United States Patent Application Publication US 2022/0213167 A1 - sequence listing, part 35

SEQ ID NO: 743202 - protein, 17 aa, Homo sapiens
  CDR3 for beta chain variable domain of TCR clone 371601 (TRBV11-2, TRBJ2-1)
CAGSLYPPGVEYNEQFF

SEQ ID NO: 743203 - protein, 11 aa, Homo sapiens
  CDR3 for alpha chain variable domain of TCR clone 371602 (TRAV12-1, TRAJ43)
CVEYDNNDMRF

SEQ ID NO: 743204 - protein, 17 aa, Homo sapiens
  CDR3 for beta chain variable domain of TCR clone 371602 (TRBV20-1, TRBJ2-1)
CSARGPLAGVWDNEQFF

SEQ ID NO: 743205 - protein, 15 aa, Homo sapiens
  CDR3 for alpha chain variable domain of TCR clone 371603 (TRAV12-3, TRAJ49)
CAMAVTPNTGNQFYF

SEQ ID NO: 743206 - protein, 12 aa, Homo sapiens
  CDR3 for beta chain variable domain of TCR clone 371603 (TRBV12-4, TRBJ1-2)
CASSFIWLHLRF

SEQ ID NO: 743207 - protein, 14 aa, Homo sapiens
  CDR3 for alpha chain variable domain of TCR clone 371604 (TRAV3, TRAJ21)
CAVESQANFKNFYF

SEQ ID NO: 743208 - protein, 18 aa, Homo sapiens
  CDR3 for beta chain variable domain of TCR clone 371604 (TRBV7-9, TRBJ2-1)
CASSLAVSGTSGRNEQFF

SEQ ID NO: 743209 - protein, 14 aa, Homo sapiens
  CDR3 for alpha chain variable domain of TCR clone 371605 (TRAV1-2, TRAJ8)
CAVREDTGFQKLVF

SEQ ID NO: 743210 - protein, 14 aa, Homo sapiens
  CDR3 for beta chain variable domain of TCR clone 371605 (TRBV25-1, TRBJ1-1)
CASTHLGGNTETFF

SEQ ID NO: 743211 - protein, 13 aa, Homo sapiens
  CDR3 for alpha chain variable domain of TCR clone 371606 (TRAV12-2, TRAJ10)
FAVPTGGGNKLTF

SEQ ID NO: 743212 - protein, 14 aa, Homo sapiens
  CDR3 for beta chain variable domain of TCR clone 371606 (TRBV6-1, TRBJ1-3)
CASVQGGGGNTIYF

SEQ ID NO: 743213 - protein, 13 aa, Homo sapiens
  CDR3 for alpha chain variable domain of TCR clone 371607 (TRAV20, TRAJ31)
CAVQAIGGSRLMF

SEQ ID NO: 743214 - protein, 14 aa, Homo sapiens
  CDR3 for beta chain variable domain of TCR clone 371607 (TRBV2, TRBJ1-5)
CASSGTVSNQPQHF

SEQ ID NO: 743215 - protein, 14 aa, Homo sapiens
  CDR3 for alpha chain variable domain of TCR clone 371608 (TRAV12-1, TRAJ17)
CVVNYKAAGNKLTF

SEQ ID NO: 743216 - protein, 17 aa, Homo sapiens
  CDR3 for beta chain variable domain of TCR clone 371608 (TRBV11-2, TRBJ2-1)
CASSLYPPGVGYNEQFF

SEQ ID NO: 743217 - protein, 12 aa, Homo sapiens
  CDR3 for alpha chain variable domain of TCR clone 371609 (TRAV8-3, TRAJ26)
CAGDNYGQNFVF

SEQ ID NO: 743218 - protein, 11 aa, Homo sapiens
  CDR3 for beta chain variable domain of TCR clone 371609 (TRBV19, TRBJ1-1)
CASSIGSEAFF

SEQ ID NO: 743219 - protein, 13 aa, Homo sapiens
  CDR3 for alpha chain variable domain of TCR clone 371610 (TRAV2, TRAJ29)
CAVRNSGNTPLVF

SEQ ID NO: 743220 - protein, 16 aa, Homo sapiens
  CDR3 for beta chain variable domain of TCR clone 371610 (TRBV5-4, TRBJ2-3)
CASQQPGAGGADTQYF

SEQ ID NO: 743221 - protein, 16 aa, Homo sapiens
  CDR3 for alpha chain variable domain of TCR clone 371611 (TRAV21, TRAJ37)
CAVCTAGSSNTGEIIF

SEQ ID NO: 743222 - protein, 13 aa, Homo sapiens
  CDR3 for beta chain variable domain of TCR clone 371611 (TRBV7-9, TRBJ2-5)
CASLPSGRETQYF

SEQ ID NO: 743223 - protein, 12 aa, Homo sapiens
  CDR3 for alpha chain variable domain of TCR clone 371612 (TRAV21, TRAJ20)
CAVRRNDYKLSF

SEQ ID NO: 743224 - protein, 12 aa, Homo sapiens
  CDR3 for beta chain variable domain of TCR clone 371612 (TRBV11-2, TRBJ2-2)
CASSLPTGELFF

SEQ ID NO: 743225 - protein, 10 aa, Homo sapiens
  CDR3 for alpha chain variable domain of TCR clone 371613 (TRAV26-1, TRAJ40)
CIAGTYKYIF

SEQ ID NO: 743226 - protein, 14 aa, Homo sapiens
  CDR3 for beta chain variable domain of TCR clone 371613 (TRBV11-3, TRBJ2-2)
CARSRDTSTGELFF

SEQ ID NO: 743227 - protein, 13 aa, Homo sapiens
  CDR3 for alpha chain variable domain of TCR clone 371614 (TRAV21, TRAJ20)
CAVGLRVDYKLSF

SEQ ID NO: 743228 - protein, 12 aa, Homo sapiens
  CDR3 for beta chain variable domain of TCR clone 371614 (TRBV7-9, TRBJ2-7)
CASSIKREEHYF

SEQ ID NO: 743229 - protein, 12 aa, Homo sapiens
  CDR3 for alpha chain variable domain of TCR clone 371615 (TRAV21, TRAJ11)
CAATSGYSTLTF

SEQ ID NO: 743230 - protein, 14 aa, Homo sapiens
  CDR3 for beta chain variable domain of TCR clone 371615 (TRBV20-1, TRBJ2-7)
GSAPGLAGVGEQYF

SEQ ID NO: 743231 - protein, 11 aa, Homo sapiens
  CDR3 for alpha chain variable domain of TCR clone 371616 (TRAV1-2, TRAJ11)
CAVRGYSTLTF

SEQ ID NO: 743232 - protein, 18 aa, Homo sapiens
  CDR3 for beta chain variable domain of TCR clone 371616 (TRBV20-1, TRBJ2-6)
CSAETAPTHGSGANVLTF

SEQ ID NO: 743233 - protein, 23 aa, Homo sapiens
  CDR3 for alpha chain variable domain of TCR clone 371617 (TRAV8-1, TRAJ5)
CAVKTEQPGRRAGENLLLGVEQD

SEQ ID NO: 743234 - protein, 15 aa, Homo sapiens
  CDR3 for beta chain variable domain of TCR clone 371617 (TRBV7-3, TRBJ2-1)
CASSLAGAGADEQFF

SEQ ID NO: 743235 - protein, 15 aa, Homo sapiens
  CDR3 for alpha chain variable domain of TCR clone 371618 (TRAV27, TRAJ48)
CAGSISNFGNEKLTF

SEQ ID NO: 743236 - protein, 14 aa, Homo sapiens
  CDR3 for beta chain variable domain of TCR clone 371618 (TRBV11-2, TRBJ1-2)
CASNVRDRGYGYTF

SEQ ID NO: 743237 - protein, 15 aa, Homo sapiens
  CDR3 for alpha chain variable domain of TCR clone 371619 (TRAV34, TRAJ38)
CGADFTPGNSRKLIW

SEQ ID NO: 743238 - protein, 14 aa, Homo sapiens
  CDR3 for beta chain variable domain of TCR clone 371619 (TRBV12-5, TRBJ2-5)
CASGSRTHQETQYF

SEQ ID NO: 743239 - protein, 12 aa, Homo sapiens
  CDR3 for alpha chain variable domain of TCR clone 371620 (TRAV12-3, TRAJ17)
CAMTLTGNSLTF

SEQ ID NO: 743240 - protein, 15 aa, Homo sapiens
  CDR3 for beta chain variable domain of TCR clone 371620 (TRBV20-1, TRBJ2-7)
CSARDRVSGMDERYF

SEQ ID NO: 743241 - protein, 16 aa, Homo sapiens
  CDR3 for alpha chain variable domain of TCR clone 371621 (TRAV30, TRAJ24)
CGTEIVDAHSWGKFQF

SEQ ID NO: 743242 - protein, 14 aa, Homo sapiens
  CDR3 for beta chain variable domain of TCR clone 371621 (TRBV12-5, TRBJ2-5)
CASGSRRHQETQYF

SEQ ID NO: 743243 - protein, 11 aa, Homo sapiens
  CDR3 for alpha chain variable domain of TCR clone 371622 (TRAV26-2, TRAJ8)
CILTGFQKPVF

SEQ ID NO: 743244 - protein, 12 aa, Homo sapiens
  CDR3 for beta chain variable domain of TCR clone 371622 (TRBV12-4, TRBJ2-7)
CASSLGGYEQYF

SEQ ID NO: 743245 - protein, 11 aa, Homo sapiens
  CDR3 for alpha chain variable domain of TCR clone 371623 (TRAV2, TRAJ13)
CASGGYQKVTF

SEQ ID NO: 743246 - protein, 13 aa, Homo sapiens
  CDR3 for beta chain variable domain of TCR clone 371623 (TRBV24-1, TRBJ2-3)
CATSTGGTDTEYF

SEQ ID NO: 743247 - protein, 14 aa, Homo sapiens
  CDR3 for alpha chain variable domain of TCR clone 371624 (TRAV16, TRAJ42)
CALSGMGSQGNLIF

SEQ ID NO: 743248 - protein, 12 aa, Homo sapiens
  CDR3 for beta chain variable domain of TCR clone 371624 (TRBV20-1, TRBJ1-1)
QCSTWGGTEAFF

SEQ ID NO: 743249 - protein, 11 aa, Homo sapiens
  CDR3 for alpha chain variable domain of TCR clone 371625 (TRAV27, TRAJ20)
CVGADDYKLSF

SEQ ID NO: 743250 - protein, 14 aa, Homo sapiens
  CDR3 for beta chain variable domain of TCR clone 371625 (TRBV4-1, TRBJ2-2)
CASSQAVNTGELFF

SEQ ID NO: 743251 - protein, 12 aa, Homo sapiens
  CDR3 for alpha chain variable domain of TCR clone 371626 (TRAV8-2, TRAJ45)
CVQGGGTDGLTF

SEQ ID NO: 743252 - protein, 14 aa, Homo sapiens
  CDR3 for beta chain variable domain of TCR clone 371626 (TRBV4-3, TRBJ1-1)
CASSQGWTPARAFF

SEQ ID NO: 743253 - protein, 12 aa, Homo sapiens
  CDR3 for alpha chain variable domain of TCR clone 371627 (TRAV1-2, TRAJ29)
CAVPSGNTPLVV

SEQ ID NO: 743254 - protein, 14 aa, Homo sapiens
  CDR3 for beta chain variable domain of TCR clone 371627 (TRBV6-1, TRBJ1-3)
CASVQGGGGNTIYF

SEQ ID NO: 743255 - protein, 14 aa, Homo sapiens
  CDR3 for alpha chain variable domain of TCR clone 371628 (TRAV12-2, TRAJ17)
FAVLFKAAGNKLTF

SEQ ID NO: 743256 - protein, 14 aa, Homo sapiens
  CDR3 for beta chain variable domain of TCR clone 371628 (TRBV29-1, TRBJ2-1)
CSVGAVAGGNEQFF

SEQ ID NO: 743257 - protein, 10 aa, Homo sapiens
  CDR3 for alpha chain variable domain of TCR clone 371629 (TRAV12-2, TRAJ48)
CAVTSEKLTF

SEQ ID NO: 743258 - protein, 13 aa, Homo sapiens
  CDR3 for beta chain variable domain of TCR clone 371629 (TRBV7-6, TRBJ1-2)
CASSLVADYGYTF

SEQ ID NO: 743259 - protein, 13 aa, Homo sapiens
  CDR3 for alpha chain variable domain of TCR clone 371630 (TRAV12-1, TRAJ33)
CGDAPDSNYQLIW

SEQ ID NO: 743260 - protein, 14 aa, Homo sapiens
  CDR3 for beta chain variable domain of TCR clone 371630 (TRBV7-2, TRBJ2-7)
CASSPKTSFYGQYF

SEQ ID NO: 743261 - protein, 13 aa, Homo sapiens
  CDR3 for alpha chain variable domain of TCR clone 371631 (TRAV35, TRAJ21)
CAGQLSNFNKFYF

SEQ ID NO: 743262 - protein, 16 aa, Homo sapiens
  CDR3 for beta chain variable domain of TCR clone 371631 (TRBV4-3, TRBJ2-2)
CASSLLQGSGTGELFF

SEQ ID NO: 743263 - protein, 16 aa, Homo sapiens
  CDR3 for alpha chain variable domain of TCR clone 371632 (TRAV30, TRAJ24)
CGTEIVDAGSWGQFQF

SEQ ID NO: 743264 - protein, 16 aa, Homo sapiens
  CDR3 for beta chain variable domain of TCR clone 371632 (TRBV6-1, TRBJ2-1)
CASILRQGSSYNEQFF

SEQ ID NO: 743265 - protein, 12 aa, Homo sapiens
  CDR3 for alpha chain variable domain of TCR clone 371633 (TRAV12-3, TRAJ17)
CAMTLTGNKLTF

SEQ ID NO: 743266 - protein, 13 aa, Homo sapiens
  CDR3 for beta chain variable domain of TCR clone 371633 (TRBV7-3, TRBJ2-7)
CASSKRRGGEQYF

SEQ ID NO: 743267 - protein, 18 aa, Homo sapiens
  CDR3 for alpha chain variable domain of TCR clone 371634 (TRAV26-2, TRAJ32)
CILRAPLNYGGATNKLIL

SEQ ID NO: 743268 - protein, 13 aa, Homo sapiens
  CDR3 for beta chain variable domain of TCR clone 371634 (TRBV7-3, TRBJ2-1)
CASSLWPYNEQFF

SEQ ID NO: 743269 - protein, 16 aa, Homo sapiens
  CDR3 for alpha chain variable domain of TCR clone 371635 (TRAV35, TRAJ28)
CAGQRYSGAGSYQLTF

SEQ ID NO: 743270 - protein, 15 aa, Homo sapiens
  CDR3 for beta chain variable domain of TCR clone 371635 (TRBV5-1, TRBJ2-3)
CASSVTSGATDTQYF

SEQ ID NO: 743271 - protein, 15 aa, Homo sapiens
  CDR3 for alpha chain variable domain of TCR clone 371636 (TRAV35, TRAJ58)
CAGRRQETSGSRLTF

SEQ ID NO: 743272 - protein, 15 aa, Homo sapiens
  CDR3 for beta chain variable domain of TCR clone 371636 (TRBV12-4, TRBJ2-2)
CASSPQPGSTGELFF

SEQ ID NO: 743273 - protein, 17 aa, Homo sapiens
  CDR3 for alpha chain variable domain of TCR clone 371637 (TRAV13-1, TRAJ28)
CAASPPYSGAGSYQLPF

SEQ ID NO: 743274 - protein, 13 aa, Homo sapiens
  CDR3 for beta chain variable domain of TCR clone 371637 (TRBV12-5, TRBJ2-3)
CASGDRQSDTQYF

SEQ ID NO: 743275 - protein, 13 aa, Homo sapiens
  CDR3 for alpha chain variable domain of TCR clone 371638 (TRAV27, TRAJ13)
CAGEPGGYQKVTF

SEQ ID NO: 743276 - protein, 15 aa, Homo sapiens
  CDR3 for beta chain variable domain of TCR clone 371638 (TRBV11-3, TRBJ2-3)
CASSAGTVVTNTQYF

SEQ ID NO: 743277 - protein, 15 aa, Homo sapiens
  CDR3 for alpha chain variable domain of TCR clone 371639 (TRAV17, TRAJ35)
CATAFVIGFGNVLHC

SEQ ID NO: 743278 - protein, 15 aa, Homo sapiens
  CDR3 for beta chain variable domain of TCR clone 371639 (TRBV7-9, TRBJ2-7)
CASSLSLAEAYEQYF

SEQ ID NO: 743279 - protein, 12 aa, Homo sapiens
  CDR3 for alpha chain variable domain of TCR clone 371640 (TRAV13-2, TRAJ23)
CAERHRGGKLIF

SEQ ID NO: 743280 - protein, 15 aa, Homo sapiens
  CDR3 for beta chain variable domain of TCR clone 371640 (TRBV19, TRBJ1-2)
CSSSVGQVLNYGYSF

SEQ ID NO: 743281 - protein, 14 aa, Homo sapiens
  CDR3 for alpha chain variable domain of TCR clone 371641 (TRAV9-2, TRAJ39)
CALYIYNAGNMLTF

SEQ ID NO: 743282 - protein, 15 aa, Homo sapiens
  CDR3 for beta chain variable domain of TCR clone 371641 (TRBV7-2, TRBJ2-1)
CASSSGLAGGNERFF

SEQ ID NO: 743283 - protein, 17 aa, Homo sapiens
  CDR3 for alpha chain variable domain of TCR clone 371642 (TRAV12-2, TRAJ36)
CAVKDNLFFGTGTRLTV

SEQ ID NO: 743284 - protein, 12 aa, Homo sapiens
  CDR3 for beta chain variable domain of TCR clone 371642 (TRBV12-4, TRBJ2-1)
CASSSSYNEQFF

SEQ ID NO: 743285 - protein, 14 aa, Homo sapiens
  CDR3 for alpha chain variable domain of TCR clone 371643 (TRAV9-2, TRAJ39)
WALYIYNAGNMLTF

SEQ ID NO: 743286 - protein, 15 aa, Homo sapiens
  CDR3 for beta chain variable domain of TCR clone 371643 (TRBV27, TRBJ2-5)
CASSLYPRGGETQYF

SEQ ID NO: 743287 - protein, 18 aa, Homo sapiens
  CDR3 for alpha chain variable domain of TCR clone 371644 (TRAV1-2, TRAJ18)
CAVRDMGVRGSTLGRLYF

SEQ ID NO: 743288 - protein, 16 aa, Homo sapiens
  CDR3 for beta chain variable domain of TCR clone 371644 (TRBV29-1, TRBJ1-2)
CSVEANRDIANYGYTF

SEQ ID NO: 743289 - protein, 14 aa, Homo sapiens
  CDR3 for alpha chain variable domain of TCR clone 371645 (TRAV12-2, TRAJ13)
CAVNPSGGYKKVTF

SEQ ID NO: 743290 - protein, 13 aa, Homo sapiens
  CDR3 for beta chain variable domain of TCR clone 371645 (TRBV20-1, TRBJ1-6)
CSAKRGGASPLHF

SEQ ID NO: 743291 - protein, 15 aa, Homo sapiens
  CDR3 for alpha chain variable domain of TCR clone 371646 (TRAV20, TRAJ43)
CAVQAGKSSNNDMSF

SEQ ID NO: 743292 - protein, 14 aa, Homo sapiens
  CDR3 for beta chain variable domain of TCR clone 371646 (TRBV27, TRBJ2-1)
CASRHLGGGKEQFF

SEQ ID NO: 743293 - protein, 11 aa, Homo sapiens
  CDR3 for alpha chain variable domain of TCR clone 371647 (TRAV12-3, TRAJ27)
CAMANAGKSTF

SEQ ID NO: 743294 - protein, 14 aa, Homo sapiens
  CDR3 for beta chain variable domain of TCR clone 371647 (TRBV4-1, TRBJ2-2)
CASIQAVNTGELFF

SEQ ID NO: 743295 - protein, 12 aa, Homo sapiens
  CDR3 for alpha chain variable domain of TCR clone 371648 (TRAV12-3, TRAJ5)
CAMDTGRRALTF

SEQ ID NO: 743296 - protein, 15 aa, Homo sapiens
  CDR3 for beta chain variable domain of TCR clone 371648 (TRBV7-3, TRBJ2-1)
CASSLAGAGADEQFF

SEQ ID NO: 743297 - protein, 12 aa, Homo sapiens
  CDR3 for alpha chain variable domain of TCR clone 371649 (TRAV3, TRAJ20)
CAVRDPDYKLSF

SEQ ID NO: 743298 - protein, 15 aa, Homo sapiens
  CDR3 for beta chain variable domain of TCR clone 371649 (TRBV27, TRBJ2-2)
CASSLEGPNTGELFF

SEQ ID NO: 743299 - protein, 14 aa, Homo sapiens
  CDR3 for alpha chain variable domain of TCR clone 371650 (TRAV1-2, TRAJ16)
CAVNRFSDGQKLLL

SEQ ID NO: 743300 - protein, 15 aa, Homo sapiens
  CDR3 for beta chain variable domain of TCR clone 371650 (TRBV7-9, TRBJ1-6)
CASSSPGRGNSPLHL

SEQ ID NO: 743301 - protein, 17 aa, Homo sapiens
  CDR3 for alpha chain variable domain of TCR clone 371651 (TRAV3, TRAJ6)
CAVRDGPRAGGSYIPTF

SEQ ID NO: 743302 - protein, 13 aa, Homo sapiens
  CDR3 for beta chain variable domain of TCR clone 371651 (TRBV19, TRBJ2-7)
CASSIDRTYEQFF

SEQ ID NO: 743303 - protein, 10 aa, Homo sapiens
  CDR3 for alpha chain variable domain of TCR clone 371652 (TRAV16, TRAJ22)
SAMYLRQLTF

SEQ ID NO: 743304 - protein, 15 aa, Homo sapiens
  CDR3 for beta chain variable domain of TCR clone 371652 (TRBV27, TRBJ2-7)
CASSPIVTGAYEQYF

SEQ ID NO: 743305 - protein, 14 aa, Homo sapiens
  CDR3 for alpha chain variable domain of TCR clone 371653 (TRAV17, TRAJ22)
CATSPSGSARQLTF

SEQ ID NO: 743306 - protein, 15 aa, Homo sapiens
  CDR3 for beta chain variable domain of TCR clone 371653 (TRBV4-1, TRBJ2-5)
CASSQWDLEQETQYF

SEQ ID NO: 743307 - protein, 11 aa, Homo sapiens
  CDR3 for alpha chain variable domain of TCR clone 371654 (TRAV12-3, TRAJ43)
CAMSVSNDMRF

SEQ ID NO: 743308 - protein, 14 aa, Homo sapiens
  CDR3 for beta chain variable domain of TCR clone 371654 (TRBV13, TRBJ2-7)
CASSLKGASYEQYF

SEQ ID NO: 743309 - protein, 14 aa, Homo sapiens
  CDR3 for alpha chain variable domain of TCR clone 371655 (TRAV12-3, TRAJ15)
CAMIPPQAGTSLVF

SEQ ID NO: 743310 - protein, 12 aa, Homo sapiens
  CDR3 for beta chain variable domain of TCR clone 371655 (TRBV11-2, TRBJ2-2)
CASSLGGGELFF

SEQ ID NO: 743311 - protein, 16 aa, Homo sapiens
  CDR3 for alpha chain variable domain of TCR clone 371656 (TRAV12-3, TRAJ53)
CAMSPGSGGSNSKLTF

SEQ ID NO: 743312 - protein, 15 aa, Homo sapiens
  CDR3 for beta chain variable domain of TCR clone 371656 (TRBV18, TRBJ2-7)
CASSPSSTGNYEQYF

SEQ ID NO: 743313 - protein, 12 aa, Homo sapiens
  CDR3 for alpha chain variable domain of TCR clone 371657 (TRAV12-2, TRAJ9)
CAGNTGGFKTIF

SEQ ID NO: 743314 - protein, 13 aa, Homo sapiens
  CDR3 for beta chain variable domain of TCR clone 371657 (TRBV10-3, TRBJ2-7)
CASKLAVNYEQYF

SEQ ID NO: 743315 - protein, 18 aa, Homo sapiens
  CDR3 for alpha chain variable domain of TCR clone 371658 (TRAV17, TRAJ45)
CATSLDLYSGGGADVLTF

SEQ ID NO: 743316 - protein, 13 aa, Homo sapiens
  CDR3 for beta chain variable domain of TCR clone 371658 (TRBV10-3, TRBJ2-7)
CASKLAVNYEQYF

SEQ ID NO: 743317 - protein, 13 aa, Homo sapiens
  CDR3 for alpha chain variable domain of TCR clone 371659 (TRAV1-2, TRAJ24)
CAVRADSWGKFQF

SEQ ID NO: 743318 - protein, 13 aa, Homo sapiens
  CDR3 for beta chain variable domain of TCR clone 371659 (TRBV7-9, TRBJ1-2)
CASSLKQNYGYTF

SEQ ID NO: 743319 - protein, 12 aa, Homo sapiens
  CDR3 for alpha chain variable domain of TCR clone 371660 (TRAV10, TRAJ43)
CVVVRVGNDMRF

SEQ ID NO: 743320 - protein, 15 aa, Homo sapiens
  CDR3 for beta chain variable domain of TCR clone 371660 (TRBV2, TRBJ2-7)
CASSEGLAGYYEQYF

SEQ ID NO: 743321 - protein, 13 aa, Homo sapiens
  CDR3 for alpha chain variable domain of TCR clone 371661 (TRAV13-1, TRAJ6)
CASSKGGSYIPTF

SEQ ID NO: 743322 - protein, 15 aa, Homo sapiens
  CDR3 for beta chain variable domain of TCR clone 371661 (TRBV12-4, TRBJ1-1)
CASSGRTGMNTEAFF

SEQ ID NO: 743323 - protein, 14 aa, Homo sapiens
  CDR3 for alpha chain variable domain of TCR clone 371662 (TRAV27, TRAJ52)
CAGGYGMIGWWYSI

SEQ ID NO: 743324 - protein, 12 aa, Homo sapiens
  CDR3 for beta chain variable domain of TCR clone 371662 (TRBV12-4, TRBJ2-7)
CASSLGGYEQYF

SEQ ID NO: 743325 - protein, 15 aa, Homo sapiens
  CDR3 for alpha chain variable domain of TCR clone 371663 (TRAV17, TRAJ4)
CATGTWSGGYNKLIF

SEQ ID NO: 743326 - protein, 14 aa, Homo sapiens
  CDR3 for beta chain variable domain of TCR clone 371663 (TRBV4-2, TRBJ2-1)
CASGLDRAYNEQFF

SEQ ID NO: 743327 - protein, 17 aa, Homo sapiens
  CDR3 for alpha chain variable domain of TCR clone 371664 (TRAV8-6, TRAJ8)
CAVKEGIENTGFQKLVF

SEQ ID NO: 743328 - protein, 14 aa, Homo sapiens
  CDR3 for beta chain variable domain of TCR clone 371664 (TRBV19, TRBJ2-1)
CASSMGSGRRSSSS

SEQ ID NO: 743329 - protein, 13 aa, Homo sapiens
  CDR3 for alpha chain variable domain of TCR clone 371665 (TRAV12-3, TRAJ9)
CAMRNTGGFKTIF

SEQ ID NO: 743330 - protein, 14 aa, Homo sapiens
  CDR3 for beta chain variable domain of TCR clone 371665 (TRBV11-2, TRBJ2-7)
CPSSSTGEGYEQYF

SEQ ID NO: 743331 - protein, 13 aa, Homo sapiens
  CDR3 for alpha chain variable domain of TCR clone 371666 (TRAV20, TRAJ21)
CAVEGYNFNKFYF

SEQ ID NO: 743332 - protein, 19 aa, Homo sapiens
  CDR3 for beta chain variable domain of TCR clone 371666 (TRBV28, TRBJ2-1)
CASSFSIRGSGRTRYEQFF

SEQ ID NO: 743333 - protein, 12 aa, Homo sapiens
  CDR3 for alpha chain variable domain of TCR clone 371667 (TRAV2, TRAJ33)
CAVPDSNYQLIW

SEQ ID NO: 743334 - protein, 16 aa, Homo sapiens
  CDR3 for beta chain variable domain of TCR clone 371667 (TRBV25-1, TRBJ2-7)
CASSELTGGVIYEQYF

SEQ ID NO: 743335 - protein, 13 aa, Homo sapiens
  CDR3 for alpha chain variable domain of TCR clone 371668 (TRAV21, TRAJ20)
CAVGLRVDYKLSF

SEQ ID NO: 743336 - protein, 13 aa, Homo sapiens
  CDR3 for beta chain variable domain of TCR clone 371668 (TRBV6-1, TRBJ1-1)
CASTRQGNTEAFF

SEQ ID NO: 743337 - protein, 16 aa, Homo sapiens
  CDR3 for alpha chain variable domain of TCR clone 371669 (TRAV12-2, TRAJ18)
CAVTTDRGSTLGRIYV

SEQ ID NO: 743338 - protein, 15 aa, Homo sapiens
  CDR3 for beta chain variable domain of TCR clone 371669 (TRBV5-1, TRBJ2-3)
CASSVTSGSTDTQYF

SEQ ID NO: 743339 - protein, 11 aa, Homo sapiens
  CDR3 for alpha chain variable domain of TCR clone 371670 (TRAV12-3, TRAJ27)
CAMANAGKSTF

SEQ ID NO: 743340 - protein, 14 aa, Homo sapiens
  CDR3 for beta chain variable domain of TCR clone 371670 (TRBV6-1, TRBJ1-3)
CASVQGGGGNTIYF

SEQ ID NO: 743341 - protein, 13 aa, Homo sapiens
  CDR3 for alpha chain variable domain of TCR clone 371671 (TRAV23/DV6, TRAJ15)
CAALPAGRNCSDL

SEQ ID NO: 743342 - protein, 14 aa, Homo sapiens
  CDR3 for beta chain variable domain of TCR clone 371671 (TRBV7-9, TRBJ1-2)
CASSRQGPNYGYTF

SEQ ID NO: 743343 - protein, 13 aa, Homo sapiens
  CDR3 for alpha chain variable domain of TCR clone 371672 (TRAV13-1, TRAJ43)
FAASLSNNNDMRF

SEQ ID NO: 743344 - protein, 14 aa, Homo sapiens
  CDR3 for beta chain variable domain of TCR clone 371672 (TRBV5-1, TRBJ2-5)
CASSLAGKQETQYF

SEQ ID NO: 743345 - protein, 17 aa, Homo sapiens
  CDR3 for alpha chain variable domain of TCR clone 371673 (TRAV8-6, TRAJ58)
CAVSSWGGETSGSRLTF

SEQ ID NO: 743346 - protein, 15 aa, Homo sapiens
  CDR3 for beta chain variable domain of TCR clone 371673 (TRBV20-1, TRBJ2-7)
CSARDRVSGMDEQYF

SEQ ID NO: 743347 - protein, 17 aa, Homo sapiens
  CDR3 for alpha chain variable domain of TCR clone 371674 (TRAV19, TRAJ28)
CALSEASSGAGSYQLTF

SEQ ID NO: 743348 - protein, 13 aa, Homo sapiens
  CDR3 for beta chain variable domain of TCR clone 371674 (TRBV19, TRBJ1-1)
CASSFGRNTEAFF

SEQ ID NO: 743349 - protein, 16 aa, Homo sapiens
  CDR3 for alpha chain variable domain of TCR clone 371675 (TRAV9-2, TRAJ42)
CALNLDYGGSQGNLIF

SEQ ID NO: 743350 - protein, 15 aa, Homo sapiens
  CDR3 for beta chain variable domain of TCR clone 371675 (TRBV20-1, TRBJ2-7)
CSARDRVSGMDEQYF

SEQ ID NO: 743351 - protein, 13 aa, Homo sapiens
  CDR3 for alpha chain variable domain of TCR clone 371676 (TRAV8-4, TRAJ9)
CAVSEPGGFKTIF

SEQ ID NO: 743352 - protein, 14 aa, Homo sapiens
  CDR3 for beta chain variable domain of TCR clone 371676 (TRBV18, TRBJ2-3)
CASSGLADTDTQYF

SEQ ID NO: 743353 - protein, 21 aa, Homo sapiens
  CDR3 for alpha chain variable domain of TCR clone 371677 (TRAV30, TRAJ43)
GLPAHLLRNLLPIIELNDMRF

SEQ ID NO: 743354 - protein, 14 aa, Homo sapiens
  CDR3 for beta chain variable domain of TCR clone 371677 (TRBV27, TRBJ2-1)
CASRHLGGGKEQFF

SEQ ID NO: 743355 - protein, 13 aa, Homo sapiens
  CDR3 for alpha chain variable domain of TCR clone 371678 (TRAV17, TRAJ9)
CATDYTGGFKTIF

SEQ ID NO: 743356 - protein, 14 aa, Homo sapiens
  CDR3 for beta chain variable domain of TCR clone 371678 (TRBV19, TRBJ2-5)
SASSMTGQQETQYF

SEQ ID NO: 743357 - protein, 12 aa, Homo sapiens
  CDR3 for alpha chain variable domain of TCR clone 371679 (TRAV13-2, TRAJ23)
GAERHRGGKLIF

SEQ ID NO: 743358 - protein, 16 aa, Homo sapiens
  CDR3 for beta chain variable domain of TCR clone 371679 (TRBV20-1, TRBJ1-4)
CSAPGQGLLTNEKLFF

SEQ ID NO: 743359 - protein, 10 aa, Homo sapiens
  CDR3 for alpha chain variable domain of TCR clone 371680 (TRAV36/DV7, TRAJ48)
CAVGNEKLTF

SEQ ID NO: 743360 - protein, 13 aa, Homo sapiens
  CDR3 for beta chain variable domain of TCR clone 371680 (TRBV5-5, TRBJ1-2)
CASSFWRGEDYTF

SEQ ID NO: 743361 - protein, 14 aa, Homo sapiens
  CDR3 for alpha chain variable domain of TCR clone 371681 (TRAV35, TRAJ33)
CAGSSQDSNYQLIW

SEQ ID NO: 743362 - protein, 18 aa, Homo sapiens
  CDR3 for beta chain variable domain of TCR clone 371681 (TRBV20-1, TRBJ2-6)
CSAETTPTHGSGANDLTF

SEQ ID NO: 743363 - protein, 16 aa, Homo sapiens
  CDR3 for alpha chain variable domain of TCR clone 371682 (TRAV3, TRAJ10)
CAVRDMRAGGGNKLTF

SEQ ID NO: 743364 - protein, 13 aa, Homo sapiens
  CDR3 for beta chain variable domain of TCR clone 371682 (TRBV4-2, TRBJ1-1)
CASSQAGNTEDFF

SEQ ID NO: 743365 - protein, 13 aa, Homo sapiens
  CDR3 for alpha chain variable domain of TCR clone 371683 (TRAV26-2, TRAJ43)
CILRAVNNNDMRF

SEQ ID NO: 743366 - protein, 15 aa, Homo sapiens
  CDR3 for beta chain variable domain of TCR clone 371683 (TRBV7-2, TRBJ2-1)
CASTHGTGIYNEQIF

SEQ ID NO: 743367 - protein, 10 aa, Homo sapiens
  CDR3 for alpha chain variable domain of TCR clone 371684 (TRAV20, TRAJ22)
CAAPARQLTF

SEQ ID NO: 743368 - protein, 16 aa, Homo sapiens
  CDR3 for beta chain variable domain of TCR clone 371684 (TRBV2, TRBJ2-3)
CASSTSVEGVTDTQYF

SEQ ID NO: 743369 - protein, 17 aa, Homo sapiens
  CDR3 for alpha chain variable domain of TCR clone 371685 (TRAV9-2, TRAJ45)
CALSGYYSGGGADGLTF

SEQ ID NO: 743370 - protein, 15 aa, Homo sapiens
  CDR3 for beta chain variable domain of TCR clone 371685 (TRBV2, TRBJ2-2)
CASSRETVGTGELFF

SEQ ID NO: 743371 - protein, 14 aa, Homo sapiens
  CDR3 for alpha chain variable domain of TCR clone 371686 (TRAV13-1, TRAJ35)
CAASKGGFGNVLHC

SEQ ID NO: 743372 - protein, 13 aa, Homo sapiens
  CDR3 for beta chain variable domain of TCR clone 371686 (TRBV27, TRBJ2-3)
CASSLSQGDTQYF

SEQ ID NO: 743373 - protein, 14 aa, Homo sapiens
  CDR3 for alpha chain variable domain of TCR clone 371687 (TRAV23/DV6, TRAJ11)
CAASLESGYSTLTF

SEQ ID NO: 743374 - protein, 13 aa, Homo sapiens
  CDR3 for beta chain variable domain of TCR clone 371687 (TRBV4-1, TRBJ2-5)
CASSLTRGETQDF

SEQ ID NO: 743375 - protein, 11 aa, Homo sapiens
  CDR3 for alpha chain variable domain of TCR clone 371688 (TRAV23/DV6, TRAJ58)
CAARLLRGVTS

SEQ ID NO: 743376 - protein, 14 aa, Homo sapiens
  CDR3 for beta chain variable domain of TCR clone 371688 (TRBV7-2, TRBJ2-7)
CASRSQGAAYEQYF

SEQ ID NO: 743377 - protein, 15 aa, Homo sapiens
  CDR3 for alpha chain variable domain of TCR clone 371689 (TRAV21, TRAJ53)
CATLNSGGSDYKLTF

SEQ ID NO: 743378 - protein, 16 aa, Homo sapiens
  CDR3 for beta chain variable domain of TCR clone 371689 (TRBV9, TRBJ2-1)
CASSVGGGGNYSEQFF

SEQ ID NO: 743379 - protein, 14 aa, Homo sapiens
  CDR3 for alpha chain variable domain of TCR clone 371690 (TRAV3, TRAJ17)
CAVRDAAAGNKLTF

SEQ ID NO: 743380 - protein, 18 aa, Homo sapiens
  CDR3 for beta chain variable domain of TCR clone 371690 (TRBV24-1, TRBJ2-2)
CATSDSGQGTANTGELFF

SEQ ID NO: 743381 - protein, 12 aa, Homo sapiens
  CDR3 for alpha chain variable domain of TCR clone 371691 (TRAV12-3, TRAJ17)
CAMTLTGNQLTF

SEQ ID NO: 743382 - protein, 15 aa, Homo sapiens
  CDR3 for beta chain variable domain of TCR clone 371691 (TRBV19, TRBJ2-5)
CASHGLAGAQETQYF

SEQ ID NO: 743383 - protein, 12 aa, Homo sapiens
  CDR3 for alpha chain variable domain of TCR clone 371692 (TRAV1-1, TRAJ8)
CAGGTGFQKLVF

SEQ ID NO: 743384 - protein, 14 aa, Homo sapiens
  CDR3 for beta chain variable domain of TCR clone 371692 (TRBV12-4, TRBJ2-3)
CASTIAGWGDTQYF

SEQ ID NO: 743385 - protein, 16 aa, Homo sapiens
  CDR3 for alpha chain variable domain of TCR clone 371693 (TRAV30, TRAJ24)
CGTEIVDADSWGKFQF

SEQ ID NO: 743386 - protein, 14 aa, Homo sapiens
  CDR3 for beta chain variable domain of TCR clone 371693 (TRBV28, TRBJ2-7)
CASSLLRISYEQYF

SEQ ID NO: 743387 - protein, 13 aa, Homo sapiens
  CDR3 for alpha chain variable domain of TCR clone 371694 (TRAV3, TRAJ21)
CAVREPDFNKFYF

SEQ ID NO: 743388 - protein, 14 aa, Homo sapiens
  CDR3 for beta chain variable domain of TCR clone 371694 (TRBV4-2, TRBJ2-1)
CASGLDRAYNEQFY

SEQ ID NO: 743389 - protein, 15 aa, Homo sapiens
  CDR3 for alpha chain variable domain of TCR clone 371695 (TRAV25, TRAJ23)
CALAPNYNQGGTLIF

SEQ ID NO: 743390 - protein, 13 aa, Homo sapiens
  CDR3 for beta chain variable domain of TCR clone 371695 (TRBV11-3, TRBJ1-1)
CASSWDGNTEAFF

SEQ ID NO: 743391 - protein, 17 aa, Homo sapiens
  CDR3 for alpha chain variable domain of TCR clone 371696 (TRAV13-1, TRAJ28)
CAASPPYPGAGSYQLTF

SEQ ID NO: 743392 - protein, 14 aa, Homo sapiens
  CDR3 for beta chain variable domain of TCR clone 371696 (TRBV24-1, TRBJ1-1)
CATSIPRGDTEAFF

SEQ ID NO: 743393 - protein, 12 aa, Homo sapiens
  CDR3 for alpha chain variable domain of TCR clone 371697 (TRAV29/DV5, TRAJ49)
CAATDTGNQFYF

SEQ ID NO: 743394 - protein, 13 aa, Homo sapiens
  CDR3 for beta chain variable domain of TCR clone 371697 (TRBV7-9, TRBJ1-2)
CASSLKQNYGYTF

SEQ ID NO: 743395 - protein, 15 aa, Homo sapiens
  CDR3 for alpha chain variable domain of TCR clone 371698 (TRAV8-3, TRAJ37)
CAVGAPFSNTGKLIF

SEQ ID NO: 743396 - protein, 15 aa, Homo sapiens
  CDR3 for beta chain variable domain of TCR clone 371698 (TRBV11-2, TRBJ1-2)
CASSQMRGLNYGYTF

SEQ ID NO: 743397 - protein, 14 aa, Homo sapiens
  CDR3 for alpha chain variable domain of TCR clone 371699 (TRAV12-3, TRAJ10)
SHLPLTGEGNKLTF

SEQ ID NO: 743398 - protein, 13 aa, Homo sapiens
  CDR3 for beta chain variable domain of TCR clone 371699 (TRBV20-1, TRBJ1-5)
CSASQQVVQPQHF

SEQ ID NO: 743399 - protein, 15 aa, Homo sapiens
  CDR3 for alpha chain variable domain of TCR clone 371700 (TRAV3, TRAJ5)
CAVRDLDTGRRALTF

SEQ ID NO: 743400 - protein, 13 aa, Homo sapiens
  CDR3 for beta chain variable domain of TCR clone 371700 (TRBV4-1, TRBJ1-1)
CASSRKMNTEAFF

SEQ ID NO: 743401 - protein, 10 aa, Homo sapiens
  CDR3 for alpha chain variable domain of TCR clone 371701 (TRAV23/DV6, TRAJ57)
CAASSTLSQG

SEQ ID NO: 743402 - protein, 13 aa, Homo sapiens
  CDR3 for beta chain variable domain of TCR clone 371701 (TRBV15, TRBJ1-6)
CATSGGLNSTLHF

SEQ ID NO: 743403 - protein, 13 aa, Homo sapiens
  CDR3 for alpha chain variable domain of TCR clone 371702 (TRAV12-2, TRAJ37)
CSGGSGNTGKLIF

SEQ ID NO: 743404 - protein, 14 aa, Homo sapiens
  CDR3 for beta chain variable domain of TCR clone 371702 (TRBV6-1, TRBJ2-6)
CASQQGAGANVLTF

SEQ ID NO: 743405 - protein, 13 aa, Homo sapiens
  CDR3 for alpha chain variable domain of TCR clone 371703 (TRAV27, TRAJ45)
CRSSGGGANGLTF

SEQ ID NO: 743406 - protein, 11 aa, Homo sapiens
  CDR3 for beta chain variable domain of TCR clone 371703 (TRBV19, TRBJ1-1)
CASSIGSEAFF

SEQ ID NO: 743407 - protein, 12 aa, Homo sapiens
  CDR3 for alpha chain variable domain of TCR clone 371704 (TRAV29/DV5, TRAJ34)
CAASGNTDKLIF

SEQ ID NO: 743408 - protein, 18 aa, Homo sapiens
  CDR3 for beta chain variable domain of TCR clone 371704 (TRBV11-2, TRBJ2-3)
CASSLGGASRGAPNTQYF

SEQ ID NO: 743409 - protein, 16 aa, Homo sapiens
  CDR3 for alpha chain variable domain of TCR clone 371705 (TRAV12-3, TRAJ53)
CAMSPGSGGSNYKLTF

SEQ ID NO: 743410 - protein, 15 aa, Homo sapiens
  CDR3 for beta chain variable domain of TCR clone 371705 (TRBV7-2, TRBJ2-1)
CASSFSGGIYNEQFF

SEQ ID NO: 743411 - protein, 19 aa, Homo sapiens
  CDR3 for alpha chain variable domain of TCR clone 371706 (TRAV2, TRAJ20)
ILQVREADAAVYRDCKLSF

SEQ ID NO: 743412 - protein, 15 aa, Homo sapiens
  CDR3 for beta chain variable domain of TCR clone 371706 (TRBV19, TRBJ2-7)
CASSIAGTGGYEQYF

SEQ ID NO: 743413 - protein, 15 aa, Homo sapiens
  CDR3 for alpha chain variable domain of TCR clone 371707 (TRAV21, TRAJ53)
CATLNSGGSNYKLTF

SEQ ID NO: 743414 - protein, 16 aa, Homo sapiens
  CDR3 for beta chain variable domain of TCR clone 371707 (TRBV4-1, TRBJ2-3)
CASSQSTSGAEDTQYF

SEQ ID NO: 743415 - protein, 16 aa, Homo sapiens
  CDR3 for alpha chain variable domain of TCR clone 371708 (TRAV38-1, TRAJ56)
CASMKRQTGANSKLTF

SEQ ID NO: 743416 - protein, 16 aa, Homo sapiens
  CDR3 for beta chain variable domain of TCR clone 371708 (TRBV12-5, TRBJ2-5)
CASGPRTSGNQETQYF

SEQ ID NO: 743417 - protein, 12 aa, Homo sapiens
  CDR3 for alpha chain variable domain of TCR clone 371709 (TRAV3, TRAJ20)
CAVRDPDYKLSF

SEQ ID NO: 743418 - protein, 14 aa, Homo sapiens
  CDR3 for beta chain variable domain of TCR clone 371709 (TRBV4-1, TRBJ1-6)
CASSPGSDSSPLHF

SEQ ID NO: 743419 - protein, 18 aa, Homo sapiens
  CDR3 for alpha chain variable domain of TCR clone 371710 (TRAV21, TRAJ52)
CAVRPSPAGGTSYGKLTF

SEQ ID NO: 743420 - protein, 16 aa, Homo sapiens
  CDR3 for beta chain variable domain of TCR clone 371710 (TRBV6-5, TRBJ2-7)
CASSYFRVGISDEQYF

SEQ ID NO: 743421 - protein, 18 aa, Homo sapiens
  CDR3 for alpha chain variable domain of TCR clone 371711 (TRAV12-3, TRAJ52)
CAMSVGGAGGTSYGKLTF

SEQ ID NO: 743422 - protein, 14 aa, Homo sapiens
  CDR3 for beta chain variable domain of TCR clone 371711 (TRBV20-1, TRBJ2-3)
CSARGGTSTDTQYF

SEQ ID NO: 743423 - protein, 12 aa, Homo sapiens
  CDR3 for alpha chain variable domain of TCR clone 371712 (TRAV27, TRAJ20)
CAGLYNDYKLSF

SEQ ID NO: 743424 - protein, 15 aa, Homo sapiens
  CDR3 for beta chain variable domain of TCR clone 371712 (TRBV25-1, TRBJ1-1)
CASSEYGGPNTEAFF

SEQ ID NO: 743425 - protein, 23 aa, Homo sapiens
  CDR3 for alpha chain variable domain of TCR clone 371713 (TRAV26-1, )
CIADNACNNHIQNPDPAGYQLRD

SEQ ID NO: 743426 - protein, 13 aa, Homo sapiens
  CDR3 for beta chain variable domain of TCR clone 371713 (TRBV20-1, TRBJ1-1)
CSARGGGNTEAFF

SEQ ID NO: 743427 - protein, 16 aa, Homo sapiens
  CDR3 for alpha chain variable domain of TCR clone 371714 (TRAV30, TRAJ24)
CVTEIVGADSWGKFQF

SEQ ID NO: 743428 - protein, 18 aa, Homo sapiens
  CDR3 for beta chain variable domain of TCR clone 371714 (TRBV11-2, TRBJ2-3)
CASSLGGASRGAPNTQYF

SEQ ID NO: 743429 - protein, 12 aa, Homo sapiens
  CDR3 for alpha chain variable domain of TCR clone 371715 (TRAV13-1, TRAJ20)
CAASMGDYKLSF

SEQ ID NO: 743430 - protein, 15 aa, Homo sapiens
  CDR3 for beta chain variable domain of TCR clone 371715 (TRBV11-2, TRBJ2-2)
CASSSDRVNAGELFF

SEQ ID NO: 743431 - protein, 12 aa, Homo sapiens
  CDR3 for alpha chain variable domain of TCR clone 371716 (TRAV30, TRAJ15)
CGTNQAGTALIF

SEQ ID NO: 743432 - protein, 16 aa, Homo sapiens
  CDR3 for beta chain variable domain of TCR clone 371716 (TRBV20-1, TRBJ2-1)
CSARDLKQGMNNEQFF

SEQ ID NO: 743433 - protein, 15 aa, Homo sapiens
  CDR3 for alpha chain variable domain of TCR clone 371717 (TRAV20, TRAJ53)
CAVQASGGSNYKLTF

SEQ ID NO: 743434 - protein, 12 aa, Homo sapiens
  CDR3 for beta chain variable domain of TCR clone 371717 (TRBV7-8, TRBJ2-7)
WASSLGDREQYF

SEQ ID NO: 743435 - protein, 13 aa, Homo sapiens
  CDR3 for alpha chain variable domain of TCR clone 371718 (TRAV12-1, TRAJ31)
CVVNMNNNARLMF

SEQ ID NO: 743436 - protein, 13 aa, Homo sapiens
  CDR3 for beta chain variable domain of TCR clone 371718 (TRBV10-3, TRBJ2-7)
CASKLAVNYEQYF

SEQ ID NO: 743437 - protein, 17 aa, Homo sapiens
  CDR3 for alpha chain variable domain of TCR clone 371719 (TRAV3, TRAJ38)
CAVRDCLNAGNNRKLIW

SEQ ID NO: 743438 - protein, 12 aa, Homo sapiens
  CDR3 for beta chain variable domain of TCR clone 371719 (TRBV7-9, TRBJ2-7)
CASSIKREEQYF

SEQ ID NO: 743439 - protein, 10 aa, Homo sapiens
  CDR3 for alpha chain variable domain of TCR clone 371720 (TRAV12-3, TRAJ34)
CAMSADKLIF

SEQ ID NO: 743440 - protein, 17 aa, Homo sapiens
  CDR3 for beta chain variable domain of TCR clone 371720 (TRBV15, TRBJ1-4)
CATSRYGTGDPNEKLFF

SEQ ID NO: 743441 - protein, 15 aa, Homo sapiens
  CDR3 for alpha chain variable domain of TCR clone 371721 (TRAV12-1, TRAJ44)
CVVFVNTGTASKLTF

SEQ ID NO: 743442 - protein, 16 aa, Homo sapiens
  CDR3 for beta chain variable domain of TCR clone 371721 (TRBV20-1, TRBJ2-5)
CSPGGTSGGYMETQYS

SEQ ID NO: 743443 - protein, 15 aa, Homo sapiens
  CDR3 for alpha chain variable domain of TCR clone 371722 (TRAV2, TRAJ15)
CAVEDRGPAGTALIF

SEQ ID NO: 743444 - protein, 13 aa, Homo sapiens
  CDR3 for beta chain variable domain of TCR clone 371722 (TRBV10-2, TRBJ2-7)
CASGVSGGYEQYF

SEQ ID NO: 743445 - protein, 14 aa, Homo sapiens
  CDR3 for alpha chain variable domain of TCR clone 371723 (TRAV8-4, TRAJ34)
CAVRDPGDTDKLIF

SEQ ID NO: 743446 - protein, 14 aa, Homo sapiens
  CDR3 for beta chain variable domain of TCR clone 371723 (TRBV20-1, TRBJ2-5)
CSARDGRAGETQYF

SEQ ID NO: 743447 - protein, 17 aa, Homo sapiens
  CDR3 for alpha chain variable domain of TCR clone 371724 (TRAV12-2, TRAJ48)
CASNEKLTFGTVTRLTI

SEQ ID NO: 743448 - protein, 15 aa, Homo sapiens
  CDR3 for beta chain variable domain of TCR clone 371724 (TRBV5-1, TRBJ2-1)
YASSQAGYWWNEQFF

SEQ ID NO: 743449 - protein, 14 aa, Homo sapiens
  CDR3 for alpha chain variable domain of TCR clone 371725 (TRAV9-2, TRAJ39)
CALYIYNAGNMLTF

SEQ ID NO: 743450 - protein, 15 aa, Homo sapiens
  CDR3 for beta chain variable domain of TCR clone 371725 (TRBV2, TRBJ1-2)
CASRRDRRSNYGYTF

SEQ ID NO: 743451 - protein, 13 aa, Homo sapiens
  CDR3 for alpha chain variable domain of TCR clone 371726 (TRAV2, TRAJ40)
CALVTSGTYKYIF

SEQ ID NO: 743452 - protein, 14 aa, Homo sapiens
  CDR3 for beta chain variable domain of TCR clone 371726 (TRBV19, TRBJ2-1)
CASPNFVLSGEQFF

SEQ ID NO: 743453 - protein, 14 aa, Homo sapiens
  CDR3 for alpha chain variable domain of TCR clone 371727 (TRAV12-2, TRAJ45)
CAVHIGGGADGLTF

SEQ ID NO: 743454 - protein, 17 aa, Homo sapiens
  CDR3 for beta chain variable domain of TCR clone 371727 (TRBV7-8, TRBJ2-6)
CASSAGTGGAGANVLTF

SEQ ID NO: 743455 - protein, 14 aa, Homo sapiens
  CDR3 for alpha chain variable domain of TCR clone 371728 (TRAV29/DV5, TRAJ54)
CAASAKQGAQKLVF

SEQ ID NO: 743456 - protein, 16 aa, Homo sapiens
  CDR3 for beta chain variable domain of TCR clone 371728 (TRBV7-9, TRBJ1-2)
CASSLGFSSGEDGYTF

SEQ ID NO: 743457 - protein, 18 aa, Homo sapiens
  CDR3 for alpha chain variable domain of TCR clone 371729 (TRAV29/DV5, TRAJ52)
CAAGFRVAGGTTYGKLTF

SEQ ID NO: 743458 - protein, 16 aa, Homo sapiens
  CDR3 for beta chain variable domain of TCR clone 371729 (TRBV7-3, TRBJ2-2)
CASSLKRGTLSGELFF

SEQ ID NO: 743459 - protein, 15 aa, Homo sapiens
  CDR3 for alpha chain variable domain of TCR clone 371730 (TRAV3, TRAJ5)
CAVRDLDTGRRALTF

SEQ ID NO: 743460 - protein, 14 aa, Homo sapiens
  CDR3 for beta chain variable domain of TCR clone 371730 (TRBV25-1, TRBJ1-1)
CASTILGGNTEAFF

SEQ ID NO: 743461 - protein, 18 aa, Homo sapiens
  CDR3 for alpha chain variable domain of TCR clone 371731 (TRAV12-2, )
CAVEDIQNPDPAVYQLRD

SEQ ID NO: 743462 - protein, 13 aa, Homo sapiens
  CDR3 for beta chain variable domain of TCR clone 371731 (TRBV4-1, TRBJ2-2)
CASSQENTGELFF

SEQ ID NO: 743463 - protein, 13 aa, Homo sapiens
  CDR3 for alpha chain variable domain of TCR clone 371732 (TRAV26-2, TRAJ43)
CILRAVNNNDMRF

SEQ ID NO: 743464 - protein, 16 aa, Homo sapiens
  CDR3 for beta chain variable domain of TCR clone 371732 (TRBV5-7, TRBJ2-5)
CASTLAPAGGRETQYF

SEQ ID NO: 743465 - protein, 15 aa, Homo sapiens
  CDR3 for alpha chain variable domain of TCR clone 371733 (TRAV2, TRAJ15)
CAVEDRNQAGTALIF

SEQ ID NO: 743466 - protein, 13 aa, Homo sapiens
  CDR3 for beta chain variable domain of TCR clone 371733 (TRBV10-2, TRBJ2-1)
CASGASGDAKRFF

SEQ ID NO: 743467 - protein, 15 aa, Homo sapiens
  CDR3 for alpha chain variable domain of TCR clone 371734 (TRAV2, TRAJ11)
CAVGGRNSGYSTLTF

SEQ ID NO: 743468 - protein, 14 aa, Homo sapiens
  CDR3 for beta chain variable domain of TCR clone 371734 (TRBV20-1, TRBJ2-1)
CSAQIGGSANEQLF

SEQ ID NO: 743469 - protein, 14 aa, Homo sapiens
  CDR3 for alpha chain variable domain of TCR clone 371735 (TRAV8-1, TRAJ5)
CAVRTDTGRRALTF

SEQ ID NO: 743470 - protein, 15 aa, Homo sapiens
  CDR3 for beta chain variable domain of TCR clone 371735 (TRBV7-9, TRBJ2-7)
CASSLALAEAYEQYF

SEQ ID NO: 743471 - protein, 15 aa, Homo sapiens
  CDR3 for alpha chain variable domain of TCR clone 371736 (TRAV26-1, TRAJ44)
CIVRANTGTASKLTF

SEQ ID NO: 743472 - protein, 19 aa, Homo sapiens
  CDR3 for beta chain variable domain of TCR clone 371736 (TRBV2, TRBJ2-7)
CASSDDETSGRANDYEQYF

SEQ ID NO: 743473 - protein, 11 aa, Homo sapiens
  CDR3 for alpha chain variable domain of TCR clone 371737 (TRAV12-1, TRAJ33)
CVGDSNYQLIW

SEQ ID NO: 743474 - protein, 12 aa, Homo sapiens
  CDR3 for beta chain variable domain of TCR clone 371737 (TRBV7-8, TRBJ2-7)
CASSLGDREQYF

SEQ ID NO: 743475 - protein, 14 aa, Homo sapiens
  CDR3 for alpha chain variable domain of TCR clone 371738 (TRAV8-6, TRAJ12)
CAVKAADSSYKLIF

SEQ ID NO: 743476 - protein, 16 aa, Homo sapiens
  CDR3 for beta chain variable domain of TCR clone 371738 (TRBV12-4, TRBJ1-5)
CASSRPVGGSNQPQHF

SEQ ID NO: 743477 - protein, 18 aa, Homo sapiens
  CDR3 for alpha chain variable domain of TCR clone 371739 (TRAV13-1, TRAJ52)
CAAKNPNAGGTSYGKLTF

SEQ ID NO: 743478 - protein, 11 aa, Homo sapiens
  CDR3 for beta chain variable domain of TCR clone 371739 (TRBV12-4, TRBJ2-3)
CASSSVRGRYF

SEQ ID NO: 743479 - protein, 10 aa, Homo sapiens
  CDR3 for alpha chain variable domain of TCR clone 371740 (TRAV1-2, TRAJ18)
CAVRGEAQPW

SEQ ID NO: 743480 - protein, 19 aa, Homo sapiens
  CDR3 for beta chain variable domain of TCR clone 371740 (TRBV6-3, TRBJ1-2)
CASSYSKGRTGPPNYGYSF

SEQ ID NO: 743481 - protein, 14 aa, Homo sapiens
  CDR3 for alpha chain variable domain of TCR clone 371741 (TRAV1-2, TRAJ8)
CAVREDTGFQKLVF

SEQ ID NO: 743482 - protein, 12 aa, Homo sapiens
  CDR3 for beta chain variable domain of TCR clone 371741 (TRBV27, TRBJ2-1)
CASSLSQGKQFF

SEQ ID NO: 743483 - protein, 15 aa, Homo sapiens
  CDR3 for alpha chain variable domain of TCR clone 371742 (TRAV25, TRAJ41)
CAEPWNSNSGYALNF

SEQ ID NO: 743484 - protein, 13 aa, Homo sapiens
  CDR3 for beta chain variable domain of TCR clone 371742 (TRBV15, TRBJ1-1)
CATSRGTQARAFF

SEQ ID NO: 743485 - protein, 13 aa, Homo sapiens
  CDR3 for alpha chain variable domain of TCR clone 371743 (TRAV35, TRAJ27)
CAGQEGDAGKSTY

SEQ ID NO: 743486 - protein, 16 aa, Homo sapiens
  CDR3 for beta chain variable domain of TCR clone 371743 (TRBV7-2, TRBJ2-5)
CASSYKTGISLETQYF

SEQ ID NO: 743487 - protein, 12 aa, Homo sapiens
  CDR3 for alpha chain variable domain of TCR clone 371744 (TRAV12-2, TRAJ45)
CAVTGGADGLTF

SEQ ID NO: 743488 - protein, 16 aa, Homo sapiens
  CDR3 for beta chain variable domain of TCR clone 371744 (TRBV7-3, TRBJ2-2)
CASSLKRGTLSGELFF

SEQ ID NO: 743489 - protein, 13 aa, Homo sapiens
  CDR3 for alpha chain variable domain of TCR clone 371745 (TRAV26-1, TRAJ34)
CIVRPWITDKLIF

SEQ ID NO: 743490 - protein, 14 aa, Homo sapiens
  CDR3 for beta chain variable domain of TCR clone 371745 (TRBV12-4, TRBJ1-4)
CASSQQGANEKLFF

SEQ ID NO: 743491 - protein, 13 aa, Homo sapiens
  CDR3 for alpha chain variable domain of TCR clone 371746 (TRAV13-2, TRAJ49)
CAETLHGGNQVYF

SEQ ID NO: 743492 - protein, 14 aa, Homo sapiens
  CDR3 for beta chain variable domain of TCR clone 371746 (TRBV18, TRBJ2-7)
CASSPRGGAYEQYF

SEQ ID NO: 743493 - protein, 16 aa, Homo sapiens
  CDR3 for alpha chain variable domain of TCR clone 371747 (TRAV38-2/DV8, TRAJ45)
CAYTTTSGGGADGPTF

SEQ ID NO: 743494 - protein, 14 aa, Homo sapiens
  CDR3 for beta chain variable domain of TCR clone 371747 (TRBV7-9, TRBJ2-2)
CASSLGHRTGELFS

SEQ ID NO: 743495 - protein, 16 aa, Homo sapiens
  CDR3 for alpha chain variable domain of TCR clone 371748 (TRAV13-1, TRAJ18)
CAASRMIGLTLGRLYF

SEQ ID NO: 743496 - protein, 16 aa, Homo sapiens
  CDR3 for beta chain variable domain of TCR clone 371748 (TRBV27, TRBJ1-1)
CASSSRGRTGYTEAFF

SEQ ID NO: 743497 - protein, 15 aa, Homo sapiens
  CDR3 for alpha chain variable domain of TCR clone 371749 (TRAV3, TRAJ12)
CAVRDIRDSSYKLIF

SEQ ID NO: 743498 - protein, 15 aa, Homo sapiens
  CDR3 for beta chain variable domain of TCR clone 371749 (TRBV11-2, TRBJ2-2)
CASSSDRVNAGELFF

SEQ ID NO: 743499 - protein, 16 aa, Homo sapiens
  CDR3 for alpha chain variable domain of TCR clone 371750 (TRAV16, TRAJ54)
CALSPPLIQGAQKLVF

SEQ ID NO: 743500 - protein, 16 aa, Homo sapiens
  CDR3 for beta chain variable domain of TCR clone 371750 (TRBV29-1, TRBJ2-2)
CSVEKTSEGNTGELFF

SEQ ID NO: 743501 - protein, 13 aa, Homo sapiens
  CDR3 for alpha chain variable domain of TCR clone 371751 (TRAV23/DV6, TRAJ22)
FSPYSSSARQLTF

SEQ ID NO: 743502 - protein, 15 aa, Homo sapiens
  CDR3 for beta chain variable domain of TCR clone 371751 (TRBV11-2, TRBJ1-6)
CASSLDPWAVSPLHF

SEQ ID NO: 743503 - protein, 12 aa, Homo sapiens
  CDR3 for alpha chain variable domain of TCR clone 371752 (TRAV13-1, TRAJ21)
CAAKEGLNKFYF

SEQ ID NO: 743504 - protein, 13 aa, Homo sapiens
  CDR3 for beta chain variable domain of TCR clone 371752 (TRBV7-9, TRBJ1-2)
CASSLKQNYGYTF

SEQ ID NO: 743505 - protein, 14 aa, Homo sapiens
  CDR3 for alpha chain variable domain of TCR clone 371753 (TRAV12-2, TRAJ44)
CAVKPAGTASKLTF

SEQ ID NO: 743506 - protein, 13 aa, Homo sapiens
  CDR3 for beta chain variable domain of TCR clone 371753 (TRBV20-1, TRBJ1-6)
CSAPLGVGSPLHF

SEQ ID NO: 743507 - protein, 14 aa, Homo sapiens
  CDR3 for alpha chain variable domain of TCR clone 371754 (TRAV13-1, TRAJ44)
CAATATGTASKLNF

SEQ ID NO: 743508 - protein, 17 aa, Homo sapiens
  CDR3 for beta chain variable domain of TCR clone 371754 (TRBV7-3, TRBJ2-3)
RASSLMKRMRGADTQYF

SEQ ID NO: 743509 - protein, 14 aa, Homo sapiens
  CDR3 for alpha chain variable domain of TCR clone 371755 (TRAV3, TRAJ6)
CAVRGWGGSYIPTF

SEQ ID NO: 743510 - protein, 15 aa, Homo sapiens
  CDR3 for beta chain variable domain of TCR clone 371755 (TRBV5-1, TRBJ2-1)
CASSPPRAPYNEQFF

SEQ ID NO: 743511 - protein, 12 aa, Homo sapiens
  CDR3 for alpha chain variable domain of TCR clone 371756 (TRAV12-3, TRAJ17)
CAMTLTGNKLTF

SEQ ID NO: 743512 - protein, 16 aa, Homo sapiens
  CDR3 for beta chain variable domain of TCR clone 371756 (TRBV28, TRBJ1-4)
CASSPPYRGRSEKLFF

SEQ ID NO: 743513 - protein, 17 aa, Homo sapiens
  CDR3 for alpha chain variable domain of TCR clone 371757 (TRAV29/DV5, TRAJ52)
CAATSTADGTSYGRLTF

SEQ ID NO: 743514 - protein, 13 aa, Homo sapiens
  CDR3 for beta chain variable domain of TCR clone 371757 (TRBV20-1, TRBJ1-1)
CSARGGGNTEAFF

SEQ ID NO: 743515 - protein, 13 aa, Homo sapiens
  CDR3 for alpha chain variable domain of TCR clone 371758 (TRAV30, TRAJ34)
CGTVGDNTAKLIF

SEQ ID NO: 743516 - protein, 16 aa, Homo sapiens
  CDR3 for beta chain variable domain of TCR clone 371758 (TRBV7-9, TRBJ1-2)
CASSLGFSSGEDGYTF

SEQ ID NO: 743517 - protein, 13 aa, Homo sapiens
  CDR3 for alpha chain variable domain of TCR clone 371759 (TRAV27, TRAJ42)
CAGARGSQGNLIF

SEQ ID NO: 743518 - protein, 17 aa, Homo sapiens
  CDR3 for beta chain variable domain of TCR clone 371759 (TRBV10-3, TRBJ2-2)
CTSVPSGQTGRTPGSCF

SEQ ID NO: 743519 - protein, 15 aa, Homo sapiens
  CDR3 for alpha chain variable domain of TCR clone 371760 (TRAV13-1, TRAJ5)
CAASPRGHGQESTYF

SEQ ID NO: 743520 - protein, 18 aa, Homo sapiens
  CDR3 for beta chain variable domain of TCR clone 371760 (TRBV7-6, TRBJ2-1)
GHVSLGQQLGGGADEQFF

SEQ ID NO: 743521 - protein, 16 aa, Homo sapiens
  CDR3 for alpha chain variable domain of TCR clone 371761 (TRAV3, TRAJ37)
CAVRGKGSGNTGKLIF

SEQ ID NO: 743522 - protein, 21 aa, Homo sapiens
  CDR3 for beta chain variable domain of TCR clone 371761 (TRBV15, TRBJ2-1)
AWGTQPCTCVQPAEVDTARFF

SEQ ID NO: 743523 - protein, 14 aa, Homo sapiens
  CDR3 for alpha chain variable domain of TCR clone 371762 (TRAV16, TRAJ15)
SALSSNQAGTALIF

SEQ ID NO: 743524 - protein, 14 aa, Homo sapiens
  CDR3 for beta chain variable domain of TCR clone 371762 (TRBV19, TRBJ2-2)
CATTGHANTGELFF

SEQ ID NO: 743525 - protein, 13 aa, Homo sapiens
  CDR3 for alpha chain variable domain of TCR clone 371763 (TRAV1-2, TRAJ31)
CAVRPNNNARLMF

SEQ ID NO: 743526 - protein, 13 aa, Homo sapiens
  CDR3 for beta chain variable domain of TCR clone 371763 (TRBV2, TRBJ2-3)
CASILAGGQGQYF

SEQ ID NO: 743527 - protein, 18 aa, Homo sapiens
  CDR3 for alpha chain variable domain of TCR clone 371764 (TRAV26-2, TRAJ54)
CILRDVEVGIQGDQKLVL

SEQ ID NO: 743528 - protein, 16 aa, Homo sapiens
  CDR3 for beta chain variable domain of TCR clone 371764 (TRBV6-1, TRBJ2-5)
CASSETLDRGAETQYF

SEQ ID NO: 743529 - protein, 13 aa, Homo sapiens
  CDR3 for alpha chain variable domain of TCR clone 371765 (TRAV13-1, TRAJ39)
CSASIWAGNMITF

SEQ ID NO: 743530 - protein, 15 aa, Homo sapiens
  CDR3 for beta chain variable domain of TCR clone 371765 (TRBV7-9, TRBJ1-1)
CASSLLEQGGTEAFF

SEQ ID NO: 743531 - protein, 16 aa, Homo sapiens
  CDR3 for alpha chain variable domain of TCR clone 371766 (TRAV30, TRAJ24)
CGTEIVDADSWGKFQF

SEQ ID NO: 743532 - protein, 13 aa, Homo sapiens
  CDR3 for beta chain variable domain of TCR clone 371766 (TRBV20-1, TRBJ1-1)
CSAGTVGNTEAFF

SEQ ID NO: 743533 - protein, 10 aa, Homo sapiens
  CDR3 for alpha chain variable domain of TCR clone 371767 (TRAV12-1, TRAJ20)
CAIYFQRLQA

SEQ ID NO: 743534 - protein, 13 aa, Homo sapiens
  CDR3 for beta chain variable domain of TCR clone 371767 (TRBV7-9, TRBJ1-2)
CASSLKQNYGYTF

SEQ ID NO: 743535 - protein, 12 aa, Homo sapiens
  CDR3 for alpha chain variable domain of TCR clone 371768 (TRAV21, TRAJ23)
CAVMLQGGKLIF

SEQ ID NO: 743536 - protein, 15 aa, Homo sapiens
  CDR3 for beta chain variable domain of TCR clone 371768 (TRBV10-1, TRBJ2-3)
CASSATSGGFDTQYF

SEQ ID NO: 743537 - protein, 15 aa, Homo sapiens
  CDR3 for alpha chain variable domain of TCR clone 371769 (TRAV3, TRAJ3)
CAVRYGHSSASKIIF

SEQ ID NO: 743538 - protein, 14 aa, Homo sapiens
  CDR3 for beta chain variable domain of TCR clone 371769 (TRBV28, TRBJ1-4)
CASSFGTFDEKLFF

SEQ ID NO: 743539 - protein, 14 aa, Homo sapiens
  CDR3 for alpha chain variable domain of TCR clone 371770 (TRAV12-1, TRAJ3)
CVVGRHSSASKIIF

SEQ ID NO: 743540 - protein, 14 aa, Homo sapiens
  CDR3 for beta chain variable domain of TCR clone 371770 (TRBV7-2, TRBJ2-7)
CASSPKTSFYEQYF

SEQ ID NO: 743541 - protein, 16 aa, Homo sapiens
  CDR3 for alpha chain variable domain of TCR clone 371771 (TRAV8-3, TRAJ13)
CAVGAYPSGGYQKVTF

SEQ ID NO: 743542 - protein, 16 aa, Homo sapiens
  CDR3 for beta chain variable domain of TCR clone 371771 (TRBV6-1, TRBJ1-5)
CASSDIAGQINQPQHF

SEQ ID NO: 743543 - protein, 15 aa, Homo sapiens
  CDR3 for alpha chain variable domain of TCR clone 371772 (TRAV10, TRAJ6)
CVVRPRTGGSYIPTF

SEQ ID NO: 743544 - protein, 15 aa, Homo sapiens
  CDR3 for beta chain variable domain of TCR clone 371772 (TRBV20-1, TRBJ2-7)
CSARDRVSGMDEQYL

SEQ ID NO: 743545 - protein, 12 aa, Homo sapiens
  CDR3 for alpha chain variable domain of TCR clone 371773 (TRAV20, TRAJ20)
CAVRFNDCKLSF

SEQ ID NO: 743546 - protein, 14 aa, Homo sapiens
  CDR3 for beta chain variable domain of TCR clone 371773 (TRBV20-1, TRBJ2-1)
CSAQIGGSANEQFF

SEQ ID NO: 743547 - protein, 13 aa, Homo sapiens
  CDR3 for alpha chain variable domain of TCR clone 371774 (TRAV14/DV4, TRAJ26)
CAMREAYGQNFVF

SEQ ID NO: 743548 - protein, 19 aa, Homo sapiens
  CDR3 for beta chain variable domain of TCR clone 371774 (TRBV13, TRBJ2-6)
WASSLVHRDRGAGANVLTF

SEQ ID NO: 743549 - protein, 13 aa, Homo sapiens
  CDR3 for alpha chain variable domain of TCR clone 371775 (TRAV13-2, TRAJ15)
CAEKNQAGTALIF

SEQ ID NO: 743550 - protein, 15 aa, Homo sapiens
  CDR3 for beta chain variable domain of TCR clone 371775 (TRBV29-1, TRBJ2-5)
CSVAPGQGAREIQYF

SEQ ID NO: 743551 - protein, 13 aa, Homo sapiens
  CDR3 for alpha chain variable domain of TCR clone 371776 (TRAV3, TRAJ33)
CAVRDRCNYQLIW

SEQ ID NO: 743552 - protein, 16 aa, Homo sapiens
  CDR3 for beta chain variable domain of TCR clone 371776 (TRBV4-2, TRBJ2-7)
CASSQDRGTSSYEQYF

SEQ ID NO: 743553 - protein, 11 aa, Homo sapiens
  CDR3 for alpha chain variable domain of TCR clone 371777 (TRAV21, TRAJ34)
CAHYNTDKLIL

SEQ ID NO: 743554 - protein, 20 aa, Homo sapiens
  CDR3 for beta chain variable domain of TCR clone 371777 (TRBV28, TRBJ2-1)
CASTPIGRSPGLAGGNEQFF

SEQ ID NO: 743555 - protein, 15 aa, Homo sapiens
  CDR3 for alpha chain variable domain of TCR clone 371778 (TRAV17, TRAJ16)
CATALRFSDGQKLLF

SEQ ID NO: 743556 - protein, 15 aa, Homo sapiens
  CDR3 for beta chain variable domain of TCR clone 371778 (TRBV13, TRBJ1-5)
CASSFGQGGVQPQHL

SEQ ID NO: 743557 - protein, 14 aa, Homo sapiens
  CDR3 for alpha chain variable domain of TCR clone 371779 (TRAV16, TRAJ17)
CALSEGAAGNKLTF

SEQ ID NO: 743558 - protein, 12 aa, Homo sapiens
  CDR3 for beta chain variable domain of TCR clone 371779 (TRBV11-2, TRBJ2-1)
CASSPGNNEQFF

SEQ ID NO: 743559 - protein, 15 aa, Homo sapiens
  CDR3 for alpha chain variable domain of TCR clone 371780 (TRAV8-4, TRAJ6)
CDVSAPSGGSYIPTF

SEQ ID NO: 743560 - protein, 15 aa, Homo sapiens
  CDR3 for beta chain variable domain of TCR clone 371780 (TRBV28, TRBJ2-7)
CASSLISGGSYEQYF

SEQ ID NO: 743561 - protein, 17 aa, Homo sapiens
  CDR3 for alpha chain variable domain of TCR clone 371781 (TRAV17, TRAJ24)
CATANSMTTDCWGKLQF

SEQ ID NO: 743562 - protein, 15 aa, Homo sapiens
  CDR3 for beta chain variable domain of TCR clone 371781 (TRBV27, TRBJ2-3)
CASSLGLAATDTQYF

SEQ ID NO: 743563 - protein, 10 aa, Homo sapiens
  CDR3 for alpha chain variable domain of TCR clone 371782 (TRAV20, TRAJ22)
CAAPARPLTF

SEQ ID NO: 743564 - protein, 14 aa, Homo sapiens
  CDR3 for beta chain variable domain of TCR clone 371782 (TRBV19, TRBJ2-1)
CASSMGSGATEQFF

SEQ ID NO: 743565 - protein, 12 aa, Homo sapiens
  CDR3 for alpha chain variable domain of TCR clone 371783 (TRAV3, TRAJ20)
CAVRDGDYKRSF

SEQ ID NO: 743566 - protein, 13 aa, Homo sapiens
  CDR3 for beta chain variable domain of TCR clone 371783 (TRBV6-1, TRBJ2-7)
CASSADTSYERYF

SEQ ID NO: 743567 - protein, 14 aa, Homo sapiens
  CDR3 for alpha chain variable domain of TCR clone 371784 (TRAV1-2, TRAJ8)
CAVREDTGFQKLVF

SEQ ID NO: 743568 - protein, 16 aa, Homo sapiens
  CDR3 for beta chain variable domain of TCR clone 371784 (TRBV19, TRBJ1-1)
CTSSPTRFWPGTEAFF

SEQ ID NO: 743569 - protein, 13 aa, Homo sapiens
  CDR3 for alpha chain variable domain of TCR clone 371785 (TRAV2, TRAJ40)
CAVVTSGTYKYIF

SEQ ID NO: 743570 - protein, 15 aa, Homo sapiens
  CDR3 for beta chain variable domain of TCR clone 371785 (TRBV9, TRBJ1-6)
CASSVAGTGESPLHF

SEQ ID NO: 743571 - protein, 15 aa, Homo sapiens
  CDR3 for alpha chain variable domain of TCR clone 371786 (TRAV25, TRAJ52)
CAGRPGGTSYGKLTF

SEQ ID NO: 743572 - protein, 14 aa, Homo sapiens
  CDR3 for beta chain variable domain of TCR clone 371786 (TRBV7-8, TRBJ2-7)
CASTLGGALGEQYF

SEQ ID NO: 743573 - protein, 12 aa, Homo sapiens
  CDR3 for alpha chain variable domain of TCR clone 371787 (TRAV21, TRAJ33)
CAKMDSNYQLIW

SEQ ID NO: 743574 - protein, 15 aa, Homo sapiens
  CDR3 for beta chain variable domain of TCR clone 371787 (TRBV9, TRBJ1-6)
CASSVAGTWDSPLHF

SEQ ID NO: 743575 - protein, 13 aa, Homo sapiens
  CDR3 for alpha chain variable domain of TCR clone 371788 (TRAV1-1, TRAJ33)
CAVRRDSNYQLIW

SEQ ID NO: 743576 - protein, 14 aa, Homo sapiens
  CDR3 for beta chain variable domain of TCR clone 371788 (TRBV18, TRBJ2-7)
CVSSPTSGGYEQYF

SEQ ID NO: 743577 - protein, 15 aa, Homo sapiens
  CDR3 for alpha chain variable domain of TCR clone 371789 (TRAV12-1, TRAJ44)
CVVDTPQCTASKLTF

SEQ ID NO: 743578 - protein, 13 aa, Homo sapiens
  CDR3 for beta chain variable domain of TCR clone 371789 (TRBV27, TRBJ2-1)
CASSSGSYNEQFF

SEQ ID NO: 743579 - protein, 14 aa, Homo sapiens
  CDR3 for alpha chain variable domain of TCR clone 371790 (TRAV12-3, TRAJ10)
SHLPLRGGGNKLTF

SEQ ID NO: 743580 - protein, 17 aa, Homo sapiens
  CDR3 for beta chain variable domain of TCR clone 371790 (TRBV15, TRBJ1-2)
CATSGREIDVVNYGYTF

SEQ ID NO: 743581 - protein, 14 aa, Homo sapiens
  CDR3 for alpha chain variable domain of TCR clone 371791 (TRAV8-4, TRAJ9)
CAVRINTGGFKTIF

SEQ ID NO: 743582 - protein, 18 aa, Homo sapiens
  CDR3 for beta chain variable domain of TCR clone 371791 (TRBV11-2, TRBJ2-3)
CASSLGGASRGAPNTQYF

SEQ ID NO: 743583 - protein, 12 aa, Homo sapiens
  CDR3 for alpha chain variable domain of TCR clone 371792 (TRAV30, TRAJ43)
CGTEERGNDMRF

SEQ ID NO: 743584 - protein, 15 aa, Homo sapiens
  CDR3 for beta chain variable domain of TCR clone 371792 (TRBV11-1, TRBJ2-7)
CASSRGRFKTYEQYF

SEQ ID NO: 743585 - protein, 15 aa, Homo sapiens
  CDR3 for alpha chain variable domain of TCR clone 371793 (TRAV8-3, TRAJ7)
CAVGSISYGNNRLAF

SEQ ID NO: 743586 - protein, 14 aa, Homo sapiens
  CDR3 for beta chain variable domain of TCR clone 371793 (TRBV7-3, TRBJ1-1)
CASSLKGGNTEAFF

SEQ ID NO: 743587 - protein, 17 aa, Homo sapiens
  CDR3 for alpha chain variable domain of TCR clone 371794 (TRAV12-3, TRAJ6)
CAMSARGGAGGSFIPTF

SEQ ID NO: 743588 - protein, 12 aa, Homo sapiens
  CDR3 for beta chain variable domain of TCR clone 371794 (TRBV12-4, TRBJ2-3)
CASSTLPDTQYF

SEQ ID NO: 743589 - protein, 12 aa, Homo sapiens
  CDR3 for alpha chain variable domain of TCR clone 371795 (TRAV25, TRAJ16)
CAGQQDGQKLLF

SEQ ID NO: 743590 - protein, 13 aa, Homo sapiens
  CDR3 for beta chain variable domain of TCR clone 371795 (TRBV12-5, TRBJ2-3)
CASGDRQSDTQYF

SEQ ID NO: 743591 - protein, 14 aa, Homo sapiens
  CDR3 for alpha chain variable domain of TCR clone 371796 (TRAV26-1, TRAJ45)
CIEVTGGGADGLTF

SEQ ID NO: 743592 - protein, 18 aa, Homo sapiens
  CDR3 for beta chain variable domain of TCR clone 371796 (TRBV11-2, TRBJ2-3)
CASSLGGASRGAPNTQYF

SEQ ID NO: 743593 - protein, 15 aa, Homo sapiens
  CDR3 for alpha chain variable domain of TCR clone 371797 (TRAV8-3, TRAJ45)
CASSYSGGGADGLTF

SEQ ID NO: 743594 - protein, 17 aa, Homo sapiens
  CDR3 for beta chain variable domain of TCR clone 371797 (TRBV7-8, TRBJ1-2)
WASSLRPLQGHLYGYTF

SEQ ID NO: 743595 - protein, 17 aa, Homo sapiens
  CDR3 for alpha chain variable domain of TCR clone 371798 (TRAV3, TRAJ6)
CAVRDGPRAGGGYIPTF

SEQ ID NO: 743596 - protein, 14 aa, Homo sapiens
  CDR3 for beta chain variable domain of TCR clone 371798 (TRBV11-2, TRBJ2-3)
CASSRLARTDTQYF

SEQ ID NO: 743597 - protein, 15 aa, Homo sapiens
  CDR3 for alpha chain variable domain of TCR clone 371799 (TRAV8-2, TRAJ40)
CVVSGRGSGTYKYIF

SEQ ID NO: 743598 - protein, 17 aa, Homo sapiens
  CDR3 for beta chain variable domain of TCR clone 371799 (TRBV13, TRBJ2-3)
CASSLSRVAGGRNTQYF

SEQ ID NO: 743599 - protein, 12 aa, Homo sapiens
  CDR3 for alpha chain variable domain of TCR clone 371800 (TRAV17, TRAJ57)
WATDGGSEKLVF

SEQ ID NO: 743600 - protein, 13 aa, Homo sapiens
  CDR3 for beta chain variable domain of TCR clone 371800 (TRBV7-9, TRBJ2-7)
CASSFAGAYEQYF

SEQ ID NO: 743601 - protein, 11 aa, Homo sapiens
  CDR3 for alpha chain variable domain of TCR clone 371801 (TRAV2, TRAJ40)
CAVEGTYKYIF

SEQ ID NO: 743602 - protein, 17 aa, Homo sapiens
  CDR3 for beta chain variable domain of TCR clone 371801 (TRBV10-3, TRBJ1-2)
CAISQTGSASGDDGYTF

SEQ ID NO: 743603 - protein, 14 aa, Homo sapiens
  CDR3 for alpha chain variable domain of TCR clone 371802 (TRAV9-2, TRAJ39)
CALYSYNAGNMLTF

SEQ ID NO: 743604 - protein, 11 aa, Homo sapiens
  CDR3 for beta chain variable domain of TCR clone 371802 (TRBV11-2, TRBJ1-1)
CASSINTEAFF

SEQ ID NO: 743605 - protein, 19 aa, Homo sapiens
  CDR3 for alpha chain variable domain of TCR clone 371803 (TRAV13-1, TRAJ52)
CAASPYQNAGGTSYGQLTF

SEQ ID NO: 743606 - protein, 13 aa, Homo sapiens
  CDR3 for beta chain variable domain of TCR clone 371803 (TRBV29-1, TRBJ2-5)
CSATTSGGETQYF

SEQ ID NO: 743607 - protein, 15 aa, Homo sapiens
  CDR3 for alpha chain variable domain of TCR clone 371804 (TRAV25, TRAJ10)
CAGPLLTGGGNKLTF

SEQ ID NO: 743608 - protein, 14 aa, Homo sapiens
  CDR3 for beta chain variable domain of TCR clone 371804 (TRBV7-2, TRBJ2-7)
CASRSQGAAYEQYF

SEQ ID NO: 743609 - protein, 16 aa, Homo sapiens
  CDR3 for alpha chain variable domain of TCR clone 371805 (TRAV13-1, TRAJ48)
CAASIFGTFGNEKLTF

SEQ ID NO: 743610 - protein, 12 aa, Homo sapiens
  CDR3 for beta chain variable domain of TCR clone 371805 (TRBV14, TRBJ2-4)
CASSNLKSIQYF

SEQ ID NO: 743611 - protein, 19 aa, Homo sapiens
  CDR3 for alpha chain variable domain of TCR clone 371806 (TRAV1-1, TRAJ37)
CLLLLRCERSGSNTGKLIF

SEQ ID NO: 743612 - protein, 14 aa, Homo sapiens
  CDR3 for beta chain variable domain of TCR clone 371806 (TRBV29-1, TRBJ2-2)
CSALGGFGAGELFF

SEQ ID NO: 743613 - protein, 15 aa, Homo sapiens
  CDR3 for alpha chain variable domain of TCR clone 371807 (TRAV40, TRAJ53)
CLLANSGGSNYKLTF

SEQ ID NO: 743614 - protein, 15 aa, Homo sapiens
  CDR3 for beta chain variable domain of TCR clone 371807 (TRBV6-1, TRBJ2-6)
CASSSRPSGANDLTF

SEQ ID NO: 743615 - protein, 16 aa, Homo sapiens
  CDR3 for alpha chain variable domain of TCR clone 371808 (TRAV1-2, TRAJ10)
CAVRGVLTGGGNKLTF

SEQ ID NO: 743616 - protein, 14 aa, Homo sapiens
  CDR3 for beta chain variable domain of TCR clone 371808 (TRBV28, TRBJ2-5)
CASTGAGGVETQYF

SEQ ID NO: 743617 - protein, 18 aa, Homo sapiens
  CDR3 for alpha chain variable domain of TCR clone 371809 (TRAV35, TRAJ28)
CAGHNYPLSGAGSHQLTF

SEQ ID NO: 743618 - protein, 12 aa, Homo sapiens
  CDR3 for beta chain variable domain of TCR clone 371809 (TRBV7-9, TRBJ1-1)
CASSLEGTEAFF

SEQ ID NO: 743619 - protein, 10 aa, Homo sapiens
  CDR3 for alpha chain variable domain of TCR clone 371810 (TRAV1-2, TRAJ34)
CAVNTDKLIF

SEQ ID NO: 743620 - protein, 18 aa, Homo sapiens
  CDR3 for beta chain variable domain of TCR clone 371810 (TRBV7-9, TRBJ2-7)
CASSLTTSGSRTRYEQYF

SEQ ID NO: 743621 - protein, 13 aa, Homo sapiens
  CDR3 for alpha chain variable domain of TCR clone 371811 (TRAV27, TRAJ29)
CVGAHSGNTPLVF

SEQ ID NO: 743622 - protein, 14 aa, Homo sapiens
  CDR3 for beta chain variable domain of TCR clone 371811 (TRBV7-9, TRBJ2-7)
CASSIGQGAGEQYF

SEQ ID NO: 743623 - protein, 14 aa, Homo sapiens
  CDR3 for alpha chain variable domain of TCR clone 371812 (TRAV36/DV7, TRAJ45)
CPLYSGGGADGLTF

SEQ ID NO: 743624 - protein, 14 aa, Homo sapiens
  CDR3 for beta chain variable domain of TCR clone 371812 (TRBV18, TRBJ2-7)
CASSPRGGAYEQYF

SEQ ID NO: 743625 - protein, 18 aa, Homo sapiens
  CDR3 for alpha chain variable domain of TCR clone 371813 (TRAV21, TRAJ52)
CAVRPSPAGGTSYGKLTF

SEQ ID NO: 743626 - protein, 14 aa, Homo sapiens
  CDR3 for beta chain variable domain of TCR clone 371813 (TRBV14, TRBJ2-1)
CASSQVQGRGERFF

SEQ ID NO: 743627 - protein, 14 aa, Homo sapiens
  CDR3 for alpha chain variable domain of TCR clone 371814 (TRAV12-2, TRAJ13)
CAVKKTGGYQKVTF

SEQ ID NO: 743628 - protein, 17 aa, Homo sapiens
  CDR3 for beta chain variable domain of TCR clone 371814 (TRBV7-7, TRBJ2-2)
CASSSVPAGGEIGELFF

SEQ ID NO: 743629 - protein, 16 aa, Homo sapiens
  CDR3 for alpha chain variable domain of TCR clone 371815 (TRAV23/DV6, TRAJ9)
CAASIGGNTGGFQTIF

SEQ ID NO: 743630 - protein, 12 aa, Homo sapiens
  CDR3 for beta chain variable domain of TCR clone 371815 (TRBV7-8, TRBJ2-7)
CASSLGDREQYF

SEQ ID NO: 743631 - protein, 14 aa, Homo sapiens
  CDR3 for alpha chain variable domain of TCR clone 371816 (TRAV1-2, TRAJ8)
CAVREDPGFQTLVF

SEQ ID NO: 743632 - protein, 15 aa, Homo sapiens
  CDR3 for beta chain variable domain of TCR clone 371816 (TRBV6-3, TRBJ2-7)
CASSSPGTVFYEQYF

SEQ ID NO: 743633 - protein, 13 aa, Homo sapiens
  CDR3 for alpha chain variable domain of TCR clone 371817 (TRAV26-1, TRAJ48)
CIVRVVGDEKSTF

SEQ ID NO: 743634 - protein, 19 aa, Homo sapiens
  CDR3 for beta chain variable domain of TCR clone 371817 (TRBV11-3, TRBJ2-2)
CASSTRPGAKTTNTGELFF

SEQ ID NO: 743635 - protein, 15 aa, Homo sapiens
  CDR3 for alpha chain variable domain of TCR clone 371818 (TRAV26-1, TRAJ44)
CIARVPFGTASKLTF

SEQ ID NO: 743636 - protein, 15 aa, Homo sapiens
  CDR3 for beta chain variable domain of TCR clone 371818 (TRBV20-1, TRBJ1-1)
CSASRGVTGDTEAFF

SEQ ID NO: 743637 - protein, 15 aa, Homo sapiens
  CDR3 for alpha chain variable domain of TCR clone 371819 (TRAV26-1, TRAJ29)
CIVRVEGSGNTPPVV

SEQ ID NO: 743638 - protein, 15 aa, Homo sapiens
  CDR3 for beta chain variable domain of TCR clone 371819 (TRBV7-9, TRBJ1-5)
CASSQGHQPNQPQHF

SEQ ID NO: 743639 - protein, 17 aa, Homo sapiens
  CDR3 for alpha chain variable domain of TCR clone 371820 (TRAV8-3, TRAJ50)
CAVGAVDTETSYDKVIC

SEQ ID NO: 743640 - protein, 13 aa, Homo sapiens
  CDR3 for beta chain variable domain of TCR clone 371820 (TRBV7-9, TRBJ2-2)
CASSSAGTGELFF

SEQ ID NO: 743641 - protein, 10 aa, Homo sapiens
  CDR3 for alpha chain variable domain of TCR clone 371821 (TRAV13-1, TRAJ8)
CAAPFQKLVF

SEQ ID NO: 743642 - protein, 20 aa, Homo sapiens
  CDR3 for beta chain variable domain of TCR clone 371821 (TRBV3-1, TRBJ2-6)
CASSPRPGLEGGAGANGLTF

SEQ ID NO: 743643 - protein, 13 aa, Homo sapiens
  CDR3 for alpha chain variable domain of TCR clone 371822 (TRAV29/DV5, TRAJ31)
CAASRNNNARLMF

SEQ ID NO: 743644 - protein, 12 aa, Homo sapiens
  CDR3 for beta chain variable domain of TCR clone 371822 (TRBV14, TRBJ2-5)
CASSQLKETQYC

SEQ ID NO: 743645 - protein, 14 aa, Homo sapiens
  CDR3 for alpha chain variable domain of TCR clone 371823 (TRAV12-1, TRAJ17)
CVVNYKAAGNKLTF

SEQ ID NO: 743646 - protein, 15 aa, Homo sapiens
  CDR3 for beta chain variable domain of TCR clone 371823 (TRBV2, TRBJ2-1)
CASSEEREGDNEQFF

SEQ ID NO: 743647 - protein, 14 aa, Homo sapiens
  CDR3 for alpha chain variable domain of TCR clone 371824 (TRAV1-2, TRAJ16)
CAVNRFSVGQKLLF

SEQ ID NO: 743648 - protein, 16 aa, Homo sapiens
  CDR3 for beta chain variable domain of TCR clone 371824 (TRBV7-3, TRBJ2-3)
CASSLSGYRPEDTQYF

SEQ ID NO: 743649 - protein, 11 aa, Homo sapiens
  CDR3 for alpha chain variable domain of TCR clone 371825 (TRAV3, TRAJ21)
CAVGNFNKFYF

SEQ ID NO: 743650 - protein, 14 aa, Homo sapiens
  CDR3 for beta chain variable domain of TCR clone 371825 (TRBV4-3, TRBJ1-1)
CASSQGWTPARAFF

SEQ ID NO: 743651 - protein, 15 aa, Homo sapiens
  CDR3 for alpha chain variable domain of TCR clone 371826 (TRAV27, TRAJ38)
CAARRNAGNNRRLIL

SEQ ID NO: 743652 - protein, 13 aa, Homo sapiens
  CDR3 for beta chain variable domain of TCR clone 371826 (TRBV20-1, TRBJ1-1)
CSARAGGNTEAFF

SEQ ID NO: 743653 - protein, 15 aa, Homo sapiens
  CDR3 for alpha chain variable domain of TCR clone 371827 (TRAV8-6, TRAJ23)
CAVRLIYNQGGKLIF

SEQ ID NO: 743654 - protein, 15 aa, Homo sapiens
  CDR3 for beta chain variable domain of TCR clone 371827 (TRBV28, TRBJ1-5)
CASSRTGGYVQPQHF

SEQ ID NO: 743655 - protein, 14 aa, Homo sapiens
  CDR3 for alpha chain variable domain of TCR clone 371828 (TRAV12-3, TRAJ54)
CAMRGIPGAQKLVF

SEQ ID NO: 743656 - protein, 13 aa, Homo sapiens
  CDR3 for beta chain variable domain of TCR clone 371828 (TRBV19, TRBJ1-1)
CASSPSNGGEAFF

SEQ ID NO: 743657 - protein, 12 aa, Homo sapiens
  CDR3 for alpha chain variable domain of TCR clone 371829 (TRAV21, TRAJ31)
CAVSLARGRLMF

SEQ ID NO: 743658 - protein, 14 aa, Homo sapiens
  CDR3 for beta chain variable domain of TCR clone 371829 (TRBV28, TRBJ2-7)
CASSLLRISYEQYF

SEQ ID NO: 743659 - protein, 13 aa, Homo sapiens
  CDR3 for alpha chain variable domain of TCR clone 371830 (TRAV1-1, TRAJ30)
CAVRSDRDDKIIF

SEQ ID NO: 743660 - protein, 14 aa, Homo sapiens
  CDR3 for beta chain variable domain of TCR clone 371830 (TRBV28, TRBJ2-7)
CASPFYGRAHEQYF

SEQ ID NO: 743661 - protein, 14 aa, Homo sapiens
  CDR3 for alpha chain variable domain of TCR clone 371831 (TRAV12-1, TRAJ17)
VVVNYKAAGNKLTF

SEQ ID NO: 743662 - protein, 17 aa, Homo sapiens
  CDR3 for beta chain variable domain of TCR clone 371831 (TRBV20-1, TRBJ2-1)
CSASSSGLAGSYNEQFF

SEQ ID NO: 743663 - protein, 16 aa, Homo sapiens
  CDR3 for alpha chain variable domain of TCR clone 371832 (TRAV14/DV4, TRAJ54)
CAMREGRIQGAQKLVF

SEQ ID NO: 743664 - protein, 14 aa, Homo sapiens
  CDR3 for beta chain variable domain of TCR clone 371832 (TRBV2, TRBJ1-2)
CASNEGTGPYGYTF

SEQ ID NO: 743665 - protein, 14 aa, Homo sapiens
  CDR3 for alpha chain variable domain of TCR clone 371833 (TRAV13-1, TRAJ12)
CSNYPMDSSYKLIF

SEQ ID NO: 743666 - protein, 11 aa, Homo sapiens
  CDR3 for beta chain variable domain of TCR clone 371833 (TRBV19, TRBJ1-1)
CASSIGSEAFF

SEQ ID NO: 743667 - protein, 15 aa, Homo sapiens
  CDR3 for alpha chain variable domain of TCR clone 371834 (TRAV8-4, TRAJ6)
CAVSAPSGGSYIPTF

SEQ ID NO: 743668 - protein, 14 aa, Homo sapiens
  CDR3 for beta chain variable domain of TCR clone 371834 (TRBV7-2, TRBJ2-7)
CASSLPPGQGPQYF

SEQ ID NO: 743669 - protein, 16 aa, Homo sapiens
  CDR3 for alpha chain variable domain of TCR clone 371835 (TRAV20, TRAJ22)
CAVQASSSGSARQLTF

SEQ ID NO: 743670 - protein, 13 aa, Homo sapiens
  CDR3 for beta chain variable domain of TCR clone 371835 (TRBV7-9, TRBJ2-3)
CASSPGSTDTQYF

SEQ ID NO: 743671 - protein, 23 aa, Homo sapiens
  CDR3 for alpha chain variable domain of TCR clone 371836 (TRAV26-1, TRAJ38)
CIADNAGNNHIQNPDPAVYQLRD

SEQ ID NO: 743672 - protein, 12 aa, Homo sapiens
  CDR3 for beta chain variable domain of TCR clone 371836 (TRBV11-2, TRBJ2-2)
CASSLGGGELSF

SEQ ID NO: 743673 - protein, 13 aa, Homo sapiens
  CDR3 for alpha chain variable domain of TCR clone 371837 (TRAV21, TRAJ27)
CAALNTNAGKSTF

SEQ ID NO: 743674 - protein, 16 aa, Homo sapiens
  CDR3 for beta chain variable domain of TCR clone 371837 (TRBV19, TRBJ2-2)
CASRSPGTGATGELFF

SEQ ID NO: 743675 - protein, 17 aa, Homo sapiens
  CDR3 for alpha chain variable domain of TCR clone 371838 (TRAV26-1, TRAJ53)
CIVRVDDSGGSNYKLTF

SEQ ID NO: 743676 - protein, 15 aa, Homo sapiens
  CDR3 for beta chain variable domain of TCR clone 371838 (TRBV7-6, TRBJ2-1)
CASSSLAGEGNEQFF

SEQ ID NO: 743677 - protein, 15 aa, Homo sapiens
  CDR3 for alpha chain variable domain of TCR clone 371839 (TRAV26-1, TRAJ29)
CIVRVEGSGNTPLVF

SEQ ID NO: 743678 - protein, 15 aa, Homo sapiens
  CDR3 for beta chain variable domain of TCR clone 371839 (TRBV5-1, TRBJ2-7)
CASSLNGGPAREQYF

SEQ ID NO: 743679 - protein, 14 aa, Homo sapiens
  CDR3 for alpha chain variable domain of TCR clone 371840 (TRAV12-3, TRAJ10)
SHPPLTGGGNKLTF

SEQ ID NO: 743680 - protein, 14 aa, Homo sapiens
  CDR3 for beta chain variable domain of TCR clone 371840 (TRBV27, TRBJ2-2)
CASSLGAATGELFF

SEQ ID NO: 743681 - protein, 16 aa, Homo sapiens
  CDR3 for alpha chain variable domain of TCR clone 371841 (TRAV20, TRAJ38)
CAVQASNADNNRKPIW

SEQ ID NO: 743682 - protein, 16 aa, Homo sapiens
  CDR3 for beta chain variable domain of TCR clone 371841 (TRBV7-8, TRBJ2-6)
CASRVGDSSGANVLTF

SEQ ID NO: 743683 - protein, 12 aa, Homo sapiens
  CDR3 for alpha chain variable domain of TCR clone 371842 (TRAV13-1, TRAJ15)
CAANQAGTALLF

SEQ ID NO: 743684 - protein, 14 aa, Homo sapiens
  CDR3 for beta chain variable domain of TCR clone 371842 (TRBV20-1, TRBJ2-5)
CSARYRGLQETQYF

SEQ ID NO: 743685 - protein, 18 aa, Homo sapiens
  CDR3 for alpha chain variable domain of TCR clone 371843 (TRAV21, TRAJ52)
CAVRPSPAGGTSYGKLTF

SEQ ID NO: 743686 - protein, 17 aa, Homo sapiens
  CDR3 for beta chain variable domain of TCR clone 371843 (TRBV4-1, TRBJ1-4)
CASSQAGPRGVEEELFF

SEQ ID NO: 743687 - protein, 14 aa, Homo sapiens
  CDR3 for alpha chain variable domain of TCR clone 371844 (TRAV1-2, TRAJ8)
CAVREDTGFQKLVF

SEQ ID NO: 743688 - protein, 15 aa, Homo sapiens
  CDR3 for beta chain variable domain of TCR clone 371844 (TRBV6-1, TRBJ1-4)
CASSLLDRANEKLFF

SEQ ID NO: 743689 - protein, 12 aa, Homo sapiens
  CDR3 for alpha chain variable domain of TCR clone 371845 (TRAV3, TRAJ31)
CAVRPRGPRLMF

SEQ ID NO: 743690 - protein, 17 aa, Homo sapiens
  CDR3 for beta chain variable domain of TCR clone 371845 (TRBV7-9, TRBJ1-5)
CASSASQGVYSNQPQHF

SEQ ID NO: 743691 - protein, 16 aa, Homo sapiens
  CDR3 for alpha chain variable domain of TCR clone 371846 (TRAV12-3, TRAJ53)
CAMSPGSGGSNYKLTF

SEQ ID NO: 743692 - protein, 16 aa, Homo sapiens
  CDR3 for beta chain variable domain of TCR clone 371846 (TRBV12-4, TRBJ2-7)
CASSLIGGTGTYEQYF

SEQ ID NO: 743693 - protein, 13 aa, Homo sapiens
  CDR3 for alpha chain variable domain of TCR clone 371847 (TRAV25, TRAJ30)
CAGRVDRDDKSIF

SEQ ID NO: 743694 - protein, 17 aa, Homo sapiens
  CDR3 for beta chain variable domain of TCR clone 371847 (TRBV7-9, TRBJ2-6)
CASSFGAGYSGANVLTF

SEQ ID NO: 743695 - protein, 17 aa, Homo sapiens
  CDR3 for alpha chain variable domain of TCR clone 371848 (TRAV3, TRAJ42)
CAVRDRDYGGSQGNLIF

SEQ ID NO: 743696 - protein, 13 aa, Homo sapiens
  CDR3 for beta chain variable domain of TCR clone 371848 (TRBV10-3, TRBJ2-7)
CASKLAANYEQYF

SEQ ID NO: 743697 - protein, 12 aa, Homo sapiens
  CDR3 for alpha chain variable domain of TCR clone 371849 (TRAV1-1, TRAJ24)
CAVRGSWRKFQF

SEQ ID NO: 743698 - protein, 14 aa, Homo sapiens
  CDR3 for beta chain variable domain of TCR clone 371849 (TRBV20-1, TRBJ2-3)
CSARGGTSTDTQYF

SEQ ID NO: 743699 - protein, 14 aa, Homo sapiens
  CDR3 for alpha chain variable domain of TCR clone 371850 (TRAV9-2, TRAJ39)
CAPYIYNAGNMLTF

SEQ ID NO: 743700 - protein, 14 aa, Homo sapiens
  CDR3 for beta chain variable domain of TCR clone 371850 (TRBV9, TRBJ2-7)
CASSPLRAVGEQYF

SEQ ID NO: 743701 - protein, 12 aa, Homo sapiens
  CDR3 for alpha chain variable domain of TCR clone 371851 (TRAV13-1, TRAJ45)
CAATRGADGLTF

SEQ ID NO: 743702 - protein, 17 aa, Homo sapiens
  CDR3 for beta chain variable domain of TCR clone 371851 (TRBV13, TRBJ2-3)
CASSLSRVAGGRKTQYF

SEQ ID NO: 743703 - protein, 17 aa, Homo sapiens
  CDR3 for alpha chain variable domain of TCR clone 371852 (TRAV3, TRAJ38)
CAVRDCLNAGNNRKLIW

SEQ ID NO: 743704 - protein, 13 aa, Homo sapiens
  CDR3 for beta chain variable domain of TCR clone 371852 (TRBV19, TRBJ1-1)
CASTRRGDTEAFF

SEQ ID NO: 743705 - protein, 14 aa, Homo sapiens
  CDR3 for alpha chain variable domain of TCR clone 371853 (TRAV12-3, TRAJ10)
SHLPLMGGGNKLTF

SEQ ID NO: 743706 - protein, 14 aa, Homo sapiens
  CDR3 for beta chain variable domain of TCR clone 371853 (TRBV19, TRBJ2-1)
CASPTVVLSGEQFF

SEQ ID NO: 743707 - protein, 12 aa, Homo sapiens
  CDR3 for alpha chain variable domain of TCR clone 371854 (TRAV12-1, TRAJ40)
CVVYSGTYKYIF

SEQ ID NO: 743708 - protein, 15 aa, Homo sapiens
  CDR3 for beta chain variable domain of TCR clone 371854 (TRBV11-2, TRBJ2-2)
CASSSDRVNAGELFF

SEQ ID NO: 743709 - protein, 14 aa, Homo sapiens
  CDR3 for alpha chain variable domain of TCR clone 371855 (TRAV12-1, TRAJ30)
CVVNKGGRDGKIIF

SEQ ID NO: 743710 - protein, 14 aa, Homo sapiens
  CDR3 for beta chain variable domain of TCR clone 371855 (TRBV7-6, TRBJ2-3)
CVSSLGTVTDTQYF

SEQ ID NO: 743711 - protein, 11 aa, Homo sapiens
  CDR3 for alpha chain variable domain of TCR clone 371856 (TRAV12-3, TRAJ43)
CAMSVSNDMRF

SEQ ID NO: 743712 - protein, 15 aa, Homo sapiens
  CDR3 for beta chain variable domain of TCR clone 371856 (TRBV28, TRBJ2-7)
CASSPGGRGSYEQYC

SEQ ID NO: 743713 - protein, 12 aa, Homo sapiens
  CDR3 for alpha chain variable domain of TCR clone 371857 (TRAV13-1, TRAJ21)
CASKEGFNKFYF

SEQ ID NO: 743714 - protein, 15 aa, Homo sapiens
  CDR3 for beta chain variable domain of TCR clone 371857 (TRBV2, TRBJ2-1)
CASSELAGSYNEQFF

SEQ ID NO: 743715 - protein, 13 aa, Homo sapiens
  CDR3 for alpha chain variable domain of TCR clone 371858 (TRAV3, TRAJ21)
CAVREPDFNKFYF

SEQ ID NO: 743716 - protein, 13 aa, Homo sapiens
  CDR3 for beta chain variable domain of TCR clone 371858 (TRBV9, TRBJ2-1)
CTSSPSGGNEQFF

SEQ ID NO: 743717 - protein, 18 aa, Homo sapiens
  CDR3 for alpha chain variable domain of TCR clone 371859 (TRAV17, TRAJ45)
CATSLDLYSGGGADGLTF

SEQ ID NO: 743718 - protein, 14 aa, Homo sapiens
  CDR3 for beta chain variable domain of TCR clone 371859 (TRBV7-3, TRBJ1-1)
CASSLGTGYTEAFF

SEQ ID NO: 743719 - protein, 14 aa, Homo sapiens
  CDR3 for alpha chain variable domain of TCR clone 371860 (TRAV12-1, TRAJ17)
CVVNYKAAGNELTF

SEQ ID NO: 743720 - protein, 14 aa, Homo sapiens
  CDR3 for beta chain variable domain of TCR clone 371860 (TRBV11-2, TRBJ1-5)
CASSLDRGRQPQHF

SEQ ID NO: 743721 - protein, 14 aa, Homo sapiens
  CDR3 for alpha chain variable domain of TCR clone 371861 (TRAV17, TRAJ37)
CATDGSSNTGKLIF

SEQ ID NO: 743722 - protein, 14 aa, Homo sapiens
  CDR3 for beta chain variable domain of TCR clone 371861 (TRBV12-5, TRBJ2-5)
CASGSRTHQETQYF

SEQ ID NO: 743723 - protein, 16 aa, Homo sapiens
  CDR3 for alpha chain variable domain of TCR clone 371862 (TRAV3, TRAJ32)
CAVRESYGGATNKLIF

SEQ ID NO: 743724 - protein, 12 aa, Homo sapiens
  CDR3 for beta chain variable domain of TCR clone 371862 (TRBV20-1, TRBJ1-2)
CSVTPEGYGYTF

SEQ ID NO: 743725 - protein, 13 aa, Homo sapiens
  CDR3 for alpha chain variable domain of TCR clone 371863 (TRAV17, TRAJ26)
CATVDNYGQNFGF

SEQ ID NO: 743726 - protein, 14 aa, Homo sapiens
  CDR3 for beta chain variable domain of TCR clone 371863 (TRBV7-2, TRBJ1-1)
CASSFLAGTTEAFF

SEQ ID NO: 743727 - protein, 16 aa, Homo sapiens
  CDR3 for alpha chain variable domain of TCR clone 371864 (TRAV3, TRAJ3)
CAARDRAKSSASKINF

SEQ ID NO: 743728 - protein, 16 aa, Homo sapiens
  CDR3 for beta chain variable domain of TCR clone 371864 (TRBV20-1, TRBJ2-4)
CSATSLAELAENIQYF

SEQ ID NO: 743729 - protein, 14 aa, Homo sapiens
  CDR3 for alpha chain variable domain of TCR clone 371865 (TRAV2, TRAJ9)
CAVEVRSGGFKTIF

SEQ ID NO: 743730 - protein, 17 aa, Homo sapiens
  CDR3 for beta chain variable domain of TCR clone 371865 (TRBV20-1, TRBJ2-7)
CSATRAGGVAGVEEQYF

SEQ ID NO: 743731 - protein, 13 aa, Homo sapiens
  CDR3 for alpha chain variable domain of TCR clone 371866 (TRAV8-3, TRAJ43)
CAVVPYNNNDMRF

SEQ ID NO: 743732 - protein, 13 aa, Homo sapiens
  CDR3 for beta chain variable domain of TCR clone 371866 (TRBV7-3, TRBJ1-1)
CASSQDWGAEAFF

SEQ ID NO: 743733 - protein, 18 aa, Homo sapiens
  CDR3 for alpha chain variable domain of TCR clone 371867 (TRAV13-1, TRAJ52)
CAAKNPNAGATSYGKLTF

SEQ ID NO: 743734 - protein, 14 aa, Homo sapiens
  CDR3 for beta chain variable domain of TCR clone 371867 (TRBV4-3, TRBJ2-2)
CASSQGHVTGELFF

SEQ ID NO: 743735 - protein, 16 aa, Homo sapiens
  CDR3 for alpha chain variable domain of TCR clone 371868 (TRAV14/DV4, TRAJ37)
CAMREYGSGNTGKLIF

SEQ ID NO: 743736 - protein, 16 aa, Homo sapiens
  CDR3 for beta chain variable domain of TCR clone 371868 (TRBV7-2, TRBJ1-5)
CASSWTGGPGNQPQHF

SEQ ID NO: 743737 - protein, 14 aa, Homo sapiens
  CDR3 for alpha chain variable domain of TCR clone 371869 (TRAV8-4, TRAJ5)
CAVSTDTGRRALTF

SEQ ID NO: 743738 - protein, 12 aa, Homo sapiens
  CDR3 for beta chain variable domain of TCR clone 371869 (TRBV12-4, TRBJ1-3)
CASSFSGNTIYF

SEQ ID NO: 743739 - protein, 13 aa, Homo sapiens
  CDR3 for alpha chain variable domain of TCR clone 371870 (TRAV8-3, TRAJ48)
CAVVRSGNEKLTF

SEQ ID NO: 743740 - protein, 16 aa, Homo sapiens
  CDR3 for beta chain variable domain of TCR clone 371870 (TRBV20-1, TRBJ2-5)
CSARDFASGIQETQYF

SEQ ID NO: 743741 - protein, 13 aa, Homo sapiens
  CDR3 for alpha chain variable domain of TCR clone 371871 (TRAV8-6, TRAJ49)
CAVITNTGNQFYF

SEQ ID NO: 743742 - protein, 13 aa, Homo sapiens
  CDR3 for beta chain variable domain of TCR clone 371871 (TRBV5-1, TRBJ2-7)
RSSRGESLYEQYF

SEQ ID NO: 743743 - protein, 11 aa, Homo sapiens
  CDR3 for alpha chain variable domain of TCR clone 371872 (TRAV22, TRAJ49)
CAVLTGNQFYF

SEQ ID NO: 743744 - protein, 11 aa, Homo sapiens
  CDR3 for beta chain variable domain of TCR clone 371872 (TRBV5-6, TRBJ2-1)
CASSLGGEQCF

SEQ ID NO: 743745 - protein, 16 aa, Homo sapiens
  CDR3 for alpha chain variable domain of TCR clone 371873 (TRAV1-2, TRAJ10)
CAVRGVLTEGGNKLNF

SEQ ID NO: 743746 - protein, 13 aa, Homo sapiens
  CDR3 for beta chain variable domain of TCR clone 371873 (TRBV10-3, TRBJ2-7)
CASKLAVNYEQYF

SEQ ID NO: 743747 - protein, 13 aa, Homo sapiens
  CDR3 for alpha chain variable domain of TCR clone 371874 (TRAV29/DV5, TRAJ31)
CAASRNNNARLMF

SEQ ID NO: 743748 - protein, 13 aa, Homo sapiens
  CDR3 for beta chain variable domain of TCR clone 371874 (TRBV27, TRBJ1-1)
CASSLSIGAEAFF

SEQ ID NO: 743749 - protein, 16 aa, Homo sapiens
  CDR3 for alpha chain variable domain of TCR clone 371875 (TRAV1-2, TRAJ10)
CAVRGVLTGGGNKLTF

SEQ ID NO: 743750 - protein, 13 aa, Homo sapiens
  CDR3 for beta chain variable domain of TCR clone 371875 (TRBV2, TRBJ1-1)
CASRWTVNTEAFF

SEQ ID NO: 743751 - protein, 13 aa, Homo sapiens
  CDR3 for alpha chain variable domain of TCR clone 371876 (TRAV26-1, TRAJ40)
CIVRVEGTYKYIF

SEQ ID NO: 743752 - protein, 13 aa, Homo sapiens
  CDR3 for beta chain variable domain of TCR clone 371876 (TRBV7-9, TRBJ2-7)
CASSFAGAYEQYF

SEQ ID NO: 743753 - protein, 14 aa, Homo sapiens
  CDR3 for alpha chain variable domain of TCR clone 371877 (TRAV34, TRAJ44)
CGADGTGTASRLTF

SEQ ID NO: 743754 - protein, 15 aa, Homo sapiens
  CDR3 for beta chain variable domain of TCR clone 371877 (TRBV5-1, TRBJ2-1)
CASRPPRAPYNEQFF

SEQ ID NO: 743755 - protein, 12 aa, Homo sapiens
  CDR3 for alpha chain variable domain of TCR clone 371878 (TRAV10, TRAJ43)
CVVVRVGNDMRF

SEQ ID NO: 743756 - protein, 15 aa, Homo sapiens
  CDR3 for beta chain variable domain of TCR clone 371878 (TRBV2, TRBJ2-7)
CASSEGLARSYEHYF

SEQ ID NO: 743757 - protein, 14 aa, Homo sapiens
  CDR3 for alpha chain variable domain of TCR clone 371879 (TRAV12-3, TRAJ10)
SHLPLTGGGNKLTF

SEQ ID NO: 743758 - protein, 20 aa, Homo sapiens
  CDR3 for beta chain variable domain of TCR clone 371879 (TRBV12-4, TRBJ2-5)
CASSFSSGGGGDPVLRARHA

SEQ ID NO: 743759 - protein, 15 aa, Homo sapiens
  CDR3 for alpha chain variable domain of TCR clone 371880 (TRAV35, TRAJ28)
CAGRRTGAGSYQLTF

SEQ ID NO: 743760 - protein, 14 aa, Homo sapiens
  CDR3 for beta chain variable domain of TCR clone 371880 (TRBV7-3, TRBJ2-1)
CASSLAGGTNEQFF

SEQ ID NO: 743761 - protein, 13 aa, Homo sapiens
  CDR3 for alpha chain variable domain of TCR clone 371881 (TRAV30, TRAJ24)
CGTVTERWGKLQF

SEQ ID NO: 743762 - protein, 14 aa, Homo sapiens
  CDR3 for beta chain variable domain of TCR clone 371881 (TRBV6-3, TRBJ2-2)
CASTYTPDTGELFF

SEQ ID NO: 743763 - protein, 12 aa, Homo sapiens
  CDR3 for alpha chain variable domain of TCR clone 371882 (TRAV1-1, TRAJ39)
CAVPVVGNMLTF

SEQ ID NO: 743764 - protein, 15 aa, Homo sapiens
  CDR3 for beta chain variable domain of TCR clone 371882 (TRBV19, TRBJ1-6)
FASSTQGAVGSPLHF

SEQ ID NO: 743765 - protein, 16 aa, Homo sapiens
  CDR3 for alpha chain variable domain of TCR clone 371883 (TRAV27, TRAJ52)
CAGAPAGGTSYGKLTF

SEQ ID NO: 743766 - protein, 14 aa, Homo sapiens
  CDR3 for beta chain variable domain of TCR clone 371883 (TRBV19, TRBJ2-1)
CASPTFVLSGEQFF

SEQ ID NO: 743767 - protein, 14 aa, Homo sapiens
  CDR3 for alpha chain variable domain of TCR clone 371884 (TRAV3, TRAJ28)
CAVRRGAGSYQLTF

SEQ ID NO: 743768 - protein, 16 aa, Homo sapiens
  CDR3 for beta chain variable domain of TCR clone 371884 (TRBV4-1, TRBJ2-7)
CASSQEWTSGPLEQYV

SEQ ID NO: 743769 - protein, 15 aa, Homo sapiens
  CDR3 for alpha chain variable domain of TCR clone 371885 (TRAV3, TRAJ4)
CAVRDGTGGYNKLIF

SEQ ID NO: 743770 - protein, 16 aa, Homo sapiens
  CDR3 for beta chain variable domain of TCR clone 371885 (TRBV7-3, TRBJ2-3)
CASSLSGYRPEDTQYF

SEQ ID NO: 743771 - protein, 16 aa, Homo sapiens
  CDR3 for alpha chain variable domain of TCR clone 371886 (TRAV27, TRAJ53)
CAAPEGSGGSDYKLTF

SEQ ID NO: 743772 - protein, 14 aa, Homo sapiens
  CDR3 for beta chain variable domain of TCR clone 371886 (TRBV4-3, TRBJ1-5)
CASSQGVQGWPQHF

SEQ ID NO: 743773 - protein, 14 aa, Homo sapiens
  CDR3 for alpha chain variable domain of TCR clone 371887 (TRAV29/DV5, TRAJ36)
CAARRKTGANNLFL

SEQ ID NO: 743774 - protein, 14 aa, Homo sapiens
  CDR3 for beta chain variable domain of TCR clone 371887 (TRBV19, TRBJ1-6)
CASSSGTGYSPLHF

SEQ ID NO: 743775 - protein, 15 aa, Homo sapiens
  CDR3 for alpha chain variable domain of TCR clone 371888 (TRAV3, TRAJ22)
CAVRDRGGSARQLTF

SEQ ID NO: 743776 - protein, 10 aa, Homo sapiens
  CDR3 for beta chain variable domain of TCR clone 371888 (TRBV2, TRBJ1-5)
CTSVPSGQHF

SEQ ID NO: 743777 - protein, 13 aa, Homo sapiens
  CDR3 for alpha chain variable domain of TCR clone 371889 (TRAV1-2, TRAJ12)
CAVSMDSSYKLIF

SEQ ID NO: 743778 - protein, 14 aa, Homo sapiens
  CDR3 for beta chain variable domain of TCR clone 371889 (TRBV7-8, TRBJ2-3)
CASSLEAGTDTQYF

SEQ ID NO: 743779 - protein, 13 aa, Homo sapiens
  CDR3 for alpha chain variable domain of TCR clone 371890 (TRAV21, TRAJ27)
SNARPGNAGKSTF

SEQ ID NO: 743780 - protein, 14 aa, Homo sapiens
  CDR3 for beta chain variable domain of TCR clone 371890 (TRBV7-6, TRBJ2-3)
CASSLGTVTDTQYF

SEQ ID NO: 743781 - protein, 16 aa, Homo sapiens
  CDR3 for alpha chain variable domain of TCR clone 371891 (TRAV30, TRAJ44)
CGTEDKRTGTASKLTC

SEQ ID NO: 743782 - protein, 16 aa, Homo sapiens
  CDR3 for beta chain variable domain of TCR clone 371891 (TRBV10-2, TRBJ2-7)
CASSESPGSSGFEQYF

SEQ ID NO: 743783 - protein, 12 aa, Homo sapiens
  CDR3 for alpha chain variable domain of TCR clone 371892 (TRAV2, TRAJ31)
CAAPAQNARPMF

SEQ ID NO: 743784 - protein, 14 aa, Homo sapiens
  CDR3 for beta chain variable domain of TCR clone 371892 (TRBV7-9, TRBJ2-7)
CASSLDRPTDEQYC

SEQ ID NO: 743785 - protein, 12 aa, Homo sapiens
  CDR3 for alpha chain variable domain of TCR clone 371893 (TRAV35, TRAJ49)
CAGWNTGNQFYF

SEQ ID NO: 743786 - protein, 16 aa, Homo sapiens
  CDR3 for beta chain variable domain of TCR clone 371893 (TRBV5-1, TRBJ2-2)
CASSLWDTTNTGELCF

SEQ ID NO: 743787 - protein, 12 aa, Homo sapiens
  CDR3 for alpha chain variable domain of TCR clone 371894 (TRAV8-3, TRAJ26)
FAGDNYGQNFVF

SEQ ID NO: 743788 - protein, 11 aa, Homo sapiens
  CDR3 for beta chain variable domain of TCR clone 371894 (TRBV12-4, TRBJ2-3)
CASTATDTQYF

SEQ ID NO: 743789 - protein, 23 aa, Homo sapiens
  CDR3 for alpha chain variable domain of TCR clone 371895 (TRAV26-1, )
CIADSAGNNHIQNPDPAVYQLRD

SEQ ID NO: 743790 - protein, 16 aa, Homo sapiens
  CDR3 for beta chain variable domain of TCR clone 371895 (TRBV7-9, TRBJ1-2)
CASSLGFSSGEDGYTF

SEQ ID NO: 743791 - protein, 13 aa, Homo sapiens
  CDR3 for alpha chain variable domain of TCR clone 371896 (TRAV20, TRAJ31)
CAVQAIGGCQTHV

SEQ ID NO: 743792 - protein, 14 aa, Homo sapiens
  CDR3 for beta chain variable domain of TCR clone 371896 (TRBV2, TRBJ1-5)
CASSGTVSNQPQHF

SEQ ID NO: 743793 - protein, 16 aa, Homo sapiens
  CDR3 for alpha chain variable domain of TCR clone 371897 (TRAV4, TRAJ5)
CLVGPDHGHGQESTYF

SEQ ID NO: 743794 - protein, 15 aa, Homo sapiens
  CDR3 for beta chain variable domain of TCR clone 371897 (TRBV27, TRBJ2-5)
CASSLIPSGEETQYF

SEQ ID NO: 743795 - protein, 13 aa, Homo sapiens
  CDR3 for alpha chain variable domain of TCR clone 371898 (TRAV13-1, TRAJ39)
CSASIVMQATCSP

SEQ ID NO: 743796 - protein, 16 aa, Homo sapiens
  CDR3 for beta chain variable domain of TCR clone 371898 (TRBV7-2, TRBJ2-3)
CASSLVALYSTDTQYF

SEQ ID NO: 743797 - protein, 15 aa, Homo sapiens
  CDR3 for alpha chain variable domain of TCR clone 371899 (TRAV36/DV7, TRAJ44)
CAVCRNTGTASQLTF

SEQ ID NO: 743798 - protein, 13 aa, Homo sapiens
  CDR3 for beta chain variable domain of TCR clone 371899 (TRBV18, TRBJ2-3)
CASSTGRTDTQYF

SEQ ID NO: 743799 - protein, 14 aa, Homo sapiens
  CDR3 for alpha chain variable domain of TCR clone 371900 (TRAV26-1, TRAJ38)
CIADNAGNKRKLLW

SEQ ID NO: 743800 - protein, 13 aa, Homo sapiens
  CDR3 for beta chain variable domain of TCR clone 371900 (TRBV20-1, TRBJ1-1)
CSARGGGNTEAFF

SEQ ID NO: 743801 - protein, 13 aa, Homo sapiens
  CDR3 for alpha chain variable domain of TCR clone 371901 (TRAV13-1, TRAJ53)
CAASKGSNYKLTF

SEQ ID NO: 743802 - protein, 18 aa, Homo sapiens
  CDR3 for beta chain variable domain of TCR clone 371901 (TRBV7-9, TRBJ2-7)
CASSLTTSGSRTWYEQYF

SEQ ID NO: 743803 - protein, 10 aa, Homo sapiens
  CDR3 for alpha chain variable domain of TCR clone 371902 (TRAV36/DV7, TRAJ39)
CAGLIMQATF

SEQ ID NO: 743804 - protein, 14 aa, Homo sapiens
  CDR3 for beta chain variable domain of TCR clone 371902 (TRBV7-2, TRBJ2-2)
CASSSDGHTGELFF

SEQ ID NO: 743805 - protein, 16 aa, Homo sapiens
  CDR3 for alpha chain variable domain of TCR clone 371903 (TRAV38-1, TRAJ45)
CAFIPHSGGGADGLTF

SEQ ID NO: 743806 - protein, 15 aa, Homo sapiens
  CDR3 for beta chain variable domain of TCR clone 371903 (TRBV2, TRBJ1-2)
CASSDSVRGIYGYTF

SEQ ID NO: 743807 - protein, 12 aa, Homo sapiens
  CDR3 for alpha chain variable domain of TCR clone 371904 (TRAV13-1, TRAJ17)
CAARTAGNKITF

SEQ ID NO: 743808 - protein, 15 aa, Homo sapiens
  CDR3 for beta chain variable domain of TCR clone 371904 (TRBV7-6, TRBJ1-1)
CASSPQGGANTEAFF

SEQ ID NO: 743809 - protein, 14 aa, Homo sapiens
  CDR3 for alpha chain variable domain of TCR clone 371905 (TRAV23/DV6, TRAJ40)
CASRKNSGTYKYIF

SEQ ID NO: 743810 - protein, 14 aa, Homo sapiens
  CDR3 for beta chain variable domain of TCR clone 371905 (TRBV10-3, TRBJ2-5)
CAISERDYQETQYF

SEQ ID NO: 743811 - protein, 13 aa, Homo sapiens
  CDR3 for alpha chain variable domain of TCR clone 371906 (TRAV13-1, TRAJ5)
CAARVTGRRALTF

SEQ ID NO: 743812 - protein, 14 aa, Homo sapiens
  CDR3 for beta chain variable domain of TCR clone 371906 (TRBV18, TRBJ2-5)
CASSPGVSQETQFF

SEQ ID NO: 743813 - protein, 18 aa, Homo sapiens
  CDR3 for alpha chain variable domain of TCR clone 371907 (TRAV21, TRAJ52)
CAVRPSPACVTSYGKLTF

SEQ ID NO: 743814 - protein, 17 aa, Homo sapiens
  CDR3 for beta chain variable domain of TCR clone 371907 (TRBV13, TRBJ2-3)
CASSLSRVAGGRNTQYF

SEQ ID NO: 743815 - protein, 12 aa, Homo sapiens
  CDR3 for alpha chain variable domain of TCR clone 371908 (TRAV2, TRAJ34)
CAVERNTDKLIF

SEQ ID NO: 743816 - protein, 15 aa, Homo sapiens
  CDR3 for beta chain variable domain of TCR clone 371908 (TRBV2, TRBJ2-7)
CASSEGLARSYEQYF

SEQ ID NO: 743817 - protein, 15 aa, Homo sapiens
  CDR3 for alpha chain variable domain of TCR clone 371909 (TRAV3, TRAJ37)
CAVIRSSSNTGKLIF

SEQ ID NO: 743818 - protein, 15 aa, Homo sapiens
  CDR3 for beta chain variable domain of TCR clone 371909 (TRBV20-1, TRBJ2-7)
CSARDRVSGMDEQYF

SEQ ID NO: 743819 - protein, 13 aa, Homo sapiens
  CDR3 for alpha chain variable domain of TCR clone 371910 (TRAV20, TRAJ37)
CAGCSSNTGKLIF

SEQ ID NO: 743820 - protein, 14 aa, Homo sapiens
  CDR3 for beta chain variable domain of TCR clone 371910 (TRBV20-1, TRBJ2-7)
CSAISREASYEQYF

SEQ ID NO: 743821 - protein, 16 aa, Homo sapiens
  CDR3 for alpha chain variable domain of TCR clone 371911 (TRAV27, TRAJ13)
CAGAKSDSGGYQKVTI

SEQ ID NO: 743822 - protein, 15 aa, Homo sapiens
  CDR3 for beta chain variable domain of TCR clone 371911 (TRBV29-1, TRBJ2-1)
CSVGRHALFYNEQFF

SEQ ID NO: 743823 - protein, 14 aa, Homo sapiens
  CDR3 for alpha chain variable domain of TCR clone 371912 (TRAV26-2, TRAJ32)
CCVGYGGATNKLIF

SEQ ID NO: 743824 - protein, 13 aa, Homo sapiens
  CDR3 for beta chain variable domain of TCR clone 371912 (TRBV11-2, TRBJ2-5)
CASSFSSQETQYF

SEQ ID NO: 743825 - protein, 15 aa, Homo sapiens
  CDR3 for alpha chain variable domain of TCR clone 371913 (TRAV3, TRAJ36)
CAVRASQTGANNLFF

SEQ ID NO: 743826 - protein, 15 aa, Homo sapiens
  CDR3 for beta chain variable domain of TCR clone 371913 (TRBV9, TRBJ1-6)
CASSVAGTGDSPLHF

SEQ ID NO: 743827 - protein, 17 aa, Homo sapiens
  CDR3 for alpha chain variable domain of TCR clone 371914 (TRAV3, TRAJ6)
CAVRDGPGAGGGYIPTF

SEQ ID NO: 743828 - protein, 14 aa, Homo sapiens
  CDR3 for beta chain variable domain of TCR clone 371914 (TRBV7-2, TRBJ2-7)
CASSPKTSFYEQYF

SEQ ID NO: 743829 - protein, 13 aa, Homo sapiens
  CDR3 for alpha chain variable domain of TCR clone 371915 (TRAV17, TRAJ54)
CAEGIQGAQKLVF

SEQ ID NO: 743830 - protein, 14 aa, Homo sapiens
  CDR3 for beta chain variable domain of TCR clone 371915 (TRBV11-2, TRBJ1-2)
CASSLGTANYGYTF

SEQ ID NO: 743831 - protein, 13 aa, Homo sapiens
  CDR3 for alpha chain variable domain of TCR clone 371916 (TRAV1-1, TRAJ9)
CAAKNTGGFKTIF

SEQ ID NO: 743832 - protein, 15 aa, Homo sapiens
  CDR3 for beta chain variable domain of TCR clone 371916 (TRBV5-1, TRBJ2-1)
CASPGSGRTYNEQFF

SEQ ID NO: 743833 - protein, 14 aa, Homo sapiens
  CDR3 for alpha chain variable domain of TCR clone 371917 (TRAV17, TRAJ57)
CATDPQGGSEKLVF

SEQ ID NO: 743834 - protein, 13 aa, Homo sapiens
  CDR3 for beta chain variable domain of TCR clone 371917 (TRBV18, TRBJ1-2)
CASSASATEGYTF

SEQ ID NO: 743835 - protein, 14 aa, Homo sapiens
  CDR3 for alpha chain variable domain of TCR clone 371918 (TRAV12-2, TRAJ40)
CAVKIPSGTYKYIF

SEQ ID NO: 743836 - protein, 13 aa, Homo sapiens
  CDR3 for beta chain variable domain of TCR clone 371918 (TRBV20-1, TRBJ1-1)
QCANTDWGTEAFF

SEQ ID NO: 743837 - protein, 12 aa, Homo sapiens
  CDR3 for alpha chain variable domain of TCR clone 371919 (TRAV8-3, TRAJ26)
CAGDTYGQNFFF

SEQ ID NO: 743838 - protein, 15 aa, Homo sapiens
  CDR3 for beta chain variable domain of TCR clone 371919 (TRBV9, TRBJ2-1)
CASSLAGSSYNEQFF

SEQ ID NO: 743839 - protein, 13 aa, Homo sapiens
  CDR3 for alpha chain variable domain of TCR clone 371920 (TRAV12-3, TRAJ33)
CAMSVNSNYQLIW

SEQ ID NO: 743840 - protein, 15 aa, Homo sapiens
  CDR3 for beta chain variable domain of TCR clone 371920 (TRBV6-5, TRBJ2-3)
CASSRSGGARDTQYF

SEQ ID NO: 743841 - protein, 13 aa, Homo sapiens
  CDR3 for alpha chain variable domain of TCR clone 371921 (TRAV35, TRAJ36)
CAGPRIGANNLSF

SEQ ID NO: 743842 - protein, 15 aa, Homo sapiens
  CDR3 for beta chain variable domain of TCR clone 371921 (TRBV28, TRBJ2-5)
CASSPTWSYQETQYF

SEQ ID NO: 743843 - protein, 15 aa, Homo sapiens
  CDR3 for alpha chain variable domain of TCR clone 371922 (TRAV26-1, TRAJ27)
CIVRVLTPMQANQPL

SEQ ID NO: 743844 - protein, 13 aa, Homo sapiens
  CDR3 for beta chain variable domain of TCR clone 371922 (TRBV20-1, TRBJ2-7)
CSATHTSGYEQCF

SEQ ID NO: 743845 - protein, 13 aa, Homo sapiens
  CDR3 for alpha chain variable domain of TCR clone 371923 (TRAV13-2, TRAJ40)
RAEFTSGTYKYIF

SEQ ID NO: 743846 - protein, 14 aa, Homo sapiens
  CDR3 for beta chain variable domain of TCR clone 371923 (TRBV10-2, TRBJ1-5)
CASSSTGRNQPQHF

SEQ ID NO: 743847 - protein, 12 aa, Homo sapiens
  CDR3 for alpha chain variable domain of TCR clone 371924 (TRAV12-2, TRAJ10)
WGVTGGGNKLTF

SEQ ID NO: 743848 - protein, 12 aa, Homo sapiens
  CDR3 for beta chain variable domain of TCR clone 371924 (TRBV19, TRBJ2-7)
CASTSGTYEQYF

SEQ ID NO: 743849 - protein, 13 aa, Homo sapiens
  CDR3 for alpha chain variable domain of TCR clone 371925 (TRAV21, TRAJ47)
CAVSGLYGNKLVF

SEQ ID NO: 743850 - protein, 17 aa, Homo sapiens
  CDR3 for beta chain variable domain of TCR clone 371925 (TRBV15, TRBJ2-3)
CATSGTTSEEGTDTQCF

SEQ ID NO: 743851 - protein, 14 aa, Homo sapiens
  CDR3 for alpha chain variable domain of TCR clone 371926 (TRAV8-2, TRAJ45)
CVLSAGGGADGLTF

SEQ ID NO: 743852 - protein, 12 aa, Homo sapiens
  CDR3 for beta chain variable domain of TCR clone 371926 (TRBV12-4, TRBJ2-1)
CASSLVRVEQFF

SEQ ID NO: 743853 - protein, 14 aa, Homo sapiens
  CDR3 for alpha chain variable domain of TCR clone 371927 (TRAV13-2, TRAJ9)
CAENSFTGGFKTIF

SEQ ID NO: 743854 - protein, 13 aa, Homo sapiens
  CDR3 for beta chain variable domain of TCR clone 371927 (TRBV19, TRBJ2-7)
CASSIGRTYEQYF

SEQ ID NO: 743855 - protein, 14 aa, Homo sapiens
  CDR3 for alpha chain variable domain of TCR clone 371928 (TRAV13-2, TRAJ17)
CADNSKAAGNKLTF

SEQ ID NO: 743856 - protein, 14 aa, Homo sapiens
  CDR3 for beta chain variable domain of TCR clone 371928 (TRBV19, TRBJ2-1)
CASPTFVLSGEQFF

SEQ ID NO: 743857 - protein, 11 aa, Homo sapiens
  CDR3 for alpha chain variable domain of TCR clone 371929 (TRAV27, TRAJ43)
CAGANNNDMRF

SEQ ID NO: 743858 - protein, 11 aa, Homo sapiens
  CDR3 for beta chain variable domain of TCR clone 371929 (TRBV29-1, TRBJ1-3)
CSVAIGNTIYF

SEQ ID NO: 743859 - protein, 10 aa, Homo sapiens
  CDR3 for alpha chain variable domain of TCR clone 371930 (TRAV17, TRAJ36)
CATVAGNLIF

SEQ ID NO: 743860 - protein, 12 aa, Homo sapiens
  CDR3 for beta chain variable domain of TCR clone 371930 (TRBV11-2, TRBJ2-4)
CASSSASGSEYF

SEQ ID NO: 743861 - protein, 12 aa, Homo sapiens
  CDR3 for alpha chain variable domain of TCR clone 371931 (TRAV16, TRAJ10)
CSRTGGGNKLTF

SEQ ID NO: 743862 - protein, 12 aa, Homo sapiens
  CDR3 for beta chain variable domain of TCR clone 371931 (TRBV7-2, TRBJ2-1)
CASSLRQNEQFF

SEQ ID NO: 743863 - protein, 12 aa, Homo sapiens
  CDR3 for alpha chain variable domain of TCR clone 371932 (TRAV12-2, TRAJ54)
CAVVRGAQKLVF

SEQ ID NO: 743864 - protein, 14 aa, Homo sapiens
  CDR3 for beta chain variable domain of TCR clone 371932 (TRBV7-3, TRBJ1-1)
CASSLKGGNTEAFF

SEQ ID NO: 743865 - protein, 13 aa, Homo sapiens
  CDR3 for alpha chain variable domain of TCR clone 371933 (TRAV1-1, TRAJ11)
CAVRTSGYSTLTF

SEQ ID NO: 743866 - protein, 17 aa, Homo sapiens
  CDR3 for beta chain variable domain of TCR clone 371933 (TRBV5-5, TRBJ1-2)
CASSLGSLDGQSEGYTF

SEQ ID NO: 743867 - protein, 15 aa, Homo sapiens
  CDR3 for alpha chain variable domain of TCR clone 371934 (TRAV6, TRAJ13)
CALGGDSGGYQKGTF

SEQ ID NO: 743868 - protein, 12 aa, Homo sapiens
  CDR3 for beta chain variable domain of TCR clone 371934 (TRBV5-7, TRBJ1-2)
CASSDRIHGYTF

SEQ ID NO: 743869 - protein, 15 aa, Homo sapiens
  CDR3 for alpha chain variable domain of TCR clone 371935 (TRAV3, TRAJ5)
CAVRDRNTGRRALTF

SEQ ID NO: 743870 - protein, 15 aa, Homo sapiens
  CDR3 for beta chain variable domain of TCR clone 371935 (TRBV7-9, TRBJ2-2)
CASGPLDTFPGELFF

SEQ ID NO: 743871 - protein, 15 aa, Homo sapiens
  CDR3 for alpha chain variable domain of TCR clone 371936 (TRAV3, TRAJ22)
CAVRDRGGSARQLTF

SEQ ID NO: 743872 - protein, 14 aa, Homo sapiens
  CDR3 for beta chain variable domain of TCR clone 371936 (TRBV19, TRBJ2-1)
CASSMGSGATEQFF

SEQ ID NO: 743873 - protein, 12 aa, Homo sapiens
  CDR3 for alpha chain variable domain of TCR clone 371937 (TRAV13-2, TRAJ23)
CAERHRGGKLIV

SEQ ID NO: 743874 - protein, 13 aa, Homo sapiens
  CDR3 for beta chain variable domain of TCR clone 371937 (TRBV20-1, TRBJ2-2)
CSALSGGAGELFF

SEQ ID NO: 743875 - protein, 13 aa, Homo sapiens
  CDR3 for alpha chain variable domain of TCR clone 371938 (TRAV17, TRAJ21)
CATDGGNFNKFYF

SEQ ID NO: 743876 - protein, 13 aa, Homo sapiens
  CDR3 for beta chain variable domain of TCR clone 371938 (TRBV19, TRBJ2-7)
CASSIDRTYEQYF

SEQ ID NO: 743877 - protein, 11 aa, Homo sapiens
  CDR3 for alpha chain variable domain of TCR clone 371939 (TRAV3, TRAJ21)
CAVGNFNKFYF

SEQ ID NO: 743878 - protein, 14 aa, Homo sapiens
  CDR3 for beta chain variable domain of TCR clone 371939 (TRBV19, TRBJ2-1)
CASEVTGARNEQFF

SEQ ID NO: 743879 - protein, 13 aa, Homo sapiens
  CDR3 for alpha chain variable domain of TCR clone 371940 (TRAV12-3, TRAJ6)
CAMSAGGSYIPTF

SEQ ID NO: 743880 - protein, 16 aa, Homo sapiens
  CDR3 for beta chain variable domain of TCR clone 371940 (TRBV7-3, TRBJ2-1)
RASSLLVGELVDEQFF

SEQ ID NO: 743881 - protein, 15 aa, Homo sapiens
  CDR3 for alpha chain variable domain of TCR clone 371941 (TRAV26-1, TRAJ39)
CIVRDGSNAGNMPTF

SEQ ID NO: 743882 - protein, 14 aa, Homo sapiens
  CDR3 for beta chain variable domain of TCR clone 371941 (TRBV10-3, TRBJ1-2)
CAIRAGTGDYGYTF

SEQ ID NO: 743883 - protein, 17 aa, Homo sapiens
  CDR3 for alpha chain variable domain of TCR clone 371942 (TRAV3, TRAJ42)
CAVRDRVDGGSQGNLIF

SEQ ID NO: 743884 - protein, 12 aa, Homo sapiens
  CDR3 for beta chain variable domain of TCR clone 371942 (TRBV11-2, TRBJ2-1)
CASSPGNNEQFF

SEQ ID NO: 743885 - protein, 11 aa, Homo sapiens
  CDR3 for alpha chain variable domain of TCR clone 371943 (TRAV2, TRAJ13)
CASGGYQKVTF

SEQ ID NO: 743886 - protein, 14 aa, Homo sapiens
  CDR3 for beta chain variable domain of TCR clone 371943 (TRBV20-1, TRBJ1-1)
CSAMGGTANTEAFF

SEQ ID NO: 743887 - protein, 11 aa, Homo sapiens
  CDR3 for alpha chain variable domain of TCR clone 371944 (TRAV26-1, TRAJ37)
CIVRVGRKLIF

SEQ ID NO: 743888 - protein, 13 aa, Homo sapiens
  CDR3 for beta chain variable domain of TCR clone 371944 (TRBV20-1, TRBJ1-1)
CSARGGGNTEAFF

SEQ ID NO: 743889 - protein, 11 aa, Homo sapiens
  CDR3 for alpha chain variable domain of TCR clone 371945 (TRAV23/DV6, TRAJ58)
CAARLLRGETS

SEQ ID NO: 743890 - protein, 13 aa, Homo sapiens
  CDR3 for beta chain variable domain of TCR clone 371945 (TRBV6-4, TRBJ1-5)
CASSADLNQPQHL

SEQ ID NO: 743891 - protein, 11 aa, Homo sapiens
  CDR3 for alpha chain variable domain of TCR clone 371946 (TRAV2, TRAJ21)
CAVFNFNKFYF

SEQ ID NO: 743892 - protein, 12 aa, Homo sapiens
  CDR3 for beta chain variable domain of TCR clone 371946 (TRBV28, TRBJ2-7)
CASSFSSYEQYF

SEQ ID NO: 743893 - protein, 16 aa, Homo sapiens
  CDR3 for alpha chain variable domain of TCR clone 371947 (TRAV23/DV6, TRAJ9)
CAASIGGNTGGFKTIF

SEQ ID NO: 743894 - protein, 13 aa, Homo sapiens
  CDR3 for beta chain variable domain of TCR clone 371947 (TRBV15, TRBJ1-6)
CATSGGLNSPLHF

SEQ ID NO: 743895 - protein, 16 aa, Homo sapiens
  CDR3 for alpha chain variable domain of TCR clone 371948 (TRAV12-1, TRAJ12)
CVVNTLLMDSSYKLIF

SEQ ID NO: 743896 - protein, 16 aa, Homo sapiens
  CDR3 for beta chain variable domain of TCR clone 371948 (TRBV12-5, TRBJ2-5)
CASGPRTSGNQETQYF

SEQ ID NO: 743897 - protein, 16 aa, Homo sapiens
  CDR3 for alpha chain variable domain of TCR clone 371949 (TRAV26-1, TRAJ37)
CIVRPLGSGNTGKLIF

SEQ ID NO: 743898 - protein, 14 aa, Homo sapiens
  CDR3 for beta chain variable domain of TCR clone 371949 (TRBV7-8, TRBJ1-6)
CASSFSTGNSPLHF

SEQ ID NO: 743899 - protein, 17 aa, Homo sapiens
  CDR3 for alpha chain variable domain of TCR clone 371950 (TRAV3, TRAJ6)
CAVRDGPRAGGSYIPTF

SEQ ID NO: 743900 - protein, 15 aa, Homo sapiens
  CDR3 for beta chain variable domain of TCR clone 371950 (TRBV10-3, TRBJ2-3)
CGISLTSGGTDTQYF

SEQ ID NO: 743901 - protein, 16 aa, Homo sapiens
  CDR3 for alpha chain variable domain of TCR clone 371951 (TRAV38-2/DV8, TRAJ45)
CAYTTTSGGDADGLTF

SEQ ID NO: 743902 - protein, 14 aa, Homo sapiens
  CDR3 for beta chain variable domain of TCR clone 371951 (TRBV7-9, TRBJ2-2)
CASSLWHRTGEMFF

SEQ ID NO: 743903 - protein, 14 aa, Homo sapiens
  CDR3 for alpha chain variable domain of TCR clone 371952 (TRAV2, TRAJ41)
CAVGTSNSGYALNF

SEQ ID NO: 743904 - protein, 13 aa, Homo sapiens
  CDR3 for beta chain variable domain of TCR clone 371952 (TRBV19, TRBJ2-2)
CASSIWSTGELFF

SEQ ID NO: 743905 - protein, 14 aa, Homo sapiens
  CDR3 for alpha chain variable domain of TCR clone 371953 (TRAV26-1, TRAJ38)
CIADNPGNNRKLIW

SEQ ID NO: 743906 - protein, 13 aa, Homo sapiens
  CDR3 for beta chain variable domain of TCR clone 371953 (TRBV6-5, TRBJ2-5)
CATAPSPQETQYF

SEQ ID NO: 743907 - protein, 16 aa, Homo sapiens
  CDR3 for alpha chain variable domain of TCR clone 371954 (TRAV30, TRAJ24)
CGTEIVDADSRGKFQF

SEQ ID NO: 743908 - protein, 13 aa, Homo sapiens
  CDR3 for beta chain variable domain of TCR clone 371954 (TRBV11-2, TRBJ2-5)
CASSSTGEETQYF

SEQ ID NO: 743909 - protein, 17 aa, Homo sapiens
  CDR3 for alpha chain variable domain of TCR clone 371955 (TRAV3, TRAJ6)
CAARYGPRAGGSYIPTF

SEQ ID NO: 743910 - protein, 14 aa, Homo sapiens
  CDR3 for beta chain variable domain of TCR clone 371955 (TRBV7-2, TRBJ2-7)
CASSPKTSFYEQYF

SEQ ID NO: 743911 - protein, 10 aa, Homo sapiens
  CDR3 for alpha chain variable domain of TCR clone 371956 (TRAV1-1, TRAJ5)
CAVIRRALTF

SEQ ID NO: 743912 - protein, 15 aa, Homo sapiens
  CDR3 for beta chain variable domain of TCR clone 371956 (TRBV4-1, TRBJ1-4)
CASSDTGGTNEKLFF

SEQ ID NO: 743913 - protein, 15 aa, Homo sapiens
  CDR3 for alpha chain variable domain of TCR clone 371957 (TRAV17, TRAJ22)
CATGAPSGSARQLTF

SEQ ID NO: 743914 - protein, 14 aa, Homo sapiens
  CDR3 for beta chain variable domain of TCR clone 371957 (TRBV4-1, TRBJ2-2)
CASSQAVNTGELFF

SEQ ID NO: 743915 - protein, 15 aa, Homo sapiens
  CDR3 for alpha chain variable domain of TCR clone 371958 (TRAV26-1, TRAJ17)
CIVRVVKAAGNKLTF

SEQ ID NO: 743916 - protein, 20 aa, Homo sapiens
  CDR3 for beta chain variable domain of TCR clone 371958 (TRBV28, TRBJ2-1)
CASTPIGRSPGLAGGNEQFV

SEQ ID NO: 743917 - protein, 13 aa, Homo sapiens
  CDR3 for alpha chain variable domain of TCR clone 371959 (TRAV3, TRAJ20)
CCEAFCNDYKLSF

SEQ ID NO: 743918 - protein, 14 aa, Homo sapiens
  CDR3 for beta chain variable domain of TCR clone 371959 (TRBV5-4, TRBJ1-1)
CASSLDSRRDEAFF

SEQ ID NO: 743919 - protein, 20 aa, Homo sapiens
  CDR3 for alpha chain variable domain of TCR clone 371960 (TRAV25, TRAJ21)
TATQTTDVGTYPLSFNKFYF

SEQ ID NO: 743920 - protein, 16 aa, Homo sapiens
  CDR3 for beta chain variable domain of TCR clone 371960 (TRBV7-2, TRBJ2-5)
CASSPFPTGGEETQYF

SEQ ID NO: 743921 - protein, 11 aa, Homo sapiens
  CDR3 for alpha chain variable domain of TCR clone 371961 (TRAV30, TRAJ24)
WMLTAGGKFQF

SEQ ID NO: 743922 - protein, 16 aa, Homo sapiens
  CDR3 for beta chain variable domain of TCR clone 371961 (TRBV6-3, TRBJ1-1)
CASTDLGTVPNTEAFF

SEQ ID NO: 743923 - protein, 15 aa, Homo sapiens
  CDR3 for alpha chain variable domain of TCR clone 371962 (TRAV13-1, TRAJ52)
CAATSPRTSYGKLTF

SEQ ID NO: 743924 - protein, 12 aa, Homo sapiens
  CDR3 for beta chain variable domain of TCR clone 371962 (TRBV7-8, TRBJ2-7)
CASSLGDREQYL

SEQ ID NO: 743925 - protein, 15 aa, Homo sapiens
  CDR3 for alpha chain variable domain of TCR clone 371963 (TRAV26-1, TRAJ29)
CIVRVEGSGNTPLVF

SEQ ID NO: 743926 - protein, 15 aa, Homo sapiens
  CDR3 for beta chain variable domain of TCR clone 371963 (TRBV28, TRBJ2-5)
CASSPGQGSIETHYF

SEQ ID NO: 743927 - protein, 13 aa, Homo sapiens
  CDR3 for alpha chain variable domain of TCR clone 371964 (TRAV14/DV4, TRAJ20)
CALREGRDYKLSF

SEQ ID NO: 743928 - protein, 12 aa, Homo sapiens
  CDR3 for beta chain variable domain of TCR clone 371964 (TRBV12-4, TRBJ2-1)
CASSLVRVEQFF

SEQ ID NO: 743929 - protein, 13 aa, Homo sapiens
  CDR3 for alpha chain variable domain of TCR clone 371965 (TRAV2, TRAJ40)
CAVVTSGTYKYIF

SEQ ID NO: 743930 - protein, 14 aa, Homo sapiens
  CDR3 for beta chain variable domain of TCR clone 371965 (TRBV19, TRBJ2-1)
CAIPTFVLSGEKFF

SEQ ID NO: 743931 - protein, 14 aa, Homo sapiens
  CDR3 for alpha chain variable domain of TCR clone 371966 (TRAV8-3, TRAJ35)
CAVVPQGLGNVLHC

SEQ ID NO: 743932 - protein, 15 aa, Homo sapiens
  CDR3 for beta chain variable domain of TCR clone 371966 (TRBV6-1, TRBJ2-2)
CASSAGQGYTGELVF

SEQ ID NO: 743933 - protein, 15 aa, Homo sapiens
  CDR3 for alpha chain variable domain of TCR clone 371967 (TRAV3, TRAJ32)
CAVSSYGGAKNKLIF

SEQ ID NO: 743934 - protein, 14 aa, Homo sapiens
  CDR3 for beta chain variable domain of TCR clone 371967 (TRBV20-1, TRBJ1-4)
CSARDGSGWEKLFF

SEQ ID NO: 743935 - protein, 14 aa, Homo sapiens
  CDR3 for alpha chain variable domain of TCR clone 371968 (TRAV27, TRAJ23)
CAGLSYNQGGKLIF

SEQ ID NO: 743936 - protein, 14 aa, Homo sapiens
  CDR3 for beta chain variable domain of TCR clone 371968 (TRBV7-6, TRBJ2-3)
CASSLGTVTDTQYF

SEQ ID NO: 743937 - protein, 14 aa, Homo sapiens
  CDR3 for alpha chain variable domain of TCR clone 371969 (TRAV30, TRAJ33)
CGTVAPRSNYQLIW

SEQ ID NO: 743938 - protein, 15 aa, Homo sapiens
  CDR3 for beta chain variable domain of TCR clone 371969 (TRBV20-1, TRBJ2-7)
CGARDRVSGMDEQYF

SEQ ID NO: 743939 - protein, 11 aa, Homo sapiens
  CDR3 for alpha chain variable domain of TCR clone 371970 (TRAV3, TRAJ21)
CAVGNFNKFYF

SEQ ID NO: 743940 - protein, 13 aa, Homo sapiens
  CDR3 for beta chain variable domain of TCR clone 371970 (TRBV7-9, TRBJ1-2)
CASSLKQNNGYTF

SEQ ID NO: 743941 - protein, 16 aa, Homo sapiens
  CDR3 for alpha chain variable domain of TCR clone 371971 (TRAV16, TRAJ52)
CALSGVGGTSYGKLTF

SEQ ID NO: 743942 - protein, 15 aa, Homo sapiens
  CDR3 for beta chain variable domain of TCR clone 371971 (TRBV24-1, TRBJ2-7)
TSVPSVVGVSYEQYF

SEQ ID NO: 743943 - protein, 14 aa, Homo sapiens
  CDR3 for alpha chain variable domain of TCR clone 371972 (TRAV26-1, TRAJ38)
FISDNAGNNRKLIW

SEQ ID NO: 743944 - protein, 13 aa, Homo sapiens
  CDR3 for beta chain variable domain of TCR clone 371972 (TRBV20-1, TRBJ1-1)
CSARGGGNTEAFF

SEQ ID NO: 743945 - protein, 16 aa, Homo sapiens
  CDR3 for alpha chain variable domain of TCR clone 371973 (TRAV23/DV6, TRAJ9)
CAASVGGNTGGFKTIF

SEQ ID NO: 743946 - protein, 18 aa, Homo sapiens
  CDR3 for beta chain variable domain of TCR clone 371973 (TRBV2, TRBJ2-3)
CASSEAGGQALGADTQYF

SEQ ID NO: 743947 - protein, 14 aa, Homo sapiens
  CDR3 for alpha chain variable domain of TCR clone 371974 (TRAV21, TRAJ38)
CAVMGAGNNRKLIW

SEQ ID NO: 743948 - protein, 16 aa, Homo sapiens
  CDR3 for beta chain variable domain of TCR clone 371974 (TRBV7-8, TRBJ2-4)
CASSAERTLAKNIQYF

SEQ ID NO: 743949 - protein, 18 aa, Homo sapiens
  CDR3 for alpha chain variable domain of TCR clone 371975 (TRAV21, TRAJ52)
CAVRPSPAGGTSYGKLTF

SEQ ID NO: 743950 - protein, 13 aa, Homo sapiens
  CDR3 for beta chain variable domain of TCR clone 371975 (TRBV7-9, TRBJ1-1)
CASSLAGVTEAFF

SEQ ID NO: 743951 - protein, 15 aa, Homo sapiens
  CDR3 for alpha chain variable domain of TCR clone 371976 (TRAV2, TRAJ9)
CAVAALNTGGFKTIF

SEQ ID NO: 743952 - protein, 12 aa, Homo sapiens
  CDR3 for beta chain variable domain of TCR clone 371976 (TRBV28, TRBJ2-3)
CASSLYRDTQYF

SEQ ID NO: 743953 - protein, 17 aa, Homo sapiens
  CDR3 for alpha chain variable domain of TCR clone 371977 (TRAV1-1, TRAJ4)
CALYNKLIFGAGTRLAV

SEQ ID NO: 743954 - protein, 15 aa, Homo sapiens
  CDR3 for beta chain variable domain of TCR clone 371977 (TRBV7-3, TRBJ2-1)
CASSPTGGGEVEQFF

SEQ ID NO: 743955 - protein, 11 aa, Homo sapiens
  CDR3 for alpha chain variable domain of TCR clone 371978 (TRAV20, TRAJ39)
CAVSAGNMLTF

SEQ ID NO: 743956 - protein, 15 aa, Homo sapiens
  CDR3 for beta chain variable domain of TCR clone 371978 (TRBV7-3, TRBJ2-1)
CASSMSGTRANEQFF

SEQ ID NO: 743957 - protein, 15 aa, Homo sapiens
  CDR3 for alpha chain variable domain of TCR clone 371979 (TRAV8-4, TRAJ12)
CAVSDRVDSSYKLIF

SEQ ID NO: 743958 - protein, 15 aa, Homo sapiens
  CDR3 for beta chain variable domain of TCR clone 371979 (TRBV6-1, TRBJ2-1)
CASTLRVQAGSEQFF

SEQ ID NO: 743959 - protein, 14 aa, Homo sapiens
  CDR3 for alpha chain variable domain of TCR clone 371980 (TRAV38-1, TRAJ40)
CALRPTSGTYKYIF

SEQ ID NO: 743960 - protein, 14 aa, Homo sapiens
  CDR3 for beta chain variable domain of TCR clone 371980 (TRBV25-1, TRBJ1-1)
CASPHLGGNTEALF

SEQ ID NO: 743961 - protein, 11 aa, Homo sapiens
  CDR3 for alpha chain variable domain of TCR clone 371981 (TRAV12-1, TRAJ34)
CVVNKGRELIF

SEQ ID NO: 743962 - protein, 12 aa, Homo sapiens
  CDR3 for beta chain variable domain of TCR clone 371981 (TRBV28, TRBJ2-6)
CAIQAGANVLTF

SEQ ID NO: 743963 - protein, 11 aa, Homo sapiens
  CDR3 for alpha chain variable domain of TCR clone 371982 (TRAV17, TRAJ39)
RATNPYNMLTF

SEQ ID NO: 743964 - protein, 13 aa, Homo sapiens
  CDR3 for beta chain variable domain of TCR clone 371982 (TRBV7-8, TRBJ2-1)
CASTRDAVDEQFF

SEQ ID NO: 743965 - protein, 15 aa, Homo sapiens
  CDR3 for alpha chain variable domain of TCR clone 371983 (TRAV8-4, TRAJ3)
CAVTGENLVQQCFQD

SEQ ID NO: 743966 - protein, 15 aa, Homo sapiens
  CDR3 for beta chain variable domain of TCR clone 371983 (TRBV20-1, TRBJ2-7)
CSARKGLAESYEQYF

SEQ ID NO: 743967 - protein, 17 aa, Homo sapiens
  CDR3 for alpha chain variable domain of TCR clone 371984 (TRAV35, TRAJ52)
CAGQLAAGGTSYGKLTF

SEQ ID NO: 743968 - protein, 12 aa, Homo sapiens
  CDR3 for beta chain variable domain of TCR clone 371984 (TRBV20-1, TRBJ2-7)
CSAGRRQSEKYF

SEQ ID NO: 743969 - protein, 18 aa, Homo sapiens
  CDR3 for alpha chain variable domain of TCR clone 371985 (TRAV21, TRAJ52)
CAVRPSPAGGTSYGKLTF

SEQ ID NO: 743970 - protein, 15 aa, Homo sapiens
  CDR3 for beta chain variable domain of TCR clone 371985 (TRBV20-1, TRBJ1-5)
CSAFKNGQRNRPQHF

SEQ ID NO: 743971 - protein, 16 aa, Homo sapiens
  CDR3 for alpha chain variable domain of TCR clone 371986 (TRAV13-1, TRAJ17)
CAASKGVKAAGNKLTF

SEQ ID NO: 743972 - protein, 16 aa, Homo sapiens
  CDR3 for beta chain variable domain of TCR clone 371986 (TRBV12-4, TRBJ1-3)
CASSPRTGRSGNTIYF

SEQ ID NO: 743973 - protein, 12 aa, Homo sapiens
  CDR3 for alpha chain variable domain of TCR clone 371987 (TRAV13-2, TRAJ23)
CAERQRGGKLIF

SEQ ID NO: 743974 - protein, 13 aa, Homo sapiens
  CDR3 for beta chain variable domain of TCR clone 371987 (TRBV15, TRBJ2-7)
CATSTTGHYEQYF

SEQ ID NO: 743975 - protein, 17 aa, Homo sapiens
  CDR3 for alpha chain variable domain of TCR clone 371988 (TRAV3, TRAJ6)
CAVRDGTRAGGSYIPPF

SEQ ID NO: 743976 - protein, 14 aa, Homo sapiens
  CDR3 for beta chain variable domain of TCR clone 371988 (TRBV7-2, TRBJ2-7)
CASSPKTSFYEQYF

SEQ ID NO: 743977 - protein, 15 aa, Homo sapiens
  CDR3 for alpha chain variable domain of TCR clone 371989 (TRAV27, TRAJ38)
CAARRNAGNNRKLSG

SEQ ID NO: 743978 - protein, 13 aa, Homo sapiens
  CDR3 for beta chain variable domain of TCR clone 371989 (TRBV12-5, TRBJ2-3)
CASGERQSDTQYF

SEQ ID NO: 743979 - protein, 14 aa, Homo sapiens
  CDR3 for alpha chain variable domain of TCR clone 371990 (TRAV12-2, TRAJ40)
CAVKIPAGTYKYIF

SEQ ID NO: 743980 - protein, 15 aa, Homo sapiens
  CDR3 for beta chain variable domain of TCR clone 371990 (TRBV20-1, TRBJ2-7)
CSARDQVSGMDEQYF

SEQ ID NO: 743981 - protein, 12 aa, Homo sapiens
  CDR3 for alpha chain variable domain of TCR clone 371991 (TRAV30, TRAJ43)
CGTEERGNDMRF

SEQ ID NO: 743982 - protein, 15 aa, Homo sapiens
  CDR3 for beta chain variable domain of TCR clone 371991 (TRBV20-1, TRBJ2-7)
CSARDRVSGMDEQYF

SEQ ID NO: 743983 - protein, 17 aa, Homo sapiens
  CDR3 for alpha chain variable domain of TCR clone 371992 (TRAV8-6, TRAJ58)
CAVSSWVGETSGSRLTF

SEQ ID NO: 743984 - protein, 17 aa, Homo sapiens
  CDR3 for beta chain variable domain of TCR clone 371992 (TRBV4-3, TRBJ1-2)
CASSSRLQAGGSDGYTF

SEQ ID NO: 743985 - protein, 13 aa, Homo sapiens
  CDR3 for alpha chain variable domain of TCR clone 371993 (TRAV2, TRAJ40)
CAVVTSGTYKYIF

SEQ ID NO: 743986 - protein, 16 aa, Homo sapiens
  CDR3 for beta chain variable domain of TCR clone 371993 (TRBV7-2, TRBJ2-7)
CASSLVMGVGSYEQYF

SEQ ID NO: 743987 - protein, 14 aa, Homo sapiens
  CDR3 for alpha chain variable domain of TCR clone 371994 (TRAV13-1, TRAJ3)
CAASKSSSASKIIF

SEQ ID NO: 743988 - protein, 14 aa, Homo sapiens
  CDR3 for beta chain variable domain of TCR clone 371994 (TRBV19, TRBJ2-1)
CASPTFVLSGEQFF

SEQ ID NO: 743989 - protein, 10 aa, Homo sapiens
  CDR3 for alpha chain variable domain of TCR clone 371995 (TRAV36/DV7, TRAJ48)
CAVGNEKLTF

SEQ ID NO: 743990 - protein, 13 aa, Homo sapiens
  CDR3 for beta chain variable domain of TCR clone 371995 (TRBV28, TRBJ2-7)
CASTPGLAGEQYF

SEQ ID NO: 743991 - protein, 19 aa, Homo sapiens
  CDR3 for alpha chain variable domain of TCR clone 371996 (TRAV25, TRAJ20)
TATQTTDIGILPHDYKLSF

SEQ ID NO: 743992 - protein, 15 aa, Homo sapiens
  CDR3 for beta chain variable domain of TCR clone 371996 (TRBV6-6, TRBJ1-5)
CASSSIQGTNQPQHF

SEQ ID NO: 743993 - protein, 11 aa, Homo sapiens
  CDR3 for alpha chain variable domain of TCR clone 371997 (TRAV2, TRAJ33)
CAVESNYQLIW

SEQ ID NO: 743994 - protein, 13 aa, Homo sapiens
  CDR3 for beta chain variable domain of TCR clone 371997 (TRBV7-3, TRBJ1-2)
CASSLKRGDGYTF

SEQ ID NO: 743995 - protein, 12 aa, Homo sapiens
  CDR3 for alpha chain variable domain of TCR clone 371998 (TRAV12-1, TRAJ40)
CVVYSGTYKYIF

SEQ ID NO: 743996 - protein, 12 aa, Homo sapiens
  CDR3 for beta chain variable domain of TCR clone 371998 (TRBV2, TRBJ2-1)
CAKREGYNEQFF

SEQ ID NO: 743997 - protein, 14 aa, Homo sapiens
  CDR3 for alpha chain variable domain of TCR clone 371999 (TRAV12-3, TRAJ54)
CAMRGIQGAQKLVF

SEQ ID NO: 743998 - protein, 13 aa, Homo sapiens
  CDR3 for beta chain variable domain of TCR clone 371999 (TRBV19, TRBJ1-1)
CSSSPSNGGEAFF

SEQ ID NO: 743999 - protein, 14 aa, Homo sapiens
  CDR3 for alpha chain variable domain of TCR clone 372000 (TRAV16, TRAJ15)
CALSFNQAGTDLIF

SEQ ID NO: 744000 - protein, 16 aa, Homo sapiens
  CDR3 for beta chain variable domain of TCR clone 372000 (TRBV9, TRBJ2-7)
CASSAGPDRSPYEQYF

SEQ ID NO: 744001 - protein, 14 aa, Homo sapiens
  CDR3 for alpha chain variable domain of TCR clone 372001 (TRAV23/DV6, TRAJ6)
CAASRSGGRHIPTF

SEQ ID NO: 744002 - protein, 17 aa, Homo sapiens
  CDR3 for beta chain variable domain of TCR clone 372001 (TRBV20-1, TRBJ2-1)
CSASASGLAGSYNEQFF

SEQ ID NO: 744003 - protein, 14 aa, Homo sapiens
  CDR3 for alpha chain variable domain of TCR clone 372002 (TRAV1-2, TRAJ15)
CAVRDRQAGTALIC

SEQ ID NO: 744004 - protein, 15 aa, Homo sapiens
  CDR3 for beta chain variable domain of TCR clone 372002 (TRBV7-2, TRBJ2-1)
CASSLASGRVDEQFF

SEQ ID NO: 744005 - protein, 15 aa, Homo sapiens
  CDR3 for alpha chain variable domain of TCR clone 372003 (TRAV17, TRAJ35)
CATAVVIGLGNVLHG

SEQ ID NO: 744006 - protein, 16 aa, Homo sapiens
  CDR3 for beta chain variable domain of TCR clone 372003 (TRBV11-2, TRBJ2-7)
CASSPLAGGPRYEQYF

SEQ ID NO: 744007 - protein, 17 aa, Homo sapiens
  CDR3 for alpha chain variable domain of TCR clone 372004 (TRAV26-2, TRAJ42)
CILRDVGYGGSQGNLIF

SEQ ID NO: 744008 - protein, 16 aa, Homo sapiens
  CDR3 for beta chain variable domain of TCR clone 372004 (TRBV12-4, TRBJ2-7)
CASSLIGGTGTYEKYF

SEQ ID NO: 744009 - protein, 18 aa, Homo sapiens
  CDR3 for alpha chain variable domain of TCR clone 372005 (TRAV26-1, TRAJ23)
CIVRVGLEVWNQGGKLIF

SEQ ID NO: 744010 - protein, 14 aa, Homo sapiens
  CDR3 for beta chain variable domain of TCR clone 372005 (TRBV18, TRBJ2-7)
CASSPRGGAYEQYF

SEQ ID NO: 744011 - protein, 12 aa, Homo sapiens
  CDR3 for alpha chain variable domain of TCR clone 372006 (TRAV8-3, TRAJ6)
CAVAGGSYIPTF

SEQ ID NO: 744012 - protein, 14 aa, Homo sapiens
  CDR3 for beta chain variable domain of TCR clone 372006 (TRBV27, TRBJ2-7)
CASATGTGRREQYF

SEQ ID NO: 744013 - protein, 16 aa, Homo sapiens
  CDR3 for alpha chain variable domain of TCR clone 372007 (TRAV30, TRAJ24)
CGTEIVDADSRGKFQF

SEQ ID NO: 744014 - protein, 14 aa, Homo sapiens
  CDR3 for beta chain variable domain of TCR clone 372007 (TRBV12-5, TRBJ2-5)
CASGSRAHQETQYF

SEQ ID NO: 744015 - protein, 14 aa, Homo sapiens
  CDR3 for alpha chain variable domain of TCR clone 372008 (TRAV12-2, TRAJ44)
CAVNPAGTASKLTF

SEQ ID NO: 744016 - protein, 15 aa, Homo sapiens
  CDR3 for beta chain variable domain of TCR clone 372008 (TRBV5-1, TRBJ2-7)
CASSLDLTSSYEQYF

SEQ ID NO: 744017 - protein, 14 aa, Homo sapiens
  CDR3 for alpha chain variable domain of TCR clone 372009 (TRAV10, TRAJ48)
CVGIFHFGNEKLTF

SEQ ID NO: 744018 - protein, 13 aa, Homo sapiens
  CDR3 for beta chain variable domain of TCR clone 372009 (TRBV4-1, TRBJ2-7)
CASSQGQAYEQYF

SEQ ID NO: 744019 - protein, 15 aa, Homo sapiens
  CDR3 for alpha chain variable domain of TCR clone 372010 (TRAV35, TRAJ50)
CAGQLRKTSYDKMIF

SEQ ID NO: 744020 - protein, 12 aa, Homo sapiens
  CDR3 for beta chain variable domain of TCR clone 372010 (TRBV5-1, TRBJ2-5)
CASSLGLETQYF

SEQ ID NO: 744021 - protein, 11 aa, Homo sapiens
  CDR3 for alpha chain variable domain of TCR clone 372011 (TRAV21, TRAJ34)
CAVTNTDKLIL

SEQ ID NO: 744022 - protein, 16 aa, Homo sapiens
  CDR3 for beta chain variable domain of TCR clone 372011 (TRBV20-1, TRBJ1-4)
CSAPGQGLLTNEKLFF

SEQ ID NO: 744023 - protein, 14 aa, Homo sapiens
  CDR3 for alpha chain variable domain of TCR clone 372012 (TRAV17, TRAJ54)
CATYAHQGAQKLVF

SEQ ID NO: 744024 - protein, 12 aa, Homo sapiens
  CDR3 for beta chain variable domain of TCR clone 372012 (TRBV6-3, TRBJ2-1)
CASSGSYNEQFF

SEQ ID NO: 744025 - protein, 13 aa, Homo sapiens
  CDR3 for alpha chain variable domain of TCR clone 372013 (TRAV16, TRAJ31)
CALSAHNNARLMF

SEQ ID NO: 744026 - protein, 13 aa, Homo sapiens
  CDR3 for beta chain variable domain of TCR clone 372013 (TRBV19, TRBJ1-2)
CASSVPGHNGYTF

SEQ ID NO: 744027 - protein, 16 aa, Homo sapiens
  CDR3 for alpha chain variable domain of TCR clone 372014 (TRAV8-3, TRAJ42)
CAVGEGNGGSQGNLIF

SEQ ID NO: 744028 - protein, 15 aa, Homo sapiens
  CDR3 for beta chain variable domain of TCR clone 372014 (TRBV7-2, TRBJ1-5)
CASSSGQGHAQPQHF

SEQ ID NO: 744029 - protein, 13 aa, Homo sapiens
  CDR3 for alpha chain variable domain of TCR clone 372015 (TRAV34, TRAJ22)
CGAGAGFARQLTF

SEQ ID NO: 744030 - protein, 16 aa, Homo sapiens
  CDR3 for beta chain variable domain of TCR clone 372015 (TRBV7-3, TRBJ2-1)
CASSKPLAGGYNEQFF

SEQ ID NO: 744031 - protein, 11 aa, Homo sapiens
  CDR3 for alpha chain variable domain of TCR clone 372016 (TRAV2, TRAJ13)
CASGGYQKFTF

SEQ ID NO: 744032 - protein, 13 aa, Homo sapiens
  CDR3 for beta chain variable domain of TCR clone 372016 (TRBV20-1, TRBJ1-1)
CSARVGGNTEAFF

SEQ ID NO: 744033 - protein, 15 aa, Homo sapiens
  CDR3 for alpha chain variable domain of TCR clone 372017 (TRAV13-1, TRAJ10)
CAATILTGGGNKLTF

SEQ ID NO: 744034 - protein, 15 aa, Homo sapiens
  CDR3 for beta chain variable domain of TCR clone 372017 (TRBV2, TRBJ2-7)
CASTLLGSGATEQCF

SEQ ID NO: 744035 - protein, 14 aa, Homo sapiens
  CDR3 for alpha chain variable domain of TCR clone 372018 (TRAV16, TRAJ54)
CALILIQGAQKLVS

SEQ ID NO: 744036 - protein, 15 aa, Homo sapiens
  CDR3 for beta chain variable domain of TCR clone 372018 (TRBV20-1, TRBJ2-7)
CSARDRVSGMDEQYF

SEQ ID NO: 744037 - protein, 16 aa, Homo sapiens
  CDR3 for alpha chain variable domain of TCR clone 372019 (TRAV26-1, TRAJ42)
CIVRPIMEEAKENSSF

SEQ ID NO: 744038 - protein, 16 aa, Homo sapiens
  CDR3 for beta chain variable domain of TCR clone 372019 (TRBV7-3, TRBJ2-2)
CASSLKRGTLSGELFF

SEQ ID NO: 744039 - protein, 14 aa, Homo sapiens
  CDR3 for alpha chain variable domain of TCR clone 372020 (TRAV38-1, TRAJ45)
CAYYSGGGADGLTF

SEQ ID NO: 744040 - protein, 13 aa, Homo sapiens
  CDR3 for beta chain variable domain of TCR clone 372020 (TRBV11-2, TRBJ1-3)
CASSPTGGNTIYF

SEQ ID NO: 744041 - protein, 15 aa, Homo sapiens
  CDR3 for alpha chain variable domain of TCR clone 372021 (TRAV12-2, TRAJ53)
CAVNGGGGSNYKLTF

SEQ ID NO: 744042 - protein, 16 aa, Homo sapiens
  CDR3 for beta chain variable domain of TCR clone 372021 (TRBV4-1, TRBJ2-3)
CASSQSTSGAEDTQYF

SEQ ID NO: 744043 - protein, 17 aa, Homo sapiens
  CDR3 for alpha chain variable domain of TCR clone 372022 (TRAV38-1, TRAJ45)
CAFMKPYMGGGADGLTF

SEQ ID NO: 744044 - protein, 13 aa, Homo sapiens
  CDR3 for beta chain variable domain of TCR clone 372022 (TRBV2, TRBJ1-4)
CASSERAGEKLFF

SEQ ID NO: 744045 - protein, 14 aa, Homo sapiens
  CDR3 for alpha chain variable domain of TCR clone 372023 (TRAV12-2, TRAJ17)
LAVLFKAAGNKLTF

SEQ ID NO: 744046 - protein, 17 aa, Homo sapiens
  CDR3 for beta chain variable domain of TCR clone 372023 (TRBV20-1, TRBJ2-2)
CSASRSGQGGLTGELFF

SEQ ID NO: 744047 - protein, 22 aa, Homo sapiens
  CDR3 for alpha chain variable domain of TCR clone 372024 (TRAV1-1, TRAJ39)
CAVRAPLIMQATCSPWRGNEVN

SEQ ID NO: 744048 - protein, 13 aa, Homo sapiens
  CDR3 for beta chain variable domain of TCR clone 372024 (TRBV12-4, TRBJ1-5)
CASSPDRAQPQHF

SEQ ID NO: 744049 - protein, 14 aa, Homo sapiens
  CDR3 for alpha chain variable domain of TCR clone 372025 (TRAV1-2, TRAJ8)
CAVREDTGFQKLVF

SEQ ID NO: 744050 - protein, 15 aa, Homo sapiens
  CDR3 for beta chain variable domain of TCR clone 372025 (TRBV27, TRBJ2-1)
CASRNGGGSSNEQFF

SEQ ID NO: 744051 - protein, 14 aa, Homo sapiens
  CDR3 for alpha chain variable domain of TCR clone 372026 (TRAV1-2, TRAJ16)
CAFNRFSDGQKLLF

SEQ ID NO: 744052 - protein, 13 aa, Homo sapiens
  CDR3 for beta chain variable domain of TCR clone 372026 (TRBV6-5, TRBJ1-1)
QTSVYFCALRAFF

SEQ ID NO: 744053 - protein, 18 aa, Homo sapiens
  CDR3 for alpha chain variable domain of TCR clone 372027 (TRAV21, TRAJ52)
CAVRPSPAGGTSHGRLTF

SEQ ID NO: 744054 - protein, 15 aa, Homo sapiens
  CDR3 for beta chain variable domain of TCR clone 372027 (TRBV20-1, TRBJ1-5)
CSAFKNGQRNQPQHF

SEQ ID NO: 744055 - protein, 10 aa, Homo sapiens
  CDR3 for alpha chain variable domain of TCR clone 372028 (TRAV38-2/DV8, TRAJ40)
CASGTYKYIF

SEQ ID NO: 744056 - protein, 14 aa, Homo sapiens
  CDR3 for beta chain variable domain of TCR clone 372028 (TRBV7-9, TRBJ2-1)
CASSPRDSFYEQFF

SEQ ID NO: 744057 - protein, 12 aa, Homo sapiens
  CDR3 for alpha chain variable domain of TCR clone 372029 (TRAV21, TRAJ20)
CCVSEGRLKLSF

SEQ ID NO: 744058 - protein, 13 aa, Homo sapiens
  CDR3 for beta chain variable domain of TCR clone 372029 (TRBV6-1, TRBJ1-1)
CASSRQGNTEAFF

SEQ ID NO: 744059 - protein, 13 aa, Homo sapiens
  CDR3 for alpha chain variable domain of TCR clone 372030 (TRAV13-2, TRAJ15)
CAEKNQAGTALIF

SEQ ID NO: 744060 - protein, 15 aa, Homo sapiens
  CDR3 for beta chain variable domain of TCR clone 372030 (TRBV29-1, TRBJ2-5)
CSVPPGQGARETQYF

SEQ ID NO: 744061 - protein, 14 aa, Homo sapiens
  CDR3 for alpha chain variable domain of TCR clone 372031 (TRAV1-2, TRAJ6)
CAVSLSGGSYIPTF

SEQ ID NO: 744062 - protein, 15 aa, Homo sapiens
  CDR3 for beta chain variable domain of TCR clone 372031 (TRBV12-4, TRBJ2-5)
CASSGTGQAQETQYF

SEQ ID NO: 744063 - protein, 14 aa, Homo sapiens
  CDR3 for alpha chain variable domain of TCR clone 372032 (TRAV1-2, TRAJ16)
CAVNRFSDGQKLLF

SEQ ID NO: 744064 - protein, 14 aa, Homo sapiens
  CDR3 for beta chain variable domain of TCR clone 372032 (TRBV12-4, TRBJ1-1)
CASSLRSSGTEAFF

SEQ ID NO: 744065 - protein, 14 aa, Homo sapiens
  CDR3 for alpha chain variable domain of TCR clone 372033 (TRAV16, TRAJ33)
CALSAMDSNYQLIW

SEQ ID NO: 744066 - protein, 12 aa, Homo sapiens
  CDR3 for beta chain variable domain of TCR clone 372033 (TRBV5-1, TRBJ1-2)
CASSQDTYGYTI

SEQ ID NO: 744067 - protein, 12 aa, Homo sapiens
  CDR3 for alpha chain variable domain of TCR clone 372034 (TRAV8-3, TRAJ26)
YAGDNYGQNFVF

SEQ ID NO: 744068 - protein, 15 aa, Homo sapiens
  CDR3 for beta chain variable domain of TCR clone 372034 (TRBV9, TRBJ2-1)
CASSLAGSSYNEQFF

SEQ ID NO: 744069 - protein, 14 aa, Homo sapiens
  CDR3 for alpha chain variable domain of TCR clone 372035 (TRAV9-2, TRAJ39)
CALYIYNAGNMLTF

SEQ ID NO: 744070 - protein, 16 aa, Homo sapiens
  CDR3 for beta chain variable domain of TCR clone 372035 (TRBV7-3, TRBJ2-1)
CASSLVSGSSNNEQFF

SEQ ID NO: 744071 - protein, 17 aa, Homo sapiens
  CDR3 for alpha chain variable domain of TCR clone 372036 (TRAV3, TRAJ42)
CALRDRDYGGSQGNLIF

SEQ ID NO: 744072 - protein, 13 aa, Homo sapiens
  CDR3 for beta chain variable domain of TCR clone 372036 (TRBV10-2, TRBJ2-7)
CASGASGGYEQYF

SEQ ID NO: 744073 - protein, 14 aa, Homo sapiens
  CDR3 for alpha chain variable domain of TCR clone 372037 (TRAV12-3, TRAJ42)
CAMNYGGSQGNLIF

SEQ ID NO: 744074 - protein, 15 aa, Homo sapiens
  CDR3 for beta chain variable domain of TCR clone 372037 (TRBV7-3, TRBJ2-1)
CASSPTGGGEVEQFF

SEQ ID NO: 744075 - protein, 15 aa, Homo sapiens
  CDR3 for alpha chain variable domain of TCR clone 372038 (TRAV29/DV5, TRAJ29)
CAASERSSGNTPLVF

SEQ ID NO: 744076 - protein, 17 aa, Homo sapiens
  CDR3 for beta chain variable domain of TCR clone 372038 (TRBV15, TRBJ1-2)
CATSGREIDVVNYGYTF

SEQ ID NO: 744077 - protein, 16 aa, Homo sapiens
  CDR3 for alpha chain variable domain of TCR clone 372039 (TRAV30, TRAJ24)
CGTEIVDADSWGKFQF

SEQ ID NO: 744078 - protein, 13 aa, Homo sapiens
  CDR3 for beta chain variable domain of TCR clone 372039 (TRBV19, TRBJ1-2)
CASSVAGQDGYTF

SEQ ID NO: 744079 - protein, 15 aa, Homo sapiens
  CDR3 for alpha chain variable domain of TCR clone 372040 (TRAV36/DV7, TRAJ38)
CAGGQGAGNNRKLIW

SEQ ID NO: 744080 - protein, 13 aa, Homo sapiens
  CDR3 for beta chain variable domain of TCR clone 372040 (TRBV7-9, TRBJ1-2)
CASSLKQNYGYTF

SEQ ID NO: 744081 - protein, 15 aa, Homo sapiens
  CDR3 for alpha chain variable domain of TCR clone 372041 (TRAV8-4, TRAJ29)
CAVSEDVRGNTPLVF

SEQ ID NO: 744082 - protein, 12 aa, Homo sapiens
  CDR3 for beta chain variable domain of TCR clone 372041 (TRBV14, TRBJ2-7)
CASSSLKGEQYF

SEQ ID NO: 744083 - protein, 14 aa, Homo sapiens
  CDR3 for alpha chain variable domain of TCR clone 372042 (TRAV34, TRAJ22)
CGADTSGSARQLTF

SEQ ID NO: 744084 - protein, 14 aa, Homo sapiens
  CDR3 for beta chain variable domain of TCR clone 372042 (TRBV28, TRBJ2-5)
CASSLGDRAETQYF

SEQ ID NO: 744085 - protein, 13 aa, Homo sapiens
  CDR3 for alpha chain variable domain of TCR clone 372043 (TRAV21, TRAJ37)
CAVSSGNTGKLIF

SEQ ID NO: 744086 - protein, 15 aa, Homo sapiens
  CDR3 for beta chain variable domain of TCR clone 372043 (TRBV12-4, TRBJ1-2)
CASSFVDRGNYGDTF

SEQ ID NO: 744087 - protein, 13 aa, Homo sapiens
  CDR3 for alpha chain variable domain of TCR clone 372044 (TRAV1-2, TRAJ9)
CAALNTGDFKTIF

SEQ ID NO: 744088 - protein, 12 aa, Homo sapiens
  CDR3 for beta chain variable domain of TCR clone 372044 (TRBV11-3, TRBJ1-1)
CASSHRQGEAFF

SEQ ID NO: 744089 - protein, 10 aa, Homo sapiens
  CDR3 for alpha chain variable domain of TCR clone 372045 (TRAV5, TRAJ34)
CAEDTDKLIF

SEQ ID NO: 744090 - protein, 12 aa, Homo sapiens
  CDR3 for beta chain variable domain of TCR clone 372045 (TRBV11-2, TRBJ2-2)
CASSLGGGEVFF

SEQ ID NO: 744091 - protein, 14 aa, Homo sapiens
  CDR3 for alpha chain variable domain of TCR clone 372046 (TRAV8-3, TRAJ44)
CAVGNTGTASKLTF

SEQ ID NO: 744092 - protein, 15 aa, Homo sapiens
  CDR3 for beta chain variable domain of TCR clone 372046 (TRBV28, TRBJ2-7)
CASSFRGQGRYQQYF

SEQ ID NO: 744093 - protein, 17 aa, Homo sapiens
  CDR3 for alpha chain variable domain of TCR clone 372047 (TRAV13-1, TRAJ52)
CAAGRNAGGTSYGKLTF

SEQ ID NO: 744094 - protein, 16 aa, Homo sapiens
  CDR3 for beta chain variable domain of TCR clone 372047 (TRBV28, TRBJ2-7)
CASSPWVATGDLSQYF

SEQ ID NO: 744095 - protein, 14 aa, Homo sapiens
  CDR3 for alpha chain variable domain of TCR clone 372048 (TRAV17, TRAJ33)
CATDARRSNFQLIW

SEQ ID NO: 744096 - protein, 14 aa, Homo sapiens
  CDR3 for beta chain variable domain of TCR clone 372048 (TRBV25-1, TRBJ1-4)
CASSGGGQPEKLFF

SEQ ID NO: 744097 - protein, 14 aa, Homo sapiens
  CDR3 for alpha chain variable domain of TCR clone 372049 (TRAV27, TRAJ23)
CTGAFDNQGGKLIF

SEQ ID NO: 744098 - protein, 15 aa, Homo sapiens
  CDR3 for beta chain variable domain of TCR clone 372049 (TRBV7-3, TRBJ2-7)
CASSLTGQGKYEQYF

SEQ ID NO: 744099 - protein, 12 aa, Homo sapiens
  CDR3 for alpha chain variable domain of TCR clone 372050 (TRAV12-3, TRAJ29)
CAAREGNTPLVF

SEQ ID NO: 744100 - protein, 15 aa, Homo sapiens
  CDR3 for beta chain variable domain of TCR clone 372050 (TRBV7-3, TRBJ2-3)
CASSLQGGHTDTQYF

SEQ ID NO: 744101 - protein, 13 aa, Homo sapiens
  CDR3 for alpha chain variable domain of TCR clone 372051 (TRAV3, TRAJ27)
CAVRPLGAGKSTF

SEQ ID NO: 744102 - protein, 15 aa, Homo sapiens
  CDR3 for beta chain variable domain of TCR clone 372051 (TRBV19, TRBJ2-1)
CASSSPGVPLDEQFF

SEQ ID NO: 744103 - protein, 15 aa, Homo sapiens
  CDR3 for alpha chain variable domain of TCR clone 372052 (TRAV26-1, TRAJ24)
CIVPLTTDSWGKFQF

SEQ ID NO: 744104 - protein, 14 aa, Homo sapiens
  CDR3 for beta chain variable domain of TCR clone 372052 (TRBV10-3, TRBJ2-3)
CASSEKGRGDTQYF

SEQ ID NO: 744105 - protein, 11 aa, Homo sapiens
  CDR3 for alpha chain variable domain of TCR clone 372053 (TRAV12-1, TRAJ15)
CVVNAGTALIF

SEQ ID NO: 744106 - protein, 16 aa, Homo sapiens
  CDR3 for beta chain variable domain of TCR clone 372053 (TRBV28, TRBJ2-1)
CASSSRVRDSCNEQFF

SEQ ID NO: 744107 - protein, 19 aa, Homo sapiens
  CDR3 for alpha chain variable domain of TCR clone 372054 (TRAV2, TRAJ20)
ILQVREADAAVYRDCKLSF

SEQ ID NO: 744108 - protein, 13 aa, Homo sapiens
  CDR3 for beta chain variable domain of TCR clone 372054 (TRBV15, TRBJ1-6)
CDTSGGLNSPLHF

SEQ ID NO: 744109 - protein, 18 aa, Homo sapiens
  CDR3 for alpha chain variable domain of TCR clone 372055 (TRAV21, TRAJ52)
CAVRPSPAGGTSYGKLTF

SEQ ID NO: 744110 - protein, 13 aa, Homo sapiens
  CDR3 for beta chain variable domain of TCR clone 372055 (TRBV2, TRBJ1-5)
CATAGPGNEPQHF

SEQ ID NO: 744111 - protein, 14 aa, Homo sapiens
  CDR3 for alpha chain variable domain of TCR clone 372056 (TRAV12-2, TRAJ41)
CAVNRANSGYALTS

SEQ ID NO: 744112 - protein, 13 aa, Homo sapiens
  CDR3 for beta chain variable domain of TCR clone 372056 (TRBV7-9, TRBJ1-2)
CASSLKQNYGYTF

SEQ ID NO: 744113 - protein, 13 aa, Homo sapiens
  CDR3 for alpha chain variable domain of TCR clone 372057 (TRAV38-1, TRAJ20)
FAFMRDNDYKLSF

SEQ ID NO: 744114 - protein, 12 aa, Homo sapiens
  CDR3 for beta chain variable domain of TCR clone 372057 (TRBV18, TRBJ2-5)
CASSPSKETQYF

SEQ ID NO: 744115 - protein, 15 aa, Homo sapiens
  CDR3 for alpha chain variable domain of TCR clone 372058 (TRAV8-4, TRAJ47)
CGVSDPEEYGNKLVF

SEQ ID NO: 744116 - protein, 15 aa, Homo sapiens
  CDR3 for beta chain variable domain of TCR clone 372058 (TRBV11-2, TRBJ2-1)
CASSLGPDSYNEQFF

SEQ ID NO: 744117 - protein, 17 aa, Homo sapiens
  CDR3 for alpha chain variable domain of TCR clone 372059 (TRAV3, TRAJ42)
CAVRDRDYGGSQGNLIF

SEQ ID NO: 744118 - protein, 15 aa, Homo sapiens
  CDR3 for beta chain variable domain of TCR clone 372059 (TRBV7-6, TRBJ1-1)
CASSPQGGANTEAFF

SEQ ID NO: 744119 - protein, 17 aa, Homo sapiens
  CDR3 for alpha chain variable domain of TCR clone 372060 (TRAV38-1, TRAJ45)
CAFMRSHSGGGADGLTF

SEQ ID NO: 744120 - protein, 16 aa, Homo sapiens
  CDR3 for beta chain variable domain of TCR clone 372060 (TRBV4-1, TRBJ1-2)
CASSQDAGQVLYGYTF

SEQ ID NO: 744121 - protein, 13 aa, Homo sapiens
  CDR3 for alpha chain variable domain of TCR clone 372061 (TRAV12-2, TRAJ42)
CDVKRGSQGNLIF

SEQ ID NO: 744122 - protein, 12 aa, Homo sapiens
  CDR3 for beta chain variable domain of TCR clone 372061 (TRBV5-7, TRBJ1-2)
CASSLVQNGYTF

SEQ ID NO: 744123 - protein, 13 aa, Homo sapiens
  CDR3 for alpha chain variable domain of TCR clone 372062 (TRAV8-3, TRAJ36)
CAVGATGANNLFF

SEQ ID NO: 744124 - protein, 17 aa, Homo sapiens
  CDR3 for beta chain variable domain of TCR clone 372062 (TRBV4-2, TRBJ1-1)
CASTQFGGGGGNTEAFF

SEQ ID NO: 744125 - protein, 15 aa, Homo sapiens
  CDR3 for alpha chain variable domain of TCR clone 372063 (TRAV29/DV5, TRAJ53)
CAASESGGSNYKLTF

SEQ ID NO: 744126 - protein, 19 aa, Homo sapiens
  CDR3 for beta chain variable domain of TCR clone 372063 (TRBV5-1, TRBJ2-3)
CASSLWLAGGITTTDTQYF

SEQ ID NO: 744127 - protein, 13 aa, Homo sapiens
  CDR3 for alpha chain variable domain of TCR clone 372064 (TRAV12-3, TRAJ13)
CAMSSGGYQKVTF

SEQ ID NO: 744128 - protein, 13 aa, Homo sapiens
  CDR3 for beta chain variable domain of TCR clone 372064 (TRBV15, TRBJ1-6)
CATSGGLNSPLHF

SEQ ID NO: 744129 - protein, 14 aa, Homo sapiens
  CDR3 for alpha chain variable domain of TCR clone 372065 (TRAV13-1, TRAJ44)
CAAKATGTASKLTF

SEQ ID NO: 744130 - protein, 14 aa, Homo sapiens
  CDR3 for beta chain variable domain of TCR clone 372065 (TRBV25-1, TRBJ1-1)
CASAHLGGNTEAFF

SEQ ID NO: 744131 - protein, 15 aa, Homo sapiens
  CDR3 for alpha chain variable domain of TCR clone 372066 (TRAV5, TRAJ33)
CAEAPAMDSNYQLIW

SEQ ID NO: 744132 - protein, 12 aa, Homo sapiens
  CDR3 for beta chain variable domain of TCR clone 372066 (TRBV6-3, TRBJ2-7)
CASSLTPYEQDV

SEQ ID NO: 744133 - protein, 13 aa, Homo sapiens
  CDR3 for alpha chain variable domain of TCR clone 372067 (TRAV12-2, TRAJ12)
CAVNWDSSYKLIF

SEQ ID NO: 744134 - protein, 14 aa, Homo sapiens
  CDR3 for beta chain variable domain of TCR clone 372067 (TRBV12-4, TRBJ1-3)
CASTLSGAGNTIYF

SEQ ID NO: 744135 - protein, 13 aa, Homo sapiens
  CDR3 for alpha chain variable domain of TCR clone 372068 (TRAV13-1, TRAJ21)
CAASIYNFNKFYF

SEQ ID NO: 744136 - protein, 11 aa, Homo sapiens
  CDR3 for beta chain variable domain of TCR clone 372068 (TRBV5-6, TRBJ2-5)
CASSLERTQYF

SEQ ID NO: 744137 - protein, 13 aa, Homo sapiens
  CDR3 for alpha chain variable domain of TCR clone 372069 (TRAV3, TRAJ21)
CAVREPDFNKFYF

SEQ ID NO: 744138 - protein, 12 aa, Homo sapiens
  CDR3 for beta chain variable domain of TCR clone 372069 (TRBV6-3, TRBJ2-1)
CASSGSYNEQFF

SEQ ID NO: 744139 - protein, 22 aa, Homo sapiens
  CDR3 for alpha chain variable domain of TCR clone 372070 (TRAV34, TRAJ52)
STSVEQTRRSNAGGTSYGKLTF

SEQ ID NO: 744140 - protein, 13 aa, Homo sapiens
  CDR3 for beta chain variable domain of TCR clone 372070 (TRBV18, TRBJ2-5)
CASSLQGQETQYF

SEQ ID NO: 744141 - protein, 14 aa, Homo sapiens
  CDR3 for alpha chain variable domain of TCR clone 372071 (TRAV1-2, TRAJ8)
FAVREDTGFQKLVF

SEQ ID NO: 744142 - protein, 12 aa, Homo sapiens
  CDR3 for beta chain variable domain of TCR clone 372071 (TRBV2, TRBJ2-1)
CAYGPPGNEQFF

SEQ ID NO: 744143 - protein, 13 aa, Homo sapiens
  CDR3 for alpha chain variable domain of TCR clone 372072 (TRAV26-1, TRAJ48)
CIVLRVRNENLTF

SEQ ID NO: 744144 - protein, 14 aa, Homo sapiens
  CDR3 for beta chain variable domain of TCR clone 372072 (TRBV20-1, TRBJ1-5)
CSARDISMNQPQHF

SEQ ID NO: 744145 - protein, 16 aa, Homo sapiens
  CDR3 for alpha chain variable domain of TCR clone 372073 (TRAV23/DV6, TRAJ9)
CAASIGGNTGGFKTIF

SEQ ID NO: 744146 - protein, 14 aa, Homo sapiens
  CDR3 for beta chain variable domain of TCR clone 372073 (TRBV4-1, TRBJ2-2)
CASSQAVNTRELFF

SEQ ID NO: 744147 - protein, 17 aa, Homo sapiens
  CDR3 for alpha chain variable domain of TCR clone 372074 (TRAV8-6, TRAJ58)
CAVSSWVGETSGSRLTS

SEQ ID NO: 744148 - protein, 12 aa, Homo sapiens
  CDR3 for beta chain variable domain of TCR clone 372074 (TRBV7-8, TRBJ2-7)
CASSLGDREQYF

SEQ ID NO: 744149 - protein, 18 aa, Homo sapiens
  CDR3 for alpha chain variable domain of TCR clone 372075 (TRAV21, TRAJ53)
CAVKGGENSGGSNYKLTF

SEQ ID NO: 744150 - protein, 12 aa, Homo sapiens
  CDR3 for beta chain variable domain of TCR clone 372075 (TRBV7-2, TRBJ2-5)
CASSQYQETQYF

SEQ ID NO: 744151 - protein, 13 aa, Homo sapiens
  CDR3 for alpha chain variable domain of TCR clone 372076 (TRAV12-2, TRAJ20)
CAVYSSNDYKLSF

SEQ ID NO: 744152 - protein, 15 aa, Homo sapiens
  CDR3 for beta chain variable domain of TCR clone 372076 (TRBV27, TRBJ2-5)
CASSLYPRGGETQYF

SEQ ID NO: 744153 - protein, 16 aa, Homo sapiens
  CDR3 for alpha chain variable domain of TCR clone 372077 (TRAV13-1, TRAJ48)
CAASIFGNFGNEKLTF

SEQ ID NO: 744154 - protein, 14 aa, Homo sapiens
  CDR3 for beta chain variable domain of TCR clone 372077 (TRBV7-3, TRBJ1-1)
CASSLKGGNTESFF

SEQ ID NO: 744155 - protein, 13 aa, Homo sapiens
  CDR3 for alpha chain variable domain of TCR clone 372078 (TRAV21, TRAJ57)
CAVTQGGAEKLVF

SEQ ID NO: 744156 - protein, 16 aa, Homo sapiens
  CDR3 for beta chain variable domain of TCR clone 372078 (TRBV29-1, TRBJ2-7)
CSVGDAEDGTAYEQYF

SEQ ID NO: 744157 - protein, 14 aa, Homo sapiens
  CDR3 for alpha chain variable domain of TCR clone 372079 (TRAV1-2, TRAJ8)
CAVREDTDFQKLVF

SEQ ID NO: 744158 - protein, 16 aa, Homo sapiens
  CDR3 for beta chain variable domain of TCR clone 372079 (TRBV4-1, TRBJ1-4)
CASSQDLRRGGEKLFS

SEQ ID NO: 744159 - protein, 13 aa, Homo sapiens
  CDR3 for alpha chain variable domain of TCR clone 372080 (TRAV8-3, TRAJ43)
CAVGPDNNNDIRF

SEQ ID NO: 744160 - protein, 12 aa, Homo sapiens
  CDR3 for beta chain variable domain of TCR clone 372080 (TRBV7-2, TRBJ1-6)
CASSLSSSPLHL

SEQ ID NO: 744161 - protein, 14 aa, Homo sapiens
  CDR3 for alpha chain variable domain of TCR clone 372081 (TRAV12-2, TRAJ9)
CAVNMEGGGFKTIF

SEQ ID NO: 744162 - protein, 16 aa, Homo sapiens
  CDR3 for beta chain variable domain of TCR clone 372081 (TRBV19, TRBJ2-3)
CASSPGAASRTDTQYF

SEQ ID NO: 744163 - protein, 17 aa, Homo sapiens
  CDR3 for alpha chain variable domain of TCR clone 372082 (TRAV3, TRAJ12)
CAVRDGGRMDSSYKLIF

SEQ ID NO: 744164 - protein, 17 aa, Homo sapiens
  CDR3 for beta chain variable domain of TCR clone 372082 (TRBV25-1, TRBJ2-7)
CQPQQPPRTGVTYEQYF

SEQ ID NO: 744165 - protein, 11 aa, Homo sapiens
  CDR3 for alpha chain variable domain of TCR clone 372083 (TRAV2, TRAJ13)
CASVGYQKVTF

SEQ ID NO: 744166 - protein, 12 aa, Homo sapiens
  CDR3 for beta chain variable domain of TCR clone 372083 (TRBV19, TRBJ1-4)
CASKDWPGGLFF

SEQ ID NO: 744167 - protein, 15 aa, Homo sapiens
  CDR3 for alpha chain variable domain of TCR clone 372084 (TRAV26-1, TRAJ40)
CIDRYATSGTYTYIF

SEQ ID NO: 744168 - protein, 14 aa, Homo sapiens
  CDR3 for beta chain variable domain of TCR clone 372084 (TRBV19, TRBJ2-1)
CASPTFVLSGEQFF

SEQ ID NO: 744169 - protein, 13 aa, Homo sapiens
  CDR3 for alpha chain variable domain of TCR clone 372085 (TRAV8-3, TRAJ43)
CALVPYNNNDMRF

SEQ ID NO: 744170 - protein, 16 aa, Homo sapiens
  CDR3 for beta chain variable domain of TCR clone 372085 (TRBV7-2, TRBJ2-5)
CASSPFPTGGEETQYF

SEQ ID NO: 744171 - protein, 11 aa, Homo sapiens
  CDR3 for alpha chain variable domain of TCR clone 372086 (TRAV17, TRAJ9)
CATTGGFKTIF

SEQ ID NO: 744172 - protein, 19 aa, Homo sapiens
  CDR3 for beta chain variable domain of TCR clone 372086 (TRBV25-1, TRBJ2-2)
CAILVYRVGRGRKTGELFF

SEQ ID NO: 744173 - protein, 14 aa, Homo sapiens
  CDR3 for alpha chain variable domain of TCR clone 372087 (TRAV8-2, TRAJ11)
CVVSEKSGYSTPPL

SEQ ID NO: 744174 - protein, 16 aa, Homo sapiens
  CDR3 for beta chain variable domain of TCR clone 372087 (TRBV28, TRBJ2-1)
CASSSPEYPRDNEQFF

SEQ ID NO: 744175 - protein, 14 aa, Homo sapiens
  CDR3 for alpha chain variable domain of TCR clone 372088 (TRAV12-3, TRAJ29)
CAMILLSGNTPLVF

SEQ ID NO: 744176 - protein, 16 aa, Homo sapiens
  CDR3 for beta chain variable domain of TCR clone 372088 (TRBV28, TRBJ2-7)
CASSSGTSGRGYERYF

SEQ ID NO: 744177 - protein, 17 aa, Homo sapiens
  CDR3 for alpha chain variable domain of TCR clone 372089 (TRAV8-6, TRAJ58)
CAVSSWVGETSGPRLTF

SEQ ID NO: 744178 - protein, 14 aa, Homo sapiens
  CDR3 for beta chain variable domain of TCR clone 372089 (TRBV20-1, TRBJ2-1)
CSAQIGGSANEQFF

SEQ ID NO: 744179 - protein, 13 aa, Homo sapiens
  CDR3 for alpha chain variable domain of TCR clone 372090 (TRAV30, TRAJ24)
CGTVTDSWGKLQF

SEQ ID NO: 744180 - protein, 11 aa, Homo sapiens
  CDR3 for beta chain variable domain of TCR clone 372090 (TRBV6-1, TRBJ2-1)
CASISSNEQFF

SEQ ID NO: 744181 - protein, 15 aa, Homo sapiens
  CDR3 for alpha chain variable domain of TCR clone 372091 (TRAV26-1, TRAJ44)
CIARVSFGTASKLTF

SEQ ID NO: 744182 - protein, 15 aa, Homo sapiens
  CDR3 for beta chain variable domain of TCR clone 372091 (TRBV20-1, TRBJ1-1)
CSASRGVTGNTEAFF

SEQ ID NO: 744183 - protein, 14 aa, Homo sapiens
  CDR3 for alpha chain variable domain of TCR clone 372092 (TRAV12-3, TRAJ10)
SHLPLTGGGNKLTF

SEQ ID NO: 744184 - protein, 13 aa, Homo sapiens
  CDR3 for beta chain variable domain of TCR clone 372092 (TRBV12-4, TRBJ1-1)
CARSPGTGFEAFF

SEQ ID NO: 744185 - protein, 14 aa, Homo sapiens
  CDR3 for alpha chain variable domain of TCR clone 372093 (TRAV1-2, TRAJ16)
CAVNRISDGQKLLF

SEQ ID NO: 744186 - protein, 14 aa, Homo sapiens
  CDR3 for beta chain variable domain of TCR clone 372093 (TRBV25-1, TRBJ1-1)
CASTHLGGNTEAFF

SEQ ID NO: 744187 - protein, 14 aa, Homo sapiens
  CDR3 for alpha chain variable domain of TCR clone 372094 (TRAV2, TRAJ22)
CAVEVKRAARQLTF

SEQ ID NO: 744188 - protein, 14 aa, Homo sapiens
  CDR3 for beta chain variable domain of TCR clone 372094 (TRBV19, TRBJ2-2)
CASTPGYSGGELFV

SEQ ID NO: 744189 - protein, 12 aa, Homo sapiens
  CDR3 for alpha chain variable domain of TCR clone 372095 (TRAV13-1, TRAJ21)
CAEKEGFNKFYF

SEQ ID NO: 744190 - protein, 15 aa, Homo sapiens
  CDR3 for beta chain variable domain of TCR clone 372095 (TRBV7-7, TRBJ2-5)
CASSQLERAEETQYF

SEQ ID NO: 744191 - protein, 18 aa, Homo sapiens
  CDR3 for alpha chain variable domain of TCR clone 372096 (TRAV26-2, TRAJ54)
CILRDVEVGIQGAQKLVF

SEQ ID NO: 744192 - protein, 13 aa, Homo sapiens
  CDR3 for beta chain variable domain of TCR clone 372096 (TRBV7-3, TRBJ1-1)
CASSQDWGAEAFF

SEQ ID NO: 744193 - protein, 14 aa, Homo sapiens
  CDR3 for alpha chain variable domain of TCR clone 372097 (TRAV12-3, TRAJ42)
CAMNYGGSQGNLIF

SEQ ID NO: 744194 - protein, 15 aa, Homo sapiens
  CDR3 for beta chain variable domain of TCR clone 372097 (TRBV5-7, TRBJ1-5)
CASSYGKLWDQTQHC

SEQ ID NO: 744195 - protein, 15 aa, Homo sapiens
  CDR3 for alpha chain variable domain of TCR clone 372098 (TRAV3, TRAJ5)
CAVRDLDTGWRAVTF

SEQ ID NO: 744196 - protein, 13 aa, Homo sapiens
  CDR3 for beta chain variable domain of TCR clone 372098 (TRBV12-4, TRBJ2-7)
CASSPTETYEQYF

SEQ ID NO: 744197 - protein, 15 aa, Homo sapiens
  CDR3 for alpha chain variable domain of TCR clone 372099 (TRAV3, TRAJ5)
YAVRDLDTGRRALTF

SEQ ID NO: 744198 - protein, 13 aa, Homo sapiens
  CDR3 for beta chain variable domain of TCR clone 372099 (TRBV12-4, TRBJ2-7)
CASSPTEPYEQYF

SEQ ID NO: 744199 - protein, 14 aa, Homo sapiens
  CDR3 for alpha chain variable domain of TCR clone 372100 (TRAV2, TRAJ9)
CAVEDRSVGFKTIF

SEQ ID NO: 744200 - protein, 12 aa, Homo sapiens
  CDR3 for beta chain variable domain of TCR clone 372100 (TRBV7-9, TRBJ2-7)
CASSLEGYEQYF

SEQ ID NO: 744201 - protein, 14 aa, Homo sapiens
  CDR3 for alpha chain variable domain of TCR clone 372101 (TRAV23/DV6, TRAJ11)
CSASLESGYSTLTF

SEQ ID NO: 744202 - protein, 13 aa, Homo sapiens
  CDR3 for beta chain variable domain of TCR clone 372101 (TRBV4-1, TRBJ2-5)
CASSLTQGETQYF

SEQ ID NO: 744203 - protein, 15 aa, Homo sapiens
  CDR3 for alpha chain variable domain of TCR clone 372102 (TRAV12-2, TRAJ53)
CAVNGGGGSNYKLTF

SEQ ID NO: 744204 - protein, 12 aa, Homo sapiens
  CDR3 for beta chain variable domain of TCR clone 372102 (TRBV20-1, TRBJ2-1)
CSARLGTDEQFF

SEQ ID NO: 744205 - protein, 18 aa, Homo sapiens
  CDR3 for alpha chain variable domain of TCR clone 372103 (TRAV21, TRAJ52)
CAVMPSPAGGTSYGKLTF

SEQ ID NO: 744206 - protein, 15 aa, Homo sapiens
  CDR3 for beta chain variable domain of TCR clone 372103 (TRBV19, TRBJ1-1)
CASTSGQIQNTEAFF

SEQ ID NO: 744207 - protein, 10 aa, Homo sapiens
  CDR3 for alpha chain variable domain of TCR clone 372104 (TRAV12-3, TRAJ49)
CAMSGNQFYF

SEQ ID NO: 744208 - protein, 13 aa, Homo sapiens
  CDR3 for beta chain variable domain of TCR clone 372104 (TRBV7-3, TRBJ1-1)
CASSQDWGAEAFF

SEQ ID NO: 744209 - protein, 15 aa, Homo sapiens
  CDR3 for alpha chain variable domain of TCR clone 372105 (TRAV17, TRAJ52)
CATEAGGTSYGKMTF

SEQ ID NO: 744210 - protein, 14 aa, Homo sapiens
  CDR3 for beta chain variable domain of TCR clone 372105 (TRBV28, TRBJ1-5)
CASSLGVLVKPQHF

SEQ ID NO: 744211 - protein, 12 aa, Homo sapiens
  CDR3 for alpha chain variable domain of TCR clone 372106 (TRAV20, TRAJ56)
CAVTGANSKLTF

SEQ ID NO: 744212 - protein, 14 aa, Homo sapiens
  CDR3 for beta chain variable domain of TCR clone 372106 (TRBV20-1, TRBJ2-5)
CSALVPGYQEAQYF

SEQ ID NO: 744213 - protein, 16 aa, Homo sapiens
  CDR3 for alpha chain variable domain of TCR clone 372107 (TRAV30, TRAJ49)
SAAQRVGPNTGNPFYF

SEQ ID NO: 744214 - protein, 15 aa, Homo sapiens
  CDR3 for beta chain variable domain of TCR clone 372107 (TRBV2, TRBJ2-1)
CASSELAGSYNEQFF

SEQ ID NO: 744215 - protein, 15 aa, Homo sapiens
  CDR3 for alpha chain variable domain of TCR clone 372108 (TRAV8-3, TRAJ45)
CASSYSGGVADGLTF

SEQ ID NO: 744216 - protein, 12 aa, Homo sapiens
  CDR3 for beta chain variable domain of TCR clone 372108 (TRBV10-3, TRBJ2-7)
CLQLAVNYEQYF

SEQ ID NO: 744217 - protein, 14 aa, Homo sapiens
  CDR3 for alpha chain variable domain of TCR clone 372109 (TRAV12-2, TRAJ17)
CAVNIKAAGNKLTF

SEQ ID NO: 744218 - protein, 16 aa, Homo sapiens
  CDR3 for beta chain variable domain of TCR clone 372109 (TRBV20-1, TRBJ2-6)
CSASSQAYDGANVLTF

SEQ ID NO: 744219 - protein, 13 aa, Homo sapiens
  CDR3 for alpha chain variable domain of TCR clone 372110 (TRAV8-6, TRAJ5)
CAVLDTGRRALTF

SEQ ID NO: 744220 - protein, 12 aa, Homo sapiens
  CDR3 for beta chain variable domain of TCR clone 372110 (TRBV7-9, TRBJ1-6)
CAGSASESPLHF

SEQ ID NO: 744221 - protein, 15 aa, Homo sapiens
  CDR3 for alpha chain variable domain of TCR clone 372111 (TRAV23/DV6, TRAJ12)
CAAIDLGAMASSYKL

SEQ ID NO: 744222 - protein, 14 aa, Homo sapiens
  CDR3 for beta chain variable domain of TCR clone 372111 (TRBV20-1, TRBJ2-1)
CSARRGGSYNEQFF

SEQ ID NO: 744223 - protein, 13 aa, Homo sapiens
  CDR3 for alpha chain variable domain of TCR clone 372112 (TRAV8-3, TRAJ28)
CAVGAVGSYQLTC

SEQ ID NO: 744224 - protein, 15 aa, Homo sapiens
  CDR3 for beta chain variable domain of TCR clone 372112 (TRBV7-9, TRBJ1-5)
CASSQGHQPNQPQHF

SEQ ID NO: 744225 - protein, 14 aa, Homo sapiens
  CDR3 for alpha chain variable domain of TCR clone 372113 (TRAV1-2, TRAJ16)
CAVNRFSDGQKLLF

SEQ ID NO: 744226 - protein, 13 aa, Homo sapiens
  CDR3 for beta chain variable domain of TCR clone 372113 (TRBV6-3, TRBJ2-5)
CASSWAGGETQYF

SEQ ID NO: 744227 - protein, 16 aa, Homo sapiens
  CDR3 for alpha chain variable domain of TCR clone 372114 (TRAV12-1, TRAJ12)
CVVNTLLMDSSYKLIF

SEQ ID NO: 744228 - protein, 16 aa, Homo sapiens
  CDR3 for beta chain variable domain of TCR clone 372114 (TRBV20-1, TRBJ2-1)
CSARDSLGAVYNEQFF

SEQ ID NO: 744229 - protein, 16 aa, Homo sapiens
  CDR3 for alpha chain variable domain of TCR clone 372115 (TRAV12-2, TRAJ28)
CAVITDSGAGSYQLTF

SEQ ID NO: 744230 - protein, 16 aa, Homo sapiens
  CDR3 for beta chain variable domain of TCR clone 372115 (TRBV15, TRBJ2-3)
CATSRDLGIVTDTQYF

SEQ ID NO: 744231 - protein, 15 aa, Homo sapiens
  CDR3 for alpha chain variable domain of TCR clone 372116 (TRAV26-1, TRAJ44)
CIVRANTGTASKLTF

SEQ ID NO: 744232 - protein, 14 aa, Homo sapiens
  CDR3 for beta chain variable domain of TCR clone 372116 (TRBV7-9, TRBJ1-1)
CASSAQTMNTEAFF

SEQ ID NO: 744233 - protein, 13 aa, Homo sapiens
  CDR3 for alpha chain variable domain of TCR clone 372117 (TRAV35, TRAJ37)
CAGSSGNTGKLIF

SEQ ID NO: 744234 - protein, 16 aa, Homo sapiens
  CDR3 for beta chain variable domain of TCR clone 372117 (TRBV10-3, TRBJ2-1)
CAISWTSGNSYNEQFF

SEQ ID NO: 744235 - protein, 14 aa, Homo sapiens
  CDR3 for alpha chain variable domain of TCR clone 372118 (TRAV27, TRAJ45)
CAGAQEEVLTDSPL

SEQ ID NO: 744236 - protein, 15 aa, Homo sapiens
  CDR3 for beta chain variable domain of TCR clone 372118 (TRBV9, TRBJ2-2)
CASSDFAGASGELFF

SEQ ID NO: 744237 - protein, 12 aa, Homo sapiens
  CDR3 for alpha chain variable domain of TCR clone 372119 (TRAV12-1, TRAJ40)
CVVYSGTYKYIF

SEQ ID NO: 744238 - protein, 18 aa, Homo sapiens
  CDR3 for beta chain variable domain of TCR clone 372119 (TRBV11-2, TRBJ2-3)
WASSLGGASRGAPNTQYF

SEQ ID NO: 744239 - protein, 14 aa, Homo sapiens
  CDR3 for alpha chain variable domain of TCR clone 372120 (TRAV12-2, TRAJ13)
CAVKKTGGYQKVTF

SEQ ID NO: 744240 - protein, 13 aa, Homo sapiens
  CDR3 for beta chain variable domain of TCR clone 372120 (TRBV2, TRBJ2-1)
GAQRGGKYNQQFF

SEQ ID NO: 744241 - protein, 14 aa, Homo sapiens
  CDR3 for alpha chain variable domain of TCR clone 372121 (TRAV1-2, TRAJ33)
RAVRAPDSNYQLIW

SEQ ID NO: 744242 - protein, 14 aa, Homo sapiens
  CDR3 for beta chain variable domain of TCR clone 372121 (TRBV11-3, TRBJ1-6)
CASSFSGGDSPLHF

SEQ ID NO: 744243 - protein, 13 aa, Homo sapiens
  CDR3 for alpha chain variable domain of TCR clone 372122 (TRAV1-2, TRAJ9)
CAVLNTGGFKTIY

SEQ ID NO: 744244 - protein, 14 aa, Homo sapiens
  CDR3 for beta chain variable domain of TCR clone 372122 (TRBV20-1, TRBJ2-3)
CSARGGTSTDTQYF

SEQ ID NO: 744245 - protein, 14 aa, Homo sapiens
  CDR3 for alpha chain variable domain of TCR clone 372123 (TRAV13-1, TRAJ23)
CAASRLGRGGKLIF

SEQ ID NO: 744246 - protein, 15 aa, Homo sapiens
  CDR3 for beta chain variable domain of TCR clone 372123 (TRBV7-2, TRBJ2-1)
CASSLVGGRYNEQFF

SEQ ID NO: 744247 - protein, 16 aa, Homo sapiens
  CDR3 for alpha chain variable domain of TCR clone 372124 (TRAV17, TRAJ22)
CATDAISSGSARQLTF

SEQ ID NO: 744248 - protein, 15 aa, Homo sapiens
  CDR3 for beta chain variable domain of TCR clone 372124 (TRBV5-1, TRBJ2-1)
CASSPPRAPYNEQLF

SEQ ID NO: 744249 - protein, 13 aa, Homo sapiens
  CDR3 for alpha chain variable domain of TCR clone 372125 (TRAV36/DV7, TRAJ54)
CAVDIQGAQKLVF

SEQ ID NO: 744250 - protein, 16 aa, Homo sapiens
  CDR3 for beta chain variable domain of TCR clone 372125 (TRBV5-4, TRBJ2-3)
CASQQPGAGGADTQYF

SEQ ID NO: 744251 - protein, 14 aa, Homo sapiens
  CDR3 for alpha chain variable domain of TCR clone 372126 (TRAV1-2, TRAJ8)
CAVREDTGFQKLVF

SEQ ID NO: 744252 - protein, 16 aa, Homo sapiens
  CDR3 for beta chain variable domain of TCR clone 372126 (TRBV7-3, TRBJ2-2)
CDSSLKRGTLSGELFF

SEQ ID NO: 744253 - protein, 13 aa, Homo sapiens
  CDR3 for alpha chain variable domain of TCR clone 372127 (TRAV27, TRAJ56)
CAGKPGANSKLTF

SEQ ID NO: 744254 - protein, 18 aa, Homo sapiens
  CDR3 for beta chain variable domain of TCR clone 372127 (TRBV11-2, TRBJ2-3)
CASSLGGASRGAPNTQYF

SEQ ID NO: 744255 - protein, 11 aa, Homo sapiens
  CDR3 for alpha chain variable domain of TCR clone 372128 (TRAV1-2, TRAJ20)
CAVSNDYKLSF

SEQ ID NO: 744256 - protein, 16 aa, Homo sapiens
  CDR3 for beta chain variable domain of TCR clone 372128 (TRBV29-1, TRBJ2-6)
CSVEDITYSGANVLPF

SEQ ID NO: 744257 - protein, 17 aa, Homo sapiens
  CDR3 for alpha chain variable domain of TCR clone 372129 (TRAV3, TRAJ6)
CAVRDGPTAGGSHIPTF

SEQ ID NO: 744258 - protein, 16 aa, Homo sapiens
  CDR3 for beta chain variable domain of TCR clone 372129 (TRBV4-1, TRBJ2-7)
CASSLTAGQATYEQYF

SEQ ID NO: 744259 - protein, 14 aa, Homo sapiens
  CDR3 for alpha chain variable domain of TCR clone 372130 (TRAV35, TRAJ33)
CAGSSQDSNYQLIW

SEQ ID NO: 744260 - protein, 12 aa, Homo sapiens
  CDR3 for beta chain variable domain of TCR clone 372130 (TRBV7-9, TRBJ1-5)
CASSPQGQPQHF

SEQ ID NO: 744261 - protein, 14 aa, Homo sapiens
  CDR3 for alpha chain variable domain of TCR clone 372131 (TRAV12-3, TRAJ10)
SHLPLTGGGNKLTF

SEQ ID NO: 744262 - protein, 15 aa, Homo sapiens
  CDR3 for beta chain variable domain of TCR clone 372131 (TRBV4-1, TRBJ1-4)
CASSDTGETNEKLFF

SEQ ID NO: 744263 - protein, 12 aa, Homo sapiens
  CDR3 for alpha chain variable domain of TCR clone 372132 (TRAV12-3, TRAJ17)
CAMTLTGNKLTF

SEQ ID NO: 744264 - protein, 13 aa, Homo sapiens
  CDR3 for beta chain variable domain of TCR clone 372132 (TRBV19, TRBJ2-2)
CASSQRSTGELFF

SEQ ID NO: 744265 - protein, 18 aa, Homo sapiens
  CDR3 for alpha chain variable domain of TCR clone 372133 (TRAV21, TRAJ52)
CAERPSPAGGTSYGKLTF

SEQ ID NO: 744266 - protein, 13 aa, Homo sapiens
  CDR3 for beta chain variable domain of TCR clone 372133 (TRBV10-3, TRBJ2-7)
CASKLAVNYEQYF

SEQ ID NO: 744267 - protein, 16 aa, Homo sapiens
  CDR3 for alpha chain variable domain of TCR clone 372134 (TRAV3, TRAJ37)
CAVRPHGSGNTGKLNF

SEQ ID NO: 744268 - protein, 17 aa, Homo sapiens
  CDR3 for beta chain variable domain of TCR clone 372134 (TRBV20-1, TRBJ2-1)
CSASSSGLAGSYNEQFF

SEQ ID NO: 744269 - protein, 14 aa, Homo sapiens
  CDR3 for alpha chain variable domain of TCR clone 372135 (TRAV26-1, TRAJ39)
CIARGSRAGNMLTF

SEQ ID NO: 744270 - protein, 15 aa, Homo sapiens
  CDR3 for beta chain variable domain of TCR clone 372135 (TRBV7-9, TRBJ1-5)
CASSQGHQPNQPQHV

SEQ ID NO: 744271 - protein, 11 aa, Homo sapiens
  CDR3 for alpha chain variable domain of TCR clone 372136 (TRAV26-2, TRAJ8)
CILTGFRKLVF

SEQ ID NO: 744272 - protein, 19 aa, Homo sapiens
  CDR3 for beta chain variable domain of TCR clone 372136 (TRBV20-1, TRBJ2-1)
CSARGETSGNAPQIDEQFF

SEQ ID NO: 744273 - protein, 14 aa, Homo sapiens
  CDR3 for alpha chain variable domain of TCR clone 372137 (TRAV12-2, TRAJ17)
CSVLFKAAGNMLTF

SEQ ID NO: 744274 - protein, 17 aa, Homo sapiens
  CDR3 for beta chain variable domain of TCR clone 372137 (TRBV20-1, TRBJ2-2)
CSASGSGQGGLTGELFF

SEQ ID NO: 744275 - protein, 13 aa, Homo sapiens
  CDR3 for alpha chain variable domain of TCR clone 372138 (TRAV13-1, TRAJ33)
CAASRAGNYKLIW

SEQ ID NO: 744276 - protein, 15 aa, Homo sapiens
  CDR3 for beta chain variable domain of TCR clone 372138 (TRBV2, TRBJ2-7)
EDSAMYFCASSEQYF

SEQ ID NO: 744277 - protein, 13 aa, Homo sapiens
  CDR3 for alpha chain variable domain of TCR clone 372139 (TRAV20, TRAJ48)
CAVQGVGNEKLTF

SEQ ID NO: 744278 - protein, 15 aa, Homo sapiens
  CDR3 for beta chain variable domain of TCR clone 372139 (TRBV2, TRBJ2-2)
CASSQPGRAGGGEHR

SEQ ID NO: 744279 - protein, 15 aa, Homo sapiens
  CDR3 for alpha chain variable domain of TCR clone 372140 (TRAV8-3, TRAJ23)
CAVGDRYNQGGKLIF

SEQ ID NO: 744280 - protein, 17 aa, Homo sapiens
  CDR3 for beta chain variable domain of TCR clone 372140 (TRBV4-1, TRBJ1-4)
CASSQDGPRGVEEKLFF

SEQ ID NO: 744281 - protein, 12 aa, Homo sapiens
  CDR3 for alpha chain variable domain of TCR clone 372141 (TRAV4, TRAJ26)
CLVGDYGQNFVF

SEQ ID NO: 744282 - protein, 13 aa, Homo sapiens
  CDR3 for beta chain variable domain of TCR clone 372141 (TRBV12-5, TRBJ2-1)
CASGLGRGNEQFF

SEQ ID NO: 744283 - protein, 18 aa, Homo sapiens
  CDR3 for alpha chain variable domain of TCR clone 372142 (TRAV9-2, TRAJ52)
CALSRHNAGGTSYGKLTF

SEQ ID NO: 744284 - protein, 14 aa, Homo sapiens
  CDR3 for beta chain variable domain of TCR clone 372142 (TRBV19, TRBJ2-1)
CASSRLASINEQFF

SEQ ID NO: 744285 - protein, 14 aa, Homo sapiens
  CDR3 for alpha chain variable domain of TCR clone 372143 (TRAV1-2, TRAJ8)
CAVREDTGFQKLVV

SEQ ID NO: 744286 - protein, 14 aa, Homo sapiens
  CDR3 for beta chain variable domain of TCR clone 372143 (TRBV28, TRBJ2-1)
CASSFDSVSDEQFF

SEQ ID NO: 744287 - protein, 16 aa, Homo sapiens
  CDR3 for alpha chain variable domain of TCR clone 372144 (TRAV20, TRAJ52)
CAVLPDGGTGYGKLTF

SEQ ID NO: 744288 - protein, 12 aa, Homo sapiens
  CDR3 for beta chain variable domain of TCR clone 372144 (TRBV19, TRBJ2-1)
CASSQISNEQFF

SEQ ID NO: 744289 - protein, 16 aa, Homo sapiens
  CDR3 for alpha chain variable domain of TCR clone 372145 (TRAV27, TRAJ53)
CAAPEGSGGSNNKLTF

SEQ ID NO: 744290 - protein, 14 aa, Homo sapiens
  CDR3 for beta chain variable domain of TCR clone 372145 (TRBV4-3, TRBJ1-5)
CASSQGGQGWPQHF

SEQ ID NO: 744291 - protein, 13 aa, Homo sapiens
  CDR3 for alpha chain variable domain of TCR clone 372146 (TRAV27, TRAJ54)
CAGAGQGAQKLVF

SEQ ID NO: 744292 - protein, 15 aa, Homo sapiens
  CDR3 for beta chain variable domain of TCR clone 372146 (TRBV18, TRBJ2-6)
CASSPSYARANVLTF

SEQ ID NO: 744293 - protein, 14 aa, Homo sapiens
  CDR3 for alpha chain variable domain of TCR clone 372147 (TRAV17, TRAJ57)
CATDPQGGSEKLGF

SEQ ID NO: 744294 - protein, 16 aa, Homo sapiens
  CDR3 for beta chain variable domain of TCR clone 372147 (TRBV27, TRBJ2-2)
CASSFRGLVRTGELFF

SEQ ID NO: 744295 - protein, 14 aa, Homo sapiens
  CDR3 for alpha chain variable domain of TCR clone 372148 (TRAV2, TRAJ9)
CAVEDRSGGFQTIF

SEQ ID NO: 744296 - protein, 15 aa, Homo sapiens
  CDR3 for beta chain variable domain of TCR clone 372148 (TRBV5-7, TRBJ1-5)
CASSYGKLWDQPQHF

SEQ ID NO: 744297 - protein, 14 aa, Homo sapiens
  CDR3 for alpha chain variable domain of TCR clone 372149 (TRAV13-1, TRAJ10)
CAAKEPGGGNKLTF

SEQ ID NO: 744298 - protein, 14 aa, Homo sapiens
  CDR3 for beta chain variable domain of TCR clone 372149 (TRBV20-1, TRBJ1-1)
CSAQTRIGGTEAVF

SEQ ID NO: 744299 - protein, 18 aa, Homo sapiens
  CDR3 for alpha chain variable domain of TCR clone 372150 (TRAV26-2, TRAJ54)
CILRDVEVGIQGAQKLVF

SEQ ID NO: 744300 - protein, 15 aa, Homo sapiens
  CDR3 for beta chain variable domain of TCR clone 372150 (TRBV12-4, TRBJ2-5)
CASSPPTGLQETQYF

SEQ ID NO: 744301 - protein, 14 aa, Homo sapiens
  CDR3 for alpha chain variable domain of TCR clone 372151 (TRAV4, TRAJ9)
CLVGSGTGGFKTIF

SEQ ID NO: 744302 - protein, 12 aa, Homo sapiens
  CDR3 for beta chain variable domain of TCR clone 372151 (TRBV7-9, TRBJ2-2)
CASSLGGGELFF

SEQ ID NO: 744303 - protein, 17 aa, Homo sapiens
  CDR3 for alpha chain variable domain of TCR clone 372152 (TRAV3, TRAJ42)
CAVSDRDYGGSQGNLIF

SEQ ID NO: 744304 - protein, 17 aa, Homo sapiens
  CDR3 for beta chain variable domain of TCR clone 372152 (TRBV7-9, TRBJ2-3)
CASSPTVAGDLTDTQYF

SEQ ID NO: 744305 - protein, 15 aa, Homo sapiens
  CDR3 for alpha chain variable domain of TCR clone 372153 (TRAV29/DV5, TRAJ57)
CAASLLRGGSEKLFF

SEQ ID NO: 744306 - protein, 15 aa, Homo sapiens
  CDR3 for beta chain variable domain of TCR clone 372153 (TRBV5-1, TRBJ1-3)
GASSLEGGSGNTIYF

SEQ ID NO: 744307 - protein, 13 aa, Homo sapiens
  CDR3 for alpha chain variable domain of TCR clone 372154 (TRAV3, TRAJ21)
CAVIEPDFNKFYF

SEQ ID NO: 744308 - protein, 15 aa, Homo sapiens
  CDR3 for beta chain variable domain of TCR clone 372154 (TRBV2, TRBJ2-1)
CASSELAGGYNEQFF

SEQ ID NO: 744309 - protein, 16 aa, Homo sapiens
  CDR3 for alpha chain variable domain of TCR clone 372155 (TRAV26-1, TRAJ53)
CIVRVAMGGSNYKLTF

SEQ ID NO: 744310 - protein, 19 aa, Homo sapiens
  CDR3 for beta chain variable domain of TCR clone 372155 (TRBV19, TRBJ2-5)
CASSIGQVTDFFLGETQYF

SEQ ID NO: 744311 - protein, 17 aa, Homo sapiens
  CDR3 for alpha chain variable domain of TCR clone 372156 (TRAV3, TRAJ12)
CAVRDGGRMDSSYKLIF

SEQ ID NO: 744312 - protein, 20 aa, Homo sapiens
  CDR3 for beta chain variable domain of TCR clone 372156 (TRBV28, TRBJ2-1)
CASTPIGRSPGLAGGNEQFF

SEQ ID NO: 744313 - protein, 16 aa, Homo sapiens
  CDR3 for alpha chain variable domain of TCR clone 372157 (TRAV12-2, TRAJ40)
CAVIRGGTSGTYKYIF

SEQ ID NO: 744314 - protein, 13 aa, Homo sapiens
  CDR3 for beta chain variable domain of TCR clone 372157 (TRBV20-1, TRBJ1-1)
CSAGTVGNTEAFF

SEQ ID NO: 744315 - protein, 14 aa, Homo sapiens
  CDR3 for alpha chain variable domain of TCR clone 372158 (TRAV8-2, TRAJ4)
CVVSPSGGYNKLIF

SEQ ID NO: 744316 - protein, 14 aa, Homo sapiens
  CDR3 for beta chain variable domain of TCR clone 372158 (TRBV7-7, TRBJ2-2)
CASSRDRSTGELFF

SEQ ID NO: 744317 - protein, 16 aa, Homo sapiens
  CDR3 for alpha chain variable domain of TCR clone 372159 (TRAV3, TRAJ37)
CAVRGKGSGNTGKLIF

SEQ ID NO: 744318 - protein, 15 aa, Homo sapiens
  CDR3 for beta chain variable domain of TCR clone 372159 (TRBV6-3, TRBJ2-2)
CASSFLATLTGELFF

SEQ ID NO: 744319 - protein, 15 aa, Homo sapiens
  CDR3 for alpha chain variable domain of TCR clone 372160 (TRAV14/DV4, TRAJ12)
CAMREGRDSSYKLIF

SEQ ID NO: 744320 - protein, 15 aa, Homo sapiens
  CDR3 for beta chain variable domain of TCR clone 372160 (TRBV6-1, TRBJ1-1)
CASRRGEGQLSEAFF

SEQ ID NO: 744321 - protein, 16 aa, Homo sapiens
  CDR3 for alpha chain variable domain of TCR clone 372161 (TRAV26-1, TRAJ48)
IASSDLSNFGNEQLTF

SEQ ID NO: 744322 - protein, 14 aa, Homo sapiens
  CDR3 for beta chain variable domain of TCR clone 372161 (TRBV13, TRBJ2-7)
CASSLKGASYEQYF

SEQ ID NO: 744323 - protein, 13 aa, Homo sapiens
  CDR3 for alpha chain variable domain of TCR clone 372162 (TRAV20, TRAJ21)
CAVEGYNFNKFYF

SEQ ID NO: 744324 - protein, 18 aa, Homo sapiens
  CDR3 for beta chain variable domain of TCR clone 372162 (TRBV4-1, TRBJ1-5)
CASSQDPRGQGLNQPQHF

SEQ ID NO: 744325 - protein, 15 aa, Homo sapiens
  CDR3 for alpha chain variable domain of TCR clone 372163 (TRAV13-1, TRAJ50)
CAAKGSETSYDKVRF

SEQ ID NO: 744326 - protein, 18 aa, Homo sapiens
  CDR3 for beta chain variable domain of TCR clone 372163 (TRBV10-3, TRBJ2-1)
CTSVPSVSLRGGVDEQFF

SEQ ID NO: 744327 - protein, 15 aa, Homo sapiens
  CDR3 for alpha chain variable domain of TCR clone 372164 (TRAV17, TRAJ57)
CATGPSQGRSEKLVF

SEQ ID NO: 744328 - protein, 16 aa, Homo sapiens
  CDR3 for beta chain variable domain of TCR clone 372164 (TRBV20-1, TRBJ1-1)
CSARALTQGMNTEAFF

SEQ ID NO: 744329 - protein, 16 aa, Homo sapiens
  CDR3 for alpha chain variable domain of TCR clone 372165 (TRAV8-3, TRAJ13)
CAVGAYPSGGYQKVTF

SEQ ID NO: 744330 - protein, 15 aa, Homo sapiens
  CDR3 for beta chain variable domain of TCR clone 372165 (TRBV19, TRBJ1-5)
SASSIVWADNQPQHF

SEQ ID NO: 744331 - protein, 10 aa, Homo sapiens
  CDR3 for alpha chain variable domain of TCR clone 372166 (TRAV13-1, TRAJ15)
INQAGTALIF

SEQ ID NO: 744332 - protein, 14 aa, Homo sapiens
  CDR3 for beta chain variable domain of TCR clone 372166 (TRBV7-9, TRBJ2-1)
CASSGNSGYNEQFF

SEQ ID NO: 744333 - protein, 13 aa, Homo sapiens
  CDR3 for alpha chain variable domain of TCR clone 372167 (TRAV29/DV5, TRAJ31)
CAASRNNNARLMF

SEQ ID NO: 744334 - protein, 11 aa, Homo sapiens
  CDR3 for beta chain variable domain of TCR clone 372167 (TRBV12-4, TRBJ2-2)
CASSSAGELFF

SEQ ID NO: 744335 - protein, 17 aa, Homo sapiens
  CDR3 for alpha chain variable domain of TCR clone 372168 (TRAV13-1, TRAJ52)
CAAGRNAGGTSYGKLTF

SEQ ID NO: 744336 - protein, 14 aa, Homo sapiens
  CDR3 for beta chain variable domain of TCR clone 372168 (TRBV7-3, TRBJ2-1)
CASSLAGGTNEQFF

SEQ ID NO: 744337 - protein, 12 aa, Homo sapiens
  CDR3 for alpha chain variable domain of TCR clone 372169 (TRAV12-2, TRAJ31)
CAVNTPDPRLMF

SEQ ID NO: 744338 - protein, 15 aa, Homo sapiens
  CDR3 for beta chain variable domain of TCR clone 372169 (TRBV4-2, TRBJ1-1)
CASSQDQGLNTEAFF

SEQ ID NO: 744339 - protein, 10 aa, Homo sapiens
  CDR3 for alpha chain variable domain of TCR clone 372170 (TRAV16, TRAJ22)
SAMYLRQLTF

SEQ ID NO: 744340 - protein, 14 aa, Homo sapiens
  CDR3 for beta chain variable domain of TCR clone 372170 (TRBV10-3, TRBJ2-7)
CAISAPRGAYEQYF

SEQ ID NO: 744341 - protein, 18 aa, Homo sapiens
  CDR3 for alpha chain variable domain of TCR clone 372171 (TRAV26-1, TRAJ52)
CIVRVAGAGGTSYGKRTF

SEQ ID NO: 744342 - protein, 13 aa, Homo sapiens
  CDR3 for beta chain variable domain of TCR clone 372171 (TRBV7-8, TRBJ1-2)
CASSAQSYYGYTF

SEQ ID NO: 744343 - protein, 14 aa, Homo sapiens
  CDR3 for alpha chain variable domain of TCR clone 372172 (TRAV1-2, TRAJ16)
FAVNRFSDGQKLLF

SEQ ID NO: 744344 - protein, 12 aa, Homo sapiens
  CDR3 for beta chain variable domain of TCR clone 372172 (TRBV28, TRBJ2-6)
CAIQAGTNVLTF

SEQ ID NO: 744345 - protein, 14 aa, Homo sapiens
  CDR3 for alpha chain variable domain of TCR clone 372173 (TRAV8-3, TRAJ44)
CAVGLTGTASKLTF

SEQ ID NO: 744346 - protein, 12 aa, Homo sapiens
  CDR3 for beta chain variable domain of TCR clone 372173 (TRBV7-3, TRBJ2-7)
CASSLGDREQYF

SEQ ID NO: 744347 - protein, 16 aa, Homo sapiens
  CDR3 for alpha chain variable domain of TCR clone 372174 (TRAV3, TRAJ6)
CAVRRTPPGGSYIPTF

SEQ ID NO: 744348 - protein, 14 aa, Homo sapiens
  CDR3 for beta chain variable domain of TCR clone 372174 (TRBV3-1, TRBJ1-5)
CPSSTGDSNQPQHF

SEQ ID NO: 744349 - protein, 22 aa, Homo sapiens
  CDR3 for alpha chain variable domain of TCR clone 372175 (TRAV34, TRAJ40)
PAQPCRHLPLWSGPSGTYKYIF

SEQ ID NO: 744350 - protein, 13 aa, Homo sapiens
  CDR3 for beta chain variable domain of TCR clone 372175 (TRBV19, TRBJ1-2)
CASSVPGQDGYTF

SEQ ID NO: 744351 - protein, 19 aa, Homo sapiens
  CDR3 for alpha chain variable domain of TCR clone 372176 (TRAV1-1, TRAJ13)
CLLLLRCEGESGGYQKVTF

SEQ ID NO: 744352 - protein, 16 aa, Homo sapiens
  CDR3 for beta chain variable domain of TCR clone 372176 (TRBV2, TRBJ2-1)
CASSVGGSLSYNEQFF

SEQ ID NO: 744353 - protein, 14 aa, Homo sapiens
  CDR3 for alpha chain variable domain of TCR clone 372177 (TRAV12-1, TRAJ12)
CVVTRMDSSYKLIF

SEQ ID NO: 744354 - protein, 16 aa, Homo sapiens
  CDR3 for beta chain variable domain of TCR clone 372177 (TRBV7-8, TRBJ2-3)
CASSTEGQRETDTQYF

SEQ ID NO: 744355 - protein, 18 aa, Homo sapiens
  CDR3 for alpha chain variable domain of TCR clone 372178 (TRAV12-3, TRAJ52)
CAMRVGGARGTSYGKLTF

SEQ ID NO: 744356 - protein, 15 aa, Homo sapiens
  CDR3 for beta chain variable domain of TCR clone 372178 (TRBV27, TRBJ1-6)
CASSFDRGLGSPLHF

SEQ ID NO: 744357 - protein, 16 aa, Homo sapiens
  CDR3 for alpha chain variable domain of TCR clone 372179 (TRAV8-4, TRAJ5)
CAVSPLTDTGRRALTF

SEQ ID NO: 744358 - protein, 12 aa, Homo sapiens
  CDR3 for beta chain variable domain of TCR clone 372179 (TRBV28, TRBJ2-3)
CASSLYRDTQYF

SEQ ID NO: 744359 - protein, 16 aa, Homo sapiens
  CDR3 for alpha chain variable domain of TCR clone 372180 (TRAV8-3, TRAJ10)
CAVGPILTGGGNKLIF

SEQ ID NO: 744360 - protein, 16 aa, Homo sapiens
  CDR3 for beta chain variable domain of TCR clone 372180 (TRBV7-2, TRBJ2-5)
CASSSKWLSGQETQYF

SEQ ID NO: 744361 - protein, 11 aa, Homo sapiens
  CDR3 for alpha chain variable domain of TCR clone 372181 (TRAV3, TRAJ21)
CAVGNFNKFYF

SEQ ID NO: 744362 - protein, 15 aa, Homo sapiens
  CDR3 for beta chain variable domain of TCR clone 372181 (TRBV4-1, TRBJ2-5)
CASSQSRGDEETQYF

SEQ ID NO: 744363 - protein, 11 aa, Homo sapiens
  CDR3 for alpha chain variable domain of TCR clone 372182 (TRAV13-2, TRAJ31)
CVENMDARLMF

SEQ ID NO: 744364 - protein, 15 aa, Homo sapiens
  CDR3 for beta chain variable domain of TCR clone 372182 (TRBV7-8, TRBJ1-2)
CASSLVRDGGLGYTF

SEQ ID NO: 744365 - protein, 17 aa, Homo sapiens
  CDR3 for alpha chain variable domain of TCR clone 372183 (TRAV8-6, TRAJ8)
CAVKEGIENTGFQKLVF

SEQ ID NO: 744366 - protein, 15 aa, Homo sapiens
  CDR3 for beta chain variable domain of TCR clone 372183 (TRBV7-2, TRBJ2-1)
CVSSSGLAGGNEQFF

SEQ ID NO: 744367 - protein, 11 aa, Homo sapiens
  CDR3 for alpha chain variable domain of TCR clone 372184 (TRAV13-2, TRAJ45)
VTGGGADGLTF

SEQ ID NO: 744368 - protein, 17 aa, Homo sapiens
  CDR3 for beta chain variable domain of TCR clone 372184 (TRBV19, TRBJ1-1)
CAGSIAGRGLMNTEAFF

SEQ ID NO: 744369 - protein, 15 aa, Homo sapiens
  CDR3 for alpha chain variable domain of TCR clone 372185 (TRAV26-1, TRAJ22)
CIVRVSFWFCKATDL

SEQ ID NO: 744370 - protein, 13 aa, Homo sapiens
  CDR3 for beta chain variable domain of TCR clone 372185 (TRBV7-9, TRBJ1-2)
CASSLKQNYGDTV

SEQ ID NO: 744371 - protein, 16 aa, Homo sapiens
  CDR3 for alpha chain variable domain of TCR clone 372186 (TRAV12-3, TRAJ53)
CAMSPGSGGSNYKLTF

SEQ ID NO: 744372 - protein, 18 aa, Homo sapiens
  CDR3 for beta chain variable domain of TCR clone 372186 (TRBV10-2, TRBJ2-2)
CISASAVHRQADAGELFF

SEQ ID NO: 744373 - protein, 15 aa, Homo sapiens
  CDR3 for alpha chain variable domain of TCR clone 372187 (TRAV17, TRAJ35)
CATAFVIGFGNVLHC

SEQ ID NO: 744374 - protein, 16 aa, Homo sapiens
  CDR3 for beta chain variable domain of TCR clone 372187 (TRBV11-2, TRBJ2-7)
CASSPLAGGPGYEQYF

SEQ ID NO: 744375 - protein, 14 aa, Homo sapiens
  CDR3 for alpha chain variable domain of TCR clone 372188 (TRAV1-2, TRAJ6)
CAVSLSGGSYIPTF

SEQ ID NO: 744376 - protein, 14 aa, Homo sapiens
  CDR3 for beta chain variable domain of TCR clone 372188 (TRBV9, TRBJ2-4)
CASSPSGTSGFQYF

SEQ ID NO: 744377 - protein, 14 aa, Homo sapiens
  CDR3 for alpha chain variable domain of TCR clone 372189 (TRAV1-1, TRAJ27)
CAVIYNTNTGKSNF

SEQ ID NO: 744378 - protein, 13 aa, Homo sapiens
  CDR3 for beta chain variable domain of TCR clone 372189 (TRBV12-5, TRBJ1-2)
CASGVRTGNGYTF

SEQ ID NO: 744379 - protein, 15 aa, Homo sapiens
  CDR3 for alpha chain variable domain of TCR clone 372190 (TRAV12-1, TRAJ44)
CVADLPTGTASKLTF

SEQ ID NO: 744380 - protein, 14 aa, Homo sapiens
  CDR3 for beta chain variable domain of TCR clone 372190 (TRBV6-1, TRBJ2-1)
CASAKDGFYSEQFV

SEQ ID NO: 744381 - protein, 12 aa, Homo sapiens
  CDR3 for alpha chain variable domain of TCR clone 372191 (TRAV12-3, TRAJ42)
FAPGGSQGNLIF

SEQ ID NO: 744382 - protein, 13 aa, Homo sapiens
  CDR3 for beta chain variable domain of TCR clone 372191 (TRBV5-7, TRBJ2-6)
CASTSSGANVLTF

SEQ ID NO: 744383 - protein, 15 aa, Homo sapiens
  CDR3 for alpha chain variable domain of TCR clone 372192 (TRAV8-3, TRAJ27)
CAVGPSKTNAGKSTF

SEQ ID NO: 744384 - protein, 18 aa, Homo sapiens
  CDR3 for beta chain variable domain of TCR clone 372192 (TRBV24-1, TRBJ2-1)
CATSDLMFLGRGVHEQVF

SEQ ID NO: 744385 - protein, 13 aa, Homo sapiens
  CDR3 for alpha chain variable domain of TCR clone 372193 (TRAV3, TRAJ20)
CAVRDTPRYKLSF

SEQ ID NO: 744386 - protein, 16 aa, Homo sapiens
  CDR3 for beta chain variable domain of TCR clone 372193 (TRBV20-1, TRBJ2-7)
CSARAPGLALSYEKYF

SEQ ID NO: 744387 - protein, 17 aa, Homo sapiens
  CDR3 for alpha chain variable domain of TCR clone 372194 (TRAV14/DV4, TRAJ28)
CAMRGTSSGAGSYQLTF

SEQ ID NO: 744388 - protein, 13 aa, Homo sapiens
  CDR3 for beta chain variable domain of TCR clone 372194 (TRBV28, TRBJ2-5)
YASSFAGGETQYF

SEQ ID NO: 744389 - protein, 12 aa, Homo sapiens
  CDR3 for alpha chain variable domain of TCR clone 372195 (TRAV12-3, TRAJ17)
CAMTLTGNKLTF

SEQ ID NO: 744390 - protein, 13 aa, Homo sapiens
  CDR3 for beta chain variable domain of TCR clone 372195 (TRBV27, TRBJ2-1)
CASRTLGVGEQLF

SEQ ID NO: 744391 - protein, 11 aa, Homo sapiens
  CDR3 for alpha chain variable domain of TCR clone 372196 (TRAV21, TRAJ48)
CAVDGNEKLTF

SEQ ID NO: 744392 - protein, 11 aa, Homo sapiens
  CDR3 for beta chain variable domain of TCR clone 372196 (TRBV25-1, TRBJ1-1)
CASRVFTEAFF

SEQ ID NO: 744393 - protein, 14 aa, Homo sapiens
  CDR3 for alpha chain variable domain of TCR clone 372197 (TRAV8-3, TRAJ35)
CAVGAGGFGNVLHC

SEQ ID NO: 744394 - protein, 16 aa, Homo sapiens
  CDR3 for beta chain variable domain of TCR clone 372197 (TRBV7-7, TRBJ2-1)
CASSLASGTSYNEQFF

SEQ ID NO: 744395 - protein, 10 aa, Homo sapiens
  CDR3 for alpha chain variable domain of TCR clone 372198 (TRAV23/DV6, TRAJ57)
CAASSTLSQG

SEQ ID NO: 744396 - protein, 12 aa, Homo sapiens
  CDR3 for beta chain variable domain of TCR clone 372198 (TRBV7-8, TRBJ2-7)
CASSRGDREQYF

SEQ ID NO: 744397 - protein, 14 aa, Homo sapiens
  CDR3 for alpha chain variable domain of TCR clone 372199 (TRAV29/DV5, TRAJ32)
CAASQGGATNKLIF

SEQ ID NO: 744398 - protein, 14 aa, Homo sapiens
  CDR3 for beta chain variable domain of TCR clone 372199 (TRBV4-1, TRBJ2-2)
CASSQSVNTGELFF

SEQ ID NO: 744399 - protein, 14 aa, Homo sapiens
  CDR3 for alpha chain variable domain of TCR clone 372200 (TRAV8-4, TRAJ42)
CAVSEGGSQGNLIF

SEQ ID NO: 744400 - protein, 14 aa, Homo sapiens
  CDR3 for beta chain variable domain of TCR clone 372200 (TRBV18, TRBJ1-2)
CASSPDRVVYGYTF

SEQ ID NO: 744401 - protein, 13 aa, Homo sapiens
  CDR3 for alpha chain variable domain of TCR clone 372201 (TRAV23/DV6, TRAJ22)
CAPYSGPARQLTF

SEQ ID NO: 744402 - protein, 15 aa, Homo sapiens
  CDR3 for beta chain variable domain of TCR clone 372201 (TRBV11-2, TRBJ1-6)
CASSLDPWAVSPLHF

SEQ ID NO: 744403 - protein, 13 aa, Homo sapiens
  CDR3 for alpha chain variable domain of TCR clone 372202 (TRAV16, TRAJ10)
CALLTGGGNNLTF

SEQ ID NO: 744404 - protein, 12 aa, Homo sapiens
  CDR3 for beta chain variable domain of TCR clone 372202 (TRBV28, TRBJ2-7)
CASTGNHYEQYF

SEQ ID NO: 744405 - protein, 13 aa, Homo sapiens
  CDR3 for alpha chain variable domain of TCR clone 372203 (TRAV3, TRAJ36)
CAVRDTGANNLFF

SEQ ID NO: 744406 - protein, 15 aa, Homo sapiens
  CDR3 for beta chain variable domain of TCR clone 372203 (TRBV24-1, TRBJ2-1)
CATSGSGGLYNEQFF

SEQ ID NO: 744407 - protein, 17 aa, Homo sapiens
  CDR3 for alpha chain variable domain of TCR clone 372204 (TRAV3, TRAJ6)
CAVRDGPRAGGSYIPTF

SEQ ID NO: 744408 - protein, 12 aa, Homo sapiens
  CDR3 for beta chain variable domain of TCR clone 372204 (TRBV7-9, TRBJ1-6)
CASSLMTSPLHF

SEQ ID NO: 744409 - protein, 12 aa, Homo sapiens
  CDR3 for alpha chain variable domain of TCR clone 372205 (TRAV40, TRAJ20)
CLLGLNDYKLSF

SEQ ID NO: 744410 - protein, 14 aa, Homo sapiens
  CDR3 for beta chain variable domain of TCR clone 372205 (TRBV7-8, TRBJ1-2)
CASSPDSLSYGYTF

SEQ ID NO: 744411 - protein, 14 aa, Homo sapiens
  CDR3 for alpha chain variable domain of TCR clone 372206 (TRAV1-2, TRAJ8)
CAVREDTGFQKLVF

SEQ ID NO: 744412 - protein, 17 aa, Homo sapiens
  CDR3 for beta chain variable domain of TCR clone 372206 (TRBV20-1, TRBJ2-1)
CRASSSGLAGSYNEQFF

SEQ ID NO: 744413 - protein, 12 aa, Homo sapiens
  CDR3 for alpha chain variable domain of TCR clone 372207 (TRAV13-1, TRAJ15)
CAASKAGTALIF

SEQ ID NO: 744414 - protein, 14 aa, Homo sapiens
  CDR3 for beta chain variable domain of TCR clone 372207 (TRBV19, TRBJ2-1)
CASPTVVLSGEQFF

SEQ ID NO: 744415 - protein, 17 aa, Homo sapiens
  CDR3 for alpha chain variable domain of TCR clone 372208 (TRAV17, TRAJ28)
CATDPRRGGAGSYQPTF

SEQ ID NO: 744416 - protein, 14 aa, Homo sapiens
  CDR3 for beta chain variable domain of TCR clone 372208 (TRBV19, TRBJ2-7)
CASRPGTGVNEQYF

SEQ ID NO: 744417 - protein, 13 aa, Homo sapiens
  CDR3 for alpha chain variable domain of TCR clone 372209 (TRAV13-1, TRAJ43)
CAASLSNNNDMRF

SEQ ID NO: 744418 - protein, 14 aa, Homo sapiens
  CDR3 for beta chain variable domain of TCR clone 372209 (TRBV12-5, TRBJ2-5)
CASGSRTHQETQYF

SEQ ID NO: 744419 - protein, 20 aa, Homo sapiens
  CDR3 for alpha chain variable domain of TCR clone 372210 (TRAV26-1, TRAJ47)
CCVLLHRQSSFMEYGNKLVF

SEQ ID NO: 744420 - protein, 14 aa, Homo sapiens
  CDR3 for beta chain variable domain of TCR clone 372210 (TRBV7-2, TRBJ1-2)
CASSRGGTNYSYTF

SEQ ID NO: 744421 - protein, 14 aa, Homo sapiens
  CDR3 for alpha chain variable domain of TCR clone 372211 (TRAV12-2, TRAJ17)
CAVLFKDAGNKLTF

SEQ ID NO: 744422 - protein, 15 aa, Homo sapiens
  CDR3 for beta chain variable domain of TCR clone 372211 (TRBV20-1, TRBJ2-7)
CSARDRVSGMDEQYF

SEQ ID NO: 744423 - protein, 14 aa, Homo sapiens
  CDR3 for alpha chain variable domain of TCR clone 372212 (TRAV8-1, TRAJ5)
CAVRTDTGRRALTL

SEQ ID NO: 744424 - protein, 14 aa, Homo sapiens
  CDR3 for beta chain variable domain of TCR clone 372212 (TRBV7-8, TRBJ2-3)
CASSFPDGQETQYF

SEQ ID NO: 744425 - protein, 19 aa, Homo sapiens
  CDR3 for alpha chain variable domain of TCR clone 372213 (TRAV26-1, TRAJ50)
CCVLLHRQNPKTSYDKVTF

SEQ ID NO: 744426 - protein, 17 aa, Homo sapiens
  CDR3 for beta chain variable domain of TCR clone 372213 (TRBV4-1, TRBJ1-4)
CASSQEGPRGVEEKLFF

SEQ ID NO: 744427 - protein, 15 aa, Homo sapiens
  CDR3 for alpha chain variable domain of TCR clone 372214 (TRAV4, TRAJ39)
CLVGPNNNAGNMLTF

SEQ ID NO: 744428 - protein, 12 aa, Homo sapiens
  CDR3 for beta chain variable domain of TCR clone 372214 (TRBV28, TRBJ2-7)
CASSFSSYEQYF

SEQ ID NO: 744429 - protein, 14 aa, Homo sapiens
  CDR3 for alpha chain variable domain of TCR clone 372215 (TRAV2, TRAJ9)
CAVEDRSGGFKTIF

SEQ ID NO: 744430 - protein, 12 aa, Homo sapiens
  CDR3 for beta chain variable domain of TCR clone 372215 (TRBV6-5, TRBJ2-2)
CASRTGTGELFF

SEQ ID NO: 744431 - protein, 14 aa, Homo sapiens
  CDR3 for alpha chain variable domain of TCR clone 372216 (TRAV1-2, TRAJ16)
CAVNRFSDGQKRLF

SEQ ID NO: 744432 - protein, 16 aa, Homo sapiens
  CDR3 for beta chain variable domain of TCR clone 372216 (TRBV13, TRBJ2-2)
CASSPRTGEHTGELFF

SEQ ID NO: 744433 - protein, 14 aa, Homo sapiens
  CDR3 for alpha chain variable domain of TCR clone 372217 (TRAV12-3, TRAJ10)
SHLPLTGGGNKLSF

SEQ ID NO: 744434 - protein, 14 aa, Homo sapiens
  CDR3 for beta chain variable domain of TCR clone 372217 (TRBV7-2, TRBJ1-1)
CASSFLTGTTEAFF

SEQ ID NO: 744435 - protein, 16 aa, Homo sapiens
  CDR3 for alpha chain variable domain of TCR clone 372218 (TRAV12-3, TRAJ53)
CAMSPGSGGSNYKLTF

SEQ ID NO: 744436 - protein, 15 aa, Homo sapiens
  CDR3 for beta chain variable domain of TCR clone 372218 (TRBV4-2, TRBJ1-1)
CQQPSGVWMNPEAFF

SEQ ID NO: 744437 - protein, 15 aa, Homo sapiens
  CDR3 for alpha chain variable domain of TCR clone 372219 (TRAV13-1, TRAJ50)
CAAKGSETSYDKVIV

SEQ ID NO: 744438 - protein, 13 aa, Homo sapiens
  CDR3 for beta chain variable domain of TCR clone 372219 (TRBV20-1, TRBJ2-3)
CSARAGGRDTQYF

SEQ ID NO: 744439 - protein, 13 aa, Homo sapiens
  CDR3 for alpha chain variable domain of TCR clone 372220 (TRAV16, TRAJ27)
CALRRTNACKSTF

SEQ ID NO: 744440 - protein, 15 aa, Homo sapiens
  CDR3 for beta chain variable domain of TCR clone 372220 (TRBV18, TRBJ2-1)
CASSPPSASYNEQFF

SEQ ID NO: 744441 - protein, 13 aa, Homo sapiens
  CDR3 for alpha chain variable domain of TCR clone 372221 (TRAV8-3, TRAJ20)
CAVGRPNDYKLSF

SEQ ID NO: 744442 - protein, 13 aa, Homo sapiens
  CDR3 for beta chain variable domain of TCR clone 372221 (TRBV6-5, TRBJ1-4)
CASSYLSQEKLLF

SEQ ID NO: 744443 - protein, 14 aa, Homo sapiens
  CDR3 for alpha chain variable domain of TCR clone 372222 (TRAV13-1, TRAJ44)
CAAKATGTASKLNF

SEQ ID NO: 744444 - protein, 14 aa, Homo sapiens
  CDR3 for beta chain variable domain of TCR clone 372222 (TRBV25-1, TRBJ1-1)
CASTHLGGNTEAFF

SEQ ID NO: 744445 - protein, 13 aa, Homo sapiens
  CDR3 for alpha chain variable domain of TCR clone 372223 (TRAV27, TRAJ49)
CAPRPYTGNQFYF

SEQ ID NO: 744446 - protein, 18 aa, Homo sapiens
  CDR3 for beta chain variable domain of TCR clone 372223 (TRBV7-3, TRBJ2-5)
CASSLGGAAKGRWETQYF

SEQ ID NO: 744447 - protein, 14 aa, Homo sapiens
  CDR3 for alpha chain variable domain of TCR clone 372224 (TRAV38-2/DV8, TRAJ54)
CAYRRIQGAQKLVF

SEQ ID NO: 744448 - protein, 14 aa, Homo sapiens
  CDR3 for beta chain variable domain of TCR clone 372224 (TRBV7-2, TRBJ2-7)
CASSPKTSFYEQYF

SEQ ID NO: 744449 - protein, 13 aa, Homo sapiens
  CDR3 for alpha chain variable domain of TCR clone 372225 (TRAV2, TRAJ40)
CAVVTSGAYKYIF

SEQ ID NO: 744450 - protein, 13 aa, Homo sapiens
  CDR3 for beta chain variable domain of TCR clone 372225 (TRBV12-4, TRBJ1-1)
CASSPGTGFEAFF

SEQ ID NO: 744451 - protein, 14 aa, Homo sapiens
  CDR3 for alpha chain variable domain of TCR clone 372226 (TRAV1-2, TRAJ6)
CALSLSGGSYIPTF

SEQ ID NO: 744452 - protein, 15 aa, Homo sapiens
  CDR3 for beta chain variable domain of TCR clone 372226 (TRBV28, TRBJ2-7)
CASSPGGGGFYEQYF

SEQ ID NO: 744453 - protein, 17 aa, Homo sapiens
  CDR3 for alpha chain variable domain of TCR clone 372227 (TRAV8-1, TRAJ43)
CAVTNDMRFGAGTRLTV

SEQ ID NO: 744454 - protein, 17 aa, Homo sapiens
  CDR3 for beta chain variable domain of TCR clone 372227 (TRBV5-4, TRBJ2-1)
CASSSAGGRGPYNEQFV

SEQ ID NO: 744455 - protein, 17 aa, Homo sapiens
  CDR3 for alpha chain variable domain of TCR clone 372228 (TRAV23/DV6, TRAJ57)
CAASSTLSQGGSEKLVF

SEQ ID NO: 744456 - protein, 15 aa, Homo sapiens
  CDR3 for beta chain variable domain of TCR clone 372228 (TRBV14, TRBJ1-1)
CASSQDGMGRREAFF

SEQ ID NO: 744457 - protein, 15 aa, Homo sapiens
  CDR3 for alpha chain variable domain of TCR clone 372229 (TRAV2, TRAJ9)
CAVEDRGTGGCKTIF

SEQ ID NO: 744458 - protein, 14 aa, Homo sapiens
  CDR3 for beta chain variable domain of TCR clone 372229 (TRBV2, TRBJ2-3)
CASSEGQNTDTQYF

SEQ ID NO: 744459 - protein, 14 aa, Homo sapiens
  CDR3 for alpha chain variable domain of TCR clone 372230 (TRAV27, TRAJ22)
CAGLPSGSARQLTF

SEQ ID NO: 744460 - protein, 16 aa, Homo sapiens
  CDR3 for beta chain variable domain of TCR clone 372230 (TRBV5-1, TRBJ2-2)
CASSLWDTTNTGELFF

SEQ ID NO: 744461 - protein, 12 aa, Homo sapiens
  CDR3 for alpha chain variable domain of TCR clone 372231 (TRAV12-2, TRAJ20)
CAVNRNDYKLSF

SEQ ID NO: 744462 - protein, 14 aa, Homo sapiens
  CDR3 for beta chain variable domain of TCR clone 372231 (TRBV7-3, TRBJ2-1)
CANSLAGGTNEQFF

SEQ ID NO: 744463 - protein, 17 aa, Homo sapiens
  CDR3 for alpha chain variable domain of TCR clone 372232 (TRAV3, TRAJ6)
CAVSRRTDTGGSYIPTF

SEQ ID NO: 744464 - protein, 18 aa, Homo sapiens
  CDR3 for beta chain variable domain of TCR clone 372232 (TRBV7-2, TRBJ2-3)
CASSFETSRGRKADTQYF

SEQ ID NO: 744465 - protein, 13 aa, Homo sapiens
  CDR3 for alpha chain variable domain of TCR clone 372233 (TRAV8-3, TRAJ48)
CAVVPFGNEKLTF

SEQ ID NO: 744466 - protein, 15 aa, Homo sapiens
  CDR3 for beta chain variable domain of TCR clone 372233 (TRBV11-2, TRBJ2-1)
CASSSPSTRYNAQFF

SEQ ID NO: 744467 - protein, 20 aa, Homo sapiens
  CDR3 for alpha chain variable domain of TCR clone 372234 (TRAV12-3, TRAJ4)
CAMTGAGTRPAVHPYIQNPD

SEQ ID NO: 744468 - protein, 14 aa, Homo sapiens
  CDR3 for beta chain variable domain of TCR clone 372234 (TRBV10-3, TRBJ1-1)
CAISDTDRGVEAFF

SEQ ID NO: 744469 - protein, 17 aa, Homo sapiens
  CDR3 for alpha chain variable domain of TCR clone 372235 (TRAV3, TRAJ42)
CAVRDRDYGGSQGNFIF

SEQ ID NO: 744470 - protein, 14 aa, Homo sapiens
  CDR3 for beta chain variable domain of TCR clone 372235 (TRBV19, TRBJ2-2)
CTSSGQGIAGELFF

SEQ ID NO: 744471 - protein, 14 aa, Homo sapiens
  CDR3 for alpha chain variable domain of TCR clone 372236 (TRAV38-1, TRAJ40)
CALRPTSGTYKYIF

SEQ ID NO: 744472 - protein, 17 aa, Homo sapiens
  CDR3 for beta chain variable domain of TCR clone 372236 (TRBV7-7, TRBJ1-1)
CASIGDRPNLGVTEAFF

SEQ ID NO: 744473 - protein, 14 aa, Homo sapiens
  CDR3 for alpha chain variable domain of TCR clone 372237 (TRAV17, TRAJ57)
CATDPHGGSEKLVF

SEQ ID NO: 744474 - protein, 15 aa, Homo sapiens
  CDR3 for beta chain variable domain of TCR clone 372237 (TRBV27, TRBJ2-1)
CASSNGGGSSNEQFF

SEQ ID NO: 744475 - protein, 15 aa, Homo sapiens
  CDR3 for alpha chain variable domain of TCR clone 372238 (TRAV2, TRAJ3)
CAVPPGYSSASTIIF

SEQ ID NO: 744476 - protein, 15 aa, Homo sapiens
  CDR3 for beta chain variable domain of TCR clone 372238 (TRBV7-9, TRBJ1-2)
CASSLDREPNYGYTF

SEQ ID NO: 744477 - protein, 15 aa, Homo sapiens
  CDR3 for alpha chain variable domain of TCR clone 372239 (TRAV35, TRAJ52)
CAELAGGTSYGKLTF

SEQ ID NO: 744478 - protein, 13 aa, Homo sapiens
  CDR3 for beta chain variable domain of TCR clone 372239 (TRBV19, TRBJ1-2)
CASSQGQVYGYTF

SEQ ID NO: 744479 - protein, 15 aa, Homo sapiens
  CDR3 for alpha chain variable domain of TCR clone 372240 (TRAV14/DV4, TRAJ10)
CAMRELTGGGNKLTF

SEQ ID NO: 744480 - protein, 15 aa, Homo sapiens
  CDR3 for beta chain variable domain of TCR clone 372240 (TRBV10-3, TRBJ2-3)
CAISRTSGGTDTQYF

SEQ ID NO: 744481 - protein, 17 aa, Homo sapiens
  CDR3 for alpha chain variable domain of TCR clone 372241 (TRAV3, TRAJ38)
CAVRGCLNAGNNRKLNW

SEQ ID NO: 744482 - protein, 16 aa, Homo sapiens
  CDR3 for beta chain variable domain of TCR clone 372241 (TRBV20-1, TRBJ1-4)
CSAPGQGLLTNEKLFF

SEQ ID NO: 744483 - protein, 13 aa, Homo sapiens
  CDR3 for alpha chain variable domain of TCR clone 372242 (TRAV13-1, TRAJ11)
CAAVLAGYSTLTF

SEQ ID NO: 744484 - protein, 17 aa, Homo sapiens
  CDR3 for beta chain variable domain of TCR clone 372242 (TRBV25-1, TRBJ2-7)
CASSDAKVVFSSYEQYF

SEQ ID NO: 744485 - protein, 13 aa, Homo sapiens
  CDR3 for alpha chain variable domain of TCR clone 372243 (TRAV17, TRAJ5)
CAPMDTGRRALTF

SEQ ID NO: 744486 - protein, 16 aa, Homo sapiens
  CDR3 for beta chain variable domain of TCR clone 372243 (TRBV27, TRBJ2-7)
CANSSERGDSPYEQYF

SEQ ID NO: 744487 - protein, 15 aa, Homo sapiens
  CDR3 for alpha chain variable domain of TCR clone 372244 (TRAV35, TRAJ40)
CAGQLGTSGTYKYIF

SEQ ID NO: 744488 - protein, 13 aa, Homo sapiens
  CDR3 for beta chain variable domain of TCR clone 372244 (TRBV5-5, TRBJ1-2)
CASSFWRGEDYTF

SEQ ID NO: 744489 - protein, 14 aa, Homo sapiens
  CDR3 for alpha chain variable domain of TCR clone 372245 (TRAV8-1, TRAJ24)
CAVNAADCWGKLHF

SEQ ID NO: 744490 - protein, 16 aa, Homo sapiens
  CDR3 for beta chain variable domain of TCR clone 372245 (TRBV4-3, TRBJ2-1)
CASSPALDRGVNEQFF

SEQ ID NO: 744491 - protein, 14 aa, Homo sapiens
  CDR3 for alpha chain variable domain of TCR clone 372246 (TRAV23/DV6, TRAJ13)
CAASDSGGYQKVTF

SEQ ID NO: 744492 - protein, 15 aa, Homo sapiens
  CDR3 for beta chain variable domain of TCR clone 372246 (TRBV7-2, TRBJ2-2)
CASRRPGQNTGELFF

SEQ ID NO: 744493 - protein, 10 aa, Homo sapiens
  CDR3 for alpha chain variable domain of TCR clone 372247 (TRAV23/DV6, TRAJ57)
CAASSTLSQG

SEQ ID NO: 744494 - protein, 14 aa, Homo sapiens
  CDR3 for beta chain variable domain of TCR clone 372247 (TRBV25-1, TRBJ1-1)
CASTHLGGNTEAVV

SEQ ID NO: 744495 - protein, 13 aa, Homo sapiens
  CDR3 for alpha chain variable domain of TCR clone 372248 (TRAV12-2, TRAJ15)
CAVFNQAGTALIF

SEQ ID NO: 744496 - protein, 12 aa, Homo sapiens
  CDR3 for beta chain variable domain of TCR clone 372248 (TRBV11-2, TRBJ2-2)
CASSLGGGELFF

SEQ ID NO: 744497 - protein, 14 aa, Homo sapiens
  CDR3 for alpha chain variable domain of TCR clone 372249 (TRAV25, TRAJ22)
CAVRSSGSARQLTF

SEQ ID NO: 744498 - protein, 13 aa, Homo sapiens
  CDR3 for beta chain variable domain of TCR clone 372249 (TRBV25-1, TRBJ1-2)
CASSPAGLYGYTF

SEQ ID NO: 744499 - protein, 15 aa, Homo sapiens
  CDR3 for alpha chain variable domain of TCR clone 372250 (TRAV30, TRAJ32)
CGTEILGGATNKLIF

SEQ ID NO: 744500 - protein, 13 aa, Homo sapiens
  CDR3 for beta chain variable domain of TCR clone 372250 (TRBV6-3, TRBJ2-7)
CASSFSGGYGQYF

SEQ ID NO: 744501 - protein, 15 aa, Homo sapiens
  CDR3 for alpha chain variable domain of TCR clone 372251 (TRAV8-3, TRAJ11)
CAVGLLNSGYSTLTF

SEQ ID NO: 744502 - protein, 16 aa, Homo sapiens
  CDR3 for beta chain variable domain of TCR clone 372251 (TRBV7-9, TRBJ2-7)
CASSLGFSSGEDGYTF

SEQ ID NO: 744503 - protein, 16 aa, Homo sapiens
  CDR3 for alpha chain variable domain of TCR clone 372252 (TRAV3, TRAJ6)
CAVRDGMGRRKINTYI

SEQ ID NO: 744504 - protein, 15 aa, Homo sapiens
  CDR3 for beta chain variable domain of TCR clone 372252 (TRBV9, TRBJ2-1)
CASSLAGSSYNEQFF

SEQ ID NO: 744505 - protein, 11 aa, Homo sapiens
  CDR3 for alpha chain variable domain of TCR clone 372253 (TRAV2, TRAJ33)
CAVDSNYQLIW

SEQ ID NO: 744506 - protein, 13 aa, Homo sapiens
  CDR3 for beta chain variable domain of TCR clone 372253 (TRBV15, TRBJ2-5)
CATSQIVEETQYS

SEQ ID NO: 744507 - protein, 13 aa, Homo sapiens
  CDR3 for alpha chain variable domain of TCR clone 372254 (TRAV21, TRAJ47)
CAVSGLYGSKLVF

SEQ ID NO: 744508 - protein, 17 aa, Homo sapiens
  CDR3 for beta chain variable domain of TCR clone 372254 (TRBV15, TRBJ2-3)
CATSGTTSEEGTDTQYF

SEQ ID NO: 744509 - protein, 15 aa, Homo sapiens
  CDR3 for alpha chain variable domain of TCR clone 372255 (TRAV26-1, TRAJ56)
CIVRVPTGANSKLTF

SEQ ID NO: 744510 - protein, 15 aa, Homo sapiens
  CDR3 for beta chain variable domain of TCR clone 372255 (TRBV27, TRBJ2-7)
CASSPQREGQREQYF

SEQ ID NO: 744511 - protein, 11 aa, Homo sapiens
  CDR3 for alpha chain variable domain of TCR clone 372256 (TRAV12-2, TRAJ23)
CARGRGGKLIF

SEQ ID NO: 744512 - protein, 14 aa, Homo sapiens
  CDR3 for beta chain variable domain of TCR clone 372256 (TRBV28, TRBJ2-5)
CASSQGDRAETQYF

SEQ ID NO: 744513 - protein, 14 aa, Homo sapiens
  CDR3 for alpha chain variable domain of TCR clone 372257 (TRAV1-2, TRAJ16)
CAVNRFSDGQKLLF

SEQ ID NO: 744514 - protein, 14 aa, Homo sapiens
  CDR3 for beta chain variable domain of TCR clone 372257 (TRBV11-2, TRBJ2-7)
FASSLGNSLYEQYF

SEQ ID NO: 744515 - protein, 18 aa, Homo sapiens
  CDR3 for alpha chain variable domain of TCR clone 372258 (TRAV13-1, TRAJ52)
CAAKNPNAGGTSYGKLTF

SEQ ID NO: 744516 - protein, 14 aa, Homo sapiens
  CDR3 for beta chain variable domain of TCR clone 372258 (TRBV7-2, TRBJ1-2)
CASSPKELSYGYTF

SEQ ID NO: 744517 - protein, 17 aa, Homo sapiens
  CDR3 for alpha chain variable domain of TCR clone 372259 (TRAV3, TRAJ6)
CAVKDGPRAGGSYIPTF

SEQ ID NO: 744518 - protein, 14 aa, Homo sapiens
  CDR3 for beta chain variable domain of TCR clone 372259 (TRBV7-2, TRBJ2-7)
CASSPKTSFYEQYV

SEQ ID NO: 744519 - protein, 18 aa, Homo sapiens
  CDR3 for alpha chain variable domain of TCR clone 372260 (TRAV3, TRAJ32)
CAVRDIRGHGGATNKLIF

SEQ ID NO: 744520 - protein, 15 aa, Homo sapiens
  CDR3 for beta chain variable domain of TCR clone 372260 (TRBV12-4, TRBJ2-2)
CASSLAVRHTGELFF

SEQ ID NO: 744521 - protein, 14 aa, Homo sapiens
  CDR3 for alpha chain variable domain of TCR clone 372261 (TRAV12-2, TRAJ40)
CAVKIPSGTYKYIF

SEQ ID NO: 744522 - protein, 16 aa, Homo sapiens
  CDR3 for beta chain variable domain of TCR clone 372261 (TRBV10-2, TRBJ2-7)
CASSESPGSSGFEQYF

SEQ ID NO: 744523 - protein, 12 aa, Homo sapiens
  CDR3 for alpha chain variable domain of TCR clone 372262 (TRAV13-1, TRAJ42)
LNYGGSQGNLIF

SEQ ID NO: 744524 - protein, 15 aa, Homo sapiens
  CDR3 for beta chain variable domain of TCR clone 372262 (TRBV20-1, TRBJ2-1)
CSASSAGSSYNEQFF

SEQ ID NO: 744525 - protein, 15 aa, Homo sapiens
  CDR3 for alpha chain variable domain of TCR clone 372263 (TRAV29/DV5, TRAJ53)
CAASASGGSNYKLRF

SEQ ID NO: 744526 - protein, 19 aa, Homo sapiens
  CDR3 for beta chain variable domain of TCR clone 372263 (TRBV5-1, TRBJ2-3)
CASSLWLAGGITTTDTQYF

SEQ ID NO: 744527 - protein, 18 aa, Homo sapiens
  CDR3 for alpha chain variable domain of TCR clone 372264 (TRAV21, TRAJ53)
CAVKGGENSGGSNYKMKF

SEQ ID NO: 744528 - protein, 14 aa, Homo sapiens
  CDR3 for beta chain variable domain of TCR clone 372264 (TRBV11-3, TRBJ1-5)
LTGDRLYYNQPQHF

SEQ ID NO: 744529 - protein, 12 aa, Homo sapiens
  CDR3 for alpha chain variable domain of TCR clone 372265 (TRAV13-2, TRAJ23)
CAERHRGGKLIF

SEQ ID NO: 744530 - protein, 18 aa, Homo sapiens
  CDR3 for beta chain variable domain of TCR clone 372265 (TRBV11-2, TRBJ2-3)
RASSLGGASRGAPNTQYF

SEQ ID NO: 744531 - protein, 14 aa, Homo sapiens
  CDR3 for alpha chain variable domain of TCR clone 372266 (TRAV1-2, TRAJ8)
CAVREDTGFQKLVF

SEQ ID NO: 744532 - protein, 16 aa, Homo sapiens
  CDR3 for beta chain variable domain of TCR clone 372266 (TRBV20-1, TRBJ2-4)
CSARAILAGQGDTQYF

SEQ ID NO: 744533 - protein, 14 aa, Homo sapiens
  CDR3 for alpha chain variable domain of TCR clone 372267 (TRAV13-1, TRAJ44)
CAAKATGTASKLTF

SEQ ID NO: 744534 - protein, 15 aa, Homo sapiens
  CDR3 for beta chain variable domain of TCR clone 372267 (TRBV11-2, TRBJ2-7)
CASRFPGTGGYEQYF

SEQ ID NO: 744535 - protein, 12 aa, Homo sapiens
  CDR3 for alpha chain variable domain of TCR clone 372268 (TRAV13-1, TRAJ5)
CAAKAGRRALTF

SEQ ID NO: 744536 - protein, 17 aa, Homo sapiens
  CDR3 for beta chain variable domain of TCR clone 372268 (TRBV23-1, TRBJ1-2)
CASSNTGGGLLWLHLRF

SEQ ID NO: 744537 - protein, 16 aa, Homo sapiens
  CDR3 for alpha chain variable domain of TCR clone 372269 (TRAV12-3, TRAJ13)
CAMSLGSGGSNYKLAF

SEQ ID NO: 744538 - protein, 16 aa, Homo sapiens
  CDR3 for beta chain variable domain of TCR clone 372269 (TRBV5-7, TRBJ1-4)
CASSASGGLKTEKLFF

SEQ ID NO: 744539 - protein, 13 aa, Homo sapiens
  CDR3 for alpha chain variable domain of TCR clone 372270 (TRAV12-1, TRAJ6)
CVVYPGGSYIPTF

SEQ ID NO: 744540 - protein, 13 aa, Homo sapiens
  CDR3 for beta chain variable domain of TCR clone 372270 (TRBV4-3, TRBJ1-1)
CASSQAGNTEAFF

SEQ ID NO: 744541 - protein, 14 aa, Homo sapiens
  CDR3 for alpha chain variable domain of TCR clone 372271 (TRAV12-2, TRAJ13)
CAVKKTGGDQKITF

SEQ ID NO: 744542 - protein, 15 aa, Homo sapiens
  CDR3 for beta chain variable domain of TCR clone 372271 (TRBV27, TRBJ2-1)
CASSNGGGSSNEQFF

SEQ ID NO: 744543 - protein, 13 aa, Homo sapiens
  CDR3 for alpha chain variable domain of TCR clone 372272 (TRAV26-1, TRAJ43)
CIVRVGLNNDMRF

SEQ ID NO: 744544 - protein, 18 aa, Homo sapiens
  CDR3 for beta chain variable domain of TCR clone 372272 (TRBV4-1, TRBJ1-5)
CASSQDPRGQGLNQPQHF

SEQ ID NO: 744545 - protein, 12 aa, Homo sapiens
  CDR3 for alpha chain variable domain of TCR clone 372273 (TRAV6, TRAJ27)
CALDPVQANQPL

SEQ ID NO: 744546 - protein, 18 aa, Homo sapiens
  CDR3 for beta chain variable domain of TCR clone 372273 (TRBV20-1, TRBJ2-3)
CSASGLAGGPGTTDTQYF

SEQ ID NO: 744547 - protein, 15 aa, Homo sapiens
  CDR3 for alpha chain variable domain of TCR clone 372274 (TRAV13-1, TRAJ52)
CAATSPRTSYGKLTF

SEQ ID NO: 744548 - protein, 14 aa, Homo sapiens
  CDR3 for beta chain variable domain of TCR clone 372274 (TRBV7-2, TRBJ2-1)
CASSRGGARNEQFF

SEQ ID NO: 744549 - protein, 13 aa, Homo sapiens
  CDR3 for alpha chain variable domain of TCR clone 372275 (TRAV29/DV5, TRAJ31)
CTASRNNNARLMF

SEQ ID NO: 744550 - protein, 12 aa, Homo sapiens
  CDR3 for beta chain variable domain of TCR clone 372275 (TRBV14, TRBJ1-1)
CASSQLKGLAFF

SEQ ID NO: 744551 - protein, 16 aa, Homo sapiens
  CDR3 for alpha chain variable domain of TCR clone 372276 (TRAV12-3, TRAJ53)
CAMSPGSGGSNHKLTF

SEQ ID NO: 744552 - protein, 15 aa, Homo sapiens
  CDR3 for beta chain variable domain of TCR clone 372276 (TRBV12-4, TRBJ1-6)
CASSLGGQGTSPLHF

SEQ ID NO: 744553 - protein, 16 aa, Homo sapiens
  CDR3 for alpha chain variable domain of TCR clone 372277 (TRAV2, TRAJ4)
CAVEDRFSGGYNKLIF

SEQ ID NO: 744554 - protein, 18 aa, Homo sapiens
  CDR3 for beta chain variable domain of TCR clone 372277 (TRBV11-2, TRBJ2-6)
CASSLNPFLGTGANVLTF

SEQ ID NO: 744555 - protein, 13 aa, Homo sapiens
  CDR3 for alpha chain variable domain of TCR clone 372278 (TRAV21, TRAJ27)
CAARPGNVGKSTF

SEQ ID NO: 744556 - protein, 13 aa, Homo sapiens
  CDR3 for beta chain variable domain of TCR clone 372278 (TRBV7-3, TRBJ2-7)
CASSQAGGYEQYF

SEQ ID NO: 744557 - protein, 15 aa, Homo sapiens
  CDR3 for alpha chain variable domain of TCR clone 372279 (TRAV34, TRAJ36)
CGAPSRLGGANNLFF

SEQ ID NO: 744558 - protein, 16 aa, Homo sapiens
  CDR3 for beta chain variable domain of TCR clone 372279 (TRBV4-3, TRBJ2-1)
CASSYRRLGSCDEQFF

SEQ ID NO: 744559 - protein, 14 aa, Homo sapiens
  CDR3 for alpha chain variable domain of TCR clone 372280 (TRAV38-1, TRAJ45)
CASHSGGGADGLTS

SEQ ID NO: 744560 - protein, 13 aa, Homo sapiens
  CDR3 for beta chain variable domain of TCR clone 372280 (TRBV15, TRBJ1-6)
CATSGGLNSPLHF

SEQ ID NO: 744561 - protein, 10 aa, Homo sapiens
  CDR3 for alpha chain variable domain of TCR clone 372281 (TRAV12-3, TRAJ49)
CAMNDDQFYF

SEQ ID NO: 744562 - protein, 17 aa, Homo sapiens
  CDR3 for beta chain variable domain of TCR clone 372281 (TRBV3-1, TRBJ2-2)
CASSQFRDKVDAGELFF

SEQ ID NO: 744563 - protein, 11 aa, Homo sapiens
  CDR3 for alpha chain variable domain of TCR clone 372282 (TRAV12-1, TRAJ30)
CVVTGQDKIIF

SEQ ID NO: 744564 - protein, 12 aa, Homo sapiens
  CDR3 for beta chain variable domain of TCR clone 372282 (TRBV27, TRBJ2-2)
CASKLFTGELFF

SEQ ID NO: 744565 - protein, 12 aa, Homo sapiens
  CDR3 for alpha chain variable domain of TCR clone 372283 (TRAV12-3, TRAJ17)
CAMTLTGNKLTF

SEQ ID NO: 744566 - protein, 17 aa, Homo sapiens
  CDR3 for beta chain variable domain of TCR clone 372283 (TRBV20-1, TRBJ2-7)
CIARDRVSGWTSSTSGR

SEQ ID NO: 744567 - protein, 16 aa, Homo sapiens
  CDR3 for alpha chain variable domain of TCR clone 372284 (TRAV8-3, TRAJ8)
CAVPRDGNTGFQKLVF

SEQ ID NO: 744568 - protein, 15 aa, Homo sapiens
  CDR3 for beta chain variable domain of TCR clone 372284 (TRBV6-1, TRBJ2-6)
CASSSRPSGANVLSF

SEQ ID NO: 744569 - protein, 16 aa, Homo sapiens
  CDR3 for alpha chain variable domain of TCR clone 372285 (TRAV12-3, TRAJ53)
CAMSPGSGGSNYRLTF

SEQ ID NO: 744570 - protein, 14 aa, Homo sapiens
  CDR3 for beta chain variable domain of TCR clone 372285 (TRBV4-2, TRBJ2-1)
CASGLDRAYNEQFF

SEQ ID NO: 744571 - protein, 12 aa, Homo sapiens
  CDR3 for alpha chain variable domain of TCR clone 372286 (TRAV13-1, TRAJ21)
CAAKEGFNKFYF

SEQ ID NO: 744572 - protein, 13 aa, Homo sapiens
  CDR3 for beta chain variable domain of TCR clone 372286 (TRBV7-8, TRBJ2-2)
CASSHLFPGPTII

SEQ ID NO: 744573 - protein, 13 aa, Homo sapiens
  CDR3 for alpha chain variable domain of TCR clone 372287 (TRAV1-2, TRAJ9)
CAALNTGGFKTIF

SEQ ID NO: 744574 - protein, 13 aa, Homo sapiens
  CDR3 for beta chain variable domain of TCR clone 372287 (TRBV4-2, TRBJ2-1)
CASSPGTYNEQFF

SEQ ID NO: 744575 - protein, 16 aa, Homo sapiens
  CDR3 for alpha chain variable domain of TCR clone 372288 (TRAV23/DV6, )
CADIQNPDPAVYHLSD

SEQ ID NO: 744576 - protein, 13 aa, Homo sapiens
  CDR3 for beta chain variable domain of TCR clone 372288 (TRBV28, TRBJ2-7)
CASRSSGVYEQYF

SEQ ID NO: 744577 - protein, 12 aa, Homo sapiens
  CDR3 for alpha chain variable domain of TCR clone 372289 (TRAV17, TRAJ20)
CATDSNDYKLSF

SEQ ID NO: 744578 - protein, 16 aa, Homo sapiens
  CDR3 for beta chain variable domain of TCR clone 372289 (TRBV7-2, TRBJ1-2)
CASSSNQERRGHGYTF

SEQ ID NO: 744579 - protein, 13 aa, Homo sapiens
  CDR3 for alpha chain variable domain of TCR clone 372290 (TRAV1-2, TRAJ11)
CAVRREGYSTLTF

SEQ ID NO: 744580 - protein, 15 aa, Homo sapiens
  CDR3 for beta chain variable domain of TCR clone 372290 (TRBV11-2, TRBJ2-1)
CASSLGTSGLNEQFF

SEQ ID NO: 744581 - protein, 13 aa, Homo sapiens
  CDR3 for alpha chain variable domain of TCR clone 372291 (TRAV17, TRAJ31)
CATDENNNARLMF

SEQ ID NO: 744582 - protein, 14 aa, Homo sapiens
  CDR3 for beta chain variable domain of TCR clone 372291 (TRBV11-2, TRBJ2-1)
CASSPSRQEGGQFF

SEQ ID NO: 744583 - protein, 16 aa, Homo sapiens
  CDR3 for alpha chain variable domain of TCR clone 372292 (TRAV3, TRAJ37)
CAVRGKGSGNTGKLIF

SEQ ID NO: 744584 - protein, 15 aa, Homo sapiens
  CDR3 for beta chain variable domain of TCR clone 372292 (TRBV7-9, TRBJ2-7)
CASSLALAEAYEQYF

SEQ ID NO: 744585 - protein, 11 aa, Homo sapiens
  CDR3 for alpha chain variable domain of TCR clone 372293 (TRAV12-2, TRAJ33)
CAGTSNYQLIW

SEQ ID NO: 744586 - protein, 14 aa, Homo sapiens
  CDR3 for beta chain variable domain of TCR clone 372293 (TRBV28, TRBJ2-2)
CASRIRSGTGELFF

SEQ ID NO: 744587 - protein, 15 aa, Homo sapiens
  CDR3 for alpha chain variable domain of TCR clone 372294 (TRAV3, TRAJ22)
CAVRDRGGCARQLTF

SEQ ID NO: 744588 - protein, 15 aa, Homo sapiens
  CDR3 for beta chain variable domain of TCR clone 372294 (TRBV7-3, TRBJ2-1)
CASSPTGGGEVEQFF

SEQ ID NO: 744589 - protein, 11 aa, Homo sapiens
  CDR3 for alpha chain variable domain of TCR clone 372295 (TRAV3, TRAJ17)
PRGAAGNKLTF

SEQ ID NO: 744590 - protein, 16 aa, Homo sapiens
  CDR3 for beta chain variable domain of TCR clone 372295 (TRBV7-6, TRBJ2-1)
CASSAPGPSSYNEQSF

SEQ ID NO: 744591 - protein, 16 aa, Homo sapiens
  CDR3 for alpha chain variable domain of TCR clone 372296 (TRAV12-1, TRAJ53)
CVVTSVAGGSNYKLTF

SEQ ID NO: 744592 - protein, 14 aa, Homo sapiens
  CDR3 for beta chain variable domain of TCR clone 372296 (TRBV5-5, TRBJ1-2)
CASSLDPYNYGYTF

SEQ ID NO: 744593 - protein, 15 aa, Homo sapiens
  CDR3 for alpha chain variable domain of TCR clone 372297 (TRAV38-1, TRAJ45)
CAFMKGVGGADGLTF

SEQ ID NO: 744594 - protein, 13 aa, Homo sapiens
  CDR3 for beta chain variable domain of TCR clone 372297 (TRBV7-9, TRBJ1-2)
CASSLKQNYGYTF

SEQ ID NO: 744595 - protein, 14 aa, Homo sapiens
  CDR3 for alpha chain variable domain of TCR clone 372298 (TRAV35, TRAJ22)
CAGLRPGSARQLTF

SEQ ID NO: 744596 - protein, 15 aa, Homo sapiens
  CDR3 for beta chain variable domain of TCR clone 372298 (TRBV2, TRBJ2-1)
CATQARLVMIGEQFF

SEQ ID NO: 744597 - protein, 15 aa, Homo sapiens
  CDR3 for alpha chain variable domain of TCR clone 372299 (TRAV27, TRAJ38)
CSARRNAGNNRKLIW

SEQ ID NO: 744598 - protein, 13 aa, Homo sapiens
  CDR3 for beta chain variable domain of TCR clone 372299 (TRBV7-3, TRBJ2-1)
CASSLDSYNEQFF

SEQ ID NO: 744599 - protein, 16 aa, Homo sapiens
  CDR3 for alpha chain variable domain of TCR clone 372300 (TRAV21, TRAJ52)
CAVTNPGGTSYGKLTF

SEQ ID NO: 744600 - protein, 13 aa, Homo sapiens
  CDR3 for beta chain variable domain of TCR clone 372300 (TRBV20-1, TRBJ2-3)
CSARLAGTDTQYF

SEQ ID NO: 744601 - protein, 15 aa, Homo sapiens
  CDR3 for alpha chain variable domain of TCR clone 372301 (TRAV19, TRAJ9)
CALSLPDTVGFKTIF

SEQ ID NO: 744602 - protein, 17 aa, Homo sapiens
  CDR3 for beta chain variable domain of TCR clone 372301 (TRBV20-1, TRBJ2-1)
CSARDPLAGVWDNEQFF

SEQ ID NO: 744603 - protein, 14 aa, Homo sapiens
  CDR3 for alpha chain variable domain of TCR clone 372302 (TRAV17, TRAJ12)
CAILPMDSSYKLIF

SEQ ID NO: 744604 - protein, 14 aa, Homo sapiens
  CDR3 for beta chain variable domain of TCR clone 372302 (TRBV11-2, TRBJ2-5)
CASSRTGGIETQYF

SEQ ID NO: 744605 - protein, 10 aa, Homo sapiens
  CDR3 for alpha chain variable domain of TCR clone 372303 (TRAV8-4, TRAJ43)
CAVSADDILF

SEQ ID NO: 744606 - protein, 15 aa, Homo sapiens
  CDR3 for beta chain variable domain of TCR clone 372303 (TRBV5-1, TRBJ2-3)
CASSVTSGSTDTQYF

SEQ ID NO: 744607 - protein, 12 aa, Homo sapiens
  CDR3 for alpha chain variable domain of TCR clone 372304 (TRAV13-2, TRAJ23)
CAERHMGGKLIF

SEQ ID NO: 744608 - protein, 13 aa, Homo sapiens
  CDR3 for beta chain variable domain of TCR clone 372304 (TRBV20-1, TRBJ2-2)
CSALSGGAGELFF

SEQ ID NO: 744609 - protein, 14 aa, Homo sapiens
  CDR3 for alpha chain variable domain of TCR clone 372305 (TRAV27, TRAJ40)
CAGSLLRGTYKYIF

SEQ ID NO: 744610 - protein, 15 aa, Homo sapiens
  CDR3 for beta chain variable domain of TCR clone 372305 (TRBV6-3, TRBJ1-4)
CASSSPGQENEKLFF

SEQ ID NO: 744611 - protein, 14 aa, Homo sapiens
  CDR3 for alpha chain variable domain of TCR clone 372306 (TRAV8-3, TRAJ35)
CAVVPQGFVNVLHC

SEQ ID NO: 744612 - protein, 15 aa, Homo sapiens
  CDR3 for beta chain variable domain of TCR clone 372306 (TRBV27, TRBJ2-1)
CASSNGGGSSNEQFF

SEQ ID NO: 744613 - protein, 12 aa, Homo sapiens
  CDR3 for alpha chain variable domain of TCR clone 372307 (TRAV30, TRAJ15)
CGTNQAGTALIV

SEQ ID NO: 744614 - protein, 13 aa, Homo sapiens
  CDR3 for beta chain variable domain of TCR clone 372307 (TRBV24-1, TRBJ2-7)
CATSDLGPYEQYF

SEQ ID NO: 744615 - protein, 12 aa, Homo sapiens
  CDR3 for alpha chain variable domain of TCR clone 372308 (TRAV1-1, TRAJ39)
CAVPVVGNMLTF

SEQ ID NO: 744616 - protein, 15 aa, Homo sapiens
  CDR3 for beta chain variable domain of TCR clone 372308 (TRBV19, TRBJ1-6)
CASSTQGAVGSLLHF

SEQ ID NO: 744617 - protein, 16 aa, Homo sapiens
  CDR3 for alpha chain variable domain of TCR clone 372309 (TRAV8-3, TRAJ13)
CAVGAYPSGGYPEVTF

SEQ ID NO: 744618 - protein, 13 aa, Homo sapiens
  CDR3 for beta chain variable domain of TCR clone 372309 (TRBV7-9, TRBJ1-2)
CASSLKQNYGYTF

SEQ ID NO: 744619 - protein, 17 aa, Homo sapiens
  CDR3 for alpha chain variable domain of TCR clone 372310 (TRAV3, TRAJ12)
CAVRDGGRMDSSYKLIF

SEQ ID NO: 744620 - protein, 16 aa, Homo sapiens
  CDR3 for beta chain variable domain of TCR clone 372310 (TRBV9, TRBJ2-2)
CASSAMGKGNTWELFF

SEQ ID NO: 744621 - protein, 14 aa, Homo sapiens
  CDR3 for alpha chain variable domain of TCR clone 372311 (TRAV8-4, TRAJ9)
CAVRINTGGFKTIF

SEQ ID NO: 744622 - protein, 15 aa, Homo sapiens
  CDR3 for beta chain variable domain of TCR clone 372311 (TRBV10-2, TRBJ2-6)
CASSEQGTGTNALTF

SEQ ID NO: 744623 - protein, 14 aa, Homo sapiens
  CDR3 for alpha chain variable domain of TCR clone 372312 (TRAV12-3, TRAJ10)
SHLPLTGGGNKLTF

SEQ ID NO: 744624 - protein, 18 aa, Homo sapiens
  CDR3 for beta chain variable domain of TCR clone 372312 (TRBV12-4, TRBJ2-4)
CASSRTGAVNVAKNIQYF

SEQ ID NO: 744625 - protein, 16 aa, Homo sapiens
  CDR3 for alpha chain variable domain of TCR clone 372313 (TRAV17, TRAJ53)
CATDALSGGSNYKLTF

SEQ ID NO: 744626 - protein, 17 aa, Homo sapiens
  CDR3 for beta chain variable domain of TCR clone 372313 (TRBV7-3, TRBJ2-3)
CASSLMKRMRGADTQYF

SEQ ID NO: 744627 - protein, 14 aa, Homo sapiens
  CDR3 for alpha chain variable domain of TCR clone 372314 (TRAV13-1, TRAJ40)
CAARSTSRTHKYIF

SEQ ID NO: 744628 - protein, 15 aa, Homo sapiens
  CDR3 for beta chain variable domain of TCR clone 372314 (TRBV18, TRBJ1-5)
CASSETGGNNQPQHF

SEQ ID NO: 744629 - protein, 14 aa, Homo sapiens
  CDR3 for alpha chain variable domain of TCR clone 372315 (TRAV21, TRAJ15)
CAVSLNQAGTALIF

SEQ ID NO: 744630 - protein, 11 aa, Homo sapiens
  CDR3 for beta chain variable domain of TCR clone 372315 (TRBV20-1, TRBJ2-7)
CRAGTSYEQYF

SEQ ID NO: 744631 - protein, 15 aa, Homo sapiens
  CDR3 for alpha chain variable domain of TCR clone 372316 (TRAV12-2, TRAJ43)
CAFDMRFGAGTRLTV

SEQ ID NO: 744632 - protein, 13 aa, Homo sapiens
  CDR3 for beta chain variable domain of TCR clone 372316 (TRBV7-9, TRBJ2-2)
CASSLDPTGELFF

SEQ ID NO: 744633 - protein, 14 aa, Homo sapiens
  CDR3 for alpha chain variable domain of TCR clone 372317 (TRAV1-2, TRAJ16)
CAVNRFSDGQKLLF

SEQ ID NO: 744634 - protein, 15 aa, Homo sapiens
  CDR3 for beta chain variable domain of TCR clone 372317 (TRBV11-3, TRBJ2-5)
CVSSDTSGGIETQYF

SEQ ID NO: 744635 - protein, 15 aa, Homo sapiens
  CDR3 for alpha chain variable domain of TCR clone 372318 (TRAV12-3, TRAJ17)
CAMSPSLAAGNKLTF

SEQ ID NO: 744636 - protein, 11 aa, Homo sapiens
  CDR3 for beta chain variable domain of TCR clone 372318 (TRBV19, TRBJ2-7)
CASSILGEQYF

SEQ ID NO: 744637 - protein, 14 aa, Homo sapiens
  CDR3 for alpha chain variable domain of TCR clone 372319 (TRAV16, TRAJ37)
CALDISGNTGKLIF

SEQ ID NO: 744638 - protein, 15 aa, Homo sapiens
  CDR3 for beta chain variable domain of TCR clone 372319 (TRBV4-3, TRBJ2-7)
CASSQGDWGDYEQYF

SEQ ID NO: 744639 - protein, 11 aa, Homo sapiens
  CDR3 for alpha chain variable domain of TCR clone 372320 (TRAV2, TRAJ13)
CASAGYQKVTC

SEQ ID NO: 744640 - protein, 16 aa, Homo sapiens
  CDR3 for beta chain variable domain of TCR clone 372320 (TRBV6-1, TRBJ2-5)
CASSETLDRGAETQYF

SEQ ID NO: 744641 - protein, 13 aa, Homo sapiens
  CDR3 for alpha chain variable domain of TCR clone 372321 (TRAV21, TRAJ27)
GAALNTNAGKSTF

SEQ ID NO: 744642 - protein, 14 aa, Homo sapiens
  CDR3 for beta chain variable domain of TCR clone 372321 (TRBV27, TRBJ1-1)
CASSLLSGLSEAFF

SEQ ID NO: 744643 - protein, 12 aa, Homo sapiens
  CDR3 for alpha chain variable domain of TCR clone 372322 (TRAV16, TRAJ10)
CSRTGGGNKLTF

SEQ ID NO: 744644 - protein, 17 aa, Homo sapiens
  CDR3 for beta chain variable domain of TCR clone 372322 (TRBV20-1, TRBJ2-2)
CSASGSGQGGLTGELFF

SEQ ID NO: 744645 - protein, 17 aa, Homo sapiens
  CDR3 for alpha chain variable domain of TCR clone 372323 (TRAV1-1, TRAJ28)
CAVAPAYSGAGSYQLPF

SEQ ID NO: 744646 - protein, 14 aa, Homo sapiens
  CDR3 for beta chain variable domain of TCR clone 372323 (TRBV19, TRBJ2-1)
CASPTFVLSGEQFF

SEQ ID NO: 744647 - protein, 12 aa, Homo sapiens
  CDR3 for alpha chain variable domain of TCR clone 372324 (TRAV13-1, TRAJ21)
CAAKEGFNKFYF

SEQ ID NO: 744648 - protein, 16 aa, Homo sapiens
  CDR3 for beta chain variable domain of TCR clone 372324 (TRBV18, TRBJ2-7)
ISVPAHREGGAYEQYF

SEQ ID NO: 744649 - protein, 12 aa, Homo sapiens
  CDR3 for alpha chain variable domain of TCR clone 372325 (TRAV12-2, TRAJ44)
CADTGTASKLTF

SEQ ID NO: 744650 - protein, 17 aa, Homo sapiens
  CDR3 for beta chain variable domain of TCR clone 372325 (TRBV20-1, TRBJ1-1)
FSARGTGGSYGNTGAFF

SEQ ID NO: 744651 - protein, 13 aa, Homo sapiens
  CDR3 for alpha chain variable domain of TCR clone 372326 (TRAV20, TRAJ29)
CAVQAVGNTHLVF

SEQ ID NO: 744652 - protein, 12 aa, Homo sapiens
  CDR3 for beta chain variable domain of TCR clone 372326 (TRBV7-8, TRBJ2-7)
CASSLGDREQYF

SEQ ID NO: 744653 - protein, 18 aa, Homo sapiens
  CDR3 for alpha chain variable domain of TCR clone 372327 (TRAV26-1, TRAJ23)
CIVRVGLEVCNQGGKLIF

SEQ ID NO: 744654 - protein, 13 aa, Homo sapiens
  CDR3 for beta chain variable domain of TCR clone 372327 (TRBV7-3, TRBJ1-1)
CASSQDWGAEAFF

SEQ ID NO: 744655 - protein, 14 aa, Homo sapiens
  CDR3 for alpha chain variable domain of TCR clone 372328 (TRAV13-1, TRAJ53)
CAASISGSNYKLTF

SEQ ID NO: 744656 - protein, 15 aa, Homo sapiens
  CDR3 for beta chain variable domain of TCR clone 372328 (TRBV4-1, TRBJ1-4)
CASSDTGATNEKLFF

SEQ ID NO: 744657 - protein, 12 aa, Homo sapiens
  CDR3 for alpha chain variable domain of TCR clone 372329 (TRAV27, TRAJ34)
CAGAKNTDKLIF

SEQ ID NO: 744658 - protein, 13 aa, Homo sapiens
  CDR3 for beta chain variable domain of TCR clone 372329 (TRBV4-1, TRBJ2-1)
CASIQEVQYEQFF

SEQ ID NO: 744659 - protein, 14 aa, Homo sapiens
  CDR3 for alpha chain variable domain of TCR clone 372330 (TRAV9-2, TRAJ39)
CALSIYNAGNMLTF

SEQ ID NO: 744660 - protein, 15 aa, Homo sapiens
  CDR3 for beta chain variable domain of TCR clone 372330 (TRBV27, TRBJ1-6)
CASSFDRGLGSPLHF

SEQ ID NO: 744661 - protein, 15 aa, Homo sapiens
  CDR3 for alpha chain variable domain of TCR clone 372331 (TRAV21, TRAJ52)
CAVRGGGTSYGKLTF

SEQ ID NO: 744662 - protein, 15 aa, Homo sapiens
  CDR3 for beta chain variable domain of TCR clone 372331 (TRBV6-6, TRBJ2-1)
CATRQGVSSYNEQFF

SEQ ID NO: 744663 - protein, 12 aa, Homo sapiens
  CDR3 for alpha chain variable domain of TCR clone 372332 (TRAV8-3, TRAJ20)
CAVGANDYKLSF

SEQ ID NO: 744664 - protein, 13 aa, Homo sapiens
  CDR3 for beta chain variable domain of TCR clone 372332 (TRBV20-1, TRBJ1-1)
CSARGGGNTEAFF

SEQ ID NO: 744665 - protein, 12 aa, Homo sapiens
  CDR3 for alpha chain variable domain of TCR clone 372333 (TRAV12-1, TRAJ15)
CVVNQAGTARIF

SEQ ID NO: 744666 - protein, 14 aa, Homo sapiens
  CDR3 for beta chain variable domain of TCR clone 372333 (TRBV11-3, TRBJ2-1)
CASSLAVSYNEQFF

SEQ ID NO: 744667 - protein, 14 aa, Homo sapiens
  CDR3 for alpha chain variable domain of TCR clone 372334 (TRAV3, TRAJ20)
CAVRPSVTTTSSAL

SEQ ID NO: 744668 - protein, 15 aa, Homo sapiens
  CDR3 for beta chain variable domain of TCR clone 372334 (TRBV6-5, TRBJ2-1)
CASSYDAGAGNEQFF

SEQ ID NO: 744669 - protein, 12 aa, Homo sapiens
  CDR3 for alpha chain variable domain of TCR clone 372335 (TRAV1-2, TRAJ29)
CAVRNLNTPVVF

SEQ ID NO: 744670 - protein, 16 aa, Homo sapiens
  CDR3 for beta chain variable domain of TCR clone 372335 (TRBV27, TRBJ2-2)
CASSFRGLVRTGELFF

SEQ ID NO: 744671 - protein, 14 aa, Homo sapiens
  CDR3 for alpha chain variable domain of TCR clone 372336 (TRAV17, TRAJ57)
CSTDPQGGSEKLVF

SEQ ID NO: 744672 - protein, 13 aa, Homo sapiens
  CDR3 for beta chain variable domain of TCR clone 372336 (TRBV10-3, TRBJ2-7)
CASKLAVNYEQYF

SEQ ID NO: 744673 - protein, 10 aa, Homo sapiens
  CDR3 for alpha chain variable domain of TCR clone 372337 (TRAV20, TRAJ22)
CAAPARQLTF

SEQ ID NO: 744674 - protein, 13 aa, Homo sapiens
  CDR3 for beta chain variable domain of TCR clone 372337 (TRBV19, TRBJ2-1)
CASSWESYNEQFF

SEQ ID NO: 744675 - protein, 18 aa, Homo sapiens
  CDR3 for alpha chain variable domain of TCR clone 372338 (TRAV26-2, TRAJ45)
CILRVDKYSGGGADGLTF

SEQ ID NO: 744676 - protein, 11 aa, Homo sapiens
  CDR3 for beta chain variable domain of TCR clone 372338 (TRBV29-1, TRBJ2-5)
CSQDRTGTQYF

SEQ ID NO: 744677 - protein, 14 aa, Homo sapiens
  CDR3 for alpha chain variable domain of TCR clone 372339 (TRAV1-2, TRAJ8)
CAVGEDTGFQKLVF

SEQ ID NO: 744678 - protein, 16 aa, Homo sapiens
  CDR3 for beta chain variable domain of TCR clone 372339 (TRBV12-4, TRBJ1-5)
CASRQPVEGSNQPQHF

SEQ ID NO: 744679 - protein, 14 aa, Homo sapiens
  CDR3 for alpha chain variable domain of TCR clone 372340 (TRAV1-2, TRAJ16)
CAVNRFSDGQELLS

SEQ ID NO: 744680 - protein, 13 aa, Homo sapiens
  CDR3 for beta chain variable domain of TCR clone 372340 (TRBV20-1, TRBJ2-2)
CSALSGGAGELFF

SEQ ID NO: 744681 - protein, 11 aa, Homo sapiens
  CDR3 for alpha chain variable domain of TCR clone 372341 (TRAV22, TRAJ30)
CAGNRDDKIIF

SEQ ID NO: 744682 - protein, 13 aa, Homo sapiens
  CDR3 for beta chain variable domain of TCR clone 372341 (TRBV20-1, TRBJ1-1)
CSASKRGLTEAFF

SEQ ID NO: 744683 - protein, 14 aa, Homo sapiens
  CDR3 for alpha chain variable domain of TCR clone 372342 (TRAV38-1, TRAJ45)
CADYSGGGADGLTF

SEQ ID NO: 744684 - protein, 20 aa, Homo sapiens
  CDR3 for beta chain variable domain of TCR clone 372342 (TRBV28, TRBJ2-1)
CASTPIGRSPGLAGGNEQFL

SEQ ID NO: 744685 - protein, 12 aa, Homo sapiens
  CDR3 for alpha chain variable domain of TCR clone 372343 (TRAV3, TRAJ43)
CAVRDPNNDMRF

SEQ ID NO: 744686 - protein, 15 aa, Homo sapiens
  CDR3 for beta chain variable domain of TCR clone 372343 (TRBV6-5, TRBJ2-1)
CASSYDAGAGSEQFF

SEQ ID NO: 744687 - protein, 16 aa, Homo sapiens
  CDR3 for alpha chain variable domain of TCR clone 372344 (TRAV16, TRAJ4)
CALSRMFSGGYNKLIF

SEQ ID NO: 744688 - protein, 14 aa, Homo sapiens
  CDR3 for beta chain variable domain of TCR clone 372344 (TRBV4-1, TRBJ2-2)
CASSQAVNTGELFV

SEQ ID NO: 744689 - protein, 12 aa, Homo sapiens
  CDR3 for alpha chain variable domain of TCR clone 372345 (TRAV12-2, TRAJ10)
WGVTGGGNKLTF

SEQ ID NO: 744690 - protein, 14 aa, Homo sapiens
  CDR3 for beta chain variable domain of TCR clone 372345 (TRBV12-4, TRBJ1-4)
CASGRQGANEKLFF

SEQ ID NO: 744691 - protein, 13 aa, Homo sapiens
  CDR3 for alpha chain variable domain of TCR clone 372346 (TRAV2, TRAJ12)
CAVGADSSYKLIF

SEQ ID NO: 744692 - protein, 13 aa, Homo sapiens
  CDR3 for beta chain variable domain of TCR clone 372346 (TRBV20-1, TRBJ2-1)
CSARSSPRGEQFF

SEQ ID NO: 744693 - protein, 18 aa, Homo sapiens
  CDR3 for alpha chain variable domain of TCR clone 372347 (TRAV26-1, TRAJ5)
CIVRVVPPRDTGRRALTF

SEQ ID NO: 744694 - protein, 12 aa, Homo sapiens
  CDR3 for beta chain variable domain of TCR clone 372347 (TRBV19, TRBJ2-1)
CASSMQDTEQFF

SEQ ID NO: 744695 - protein, 14 aa, Homo sapiens
  CDR3 for alpha chain variable domain of TCR clone 372348 (TRAV12-3, TRAJ10)
SHLPLTGGGNELTF

SEQ ID NO: 744696 - protein, 16 aa, Homo sapiens
  CDR3 for beta chain variable domain of TCR clone 372348 (TRBV4-2, TRBJ2-3)
CASSQELAGDTDTQYF

SEQ ID NO: 744697 - protein, 14 aa, Homo sapiens
  CDR3 for alpha chain variable domain of TCR clone 372349 (TRAV13-1, TRAJ35)
CAASEGGFGNVLHC

SEQ ID NO: 744698 - protein, 13 aa, Homo sapiens
  CDR3 for beta chain variable domain of TCR clone 372349 (TRBV12-5, TRBJ2-3)
CASGDRQSDTQYF

SEQ ID NO: 744699 - protein, 14 aa, Homo sapiens
  CDR3 for alpha chain variable domain of TCR clone 372350 (TRAV35, TRAJ42)
CAGRYGGSQGNLIF

SEQ ID NO: 744700 - protein, 15 aa, Homo sapiens
  CDR3 for beta chain variable domain of TCR clone 372350 (TRBV7-9, TRBJ2-1)
CASSLGWGRANEHFF

SEQ ID NO: 744701 - protein, 15 aa, Homo sapiens
  CDR3 for alpha chain variable domain of TCR clone 372351 (TRAV12-3, TRAJ22)
CAMRSSSGSARQLTF

SEQ ID NO: 744702 - protein, 15 aa, Homo sapiens
  CDR3 for beta chain variable domain of TCR clone 372351 (TRBV5-7, TRBJ1-2)
CASSLAWTGGYGYTF

SEQ ID NO: 744703 - protein, 13 aa, Homo sapiens
  CDR3 for alpha chain variable domain of TCR clone 372352 (TRAV12-3, TRAJ7)
CAMTPYGNNRLAF

SEQ ID NO: 744704 - protein, 18 aa, Homo sapiens
  CDR3 for beta chain variable domain of TCR clone 372352 (TRBV20-1, TRBJ2-3)
CSASGLAGGPGTTDTQYF

SEQ ID NO: 744705 - protein, 15 aa, Homo sapiens
  CDR3 for alpha chain variable domain of TCR clone 372353 (TRAV26-2, TRAJ39)
CSLRGNNNAGNMLTF

SEQ ID NO: 744706 - protein, 15 aa, Homo sapiens
  CDR3 for beta chain variable domain of TCR clone 372353 (TRBV9, TRBJ1-6)
CASSVAGTGDSPLHF

SEQ ID NO: 744707 - protein, 13 aa, Homo sapiens
  CDR3 for alpha chain variable domain of TCR clone 372354 (TRAV39, TRAJ33)
CAANTDSNYQLIW

SEQ ID NO: 744708 - protein, 13 aa, Homo sapiens
  CDR3 for beta chain variable domain of TCR clone 372354 (TRBV18, TRBJ1-1)
CASSGGRNTEAFF

SEQ ID NO: 744709 - protein, 16 aa, Homo sapiens
  CDR3 for alpha chain variable domain of TCR clone 372355 (TRAV3, TRAJ37)
CAVRGKGSGNTGKLIF

SEQ ID NO: 744710 - protein, 13 aa, Homo sapiens
  CDR3 for beta chain variable domain of TCR clone 372355 (TRBV12-4, TRBJ2-2)
CASSITGSGELFF

SEQ ID NO: 744711 - protein, 17 aa, Homo sapiens
  CDR3 for alpha chain variable domain of TCR clone 372356 (TRAV3, TRAJ6)
CAVRDGPRAGGSYIPTF

SEQ ID NO: 744712 - protein, 16 aa, Homo sapiens
  CDR3 for beta chain variable domain of TCR clone 372356 (TRBV7-2, TRBJ2-1)
CASSLVSGSSNNEQFF

SEQ ID NO: 744713 - protein, 15 aa, Homo sapiens
  CDR3 for alpha chain variable domain of TCR clone 372357 (TRAV12-3, TRAJ6)
CAMGATTGGSYIPTF

SEQ ID NO: 744714 - protein, 12 aa, Homo sapiens
  CDR3 for beta chain variable domain of TCR clone 372357 (TRBV7-9, TRBJ2-7)
CASSLESYEQYF

SEQ ID NO: 744715 - protein, 12 aa, Homo sapiens
  CDR3 for alpha chain variable domain of TCR clone 372358 (TRAV1-1, TRAJ8)
CAGGTGFQKLVF

SEQ ID NO: 744716 - protein, 15 aa, Homo sapiens
  CDR3 for beta chain variable domain of TCR clone 372358 (TRBV7-2, TRBJ2-3)
CASCLEQGGTDTQYF

SEQ ID NO: 744717 - protein, 15 aa, Homo sapiens
  CDR3 for alpha chain variable domain of TCR clone 372359 (TRAV17, TRAJ16)
CATDLRFSDGQKLLF

SEQ ID NO: 744718 - protein, 12 aa, Homo sapiens
  CDR3 for beta chain variable domain of TCR clone 372359 (TRBV2, TRBJ2-7)
CASSDPDYEQYF

SEQ ID NO: 744719 - protein, 21 aa, Homo sapiens
  CDR3 for alpha chain variable domain of TCR clone 372360 (TRAV3, TRAJ6)
CAVRDRNPSDQEEATYLHLEE

SEQ ID NO: 744720 - protein, 15 aa, Homo sapiens
  CDR3 for beta chain variable domain of TCR clone 372360 (TRBV18, TRBJ2-7)
CASSPTFMDSYEQYF

SEQ ID NO: 744721 - protein, 14 aa, Homo sapiens
  CDR3 for alpha chain variable domain of TCR clone 372361 (TRAV38-1, TRAJ45)
CAYYSGGGAYGLTF

SEQ ID NO: 744722 - protein, 15 aa, Homo sapiens
  CDR3 for beta chain variable domain of TCR clone 372361 (TRBV11-2, TRBJ2-1)
CASSKNRGLIYEQFF

SEQ ID NO: 744723 - protein, 16 aa, Homo sapiens
  CDR3 for alpha chain variable domain of TCR clone 372362 (TRAV8-3, TRAJ44)
CAVGASNTGTASKLTF

SEQ ID NO: 744724 - protein, 12 aa, Homo sapiens
  CDR3 for beta chain variable domain of TCR clone 372362 (TRBV12-4, TRBJ2-7)
CASSLGGYEQYF

SEQ ID NO: 744725 - protein, 15 aa, Homo sapiens
  CDR3 for alpha chain variable domain of TCR clone 372363 (TRAV21, TRAJ52)
CAVRGGGTSYGKLTF

SEQ ID NO: 744726 - protein, 12 aa, Homo sapiens
  CDR3 for beta chain variable domain of TCR clone 372363 (TRBV11-2, TRBJ2-2)
CASSLPTGELFF

SEQ ID NO: 744727 - protein, 12 aa, Homo sapiens
  CDR3 for alpha chain variable domain of TCR clone 372364 (TRAV16, TRAJ26)
CALRSYGQNFVF

SEQ ID NO: 744728 - protein, 16 aa, Homo sapiens
  CDR3 for beta chain variable domain of TCR clone 372364 (TRBV4-2, TRBJ2-7)
CASSQEGLANSYEQYF

SEQ ID NO: 744729 - protein, 12 aa, Homo sapiens
  CDR3 for alpha chain variable domain of TCR clone 372365 (TRAV21, TRAJ33)
CAKMDSNYQLIW

SEQ ID NO: 744730 - protein, 17 aa, Homo sapiens
  CDR3 for beta chain variable domain of TCR clone 372365 (TRBV20-1, TRBJ2-2)
GSASGSGQGGLTGELFF

SEQ ID NO: 744731 - protein, 13 aa, Homo sapiens
  CDR3 for alpha chain variable domain of TCR clone 372366 (TRAV12-1, TRAJ11)
CVVTRGGYGTLTF

SEQ ID NO: 744732 - protein, 13 aa, Homo sapiens
  CDR3 for beta chain variable domain of TCR clone 372366 (TRBV20-1, TRBJ1-2)
CSARDQGAYGYTF

SEQ ID NO: 744733 - protein, 14 aa, Homo sapiens
  CDR3 for alpha chain variable domain of TCR clone 372367 (TRAV2, TRAJ9)
CAVEDRSGGFKTIF

SEQ ID NO: 744734 - protein, 14 aa, Homo sapiens
  CDR3 for beta chain variable domain of TCR clone 372367 (TRBV20-1, TRBJ2-1)
CSAQMGGSANEQFF

SEQ ID NO: 744735 - protein, 13 aa, Homo sapiens
  CDR3 for alpha chain variable domain of TCR clone 372368 (TRAV26-1, TRAJ33)
CIVRDEGNYQLIW

SEQ ID NO: 744736 - protein, 16 aa, Homo sapiens
  CDR3 for beta chain variable domain of TCR clone 372368 (TRBV15, TRBJ2-7)
CATSRDRGRRRGEQYF

SEQ ID NO: 744737 - protein, 13 aa, Homo sapiens
  CDR3 for alpha chain variable domain of TCR clone 372369 (TRAV13-1, TRAJ26)
CAIVFGPRTRLSV

SEQ ID NO: 744738 - protein, 14 aa, Homo sapiens
  CDR3 for beta chain variable domain of TCR clone 372369 (TRBV18, TRBJ2-3)
CASSPRTSTDTQYF

SEQ ID NO: 744739 - protein, 14 aa, Homo sapiens
  CDR3 for alpha chain variable domain of TCR clone 372370 (TRAV2, TRAJ37)
CAVDFTSNTGKLIF

SEQ ID NO: 744740 - protein, 14 aa, Homo sapiens
  CDR3 for beta chain variable domain of TCR clone 372370 (TRBV7-2, TRBJ1-5)
CASSTQGAGQPQHF

SEQ ID NO: 744741 - protein, 13 aa, Homo sapiens
  CDR3 for alpha chain variable domain of TCR clone 372371 (TRAV13-2, TRAJ53)
CAENMGGNYKLTI

SEQ ID NO: 744742 - protein, 13 aa, Homo sapiens
  CDR3 for beta chain variable domain of TCR clone 372371 (TRBV4-1, TRBJ2-2)
CASSQENTGELFF

SEQ ID NO: 744743 - protein, 14 aa, Homo sapiens
  CDR3 for alpha chain variable domain of TCR clone 372372 (TRAV17, TRAJ36)
CATDALSGANNLFF

SEQ ID NO: 744744 - protein, 16 aa, Homo sapiens
  CDR3 for beta chain variable domain of TCR clone 372372 (TRBV2, TRBJ2-1)
CASRSPAGGKYNEQFF

SEQ ID NO: 744745 - protein, 12 aa, Homo sapiens
  CDR3 for alpha chain variable domain of TCR clone 372373 (TRAV41, TRAJ45)
CAVGRGADGLTF

SEQ ID NO: 744746 - protein, 15 aa, Homo sapiens
  CDR3 for beta chain variable domain of TCR clone 372373 (TRBV6-1, TRBJ2-3)
CASSERGGITDTQYF

SEQ ID NO: 744747 - protein, 20 aa, Homo sapiens
  CDR3 for alpha chain variable domain of TCR clone 372374 (TRAV26-1, TRAJ57)
CCVLLHRQIETQGGSEKLVF

SEQ ID NO: 744748 - protein, 16 aa, Homo sapiens
  CDR3 for beta chain variable domain of TCR clone 372374 (TRBV4-2, TRBJ2-7)
CASSQEELAGTYEQDF

SEQ ID NO: 744749 - protein, 12 aa, Homo sapiens
  CDR3 for alpha chain variable domain of TCR clone 372375 (TRAV2, TRAJ36)
CAELTVANNLFF

SEQ ID NO: 744750 - protein, 14 aa, Homo sapiens
  CDR3 for beta chain variable domain of TCR clone 372375 (TRBV18, TRBJ2-7)
CASSPRGGAYEQYF

SEQ ID NO: 744751 - protein, 15 aa, Homo sapiens
  CDR3 for alpha chain variable domain of TCR clone 372376 (TRAV17, TRAJ56)
CATDANTGANSKLTF

SEQ ID NO: 744752 - protein, 16 aa, Homo sapiens
  CDR3 for beta chain variable domain of TCR clone 372376 (TRBV28, TRBJ1-5)
CASRFRGAVQNQPQHF

SEQ ID NO: 744753 - protein, 14 aa, Homo sapiens
  CDR3 for alpha chain variable domain of TCR clone 372377 (TRAV12-3, TRAJ20)
CAMSARRGNYKLSF

SEQ ID NO: 744754 - protein, 14 aa, Homo sapiens
  CDR3 for beta chain variable domain of TCR clone 372377 (TRBV7-3, TRBJ2-3)
CASSPSARTDTQYF

SEQ ID NO: 744755 - protein, 15 aa, Homo sapiens
  CDR3 for alpha chain variable domain of TCR clone 372378 (TRAV16, TRAJ16)
CALQGGGADGQKLLF

SEQ ID NO: 744756 - protein, 13 aa, Homo sapiens
  CDR3 for beta chain variable domain of TCR clone 372378 (TRBV12-5, TRBJ2-3)
CASGDRQSDTQYF

SEQ ID NO: 744757 - protein, 13 aa, Homo sapiens
  CDR3 for alpha chain variable domain of TCR clone 372379 (TRAV3, TRAJ20)
CAVRDTGDYKRSF

SEQ ID NO: 744758 - protein, 15 aa, Homo sapiens
  CDR3 for beta chain variable domain of TCR clone 372379 (TRBV6-1, TRBJ2-7)
CASSEGGGVSYEQYF

SEQ ID NO: 744759 - protein, 15 aa, Homo sapiens
  CDR3 for alpha chain variable domain of TCR clone 372380 (TRAV3, TRAJ22)
CAVGDRGGCARQLTF

SEQ ID NO: 744760 - protein, 16 aa, Homo sapiens
  CDR3 for beta chain variable domain of TCR clone 372380 (TRBV5-4, TRBJ2-3)
CASQQPGAGGADTQYF

SEQ ID NO: 744761 - protein, 13 aa, Homo sapiens
  CDR3 for alpha chain variable domain of TCR clone 372381 (TRAV12-2, TRAJ20)
CAVYPSNDYKLSF

SEQ ID NO: 744762 - protein, 15 aa, Homo sapiens
  CDR3 for beta chain variable domain of TCR clone 372381 (TRBV20-1, TRBJ2-5)
CSAPPRTGFGETQYF

SEQ ID NO: 744763 - protein, 14 aa, Homo sapiens
  CDR3 for alpha chain variable domain of TCR clone 372382 (TRAV12-2, TRAJ13)
CAVKKTGGYQKVTF

SEQ ID NO: 744764 - protein, 15 aa, Homo sapiens
  CDR3 for beta chain variable domain of TCR clone 372382 (TRBV7-8, TRBJ2-1)
CASSLHGGPYNEQFF

SEQ ID NO: 744765 - protein, 11 aa, Homo sapiens
  CDR3 for alpha chain variable domain of TCR clone 372383 (TRAV2, TRAJ13)
CASGGYQKVTF

SEQ ID NO: 744766 - protein, 16 aa, Homo sapiens
  CDR3 for beta chain variable domain of TCR clone 372383 (TRBV19, TRBJ2-1)
CASSKAGPSSYNKQFF

SEQ ID NO: 744767 - protein, 17 aa, Homo sapiens
  CDR3 for alpha chain variable domain of TCR clone 372384 (TRAV26-2, TRAJ37)
CILRDRGGASNTGKLIL

SEQ ID NO: 744768 - protein, 15 aa, Homo sapiens
  CDR3 for beta chain variable domain of TCR clone 372384 (TRBV7-2, TRBJ2-1)
CASSPLAGEYNEQFF

SEQ ID NO: 744769 - protein, 17 aa, Homo sapiens
  CDR3 for alpha chain variable domain of TCR clone 372385 (TRAV26-1, TRAJ37)
CIVRVITVSSNTGKLIF

SEQ ID NO: 744770 - protein, 14 aa, Homo sapiens
  CDR3 for beta chain variable domain of TCR clone 372385 (TRBV18, TRBJ1-1)
CASSPPTGRTEAFF

SEQ ID NO: 744771 - protein, 17 aa, Homo sapiens
  CDR3 for alpha chain variable domain of TCR clone 372386 (TRAV1-1, TRAJ4)
CALYNKLIFGAGTRLAV

SEQ ID NO: 744772 - protein, 16 aa, Homo sapiens
  CDR3 for beta chain variable domain of TCR clone 372386 (TRBV7-3, TRBJ2-2)
CAISLKRGTLSGELFF

SEQ ID NO: 744773 - protein, 14 aa, Homo sapiens
  CDR3 for alpha chain variable domain of TCR clone 372387 (TRAV38-1, TRAJ40)
CALRPTSGTYKYIF

SEQ ID NO: 744774 - protein, 13 aa, Homo sapiens
  CDR3 for beta chain variable domain of TCR clone 372387 (TRBV19, TRBJ2-1)
CATSRGVYNEQFF

SEQ ID NO: 744775 - protein, 12 aa, Homo sapiens
  CDR3 for alpha chain variable domain of TCR clone 372388 (TRAV12-3, TRAJ17)
CAMTLTGNKLTF

SEQ ID NO: 744776 - protein, 15 aa, Homo sapiens
  CDR3 for beta chain variable domain of TCR clone 372388 (TRBV7-2, TRBJ1-6)
CASSLGPDRGMPLHF

SEQ ID NO: 744777 - protein, 11 aa, Homo sapiens
  CDR3 for alpha chain variable domain of TCR clone 372389 (TRAV13-1, TRAJ49)
CACVGGNQFYF

SEQ ID NO: 744778 - protein, 16 aa, Homo sapiens
  CDR3 for beta chain variable domain of TCR clone 372389 (TRBV11-2, TRBJ2-2)
CASSLRTANLIGELFF

SEQ ID NO: 744779 - protein, 15 aa, Homo sapiens
  CDR3 for alpha chain variable domain of TCR clone 372390 (TRAV8-2, TRAJ42)
CVVSAYMGSQGNLIF

SEQ ID NO: 744780 - protein, 15 aa, Homo sapiens
  CDR3 for beta chain variable domain of TCR clone 372390 (TRBV7-9, TRBJ1-6)
CASSSPGRGNSPLHF

SEQ ID NO: 744781 - protein, 14 aa, Homo sapiens
  CDR3 for alpha chain variable domain of TCR clone 372391 (TRAV12-2, TRAJ13)
CAVKKTGGYQKVPF

SEQ ID NO: 744782 - protein, 14 aa, Homo sapiens
  CDR3 for beta chain variable domain of TCR clone 372391 (TRBV7-2, TRBJ2-7)
CASSPKTSFYEQYF

SEQ ID NO: 744783 - protein, 19 aa, Homo sapiens
  CDR3 for alpha chain variable domain of TCR clone 372392 (TRAV29/DV5, TRAJ49)
CSVLQCSKLTVDTGNQFYF

SEQ ID NO: 744784 - protein, 17 aa, Homo sapiens
  CDR3 for beta chain variable domain of TCR clone 372392 (TRBV13, TRBJ2-3)
CASSLSRVAGGRNTQYF

SEQ ID NO: 744785 - protein, 16 aa, Homo sapiens
  CDR3 for alpha chain variable domain of TCR clone 372393 (TRAV38-1, TRAJ32)
CAFMKGGGGATNKLIF

SEQ ID NO: 744786 - protein, 13 aa, Homo sapiens
  CDR3 for beta chain variable domain of TCR clone 372393 (TRBV20-1, TRBJ2-5)
CSARVAFQETQYF

SEQ ID NO: 744787 - protein, 17 aa, Homo sapiens
  CDR3 for alpha chain variable domain of TCR clone 372394 (TRAV3, TRAJ6)
CAVRDGPRPGGSSIPTF

SEQ ID NO: 744788 - protein, 14 aa, Homo sapiens
  CDR3 for beta chain variable domain of TCR clone 372394 (TRBV7-2, TRBJ2-7)
CASSPKTSFYEQYF

SEQ ID NO: 744789 - protein, 14 aa, Homo sapiens
  CDR3 for alpha chain variable domain of TCR clone 372395 (TRAV13-1, TRAJ45)
VSVPEGGGADGLTF

SEQ ID NO: 744790 - protein, 14 aa, Homo sapiens
  CDR3 for beta chain variable domain of TCR clone 372395 (TRBV4-1, TRBJ2-2)
CASSQAVNTGELFF

SEQ ID NO: 744791 - protein, 15 aa, Homo sapiens
  CDR3 for alpha chain variable domain of TCR clone 372396 (TRAV25, TRAJ53)
CAATGGGGSNYKLTF

SEQ ID NO: 744792 - protein, 17 aa, Homo sapiens
  CDR3 for beta chain variable domain of TCR clone 372396 (TRBV7-8, TRBJ2-6)
CASSAGTGGAGANVLTF

SEQ ID NO: 744793 - protein, 15 aa, Homo sapiens
  CDR3 for alpha chain variable domain of TCR clone 372397 (TRAV26-1, TRAJ40)
CIVRVTTSGNYKNIF

SEQ ID NO: 744794 - protein, 12 aa, Homo sapiens
  CDR3 for beta chain variable domain of TCR clone 372397 (TRBV7-9, TRBJ1-4)
CASSTDREKLFF

SEQ ID NO: 744795 - protein, 15 aa, Homo sapiens
  CDR3 for alpha chain variable domain of TCR clone 372398 (TRAV26-1, TRAJ48)
CIARWSWFGNEKLTF

SEQ ID NO: 744796 - protein, 15 aa, Homo sapiens
  CDR3 for beta chain variable domain of TCR clone 372398 (TRBV5-4, TRBJ2-1)
CASSREGLPYNEQFF

SEQ ID NO: 744797 - protein, 18 aa, Homo sapiens
  CDR3 for alpha chain variable domain of TCR clone 372399 (TRAV26-1, TRAJ23)
CIVRAGLEGWNQGGKLIF

SEQ ID NO: 744798 - protein, 16 aa, Homo sapiens
  CDR3 for beta chain variable domain of TCR clone 372399 (TRBV12-4, TRBJ2-5)
CASSFFVRGRQETQYF

SEQ ID NO: 744799 - protein, 14 aa, Homo sapiens
  CDR3 for alpha chain variable domain of TCR clone 372400 (TRAV2, TRAJ37)
CAVDFTSNTGKLIF

SEQ ID NO: 744800 - protein, 15 aa, Homo sapiens
  CDR3 for beta chain variable domain of TCR clone 372400 (TRBV20-1, TRBJ1-1)
RSASQGVTGNTEAFF

SEQ ID NO: 744801 - protein, 14 aa, Homo sapiens
  CDR3 for alpha chain variable domain of TCR clone 372401 (TRAV38-1, TRAJ45)
CASHSGGGADGLTF

SEQ ID NO: 744802 - protein, 20 aa, Homo sapiens
  CDR3 for beta chain variable domain of TCR clone 372401 (TRBV7-8, TRBJ2-2)
CASSHLFPGPTIHITGELFF

SEQ ID NO: 744803 - protein, 14 aa, Homo sapiens
  CDR3 for alpha chain variable domain of TCR clone 372402 (TRAV2, TRAJ22)
CAVEDSGSAWQLTF

SEQ ID NO: 744804 - protein, 15 aa, Homo sapiens
  CDR3 for beta chain variable domain of TCR clone 372402 (TRBV28, TRBJ1-2)
CASSLPVGHGDGYTF

SEQ ID NO: 744805 - protein, 14 aa, Homo sapiens
  CDR3 for alpha chain variable domain of TCR clone 372403 (TRAV13-2, TRAJ17)
CAENSKAAGNKLTF

SEQ ID NO: 744806 - protein, 17 aa, Homo sapiens
  CDR3 for beta chain variable domain of TCR clone 372403 (TRBV6-3, TRBJ2-3)
RPIHYSVGEGQADTQYF

SEQ ID NO: 744807 - protein, 13 aa, Homo sapiens
  CDR3 for alpha chain variable domain of TCR clone 372404 (TRAV27, TRAJ6)
CAGGTRGSYIPTF

SEQ ID NO: 744808 - protein, 20 aa, Homo sapiens
  CDR3 for beta chain variable domain of TCR clone 372404 (TRBV28, TRBJ2-1)
CASTPIGRSPGLAGGNEQFF

SEQ ID NO: 744809 - protein, 13 aa, Homo sapiens
  CDR3 for alpha chain variable domain of TCR clone 372405 (TRAV26-2, TRAJ45)
AAVYGGGADGLTF

SEQ ID NO: 744810 - protein, 13 aa, Homo sapiens
  CDR3 for beta chain variable domain of TCR clone 372405 (TRBV10-3, TRBJ2-7)
CASKLAVNYEQYF

SEQ ID NO: 744811 - protein, 14 aa, Homo sapiens
  CDR3 for alpha chain variable domain of TCR clone 372406 (TRAV1-2, TRAJ8)
CAVREDTGFQKLVF

SEQ ID NO: 744812 - protein, 16 aa, Homo sapiens
  CDR3 for beta chain variable domain of TCR clone 372406 (TRBV7-7, TRBJ2-6)
CASSLPGLSGANVLTF

SEQ ID NO: 744813 - protein, 15 aa, Homo sapiens
  CDR3 for alpha chain variable domain of TCR clone 372407 (TRAV3, TRAJ4)
GAVRDGTGGYNKLIF

SEQ ID NO: 744814 - protein, 19 aa, Homo sapiens
  CDR3 for beta chain variable domain of TCR clone 372407 (TRBV27, TRBJ2-2)
CTSAPAVLAGYRTPGSCFF

SEQ ID NO: 744815 - protein, 17 aa, Homo sapiens
  CDR3 for alpha chain variable domain of TCR clone 372408 (TRAV3, TRAJ6)
CAVRDGPRAGGSYIPTF

SEQ ID NO: 744816 - protein, 16 aa, Homo sapiens
  CDR3 for beta chain variable domain of TCR clone 372408 (TRBV19, TRBJ1-6)
CARRLEGNLHNSPLHF

SEQ ID NO: 744817 - protein, 12 aa, Homo sapiens
  CDR3 for alpha chain variable domain of TCR clone 372409 (TRAV29/DV5, TRAJ34)
CAARHNTDKLIF

SEQ ID NO: 744818 - protein, 15 aa, Homo sapiens
  CDR3 for beta chain variable domain of TCR clone 372409 (TRBV19, TRBJ2-7)
CASSHAGSGEALRYF

SEQ ID NO: 744819 - protein, 11 aa, Homo sapiens
  CDR3 for alpha chain variable domain of TCR clone 372410 (TRAV12-3, TRAJ43)
CAMSVSNDMRF

SEQ ID NO: 744820 - protein, 17 aa, Homo sapiens
  CDR3 for beta chain variable domain of TCR clone 372410 (TRBV20-1, TRBJ2-2)
CSASGSGQGGLTGELFF

SEQ ID NO: 744821 - protein, 17 aa, Homo sapiens
  CDR3 for alpha chain variable domain of TCR clone 372411 (TRAV3, TRAJ6)
CAVRDGTRAGGSYIPTF

SEQ ID NO: 744822 - protein, 14 aa, Homo sapiens
  CDR3 for beta chain variable domain of TCR clone 372411 (TRBV7-2, TRBJ2-7)
CASSPKTSFYEQYF

SEQ ID NO: 744823 - protein, 12 aa, Homo sapiens
  CDR3 for alpha chain variable domain of TCR clone 372412 (TRAV2, TRAJ10)
CASTGGGNKHTF

SEQ ID NO: 744824 - protein, 15 aa, Homo sapiens
  CDR3 for beta chain variable domain of TCR clone 372412 (TRBV28, TRBJ2-1)
CASSGLAGVDNEQFF

SEQ ID NO: 744825 - protein, 14 aa, Homo sapiens
  CDR3 for alpha chain variable domain of TCR clone 372413 (TRAV16, TRAJ33)
CALSAMDSNYQLIW

SEQ ID NO: 744826 - protein, 16 aa, Homo sapiens
  CDR3 for beta chain variable domain of TCR clone 372413 (TRBV11-2, TRBJ1-2)
CASSPSGREANYGYTF

SEQ ID NO: 744827 - protein, 12 aa, Homo sapiens
  CDR3 for alpha chain variable domain of TCR clone 372414 (TRAV12-3, TRAJ17)
CAMTLTGNKLTF

SEQ ID NO: 744828 - protein, 14 aa, Homo sapiens
  CDR3 for beta chain variable domain of TCR clone 372414 (TRBV5-1, TRBJ2-1)
CASSQRDIYNEQFF

SEQ ID NO: 744829 - protein, 15 aa, Homo sapiens
  CDR3 for alpha chain variable domain of TCR clone 372415 (TRAV3, TRAJ22)
CAVRDRGGSARQLTF

SEQ ID NO: 744830 - protein, 14 aa, Homo sapiens
  CDR3 for beta chain variable domain of TCR clone 372415 (TRBV5-1, TRBJ1-4)
CASSLDRTHEKLFF

SEQ ID NO: 744831 - protein, 13 aa, Homo sapiens
  CDR3 for alpha chain variable domain of TCR clone 372416 (TRAV38-1, TRAJ42)
CARWGGSQGNLNF

SEQ ID NO: 744832 - protein, 10 aa, Homo sapiens
  CDR3 for beta chain variable domain of TCR clone 372416 (TRBV2, TRBJ2-5)
CASSAATQYF

SEQ ID NO: 744833 - protein, 16 aa, Homo sapiens
  CDR3 for alpha chain variable domain of TCR clone 372417 (TRAV27, TRAJ52)
CAGAGAGGTSEGKLTF

SEQ ID NO: 744834 - protein, 17 aa, Homo sapiens
  CDR3 for beta chain variable domain of TCR clone 372417 (TRBV24-1, TRBJ2-3)
CATSDLPSGEDTDTQYF

SEQ ID NO: 744835 - protein, 12 aa, Homo sapiens
  CDR3 for alpha chain variable domain of TCR clone 372418 (TRAV13-1, TRAJ21)
CAAKEGINKFYF

SEQ ID NO: 744836 - protein, 18 aa, Homo sapiens
  CDR3 for beta chain variable domain of TCR clone 372418 (TRBV20-1, TRBJ2-6)
CSAETTTTHGSGANDLTF

SEQ ID NO: 744837 - protein, 19 aa, Homo sapiens
  CDR3 for alpha chain variable domain of TCR clone 372419 (TRAV26-1, TRAJ28)
CIVRVAHAYSGAGSYQLTF

SEQ ID NO: 744838 - protein, 17 aa, Homo sapiens
  CDR3 for beta chain variable domain of TCR clone 372419 (TRBV9, TRBJ2-2)
CDSSVGGQGTDTGELFF

SEQ ID NO: 744839 - protein, 15 aa, Homo sapiens
  CDR3 for alpha chain variable domain of TCR clone 372420 (TRAV17, TRAJ37)
CATDHGSSNTGKLIF

SEQ ID NO: 744840 - protein, 14 aa, Homo sapiens
  CDR3 for beta chain variable domain of TCR clone 372420 (TRBV7-2, TRBJ2-3)
RASSRTSGADTQYF

SEQ ID NO: 744841 - protein, 14 aa, Homo sapiens
  CDR3 for alpha chain variable domain of TCR clone 372421 (TRAV8-4, TRAJ29)
CAVGAVEGNTPLVF

SEQ ID NO: 744842 - protein, 13 aa, Homo sapiens
  CDR3 for beta chain variable domain of TCR clone 372421 (TRBV12-4, TRBJ2-7)
CASSFQGRYEQYF

SEQ ID NO: 744843 - protein, 14 aa, Homo sapiens
  CDR3 for alpha chain variable domain of TCR clone 372422 (TRAV12-2, TRAJ44)
CAVNPAGIASKLTF

SEQ ID NO: 744844 - protein, 15 aa, Homo sapiens
  CDR3 for beta chain variable domain of TCR clone 372422 (TRBV28, TRBJ2-7)
CASSVRQVSSYEQYF

SEQ ID NO: 744845 - protein, 15 aa, Homo sapiens
  CDR3 for alpha chain variable domain of TCR clone 372423 (TRAV35, TRAJ40)
CAGQLGTLGTYKNIF

SEQ ID NO: 744846 - protein, 14 aa, Homo sapiens
  CDR3 for beta chain variable domain of TCR clone 372423 (TRBV7-3, TRBJ2-1)
CASSLAGGTNEQFF

SEQ ID NO: 744847 - protein, 14 aa, Homo sapiens
  CDR3 for alpha chain variable domain of TCR clone 372424 (TRAV17, TRAJ57)
CATDPQGGSEKLVS

SEQ ID NO: 744848 - protein, 17 aa, Homo sapiens
  CDR3 for beta chain variable domain of TCR clone 372424 (TRBV3-1, TRBJ2-2)
CASSLRPPASGTGELFF

SEQ ID NO: 744849 - protein, 13 aa, Homo sapiens
  CDR3 for alpha chain variable domain of TCR clone 372425 (TRAV13-1, TRAJ29)
CAATISGNTPLVF

SEQ ID NO: 744850 - protein, 15 aa, Homo sapiens
  CDR3 for beta chain variable domain of TCR clone 372425 (TRBV7-9, TRBJ2-1)
CASSLAIGEYNEQFF

SEQ ID NO: 744851 - protein, 13 aa, Homo sapiens
  CDR3 for alpha chain variable domain of TCR clone 372426 (TRAV3, TRAJ15)
CAVRDQAGTALIF

SEQ ID NO: 744852 - protein, 16 aa, Homo sapiens
  CDR3 for beta chain variable domain of TCR clone 372426 (TRBV2, TRBJ2-3)
CASSTSVEGVTDTQYF

SEQ ID NO: 744853 - protein, 13 aa, Homo sapiens
  CDR3 for alpha chain variable domain of TCR clone 372427 (TRAV20, TRAJ31)
CAVQAGNNARLMF

SEQ ID NO: 744854 - protein, 12 aa, Homo sapiens
  CDR3 for beta chain variable domain of TCR clone 372427 (TRBV11-2, TRBJ2-2)
CASSLGGGELFF

SEQ ID NO: 744855 - protein, 13 aa, Homo sapiens
  CDR3 for alpha chain variable domain of TCR clone 372428 (TRAV1-1, TRAJ16)
CAVMFSDGQKLLF

SEQ ID NO: 744856 - protein, 14 aa, Homo sapiens
  CDR3 for beta chain variable domain of TCR clone 372428 (TRBV6-3, TRBJ1-1)
CASSYQRRDTEAFF

SEQ ID NO: 744857 - protein, 13 aa, Homo sapiens
  CDR3 for alpha chain variable domain of TCR clone 372429 (TRAV1-1, TRAJ34)
CAVEAPTSSSLGL

SEQ ID NO: 744858 - protein, 16 aa, Homo sapiens
  CDR3 for beta chain variable domain of TCR clone 372429 (TRBV4-1, TRBJ2-2)
CASSQESGQATGELFF

SEQ ID NO: 744859 - protein, 13 aa, Homo sapiens
  CDR3 for alpha chain variable domain of TCR clone 372430 (TRAV20, TRAJ20)
CAVQAGSSYKLSF

SEQ ID NO: 744860 - protein, 16 aa, Homo sapiens
  CDR3 for beta chain variable domain of TCR clone 372430 (TRBV3-1, TRBJ2-3)
CISVPAAKGGGDTQYF

SEQ ID NO: 744861 - protein, 12 aa, Homo sapiens
  CDR3 for alpha chain variable domain of TCR clone 372431 (TRAV12-3, TRAJ17)
CAMTLTGNKPTV

SEQ ID NO: 744862 - protein, 15 aa, Homo sapiens
  CDR3 for beta chain variable domain of TCR clone 372431 (TRBV20-1, TRBJ2-7)
CSVRDRVSGMDEQYF

SEQ ID NO: 744863 - protein, 11 aa, Homo sapiens
  CDR3 for alpha chain variable domain of TCR clone 372432 (TRAV12-2, TRAJ49)
CALQGGNQFYF

SEQ ID NO: 744864 - protein, 13 aa, Homo sapiens
  CDR3 for beta chain variable domain of TCR clone 372432 (TRBV7-9, TRBJ1-2)
CASSLKQNYGYTF

SEQ ID NO: 744865 - protein, 14 aa, Homo sapiens
  CDR3 for alpha chain variable domain of TCR clone 372433 (TRAV23/DV6, TRAJ8)
CAASKATGFQTLAF

SEQ ID NO: 744866 - protein, 15 aa, Homo sapiens
  CDR3 for beta chain variable domain of TCR clone 372433 (TRBV28, TRBJ2-3)
CASSPDRQGANTQYF

SEQ ID NO: 744867 - protein, 11 aa, Homo sapiens
  CDR3 for alpha chain variable domain of TCR clone 372434 (TRAV1-2, TRAJ40)
CAVPGTYKYIF

SEQ ID NO: 744868 - protein, 11 aa, Homo sapiens
  CDR3 for beta chain variable domain of TCR clone 372434 (TRBV11-2, TRBJ2-2)
CASSLPGELFF

SEQ ID NO: 744869 - protein, 12 aa, Homo sapiens
  CDR3 for alpha chain variable domain of TCR clone 372435 (TRAV2, TRAJ31)
CAVEDNNARLMF

SEQ ID NO: 744870 - protein, 15 aa, Homo sapiens
  CDR3 for beta chain variable domain of TCR clone 372435 (TRBV27, TRBJ2-3)
CASSSLAGVIDTQYF

SEQ ID NO: 744871 - protein, 17 aa, Homo sapiens
  CDR3 for alpha chain variable domain of TCR clone 372436 (TRAV8-6, TRAJ52)
CAVTRNAGGTSYGKLTC

SEQ ID NO: 744872 - protein, 13 aa, Homo sapiens
  CDR3 for beta chain variable domain of TCR clone 372436 (TRBV7-9, TRBJ1-2)
CASSLKQNYGYTF

SEQ ID NO: 744873 - protein, 13 aa, Homo sapiens
  CDR3 for alpha chain variable domain of TCR clone 372437 (TRAV21, TRAJ57)
CAVTQGGSEKLVF

SEQ ID NO: 744874 - protein, 16 aa, Homo sapiens
  CDR3 for beta chain variable domain of TCR clone 372437 (TRBV29-1, TRBJ2-7)
CSVEDAEDGTGYEQYF

SEQ ID NO: 744875 - protein, 12 aa, Homo sapiens
  CDR3 for alpha chain variable domain of TCR clone 372438 (TRAV3, TRAJ20)
CAVRDHDYKLSF

SEQ ID NO: 744876 - protein, 14 aa, Homo sapiens
  CDR3 for beta chain variable domain of TCR clone 372438 (TRBV4-2, TRBJ2-1)
CASGSDRAYNEQFF

SEQ ID NO: 744877 - protein, 18 aa, Homo sapiens
  CDR3 for alpha chain variable domain of TCR clone 372439 (TRAV12-1, TRAJ26)
SSVIQPPTSVPYGQNFVF

SEQ ID NO: 744878 - protein, 15 aa, Homo sapiens
  CDR3 for beta chain variable domain of TCR clone 372439 (TRBV20-1, TRBJ2-7)
CSARVPAAYFYEQYF

SEQ ID NO: 744879 - protein, 15 aa, Homo sapiens
  CDR3 for alpha chain variable domain of TCR clone 372440 (TRAV12-3, TRAJ11)
CAMSEENSGYSTLTF

SEQ ID NO: 744880 - protein, 16 aa, Homo sapiens
  CDR3 for beta chain variable domain of TCR clone 372440 (TRBV5-1, TRBJ2-7)
CASRLEGLAGLYEQYF

SEQ ID NO: 744881 - protein, 18 aa, Homo sapiens
  CDR3 for alpha chain variable domain of TCR clone 372441 (TRAV26-1, TRAJ23)
CIVSVGLEVWNQGGKLIF

SEQ ID NO: 744882 - protein, 16 aa, Homo sapiens
  CDR3 for beta chain variable domain of TCR clone 372441 (TRBV12-4, TRBJ2-5)
CASSFFVRGRQETQYV

SEQ ID NO: 744883 - protein, 12 aa, Homo sapiens
  CDR3 for alpha chain variable domain of TCR clone 372442 (TRAV12-2, TRAJ10)
WGVTGGGNKLTF

SEQ ID NO: 744884 - protein, 14 aa, Homo sapiens
  CDR3 for beta chain variable domain of TCR clone 372442 (TRBV5-1, TRBJ2-7)
CASSRGESLYEQYF

SEQ ID NO: 744885 - protein, 18 aa, Homo sapiens
  CDR3 for alpha chain variable domain of TCR clone 372443 (TRAV26-1, TRAJ23)
CIVRVGLEVWNQGGKFIF

SEQ ID NO: 744886 - protein, 14 aa, Homo sapiens
  CDR3 for beta chain variable domain of TCR clone 372443 (TRBV7-6, TRBJ2-3)
CASSLGTVTDTQYF

SEQ ID NO: 744887 - protein, 15 aa, Homo sapiens
  CDR3 for alpha chain variable domain of TCR clone 372444 (TRAV25, TRAJ10)
CAGLGLTGGGNKLTF

SEQ ID NO: 744888 - protein, 16 aa, Homo sapiens
  CDR3 for beta chain variable domain of TCR clone 372444 (TRBV5-1, TRBJ2-1)
CASSLTLAGGRNEQFF

SEQ ID NO: 744889 - protein, 14 aa, Homo sapiens
  CDR3 for alpha chain variable domain of TCR clone 372445 (TRAV12-1, TRAJ34)
CVVSLDYNTDKLIF

SEQ ID NO: 744890 - protein, 20 aa, Homo sapiens
  CDR3 for beta chain variable domain of TCR clone 372445 (TRBV7-3, TRBJ2-7)
CANSPRGLAGMVAVLRAGHQ

SEQ ID NO: 744891 - protein, 16 aa, Homo sapiens
  CDR3 for alpha chain variable domain of TCR clone 372446 (TRAV3, TRAJ37)
CAVRPNGSGNTGKLIF

SEQ ID NO: 744892 - protein, 14 aa, Homo sapiens
  CDR3 for beta chain variable domain of TCR clone 372446 (TRBV20-1, TRBJ2-1)
CSARGGSSYNEQFF

SEQ ID NO: 744893 - protein, 12 aa, Homo sapiens
  CDR3 for alpha chain variable domain of TCR clone 372447 (TRAV1-1, TRAJ8)
CAGGTGFQKLVF

SEQ ID NO: 744894 - protein, 12 aa, Homo sapiens
  CDR3 for beta chain variable domain of TCR clone 372447 (TRBV7-3, TRBJ2-1)
CASSLGFNEQFF

SEQ ID NO: 744895 - protein, 15 aa, Homo sapiens
  CDR3 for alpha chain variable domain of TCR clone 372448 (TRAV8-2, TRAJ40)
CVVLGTTSGTYKYIF

SEQ ID NO: 744896 - protein, 15 aa, Homo sapiens
  CDR3 for beta chain variable domain of TCR clone 372448 (TRBV7-9, TRBJ1-5)
CASSQGHQPNQPQHF

SEQ ID NO: 744897 - protein, 13 aa, Homo sapiens
  CDR3 for alpha chain variable domain of TCR clone 372449 (TRAV3, TRAJ43)
CAVKARNSNDMRF

SEQ ID NO: 744898 - protein, 16 aa, Homo sapiens
  CDR3 for beta chain variable domain of TCR clone 372449 (TRBV7-9, TRBJ2-3)
CASSFSVAGGTETQYF

SEQ ID NO: 744899 - protein, 19 aa, Homo sapiens
  CDR3 for alpha chain variable domain of TCR clone 372450 (TRAV1-2, TRAJ26)
CLLPLCCERPDNYGQNFVF

SEQ ID NO: 744900 - protein, 15 aa, Homo sapiens
  CDR3 for beta chain variable domain of TCR clone 372450 (TRBV12-4, TRBJ2-5)
CASSGTGQAQETQYF

SEQ ID NO: 744901 - protein, 16 aa, Homo sapiens
  CDR3 for alpha chain variable domain of TCR clone 372451 (TRAV3, TRAJ37)
CAVRPHGSGITGKLIF

SEQ ID NO: 744902 - protein, 17 aa, Homo sapiens
  CDR3 for beta chain variable domain of TCR clone 372451 (TRBV5-1, TRBJ2-5)
CASSPVALGQNQETQYF

SEQ ID NO: 744903 - protein, 14 aa, Homo sapiens
  CDR3 for alpha chain variable domain of TCR clone 372452 (TRAV12-3, TRAJ27)
CGEHIRTNAGKSTF

SEQ ID NO: 744904 - protein, 15 aa, Homo sapiens
  CDR3 for beta chain variable domain of TCR clone 372452 (TRBV19, TRBJ1-1)
CASTSGQIQNTEAFF

SEQ ID NO: 744905 - protein, 15 aa, Homo sapiens
  CDR3 for alpha chain variable domain of TCR clone 372453 (TRAV3, TRAJ5)
CAVRDLDTGMRALTF

SEQ ID NO: 744906 - protein, 13 aa, Homo sapiens
  CDR3 for beta chain variable domain of TCR clone 372453 (TRBV12-4, TRBJ2-7)
CASSPTETYKQYF

SEQ ID NO: 744907 - protein, 14 aa, Homo sapiens
  CDR3 for alpha chain variable domain of TCR clone 372454 (TRAV21, TRAJ37)
CAVKGSSNSGKLIF

SEQ ID NO: 744908 - protein, 14 aa, Homo sapiens
  CDR3 for beta chain variable domain of TCR clone 372454 (TRBV7-2, TRBJ2-1)
CASSRGGARNEQFF

SEQ ID NO: 744909 - protein, 17 aa, Homo sapiens
  CDR3 for alpha chain variable domain of TCR clone 372455 (TRAV3, TRAJ6)
CAVRDGPRAGGSYITPF

SEQ ID NO: 744910 - protein, 14 aa, Homo sapiens
  CDR3 for beta chain variable domain of TCR clone 372455 (TRBV7-2, TRBJ2-7)
CASSPKTSFYEQYF

SEQ ID NO: 744911 - protein, 14 aa, Homo sapiens
  CDR3 for alpha chain variable domain of TCR clone 372456 (TRAV12-2, TRAJ45)
CAVYSGGGADGLTF

SEQ ID NO: 744912 - protein, 12 aa, Homo sapiens
  CDR3 for beta chain variable domain of TCR clone 372456 (TRBV5-1, TRBJ2-7)
CASSLDSYEQYF

SEQ ID NO: 744913 - protein, 14 aa, Homo sapiens
  CDR3 for alpha chain variable domain of TCR clone 372457 (TRAV1-2, TRAJ8)
CAVREDTGFQKHVF

SEQ ID NO: 744914 - protein, 17 aa, Homo sapiens
  CDR3 for beta chain variable domain of TCR clone 372457 (TRBV6-5, TRBJ2-7)
CAGRPSVGEVQHYEQYF

SEQ ID NO: 744915 - protein, 13 aa, Homo sapiens
  CDR3 for alpha chain variable domain of TCR clone 372458 (TRAV3, TRAJ29)
CAVRDIIDTPLVF

SEQ ID NO: 744916 - protein, 14 aa, Homo sapiens
  CDR3 for beta chain variable domain of TCR clone 372458 (TRBV27, TRBJ2-1)
CAISATGGYNEQFF

SEQ ID NO: 744917 - protein, 12 aa, Homo sapiens
  CDR3 for alpha chain variable domain of TCR clone 372459 (TRAV8-3, TRAJ26)
CAGDNYGQNFVF

SEQ ID NO: 744918 - protein, 12 aa, Homo sapiens
  CDR3 for beta chain variable domain of TCR clone 372459 (TRBV24-1, TRBJ1-1)
CATSDSDRGAFF

SEQ ID NO: 744919 - protein, 16 aa, Homo sapiens
  CDR3 for alpha chain variable domain of TCR clone 372460 (TRAV3, TRAJ28)
CSVLPSSGPGSYQLTF

SEQ ID NO: 744920 - protein, 13 aa, Homo sapiens
  CDR3 for beta chain variable domain of TCR clone 372460 (TRBV12-4, TRBJ2-5)
CASRLAVQETQYF

SEQ ID NO: 744921 - protein, 15 aa, Homo sapiens
  CDR3 for alpha chain variable domain of TCR clone 372461 (TRAV30, TRAJ57)
CGTAIPQGGSEKLVF

SEQ ID NO: 744922 - protein, 15 aa, Homo sapiens
  CDR3 for beta chain variable domain of TCR clone 372461 (TRBV10-3, TRBJ2-3)
CAISLTSGGTDTQYF

SEQ ID NO: 744923 - protein, 17 aa, Homo sapiens
  CDR3 for alpha chain variable domain of TCR clone 372462 (TRAV8-2, TRAJ42)
CAVRDRDYGGSQGNLIF

SEQ ID NO: 744924 - protein, 15 aa, Homo sapiens
  CDR3 for beta chain variable domain of TCR clone 372462 (TRBV6-6, TRBJ2-7)
CASSYSYGGSYEQYF

SEQ ID NO: 744925 - protein, 16 aa, Homo sapiens
  CDR3 for alpha chain variable domain of TCR clone 372463 (TRAV1-2, TRAJ10)
CAVRGVLTGGGNKLTF

SEQ ID NO: 744926 - protein, 13 aa, Homo sapiens
  CDR3 for beta chain variable domain of TCR clone 372463 (TRBV9, TRBJ2-1)
CTSSPSGGSEQFF

SEQ ID NO: 744927 - protein, 16 aa, Homo sapiens
  CDR3 for alpha chain variable domain of TCR clone 372464 (TRAV16, TRAJ42)
CARKMNYGGSQGDLIF

SEQ ID NO: 744928 - protein, 13 aa, Homo sapiens
  CDR3 for beta chain variable domain of TCR clone 372464 (TRBV20-1, TRBJ2-7)
CSASPPSSYEQYF

SEQ ID NO: 744929 - protein, 10 aa, Homo sapiens
  CDR3 for alpha chain variable domain of TCR clone 372465 (TRAV26-1, TRAJ22)
CIAGSRQLTF

SEQ ID NO: 744930 - protein, 14 aa, Homo sapiens
  CDR3 for beta chain variable domain of TCR clone 372465 (TRBV25-1, TRBJ1-1)
CASTHLGGNTEAFF

SEQ ID NO: 744931 - protein, 19 aa, Homo sapiens
  CDR3 for alpha chain variable domain of TCR clone 372466 (TRAV27, TRAJ53)
ASTSVQSRNSGGSKYKLTF

SEQ ID NO: 744932 - protein, 14 aa, Homo sapiens
  CDR3 for beta chain variable domain of TCR clone 372466 (TRBV11-1, TRBJ2-7)
CASTFAVPAYEQYF

SEQ ID NO: 744933 - protein, 11 aa, Homo sapiens
  CDR3 for alpha chain variable domain of TCR clone 372467 (TRAV12-1, TRAJ30)
CVVNGQDKIIV

SEQ ID NO: 744934 - protein, 12 aa, Homo sapiens
  CDR3 for beta chain variable domain of TCR clone 372467 (TRBV27, TRBJ2-2)
CASKRFTGELFF

SEQ ID NO: 744935 - protein, 13 aa, Homo sapiens
  CDR3 for alpha chain variable domain of TCR clone 372468 (TRAV3, TRAJ21)
CAVGEPDLNKFYF

SEQ ID NO: 744936 - protein, 12 aa, Homo sapiens
  CDR3 for beta chain variable domain of TCR clone 372468 (TRBV5-1, TRBJ2-4)
LAGEWTKNIQYF

SEQ ID NO: 744937 - protein, 13 aa, Homo sapiens
  CDR3 for alpha chain variable domain of TCR clone 372469 (TRAV17, TRAJ5)
CALRGTGRRALTF

SEQ ID NO: 744938 - protein, 13 aa, Homo sapiens
  CDR3 for beta chain variable domain of TCR clone 372469 (TRBV7-6, TRBJ1-2)
CASSLVADYGYTF

SEQ ID NO: 744939 - protein, 17 aa, Homo sapiens
  CDR3 for alpha chain variable domain of TCR clone 372470 (TRAV3, TRAJ42)
CAVRDRDYGGIQGNLIF

SEQ ID NO: 744940 - protein, 15 aa, Homo sapiens
  CDR3 for beta chain variable domain of TCR clone 372470 (TRBV6-6, TRBJ2-7)
CASSYSYGGPYEQYF

SEQ ID NO: 744941 - protein, 14 aa, Homo sapiens
  CDR3 for alpha chain variable domain of TCR clone 372471 (TRAV12-3, TRAJ10)
SHLPLTGGGNKLTF

SEQ ID NO: 744942 - protein, 16 aa, Homo sapiens
  CDR3 for beta chain variable domain of TCR clone 372471 (TRBV7-2, TRBJ1-1)
CASSLGAGWTNTEAFF

SEQ ID NO: 744943 - protein, 14 aa, Homo sapiens
  CDR3 for alpha chain variable domain of TCR clone 372472 (TRAV38-1, TRAJ40)
CALRPTSGTYKYIF

SEQ ID NO: 744944 - protein, 12 aa, Homo sapiens
  CDR3 for beta chain variable domain of TCR clone 372472 (TRBV18, TRBJ2-1)
CASASDEDEQFF

SEQ ID NO: 744945 - protein, 11 aa, Homo sapiens
  CDR3 for alpha chain variable domain of TCR clone 372473 (TRAV2, TRAJ13)
CASGGYQKVTF

SEQ ID NO: 744946 - protein, 17 aa, Homo sapiens
  CDR3 for beta chain variable domain of TCR clone 372473 (TRBV10-3, TRBJ2-6)
CAISESTAPSGANVLTF

SEQ ID NO: 744947 - protein, 15 aa, Homo sapiens
  CDR3 for alpha chain variable domain of TCR clone 372474 (TRAV12-1, TRAJ43)
CVVNRGRYNNNDMRF

SEQ ID NO: 744948 - protein, 14 aa, Homo sapiens
  CDR3 for beta chain variable domain of TCR clone 372474 (TRBV7-9, TRBJ2-5)
CASSLAFGQETQYF

SEQ ID NO: 744949 - protein, 13 aa, Homo sapiens
  CDR3 for alpha chain variable domain of TCR clone 372475 (TRAV23/DV6, TRAJ47)
CAVSSQYGNKLVF

SEQ ID NO: 744950 - protein, 15 aa, Homo sapiens
  CDR3 for beta chain variable domain of TCR clone 372475 (TRBV7-3, TRBJ2-1)
CASSLAGNSYNEQFF

SEQ ID NO: 744951 - protein, 15 aa, Homo sapiens
  CDR3 for alpha chain variable domain of TCR clone 372476 (TRAV29/DV5, TRAJ53)
CAARYSGGTNYKLTF

SEQ ID NO: 744952 - protein, 15 aa, Homo sapiens
  CDR3 for beta chain variable domain of TCR clone 372476 (TRBV28, TRBJ2-1)
CASSLGTRLYNEQFF

SEQ ID NO: 744953 - protein, 12 aa, Homo sapiens
  CDR3 for alpha chain variable domain of TCR clone 372477 (TRAV12-1, TRAJ40)
CVVSSGTYKYIF

SEQ ID NO: 744954 - protein, 15 aa, Homo sapiens
  CDR3 for beta chain variable domain of TCR clone 372477 (TRBV12-4, TRBJ2-5)
CASSPPTGLQETQYF

SEQ ID NO: 744955 - protein, 18 aa, Homo sapiens
  CDR3 for alpha chain variable domain of TCR clone 372478 (TRAV21, TRAJ52)
CAVRRSPAGGTSYGKLTF

SEQ ID NO: 744956 - protein, 15 aa, Homo sapiens
  CDR3 for beta chain variable domain of TCR clone 372478 (TRBV20-1, TRBJ2-7)
CSARDRVSGMDEQYF

SEQ ID NO: 744957 - protein, 15 aa, Homo sapiens
  CDR3 for alpha chain variable domain of TCR clone 372479 (TRAV26-1, TRAJ29)
CIVRVEGAGNAPLVF

SEQ ID NO: 744958 - protein, 18 aa, Homo sapiens
  CDR3 for beta chain variable domain of TCR clone 372479 (TRBV5-5, TRBJ1-5)
CASSLRQVKGSSNQPQHF

SEQ ID NO: 744959 - protein, 14 aa, Homo sapiens
  CDR3 for alpha chain variable domain of TCR clone 372480 (TRAV13-1, TRAJ12)
CSNYQMDSSYKLIF

SEQ ID NO: 744960 - protein, 11 aa, Homo sapiens
  CDR3 for beta chain variable domain of TCR clone 372480 (TRBV20-1, TRBJ2-1)
CSLSSGSEQFF

SEQ ID NO: 744961 - protein, 13 aa, Homo sapiens
  CDR3 for alpha chain variable domain of TCR clone 372481 (TRAV8-3, TRAJ28)
CAVGAVGSYQLTF

SEQ ID NO: 744962 - protein, 15 aa, Homo sapiens
  CDR3 for beta chain variable domain of TCR clone 372481 (TRBV7-9, TRBJ1-5)
CASSQGHEPNQPLHF

SEQ ID NO: 744963 - protein, 14 aa, Homo sapiens
  CDR3 for alpha chain variable domain of TCR clone 372482 (TRAV1-2, TRAJ8)
CAVREDTGFEKLVF

SEQ ID NO: 744964 - protein, 16 aa, Homo sapiens
  CDR3 for beta chain variable domain of TCR clone 372482 (TRBV7-2, TRBJ2-5)
CASSLAVSGRGETQYF

SEQ ID NO: 744965 - protein, 11 aa, Homo sapiens
  CDR3 for alpha chain variable domain of TCR clone 372483 (TRAV4, TRAJ31)
CLVGDNARLMF

SEQ ID NO: 744966 - protein, 14 aa, Homo sapiens
  CDR3 for beta chain variable domain of TCR clone 372483 (TRBV7-7, TRBJ2-2)
CATRQDSDTGELFF

SEQ ID NO: 744967 - protein, 14 aa, Homo sapiens
  CDR3 for alpha chain variable domain of TCR clone 372484 (TRAV9-2, TRAJ36)
CALPWRTGATNLFF

SEQ ID NO: 744968 - protein, 14 aa, Homo sapiens
  CDR3 for beta chain variable domain of TCR clone 372484 (TRBV2, TRBJ1-2)
CASSELQVNYGYTF

SEQ ID NO: 744969 - protein, 13 aa, Homo sapiens
  CDR3 for alpha chain variable domain of TCR clone 372485 (TRAV30, TRAJ6)
CGTEAGGSYVPTF

SEQ ID NO: 744970 - protein, 16 aa, Homo sapiens
  CDR3 for beta chain variable domain of TCR clone 372485 (TRBV4-3, TRBJ2-3)
CASSLGLAGEGDTQYF

SEQ ID NO: 744971 - protein, 16 aa, Homo sapiens
  CDR3 for alpha chain variable domain of TCR clone 372486 (TRAV29/DV5, TRAJ36)
CAASAGVETGANNIFF

SEQ ID NO: 744972 - protein, 16 aa, Homo sapiens
  CDR3 for beta chain variable domain of TCR clone 372486 (TRBV5-1, TRBJ2-3)
CASSLGLAVYTDTQYF

SEQ ID NO: 744973 - protein, 14 aa, Homo sapiens
  CDR3 for alpha chain variable domain of TCR clone 372487 (TRAV8-2, TRAJ4)
CVVSPSGGYNKLIF

SEQ ID NO: 744974 - protein, 16 aa, Homo sapiens
  CDR3 for beta chain variable domain of TCR clone 372487 (TRBV14, TRBJ2-7)
CASSPDSGTVAREQYF

SEQ ID NO: 744975 - protein, 14 aa, Homo sapiens
  CDR3 for alpha chain variable domain of TCR clone 372488 (TRAV12-1, TRAJ12)
CVVILMDSSYKLIF

SEQ ID NO: 744976 - protein, 16 aa, Homo sapiens
  CDR3 for beta chain variable domain of TCR clone 372488 (TRBV12-4, TRBJ1-5)
CASSRPVGGSNQPQHF

SEQ ID NO: 744977 - protein, 14 aa, Homo sapiens
  CDR3 for alpha chain variable domain of TCR clone 372489 (TRAV17, TRAJ48)
CATEGNFGNEKLTF

SEQ ID NO: 744978 - protein, 15 aa, Homo sapiens
  CDR3 for beta chain variable domain of TCR clone 372489 (TRBV28, TRBJ1-3)
CASSMGWASGNTIYF

SEQ ID NO: 744979 - protein, 12 aa, Homo sapiens
  CDR3 for alpha chain variable domain of TCR clone 372490 (TRAV29/DV5, TRAJ34)
CAARHNTDKLIF

SEQ ID NO: 744980 - protein, 14 aa, Homo sapiens
  CDR3 for beta chain variable domain of TCR clone 372490 (TRBV7-2, TRBJ1-5)
CASSTQGAGQPRHF

SEQ ID NO: 744981 - protein, 16 aa, Homo sapiens
  CDR3 for alpha chain variable domain of TCR clone 372491 (TRAV3, TRAJ10)
CAVRDMRAGGGNKLTI

SEQ ID NO: 744982 - protein, 11 aa, Homo sapiens
  CDR3 for beta chain variable domain of TCR clone 372491 (TRBV29-1, TRBJ2-5)
CSEDRTGTQYF

SEQ ID NO: 744983 - protein, 12 aa, Homo sapiens
  CDR3 for alpha chain variable domain of TCR clone 372492 (TRAV3, TRAJ26)
CAVRDYGQNFVF

SEQ ID NO: 744984 - protein, 13 aa, Homo sapiens
  CDR3 for beta chain variable domain of TCR clone 372492 (TRBV2, TRBJ1-5)
CATAGPGNQPQHF

SEQ ID NO: 744985 - protein, 15 aa, Homo sapiens
  CDR3 for alpha chain variable domain of TCR clone 372493 (TRAV8-4, TRAJ36)
GAVRKSWTGANNLFF

SEQ ID NO: 744986 - protein, 17 aa, Homo sapiens
  CDR3 for beta chain variable domain of TCR clone 372493 (TRBV3-1, TRBJ2-2)
CASSQDSQGPNTGELFF

SEQ ID NO: 744987 - protein, 14 aa, Homo sapiens
  CDR3 for alpha chain variable domain of TCR clone 372494 (TRAV9-2, TRAJ39)
CALYIYNAGDMLTF

SEQ ID NO: 744988 - protein, 13 aa, Homo sapiens
  CDR3 for beta chain variable domain of TCR clone 372494 (TRBV19, TRBJ2-2)
CASSIWSTGELFF

SEQ ID NO: 744989 - protein, 12 aa, Homo sapiens
  CDR3 for alpha chain variable domain of TCR clone 372495 (TRAV1-1, TRAJ34)
CAAVPWSDKLIF

SEQ ID NO: 744990 - protein, 12 aa, Homo sapiens
  CDR3 for beta chain variable domain of TCR clone 372495 (TRBV27, TRBJ2-1)
CASRGFYNEQFF

SEQ ID NO: 744991 - protein, 11 aa, Homo sapiens
  CDR3 for alpha chain variable domain of TCR clone 372496 (TRAV13-1, TRAJ6)
CATLGSYIPTF

SEQ ID NO: 744992 - protein, 13 aa, Homo sapiens
  CDR3 for beta chain variable domain of TCR clone 372496 (TRBV6-6, TRBJ2-1)
CASSLHQGDEQFL

SEQ ID NO: 744993 - protein, 14 aa, Homo sapiens
  CDR3 for alpha chain variable domain of TCR clone 372497 (TRAV17, TRAJ56)
CATVPAGANSKLTF

SEQ ID NO: 744994 - protein, 13 aa, Homo sapiens
  CDR3 for beta chain variable domain of TCR clone 372497 (TRBV12-4, TRBJ2-2)
CTSSITGSGELFF

SEQ ID NO: 744995 - protein, 14 aa, Homo sapiens
  CDR3 for alpha chain variable domain of TCR clone 372498 (TRAV12-3, TRAJ56)
CAMSVTGANSKLTF

SEQ ID NO: 744996 - protein, 17 aa, Homo sapiens
  CDR3 for beta chain variable domain of TCR clone 372498 (TRBV20-1, TRBJ2-3)
CSASLLGRGGSADTQYF

SEQ ID NO: 744997 - protein, 14 aa, Homo sapiens
  CDR3 for alpha chain variable domain of TCR clone 372499 (TRAV16, TRAJ48)
CALTPGFGNEKLTF

SEQ ID NO: 744998 - protein, 15 aa, Homo sapiens
  CDR3 for beta chain variable domain of TCR clone 372499 (TRBV6-6, TRBJ2-7)
CASSYSYGGCYEQYF

SEQ ID NO: 744999 - protein, 12 aa, Homo sapiens
  CDR3 for alpha chain variable domain of TCR clone 372500 (TRAV12-3, TRAJ17)
CAMTLQGNKLTF

SEQ ID NO: 745000 - protein, 15 aa, Homo sapiens
  CDR3 for beta chain variable domain of TCR clone 372500 (TRBV20-1, TRBJ2-7)
CSARDRVSGMDEQYF

SEQ ID NO: 745001 - protein, 17 aa, Homo sapiens
  CDR3 for alpha chain variable domain of TCR clone 372501 (TRAV23/DV6, TRAJ57)
CAASSTLSQVGSEKLVF

SEQ ID NO: 745002 - protein, 16 aa, Homo sapiens
  CDR3 for beta chain variable domain of TCR clone 372501 (TRBV18, TRBJ1-1)
CASSPGVGGRGGEAFF

SEQ ID NO: 745003 - protein, 10 aa, Homo sapiens
  CDR3 for alpha chain variable domain of TCR clone 372502 (TRAV12-3, TRAJ49)
CAMNDDQFYF

SEQ ID NO: 745004 - protein, 15 aa, Homo sapiens
  CDR3 for beta chain variable domain of TCR clone 372502 (TRBV28, TRBJ1-5)
CASSRTGGYVQPQHF

SEQ ID NO: 745005 - protein, 10 aa, Homo sapiens
  CDR3 for alpha chain variable domain of TCR clone 372503 (TRAV23/DV6, TRAJ57)
CAASSTLSQG

SEQ ID NO: 745006 - protein, 13 aa, Homo sapiens
  CDR3 for beta chain variable domain of TCR clone 372503 (TRBV12-4, TRBJ1-2)
CASSSGLTVIATF

SEQ ID NO: 745007 - protein, 10 aa, Homo sapiens
  CDR3 for alpha chain variable domain of TCR clone 372504 (TRAV30, TRAJ16)
CGTGGQKLLF

SEQ ID NO: 745008 - protein, 14 aa, Homo sapiens
  CDR3 for beta chain variable domain of TCR clone 372504 (TRBV6-1, TRBJ1-2)
CASSTGWPPTGYTV

SEQ ID NO: 745009 - protein, 12 aa, Homo sapiens
  CDR3 for alpha chain variable domain of TCR clone 372505 (TRAV21, TRAJ30)
CAALNRDDKIIF

SEQ ID NO: 745010 - protein, 17 aa, Homo sapiens
  CDR3 for beta chain variable domain of TCR clone 372505 (TRBV7-8, TRBJ2-6)
CASSAGTGGAGANVLTF

SEQ ID NO: 745011 - protein, 12 aa, Homo sapiens
  CDR3 for alpha chain variable domain of TCR clone 372506 (TRAV1-1, TRAJ39)
CAVPVVGNILTF

SEQ ID NO: 745012 - protein, 16 aa, Homo sapiens
  CDR3 for beta chain variable domain of TCR clone 372506 (TRBV28, TRBJ2-7)
CASSPWVATGDLSQYF

SEQ ID NO: 745013 - protein, 13 aa, Homo sapiens
  CDR3 for alpha chain variable domain of TCR clone 372507 (TRAV1-2, TRAJ9)
CAALNTGGFKTIF

SEQ ID NO: 745014 - protein, 15 aa, Homo sapiens
  CDR3 for beta chain variable domain of TCR clone 372507 (TRBV5-1, TRBJ1-1)
CASSSTTGTNTEAFV

SEQ ID NO: 745015 - protein, 21 aa, Homo sapiens
  CDR3 for alpha chain variable domain of TCR clone 372508 (TRAV27, TRAJ38)
CAARRNAGNNHIQNPAPAVYQ

SEQ ID NO: 745016 - protein, 13 aa, Homo sapiens
  CDR3 for beta chain variable domain of TCR clone 372508 (TRBV12-5, TRBJ2-3)
CASGDRQSDTQYF

SEQ ID NO: 745017 - protein, 15 aa, Homo sapiens
  CDR3 for alpha chain variable domain of TCR clone 372509 (TRAV12-3, TRAJ6)
CAMSATTGGSDIPTL

SEQ ID NO: 745018 - protein, 16 aa, Homo sapiens
  CDR3 for beta chain variable domain of TCR clone 372509 (TRBV20-1, TRBJ1-2)
CSASMGQGVANYGYTF

SEQ ID NO: 745019 - protein, 14 aa, Homo sapiens
  CDR3 for alpha chain variable domain of TCR clone 372510 (TRAV1-2, TRAJ16)
CAVNLFSDGQKLLF

SEQ ID NO: 745020 - protein, 13 aa, Homo sapiens
  CDR3 for beta chain variable domain of TCR clone 372510 (TRBV7-9, TRBJ1-2)
CASSLKQNYGYTF

SEQ ID NO: 745021 - protein, 10 aa, Homo sapiens
  CDR3 for alpha chain variable domain of TCR clone 372511 (TRAV8-4, TRAJ43)
GAVSADDTRF

SEQ ID NO: 745022 - protein, 15 aa, Homo sapiens
  CDR3 for beta chain variable domain of TCR clone 372511 (TRBV5-1, TRBJ2-3)
CASSVTSGSTDTQYF

SEQ ID NO: 745023 - protein, 12 aa, Homo sapiens
  CDR3 for alpha chain variable domain of TCR clone 372512 (TRAV12-3, TRAJ20)
CAMVRGDYKLSL

SEQ ID NO: 745024 - protein, 14 aa, Homo sapiens
  CDR3 for beta chain variable domain of TCR clone 372512 (TRBV5-5, TRBJ1-5)
CASSGQGVDQPQHF

SEQ ID NO: 745025 - protein, 15 aa, Homo sapiens
  CDR3 for alpha chain variable domain of TCR clone 372513 (TRAV8-3, TRAJ45)
CASSYSGGGADGLTF

SEQ ID NO: 745026 - protein, 16 aa, Homo sapiens
  CDR3 for beta chain variable domain of TCR clone 372513 (TRBV20-1, TRBJ2-2)
CSASASGIQGAGELFF

SEQ ID NO: 745027 - protein, 16 aa, Homo sapiens
  CDR3 for alpha chain variable domain of TCR clone 372514 (TRAV13-1, TRAJ18)
CAASKMRGSTLGRLHF

SEQ ID NO: 745028 - protein, 16 aa, Homo sapiens
  CDR3 for beta chain variable domain of TCR clone 372514 (TRBV27, TRBJ1-1)
CASSSRGRTGYTEAFF

SEQ ID NO: 745029 - protein, 14 aa, Homo sapiens
  CDR3 for alpha chain variable domain of TCR clone 372515 (TRAV12-3, TRAJ58)
CAMSTETSGSRLTF

SEQ ID NO: 745030 - protein, 12 aa, Homo sapiens
  CDR3 for beta chain variable domain of TCR clone 372515 (TRBV7-8, TRBJ2-7)
CASGLGDREQYF

SEQ ID NO: 745031 - protein, 15 aa, Homo sapiens
  CDR3 for alpha chain variable domain of TCR clone 372516 (TRAV20, TRAJ4)
CAVQVFSGGYNKLIF

SEQ ID NO: 745032 - protein, 14 aa, Homo sapiens
  CDR3 for beta chain variable domain of TCR clone 372516 (TRBV7-6, TRBJ2-3)
CASNSGGGANTQYF

SEQ ID NO: 745033 - protein, 14 aa, Homo sapiens
  CDR3 for alpha chain variable domain of TCR clone 372517 (TRAV2, TRAJ23)
CAVGLRNQGGKLIF

SEQ ID NO: 745034 - protein, 15 aa, Homo sapiens
  CDR3 for beta chain variable domain of TCR clone 372517 (TRBV7-9, TRBJ1-6)
CASSSPGRGNSPLHF

SEQ ID NO: 745035 - protein, 14 aa, Homo sapiens
  CDR3 for alpha chain variable domain of TCR clone 372518 (TRAV2, TRAJ37)
CAVDFTNNTGKLIF

SEQ ID NO: 745036 - protein, 14 aa, Homo sapiens
  CDR3 for beta chain variable domain of TCR clone 372518 (TRBV7-2, TRBJ2-7)
CASSPKTSFYEQYF

SEQ ID NO: 745037 - protein, 12 aa, Homo sapiens
  CDR3 for alpha chain variable domain of TCR clone 372519 (TRAV17, TRAJ20)
CATRSNDYKLSF

SEQ ID NO: 745038 - protein, 12 aa, Homo sapiens
  CDR3 for beta chain variable domain of TCR clone 372519 (TRBV11-2, TRBJ2-2)
CASSLGGGELFF

SEQ ID NO: 745039 - protein, 11 aa, Homo sapiens
  CDR3 for alpha chain variable domain of TCR clone 372520 (TRAV3, TRAJ21)
CAVGNFNKFYF

SEQ ID NO: 745040 - protein, 16 aa, Homo sapiens
  CDR3 for beta chain variable domain of TCR clone 372520 (TRBV3-1, TRBJ2-5)
CASSPGQFSGFGTQYF

SEQ ID NO: 745041 - protein, 14 aa, Homo sapiens
  CDR3 for alpha chain variable domain of TCR clone 372521 (TRAV12-3, TRAJ58)
CAMSTETSGSSLTF

SEQ ID NO: 745042 - protein, 15 aa, Homo sapiens
  CDR3 for beta chain variable domain of TCR clone 372521 (TRBV4-1, TRBJ1-4)
CASSDTGGTNEKLFF

SEQ ID NO: 745043 - protein, 16 aa, Homo sapiens
  CDR3 for alpha chain variable domain of TCR clone 372522 (TRAV12-2, TRAJ5)
CAVTRGPGTGRRALTF

SEQ ID NO: 745044 - protein, 15 aa, Homo sapiens
  CDR3 for beta chain variable domain of TCR clone 372522 (TRBV9, TRBJ2-1)
CASSVGTGELNEQFF

SEQ ID NO: 745045 - protein, 14 aa, Homo sapiens
  CDR3 for alpha chain variable domain of TCR clone 372523 (TRAV8-3, TRAJ10)
CAVGNAGGGNKLTF

SEQ ID NO: 745046 - protein, 14 aa, Homo sapiens
  CDR3 for beta chain variable domain of TCR clone 372523 (TRBV7-2, TRBJ2-5)
CASSFTQGQETQYF

SEQ ID NO: 745047 - protein, 15 aa, Homo sapiens
  CDR3 for alpha chain variable domain of TCR clone 372524 (TRAV8-4, TRAJ47)
CAVSDLLGYGNKLVF

SEQ ID NO: 745048 - protein, 16 aa, Homo sapiens
  CDR3 for beta chain variable domain of TCR clone 372524 (TRBV19, TRBJ2-2)
CASSTSGGLNTGELFF

SEQ ID NO: 745049 - protein, 15 aa, Homo sapiens
  CDR3 for alpha chain variable domain of TCR clone 372525 (TRAV3, TRAJ9)
CAVRDSNTGGLKTIF

SEQ ID NO: 745050 - protein, 16 aa, Homo sapiens
  CDR3 for beta chain variable domain of TCR clone 372525 (TRBV15, TRBJ2-5)
CATSPTTGQGMETQYF

SEQ ID NO: 745051 - protein, 23 aa, Homo sapiens
  CDR3 for alpha chain variable domain of TCR clone 372526 (TRAV12-2, TRAJ42)
CAVKRGSQEISSLEKALNSLLNQ

SEQ ID NO: 745052 - protein, 15 aa, Homo sapiens
  CDR3 for beta chain variable domain of TCR clone 372526 (TRBV25-1, TRBJ1-4)
CASSPGDSTNEKLFF

SEQ ID NO: 745053 - protein, 13 aa, Homo sapiens
  CDR3 for alpha chain variable domain of TCR clone 372527 (TRAV12-1, TRAJ40)
CVVPTSVTYKYIF

SEQ ID NO: 745054 - protein, 18 aa, Homo sapiens
  CDR3 for beta chain variable domain of TCR clone 372527 (TRBV7-6, TRBJ2-1)
CASSPRTSGMSSYNEQFF

SEQ ID NO: 745055 - protein, 12 aa, Homo sapiens
  CDR3 for alpha chain variable domain of TCR clone 372528 (TRAV12-3, TRAJ17)
CAMTLTGNKLTF

SEQ ID NO: 745056 - protein, 15 aa, Homo sapiens
  CDR3 for beta chain variable domain of TCR clone 372528 (TRBV19, TRBJ2-3)
CAAGDTNAPNDTQYF

SEQ ID NO: 745057 - protein, 22 aa, Homo sapiens
  CDR3 for alpha chain variable domain of TCR clone 372529 (TRAV3, TRAJ38)
CAVRDCLNAGNNHIQNPDPAVY

SEQ ID NO: 745058 - protein, 18 aa, Homo sapiens
  CDR3 for beta chain variable domain of TCR clone 372529 (TRBV7-2, TRBJ2-3)
CQQLPFAELGWGTDTQYF

SEQ ID NO: 745059 - protein, 14 aa, Homo sapiens
  CDR3 for alpha chain variable domain of TCR clone 372530 (TRAV1-2, TRAJ8)
CAVREDKGFQKLVF

SEQ ID NO: 745060 - protein, 16 aa, Homo sapiens
  CDR3 for beta chain variable domain of TCR clone 372530 (TRBV5-7, TRBJ2-5)
CASTLAPAGGRETQYF

SEQ ID NO: 745061 - protein, 15 aa, Homo sapiens
  CDR3 for alpha chain variable domain of TCR clone 372531 (TRAV8-3, TRAJ45)
CASSYSGGGAAGLTF

SEQ ID NO: 745062 - protein, 13 aa, Homo sapiens
  CDR3 for beta chain variable domain of TCR clone 372531 (TRBV7-6, TRBJ1-2)
CASSLVADYGYTF

SEQ ID NO: 745063 - protein, 11 aa, Homo sapiens
  CDR3 for alpha chain variable domain of TCR clone 372532 (TRAV17, TRAJ43)
CATDVTGDIRV

SEQ ID NO: 745064 - protein, 14 aa, Homo sapiens
  CDR3 for beta chain variable domain of TCR clone 372532 (TRBV12-4, TRBJ1-1)
CASRPGQGRTEAFF

SEQ ID NO: 745065 - protein, 11 aa, Homo sapiens
  CDR3 for alpha chain variable domain of TCR clone 372533 (TRAV1-1, TRAJ16)
CAAGDGQKLLF

SEQ ID NO: 745066 - protein, 15 aa, Homo sapiens
  CDR3 for beta chain variable domain of TCR clone 372533 (TRBV28, TRBJ1-2)
CASIPQGSDYYGYTF

SEQ ID NO: 745067 - protein, 11 aa, Homo sapiens
  CDR3 for alpha chain variable domain of TCR clone 372534 (TRAV12-3, TRAJ49)
CAANTGNQFYF

SEQ ID NO: 745068 - protein, 16 aa, Homo sapiens
  CDR3 for beta chain variable domain of TCR clone 372534 (TRBV7-9, TRBJ2-3)
CSSSPWREVGTDTQYF

SEQ ID NO: 745069 - protein, 14 aa, Homo sapiens
  CDR3 for alpha chain variable domain of TCR clone 372535 (TRAV12-2, TRAJ40)
CAVKIPSGTYKYIF

SEQ ID NO: 745070 - protein, 14 aa, Homo sapiens
  CDR3 for beta chain variable domain of TCR clone 372535 (TRBV20-1, TRBJ1-1)
CSAQTRSGGTEAYF

SEQ ID NO: 745071 - protein, 15 aa, Homo sapiens
  CDR3 for alpha chain variable domain of TCR clone 372536 (TRAV22, TRAJ37)
CAVALLVSNTGKLIF

SEQ ID NO: 745072 - protein, 12 aa, Homo sapiens
  CDR3 for beta chain variable domain of TCR clone 372536 (TRBV20-1, TRBJ2-1)
CSARRGTDEQFF

SEQ ID NO: 745073 - protein, 16 aa, Homo sapiens
  CDR3 for alpha chain variable domain of TCR clone 372537 (TRAV12-3, TRAJ28)
CAMRANSGAGSYQLTF

SEQ ID NO: 745074 - protein, 15 aa, Homo sapiens
  CDR3 for beta chain variable domain of TCR clone 372537 (TRBV6-3, TRBJ2-7)
CASSSPGIVFYEQYF

SEQ ID NO: 745075 - protein, 17 aa, Homo sapiens
  CDR3 for alpha chain variable domain of TCR clone 372538 (TRAV3, TRAJ6)
CAVRDGPRAGGSYIPTF

SEQ ID NO: 745076 - protein, 13 aa, Homo sapiens
  CDR3 for beta chain variable domain of TCR clone 372538 (TRBV5-1, TRBJ2-7)
CASSATGGNEQYF

SEQ ID NO: 745077 - protein, 13 aa, Homo sapiens
  CDR3 for alpha chain variable domain of TCR clone 372539 (TRAV8-6, TRAJ49)
CAVITNTGNQLYF

SEQ ID NO: 745078 - protein, 14 aa, Homo sapiens
  CDR3 for beta chain variable domain of TCR clone 372539 (TRBV19, TRBJ2-1)
CASPTFVLSGEQFF

SEQ ID NO: 745079 - protein, 11 aa, Homo sapiens
  CDR3 for alpha chain variable domain of TCR clone 372540 (TRAV21, TRAJ48)
CAVDGNEKLTF

SEQ ID NO: 745080 - protein, 15 aa, Homo sapiens
  CDR3 for beta chain variable domain of TCR clone 372540 (TRBV19, TRBJ1-2)
CASSVGQVLNYGYTF

SEQ ID NO: 745081 - protein, 10 aa, Homo sapiens
  CDR3 for alpha chain variable domain of TCR clone 372541 (TRAV21, TRAJ31)
CAVDNARLMF

SEQ ID NO: 745082 - protein, 14 aa, Homo sapiens
  CDR3 for beta chain variable domain of TCR clone 372541 (TRBV18, TRBJ2-7)
CASSPRGGAYEQYF

SEQ ID NO: 745083 - protein, 14 aa, Homo sapiens
  CDR3 for alpha chain variable domain of TCR clone 372542 (TRAV1-2, TRAJ8)
CAVREDTVFQKLVF

SEQ ID NO: 745084 - protein, 15 aa, Homo sapiens
  CDR3 for beta chain variable domain of TCR clone 372542 (TRBV18, TRBJ2-1)
CASSPPSASYNEQFF

SEQ ID NO: 745085 - protein, 11 aa, Homo sapiens
  CDR3 for alpha chain variable domain of TCR clone 372543 (TRAV4, TRAJ23)
CLVGRKAYLRT

SEQ ID NO: 745086 - protein, 14 aa, Homo sapiens
  CDR3 for beta chain variable domain of TCR clone 372543 (TRBV12-4, TRBJ1-1)
CASSLGTGGTEAFF

SEQ ID NO: 745087 - protein, 15 aa, Homo sapiens
  CDR3 for alpha chain variable domain of TCR clone 372544 (TRAV23/DV6, TRAJ57)
CAASSTLSQGGSEKL

SEQ ID NO: 745088 - protein, 14 aa, Homo sapiens
  CDR3 for beta chain variable domain of TCR clone 372544 (TRBV25-1, TRBJ1-1)
CASTHQGGNTEAFF

SEQ ID NO: 745089 - protein, 15 aa, Homo sapiens
  CDR3 for alpha chain variable domain of TCR clone 372545 (TRAV26-1, TRAJ24)
CIVREDTDSWGKLQF

SEQ ID NO: 745090 - protein, 15 aa, Homo sapiens
  CDR3 for beta chain variable domain of TCR clone 372545 (TRBV5-1, TRBJ2-5)
CASSFKGGDQETQYF

SEQ ID NO: 745091 - protein, 15 aa, Homo sapiens
  CDR3 for alpha chain variable domain of TCR clone 372546 (TRAV12-3, TRAJ6)
CAMSAASGGSYIPTF

SEQ ID NO: 745092 - protein, 16 aa, Homo sapiens
  CDR3 for beta chain variable domain of TCR clone 372546 (TRBV13, TRBJ2-2)
CASSPRTGEHTGELFF

SEQ ID NO: 745093 - protein, 17 aa, Homo sapiens
  CDR3 for alpha chain variable domain of TCR clone 372547 (TRAV26-1, TRAJ37)
CIVRVITVSSNTGKLIF

SEQ ID NO: 745094 - protein, 11 aa, Homo sapiens
  CDR3 for beta chain variable domain of TCR clone 372547 (TRBV7-8, TRBJ2-7)
CASSLSLEQYF

SEQ ID NO: 745095 - protein, 14 aa, Homo sapiens
  CDR3 for alpha chain variable domain of TCR clone 372548 (TRAV8-1, TRAJ4)
CAVPFSVGYNKLIF

SEQ ID NO: 745096 - protein, 16 aa, Homo sapiens
  CDR3 for beta chain variable domain of TCR clone 372548 (TRBV6-1, TRBJ1-2)
CASSGAWQGRSHGYTF

SEQ ID NO: 745097 - protein, 11 aa, Homo sapiens
  CDR3 for alpha chain variable domain of TCR clone 372549 (TRAV29/DV5, TRAJ31)
CAASYRDRLMF

SEQ ID NO: 745098 - protein, 19 aa, Homo sapiens
  CDR3 for beta chain variable domain of TCR clone 372549 (TRBV19, TRBJ2-5)
CASSIGPVTDFFLGETQYF

SEQ ID NO: 745099 - protein, 12 aa, Homo sapiens
  CDR3 for alpha chain variable domain of TCR clone 372550 (TRAV3, TRAJ27)
CAVRDKAGKSTF

SEQ ID NO: 745100 - protein, 18 aa, Homo sapiens
  CDR3 for beta chain variable domain of TCR clone 372550 (TRBV25-1, TRBJ1-2)
CASSGLQNGQGLIFGYTF

SEQ ID NO: 745101 - protein, 13 aa, Homo sapiens
  CDR3 for alpha chain variable domain of TCR clone 372551 (TRAV27, TRAJ54)
CAGAGQGAQKLVF

SEQ ID NO: 745102 - protein, 15 aa, Homo sapiens
  CDR3 for beta chain variable domain of TCR clone 372551 (TRBV18, TRBJ2-6)
CASSPSYAGANVLTC

SEQ ID NO: 745103 - protein, 11 aa, Homo sapiens
  CDR3 for alpha chain variable domain of TCR clone 372552 (TRAV21, TRAJ11)
CAVNGYSTLTF

SEQ ID NO: 745104 - protein, 11 aa, Homo sapiens
  CDR3 for beta chain variable domain of TCR clone 372552 (TRBV19, TRBJ1-1)
CASSMGSEASF

SEQ ID NO: 745105 - protein, 12 aa, Homo sapiens
  CDR3 for alpha chain variable domain of TCR clone 372553 (TRAV27, TRAJ33)
CAGDGSNYQLIW

SEQ ID NO: 745106 - protein, 13 aa, Homo sapiens
  CDR3 for beta chain variable domain of TCR clone 372553 (TRBV12-5, TRBJ2-3)
CASGDRQSDTQYF

SEQ ID NO: 745107 - protein, 13 aa, Homo sapiens
  CDR3 for alpha chain variable domain of TCR clone 372554 (TRAV38-1, TRAJ42)
CARWGGSQGNLIF

SEQ ID NO: 745108 - protein, 15 aa, Homo sapiens
  CDR3 for beta chain variable domain of TCR clone 372554 (TRBV20-1, TRBJ2-7)
CSARDRVSGMDEQYS

SEQ ID NO: 745109 - protein, 18 aa, Homo sapiens
  CDR3 for alpha chain variable domain of TCR clone 372555 (TRAV8-4, TRAJ52)
CAVASFNAGGTSYGRLTF

SEQ ID NO: 745110 - protein, 14 aa, Homo sapiens
  CDR3 for beta chain variable domain of TCR clone 372555 (TRBV18, TRBJ1-5)
CASSRQQRNQPQHF

SEQ ID NO: 745111 - protein, 17 aa, Homo sapiens
  CDR3 for alpha chain variable domain of TCR clone 372556 (TRAV19, TRAJ28)
CALSEASSGAGSYQLTF

SEQ ID NO: 745112 - protein, 12 aa, Homo sapiens
  CDR3 for beta chain variable domain of TCR clone 372556 (TRBV6-3, TRBJ2-1)
CASSGSYNEQFF

SEQ ID NO: 745113 - protein, 14 aa, Homo sapiens
  CDR3 for alpha chain variable domain of TCR clone 372557 (TRAV27, TRAJ42)
CAGGDGGSQGNIIF

SEQ ID NO: 745114 - protein, 14 aa, Homo sapiens
  CDR3 for beta chain variable domain of TCR clone 372557 (TRBV19, TRBJ1-2)
CASSRQGSSIGYTF

SEQ ID NO: 745115 - protein, 15 aa, Homo sapiens
  CDR3 for alpha chain variable domain of TCR clone 372558 (TRAV27, TRAJ38)
CAARRNAGNNRKMSW

SEQ ID NO: 745116 - protein, 13 aa, Homo sapiens
  CDR3 for beta chain variable domain of TCR clone 372558 (TRBV12-5, TRBJ2-3)
CASGDRQSDTQYF

SEQ ID NO: 745117 - protein, 16 aa, Homo sapiens
  CDR3 for alpha chain variable domain of TCR clone 372559 (TRAV30, TRAJ24)
CGTEIVDADSWGKFQF

SEQ ID NO: 745118 - protein, 12 aa, Homo sapiens
  CDR3 for beta chain variable domain of TCR clone 372559 (TRBV11-2, TRBJ2-3)
GASRGAPNTQYF

SEQ ID NO: 745119 - protein, 16 aa, Homo sapiens
  CDR3 for alpha chain variable domain of TCR clone 372560 (TRAV16, TRAJ42)
CARTMNYGGSQGNLIF

SEQ ID NO: 745120 - protein, 13 aa, Homo sapiens
  CDR3 for beta chain variable domain of TCR clone 372560 (TRBV20-1, TRBJ2-7)
CSASPPSSYEQYF

SEQ ID NO: 745121 - protein, 14 aa, Homo sapiens
  CDR3 for alpha chain variable domain of TCR clone 372561 (TRAV12-3, TRAJ33)
CAMSGRDSNYQLIW

SEQ ID NO: 745122 - protein, 14 aa, Homo sapiens
  CDR3 for beta chain variable domain of TCR clone 372561 (TRBV2, TRBJ2-1)
CASRTGSSYNEQFF

SEQ ID NO: 745123 - protein, 12 aa, Homo sapiens
  CDR3 for alpha chain variable domain of TCR clone 372562 (TRAV13-1, TRAJ21)
CAAFFDFNKFYF

SEQ ID NO: 745124 - protein, 14 aa, Homo sapiens
  CDR3 for beta chain variable domain of TCR clone 372562 (TRBV4-1, TRBJ2-7)
CASRLTSGSYEQYF

SEQ ID NO: 745125 - protein, 14 aa, Homo sapiens
  CDR3 for alpha chain variable domain of TCR clone 372563 (TRAV1-2, TRAJ6)
CAVSLSGGSYIPTF

SEQ ID NO: 745126 - protein, 16 aa, Homo sapiens
  CDR3 for beta chain variable domain of TCR clone 372563 (TRBV2, TRBJ2-1)
CASSVGGSLSYNEQFF

SEQ ID NO: 745127 - protein, 10 aa, Homo sapiens
  CDR3 for alpha chain variable domain of TCR clone 372564 (TRAV30, TRAJ48)
CGIGNEKLTF

SEQ ID NO: 745128 - protein, 14 aa, Homo sapiens
  CDR3 for beta chain variable domain of TCR clone 372564 (TRBV19, TRBJ1-5)
CASGTEVYNQPQHF

SEQ ID NO: 745129 - protein, 13 aa, Homo sapiens
  CDR3 for alpha chain variable domain of TCR clone 372565 (TRAV2, TRAJ40)
CAVVTSGTYKYIF

SEQ ID NO: 745130 - protein, 13 aa, Homo sapiens
  CDR3 for beta chain variable domain of TCR clone 372565 (TRBV7-9, TRBJ1-2)
CASSLKQNYSYTF

SEQ ID NO: 745131 - protein, 11 aa, Homo sapiens
  CDR3 for alpha chain variable domain of TCR clone 372566 (TRAV17, TRAJ31)
CATSNNARLMF

SEQ ID NO: 745132 - protein, 16 aa, Homo sapiens
  CDR3 for beta chain variable domain of TCR clone 372566 (TRBV7-8, TRBJ2-4)
CASSAERTLDKDSQYF

SEQ ID NO: 745133 - protein, 18 aa, Homo sapiens
  CDR3 for alpha chain variable domain of TCR clone 372567 (TRAV26-1, TRAJ23)
CIVRVGLEVWNQGGKLIF

SEQ ID NO: 745134 - protein, 16 aa, Homo sapiens
  CDR3 for beta chain variable domain of TCR clone 372567 (TRBV12-4, TRBJ2-5)
CSSSFFVRGRQETQYF

SEQ ID NO: 745135 - protein, 14 aa, Homo sapiens
  CDR3 for alpha chain variable domain of TCR clone 372568 (TRAV1-2, TRAJ16)
CAVNRFSDGQKLFF

SEQ ID NO: 745136 - protein, 12 aa, Homo sapiens
  CDR3 for beta chain variable domain of TCR clone 372568 (TRBV11-2, TRBJ2-2)
CASSLGGGELFF

SEQ ID NO: 745137 - protein, 13 aa, Homo sapiens
  CDR3 for alpha chain variable domain of TCR clone 372569 (TRAV8-3, TRAJ5)
CAVGPRGRRALTF

SEQ ID NO: 745138 - protein, 16 aa, Homo sapiens
  CDR3 for beta chain variable domain of TCR clone 372569 (TRBV24-1, TRBJ2-3)
CATSDPGTGATDTQYF

SEQ ID NO: 745139 - protein, 14 aa, Homo sapiens
  CDR3 for alpha chain variable domain of TCR clone 372570 (TRAV21, TRAJ45)
CAVSSGGGADGLTF

SEQ ID NO: 745140 - protein, 14 aa, Homo sapiens
  CDR3 for beta chain variable domain of TCR clone 372570 (TRBV7-2, TRBJ2-7)
CASSPKTSFYEQYF

SEQ ID NO: 745141 - protein, 11 aa, Homo sapiens
  CDR3 for alpha chain variable domain of TCR clone 372571 (TRAV2, TRAJ13)
CASGGYPKVTF

SEQ ID NO: 745142 - protein, 18 aa, Homo sapiens
  CDR3 for beta chain variable domain of TCR clone 372571 (TRBV19, TRBJ2-6)
CASIGPTSGGSGANVLTF

SEQ ID NO: 745143 - protein, 14 aa, Homo sapiens
  CDR3 for alpha chain variable domain of TCR clone 372572 (TRAV14/DV4, TRAJ32)
SNVLPLTPTNKLIF

SEQ ID NO: 745144 - protein, 17 aa, Homo sapiens
  CDR3 for beta chain variable domain of TCR clone 372572 (TRBV20-1, TRBJ2-1)
SSASSSGLAGSYNEQFF

SEQ ID NO: 745145 - protein, 17 aa, Homo sapiens
  CDR3 for alpha chain variable domain of TCR clone 372573 (TRAV26-1, TRAJ28)
CIVRASYSGAGSYQLTF

SEQ ID NO: 745146 - protein, 10 aa, Homo sapiens
  CDR3 for beta chain variable domain of TCR clone 372573 (TRBV12-4, TRBJ2-7)
CASLTFEQYF

SEQ ID NO: 745147 - protein, 14 aa, Homo sapiens
  CDR3 for alpha chain variable domain of TCR clone 372574 (TRAV12-2, TRAJ45)
CAVNIGGGADGLTF

SEQ ID NO: 745148 - protein, 14 aa, Homo sapiens
  CDR3 for beta chain variable domain of TCR clone 372574 (TRBV4-1, TRBJ2-2)
CASSQAVNTGELFF

SEQ ID NO: 745149 - protein, 10 aa, Homo sapiens
  CDR3 for alpha chain variable domain of TCR clone 372575 (TRAV8-1, TRAJ21)
CAVNGTKFYF

SEQ ID NO: 745150 - protein, 16 aa, Homo sapiens
  CDR3 for beta chain variable domain of TCR clone 372575 (TRBV7-2, TRBJ1-5)
CASSPWGPGGNQPQHF

SEQ ID NO: 745151 - protein, 14 aa, Homo sapiens
  CDR3 for alpha chain variable domain of TCR clone 372576 (TRAV29/DV5, TRAJ20)
CAASAPIEDYKLSF

SEQ ID NO: 745152 - protein, 13 aa, Homo sapiens
  CDR3 for beta chain variable domain of TCR clone 372576 (TRBV2, TRBJ2-7)
CASSVGGSGEQYF

SEQ ID NO: 745153 - protein, 13 aa, Homo sapiens
  CDR3 for alpha chain variable domain of TCR clone 372577 (TRAV30, TRAJ33)
CGTVAPQQLSVNL

SEQ ID NO: 745154 - protein, 16 aa, Homo sapiens
  CDR3 for beta chain variable domain of TCR clone 372577 (TRBV3-1, TRBJ2-5)
CASSPGQFNGFGTQYF

SEQ ID NO: 745155 - protein, 14 aa, Homo sapiens
  CDR3 for alpha chain variable domain of TCR clone 372578 (TRAV2, TRAJ9)
CAVEDRSGGFKTIF

SEQ ID NO: 745156 - protein, 17 aa, Homo sapiens
  CDR3 for beta chain variable domain of TCR clone 372578 (TRBV12-4, TRBJ2-7)
CASSQRTSGTTSSTSGR

SEQ ID NO: 745157 - protein, 13 aa, Homo sapiens
  CDR3 for alpha chain variable domain of TCR clone 372579 (TRAV38-1, TRAJ42)
CARWGGSQGNPIF

SEQ ID NO: 745158 - protein, 17 aa, Homo sapiens
  CDR3 for beta chain variable domain of TCR clone 372579 (TRBV20-1, TRBJ2-1)
CSARDPLAGVWDNEQLF

SEQ ID NO: 745159 - protein, 16 aa, Homo sapiens
  CDR3 for alpha chain variable domain of TCR clone 372580 (TRAV3, TRAJ10)
CAVRDMWAGGGNKLTF

SEQ ID NO: 745160 - protein, 15 aa, Homo sapiens
  CDR3 for beta chain variable domain of TCR clone 372580 (TRBV9, TRBJ1-6)
CASSVAGTGDSPLHF

SEQ ID NO: 745161 - protein, 16 aa, Homo sapiens
  CDR3 for alpha chain variable domain of TCR clone 372581 (TRAV1-2, TRAJ10)
CAVRGVPTGGGNKLTF

SEQ ID NO: 745162 - protein, 15 aa, Homo sapiens
  CDR3 for beta chain variable domain of TCR clone 372581 (TRBV29-1, TRBJ2-1)
CSVGRHALFYNEQFF

SEQ ID NO: 745163 - protein, 13 aa, Homo sapiens
  CDR3 for alpha chain variable domain of TCR clone 372582 (TRAV2, TRAJ40)
CAVVTSGTYKYIF

SEQ ID NO: 745164 - protein, 13 aa, Homo sapiens
  CDR3 for beta chain variable domain of TCR clone 372582 (TRBV20-1, TRBJ2-7)
CSARPSTNYEQYF

SEQ ID NO: 745165 - protein, 13 aa, Homo sapiens
  CDR3 for alpha chain variable domain of TCR clone 372583 (TRAV16, TRAJ9)
CALRATGGFKTIF

SEQ ID NO: 745166 - protein, 12 aa, Homo sapiens
  CDR3 for beta chain variable domain of TCR clone 372583 (TRBV28, TRBJ2-1)
CASSRLVGEQFF

SEQ ID NO: 745167 - protein, 15 aa, Homo sapiens
  CDR3 for alpha chain variable domain of TCR clone 372584 (TRAV8-6, TRAJ45)
CAVSEQGGGADVLTF

SEQ ID NO: 745168 - protein, 14 aa, Homo sapiens
  CDR3 for beta chain variable domain of TCR clone 372584 (TRBV28, TRBJ2-5)
CASRGSSFWETQYF

SEQ ID NO: 745169 - protein, 13 aa, Homo sapiens
  CDR3 for alpha chain variable domain of TCR clone 372585 (TRAV21, TRAJ45)
CAVMGGGADGLTF

SEQ ID NO: 745170 - protein, 16 aa, Homo sapiens
  CDR3 for beta chain variable domain of TCR clone 372585 (TRBV20-1, TRBJ2-1)
CSARDHIAGGRGEQFF

SEQ ID NO: 745171 - protein, 14 aa, Homo sapiens
  CDR3 for alpha chain variable domain of TCR clone 372586 (TRAV26-2, TRAJ32)
CCVGYGGATNKLIF

SEQ ID NO: 745172 - protein, 14 aa, Homo sapiens
  CDR3 for beta chain variable domain of TCR clone 372586 (TRBV4-2, TRBJ2-1)
CASGLDRAYDEQFF

SEQ ID NO: 745173 - protein, 23 aa, Homo sapiens
  CDR3 for alpha chain variable domain of TCR clone 372587 (TRAV26-1, )
CIADNTGNNHIQNPDPAVYQLRD

SEQ ID NO: 745174 - protein, 13 aa, Homo sapiens
  CDR3 for beta chain variable domain of TCR clone 372587 (TRBV10-3, TRBJ2-7)
CASKLAVNYEQYF

SEQ ID NO: 745175 - protein, 15 aa, Homo sapiens
  CDR3 for alpha chain variable domain of TCR clone 372588 (TRAV3, TRAJ9)
CAVRDINTGGFKNIF

SEQ ID NO: 745176 - protein, 13 aa, Homo sapiens
  CDR3 for beta chain variable domain of TCR clone 372588 (TRBV19, TRBJ2-7)
CASSIPSVREQYF

SEQ ID NO: 745177 - protein, 11 aa, Homo sapiens
  CDR3 for alpha chain variable domain of TCR clone 372589 (TRAV2, TRAJ13)
CASGGYQKVTF

SEQ ID NO: 745178 - protein, 13 aa, Homo sapiens
  CDR3 for beta chain variable domain of TCR clone 372589 (TRBV12-4, TRBJ1-2)
CASRTDGNYGYTF

SEQ ID NO: 745179 - protein, 17 aa, Homo sapiens
  CDR3 for alpha chain variable domain of TCR clone 372590 (TRAV13-2, TRAJ5)
CAESVVIVGHGQESTYF

SEQ ID NO: 745180 - protein, 18 aa, Homo sapiens
  CDR3 for beta chain variable domain of TCR clone 372590 (TRBV4-1, TRBJ2-3)
CASSHQLAGERSTDTQYF

SEQ ID NO: 745181 - protein, 14 aa, Homo sapiens
  CDR3 for alpha chain variable domain of TCR clone 372591 (TRAV12-2, TRAJ13)
CAVKKTGGYQKVTF

SEQ ID NO: 745182 - protein, 14 aa, Homo sapiens
  CDR3 for beta chain variable domain of TCR clone 372591 (TRBV3-1, TRBJ2-5)
CASSEGPDQETQYF

SEQ ID NO: 745183 - protein, 10 aa, Homo sapiens
  CDR3 for alpha chain variable domain of TCR clone 372592 (TRAV5, TRAJ34)
CAEDTDKLIF

SEQ ID NO: 745184 - protein, 15 aa, Homo sapiens
  CDR3 for beta chain variable domain of TCR clone 372592 (TRBV27, TRBJ2-1)
CASSLARGAYNEQFF

SEQ ID NO: 745185 - protein, 16 aa, Homo sapiens
  CDR3 for alpha chain variable domain of TCR clone 372593 (TRAV3, TRAJ10)
CAVRDMRVGGGNKLTF

SEQ ID NO: 745186 - protein, 15 aa, Homo sapiens
  CDR3 for beta chain variable domain of TCR clone 372593 (TRBV5-1, TRBJ2-3)
CASSVTSGSTDTQYF

SEQ ID NO: 745187 - protein, 13 aa, Homo sapiens
  CDR3 for alpha chain variable domain of TCR clone 372594 (TRAV17, TRAJ5)
CALRGTGRRALTF

SEQ ID NO: 745188 - protein, 15 aa, Homo sapiens
  CDR3 for beta chain variable domain of TCR clone 372594 (TRBV6-1, TRBJ2-5)
CASSEGWGIQETQYF

SEQ ID NO: 745189 - protein, 15 aa, Homo sapiens
  CDR3 for alpha chain variable domain of TCR clone 372595 (TRAV26-1, TRAJ29)
CIVRVEGSGNTPLVF

SEQ ID NO: 745190 - protein, 15 aa, Homo sapiens
  CDR3 for beta chain variable domain of TCR clone 372595 (TRBV28, TRBJ2-1)
CASSPGQGSIETQYF

SEQ ID NO: 745191 - protein, 13 aa, Homo sapiens
  CDR3 for alpha chain variable domain of TCR clone 372596 (TRAV2, TRAJ29)
CAAQHSGNTPLVF

SEQ ID NO: 745192 - protein, 14 aa, Homo sapiens
  CDR3 for beta chain variable domain of TCR clone 372596 (TRBV7-9, TRBJ2-4)
CASSIAMGGNIQYF

SEQ ID NO: 745193 - protein, 17 aa, Homo sapiens
  CDR3 for alpha chain variable domain of TCR clone 372597 (TRAV3, TRAJ42)
CAVRDRDYGGSQGNLIF

SEQ ID NO: 745194 - protein, 11 aa, Homo sapiens
  CDR3 for beta chain variable domain of TCR clone 372597 (TRBV12-4, TRBJ2-3)
CASSSVRGRYF

SEQ ID NO: 745195 - protein, 14 aa, Homo sapiens
  CDR3 for alpha chain variable domain of TCR clone 372598 (TRAV13-1, TRAJ44)
CAAKATGTASKLTF

SEQ ID NO: 745196 - protein, 14 aa, Homo sapiens
  CDR3 for beta chain variable domain of TCR clone 372598 (TRBV7-6, TRBJ2-3)
CASSVAGGTDTQYF

SEQ ID NO: 745197 - protein, 16 aa, Homo sapiens
  CDR3 for alpha chain variable domain of TCR clone 372599 (TRAV30, TRAJ24)
CGTEIVDADSWGKFKF

SEQ ID NO: 745198 - protein, 14 aa, Homo sapiens
  CDR3 for beta chain variable domain of TCR clone 372599 (TRBV12-5, TRBJ2-5)
CASGSLTHQETQYF

SEQ ID NO: 745199 - protein, 17 aa, Homo sapiens
  CDR3 for alpha chain variable domain of TCR clone 372600 (TRAV1-2, TRAJ8)
CAVRDPDENTGFQKLVF

SEQ ID NO: 745200 - protein, 11 aa, Homo sapiens
  CDR3 for beta chain variable domain of TCR clone 372600 (TRBV7-9, TRBJ2-2)
CASRASGVRTP

SEQ ID NO: 745201 - protein, 14 aa, Homo sapiens
  CDR3 for alpha chain variable domain of TCR clone 372601 (TRAV17, TRAJ31)
CATVPLSGNARPMF

SEQ ID NO: 745202 - protein, 15 aa, Homo sapiens
  CDR3 for beta chain variable domain of TCR clone 372601 (TRBV15, TRBJ2-2)
CATSGTGGRVGELFF

SEQ ID NO: 745203 - protein, 14 aa, Homo sapiens
  CDR3 for alpha chain variable domain of TCR clone 372602 (TRAV1-2, TRAJ16)
CAVNRFSDGQKLLF

SEQ ID NO: 745204 - protein, 15 aa, Homo sapiens
  CDR3 for beta chain variable domain of TCR clone 372602 (TRBV10-2, TRBJ1-6)
CASSVAGTGDSPLHF

SEQ ID NO: 745205 - protein, 14 aa, Homo sapiens
  CDR3 for alpha chain variable domain of TCR clone 372603 (TRAV8-6, TRAJ40)
CAVSAISGTYKYIF

SEQ ID NO: 745206 - protein, 16 aa, Homo sapiens
  CDR3 for beta chain variable domain of TCR clone 372603 (TRBV4-2, TRBJ2-7)
CASSQDGGSLRGEQYF

SEQ ID NO: 745207 - protein, 14 aa, Homo sapiens
  CDR3 for alpha chain variable domain of TCR clone 372604 (TRAV12-1, TRAJ17)
CVVNYKAAGNKLTF

SEQ ID NO: 745208 - protein, 13 aa, Homo sapiens
  CDR3 for beta chain variable domain of TCR clone 372604 (TRBV28, TRBJ1-5)
CASSDRGNQPQHF

SEQ ID NO: 745209 - protein, 15 aa, Homo sapiens
  CDR3 for alpha chain variable domain of TCR clone 372605 (TRAV2, TRAJ28)
CAVPYSGAGSYQLTF

SEQ ID NO: 745210 - protein, 17 aa, Homo sapiens
  CDR3 for beta chain variable domain of TCR clone 372605 (TRBV20-1, TRBJ1-6)
CSARGGYTFSYNSPLHF

SEQ ID NO: 745211 - protein, 13 aa, Homo sapiens
  CDR3 for alpha chain variable domain of TCR clone 372606 (TRAV25, TRAJ26)
CAGMVNYGQNFVF

SEQ ID NO: 745212 - protein, 15 aa, Homo sapiens
  CDR3 for beta chain variable domain of TCR clone 372606 (TRBV10-3, TRBJ2-1)
CAIRNGTSGHNEQFF

SEQ ID NO: 745213 - protein, 18 aa, Homo sapiens
  CDR3 for alpha chain variable domain of TCR clone 372607 (TRAV21, TRAJ52)
CAVRPSPAGGTSYGKLTF

SEQ ID NO: 745214 - protein, 14 aa, Homo sapiens
  CDR3 for beta chain variable domain of TCR clone 372607 (TRBV11-2, TRBJ2-5)
CASSGHSLQETQYF

SEQ ID NO: 745215 - protein, 14 aa, Homo sapiens
  CDR3 for alpha chain variable domain of TCR clone 372608 (TRAV12-1, TRAJ30)
CVVNIGGRGDKSIF

SEQ ID NO: 745216 - protein, 13 aa, Homo sapiens
  CDR3 for beta chain variable domain of TCR clone 372608 (TRBV12-5, TRBJ2-1)
CASGLGRGNEQFF

SEQ ID NO: 745217 - protein, 15 aa, Homo sapiens
  CDR3 for alpha chain variable domain of TCR clone 372609 (TRAV3, TRAJ5)
CAVRDLDTGRRALTF

SEQ ID NO: 745218 - protein, 15 aa, Homo sapiens
  CDR3 for beta chain variable domain of TCR clone 372609 (TRBV7-9, TRBJ1-6)
CASSSPGRGNSPLHF

SEQ ID NO: 745219 - protein, 14 aa, Homo sapiens
  CDR3 for alpha chain variable domain of TCR clone 372610 (TRAV13-1, TRAJ10)
CAAKEPGGGNKVTF

SEQ ID NO: 745220 - protein, 12 aa, Homo sapiens
  CDR3 for beta chain variable domain of TCR clone 372610 (TRBV11-2, TRBJ2-2)
CASSLGGGELFF

SEQ ID NO: 745221 - protein, 13 aa, Homo sapiens
  CDR3 for alpha chain variable domain of TCR clone 372611 (TRAV8-1, TRAJ39)
CAVANNAGNMLTF

SEQ ID NO: 745222 - protein, 15 aa, Homo sapiens
  CDR3 for beta chain variable domain of TCR clone 372611 (TRBV7-2, TRBJ2-1)
CDSSLNRGAYNEQFF

SEQ ID NO: 745223 - protein, 11 aa, Homo sapiens
  CDR3 for alpha chain variable domain of TCR clone 372612 (TRAV1-2, TRAJ31)
CAVNNNARFMF

SEQ ID NO: 745224 - protein, 15 aa, Homo sapiens
  CDR3 for beta chain variable domain of TCR clone 372612 (TRBV28, TRBJ2-1)
CASSIIAGGRSGQFF

SEQ ID NO: 745225 - protein, 11 aa, Homo sapiens
  CDR3 for alpha chain variable domain of TCR clone 372613 (TRAV3, TRAJ31)
CAVRPDARLMF

SEQ ID NO: 745226 - protein, 13 aa, Homo sapiens
  CDR3 for beta chain variable domain of TCR clone 372613 (TRBV11-2, TRBJ2-5)
CASSFSSQETQYF

SEQ ID NO: 745227 - protein, 12 aa, Homo sapiens
  CDR3 for alpha chain variable domain of TCR clone 372614 (TRAV16, TRAJ12)
SAHGDSSYKLIF

SEQ ID NO: 745228 - protein, 12 aa, Homo sapiens
  CDR3 for beta chain variable domain of TCR clone 372614 (TRBV28, TRBJ2-1)
CASSRLVGEQFF

SEQ ID NO: 745229 - protein, 16 aa, Homo sapiens
  CDR3 for alpha chain variable domain of TCR clone 372615 (TRAV17, TRAJ52)
CATGIIGGTSYGKLTF

SEQ ID NO: 745230 - protein, 12 aa, Homo sapiens
  CDR3 for beta chain variable domain of TCR clone 372615 (TRBV7-3, TRBJ2-1)
CASSFINNEQLF

SEQ ID NO: 745231 - protein, 11 aa, Homo sapiens
  CDR3 for alpha chain variable domain of TCR clone 372616 (TRAV2, TRAJ33)
CAVESNYQLIW

SEQ ID NO: 745232 - protein, 14 aa, Homo sapiens
  CDR3 for beta chain variable domain of TCR clone 372616 (TRBV10-3, TRBJ2-3)
CATMGTGGLDTQYF

SEQ ID NO: 745233 - protein, 15 aa, Homo sapiens
  CDR3 for alpha chain variable domain of TCR clone 372617 (TRAV3, TRAJ13)
CAVRVYSVGYQKVTF

SEQ ID NO: 745234 - protein, 15 aa, Homo sapiens
  CDR3 for beta chain variable domain of TCR clone 372617 (TRBV5-7, TRBJ1-2)
CASSLGVAANYGYTF

SEQ ID NO: 745235 - protein, 16 aa, Homo sapiens
  CDR3 for alpha chain variable domain of TCR clone 372618 (TRAV3, TRAJ22)
CAVRDMGSGSARQLTF

SEQ ID NO: 745236 - protein, 13 aa, Homo sapiens
  CDR3 for beta chain variable domain of TCR clone 372618 (TRBV11-2, TRBJ2-7)
CASSGTRPYEQYF

SEQ ID NO: 745237 - protein, 14 aa, Homo sapiens
  CDR3 for alpha chain variable domain of TCR clone 372619 (TRAV12-2, TRAJ9)
CAVNMEGGGFKTIF

SEQ ID NO: 745238 - protein, 14 aa, Homo sapiens
  CDR3 for beta chain variable domain of TCR clone 372619 (TRBV2, TRBJ2-5)
CASSEVLAQETEYF

SEQ ID NO: 745239 - protein, 12 aa, Homo sapiens
  CDR3 for alpha chain variable domain of TCR clone 372620 (TRAV27, TRAJ35)
CAGADLGNVLHF

SEQ ID NO: 745240 - protein, 16 aa, Homo sapiens
  CDR3 for beta chain variable domain of TCR clone 372620 (TRBV6-1, TRBJ2-1)
CASILRQGSSYNEQFF

SEQ ID NO: 745241 - protein, 13 aa, Homo sapiens
  CDR3 for alpha chain variable domain of TCR clone 372621 (TRAV12-2, TRAJ13)
CAVKKTGLPESYL

SEQ ID NO: 745242 - protein, 16 aa, Homo sapiens
  CDR3 for beta chain variable domain of TCR clone 372621 (TRBV4-2, TRBJ2-4)
CASSQELRRAKNIQYF

SEQ ID NO: 745243 - protein, 12 aa, Homo sapiens
  CDR3 for alpha chain variable domain of TCR clone 372622 (TRAV1-2, TRAJ9)
CAGYTGGFKTIF

SEQ ID NO: 745244 - protein, 15 aa, Homo sapiens
  CDR3 for beta chain variable domain of TCR clone 372622 (TRBV11-2, TRBJ2-1)
CAGSPAGQSLNEQFF

SEQ ID NO: 745245 - protein, 14 aa, Homo sapiens
  CDR3 for alpha chain variable domain of TCR clone 372623 (TRAV12-3, TRAJ54)
CAMRGIQGAQKLVF

SEQ ID NO: 745246 - protein, 14 aa, Homo sapiens
  CDR3 for beta chain variable domain of TCR clone 372623 (TRBV12-5, TRBJ2-5)
CASGSRTHQETQYF

SEQ ID NO: 745247 - protein, 15 aa, Homo sapiens
  CDR3 for alpha chain variable domain of TCR clone 372624 (TRAV29/DV5, TRAJ53)
CAASASGGSNYKLTF

SEQ ID NO: 745248 - protein, 14 aa, Homo sapiens
  CDR3 for beta chain variable domain of TCR clone 372624 (TRBV20-1, TRBJ2-1)
CSAQIGGSANEQFF

SEQ ID NO: 745249 - protein, 16 aa, Homo sapiens
  CDR3 for alpha chain variable domain of TCR clone 372625 (TRAV30, TRAJ24)
FGTEIVDADSWGKFQI

SEQ ID NO: 745250 - protein, 14 aa, Homo sapiens
  CDR3 for beta chain variable domain of TCR clone 372625 (TRBV12-5, TRBJ2-5)
CASGSRTHQETQYF

SEQ ID NO: 745251 - protein, 16 aa, Homo sapiens
  CDR3 for alpha chain variable domain of TCR clone 372626 (TRAV30, TRAJ24)
CGTEIVDADSWGKFPF

SEQ ID NO: 745252 - protein, 12 aa, Homo sapiens
  CDR3 for beta chain variable domain of TCR clone 372626 (TRBV5-1, TRBJ1-2)
CASSQDTYGYTF

SEQ ID NO: 745253 - protein, 12 aa, Homo sapiens
  CDR3 for alpha chain variable domain of TCR clone 372627 (TRAV12-2, TRAJ20)
CAVRPSAYKLSF

SEQ ID NO: 745254 - protein, 14 aa, Homo sapiens
  CDR3 for beta chain variable domain of TCR clone 372627 (TRBV6-1, TRBJ2-7)
CASNRARPDYEQYF

SEQ ID NO: 745255 - protein, 13 aa, Homo sapiens
  CDR3 for alpha chain variable domain of TCR clone 372628 (TRAV1-2, TRAJ9)
CAALNTGGFKTIF

SEQ ID NO: 745256 - protein, 14 aa, Homo sapiens
  CDR3 for beta chain variable domain of TCR clone 372628 (TRBV13, TRBJ2-5)
CHSSLERVGETQYF

SEQ ID NO: 745257 - protein, 11 aa, Homo sapiens
  CDR3 for alpha chain variable domain of TCR clone 372629 (TRAV21, TRAJ11)
CAVNGYSTLTF

SEQ ID NO: 745258 - protein, 13 aa, Homo sapiens
  CDR3 for beta chain variable domain of TCR clone 372629 (TRBV20-1, TRBJ2-7)
CSATHTSGYEQYF

SEQ ID NO: 745259 - protein, 16 aa, Homo sapiens
  CDR3 for alpha chain variable domain of TCR clone 372630 (TRAV23/DV6, TRAJ9)
CAASIGGNTGGFKNIY

SEQ ID NO: 745260 - protein, 14 aa, Homo sapiens
  CDR3 for beta chain variable domain of TCR clone 372630 (TRBV9, TRBJ2-7)
CASSVGVGSYEQYF

SEQ ID NO: 745261 - protein, 14 aa, Homo sapiens
  CDR3 for alpha chain variable domain of TCR clone 372631 (TRAV1-2, TRAJ8)
CAVREDTGFQKLVF

SEQ ID NO: 745262 - protein, 15 aa, Homo sapiens
  CDR3 for beta chain variable domain of TCR clone 372631 (TRBV11-3, TRBJ2-1)
CASSLAGQTYNEQFF

SEQ ID NO: 745263 - protein, 14 aa, Homo sapiens
  CDR3 for alpha chain variable domain of TCR clone 372632 (TRAV12-2, TRAJ11)
CAVRKNSGYSTLTF

SEQ ID NO: 745264 - protein, 17 aa, Homo sapiens
  CDR3 for beta chain variable domain of TCR clone 372632 (TRBV11-2, TRBJ2-1)
CASSLYPPGVEYNEQFF

SEQ ID NO: 745265 - protein, 16 aa, Homo sapiens
  CDR3 for alpha chain variable domain of TCR clone 372633 (TRAV27, TRAJ13)
CAGAKSDSGGYQKGTF

SEQ ID NO: 745266 - protein, 15 aa, Homo sapiens
  CDR3 for beta chain variable domain of TCR clone 372633 (TRBV29-1, TRBJ2-1)
CSVGRRALFYNEQFF

SEQ ID NO: 745267 - protein, 13 aa, Homo sapiens
  CDR3 for alpha chain variable domain of TCR clone 372634 (TRAV3, TRAJ21)
CAVREPDFNKFYF

SEQ ID NO: 745268 - protein, 14 aa, Homo sapiens
  CDR3 for beta chain variable domain of TCR clone 372634 (TRBV2, TRBJ2-1)
CASRTGSSYNEQFF

SEQ ID NO: 745269 - protein, 14 aa, Homo sapiens
  CDR3 for alpha chain variable domain of TCR clone 372635 (TRAV12-2, TRAJ40)
CAVKIPPGTYKYIF

SEQ ID NO: 745270 - protein, 15 aa, Homo sapiens
  CDR3 for beta chain variable domain of TCR clone 372635 (TRBV12-4, TRBJ2-5)
CASSPPTGLQETQYF

SEQ ID NO: 745271 - protein, 13 aa, Homo sapiens
  CDR3 for alpha chain variable domain of TCR clone 372636 (TRAV2, TRAJ21)
CAVEDLNFNKFYF

SEQ ID NO: 745272 - protein, 15 aa, Homo sapiens
  CDR3 for beta chain variable domain of TCR clone 372636 (TRBV28, TRBJ2-5)
CASSPEQGSIETQYF

SEQ ID NO: 745273 - protein, 13 aa, Homo sapiens
  CDR3 for alpha chain variable domain of TCR clone 372637 (TRAV17, TRAJ9)
CATDYTGGFKTIF

SEQ ID NO: 745274 - protein, 15 aa, Homo sapiens
  CDR3 for beta chain variable domain of TCR clone 372637 (TRBV7-7, TRBJ2-1)
CASSLASGSLNEQFF

SEQ ID NO: 745275 - protein, 17 aa, Homo sapiens
  CDR3 for alpha chain variable domain of TCR clone 372638 (TRAV14/DV4, TRAJ56)
CAMREGSSFGANSKLTF

SEQ ID NO: 745276 - protein, 14 aa, Homo sapiens
  CDR3 for beta chain variable domain of TCR clone 372638 (TRBV7-9, TRBJ1-2)
CASSRQGANYGYTF

SEQ ID NO: 745277 - protein, 14 aa, Homo sapiens
  CDR3 for alpha chain variable domain of TCR clone 372639 (TRAV8-1, TRAJ24)
CAVNAADSWGQLQF

SEQ ID NO: 745278 - protein, 16 aa, Homo sapiens
  CDR3 for beta chain variable domain of TCR clone 372639 (TRBV4-3, TRBJ2-1)
CASSPALDRGVNEQFF

SEQ ID NO: 745279 - protein, 13 aa, Homo sapiens
  CDR3 for alpha chain variable domain of TCR clone 372640 (TRAV8-4, TRAJ21)
CAVSDPGVNKFYF

SEQ ID NO: 745280 - protein, 10 aa, Homo sapiens
  CDR3 for beta chain variable domain of TCR clone 372640 (TRBV29-1, TRBJ1-4)
CSVYLGKLFF

SEQ ID NO: 745281 - protein, 11 aa, Homo sapiens
  CDR3 for alpha chain variable domain of TCR clone 372641 (TRAV35, TRAJ34)
CWARNTDKLIF

SEQ ID NO: 745282 - protein, 14 aa, Homo sapiens
  CDR3 for beta chain variable domain of TCR clone 372641 (TRBV19, TRBJ2-1)
CASPAFVLSGEQFF

SEQ ID NO: 745283 - protein, 15 aa, Homo sapiens
  CDR3 for alpha chain variable domain of TCR clone 372642 (TRAV8-3, TRAJ45)
CASSYSGGGADGLPF

SEQ ID NO: 745284 - protein, 13 aa, Homo sapiens
  CDR3 for beta chain variable domain of TCR clone 372642 (TRBV10-3, TRBJ2-7)
CAYKLAVNYEQYF

SEQ ID NO: 745285 - protein, 16 aa, Homo sapiens
  CDR3 for alpha chain variable domain of TCR clone 372643 (TRAV17, TRAJ52)
CATGIIGGTSYGKLTF

SEQ ID NO: 745286 - protein, 15 aa, Homo sapiens
  CDR3 for beta chain variable domain of TCR clone 372643 (TRBV7-3, TRBJ2-1)
CASRATGGSRNEQFF

SEQ ID NO: 745287 - protein, 13 aa, Homo sapiens
  CDR3 for alpha chain variable domain of TCR clone 372644 (TRAV17, TRAJ9)
CATDYTGGFKTIF

SEQ ID NO: 745288 - protein, 17 aa, Homo sapiens
  CDR3 for beta chain variable domain of TCR clone 372644 (TRBV7-3, TRBJ2-3)
CASSLMKRMRGADTQYF

SEQ ID NO: 745289 - protein, 13 aa, Homo sapiens
  CDR3 for alpha chain variable domain of TCR clone 372645 (TRAV3, TRAJ21)
CAVREPDFNKFYF

SEQ ID NO: 745290 - protein, 14 aa, Homo sapiens
  CDR3 for beta chain variable domain of TCR clone 372645 (TRBV4-1, TRBJ2-2)
CASSQAVSTGELFF

SEQ ID NO: 745291 - protein, 13 aa, Homo sapiens
  CDR3 for alpha chain variable domain of TCR clone 372646 (TRAV12-2, TRAJ22)
CAVKWGSARHLTF

SEQ ID NO: 745292 - protein, 16 aa, Homo sapiens
  CDR3 for beta chain variable domain of TCR clone 372646 (TRBV5-1, TRBJ2-1)
CASSLSSLRESNEQFF

SEQ ID NO: 745293 - protein, 13 aa, Homo sapiens
  CDR3 for alpha chain variable domain of TCR clone 372647 (TRAV13-1, TRAJ6)
CAASKGGSYIPTF

SEQ ID NO: 745294 - protein, 14 aa, Homo sapiens
  CDR3 for beta chain variable domain of TCR clone 372647 (TRBV7-2, TRBJ2-1)
CASSLGVGDNEQFF

SEQ ID NO: 745295 - protein, 13 aa, Homo sapiens
  CDR3 for alpha chain variable domain of TCR clone 372648 (TRAV12-3, TRAJ7)
CAMTPYGNNRLAF

SEQ ID NO: 745296 - protein, 12 aa, Homo sapiens
  CDR3 for beta chain variable domain of TCR clone 372648 (TRBV5-7, TRBJ2-7)
CASSVQGGEQYF

SEQ ID NO: 745297 - protein, 14 aa, Homo sapiens
  CDR3 for alpha chain variable domain of TCR clone 372649 (TRAV21, TRAJ35)
CAVMPIGFGNVLHC

SEQ ID NO: 745298 - protein, 15 aa, Homo sapiens
  CDR3 for beta chain variable domain of TCR clone 372649 (TRBV7-9, TRBJ2-1)
CASSLLIGSYNEQFF

SEQ ID NO: 745299 - protein, 14 aa, Homo sapiens
  CDR3 for alpha chain variable domain of TCR clone 372650 (TRAV1-2, TRAJ16)
CAVNRFSDGQKLTF

SEQ ID NO: 745300 - protein, 16 aa, Homo sapiens
  CDR3 for beta chain variable domain of TCR clone 372650 (TRBV20-1, TRBJ1-4)
CSAPGQGLLTNEELFF

SEQ ID NO: 745301 - protein, 13 aa, Homo sapiens
  CDR3 for alpha chain variable domain of TCR clone 372651 (TRAV26-2, TRAJ43)
CILRAVNNNDMRF

SEQ ID NO: 745302 - protein, 16 aa, Homo sapiens
  CDR3 for beta chain variable domain of TCR clone 372651 (TRBV11-2, TRBJ2-5)
CASSGQGYSPQETQYF

SEQ ID NO: 745303 - protein, 14 aa, Homo sapiens
  CDR3 for alpha chain variable domain of TCR clone 372652 (TRAV35, TRAJ33)
CAGSSQDSNYQLIG

SEQ ID NO: 745304 - protein, 15 aa, Homo sapiens
  CDR3 for beta chain variable domain of TCR clone 372652 (TRBV20-1, TRBJ2-7)
CSAASGTSGAYEQYF

SEQ ID NO: 745305 - protein, 13 aa, Homo sapiens
  CDR3 for alpha chain variable domain of TCR clone 372653 (TRAV12-2, TRAJ20)
CAVYPSNDYKLSF

SEQ ID NO: 745306 - protein, 14 aa, Homo sapiens
  CDR3 for beta chain variable domain of TCR clone 372653 (TRBV27, TRBJ2-5)
CASSLYPRGETQYF

SEQ ID NO: 745307 - protein, 13 aa, Homo sapiens
  CDR3 for alpha chain variable domain of TCR clone 372654 (TRAV17, TRAJ5)
CAPMDTGRRALTF

SEQ ID NO: 745308 - protein, 15 aa, Homo sapiens
  CDR3 for beta chain variable domain of TCR clone 372654 (TRBV11-2, TRBJ1-3)
CASSLDGTVGNTIYF

SEQ ID NO: 745309 - protein, 15 aa, Homo sapiens
  CDR3 for alpha chain variable domain of TCR clone 372655 (TRAV3, TRAJ5)
CAVRDLDTGSRALTF

SEQ ID NO: 745310 - protein, 13 aa, Homo sapiens
  CDR3 for beta chain variable domain of TCR clone 372655 (TRBV9, TRBJ2-7)
CASSASDSYEQYF

SEQ ID NO: 745311 - protein, 14 aa, Homo sapiens
  CDR3 for alpha chain variable domain of TCR clone 372656 (TRAV2, TRAJ37)
CAVAFTSNTGKLIF

SEQ ID NO: 745312 - protein, 11 aa, Homo sapiens
  CDR3 for beta chain variable domain of TCR clone 372656 (TRBV6-1, TRBJ2-1)
CASISSNEQFF

SEQ ID NO: 745313 - protein, 16 aa, Homo sapiens
  CDR3 for alpha chain variable domain of TCR clone 372657 (TRAV26-1, TRAJ47)
CIVRVVLSQYGNKLVF

SEQ ID NO: 745314 - protein, 16 aa, Homo sapiens
  CDR3 for beta chain variable domain of TCR clone 372657 (TRBV5-1, TRBJ2-1)
CASSFGVSGSYNEQFC

SEQ ID NO: 745315 - protein, 17 aa, Homo sapiens
  CDR3 for alpha chain variable domain of TCR clone 372658 (TRAV13-1, TRAJ31)
CAPRDRLMFGDGNKLVV

SEQ ID NO: 745316 - protein, 12 aa, Homo sapiens
  CDR3 for beta chain variable domain of TCR clone 372658 (TRBV7-9, TRBJ2-7)
CASSLEGYEQYF

SEQ ID NO: 745317 - protein, 15 aa, Homo sapiens
  CDR3 for alpha chain variable domain of TCR clone 372659 (TRAV8-2, TRAJ15)
CVVTMGNQAGTALIF

SEQ ID NO: 745318 - protein, 12 aa, Homo sapiens
  CDR3 for beta chain variable domain of TCR clone 372659 (TRBV6-1, TRBJ2-7)
CASSDYSYEQFF

SEQ ID NO: 745319 - protein, 13 aa, Homo sapiens
  CDR3 for alpha chain variable domain of TCR clone 372660 (TRAV20, TRAJ54)
CAVQAGGAQKLVF

SEQ ID NO: 745320 - protein, 15 aa, Homo sapiens
  CDR3 for beta chain variable domain of TCR clone 372660 (TRBV27, TRBJ2-3)
CASSLGLAATDTQYF

SEQ ID NO: 745321 - protein, 15 aa, Homo sapiens
  CDR3 for alpha chain variable domain of TCR clone 372661 (TRAV26-1, TRAJ40)
CIVRVTTSGTYKYIF

SEQ ID NO: 745322 - protein, 14 aa, Homo sapiens
  CDR3 for beta chain variable domain of TCR clone 372661 (TRBV7-2, TRBJ1-5)
CASSTQGAGQPQHF

SEQ ID NO: 745323 - protein, 14 aa, Homo sapiens
  CDR3 for alpha chain variable domain of TCR clone 372662 (TRAV16, TRAJ32)
CALKSGGATNRLIF

SEQ ID NO: 745324 - protein, 13 aa, Homo sapiens
  CDR3 for beta chain variable domain of TCR clone 372662 (TRBV15, TRBJ1-6)
CATSGGLNSPLLF

SEQ ID NO: 745325 - protein, 13 aa, Homo sapiens
  CDR3 for alpha chain variable domain of TCR clone 372663 (TRAV16, TRAJ28)
CALTGAGSYQLTF

SEQ ID NO: 745326 - protein, 16 aa, Homo sapiens
  CDR3 for beta chain variable domain of TCR clone 372663 (TRBV28, TRBJ1-5)
CASSLTGQGWNQPQHL

SEQ ID NO: 745327 - protein, 14 aa, Homo sapiens
  CDR3 for alpha chain variable domain of TCR clone 372664 (TRAV9-2, TRAJ39)
CALYIYNAGNMLTF

SEQ ID NO: 745328 - protein, 15 aa, Homo sapiens
  CDR3 for beta chain variable domain of TCR clone 372664 (TRBV7-3, TRBJ2-2)
CASSLEVVPTGELFF

SEQ ID NO: 745329 - protein, 15 aa, Homo sapiens
  CDR3 for alpha chain variable domain of TCR clone 372665 (TRAV26-1, TRAJ39)
CTVRVARNAGNILTF

SEQ ID NO: 745330 - protein, 16 aa, Homo sapiens
  CDR3 for beta chain variable domain of TCR clone 372665 (TRBV5-1, TRBJ2-1)
CASSLTLAGGRNEQFF

SEQ ID NO: 745331 - protein, 17 aa, Homo sapiens
  CDR3 for alpha chain variable domain of TCR clone 372666 (TRAV4, TRAJ18)
CLVGERSVGSTLGGLYF

SEQ ID NO: 745332 - protein, 16 aa, Homo sapiens
  CDR3 for beta chain variable domain of TCR clone 372666 (TRBV6-1, TRBJ2-5)
CASSETLDRGAETQYF

SEQ ID NO: 745333 - protein, 12 aa, Homo sapiens
  CDR3 for alpha chain variable domain of TCR clone 372667 (TRAV8-6, TRAJ57)
CAVQGGSDELVF

SEQ ID NO: 745334 - protein, 11 aa, Homo sapiens
  CDR3 for beta chain variable domain of TCR clone 372667 (TRBV19, TRBJ1-1)
CASSIGSEAFF

SEQ ID NO: 745335 - protein, 14 aa, Homo sapiens
  CDR3 for alpha chain variable domain of TCR clone 372668 (TRAV1-2, TRAJ16)
CAVNRFSDGQKLLF

SEQ ID NO: 745336 - protein, 13 aa, Homo sapiens
  CDR3 for beta chain variable domain of TCR clone 372668 (TRBV6-4, TRBJ2-1)
CASSVEREEEQFF

SEQ ID NO: 745337 - protein, 14 aa, Homo sapiens
  CDR3 for alpha chain variable domain of TCR clone 372669 (TRAV1-2, TRAJ16)
CAVNRFSDGQNLLF

SEQ ID NO: 745338 - protein, 15 aa, Homo sapiens
  CDR3 for beta chain variable domain of TCR clone 372669 (TRBV7-2, TRBJ2-7)
CASSLKGALTYEQYF

SEQ ID NO: 745339 - protein, 13 aa, Homo sapiens
  CDR3 for alpha chain variable domain of TCR clone 372670 (TRAV21, TRAJ57)
CAVTQGGSEKLVF

SEQ ID NO: 745340 - protein, 15 aa, Homo sapiens
  CDR3 for beta chain variable domain of TCR clone 372670 (TRBV5-1, TRBJ1-1)
CASSSTTGTNTDAFF

SEQ ID NO: 745341 - protein, 18 aa, Homo sapiens
  CDR3 for alpha chain variable domain of TCR clone 372671 (TRAV13-2, TRAJ52)
CAETPLNAGGTSYGKLTF

SEQ ID NO: 745342 - protein, 15 aa, Homo sapiens
  CDR3 for beta chain variable domain of TCR clone 372671 (TRBV7-2, TRBJ2-7)
CASSLKGAITYEQYF

SEQ ID NO: 745343 - protein, 16 aa, Homo sapiens
  CDR3 for alpha chain variable domain of TCR clone 372672 (TRAV23/DV6, TRAJ9)
CAASIGGNTGGFKTIF

SEQ ID NO: 745344 - protein, 14 aa, Homo sapiens
  CDR3 for beta chain variable domain of TCR clone 372672 (TRBV9, TRBJ2-7)
CASSVGVGSYEQFF

SEQ ID NO: 745345 - protein, 11 aa, Homo sapiens
  CDR3 for alpha chain variable domain of TCR clone 372673 (TRAV12-1, TRAJ30)
CVVNCQDKIIF

SEQ ID NO: 745346 - protein, 12 aa, Homo sapiens
  CDR3 for beta chain variable domain of TCR clone 372673 (TRBV27, TRBJ2-2)
CASKLFTGELFF

SEQ ID NO: 745347 - protein, 14 aa, Homo sapiens
  CDR3 for alpha chain variable domain of TCR clone 372674 (TRAV3, TRAJ8)
SAVSLNTGFQKLVF

SEQ ID NO: 745348 - protein, 14 aa, Homo sapiens
  CDR3 for beta chain variable domain of TCR clone 372674 (TRBV6-6, TRBJ1-5)
CASVDSGFNQPQHF

SEQ ID NO: 745349 - protein, 20 aa, Homo sapiens
  CDR3 for alpha chain variable domain of TCR clone 372675 (TRAV12-1, TRAJ42)
SSVIQPPTSVKGGSQGNLIF

SEQ ID NO: 745350 - protein, 14 aa, Homo sapiens
  CDR3 for beta chain variable domain of TCR clone 372675 (TRBV7-2, TRBJ2-1)
CASSLVAGRNEQFF

SEQ ID NO: 745351 - protein, 12 aa, Homo sapiens
  CDR3 for alpha chain variable domain of TCR clone 372676 (TRAV12-3, TRAJ17)
CAMTLTGNKLTF

SEQ ID NO: 745352 - protein, 13 aa, Homo sapiens
  CDR3 for beta chain variable domain of TCR clone 372676 (TRBV5-1, TRBJ1-2)
CASSSTGVHGYTF

SEQ ID NO: 745353 - protein, 14 aa, Homo sapiens
  CDR3 for alpha chain variable domain of TCR clone 372677 (TRAV21, TRAJ38)
CAVMVAGNNRKLIW

SEQ ID NO: 745354 - protein, 13 aa, Homo sapiens
  CDR3 for beta chain variable domain of TCR clone 372677 (TRBV7-3, TRBJ2-5)
CASSIGFFETQYF

SEQ ID NO: 745355 - protein, 12 aa, Homo sapiens
  CDR3 for alpha chain variable domain of TCR clone 372678 (TRAV2, TRAJ9)
CAVGAGGFKTSF

SEQ ID NO: 745356 - protein, 16 aa, Homo sapiens
  CDR3 for beta chain variable domain of TCR clone 372678 (TRBV13, TRBJ2-2)
CASSPRTGEHTGELLF

SEQ ID NO: 745357 - protein, 16 aa, Homo sapiens
  CDR3 for alpha chain variable domain of TCR clone 372679 (TRAV29/DV5, TRAJ36)
CAASAGVETGANNLFF

SEQ ID NO: 745358 - protein, 17 aa, Homo sapiens
  CDR3 for beta chain variable domain of TCR clone 372679 (TRBV13, TRBJ2-3)
CASSLSRVAGGRNTQYF

SEQ ID NO: 745359 - protein, 14 aa, Homo sapiens
  CDR3 for alpha chain variable domain of TCR clone 372680 (TRAV12-2, TRAJ13)
CAVKKTGGYQKVTF

SEQ ID NO: 745360 - protein, 15 aa, Homo sapiens
  CDR3 for beta chain variable domain of TCR clone 372680 (TRBV11-2, TRBJ2-2)
CASSSGRVNAGELFF

SEQ ID NO: 745361 - protein, 11 aa, Homo sapiens
  CDR3 for alpha chain variable domain of TCR clone 372681 (TRAV2, TRAJ13)
CASGGYQKVTF

SEQ ID NO: 745362 - protein, 18 aa, Homo sapiens
  CDR3 for beta chain variable domain of TCR clone 372681 (TRBV19, TRBJ2-6)
CASIGPTSGGSGANILTF

SEQ ID NO: 745363 - protein, 16 aa, Homo sapiens
  CDR3 for alpha chain variable domain of TCR clone 372682 (TRAV30, TRAJ24)
CGTEIVDADSWGKFPF

SEQ ID NO: 745364 - protein, 14 aa, Homo sapiens
  CDR3 for beta chain variable domain of TCR clone 372682 (TRBV12-5, TRBJ2-5)
CASGSRTHHETQYF

SEQ ID NO: 745365 - protein, 13 aa, Homo sapiens
  CDR3 for alpha chain variable domain of TCR clone 372683 (TRAV4, TRAJ42)
CLVGGGSQGNRIF

SEQ ID NO: 745366 - protein, 16 aa, Homo sapiens
  CDR3 for beta chain variable domain of TCR clone 372683 (TRBV5-1, TRBJ2-3)
CASSLQGRVGADTQYF

SEQ ID NO: 745367 - protein, 13 aa, Homo sapiens
  CDR3 for alpha chain variable domain of TCR clone 372684 (TRAV8-3, TRAJ48)
CAVVPFGTEKLTF

SEQ ID NO: 745368 - protein, 14 aa, Homo sapiens
  CDR3 for beta chain variable domain of TCR clone 372684 (TRBV18, TRBJ2-7)
CASSPRGGAYEQYF

SEQ ID NO: 745369 - protein, 18 aa, Homo sapiens
  CDR3 for alpha chain variable domain of TCR clone 372685 (TRAV12-3, TRAJ52)
CAMSVGGAGGTSYGKLTF

SEQ ID NO: 745370 - protein, 15 aa, Homo sapiens
  CDR3 for beta chain variable domain of TCR clone 372685 (TRBV27, TRBJ1-6)
SASSFDRGLGSPLHF

SEQ ID NO: 745371 - protein, 12 aa, Homo sapiens
  CDR3 for alpha chain variable domain of TCR clone 372686 (TRAV8-3, TRAJ26)
CAGDNYGYNFVF

SEQ ID NO: 745372 - protein, 18 aa, Homo sapiens
  CDR3 for beta chain variable domain of TCR clone 372686 (TRBV12-4, TRBJ2-2)
CASSLVAGTRGRTGELFF

SEQ ID NO: 745373 - protein, 12 aa, Homo sapiens
  CDR3 for alpha chain variable domain of TCR clone 372687 (TRAV26-1, TRAJ22)
CIVTGSARQLTF

SEQ ID NO: 745374 - protein, 16 aa, Homo sapiens
  CDR3 for beta chain variable domain of TCR clone 372687 (TRBV12-5, TRBJ2-5)
CASGPRTSGNQETQYF

SEQ ID NO: 745375 - protein, 12 aa, Homo sapiens
  CDR3 for alpha chain variable domain of TCR clone 372688 (TRAV3, TRAJ26)
CAVRDYGQNFVF

SEQ ID NO: 745376 - protein, 14 aa, Homo sapiens
  CDR3 for beta chain variable domain of TCR clone 372688 (TRBV7-8, TRBJ2-7)
CASSPGLADYEQYF

SEQ ID NO: 745377 - protein, 14 aa, Homo sapiens
  CDR3 for alpha chain variable domain of TCR clone 372689 (TRAV13-1, )
CAANIQNPDPAVYQ

SEQ ID NO: 745378 - protein, 14 aa, Homo sapiens
  CDR3 for beta chain variable domain of TCR clone 372689 (TRBV19, TRBJ2-7)
CASSIGPNSYEQYF

SEQ ID NO: 745379 - protein, 13 aa, Homo sapiens
  CDR3 for alpha chain variable domain of TCR clone 372690 (TRAV21, TRAJ40)
CAVRPSRAYKYIF

SEQ ID NO: 745380 - protein, 12 aa, Homo sapiens
  CDR3 for beta chain variable domain of TCR clone 372690 (TRBV14, TRBJ2-5)
CASSQLNETQYF

SEQ ID NO: 745381 - protein, 13 aa, Homo sapiens
  CDR3 for alpha chain variable domain of TCR clone 372691 (TRAV8-6, TRAJ49)
CAVITNTGNRFYF

SEQ ID NO: 745382 - protein, 14 aa, Homo sapiens
  CDR3 for beta chain variable domain of TCR clone 372691 (TRBV5-1, TRBJ2-7)
CASSRGESLYEQYF

SEQ ID NO: 745383 - protein, 13 aa, Homo sapiens
  CDR3 for alpha chain variable domain of TCR clone 372692 (TRAV21, TRAJ26)
CAVSGGYGQNFVF

SEQ ID NO: 745384 - protein, 15 aa, Homo sapiens
  CDR3 for beta chain variable domain of TCR clone 372692 (TRBV7-3, TRBJ2-2)
CASSETGQGTGELFF

SEQ ID NO: 745385 - protein, 14 aa, Homo sapiens
  CDR3 for alpha chain variable domain of TCR clone 372693 (TRAV29/DV5, TRAJ40)
CAAAVASGTYKYSF

SEQ ID NO: 745386 - protein, 15 aa, Homo sapiens
  CDR3 for beta chain variable domain of TCR clone 372693 (TRBV27, TRBJ1-5)
CASSLGTGFDQPQHF

SEQ ID NO: 745387 - protein, 15 aa, Homo sapiens
  CDR3 for alpha chain variable domain of TCR clone 372694 (TRAV26-1, TRAJ15)
CIVRMANQAGTALIF

SEQ ID NO: 745388 - protein, 13 aa, Homo sapiens
  CDR3 for beta chain variable domain of TCR clone 372694 (TRBV20-1, TRBJ2-5)
CSARGDYQETQYF

SEQ ID NO: 745389 - protein, 13 aa, Homo sapiens
  CDR3 for alpha chain variable domain of TCR clone 372695 (TRAV12-3, TRAJ33)
CAMSVNSNYQLIW

SEQ ID NO: 745390 - protein, 16 aa, Homo sapiens
  CDR3 for beta chain variable domain of TCR clone 372695 (TRBV13, TRBJ2-5)
CASSLRTGGCWETQYF

SEQ ID NO: 745391 - protein, 11 aa, Homo sapiens
  CDR3 for alpha chain variable domain of TCR clone 372696 (TRAV21, TRAJ48)
CAVDGNEKLTF

SEQ ID NO: 745392 - protein, 13 aa, Homo sapiens
  CDR3 for beta chain variable domain of TCR clone 372696 (TRBV12-5, TRBJ2-3)
CASGDRQSDTQYF

SEQ ID NO: 745393 - protein, 16 aa, Homo sapiens
  CDR3 for alpha chain variable domain of TCR clone 372697 (TRAV1-1, TRAJ37)
CAVRDKALATQANSSL

SEQ ID NO: 745394 - protein, 14 aa, Homo sapiens
  CDR3 for beta chain variable domain of TCR clone 372697 (TRBV7-2, TRBJ2-7)
CASSPKTSFYEQYF

SEQ ID NO: 745395 - protein, 16 aa, Homo sapiens
  CDR3 for alpha chain variable domain of TCR clone 372698 (TRAV8-2, TRAJ45)
CVVSEGTGGGADGLNF

SEQ ID NO: 745396 - protein, 15 aa, Homo sapiens
  CDR3 for beta chain variable domain of TCR clone 372698 (TRBV7-9, TRBJ2-5)
CASSLVAGGLETQYF

SEQ ID NO: 745397 - protein, 13 aa, Homo sapiens
  CDR3 for alpha chain variable domain of TCR clone 372699 (TRAV23/DV6, TRAJ22)
CAPYSGSARQLTF

SEQ ID NO: 745398 - protein, 15 aa, Homo sapiens
  CDR3 for beta chain variable domain of TCR clone 372699 (TRBV11-2, TRBJ1-6)
CASSLDPWAMSPLHF

SEQ ID NO: 745399 - protein, 15 aa, Homo sapiens
  CDR3 for alpha chain variable domain of TCR clone 372700 (TRAV8-1, TRAJ6)
CAVNTAPGGSYIPTF

SEQ ID NO: 745400 - protein, 15 aa, Homo sapiens
  CDR3 for beta chain variable domain of TCR clone 372700 (TRBV11-2, TRBJ2-2)
CASSSDRVNAGELFF

SEQ ID NO: 745401 - protein, 13 aa, Homo sapiens
  CDR3 for alpha chain variable domain of TCR clone 372701 (TRAV4, TRAJ42)
CLVGGGSQGNLIF

SEQ ID NO: 745402 - protein, 16 aa, Homo sapiens
  CDR3 for beta chain variable domain of TCR clone 372701 (TRBV5-1, TRBJ2-3)
CASSLQGRVRADTQYF

SEQ ID NO: 745403 - protein, 14 aa, Homo sapiens
  CDR3 for alpha chain variable domain of TCR clone 372702 (TRAV17, TRAJ57)
CSGPSQGGSEKLVF

SEQ ID NO: 745404 - protein, 16 aa, Homo sapiens
  CDR3 for beta chain variable domain of TCR clone 372702 (TRBV12-4, TRBJ1-5)
CASSRPVGGSNQPQHF

SEQ ID NO: 745405 - protein, 14 aa, Homo sapiens
  CDR3 for alpha chain variable domain of TCR clone 372703 (TRAV14/DV4, TRAJ42)
CPRGSLRSQGNLIF

SEQ ID NO: 745406 - protein, 14 aa, Homo sapiens
  CDR3 for beta chain variable domain of TCR clone 372703 (TRBV7-3, TRBJ2-1)
CASSLAGGTNEQFF

SEQ ID NO: 745407 - protein, 15 aa, Homo sapiens
  CDR3 for alpha chain variable domain of TCR clone 372704 (TRAV38-1, TRAJ57)
CAFMDSQGGSEKLVF

SEQ ID NO: 745408 - protein, 16 aa, Homo sapiens
  CDR3 for beta chain variable domain of TCR clone 372704 (TRBV10-3, TRBJ2-1)
CAIRGGGRGDYNTQFF

SEQ ID NO: 745409 - protein, 15 aa, Homo sapiens
  CDR3 for alpha chain variable domain of TCR clone 372705 (TRAV13-1, TRAJ44)
CAASRNTGTAIKLTF

SEQ ID NO: 745410 - protein, 17 aa, Homo sapiens
  CDR3 for beta chain variable domain of TCR clone 372705 (TRBV11-2, TRBJ2-1)
CASSLYPPGVEYNEQFF

SEQ ID NO: 745411 - protein, 14 aa, Homo sapiens
  CDR3 for alpha chain variable domain of TCR clone 372706 (TRAV16, TRAJ54)
CALSDGQGAQNLVF

SEQ ID NO: 745412 - protein, 13 aa, Homo sapiens
  CDR3 for beta chain variable domain of TCR clone 372706 (TRBV20-1, TRBJ2-4)
CSAPTWAGNIQYF

SEQ ID NO: 745413 - protein, 14 aa, Homo sapiens
  CDR3 for alpha chain variable domain of TCR clone 372707 (TRAV16, TRAJ15)
CALRPNQAGTALLF

SEQ ID NO: 745414 - protein, 16 aa, Homo sapiens
  CDR3 for beta chain variable domain of TCR clone 372707 (TRBV6-5, TRBJ2-2)
CASSYGRVPDTGELFF

SEQ ID NO: 745415 - protein, 13 aa, Homo sapiens
  CDR3 for alpha chain variable domain of TCR clone 372708 (TRAV20, TRAJ20)
CAVQNPHDYKLSF

SEQ ID NO: 745416 - protein, 12 aa, Homo sapiens
  CDR3 for beta chain variable domain of TCR clone 372708 (TRBV18, TRBJ2-7)
RASSPNNNEQYF

SEQ ID NO: 745417 - protein, 16 aa, Homo sapiens
  CDR3 for alpha chain variable domain of TCR clone 372709 (TRAV26-1, TRAJ36)
CIVRVSYQTGANNLFF

SEQ ID NO: 745418 - protein, 16 aa, Homo sapiens
  CDR3 for beta chain variable domain of TCR clone 372709 (TRBV12-5, TRBJ2-5)
CASGPRTSGNQETQYF

SEQ ID NO: 745419 - protein, 16 aa, Homo sapiens
  CDR3 for alpha chain variable domain of TCR clone 372710 (TRAV8-3, TRAJ38)
CAVGASNAGNNRKRIW

SEQ ID NO: 745420 - protein, 15 aa, Homo sapiens
  CDR3 for beta chain variable domain of TCR clone 372710 (TRBV11-3, TRBJ1-3)
CASSLFGPSGNTIYF

SEQ ID NO: 745421 - protein, 13 aa, Homo sapiens
  CDR3 for alpha chain variable domain of TCR clone 372711 (TRAV1-1, TRAJ7)
CAVRDHGSNRLAF

SEQ ID NO: 745422 - protein, 20 aa, Homo sapiens
  CDR3 for beta chain variable domain of TCR clone 372711 (TRBV28, TRBJ2-3)
CASSLGVRSTSGRSTDTQYF

SEQ ID NO: 745423 - protein, 11 aa, Homo sapiens
  CDR3 for alpha chain variable domain of TCR clone 372712 (TRAV12-1, TRAJ21)
CVVYNFNKFYF

SEQ ID NO: 745424 - protein, 13 aa, Homo sapiens
  CDR3 for beta chain variable domain of TCR clone 372712 (TRBV29-1, TRBJ2-1)
CSVEGGRVNEQFF

SEQ ID NO: 745425 - protein, 15 aa, Homo sapiens
  CDR3 for alpha chain variable domain of TCR clone 372713 (TRAV17, TRAJ22)
CATVAPSGSARQLTF

SEQ ID NO: 745426 - protein, 16 aa, Homo sapiens
  CDR3 for beta chain variable domain of TCR clone 372713 (TRBV10-3, TRBJ2-7)
CAISADLVDRPYEQYF

SEQ ID NO: 745427 - protein, 13 aa, Homo sapiens
  CDR3 for alpha chain variable domain of TCR clone 372714 (TRAV1-1, TRAJ9)
CAAKNTGGFKTIF

SEQ ID NO: 745428 - protein, 13 aa, Homo sapiens
  CDR3 for beta chain variable domain of TCR clone 372714 (TRBV20-1, TRBJ1-1)
CSARGGGNTEAFF

SEQ ID NO: 745429 - protein, 16 aa, Homo sapiens
  CDR3 for alpha chain variable domain of TCR clone 372715 (TRAV3, TRAJ6)
CAVRDGMGGRKLHTYI

SEQ ID NO: 745430 - protein, 15 aa, Homo sapiens
  CDR3 for beta chain variable domain of TCR clone 372715 (TRBV9, TRBJ2-1)
CASSLAGSSYNEQFF

SEQ ID NO: 745431 - protein, 12 aa, Homo sapiens
  CDR3 for alpha chain variable domain of TCR clone 372716 (TRAV16, TRAJ10)
CSRTGGGNKLAF

SEQ ID NO: 745432 - protein, 16 aa, Homo sapiens
  CDR3 for beta chain variable domain of TCR clone 372716 (TRBV27, TRBJ2-2)
CASSFRGLVRTGELFF

SEQ ID NO: 745433 - protein, 13 aa, Homo sapiens
  CDR3 for alpha chain variable domain of TCR clone 372717 (TRAV27, TRAJ45)
CRSSGGGADGLPF

SEQ ID NO: 745434 - protein, 17 aa, Homo sapiens
  CDR3 for beta chain variable domain of TCR clone 372717 (TRBV11-2, TRBJ2-1)
CASSLYPPGVECNEQFF

SEQ ID NO: 745435 - protein, 15 aa, Homo sapiens
  CDR3 for alpha chain variable domain of TCR clone 372718 (TRAV38-1, TRAJ37)
CAFIFGSGNTGKLIF

SEQ ID NO: 745436 - protein, 16 aa, Homo sapiens
  CDR3 for beta chain variable domain of TCR clone 372718 (TRBV4-2, TRBJ2-3)
CASSQELAGDTDTQYF

SEQ ID NO: 745437 - protein, 13 aa, Homo sapiens
  CDR3 for alpha chain variable domain of TCR clone 372719 (TRAV12-2, TRAJ6)
CAVNVSRQLHTYI

SEQ ID NO: 745438 - protein, 12 aa, Homo sapiens
  CDR3 for beta chain variable domain of TCR clone 372719 (TRBV29-1, TRBJ2-3)
CSVTGGADTQYF

SEQ ID NO: 745439 - protein, 14 aa, Homo sapiens
  CDR3 for alpha chain variable domain of TCR clone 372720 (TRAV1-2, TRAJ16)
CAVNRFSDGQKLLF

SEQ ID NO: 745440 - protein, 16 aa, Homo sapiens
  CDR3 for beta chain variable domain of TCR clone 372720 (TRBV6-1, TRBJ2-1)
CASILRQGSSYNEQFF

SEQ ID NO: 745441 - protein, 13 aa, Homo sapiens
  CDR3 for alpha chain variable domain of TCR clone 372721 (TRAV1-2, TRAJ31)
CAVRGYNNARLMF

SEQ ID NO: 745442 - protein, 14 aa, Homo sapiens
  CDR3 for beta chain variable domain of TCR clone 372721 (TRBV12-4, TRBJ1-3)
CASTLTGAGNTIYF

SEQ ID NO: 745443 - protein, 14 aa, Homo sapiens
  CDR3 for alpha chain variable domain of TCR clone 372722 (TRAV2, TRAJ9)
CVVEDRSGGFKTIF

SEQ ID NO: 745444 - protein, 14 aa, Homo sapiens
  CDR3 for beta chain variable domain of TCR clone 372722 (TRBV25-1, TRBJ1-1)
CASTHLGGNTEAFF

SEQ ID NO: 745445 - protein, 13 aa, Homo sapiens
  CDR3 for alpha chain variable domain of TCR clone 372723 (TRAV23/DV6, TRAJ22)
CAPYSGSARHLTF

SEQ ID NO: 745446 - protein, 15 aa, Homo sapiens
  CDR3 for beta chain variable domain of TCR clone 372723 (TRBV7-2, TRBJ2-1)
CASTHGTGIYNEQFF

SEQ ID NO: 745447 - protein, 13 aa, Homo sapiens
  CDR3 for alpha chain variable domain of TCR clone 372724 (TRAV13-1, TRAJ5)
CAASDTGRRELTF

SEQ ID NO: 745448 - protein, 12 aa, Homo sapiens
  CDR3 for beta chain variable domain of TCR clone 372724 (TRBV28, TRBJ2-3)
CASSLYRDAQYF

SEQ ID NO: 745449 - protein, 12 aa, Homo sapiens
  CDR3 for alpha chain variable domain of TCR clone 372725 (TRAV3, TRAJ31)
CAVRDGNARLMF

SEQ ID NO: 745450 - protein, 13 aa, Homo sapiens
  CDR3 for beta chain variable domain of TCR clone 372725 (TRBV20-1, TRBJ1-1)
CSARGGGNTEAFF

SEQ ID NO: 745451 - protein, 14 aa, Homo sapiens
  CDR3 for alpha chain variable domain of TCR clone 372726 (TRAV16, TRAJ33)
CALSSMNSNYQLIW

SEQ ID NO: 745452 - protein, 16 aa, Homo sapiens
  CDR3 for beta chain variable domain of TCR clone 372726 (TRBV25-1, TRBJ2-7)
CASSELTGGGIYEQYF

SEQ ID NO: 745453 - protein, 15 aa, Homo sapiens
  CDR3 for alpha chain variable domain of TCR clone 372727 (TRAV8-3, TRAJ27)
CAVGPSKTNAGKSTF

SEQ ID NO: 745454 - protein, 14 aa, Homo sapiens
  CDR3 for beta chain variable domain of TCR clone 372727 (TRBV27, TRBJ2-2)
CASSLGAATGELFF

SEQ ID NO: 745455 - protein, 16 aa, Homo sapiens
  CDR3 for alpha chain variable domain of TCR clone 372728 (TRAV23/DV6, TRAJ52)
CAASMNGGTSYGKLTF

SEQ ID NO: 745456 - protein, 16 aa, Homo sapiens
  CDR3 for beta chain variable domain of TCR clone 372728 (TRBV27, TRBJ2-2)
CASSCRGLVRTGELFF

SEQ ID NO: 745457 - protein, 15 aa, Homo sapiens
  CDR3 for alpha chain variable domain of TCR clone 372729 (TRAV21, TRAJ24)
CAARSSTDSWGKLQF

SEQ ID NO: 745458 - protein, 15 aa, Homo sapiens
  CDR3 for beta chain variable domain of TCR clone 372729 (TRBV6-5, TRBJ2-7)
CASSYSTSGNYEQYF

SEQ ID NO: 745459 - protein, 13 aa, Homo sapiens
  CDR3 for alpha chain variable domain of TCR clone 372730 (TRAV21, TRAJ57)
CAVTQGGSEKLFF

SEQ ID NO: 745460 - protein, 11 aa, Homo sapiens
  CDR3 for beta chain variable domain of TCR clone 372730 (TRBV11-2, TRBJ2-2)
CASSLPGELFF

SEQ ID NO: 745461 - protein, 13 aa, Homo sapiens
  CDR3 for alpha chain variable domain of TCR clone 372731 (TRAV13-2, TRAJ40)
CAEFTSGTYKYIF

SEQ ID NO: 745462 - protein, 13 aa, Homo sapiens
  CDR3 for beta chain variable domain of TCR clone 372731 (TRBV19, TRBJ1-5)
CASSIGGNQPQHF

SEQ ID NO: 745463 - protein, 16 aa, Homo sapiens
  CDR3 for alpha chain variable domain of TCR clone 372732 (TRAV30, TRAJ24)
CGTEIVDADSWGKFQF

SEQ ID NO: 745464 - protein, 14 aa, Homo sapiens
  CDR3 for beta chain variable domain of TCR clone 372732 (TRBV7-9, TRBJ2-4)
CASSVGMGGNIQYF

SEQ ID NO: 745465 - protein, 11 aa, Homo sapiens
  CDR3 for alpha chain variable domain of TCR clone 372733 (TRAV3, TRAJ17)
CAEAAGNKLTF

SEQ ID NO: 745466 - protein, 15 aa, Homo sapiens
  CDR3 for beta chain variable domain of TCR clone 372733 (TRBV9, TRBJ2-7)
CASSPHEQGSYEQYF

SEQ ID NO: 745467 - protein, 14 aa, Homo sapiens
  CDR3 for alpha chain variable domain of TCR clone 372734 (TRAV20, TRAJ32)
CCGRYGGATNKLIF

SEQ ID NO: 745468 - protein, 16 aa, Homo sapiens
  CDR3 for beta chain variable domain of TCR clone 372734 (TRBV19, TRBJ2-2)
CASRSPGSGATGELFF

SEQ ID NO: 745469 - protein, 15 aa, Homo sapiens
  CDR3 for alpha chain variable domain of TCR clone 372735 (TRAV20, TRAJ50)
CAVRQMKTYYDKVRF

SEQ ID NO: 745470 - protein, 16 aa, Homo sapiens
  CDR3 for beta chain variable domain of TCR clone 372735 (TRBV15, TRBJ1-2)
CATSRGPRTGGGGYTF

SEQ ID NO: 745471 - protein, 13 aa, Homo sapiens
  CDR3 for alpha chain variable domain of TCR clone 372736 (TRAV12-3, TRAJ7)
CAMSASGNNRLAF

SEQ ID NO: 745472 - protein, 14 aa, Homo sapiens
  CDR3 for beta chain variable domain of TCR clone 372736 (TRBV11-2, TRBJ2-3)
CASSRLARTDTQYF

SEQ ID NO: 745473 - protein, 16 aa, Homo sapiens
  CDR3 for alpha chain variable domain of TCR clone 372737 (TRAV12-2, TRAJ18)
CAVTTDRGSTLGRLYF

SEQ ID NO: 745474 - protein, 13 aa, Homo sapiens
  CDR3 for beta chain variable domain of TCR clone 372737 (TRBV19, TRBJ2-3)
CATWGKITDTQNF

SEQ ID NO: 745475 - protein, 14 aa, Homo sapiens
  CDR3 for alpha chain variable domain of TCR clone 372738 (TRAV1-2, TRAJ8)
CAVREDTGFQKLVF

SEQ ID NO: 745476 - protein, 21 aa, Homo sapiens
  CDR3 for beta chain variable domain of TCR clone 372738 (TRBV15, TRBJ2-1)
AWGTQPCTCVPPAEVDTARFF

SEQ ID NO: 745477 - protein, 21 aa, Homo sapiens
  CDR3 for alpha chain variable domain of TCR clone 372739 (TRAV8-3, TRAJ10)
CAVGHTHGRRKQTHLRDRHST

SEQ ID NO: 745478 - protein, 10 aa, Homo sapiens
  CDR3 for beta chain variable domain of TCR clone 372739 (TRBV20-1, TRBJ2-5)
CRARFETQYF

SEQ ID NO: 745479 - protein, 14 aa, Homo sapiens
  CDR3 for alpha chain variable domain of TCR clone 372740 (TRAV13-1, TRAJ44)
CAAKATSTASKLTF

SEQ ID NO: 745480 - protein, 16 aa, Homo sapiens
  CDR3 for beta chain variable domain of TCR clone 372740 (TRBV12-4, TRBJ1-5)
CASSSGPRGSNQPQHF

SEQ ID NO: 745481 - protein, 11 aa, Homo sapiens
  CDR3 for alpha chain variable domain of TCR clone 372741 (TRAV1-1, TRAJ23)
CAVRQGGKLIF

SEQ ID NO: 745482 - protein, 13 aa, Homo sapiens
  CDR3 for beta chain variable domain of TCR clone 372741 (TRBV7-3, TRBJ1-1)
CASSQDWGADAFF

SEQ ID NO: 745483 - protein, 12 aa, Homo sapiens
  CDR3 for alpha chain variable domain of TCR clone 372742 (TRAV12-3, TRAJ5)
CAMDTGRRALTF

SEQ ID NO: 745484 - protein, 14 aa, Homo sapiens
  CDR3 for beta chain variable domain of TCR clone 372742 (TRBV7-8, TRBJ2-3)
CASSLEAGTDTQYF

SEQ ID NO: 745485 - protein, 16 aa, Homo sapiens
  CDR3 for alpha chain variable domain of TCR clone 372743 (TRAV3, TRAJ37)
CAVRGKGSGNTGKLIF

SEQ ID NO: 745486 - protein, 14 aa, Homo sapiens
  CDR3 for beta chain variable domain of TCR clone 372743 (TRBV12-4, TRBJ1-1)
CASSSARGYTEAFF

SEQ ID NO: 745487 - protein, 15 aa, Homo sapiens
  CDR3 for alpha chain variable domain of TCR clone 372744 (TRAV13-1, TRAJ5)
CAASKADTGRRALTF

SEQ ID NO: 745488 - protein, 15 aa, Homo sapiens
  CDR3 for beta chain variable domain of TCR clone 372744 (TRBV19, TRBJ2-1)
YASSMGWNSNNEQFF

SEQ ID NO: 745489 - protein, 13 aa, Homo sapiens
  CDR3 for alpha chain variable domain of TCR clone 372745 (TRAV26-2, TRAJ54)
CIPRVGGAQKLVF

SEQ ID NO: 745490 - protein, 15 aa, Homo sapiens
  CDR3 for beta chain variable domain of TCR clone 372745 (TRBV9, TRBJ1-6)
CASSVAGTGDSPLHF

SEQ ID NO: 745491 - protein, 15 aa, Homo sapiens
  CDR3 for alpha chain variable domain of TCR clone 372746 (TRAV17, TRAJ57)
CATGPSQGGSEKLVF

SEQ ID NO: 745492 - protein, 13 aa, Homo sapiens
  CDR3 for beta chain variable domain of TCR clone 372746 (TRBV27, TRBJ1-4)
CASSLMGDENLFF

SEQ ID NO: 745493 - protein, 15 aa, Homo sapiens
  CDR3 for alpha chain variable domain of TCR clone 372747 (TRAV12-3, TRAJ6)
CAMSATTGGSYIPTF

SEQ ID NO: 745494 - protein, 16 aa, Homo sapiens
  CDR3 for beta chain variable domain of TCR clone 372747 (TRBV20-1, TRBJ1-2)
CSASMGQGVANYGDIF

SEQ ID NO: 745495 - protein, 14 aa, Homo sapiens
  CDR3 for alpha chain variable domain of TCR clone 372748 (TRAV12-3, TRAJ10)
SHLPLTGGGNKLTF

SEQ ID NO: 745496 - protein, 16 aa, Homo sapiens
  CDR3 for beta chain variable domain of TCR clone 372748 (TRBV13, TRBJ2-2)
CASSPRTGEHTRELFF

SEQ ID NO: 745497 - protein, 21 aa, Homo sapiens
  CDR3 for alpha chain variable domain of TCR clone 372749 (TRAV1-2, TRAJ37)
CLLPLCCERFHGSGNTGKLIF

SEQ ID NO: 745498 - protein, 14 aa, Homo sapiens
  CDR3 for beta chain variable domain of TCR clone 372749 (TRBV2, TRBJ2-5)
CASSKVLAQETQYF

SEQ ID NO: 745499 - protein, 13 aa, Homo sapiens
  CDR3 for alpha chain variable domain of TCR clone 372750 (TRAV29/DV5, TRAJ31)
CAASRNNNARLMV

SEQ ID NO: 745500 - protein, 12 aa, Homo sapiens
  CDR3 for beta chain variable domain of TCR clone 372750 (TRBV14, TRBJ2-5)
CASSHLKETQYF

SEQ ID NO: 745501 - protein, 14 aa, Homo sapiens
  CDR3 for alpha chain variable domain of TCR clone 372751 (TRAV12-2, TRAJ9)
CAVNALEGGFKTIF

SEQ ID NO: 745502 - protein, 15 aa, Homo sapiens
  CDR3 for beta chain variable domain of TCR clone 372751 (TRBV18, TRBJ2-1)
CASSPPSASYNEQFF

SEQ ID NO: 745503 - protein, 14 aa, Homo sapiens
  CDR3 for alpha chain variable domain of TCR clone 372752 (TRAV12-3, TRAJ10)
SHLPLTGGGNKLTF

SEQ ID NO: 745504 - protein, 15 aa, Homo sapiens
  CDR3 for beta chain variable domain of TCR clone 372752 (TRBV10-3, TRBJ1-3)
CAISDSQGAGNTIYF

SEQ ID NO: 745505 - protein, 15 aa, Homo sapiens
  CDR3 for alpha chain variable domain of TCR clone 372753 (TRAV2, TRAJ15)
CAVEDRGQAGTALIF

SEQ ID NO: 745506 - protein, 15 aa, Homo sapiens
  CDR3 for beta chain variable domain of TCR clone 372753 (TRBV6-5, TRBJ1-2)
CASSYSQAFNYGYTF

SEQ ID NO: 745507 - protein, 11 aa, Homo sapiens
  CDR3 for alpha chain variable domain of TCR clone 372754 (TRAV1-1, TRAJ23)
FVVRQGGKLIF

SEQ ID NO: 745508 - protein, 20 aa, Homo sapiens
  CDR3 for beta chain variable domain of TCR clone 372754 (TRBV7-8, TRBJ2-2)
CASSHLFPGPTIHITGELFF

SEQ ID NO: 745509 - protein, 10 aa, Homo sapiens
  CDR3 for alpha chain variable domain of TCR clone 372755 (TRAV1-2, TRAJ20)
CAVTDYKLSF

SEQ ID NO: 745510 - protein, 15 aa, Homo sapiens
  CDR3 for beta chain variable domain of TCR clone 372755 (TRBV7-2, TRBJ2-7)
CASSLVSSGSYAQYF

SEQ ID NO: 745511 - protein, 13 aa, Homo sapiens
  CDR3 for alpha chain variable domain of TCR clone 372756 (TRAV13-1, TRAJ43)
CAASLSNNNDMRF

SEQ ID NO: 745512 - protein, 17 aa, Homo sapiens
  CDR3 for beta chain variable domain of TCR clone 372756 (TRBV13, TRBJ2-3)
CASSLSGVAGGGNTQYF

SEQ ID NO: 745513 - protein, 14 aa, Homo sapiens
  CDR3 for alpha chain variable domain of TCR clone 372757 (TRAV17, TRAJ34)
CATDSLEGTDKLIF

SEQ ID NO: 745514 - protein, 17 aa, Homo sapiens
  CDR3 for beta chain variable domain of TCR clone 372757 (TRBV28, TRBJ2-2)
CASSFATGMGDAGELFF

SEQ ID NO: 745515 - protein, 10 aa, Homo sapiens
  CDR3 for alpha chain variable domain of TCR clone 372758 (TRAV30, TRAJ48)
CGIGNEKLTF

SEQ ID NO: 745516 - protein, 15 aa, Homo sapiens
  CDR3 for beta chain variable domain of TCR clone 372758 (TRBV28, TRBJ2-5)
CASSPPWSYQATQYF

SEQ ID NO: 745517 - protein, 14 aa, Homo sapiens
  CDR3 for alpha chain variable domain of TCR clone 372759 (TRAV1-2, TRAJ16)
CAVNRFSDGPKLLF

SEQ ID NO: 745518 - protein, 13 aa, Homo sapiens
  CDR3 for beta chain variable domain of TCR clone 372759 (TRBV27, TRBJ1-1)
CASSLSIGAEAFF

SEQ ID NO: 745519 - protein, 12 aa, Homo sapiens
  CDR3 for alpha chain variable domain of TCR clone 372760 (TRAV21, TRAJ37)
CAVRGNTGKLIF

SEQ ID NO: 745520 - protein, 15 aa, Homo sapiens
  CDR3 for beta chain variable domain of TCR clone 372760 (TRBV19, TRBJ2-1)
CASSPPGQGPNEQFF

SEQ ID NO: 745521 - protein, 16 aa, Homo sapiens
  CDR3 for alpha chain variable domain of TCR clone 372761 (TRAV12-3, TRAJ53)
CALSPGSGGSNYKLTF

SEQ ID NO: 745522 - protein, 14 aa, Homo sapiens
  CDR3 for beta chain variable domain of TCR clone 372761 (TRBV15, TRBJ2-5)
CATSIGGLGETQYF

SEQ ID NO: 745523 - protein, 17 aa, Homo sapiens
  CDR3 for alpha chain variable domain of TCR clone 372762 (TRAV3, TRAJ6)
CAVRDGPRAGGSDIPTL

SEQ ID NO: 745524 - protein, 14 aa, Homo sapiens
  CDR3 for beta chain variable domain of TCR clone 372762 (TRBV7-2, TRBJ2-7)
CASSPKTSFYEQYF

SEQ ID NO: 745525 - protein, 13 aa, Homo sapiens
  CDR3 for alpha chain variable domain of TCR clone 372763 (TRAV8-3, TRAJ28)
CAVGAVGSYQLTF

SEQ ID NO: 745526 - protein, 13 aa, Homo sapiens
  CDR3 for beta chain variable domain of TCR clone 372763 (TRBV7-7, TRBJ2-3)
CASSLSRADTQYF

SEQ ID NO: 745527 - protein, 11 aa, Homo sapiens
  CDR3 for alpha chain variable domain of TCR clone 372764 (TRAV3, TRAJ21)
CAVGNFDKFCF

SEQ ID NO: 745528 - protein, 12 aa, Homo sapiens
  CDR3 for beta chain variable domain of TCR clone 372764 (TRBV12-4, TRBJ2-7)
CASSLGGYEQYF

SEQ ID NO: 745529 - protein, 14 aa, Homo sapiens
  CDR3 for alpha chain variable domain of TCR clone 372765 (TRAV12-2, TRAJ45)
CAVNKGGGADGLTF

SEQ ID NO: 745530 - protein, 15 aa, Homo sapiens
  CDR3 for beta chain variable domain of TCR clone 372765 (TRBV25-1, TRBJ1-6)
CASSGDRGLNSPLHF

SEQ ID NO: 745531 - protein, 14 aa, Homo sapiens
  CDR3 for alpha chain variable domain of TCR clone 372766 (TRAV8-3, TRAJ35)
FAVVPQGFGNVLHC

SEQ ID NO: 745532 - protein, 15 aa, Homo sapiens
  CDR3 for beta chain variable domain of TCR clone 372766 (TRBV6-1, TRBJ2-2)
CASSAGQGYTGELFF

SEQ ID NO: 745533 - protein, 15 aa, Homo sapiens
  CDR3 for alpha chain variable domain of TCR clone 372767 (TRAV8-4, TRAJ29)
CAVSEDFRGNTPLVF

SEQ ID NO: 745534 - protein, 18 aa, Homo sapiens
  CDR3 for beta chain variable domain of TCR clone 372767 (TRBV20-1, TRBJ2-6)
CSARTLAGGPSGANDLTF

SEQ ID NO: 745535 - protein, 14 aa, Homo sapiens
  CDR3 for alpha chain variable domain of TCR clone 372768 (TRAV27, TRAJ49)
CAGRPEGTGNQFYF

SEQ ID NO: 745536 - protein, 15 aa, Homo sapiens
  CDR3 for beta chain variable domain of TCR clone 372768 (TRBV12-5, TRBJ2-2)
CASGRLGGNTGELFF

SEQ ID NO: 745537 - protein, 12 aa, Homo sapiens
  CDR3 for alpha chain variable domain of TCR clone 372769 (TRAV8-1, TRAJ31)
CAVINNNARLLF

SEQ ID NO: 745538 - protein, 15 aa, Homo sapiens
  CDR3 for beta chain variable domain of TCR clone 372769 (TRBV20-1, TRBJ2-2)
CSARGGQGNTGELFF

SEQ ID NO: 745539 - protein, 14 aa, Homo sapiens
  CDR3 for alpha chain variable domain of TCR clone 372770 (TRAV10, TRAJ34)
CVVSRGGDTDKLIF

SEQ ID NO: 745540 - protein, 17 aa, Homo sapiens
  CDR3 for beta chain variable domain of TCR clone 372770 (TRBV6-3, TRBJ2-3)
CASRRPLGGGSTHTQYF

SEQ ID NO: 745541 - protein, 16 aa, Homo sapiens
  CDR3 for alpha chain variable domain of TCR clone 372771 (TRAV12-3, TRAJ53)
CSMSPGSGGSNYKLTF

SEQ ID NO: 745542 - protein, 11 aa, Homo sapiens
  CDR3 for beta chain variable domain of TCR clone 372771 (TRBV29-1, TRBJ2-5)
CIEDRTGTQYF

SEQ ID NO: 745543 - protein, 18 aa, Homo sapiens
  CDR3 for alpha chain variable domain of TCR clone 372772 (TRAV21, TRAJ52)
CAVRPSPAGGTSYGKLTF

SEQ ID NO: 745544 - protein, 15 aa, Homo sapiens
  CDR3 for beta chain variable domain of TCR clone 372772 (TRBV7-9, TRBJ2-7)
CASSSSGLAVYEQCF

SEQ ID NO: 745545 - protein, 15 aa, Homo sapiens
  CDR3 for alpha chain variable domain of TCR clone 372773 (TRAV16, TRAJ17)
CALSGNKAAGNKLTF

SEQ ID NO: 745546 - protein, 16 aa, Homo sapiens
  CDR3 for beta chain variable domain of TCR clone 372773 (TRBV7-6, TRBJ1-6)
CASSSLPAGEYAPLHF

SEQ ID NO: 745547 - protein, 16 aa, Homo sapiens
  CDR3 for alpha chain variable domain of TCR clone 372774 (TRAV13-1, TRAJ37)
CAASSLGSNNTGKLII

SEQ ID NO: 745548 - protein, 12 aa, Homo sapiens
  CDR3 for beta chain variable domain of TCR clone 372774 (TRBV6-1, TRBJ2-5)
CASSEGRETQYF

SEQ ID NO: 745549 - protein, 15 aa, Homo sapiens
  CDR3 for alpha chain variable domain of TCR clone 372775 (TRAV17, TRAJ57)
CATGTSQGGSEKLVL

SEQ ID NO: 745550 - protein, 16 aa, Homo sapiens
  CDR3 for beta chain variable domain of TCR clone 372775 (TRBV12-4, TRBJ1-5)
CASSRPVGGSNQPQHF

SEQ ID NO: 745551 - protein, 13 aa, Homo sapiens
  CDR3 for alpha chain variable domain of TCR clone 372776 (TRAV22, TRAJ29)
CAVGGPGNTPLVF

SEQ ID NO: 745552 - protein, 13 aa, Homo sapiens
  CDR3 for beta chain variable domain of TCR clone 372776 (TRBV19, TRBJ2-7)
CASRKAGGSEQYF

SEQ ID NO: 745553 - protein, 12 aa, Homo sapiens
  CDR3 for alpha chain variable domain of TCR clone 372777 (TRAV8-4, TRAJ37)
CAQSSNTGKLIF

SEQ ID NO: 745554 - protein, 15 aa, Homo sapiens
  CDR3 for beta chain variable domain of TCR clone 372777 (TRBV5-1, TRBJ2-3)
CASSYTSGSADTQYF

SEQ ID NO: 745555 - protein, 12 aa, Homo sapiens
  CDR3 for alpha chain variable domain of TCR clone 372778 (TRAV2, TRAJ9)
CPVGAGGFKTIF

SEQ ID NO: 745556 - protein, 16 aa, Homo sapiens
  CDR3 for beta chain variable domain of TCR clone 372778 (TRBV13, TRBJ2-2)
CASSPRTGEHTGELFF

SEQ ID NO: 745557 - protein, 13 aa, Homo sapiens
  CDR3 for alpha chain variable domain of TCR clone 372779 (TRAV13-2, TRAJ13)
CAERPGGYQKVTF

SEQ ID NO: 745558 - protein, 15 aa, Homo sapiens
  CDR3 for beta chain variable domain of TCR clone 372779 (TRBV4-1, TRBJ1-4)
CASSDTGGTNENLFF

SEQ ID NO: 745559 - protein, 14 aa, Homo sapiens
  CDR3 for alpha chain variable domain of TCR clone 372780 (TRAV12-2, TRAJ45)
CAVNIGGGADGLTF

SEQ ID NO: 745560 - protein, 17 aa, Homo sapiens
  CDR3 for beta chain variable domain of TCR clone 372780 (TRBV11-2, TRBJ2-6)
CASSQRDIFSGANVLTF

SEQ ID NO: 745561 - protein, 14 aa, Homo sapiens
  CDR3 for alpha chain variable domain of TCR clone 372781 (TRAV16, TRAJ16)
CALSVLSDVQKLLF

SEQ ID NO: 745562 - protein, 12 aa, Homo sapiens
  CDR3 for beta chain variable domain of TCR clone 372781 (TRBV5-5, TRBJ1-2)
CASSALNYGYTF

SEQ ID NO: 745563 - protein, 15 aa, Homo sapiens
  CDR3 for alpha chain variable domain of TCR clone 372782 (TRAV4, TRAJ39)
CLVGPNHNAGSMLTF

SEQ ID NO: 745564 - protein, 13 aa, Homo sapiens
  CDR3 for beta chain variable domain of TCR clone 372782 (TRBV11-2, TRBJ2-5)
CASSSTGEETQYF

SEQ ID NO: 745565 - protein, 12 aa, Homo sapiens
  CDR3 for alpha chain variable domain of TCR clone 372783 (TRAV13-1, TRAJ27)
CAAHTNAGKSTF

SEQ ID NO: 745566 - protein, 16 aa, Homo sapiens
  CDR3 for beta chain variable domain of TCR clone 372783 (TRBV7-8, TRBJ2-4)
CASSAERTLAKNIQYF

SEQ ID NO: 745567 - protein, 13 aa, Homo sapiens
  CDR3 for alpha chain variable domain of TCR clone 372784 (TRAV27, TRAJ16)
CAGACSDGKKLLF

SEQ ID NO: 745568 - protein, 14 aa, Homo sapiens
  CDR3 for beta chain variable domain of TCR clone 372784 (TRBV11-2, TRBJ1-3)
CASSLAVPGNTIYF

SEQ ID NO: 745569 - protein, 14 aa, Homo sapiens
  CDR3 for alpha chain variable domain of TCR clone 372785 (TRAV26-1, TRAJ21)
CIVRVVYNFNKFYF

SEQ ID NO: 745570 - protein, 11 aa, Homo sapiens
  CDR3 for beta chain variable domain of TCR clone 372785 (TRBV5-6, TRBJ2-5)
YASSLERTQYF

SEQ ID NO: 745571 - protein, 17 aa, Homo sapiens
  CDR3 for alpha chain variable domain of TCR clone 372786 (TRAV29/DV5, TRAJ52)
CAASARAGGTSYGKLTF

SEQ ID NO: 745572 - protein, 15 aa, Homo sapiens
  CDR3 for beta chain variable domain of TCR clone 372786 (TRBV7-9, TRBJ1-2)
CASSSFGDTNYGYTF

SEQ ID NO: 745573 - protein, 15 aa, Homo sapiens
  CDR3 for alpha chain variable domain of TCR clone 372787 (TRAV26-1, TRAJ39)
CIVRVASNAGNMLNF

SEQ ID NO: 745574 - protein, 14 aa, Homo sapiens
  CDR3 for beta chain variable domain of TCR clone 372787 (TRBV7-6, TRBJ2-3)
CASSVAGGTDTQYF

SEQ ID NO: 745575 - protein, 15 aa, Homo sapiens
  CDR3 for alpha chain variable domain of TCR clone 372788 (TRAV12-2, TRAJ53)
CAVHGGGGSNYKLTF

SEQ ID NO: 745576 - protein, 14 aa, Homo sapiens
  CDR3 for beta chain variable domain of TCR clone 372788 (TRBV4-1, TRBJ2-2)
CASSQAVNTGELFF

SEQ ID NO: 745577 - protein, 15 aa, Homo sapiens
  CDR3 for alpha chain variable domain of TCR clone 372789 (TRAV26-1, TRAJ29)
CIVRVEGSGNTPLVF

SEQ ID NO: 745578 - protein, 16 aa, Homo sapiens
  CDR3 for beta chain variable domain of TCR clone 372789 (TRBV18, TRBJ1-5)
CASSPSTGNSNQPQHF

SEQ ID NO: 745579 - protein, 10 aa, Homo sapiens
  CDR3 for alpha chain variable domain of TCR clone 372790 (TRAV9-2, TRAJ49)
RALTGNQFYF

SEQ ID NO: 745580 - protein, 16 aa, Homo sapiens
  CDR3 for beta chain variable domain of TCR clone 372790 (TRBV19, TRBJ2-3)
CASSPGAASRTDTQYF

SEQ ID NO: 745581 - protein, 13 aa, Homo sapiens
  CDR3 for alpha chain variable domain of TCR clone 372791 (TRAV13-2, TRAJ8)
CAFMNTGFQNLVF

SEQ ID NO: 745582 - protein, 15 aa, Homo sapiens
  CDR3 for beta chain variable domain of TCR clone 372791 (TRBV19, TRBJ2-3)
CAAGDTNAPNDTQYF

SEQ ID NO: 745583 - protein, 11 aa, Homo sapiens
  CDR3 for alpha chain variable domain of TCR clone 372792 (TRAV17, TRAJ9)
CGFTGGFKTIF

SEQ ID NO: 745584 - protein, 14 aa, Homo sapiens
  CDR3 for beta chain variable domain of TCR clone 372792 (TRBV7-9, TRBJ2-2)
CASSLFQDTGELFS

SEQ ID NO: 745585 - protein, 14 aa, Homo sapiens
  CDR3 for alpha chain variable domain of TCR clone 372793 (TRAV26-1, TRAJ49)
CIVRLTNTRNQFYF

SEQ ID NO: 745586 - protein, 13 aa, Homo sapiens
  CDR3 for beta chain variable domain of TCR clone 372793 (TRBV10-1, TRBJ1-1)
CASQGQTNTEAFF

SEQ ID NO: 745587 - protein, 14 aa, Homo sapiens
  CDR3 for alpha chain variable domain of TCR clone 372794 (TRAV23/DV6, TRAJ4)
CAAPSSGRYNKLIF

SEQ ID NO: 745588 - protein, 16 aa, Homo sapiens
  CDR3 for beta chain variable domain of TCR clone 372794 (TRBV19, TRBJ1-1)
CASRFGGPVTGTEAFF

SEQ ID NO: 745589 - protein, 15 aa, Homo sapiens
  CDR3 for alpha chain variable domain of TCR clone 372795 (TRAV8-3, TRAJ45)
CASSYSGGGSDGLTF

SEQ ID NO: 745590 - protein, 17 aa, Homo sapiens
  CDR3 for beta chain variable domain of TCR clone 372795 (TRBV7-8, TRBJ1-2)
CASSLRPRQGHLYGYTF

SEQ ID NO: 745591 - protein, 12 aa, Homo sapiens
  CDR3 for alpha chain variable domain of TCR clone 372796 (TRAV12-3, TRAJ17)
CAMTLTGNKLTF

SEQ ID NO: 745592 - protein, 13 aa, Homo sapiens
  CDR3 for beta chain variable domain of TCR clone 372796 (TRBV20-1, TRBJ2-5)
CSVTQGNEETQYF

SEQ ID NO: 745593 - protein, 13 aa, Homo sapiens
  CDR3 for alpha chain variable domain of TCR clone 372797 (TRAV38-2/DV8, TRAJ34)
CAYRTWNTDKLIF

SEQ ID NO: 745594 - protein, 12 aa, Homo sapiens
  CDR3 for beta chain variable domain of TCR clone 372797 (TRBV11-2, TRBJ1-2)
CASSREGDGYTF

SEQ ID NO: 745595 - protein, 14 aa, Homo sapiens
  CDR3 for alpha chain variable domain of TCR clone 372798 (TRAV12-2, TRAJ24)
CAVTPADSWGKLQF

SEQ ID NO: 745596 - protein, 17 aa, Homo sapiens
  CDR3 for beta chain variable domain of TCR clone 372798 (TRBV5-1, TRBJ2-5)
CASSPVALGQNQETQYF

SEQ ID NO: 745597 - protein, 16 aa, Homo sapiens
  CDR3 for alpha chain variable domain of TCR clone 372799 (TRAV8-3, TRAJ8)
CAVPRDGNTGFQKLVF

SEQ ID NO: 745598 - protein, 14 aa, Homo sapiens
  CDR3 for beta chain variable domain of TCR clone 372799 (TRBV11-1, TRBJ2-7)
CASSFRQGSYEQYF

SEQ ID NO: 745599 - protein, 11 aa, Homo sapiens
  CDR3 for alpha chain variable domain of TCR clone 372800 (TRAV21, TRAJ48)
CAVDGNEKVTF

SEQ ID NO: 745600 - protein, 16 aa, Homo sapiens
  CDR3 for beta chain variable domain of TCR clone 372800 (TRBV12-4, TRBJ1-5)
CASSSGPRGSNQPQHF

SEQ ID NO: 745601 - protein, 13 aa, Homo sapiens
  CDR3 for alpha chain variable domain of TCR clone 372801 (TRAV1-2, TRAJ9)
CAALNTGGFKTIF

SEQ ID NO: 745602 - protein, 15 aa, Homo sapiens
  CDR3 for beta chain variable domain of TCR clone 372801 (TRBV2, TRBJ2-3)
CASSGSGISTDTQYF

SEQ ID NO: 745603 - protein, 15 aa, Homo sapiens
  CDR3 for alpha chain variable domain of TCR clone 372802 (TRAV23/DV6, TRAJ13)
FAAWPGGGGYQKVTF

SEQ ID NO: 745604 - protein, 14 aa, Homo sapiens
  CDR3 for beta chain variable domain of TCR clone 372802 (TRBV6-1, TRBJ2-1)
CASAGGAIKNEQFF

SEQ ID NO: 745605 - protein, 13 aa, Homo sapiens
  CDR3 for alpha chain variable domain of TCR clone 372803 (TRAV2, TRAJ24)
CAVTTDSWGKLQF

SEQ ID NO: 745606 - protein, 14 aa, Homo sapiens
  CDR3 for beta chain variable domain of TCR clone 372803 (TRBV13, TRBJ2-5)
CASSLGLGQETQYF

SEQ ID NO: 745607 - protein, 12 aa, Homo sapiens
  CDR3 for alpha chain variable domain of TCR clone 372804 (TRAV25, TRAJ11)
CAGASGYSTLTF

SEQ ID NO: 745608 - protein, 13 aa, Homo sapiens
  CDR3 for beta chain variable domain of TCR clone 372804 (TRBV19, TRBJ1-5)
CASSIGGNQPQHF

SEQ ID NO: 745609 - protein, 13 aa, Homo sapiens
  CDR3 for alpha chain variable domain of TCR clone 372805 (TRAV12-2, TRAJ42)
CAVKRGSQGNLLF

SEQ ID NO: 745610 - protein, 13 aa, Homo sapiens
  CDR3 for beta chain variable domain of TCR clone 372805 (TRBV7-9, TRBJ2-3)
CASSPGSTDTQYF

SEQ ID NO: 745611 - protein, 15 aa, Homo sapiens
  CDR3 for alpha chain variable domain of TCR clone 372806 (TRAV12-1, TRAJ40)
CVVNMHFPGTYKYIF

SEQ ID NO: 745612 - protein, 13 aa, Homo sapiens
  CDR3 for beta chain variable domain of TCR clone 372806 (TRBV7-2, TRBJ2-1)
CASSLGVYNEQFF

SEQ ID NO: 745613 - protein, 15 aa, Homo sapiens
  CDR3 for alpha chain variable domain of TCR clone 372807 (TRAV4, TRAJ36)
CLVGDRQTGANNLFF

SEQ ID NO: 745614 - protein, 15 aa, Homo sapiens
  CDR3 for beta chain variable domain of TCR clone 372807 (TRBV7-6, TRBJ2-1)
CASSALAGEGNEQFF

SEQ ID NO: 745615 - protein, 17 aa, Homo sapiens
  CDR3 for alpha chain variable domain of TCR clone 372808 (TRAV3, TRAJ42)
CAVRDRDYGGSQGNLIF

SEQ ID NO: 745616 - protein, 14 aa, Homo sapiens
  CDR3 for beta chain variable domain of TCR clone 372808 (TRBV20-1, TRBJ2-1)
CSAQIGGSANEQFF

SEQ ID NO: 745617 - protein, 13 aa, Homo sapiens
  CDR3 for alpha chain variable domain of TCR clone 372809 (TRAV27, TRAJ42)
CAGARGSQGNLIF

SEQ ID NO: 745618 - protein, 15 aa, Homo sapiens
  CDR3 for beta chain variable domain of TCR clone 372809 (TRBV2, TRBJ2-1)
CASSELAGGHNEQFF

SEQ ID NO: 745619 - protein, 13 aa, Homo sapiens
  CDR3 for alpha chain variable domain of TCR clone 372810 (TRAV17, TRAJ34)
CATVPYNTDKLIF

SEQ ID NO: 745620 - protein, 10 aa, Homo sapiens
  CDR3 for beta chain variable domain of TCR clone 372810 (TRBV6-3, TRBJ2-7)
CASSSPGQFS

SEQ ID NO: 745621 - protein, 11 aa, Homo sapiens
  CDR3 for alpha chain variable domain of TCR clone 372811 (TRAV12-2, TRAJ30)
CAVGRDDKIIF

SEQ ID NO: 745622 - protein, 14 aa, Homo sapiens
  CDR3 for beta chain variable domain of TCR clone 372811 (TRBV2, TRBJ1-5)
CASSGTVSNQPQHF

SEQ ID NO: 745623 - protein, 16 aa, Homo sapiens
  CDR3 for alpha chain variable domain of TCR clone 372812 (TRAV16, TRAJ42)
CARKMNYGGSQGHLIF

SEQ ID NO: 745624 - protein, 13 aa, Homo sapiens
  CDR3 for beta chain variable domain of TCR clone 372812 (TRBV20-1, TRBJ2-7)
CSASPPAAYEQYF

SEQ ID NO: 745625 - protein, 13 aa, Homo sapiens
  CDR3 for alpha chain variable domain of TCR clone 372813 (TRAV3, TRAJ7)
CAVSSYGNNRLAF

SEQ ID NO: 745626 - protein, 17 aa, Homo sapiens
  CDR3 for beta chain variable domain of TCR clone 372813 (TRBV25-1, TRBJ1-1)
CASSEYSRTGSNTEAFF

SEQ ID NO: 745627 - protein, 14 aa, Homo sapiens
  CDR3 for alpha chain variable domain of TCR clone 372814 (TRAV23/DV6, TRAJ22)
CAASVSGSARQLTF

SEQ ID NO: 745628 - protein, 13 aa, Homo sapiens
  CDR3 for beta chain variable domain of TCR clone 372814 (TRBV5-1, TRBJ1-2)
CASSIDRPEGYTF

SEQ ID NO: 745629 - protein, 12 aa, Homo sapiens
  CDR3 for alpha chain variable domain of TCR clone 372815 (TRAV21, TRAJ13)
PGPSGGYQKVTF

SEQ ID NO: 745630 - protein, 16 aa, Homo sapiens
  CDR3 for beta chain variable domain of TCR clone 372815 (TRBV7-8, TRBJ2-2)
CASSLARTGVTGELFF

SEQ ID NO: 745631 - protein, 15 aa, Homo sapiens
  CDR3 for alpha chain variable domain of TCR clone 372816 (TRAV14/DV4, TRAJ26)
CAMREGQNYGQNFVF

SEQ ID NO: 745632 - protein, 15 aa, Homo sapiens
  CDR3 for beta chain variable domain of TCR clone 372816 (TRBV4-1, TRBJ2-5)
CASSQWDLYQETQYF

SEQ ID NO: 745633 - protein, 17 aa, Homo sapiens
  CDR3 for alpha chain variable domain of TCR clone 372817 (TRAV26-2, TRAJ42)
CILRDVGYGGSQGNLIF

SEQ ID NO: 745634 - protein, 16 aa, Homo sapiens
  CDR3 for beta chain variable domain of TCR clone 372817 (TRBV19, TRBJ2-2)
CASRSPGTGATGELFF

SEQ ID NO: 745635 - protein, 15 aa, Homo sapiens
  CDR3 for alpha chain variable domain of TCR clone 372818 (TRAV17, TRAJ56)
CATDAIPGANSKLTF

SEQ ID NO: 745636 - protein, 15 aa, Homo sapiens
  CDR3 for beta chain variable domain of TCR clone 372818 (TRBV6-3, TRBJ2-2)
CASSRFGGNAGELFF

SEQ ID NO: 745637 - protein, 13 aa, Homo sapiens
  CDR3 for alpha chain variable domain of TCR clone 372819 (TRAV12-3, TRAJ13)
CAMSSGGYQKVTF

SEQ ID NO: 745638 - protein, 14 aa, Homo sapiens
  CDR3 for beta chain variable domain of TCR clone 372819 (TRBV19, TRBJ2-1)
CASPTFVLSGEQFV

SEQ ID NO: 745639 - protein, 13 aa, Homo sapiens
  CDR3 for alpha chain variable domain of TCR clone 372820 (TRAV12-3, TRAJ5)
CAMIYTGRRALTF

SEQ ID NO: 745640 - protein, 16 aa, Homo sapiens
  CDR3 for beta chain variable domain of TCR clone 372820 (TRBV7-2, TRBJ2-7)
CASSLVMGVGSYEQYF

SEQ ID NO: 745641 - protein, 13 aa, Homo sapiens
  CDR3 for alpha chain variable domain of TCR clone 372821 (TRAV8-3, TRAJ28)
CAVGAVGSYQLTF

SEQ ID NO: 745642 - protein, 13 aa, Homo sapiens
  CDR3 for beta chain variable domain of TCR clone 372821 (TRBV4-2, TRBJ2-2)
CASEDRGTGELFF

SEQ ID NO: 745643 - protein, 17 aa, Homo sapiens
  CDR3 for alpha chain variable domain of TCR clone 372822 (TRAV23/DV6, TRAJ3)
CSNHFCFGWSSASKITF

SEQ ID NO: 745644 - protein, 15 aa, Homo sapiens
  CDR3 for beta chain variable domain of TCR clone 372822 (TRBV19, TRBJ1-6)
CASSTQGAVGSPLHF

SEQ ID NO: 745645 - protein, 12 aa, Homo sapiens
  CDR3 for alpha chain variable domain of TCR clone 372823 (TRAV12-1, TRAJ40)
CVVYSGTYKYIF

SEQ ID NO: 745646 - protein, 15 aa, Homo sapiens
  CDR3 for beta chain variable domain of TCR clone 372823 (TRBV4-1, TRBJ2-5)
CASSQWDLYQETQYF

SEQ ID NO: 745647 - protein, 23 aa, Homo sapiens
  CDR3 for alpha chain variable domain of TCR clone 372824 (TRAV1-2, TRAJ26)
CAVRDLITMVRILSLFPEPDCPF

SEQ ID NO: 745648 - protein, 15 aa, Homo sapiens
  CDR3 for beta chain variable domain of TCR clone 372824 (TRBV9, TRBJ1-6)
CASSVAGTGDSPLHF

SEQ ID NO: 745649 - protein, 14 aa, Homo sapiens
  CDR3 for alpha chain variable domain of TCR clone 372825 (TRAV38-1, TRAJ44)
CASLMGGTASKLTF

SEQ ID NO: 745650 - protein, 15 aa, Homo sapiens
  CDR3 for beta chain variable domain of TCR clone 372825 (TRBV4-2, TRBJ1-4)
CASSLVQREVEKLFF

SEQ ID NO: 745651 - protein, 13 aa, Homo sapiens
  CDR3 for alpha chain variable domain of TCR clone 372826 (TRAV1-2, TRAJ9)
CAALNTGGFKTIF

SEQ ID NO: 745652 - protein, 13 aa, Homo sapiens
  CDR3 for beta chain variable domain of TCR clone 372826 (TRBV7-9, TRBJ1-2)
CASSLKQNYRHTF

SEQ ID NO: 745653 - protein, 20 aa, Homo sapiens
  CDR3 for alpha chain variable domain of TCR clone 372827 (TRAV2, TRAJ9)
CAVGAGASKLSLEQEQDYLL

SEQ ID NO: 745654 - protein, 16 aa, Homo sapiens
  CDR3 for beta chain variable domain of TCR clone 372827 (TRBV24-1, TRBJ2-3)
CATSDRRQDLTDTQYF

SEQ ID NO: 745655 - protein, 15 aa, Homo sapiens
  CDR3 for alpha chain variable domain of TCR clone 372828 (TRAV8-3, TRAJ11)
CAVGLLNSGYSTLTF

SEQ ID NO: 745656 - protein, 13 aa, Homo sapiens
  CDR3 for beta chain variable domain of TCR clone 372828 (TRBV10-3, TRBJ1-2)
CAISERDSYGYTF

SEQ ID NO: 745657 - protein, 14 aa, Homo sapiens
  CDR3 for alpha chain variable domain of TCR clone 372829 (TRAV17, TRAJ56)
CATVPAGANSKLTF

SEQ ID NO: 745658 - protein, 13 aa, Homo sapiens
  CDR3 for beta chain variable domain of TCR clone 372829 (TRBV12-4, TRBJ2-2)
CASSITGSGELVF

SEQ ID NO: 745659 - protein, 12 aa, Homo sapiens
  CDR3 for alpha chain variable domain of TCR clone 372830 (TRAV17, TRAJ57)
CATDGGSEKLVF

SEQ ID NO: 745660 - protein, 13 aa, Homo sapiens
  CDR3 for beta chain variable domain of TCR clone 372830 (TRBV14, TRBJ1-6)
CASSQSIYSPLHF

SEQ ID NO: 745661 - protein, 15 aa, Homo sapiens
  CDR3 for alpha chain variable domain of TCR clone 372831 (TRAV13-1, TRAJ57)
CAASNTQGGSEELVF

SEQ ID NO: 745662 - protein, 16 aa, Homo sapiens
  CDR3 for beta chain variable domain of TCR clone 372831 (TRBV19, TRBJ2-1)
CASSKAGPSSYNEQFF

SEQ ID NO: 745663 - protein, 13 aa, Homo sapiens
  CDR3 for alpha chain variable domain of TCR clone 372832 (TRAV38-1, TRAJ42)
CARWGGSQGDLIF

SEQ ID NO: 745664 - protein, 10 aa, Homo sapiens
  CDR3 for beta chain variable domain of TCR clone 372832 (TRBV2, TRBJ2-5)
CASSAATQYF

SEQ ID NO: 745665 - protein, 13 aa, Homo sapiens
  CDR3 for alpha chain variable domain of TCR clone 372833 (TRAV20, TRAJ48)
CALQGVGNKKLTF

SEQ ID NO: 745666 - protein, 14 aa, Homo sapiens
  CDR3 for beta chain variable domain of TCR clone 372833 (TRBV27, TRBJ2-7)
CASSFRDGPYEQYF

SEQ ID NO: 745667 - protein, 15 aa, Homo sapiens
  CDR3 for alpha chain variable domain of TCR clone 372834 (TRAV14/DV4, TRAJ33)
CAMREGRDSNYQLIW

SEQ ID NO: 745668 - protein, 15 aa, Homo sapiens
  CDR3 for beta chain variable domain of TCR clone 372834 (TRBV5-5, TRBJ1-5)
CASSSTPGGNQPQHF

SEQ ID NO: 745669 - protein, 16 aa, Homo sapiens
  CDR3 for alpha chain variable domain of TCR clone 372835 (TRAV12-2, TRAJ18)
CAVTTDRGSTLGRLYF

SEQ ID NO: 745670 - protein, 12 aa, Homo sapiens
  CDR3 for beta chain variable domain of TCR clone 372835 (TRBV7-9, TRBJ2-7)
CASSLEGYEQYF

SEQ ID NO: 745671 - protein, 18 aa, Homo sapiens
  CDR3 for alpha chain variable domain of TCR clone 372836 (TRAV21, TRAJ52)
CAVRPSPAGGTSYGKLTF

SEQ ID NO: 745672 - protein, 15 aa, Homo sapiens
  CDR3 for beta chain variable domain of TCR clone 372836 (TRBV6-4, TRBJ2-1)
CASSDSTGGYNEQFF

SEQ ID NO: 745673 - protein, 11 aa, Homo sapiens
  CDR3 for alpha chain variable domain of TCR clone 372837 (TRAV13-2, TRAJ36)
CAETGANNLFF

SEQ ID NO: 745674 - protein, 13 aa, Homo sapiens
  CDR3 for beta chain variable domain of TCR clone 372837 (TRBV7-9, TRBJ2-4)
CATEGLAGNIQHF

SEQ ID NO: 745675 - protein, 20 aa, Homo sapiens
  CDR3 for alpha chain variable domain of TCR clone 372838 (TRAV13-1, )
CAASPMDIQNPDPAVYQLRD

SEQ ID NO: 745676 - protein, 13 aa, Homo sapiens
  CDR3 for beta chain variable domain of TCR clone 372838 (TRBV20-1, TRBJ2-2)
CSASAAGTGELFI

SEQ ID NO: 745677 - protein, 11 aa, Homo sapiens
  CDR3 for alpha chain variable domain of TCR clone 372839 (TRAV3, TRAJ21)
CAVGNFNKFYF

SEQ ID NO: 745678 - protein, 13 aa, Homo sapiens
  CDR3 for beta chain variable domain of TCR clone 372839 (TRBV19, TRBJ2-2)
CASSPLGIGELFF

SEQ ID NO: 745679 - protein, 12 aa, Homo sapiens
  CDR3 for alpha chain variable domain of TCR clone 372840 (TRAV29/DV5, TRAJ49)
CAATDTGNQFYF

SEQ ID NO: 745680 - protein, 16 aa, Homo sapiens
  CDR3 for beta chain variable domain of TCR clone 372840 (TRBV27, TRBJ2-5)
CASSSQTSGFQETQYF

SEQ ID NO: 745681 - protein, 13 aa, Homo sapiens
  CDR3 for alpha chain variable domain of TCR clone 372841 (TRAV8-4, TRAJ34)
CAVTLYDTDKLIF

SEQ ID NO: 745682 - protein, 17 aa, Homo sapiens
  CDR3 for beta chain variable domain of TCR clone 372841 (TRBV7-2, TRBJ2-2)
CASSPSWRGGGTGELFF

SEQ ID NO: 745683 - protein, 15 aa, Homo sapiens
  CDR3 for alpha chain variable domain of TCR clone 372842 (TRAV27, TRAJ38)
CAARRNAGNNRRRIW

SEQ ID NO: 745684 - protein, 13 aa, Homo sapiens
  CDR3 for beta chain variable domain of TCR clone 372842 (TRBV28, TRBJ2-5)
CAGVSRGEETQYF

SEQ ID NO: 745685 - protein, 14 aa, Homo sapiens
  CDR3 for alpha chain variable domain of TCR clone 372843 (TRAV16, TRAJ54)
CALSLIQGAQKLVF

SEQ ID NO: 745686 - protein, 18 aa, Homo sapiens
  CDR3 for beta chain variable domain of TCR clone 372843 (TRBV7-9, TRBJ2-7)
CASSLTTSGSRTWYEQYF

SEQ ID NO: 745687 - protein, 15 aa, Homo sapiens
  CDR3 for alpha chain variable domain of TCR clone 372844 (TRAV34, TRAJ38)
SGADFTPGNNRKLIW

SEQ ID NO: 745688 - protein, 12 aa, Homo sapiens
  CDR3 for beta chain variable domain of TCR clone 372844 (TRBV7-9, TRBJ2-7)
CATRTDAYEQYF

SEQ ID NO: 745689 - protein, 13 aa, Homo sapiens
  CDR3 for alpha chain variable domain of TCR clone 372845 (TRAV2, TRAJ40)
CAVVSSGTYKYIF

SEQ ID NO: 745690 - protein, 16 aa, Homo sapiens
  CDR3 for beta chain variable domain of TCR clone 372845 (TRBV7-9, TRBJ1-3)
CASSLGAGSSGNTIYF

SEQ ID NO: 745691 - protein, 12 aa, Homo sapiens
  CDR3 for alpha chain variable domain of TCR clone 372846 (TRAV27, TRAJ22)
CAGDGAGVEIGF

SEQ ID NO: 745692 - protein, 17 aa, Homo sapiens
  CDR3 for beta chain variable domain of TCR clone 372846 (TRBV5-5, TRBJ1-1)
CASSLRFRGLMNTEAFF

SEQ ID NO: 745693 - protein, 14 aa, Homo sapiens
  CDR3 for alpha chain variable domain of TCR clone 372847 (TRAV13-1, TRAJ35)
CTASKGGFGNVLNC

SEQ ID NO: 745694 - protein, 13 aa, Homo sapiens
  CDR3 for beta chain variable domain of TCR clone 372847 (TRBV7-3, TRBJ1-1)
CASSQDWGAEAFF

SEQ ID NO: 745695 - protein, 13 aa, Homo sapiens
  CDR3 for alpha chain variable domain of TCR clone 372848 (TRAV12-1, TRAJ33)
CGDAPDSNYQLIW

SEQ ID NO: 745696 - protein, 15 aa, Homo sapiens
  CDR3 for beta chain variable domain of TCR clone 372848 (TRBV19, TRBJ2-1)
CASSIGLAGWDEQFF

SEQ ID NO: 745697 - protein, 16 aa, Homo sapiens
  CDR3 for alpha chain variable domain of TCR clone 372849 (TRAV8-3, TRAJ10)
CAVGPILTGGGNKLTF

SEQ ID NO: 745698 - protein, 16 aa, Homo sapiens
  CDR3 for beta chain variable domain of TCR clone 372849 (TRBV7-2, TRBJ2-5)
CANSSKWLSGQETQYF

SEQ ID NO: 745699 - protein, 11 aa, Homo sapiens
  CDR3 for alpha chain variable domain of TCR clone 372850 (TRAV2, TRAJ33)
CAVESNYQLIW

SEQ ID NO: 745700 - protein, 16 aa, Homo sapiens
  CDR3 for beta chain variable domain of TCR clone 372850 (TRBV7-2, TRBJ2-5)
CASSYKTGISLETQYF

SEQ ID NO: 745701 - protein, 19 aa, Homo sapiens
  CDR3 for alpha chain variable domain of TCR clone 372851 (TRAV26-1, TRAJ52)
CIVRAHRNAGGTSYGKLTF

SEQ ID NO: 745702 - protein, 15 aa, Homo sapiens
  CDR3 for beta chain variable domain of TCR clone 372851 (TRBV29-1, TRBJ2-1)
CSVRDRKSSYNEQFF

SEQ ID NO: 745703 - protein, 15 aa, Homo sapiens
  CDR3 for alpha chain variable domain of TCR clone 372852 (TRAV3, TRAJ37)
CCERKGVCNTGKLIF

SEQ ID NO: 745704 - protein, 15 aa, Homo sapiens
  CDR3 for beta chain variable domain of TCR clone 372852 (TRBV7-9, TRBJ1-6)
CASSSPGLGNSPLHF

SEQ ID NO: 745705 - protein, 14 aa, Homo sapiens
  CDR3 for alpha chain variable domain of TCR clone 372853 (TRAV23/DV6, TRAJ40)
CAASLTSGTYKYIF

SEQ ID NO: 745706 - protein, 15 aa, Homo sapiens
  CDR3 for beta chain variable domain of TCR clone 372853 (TRBV5-1, TRBJ2-3)
CASSVTSGSTDTQYF

SEQ ID NO: 745707 - protein, 12 aa, Homo sapiens
  CDR3 for alpha chain variable domain of TCR clone 372854 (TRAV30, TRAJ39)
CGRGNAGNMLTF

SEQ ID NO: 745708 - protein, 16 aa, Homo sapiens
  CDR3 for beta chain variable domain of TCR clone 372854 (TRBV20-1, TRBJ1-4)
CSAPGQGLLTNEKLFF

SEQ ID NO: 745709 - protein, 13 aa, Homo sapiens
  CDR3 for alpha chain variable domain of TCR clone 372855 (TRAV27, TRAJ29)
CAGAHSGNTPLDF

SEQ ID NO: 745710 - protein, 14 aa, Homo sapiens
  CDR3 for beta chain variable domain of TCR clone 372855 (TRBV7-9, TRBJ2-7)
CASSIGQGAGEQYF

SEQ ID NO: 745711 - protein, 15 aa, Homo sapiens
  CDR3 for alpha chain variable domain of TCR clone 372856 (TRAV8-6, TRAJ38)
CAVSSNAGNNRKLIR

SEQ ID NO: 745712 - protein, 14 aa, Homo sapiens
  CDR3 for beta chain variable domain of TCR clone 372856 (TRBV14, TRBJ2-1)
CASSQVQGRGEQFF

SEQ ID NO: 745713 - protein, 14 aa, Homo sapiens
  CDR3 for alpha chain variable domain of TCR clone 372857 (TRAV1-2, TRAJ17)
CSLRRGAAGNKLTF

SEQ ID NO: 745714 - protein, 13 aa, Homo sapiens
  CDR3 for beta chain variable domain of TCR clone 372857 (TRBV9, TRBJ2-1)
CASSVGQGGEQFF

SEQ ID NO: 745715 - protein, 14 aa, Homo sapiens
  CDR3 for alpha chain variable domain of TCR clone 372858 (TRAV12-3, TRAJ10)
SHLPLTGGGNKLTF

SEQ ID NO: 745716 - protein, 11 aa, Homo sapiens
  CDR3 for beta chain variable domain of TCR clone 372858 (TRBV6-1, TRBJ2-1)
CASISSNEQFF

SEQ ID NO: 745717 - protein, 20 aa, Homo sapiens
  CDR3 for alpha chain variable domain of TCR clone 372859 (TRAV30, TRAJ54)
SAAQSRSETQVVQGAQKLVF

SEQ ID NO: 745718 - protein, 14 aa, Homo sapiens
  CDR3 for beta chain variable domain of TCR clone 372859 (TRBV12-5, TRBJ2-5)
CASGSRTHQETQYF

SEQ ID NO: 745719 - protein, 14 aa, Homo sapiens
  CDR3 for alpha chain variable domain of TCR clone 372860 (TRAV16, TRAJ44)
CALSATGTASKLTF

SEQ ID NO: 745720 - protein, 14 aa, Homo sapiens
  CDR3 for beta chain variable domain of TCR clone 372860 (TRBV20-1, TRBJ2-7)
CSAISREASYEQYF

SEQ ID NO: 745721 - protein, 12 aa, Homo sapiens
  CDR3 for alpha chain variable domain of TCR clone 372861 (TRAV12-2, TRAJ31)
CAVKGYNARLMF

SEQ ID NO: 745722 - protein, 18 aa, Homo sapiens
  CDR3 for beta chain variable domain of TCR clone 372861 (TRBV6-6, TRBJ1-3)
CASSYSKWDSISGNTIYF

SEQ ID NO: 745723 - protein, 13 aa, Homo sapiens
  CDR3 for alpha chain variable domain of TCR clone 372862 (TRAV17, TRAJ40)
CATRSPGTYKYIF

SEQ ID NO: 745724 - protein, 13 aa, Homo sapiens
  CDR3 for beta chain variable domain of TCR clone 372862 (TRBV2, TRBJ1-5)
CATAGPGNQTQHL

SEQ ID NO: 745725 - protein, 15 aa, Homo sapiens
  CDR3 for alpha chain variable domain of TCR clone 372863 (TRAV1-1, TRAJ23)
CAVREGDNQGGRLIF

SEQ ID NO: 745726 - protein, 14 aa, Homo sapiens
  CDR3 for beta chain variable domain of TCR clone 372863 (TRBV6-1, TRBJ1-3)
CASVQGGGGNTIYF

SEQ ID NO: 745727 - protein, 14 aa, Homo sapiens
  CDR3 for alpha chain variable domain of TCR clone 372864 (TRAV12-2, TRAJ45)
CAVNIGGGADGLTF

SEQ ID NO: 745728 - protein, 14 aa, Homo sapiens
  CDR3 for beta chain variable domain of TCR clone 372864 (TRBV5-1, TRBJ2-7)
CASSRGESLYEQYF

SEQ ID NO: 745729 - protein, 15 aa, Homo sapiens
  CDR3 for alpha chain variable domain of TCR clone 372865 (TRAV26-1, TRAJ48)
CIVRVGDFGNEKLTF

SEQ ID NO: 745730 - protein, 16 aa, Homo sapiens
  CDR3 for beta chain variable domain of TCR clone 372865 (TRBV4-1, TRBJ2-3)
CASSQRAGGRTDTQYF

SEQ ID NO: 745731 - protein, 16 aa, Homo sapiens
  CDR3 for alpha chain variable domain of TCR clone 372866 (TRAV30, TRAJ24)
CGTGTVDADSWGKFQF

SEQ ID NO: 745732 - protein, 15 aa, Homo sapiens
  CDR3 for beta chain variable domain of TCR clone 372866 (TRBV5-7, TRBJ2-7)
CASSGGRPVPYEQYF

SEQ ID NO: 745733 - protein, 14 aa, Homo sapiens
  CDR3 for alpha chain variable domain of TCR clone 372867 (TRAV23/DV6, TRAJ40)
CAARKNSGTYKYIF

SEQ ID NO: 745734 - protein, 14 aa, Homo sapiens
  CDR3 for beta chain variable domain of TCR clone 372867 (TRBV10-3, TRBJ2-5)
CALRARDYQETQYF

SEQ ID NO: 745735 - protein, 12 aa, Homo sapiens
  CDR3 for alpha chain variable domain of TCR clone 372868 (TRAV3, TRAJ34)
CAVSSYTDKLIF

SEQ ID NO: 745736 - protein, 15 aa, Homo sapiens
  CDR3 for beta chain variable domain of TCR clone 372868 (TRBV6-5, TRBJ2-1)
CASSYDAGAGNEQFF

SEQ ID NO: 745737 - protein, 11 aa, Homo sapiens
  CDR3 for alpha chain variable domain of TCR clone 372869 (TRAV2, TRAJ33)
CAADSNYQLIW

SEQ ID NO: 745738 - protein, 13 aa, Homo sapiens
  CDR3 for beta chain variable domain of TCR clone 372869 (TRBV7-2, TRBJ2-7)
CASSSPSGSEQYF

SEQ ID NO: 745739 - protein, 13 aa, Homo sapiens
  CDR3 for alpha chain variable domain of TCR clone 372870 (TRAV1-1, TRAJ9)
CAAKNTGGFKTIF

SEQ ID NO: 745740 - protein, 14 aa, Homo sapiens
  CDR3 for beta chain variable domain of TCR clone 372870 (TRBV19, TRBJ2-2)
CASTVTANTGELFF

SEQ ID NO: 745741 - protein, 15 aa, Homo sapiens
  CDR3 for alpha chain variable domain of TCR clone 372871 (TRAV26-1, TRAJ22)
CIVRVSFWFCKATDL

SEQ ID NO: 745742 - protein, 18 aa, Homo sapiens
  CDR3 for beta chain variable domain of TCR clone 372871 (TRBV27, TRBJ2-1)
CASTSGTSGKAAYNEQFF

SEQ ID NO: 745743 - protein, 13 aa, Homo sapiens
  CDR3 for alpha chain variable domain of TCR clone 372872 (TRAV8-6, TRAJ49)
CAVITNTGNQFYF

SEQ ID NO: 745744 - protein, 15 aa, Homo sapiens
  CDR3 for beta chain variable domain of TCR clone 372872 (TRBV5-1, TRBJ2-7)
CASSRGESLYEQYFG

SEQ ID NO: 745745 - protein, 18 aa, Homo sapiens
  CDR3 for alpha chain variable domain of TCR clone 372873 (TRAV26-2, TRAJ54)
CILRDVEVGIQGAQKLVF

SEQ ID NO: 745746 - protein, 15 aa, Homo sapiens
  CDR3 for beta chain variable domain of TCR clone 372873 (TRBV4-1, TRBJ2-5)
CASSQWDLYQETQYF

SEQ ID NO: 745747 - protein, 17 aa, Homo sapiens
  CDR3 for alpha chain variable domain of TCR clone 372874 (TRAV26-1, TRAJ53)
CIVRVDNSGGSNYKLTF

SEQ ID NO: 745748 - protein, 15 aa, Homo sapiens
  CDR3 for beta chain variable domain of TCR clone 372874 (TRBV20-1, TRBJ2-7)
CSARVPAAYFYEQYF

SEQ ID NO: 745749 - protein, 16 aa, Homo sapiens
  CDR3 for alpha chain variable domain of TCR clone 372875 (TRAV3, TRAJ10)
RAVRDMRAGGGNKLTF

SEQ ID NO: 745750 - protein, 16 aa, Homo sapiens
  CDR3 for beta chain variable domain of TCR clone 372875 (TRBV12-4, TRBJ1-5)
CASNRPVGGSNQPQHF

SEQ ID NO: 745751 - protein, 16 aa, Homo sapiens
  CDR3 for alpha chain variable domain of TCR clone 372876 (TRAV16, TRAJ4)
CALSRMFSGGYNKLIF

SEQ ID NO: 745752 - protein, 13 aa, Homo sapiens
  CDR3 for beta chain variable domain of TCR clone 372876 (TRBV19, TRBJ1-3)
CASRLSLGNTIYF

SEQ ID NO: 745753 - protein, 12 aa, Homo sapiens
  CDR3 for alpha chain variable domain of TCR clone 372877 (TRAV16, TRAJ56)
CAPTGANSKLTF

SEQ ID NO: 745754 - protein, 17 aa, Homo sapiens
  CDR3 for beta chain variable domain of TCR clone 372877 (TRBV27, TRBJ2-6)
CANSLTGFASGANVLTF

SEQ ID NO: 745755 - protein, 14 aa, Homo sapiens
  CDR3 for alpha chain variable domain of TCR clone 372878 (TRAV1-2, TRAJ16)
CAVNRFSDGQKLLF

SEQ ID NO: 745756 - protein, 18 aa, Homo sapiens
  CDR3 for beta chain variable domain of TCR clone 372878 (TRBV7-2, TRBJ2-3)
CQQLPSRNWGGGTDTQYF

SEQ ID NO: 745757 - protein, 13 aa, Homo sapiens
  CDR3 for alpha chain variable domain of TCR clone 372879 (TRAV2, TRAJ40)
CAVVNSGTYKYIF

SEQ ID NO: 745758 - protein, 15 aa, Homo sapiens
  CDR3 for beta chain variable domain of TCR clone 372879 (TRBV11-3, TRBJ2-3)
CASLEDGREGDTQYF

SEQ ID NO: 745759 - protein, 14 aa, Homo sapiens
  CDR3 for alpha chain variable domain of TCR clone 372880 (TRAV13-2, TRAJ9)
CAENSCTGGFKTIF

SEQ ID NO: 745760 - protein, 13 aa, Homo sapiens
  CDR3 for beta chain variable domain of TCR clone 372880 (TRBV19, TRBJ2-7)
CASSIDRTYEQYF

SEQ ID NO: 745761 - protein, 18 aa, Homo sapiens
  CDR3 for alpha chain variable domain of TCR clone 372881 (TRAV26-2, TRAJ54)
CILRDVEVGIQGAQKLVF

SEQ ID NO: 745762 - protein, 16 aa, Homo sapiens
  CDR3 for beta chain variable domain of TCR clone 372881 (TRBV12-4, TRBJ2-5)
CASSFFVRGRQETQYF

SEQ ID NO: 745763 - protein, 15 aa, Homo sapiens
  CDR3 for alpha chain variable domain of TCR clone 372882 (TRAV3, TRAJ22)
CAVRDRGGSARQLTF

SEQ ID NO: 745764 - protein, 13 aa, Homo sapiens
  CDR3 for beta chain variable domain of TCR clone 372882 (TRBV29-1, TRBJ2-5)
CSVLLASGETQYF

SEQ ID NO: 745765 - protein, 12 aa, Homo sapiens
  CDR3 for alpha chain variable domain of TCR clone 372883 (TRAV3, TRAJ43)
CAVRDPNNDMRF

SEQ ID NO: 745766 - protein, 15 aa, Homo sapiens
  CDR3 for beta chain variable domain of TCR clone 372883 (TRBV28, TRBJ2-1)
CASSIIAGGRSEQFF

SEQ ID NO: 745767 - protein, 12 aa, Homo sapiens
  CDR3 for alpha chain variable domain of TCR clone 372884 (TRAV12-3, TRAJ17)
CAMTLTGNKITF

SEQ ID NO: 745768 - protein, 15 aa, Homo sapiens
  CDR3 for beta chain variable domain of TCR clone 372884 (TRBV11-2, TRBJ2-2)
CASSSVMVNAGELFF

SEQ ID NO: 745769 - protein, 15 aa, Homo sapiens
  CDR3 for alpha chain variable domain of TCR clone 372885 (TRAV2, TRAJ9)
CAVEDRGTGGIKTIF

SEQ ID NO: 745770 - protein, 16 aa, Homo sapiens
  CDR3 for beta chain variable domain of TCR clone 372885 (TRBV24-1, TRBJ2-3)
CATSDPGTGATDTQYF

SEQ ID NO: 745771 - protein, 21 aa, Homo sapiens
  CDR3 for alpha chain variable domain of TCR clone 372886 (TRAV1-2, TRAJ9)
CAALNTGGFKTILEQEQDYLL

SEQ ID NO: 745772 - protein, 14 aa, Homo sapiens
  CDR3 for beta chain variable domain of TCR clone 372886 (TRBV25-1, TRBJ1-1)
CASTPLGGNTEAFF

SEQ ID NO: 745773 - protein, 17 aa, Homo sapiens
  CDR3 for alpha chain variable domain of TCR clone 372887 (TRAV3, TRAJ6)
CAVRDGPRAGGSYIPTF

SEQ ID NO: 745774 - protein, 15 aa, Homo sapiens
  CDR3 for beta chain variable domain of TCR clone 372887 (TRBV4-1, TRBJ2-1)
CASSQGGELYNEQFF

SEQ ID NO: 745775 - protein, 12 aa, Homo sapiens
  CDR3 for alpha chain variable domain of TCR clone 372888 (TRAV12-3, TRAJ39)
CAMTQAGNMITF

SEQ ID NO: 745776 - protein, 12 aa, Homo sapiens
  CDR3 for beta chain variable domain of TCR clone 372888 (TRBV4-1, TRBJ2-3)
CASSQGTDTQYF

SEQ ID NO: 745777 - protein, 14 aa, Homo sapiens
  CDR3 for alpha chain variable domain of TCR clone 372889 (TRAV1-2, TRAJ8)
CALREDTGFQKLVF

SEQ ID NO: 745778 - protein, 14 aa, Homo sapiens
  CDR3 for beta chain variable domain of TCR clone 372889 (TRBV5-4, TRBJ1-1)
CASSLDSRRDEAFF

SEQ ID NO: 745779 - protein, 16 aa, Homo sapiens
  CDR3 for alpha chain variable domain of TCR clone 372890 (TRAV1-2, TRAJ10)
CAVRGVLTGGGNKLTF

SEQ ID NO: 745780 - protein, 16 aa, Homo sapiens
  CDR3 for beta chain variable domain of TCR clone 372890 (TRBV10-3, TRBJ2-1)
CAISGVGDGGGGEQFF

SEQ ID NO: 745781 - protein, 12 aa, Homo sapiens
  CDR3 for alpha chain variable domain of TCR clone 372891 (TRAV8-1, TRAJ31)
CAVINNNARLMF

SEQ ID NO: 745782 - protein, 13 aa, Homo sapiens
  CDR3 for beta chain variable domain of TCR clone 372891 (TRBV20-1, TRBJ1-1)
CSARGGGNTEAFF

SEQ ID NO: 745783 - protein, 16 aa, Homo sapiens
  CDR3 for alpha chain variable domain of TCR clone 372892 (TRAV21, TRAJ37)
CAVRTAGSSNTGKLIF

SEQ ID NO: 745784 - protein, 14 aa, Homo sapiens
  CDR3 for beta chain variable domain of TCR clone 372892 (TRBV9, TRBJ2-5)
CASSVDGAGETQYF

SEQ ID NO: 745785 - protein, 13 aa, Homo sapiens
  CDR3 for alpha chain variable domain of TCR clone 372893 (TRAV21, TRAJ27)
CAARPGNAGKSTF

SEQ ID NO: 745786 - protein, 16 aa, Homo sapiens
  CDR3 for beta chain variable domain of TCR clone 372893 (TRBV20-1, TRBJ1-2)
CSDSMGQGVANYGYTF

SEQ ID NO: 745787 - protein, 11 aa, Homo sapiens
  CDR3 for alpha chain variable domain of TCR clone 372894 (TRAV17, TRAJ31)
CATDRTARLMF

SEQ ID NO: 745788 - protein, 14 aa, Homo sapiens
  CDR3 for beta chain variable domain of TCR clone 372894 (TRBV4-2, TRBJ2-3)
CASSQERGTDTHYF

SEQ ID NO: 745789 - protein, 17 aa, Homo sapiens
  CDR3 for alpha chain variable domain of TCR clone 372895 (TRAV1-2, TRAJ6)
CAVRDTTRTGGSYIPTF

SEQ ID NO: 745790 - protein, 15 aa, Homo sapiens
  CDR3 for beta chain variable domain of TCR clone 372895 (TRBV7-9, TRBJ1-1)
CASSLLEQGGTEAFF

SEQ ID NO: 745791 - protein, 16 aa, Homo sapiens
  CDR3 for alpha chain variable domain of TCR clone 372896 (TRAV3, TRAJ37)
CAVRGKGSGNTGKLTF

SEQ ID NO: 745792 - protein, 15 aa, Homo sapiens
  CDR3 for beta chain variable domain of TCR clone 372896 (TRBV5-1, TRBJ2-7)
CASSLNGGPAREQYF

SEQ ID NO: 745793 - protein, 16 aa, Homo sapiens
  CDR3 for alpha chain variable domain of TCR clone 372897 (TRAV17, TRAJ35)
CATAEGGIGFGNVLHC

SEQ ID NO: 745794 - protein, 13 aa, Homo sapiens
  CDR3 for beta chain variable domain of TCR clone 372897 (TRBV12-4, TRBJ2-5)
CASRLAVQETQYF

SEQ ID NO: 745795 - protein, 14 aa, Homo sapiens
  CDR3 for alpha chain variable domain of TCR clone 372898 (TRAV9-2, TRAJ39)
CALYIYNAGNMLPF

SEQ ID NO: 745796 - protein, 13 aa, Homo sapiens
  CDR3 for beta chain variable domain of TCR clone 372898 (TRBV7-9, TRBJ1-2)
CASSLKQNYGYTF

SEQ ID NO: 745797 - protein, 12 aa, Homo sapiens
  CDR3 for alpha chain variable domain of TCR clone 372899 (TRAV12-3, TRAJ33)
CAFMDSNYQLIW

SEQ ID NO: 745798 - protein, 13 aa, Homo sapiens
  CDR3 for beta chain variable domain of TCR clone 372899 (TRBV3-1, TRBJ1-1)
CASSPGVITEAFF

SEQ ID NO: 745799 - protein, 16 aa, Homo sapiens
  CDR3 for alpha chain variable domain of TCR clone 372900 (TRAV12-3, TRAJ53)
CAMSPGSGGSNYKLTF

SEQ ID NO: 745800 - protein, 15 aa, Homo sapiens
  CDR3 for beta chain variable domain of TCR clone 372900 (TRBV7-3, TRBJ2-1)
CASSLTSGSYNEQFF

SEQ ID NO: 745801 - protein, 17 aa, Homo sapiens
  CDR3 for alpha chain variable domain of TCR clone 372901 (TRAV17, TRAJ4)
CFLLLCYGRGGYNKLIF

SEQ ID NO: 745802 - protein, 16 aa, Homo sapiens
  CDR3 for beta chain variable domain of TCR clone 372901 (TRBV19, TRBJ2-2)
CASRSPGTGATGELFF

SEQ ID NO: 745803 - protein, 16 aa, Homo sapiens
  CDR3 for alpha chain variable domain of TCR clone 372902 (TRAV30, TRAJ24)
CGTEIVDADSWGKFQF

SEQ ID NO: 745804 - protein, 14 aa, Homo sapiens
  CDR3 for beta chain variable domain of TCR clone 372902 (TRBV12-4, TRBJ1-4)
CASSRQGANEKLFF

SEQ ID NO: 745805 - protein, 16 aa, Homo sapiens
  CDR3 for alpha chain variable domain of TCR clone 372903 (TRAV30, TRAJ24)
RGTEIVDADSWGKFQF

SEQ ID NO: 745806 - protein, 15 aa, Homo sapiens
  CDR3 for beta chain variable domain of TCR clone 372903 (TRBV20-1, TRBJ2-4)
RSARDLTGGPNIQYF

SEQ ID NO: 745807 - protein, 16 aa, Homo sapiens
  CDR3 for alpha chain variable domain of TCR clone 372904 (TRAV38-1, TRAJ56)
CAFMKRQTGANSKLTF

SEQ ID NO: 745808 - protein, 16 aa, Homo sapiens
  CDR3 for beta chain variable domain of TCR clone 372904 (TRBV7-3, TRBJ2-3)
CASSLSGYRPEDTQYF

SEQ ID NO: 745809 - protein, 16 aa, Homo sapiens
  CDR3 for alpha chain variable domain of TCR clone 372905 (TRAV1-2, TRAJ10)
CAVRGVLTGGGNKLTF

SEQ ID NO: 745810 - protein, 13 aa, Homo sapiens
  CDR3 for beta chain variable domain of TCR clone 372905 (TRBV7-3, TRBJ2-5)
CASSFRGGETQYF

SEQ ID NO: 745811 - protein, 17 aa, Homo sapiens
  CDR3 for alpha chain variable domain of TCR clone 372906 (TRAV35, TRAJ47)
GLLDCRTHTEYGNKLVC

SEQ ID NO: 745812 - protein, 11 aa, Homo sapiens
  CDR3 for beta chain variable domain of TCR clone 372906 (TRBV29-1, TRBJ1-1)
CSVEVGTRTFF

SEQ ID NO: 745813 - protein, 13 aa, Homo sapiens
  CDR3 for alpha chain variable domain of TCR clone 372907 (TRAV2, TRAJ21)
CAVEDLNFNKFYF

SEQ ID NO: 745814 - protein, 13 aa, Homo sapiens
  CDR3 for beta chain variable domain of TCR clone 372907 (TRBV11-2, TRBJ2-1)
CASSLGLAGGRFF

SEQ ID NO: 745815 - protein, 12 aa, Homo sapiens
  CDR3 for alpha chain variable domain of TCR clone 372908 (TRAV29/DV5, TRAJ15)
CASNQAGTALIF

SEQ ID NO: 745816 - protein, 15 aa, Homo sapiens
  CDR3 for beta chain variable domain of TCR clone 372908 (TRBV11-2, TRBJ2-2)
CASGSDRVNAGELFF

SEQ ID NO: 745817 - protein, 13 aa, Homo sapiens
  CDR3 for alpha chain variable domain of TCR clone 372909 (TRAV27, TRAJ45)
CRSSGGGADGLTF

SEQ ID NO: 745818 - protein, 16 aa, Homo sapiens
  CDR3 for beta chain variable domain of TCR clone 372909 (TRBV11-2, TRBJ2-1)
CQQLITPGVEYNEQFF

SEQ ID NO: 745819 - protein, 13 aa, Homo sapiens
  CDR3 for alpha chain variable domain of TCR clone 372910 (TRAV27, TRAJ43)
CAGAGNNNNDMRF

SEQ ID NO: 745820 - protein, 14 aa, Homo sapiens
  CDR3 for beta chain variable domain of TCR clone 372910 (TRBV7-2, TRBJ2-7)
CASRSQGAAYEQFF

SEQ ID NO: 745821 - protein, 14 aa, Homo sapiens
  CDR3 for alpha chain variable domain of TCR clone 372911 (TRAV26-2, TRAJ27)
CILRDISDASKSTF

SEQ ID NO: 745822 - protein, 15 aa, Homo sapiens
  CDR3 for beta chain variable domain of TCR clone 372911 (TRBV10-3, TRBJ2-7)
CATREQGLRSYEQYF

SEQ ID NO: 745823 - protein, 16 aa, Homo sapiens
  CDR3 for alpha chain variable domain of TCR clone 372912 (TRAV13-1, TRAJ17)
CAASKGVKAAGNKVTF

SEQ ID NO: 745824 - protein, 15 aa, Homo sapiens
  CDR3 for beta chain variable domain of TCR clone 372912 (TRBV20-1, TRBJ1-5)
CSAREGGYSNQPQHF

SEQ ID NO: 745825 - protein, 13 aa, Homo sapiens
  CDR3 for alpha chain variable domain of TCR clone 372913 (TRAV8-3, TRAJ44)
CAVVPGTASKLTF

SEQ ID NO: 745826 - protein, 16 aa, Homo sapiens
  CDR3 for beta chain variable domain of TCR clone 372913 (TRBV19, TRBJ2-1)
CASSKAGPSSYNEQFF

SEQ ID NO: 745827 - protein, 11 aa, Homo sapiens
  CDR3 for alpha chain variable domain of TCR clone 372914 (TRAV12-1, TRAJ43)
CVEYDNNDMRF

SEQ ID NO: 745828 - protein, 16 aa, Homo sapiens
  CDR3 for beta chain variable domain of TCR clone 372914 (TRBV5-4, TRBJ2-1)
CASSLVGSGQDNEQVF

SEQ ID NO: 745829 - protein, 13 aa, Homo sapiens
  CDR3 for alpha chain variable domain of TCR clone 372915 (TRAV8-1, TRAJ23)
CAVTGWQGGKLIF

SEQ ID NO: 745830 - protein, 15 aa, Homo sapiens
  CDR3 for beta chain variable domain of TCR clone 372915 (TRBV20-1, TRBJ2-2)
CSAIPGHSNTGELFF

SEQ ID NO: 745831 - protein, 13 aa, Homo sapiens
  CDR3 for alpha chain variable domain of TCR clone 372916 (TRAV36/DV7, TRAJ37)
CAVFSSNTGKLIF

SEQ ID NO: 745832 - protein, 16 aa, Homo sapiens
  CDR3 for beta chain variable domain of TCR clone 372916 (TRBV9, TRBJ2-2)
CASSAMGKGNTGELFF

SEQ ID NO: 745833 - protein, 11 aa, Homo sapiens
  CDR3 for alpha chain variable domain of TCR clone 372917 (TRAV17, TRAJ43)
CATPRSNDMRF

SEQ ID NO: 745834 - protein, 14 aa, Homo sapiens
  CDR3 for beta chain variable domain of TCR clone 372917 (TRBV7-2, TRBJ2-7)
CASRSQGAAYEQYF

SEQ ID NO: 745835 - protein, 13 aa, Homo sapiens
  CDR3 for alpha chain variable domain of TCR clone 372918 (TRAV16, TRAJ52)
CALRGTSYGKLTF

SEQ ID NO: 745836 - protein, 18 aa, Homo sapiens
  CDR3 for beta chain variable domain of TCR clone 372918 (TRBV13, TRBJ2-6)
CVSSPMTSGGSGANVLTF

SEQ ID NO: 745837 - protein, 13 aa, Homo sapiens
  CDR3 for alpha chain variable domain of TCR clone 372919 (TRAV3, TRAJ15)
CAVRDQTGTALIF

SEQ ID NO: 745838 - protein, 15 aa, Homo sapiens
  CDR3 for beta chain variable domain of TCR clone 372919 (TRBV11-1, TRBJ2-7)
CASSLNYGASYERYF

SEQ ID NO: 745839 - protein, 13 aa, Homo sapiens
  CDR3 for alpha chain variable domain of TCR clone 372920 (TRAV27, TRAJ6)
CAGGTRGSYIPTF

SEQ ID NO: 745840 - protein, 17 aa, Homo sapiens
  CDR3 for beta chain variable domain of TCR clone 372920 (TRBV19, TRBJ2-6)
CASSTGQVFSGANVLTF

SEQ ID NO: 745841 - protein, 14 aa, Homo sapiens
  CDR3 for alpha chain variable domain of TCR clone 372921 (TRAV1-2, TRAJ8)
CAVREDTGFQKLVF

SEQ ID NO: 745842 - protein, 14 aa, Homo sapiens
  CDR3 for beta chain variable domain of TCR clone 372921 (TRBV7-2, TRBJ1-2)
CASSQSGSTYGYTF

SEQ ID NO: 745843 - protein, 14 aa, Homo sapiens
  CDR3 for alpha chain variable domain of TCR clone 372922 (TRAV8-1, TRAJ5)
CAVRTDTGRRALTF

SEQ ID NO: 745844 - protein, 17 aa, Homo sapiens
  CDR3 for beta chain variable domain of TCR clone 372922 (TRBV5-1, TRBJ2-5)
CACSLLGLAANQETQYF

SEQ ID NO: 745845 - protein, 14 aa, Homo sapiens
  CDR3 for alpha chain variable domain of TCR clone 372923 (TRAV13-1, TRAJ39)
CAASEGNAGNMLTF

SEQ ID NO: 745846 - protein, 13 aa, Homo sapiens
  CDR3 for beta chain variable domain of TCR clone 372923 (TRBV7-6, TRBJ2-7)
CASSLDHTHEQYF

SEQ ID NO: 745847 - protein, 14 aa, Homo sapiens
  CDR3 for alpha chain variable domain of TCR clone 372924 (TRAV29/DV5, )
CAASAFRTQIPDIQ

SEQ ID NO: 745848 - protein, 13 aa, Homo sapiens
  CDR3 for beta chain variable domain of TCR clone 372924 (TRBV27, TRBJ1-1)
CASSLSIGAEAFF

SEQ ID NO: 745849 - protein, 15 aa, Homo sapiens
  CDR3 for alpha chain variable domain of TCR clone 372925 (TRAV26-2, TRAJ50)
CILRDEETSYDKVIF

SEQ ID NO: 745850 - protein, 16 aa, Homo sapiens
  CDR3 for beta chain variable domain of TCR clone 372925 (TRBV7-2, TRBJ2-5)
CASSSKWLSGQETQYF

SEQ ID NO: 745851 - protein, 15 aa, Homo sapiens
  CDR3 for alpha chain variable domain of TCR clone 372926 (TRAV8-3, TRAJ45)
CASSYSGGGADGLTF

SEQ ID NO: 745852 - protein, 13 aa, Homo sapiens
  CDR3 for beta chain variable domain of TCR clone 372926 (TRBV19, TRBJ2-7)
CASQSYGAGEQYF

SEQ ID NO: 745853 - protein, 15 aa, Homo sapiens
  CDR3 for alpha chain variable domain of TCR clone 372927 (TRAV27, TRAJ38)
CAARRNAGNNRKRIW

SEQ ID NO: 745854 - protein, 13 aa, Homo sapiens
  CDR3 for beta chain variable domain of TCR clone 372927 (TRBV12-5, TRBJ2-3)
CASGGRQSDTQYF

SEQ ID NO: 745855 - protein, 16 aa, Homo sapiens
  CDR3 for alpha chain variable domain of TCR clone 372928 (TRAV16, TRAJ57)
CAPYLITQGGSEKLVF

SEQ ID NO: 745856 - protein, 14 aa, Homo sapiens
  CDR3 for beta chain variable domain of TCR clone 372928 (TRBV11-2, TRBJ2-3)
CASSRLARTDTQYF

SEQ ID NO: 745857 - protein, 18 aa, Homo sapiens
  CDR3 for alpha chain variable domain of TCR clone 372929 (TRAV26-2, TRAJ54)
CILRDVEVGIQGAQKLVF

SEQ ID NO: 745858 - protein, 14 aa, Homo sapiens
  CDR3 for beta chain variable domain of TCR clone 372929 (TRBV28, TRBJ1-2)
CASRIQGANYGYTF

SEQ ID NO: 745859 - protein, 12 aa, Homo sapiens
  CDR3 for alpha chain variable domain of TCR clone 372930 (TRAV17, TRAJ4)
CATDGGYNKLIF

SEQ ID NO: 745860 - protein, 12 aa, Homo sapiens
  CDR3 for beta chain variable domain of TCR clone 372930 (TRBV6-5, TRBJ2-3)
CASSDTTDTQYF

SEQ ID NO: 745861 - protein, 12 aa, Homo sapiens
  CDR3 for alpha chain variable domain of TCR clone 372931 (TRAV13-1, TRAJ49)
CAASIRGNQFYF

SEQ ID NO: 745862 - protein, 14 aa, Homo sapiens
  CDR3 for beta chain variable domain of TCR clone 372931 (TRBV12-4, TRBJ1-1)
CASSLDGLNTEAFF

SEQ ID NO: 745863 - protein, 18 aa, Homo sapiens
  CDR3 for alpha chain variable domain of TCR clone 372932 (TRAV12-3, TRAJ52)
CAMSRTNAVGTGYGQLTF

SEQ ID NO: 745864 - protein, 17 aa, Homo sapiens
  CDR3 for beta chain variable domain of TCR clone 372932 (TRBV7-3, TRBJ2-3)
CASSLMKRMRGADTQYF

SEQ ID NO: 745865 - protein, 17 aa, Homo sapiens
  CDR3 for alpha chain variable domain of TCR clone 372933 (TRAV3, TRAJ38)
CAVRDCLNAGTNRKLIW

SEQ ID NO: 745866 - protein, 14 aa, Homo sapiens
  CDR3 for beta chain variable domain of TCR clone 372933 (TRBV5-5, TRBJ1-5)
CASSGQGVDQPQHF

SEQ ID NO: 745867 - protein, 12 aa, Homo sapiens
  CDR3 for alpha chain variable domain of TCR clone 372934 (TRAV16, TRAJ10)
CSRTGGGNKLTF

SEQ ID NO: 745868 - protein, 15 aa, Homo sapiens
  CDR3 for beta chain variable domain of TCR clone 372934 (TRBV7-8, TRBJ2-1)
CASSLHGGPYNEQFF

SEQ ID NO: 745869 - protein, 19 aa, Homo sapiens
  CDR3 for alpha chain variable domain of TCR clone 372935 (TRAV3, TRAJ6)
CAVRDGPRQEEATYLHLEE

SEQ ID NO: 745870 - protein, 20 aa, Homo sapiens
  CDR3 for beta chain variable domain of TCR clone 372935 (TRBV28, TRBJ2-1)
CASTPIGRSPGLAGGNEQFF

SEQ ID NO: 745871 - protein, 16 aa, Homo sapiens
  CDR3 for alpha chain variable domain of TCR clone 372936 (TRAV3, TRAJ13)
CAVRDLESGGYQKVTF

SEQ ID NO: 745872 - protein, 16 aa, Homo sapiens
  CDR3 for beta chain variable domain of TCR clone 372936 (TRBV27, TRBJ2-5)
CASSYGPGGQKETQYF

SEQ ID NO: 745873 - protein, 16 aa, Homo sapiens
  CDR3 for alpha chain variable domain of TCR clone 372937 (TRAV8-4, TRAJ27)
CAVKEGGLTNAGKSTF

SEQ ID NO: 745874 - protein, 14 aa, Homo sapiens
  CDR3 for beta chain variable domain of TCR clone 372937 (TRBV7-3, TRBJ1-1)
CASSPTGGVSEAFF

SEQ ID NO: 745875 - protein, 16 aa, Homo sapiens
  CDR3 for alpha chain variable domain of TCR clone 372938 (TRAV8-3, TRAJ6)
CAVGAEHQEEATYLHL

SEQ ID NO: 745876 - protein, 14 aa, Homo sapiens
  CDR3 for beta chain variable domain of TCR clone 372938 (TRBV6-6, TRBJ2-7)
CASSDSGAGYEQYF

SEQ ID NO: 745877 - protein, 11 aa, Homo sapiens
  CDR3 for alpha chain variable domain of TCR clone 372939 (TRAV1-1, TRAJ23)
CVVRQGGKLIF

SEQ ID NO: 745878 - protein, 20 aa, Homo sapiens
  CDR3 for beta chain variable domain of TCR clone 372939 (TRBV7-8, TRBJ2-2)
CASSHLFPGPTIQITGELFF

SEQ ID NO: 745879 - protein, 14 aa, Homo sapiens
  CDR3 for alpha chain variable domain of TCR clone 372940 (TRAV8-4, TRAJ48)
FAGSETFGNEKLTF

SEQ ID NO: 745880 - protein, 14 aa, Homo sapiens
  CDR3 for beta chain variable domain of TCR clone 372940 (TRBV13, TRBJ2-7)
CASSLKGASYEQYF

SEQ ID NO: 745881 - protein, 12 aa, Homo sapiens
  CDR3 for alpha chain variable domain of TCR clone 372941 (TRAV36/DV7, TRAJ54)
CAAVRGAQELVF

SEQ ID NO: 745882 - protein, 11 aa, Homo sapiens
  CDR3 for beta chain variable domain of TCR clone 372941 (TRBV6-3, TRBJ2-3)
CATGQADTQYF

SEQ ID NO: 745883 - protein, 12 aa, Homo sapiens
  CDR3 for alpha chain variable domain of TCR clone 372942 (TRAV12-3, TRAJ17)
CAMTLTGNKLTF

SEQ ID NO: 745884 - protein, 14 aa, Homo sapiens
  CDR3 for beta chain variable domain of TCR clone 372942 (TRBV7-9, TRBJ2-4)
CASSLAMGGNIQYF

SEQ ID NO: 745885 - protein, 15 aa, Homo sapiens
  CDR3 for alpha chain variable domain of TCR clone 372943 (TRAV26-1, TRAJ29)
CIVRVEGSGNTPLVF

SEQ ID NO: 745886 - protein, 13 aa, Homo sapiens
  CDR3 for beta chain variable domain of TCR clone 372943 (TRBV5-5, TRBJ2-2)
CASTLGGAGELFF

SEQ ID NO: 745887 - protein, 12 aa, Homo sapiens
  CDR3 for alpha chain variable domain of TCR clone 372944 (TRAV13-1, TRAJ43)
SVQQYNNNDMRF

SEQ ID NO: 745888 - protein, 15 aa, Homo sapiens
  CDR3 for beta chain variable domain of TCR clone 372944 (TRBV12-4, TRBJ2-5)
CASSPGSSRQGTHYF

SEQ ID NO: 745889 - protein, 13 aa, Homo sapiens
  CDR3 for alpha chain variable domain of TCR clone 372945 (TRAV8-3, TRAJ43)
CAVGPDNNNDMRL

SEQ ID NO: 745890 - protein, 14 aa, Homo sapiens
  CDR3 for beta chain variable domain of TCR clone 372945 (TRBV19, TRBJ2-1)
CASPTFFLSGEQFF

SEQ ID NO: 745891 - protein, 14 aa, Homo sapiens
  CDR3 for alpha chain variable domain of TCR clone 372946 (TRAV8-2, TRAJ13)
CVVSDSRGYQKVTF

SEQ ID NO: 745892 - protein, 14 aa, Homo sapiens
  CDR3 for beta chain variable domain of TCR clone 372946 (TRBV5-5, TRBJ1-4)
CASSPRGYNEKLFF

SEQ ID NO: 745893 - protein, 12 aa, Homo sapiens
  CDR3 for alpha chain variable domain of TCR clone 372947 (TRAV20, TRAJ39)
CAVGNAGNMLTF

SEQ ID NO: 745894 - protein, 10 aa, Homo sapiens
  CDR3 for beta chain variable domain of TCR clone 372947 (TRBV19, TRBJ1-1)
CASRQVEAFF

SEQ ID NO: 745895 - protein, 17 aa, Homo sapiens
  CDR3 for alpha chain variable domain of TCR clone 372948 (TRAV3, TRAJ28)
CAVRDQNSGAGSYQLTF

SEQ ID NO: 745896 - protein, 13 aa, Homo sapiens
  CDR3 for beta chain variable domain of TCR clone 372948 (TRBV12-5, TRBJ2-3)
CASGDRQSDTQYF

SEQ ID NO: 745897 - protein, 15 aa, Homo sapiens
  CDR3 for alpha chain variable domain of TCR clone 372949 (TRAV36/DV7, TRAJ54)
CAVEKPVQGAQKLVF

SEQ ID NO: 745898 - protein, 14 aa, Homo sapiens
  CDR3 for beta chain variable domain of TCR clone 372949 (TRBV5-1, TRBJ2-2)
CASMSGGSTGELFF

SEQ ID NO: 745899 - protein, 12 aa, Homo sapiens
  CDR3 for alpha chain variable domain of TCR clone 372950 (TRAV23/DV6, TRAJ16)
CAATGTGQELLF

SEQ ID NO: 745900 - protein, 20 aa, Homo sapiens
  CDR3 for beta chain variable domain of TCR clone 372950 (TRBV6-7, TRBJ1-2)
CASSYSAGQGNPLRVYGYTF

SEQ ID NO: 745901 - protein, 11 aa, Homo sapiens
  CDR3 for alpha chain variable domain of TCR clone 372951 (TRAV23/DV6, TRAJ58)
CAARLLRGETS

SEQ ID NO: 745902 - protein, 12 aa, Homo sapiens
  CDR3 for beta chain variable domain of TCR clone 372951 (TRBV19, TRBJ1-5)
CASSIAQQPQHF

SEQ ID NO: 745903 - protein, 12 aa, Homo sapiens
  CDR3 for alpha chain variable domain of TCR clone 372952 (TRAV13-2, TRAJ8)
CAPWLGFQKLAF

SEQ ID NO: 745904 - protein, 16 aa, Homo sapiens
  CDR3 for beta chain variable domain of TCR clone 372952 (TRBV11-2, TRBJ1-2)
CASSLDTGGADYGYTF

SEQ ID NO: 745905 - protein, 11 aa, Homo sapiens
  CDR3 for alpha chain variable domain of TCR clone 372953 (TRAV21, TRAJ34)
CAVTNTDKLIF

SEQ ID NO: 745906 - protein, 14 aa, Homo sapiens
  CDR3 for beta chain variable domain of TCR clone 372953 (TRBV16, TRBJ1-1)
CASSQAGPNTEAFF

SEQ ID NO: 745907 - protein, 13 aa, Homo sapiens
  CDR3 for alpha chain variable domain of TCR clone 372954 (TRAV4, TRAJ31)
CLVYRNNNARLMF

SEQ ID NO: 745908 - protein, 15 aa, Homo sapiens
  CDR3 for beta chain variable domain of TCR clone 372954 (TRBV20-1, TRBJ2-7)
CSARDRVSGMDEQYF

SEQ ID NO: 745909 - protein, 13 aa, Homo sapiens
  CDR3 for alpha chain variable domain of TCR clone 372955 (TRAV35, TRAJ36)
CAGHRIGANNLFF

SEQ ID NO: 745910 - protein, 15 aa, Homo sapiens
  CDR3 for beta chain variable domain of TCR clone 372955 (TRBV28, TRBJ2-5)
CASSPPWSYQETQYF

SEQ ID NO: 745911 - protein, 13 aa, Homo sapiens
  CDR3 for alpha chain variable domain of TCR clone 372956 (TRAV2, TRAJ24)
CAVTTDSWGKLQF

SEQ ID NO: 745912 - protein, 14 aa, Homo sapiens
  CDR3 for beta chain variable domain of TCR clone 372956 (TRBV13, TRBJ2-5)
CASSLGRGKETQYF

SEQ ID NO: 745913 - protein, 15 aa, Homo sapiens
  CDR3 for alpha chain variable domain of TCR clone 372957 (TRAV9-2, TRAJ8)
CALRGLNTGFQKLVF

SEQ ID NO: 745914 - protein, 15 aa, Homo sapiens
  CDR3 for beta chain variable domain of TCR clone 372957 (TRBV27, TRBJ2-1)
CASSNGGGSSNEQFF

SEQ ID NO: 745915 - protein, 20 aa, Homo sapiens
  CDR3 for alpha chain variable domain of TCR clone 372958 (TRAV8-3, TRAJ45)
LSTSVLWGSYSGGGADGLTF

SEQ ID NO: 745916 - protein, 11 aa, Homo sapiens
  CDR3 for beta chain variable domain of TCR clone 372958 (TRBV7-9, TRBJ2-5)
CASSLGETQYF

SEQ ID NO: 745917 - protein, 23 aa, Homo sapiens
  CDR3 for alpha chain variable domain of TCR clone 372959 (TRAV26-1, TRAJ38)
CIADNAGNNHIQNPDPAVYQLRD

SEQ ID NO: 745918 - protein, 14 aa, Homo sapiens
  CDR3 for beta chain variable domain of TCR clone 372959 (TRBV19, TRBJ2-1)
CASSMGSGRRSSSS

SEQ ID NO: 745919 - protein, 13 aa, Homo sapiens
  CDR3 for alpha chain variable domain of TCR clone 372960 (TRAV21, TRAJ57)
CAVTQGGSEKMVF

SEQ ID NO: 745920 - protein, 13 aa, Homo sapiens
  CDR3 for beta chain variable domain of TCR clone 372960 (TRBV7-3, TRBJ1-1)
CASSQDWGAEAFF

SEQ ID NO: 745921 - protein, 14 aa, Homo sapiens
  CDR3 for alpha chain variable domain of TCR clone 372961 (TRAV8-2, TRAJ4)
CVVGPSGGYNKLIC

SEQ ID NO: 745922 - protein, 15 aa, Homo sapiens
  CDR3 for beta chain variable domain of TCR clone 372961 (TRBV4-1, TRBJ1-4)
CASSDTGGTNEKLFF

SEQ ID NO: 745923 - protein, 13 aa, Homo sapiens
  CDR3 for alpha chain variable domain of TCR clone 372962 (TRAV12-1, TRAJ39)
CVALNNAGNMLTF

SEQ ID NO: 745924 - protein, 13 aa, Homo sapiens
  CDR3 for beta chain variable domain of TCR clone 372962 (TRBV7-3, TRBJ1-1)
CASSQDWGAEAFF

SEQ ID NO: 745925 - protein, 13 aa, Homo sapiens
  CDR3 for alpha chain variable domain of TCR clone 372963 (TRAV13-1, TRAJ49)
CAASVLRGNQFYF

SEQ ID NO: 745926 - protein, 15 aa, Homo sapiens
  CDR3 for beta chain variable domain of TCR clone 372963 (TRBV5-7, TRBJ2-7)
CASSLGPGRGHEQYF

SEQ ID NO: 745927 - protein, 11 aa, Homo sapiens
  CDR3 for alpha chain variable domain of TCR clone 372964 (TRAV13-1, TRAJ39)
CASHAGNMLTF

SEQ ID NO: 745928 - protein, 13 aa, Homo sapiens
  CDR3 for beta chain variable domain of TCR clone 372964 (TRBV11-2, TRBJ1-5)
CQQLRHGRQPQHF

SEQ ID NO: 745929 - protein, 15 aa, Homo sapiens
  CDR3 for alpha chain variable domain of TCR clone 372965 (TRAV8-3, TRAJ40)
CAVGPYTSGTYKYSF

SEQ ID NO: 745930 - protein, 16 aa, Homo sapiens
  CDR3 for beta chain variable domain of TCR clone 372965 (TRBV7-2, TRBJ2-7)
CASSLDPGGGSGEQYF

SEQ ID NO: 745931 - protein, 12 aa, Homo sapiens
  CDR3 for alpha chain variable domain of TCR clone 372966 (TRAV13-1, TRAJ15)
CAASQAGTALIF

SEQ ID NO: 745932 - protein, 18 aa, Homo sapiens
  CDR3 for beta chain variable domain of TCR clone 372966 (TRBV7-9, TRBJ2-3)
WASSLPINGQISTDTQYF

SEQ ID NO: 745933 - protein, 16 aa, Homo sapiens
  CDR3 for alpha chain variable domain of TCR clone 372967 (TRAV25, TRAJ53)
CAGPKGSGGSNYKLTF

SEQ ID NO: 745934 - protein, 15 aa, Homo sapiens
  CDR3 for beta chain variable domain of TCR clone 372967 (TRBV7-6, TRBJ2-1)
CASSSLAGEGNEQFF

SEQ ID NO: 745935 - protein, 14 aa, Homo sapiens
  CDR3 for alpha chain variable domain of TCR clone 372968 (TRAV26-1, TRAJ45)
FIEVTGGGADGLTF

SEQ ID NO: 745936 - protein, 15 aa, Homo sapiens
  CDR3 for beta chain variable domain of TCR clone 372968 (TRBV18, TRBJ2-7)
CASSPSSTGNYEQYF

SEQ ID NO: 745937 - protein, 14 aa, Homo sapiens
  CDR3 for alpha chain variable domain of TCR clone 372969 (TRAV12-3, TRAJ42)
CAMNYGGSQGNLIF

SEQ ID NO: 745938 - protein, 14 aa, Homo sapiens
  CDR3 for beta chain variable domain of TCR clone 372969 (TRBV19, TRBJ2-7)
CASRMGQGAIEQYF

SEQ ID NO: 745939 - protein, 10 aa, Homo sapiens
  CDR3 for alpha chain variable domain of TCR clone 372970 (TRAV1-2, TRAJ23)
CAGQGGKLIF

SEQ ID NO: 745940 - protein, 16 aa, Homo sapiens
  CDR3 for beta chain variable domain of TCR clone 372970 (TRBV19, TRBJ2-1)
CASSKAGPSSYNEQFF

SEQ ID NO: 745941 - protein, 11 aa, Homo sapiens
  CDR3 for alpha chain variable domain of TCR clone 372971 (TRAV12-2, TRAJ33)
CAVTSNYQLIW

SEQ ID NO: 745942 - protein, 14 aa, Homo sapiens
  CDR3 for beta chain variable domain of TCR clone 372971 (TRBV28, TRBJ2-2)
CASRIRTGTGELFF

SEQ ID NO: 745943 - protein, 13 aa, Homo sapiens
  CDR3 for alpha chain variable domain of TCR clone 372972 (TRAV26-1, TRAJ23)
CIDLRTRGGKLIF

SEQ ID NO: 745944 - protein, 14 aa, Homo sapiens
  CDR3 for beta chain variable domain of TCR clone 372972 (TRBV2, TRBJ2-7)
CASSRDRSYYEQYF

SEQ ID NO: 745945 - protein, 15 aa, Homo sapiens
  CDR3 for alpha chain variable domain of TCR clone 372973 (TRAV16, TRAJ17)
CALSGNKAAGNKLTF

SEQ ID NO: 745946 - protein, 16 aa, Homo sapiens
  CDR3 for beta chain variable domain of TCR clone 372973 (TRBV20-1, TRBJ1-4)
CSAPGQGLLTNEKLFF

SEQ ID NO: 745947 - protein, 13 aa, Homo sapiens
  CDR3 for alpha chain variable domain of TCR clone 372974 (TRAV20, TRAJ40)
CAVPFLGTYKYIF

SEQ ID NO: 745948 - protein, 13 aa, Homo sapiens
  CDR3 for beta chain variable domain of TCR clone 372974 (TRBV15, TRBJ2-5)
CATSQSGEETQYF

SEQ ID NO: 745949 - protein, 15 aa, Homo sapiens
  CDR3 for alpha chain variable domain of TCR clone 372975 (TRAV17, TRAJ57)
CATGPSQGGSEKLVF

SEQ ID NO: 745950 - protein, 13 aa, Homo sapiens
  CDR3 for beta chain variable domain of TCR clone 372975 (TRBV28, TRBJ2-2)
CASIRESTGELFF

SEQ ID NO: 745951 - protein, 11 aa, Homo sapiens
  CDR3 for alpha chain variable domain of TCR clone 372976 (TRAV3, TRAJ21)
CAVGNFNKFYF

SEQ ID NO: 745952 - protein, 16 aa, Homo sapiens
  CDR3 for beta chain variable domain of TCR clone 372976 (TRBV6-6, TRBJ1-5)
CASSYSTLVGNQPQHF

SEQ ID NO: 745953 - protein, 12 aa, Homo sapiens
  CDR3 for alpha chain variable domain of TCR clone 372977 (TRAV4, TRAJ26)
CLVGDYGQNFVF

SEQ ID NO: 745954 - protein, 16 aa, Homo sapiens
  CDR3 for beta chain variable domain of TCR clone 372977 (TRBV7-2, TRBJ1-2)
CASSANQDRRGHGYTV

SEQ ID NO: 745955 - protein, 16 aa, Homo sapiens
  CDR3 for alpha chain variable domain of TCR clone 372978 (TRAV38-2/DV8, TRAJ47)
CAYRSAIMEYGNKLVF

SEQ ID NO: 745956 - protein, 14 aa, Homo sapiens
  CDR3 for beta chain variable domain of TCR clone 372978 (TRBV19, TRBJ2-7)
CASSIFAGAYEQYF

SEQ ID NO: 745957 - protein, 13 aa, Homo sapiens
  CDR3 for alpha chain variable domain of TCR clone 372979 (TRAV21, TRAJ52)
CAVRPSPAGGTSY

SEQ ID NO: 745958 - protein, 13 aa, Homo sapiens
  CDR3 for beta chain variable domain of TCR clone 372979 (TRBV20-1, TRBJ1-1)
CSARVGGNTEAFF

SEQ ID NO: 745959 - protein, 10 aa, Homo sapiens
  CDR3 for alpha chain variable domain of TCR clone 372980 (TRAV30, TRAJ48)
CGIGNEKLTF

SEQ ID NO: 745960 - protein, 14 aa, Homo sapiens
  CDR3 for beta chain variable domain of TCR clone 372980 (TRBV7-2, TRBJ2-2)
CASRGQGAAGELFF

SEQ ID NO: 745961 - protein, 12 aa, Homo sapiens
  CDR3 for alpha chain variable domain of TCR clone 372981 (TRAV1-2, TRAJ33)
CAALDSNYQLIW

SEQ ID NO: 745962 - protein, 14 aa, Homo sapiens
  CDR3 for beta chain variable domain of TCR clone 372981 (TRBV7-8, TRBJ2-3)
CASSLEAGTDTQYF

SEQ ID NO: 745963 - protein, 14 aa, Homo sapiens
  CDR3 for alpha chain variable domain of TCR clone 372982 (TRAV12-1, TRAJ12)
CVVTSGDSSYKLIF

SEQ ID NO: 745964 - protein, 15 aa, Homo sapiens
  CDR3 for beta chain variable domain of TCR clone 372982 (TRBV7-2, TRBJ1-2)
CASSPRAGWNYGYTF

SEQ ID NO: 745965 - protein, 23 aa, Homo sapiens
  CDR3 for alpha chain variable domain of TCR clone 372983 (TRAV30, TRAJ29)
PAQLLRNLLLWHRAFPGNTPLVF

SEQ ID NO: 745966 - protein, 15 aa, Homo sapiens
  CDR3 for beta chain variable domain of TCR clone 372983 (TRBV5-1, TRBJ2-2)
CASSLFGQNTGELFF

SEQ ID NO: 745967 - protein, 15 aa, Homo sapiens
  CDR3 for alpha chain variable domain of TCR clone 372984 (TRAV8-6, TRAJ10)
CAVSDQAGGGNKLTF

SEQ ID NO: 745968 - protein, 14 aa, Homo sapiens
  CDR3 for beta chain variable domain of TCR clone 372984 (TRBV12-5, TRBJ2-5)
CASGSRTHQETQYF

SEQ ID NO: 745969 - protein, 15 aa, Homo sapiens
  CDR3 for alpha chain variable domain of TCR clone 372985 (TRAV26-1, TRAJ29)
CIVRVEGSGNTSLVF

SEQ ID NO: 745970 - protein, 15 aa, Homo sapiens
  CDR3 for beta chain variable domain of TCR clone 372985 (TRBV28, TRBJ2-5)
CASSPGQGSIETQYF

SEQ ID NO: 745971 - protein, 16 aa, Homo sapiens
  CDR3 for alpha chain variable domain of TCR clone 372986 (TRAV4, TRAJ6)
CLVGVYASGGSYIPTF

SEQ ID NO: 745972 - protein, 15 aa, Homo sapiens
  CDR3 for beta chain variable domain of TCR clone 372986 (TRBV14, TRBJ2-5)
CASSQGDRYQETQYF

SEQ ID NO: 745973 - protein, 14 aa, Homo sapiens
  CDR3 for alpha chain variable domain of TCR clone 372987 (TRAV17, TRAJ37)
CATDGSSNTGRPIF

SEQ ID NO: 745974 - protein, 14 aa, Homo sapiens
  CDR3 for beta chain variable domain of TCR clone 372987 (TRBV7-2, TRBJ2-7)
CASRSQGAAYEQYF

SEQ ID NO: 745975 - protein, 14 aa, Homo sapiens
  CDR3 for alpha chain variable domain of TCR clone 372988 (TRAV1-2, TRAJ16)
CAVNRFSDGQTLLF

SEQ ID NO: 745976 - protein, 16 aa, Homo sapiens
  CDR3 for beta chain variable domain of TCR clone 372988 (TRBV11-2, TRBJ1-2)
CASSLDTGGADYGHTF

SEQ ID NO: 745977 - protein, 12 aa, Homo sapiens
  CDR3 for alpha chain variable domain of TCR clone 372989 (TRAV23/DV6, TRAJ17)
CARGSCRQQANF

SEQ ID NO: 745978 - protein, 13 aa, Homo sapiens
  CDR3 for beta chain variable domain of TCR clone 372989 (TRBV7-2, TRBJ1-2)
CQQPDGVTYGYAF

SEQ ID NO: 745979 - protein, 13 aa, Homo sapiens
  CDR3 for alpha chain variable domain of TCR clone 372990 (TRAV27, TRAJ29)
CAGAHSGNTPLGF

SEQ ID NO: 745980 - protein, 15 aa, Homo sapiens
  CDR3 for beta chain variable domain of TCR clone 372990 (TRBV7-9, TRBJ1-5)
CASSQGHQPNQPQHF

SEQ ID NO: 745981 - protein, 12 aa, Homo sapiens
  CDR3 for alpha chain variable domain of TCR clone 372991 (TRAV13-1, TRAJ21)
CAAQEGFNKFYF

SEQ ID NO: 745982 - protein, 20 aa, Homo sapiens
  CDR3 for beta chain variable domain of TCR clone 372991 (TRBV7-8, TRBJ2-2)
CASSHLFPGPTIHITGELFF

SEQ ID NO: 745983 - protein, 16 aa, Homo sapiens
  CDR3 for alpha chain variable domain of TCR clone 372992 (TRAV12-2, TRAJ18)
CAVTTDRGSTLGRQYF

SEQ ID NO: 745984 - protein, 14 aa, Homo sapiens
  CDR3 for beta chain variable domain of TCR clone 372992 (TRBV4-2, TRBJ1-5)
CASSQDSTNQPQHF

SEQ ID NO: 745985 - protein, 15 aa, Homo sapiens
  CDR3 for alpha chain variable domain of TCR clone 372993 (TRAV21, TRAJ37)
CAVRPTLSNTGKLIF

SEQ ID NO: 745986 - protein, 15 aa, Homo sapiens
  CDR3 for beta chain variable domain of TCR clone 372993 (TRBV12-4, TRBJ2-1)
CASSLLATGNNEQFF

SEQ ID NO: 745987 - protein, 12 aa, Homo sapiens
  CDR3 for alpha chain variable domain of TCR clone 372994 (TRAV17, TRAJ4)
CATDGGYNKLIF

SEQ ID NO: 745988 - protein, 18 aa, Homo sapiens
  CDR3 for beta chain variable domain of TCR clone 372994 (TRBV7-9, TRBJ2-7)
CASSLTTSGSRTWYEQYF

SEQ ID NO: 745989 - protein, 14 aa, Homo sapiens
  CDR3 for alpha chain variable domain of TCR clone 372995 (TRAV8-3, TRAJ4)
CAVGAAGGYNKLIF

SEQ ID NO: 745990 - protein, 16 aa, Homo sapiens
  CDR3 for beta chain variable domain of TCR clone 372995 (TRBV19, TRBJ2-2)
CASRSPGAGATGELFF

SEQ ID NO: 745991 - protein, 15 aa, Homo sapiens
  CDR3 for alpha chain variable domain of TCR clone 372996 (TRAV12-1, TRAJ44)
CVVFVNTGTASKLTF

SEQ ID NO: 745992 - protein, 12 aa, Homo sapiens
  CDR3 for beta chain variable domain of TCR clone 372996 (TRBV14, TRBJ1-1)
CASSQLKGLAFF

SEQ ID NO: 745993 - protein, 13 aa, Homo sapiens
  CDR3 for alpha chain variable domain of TCR clone 372997 (TRAV21, TRAJ27)
CAALNTNAGKSTF

SEQ ID NO: 745994 - protein, 15 aa, Homo sapiens
  CDR3 for beta chain variable domain of TCR clone 372997 (TRBV20-1, TRBJ2-7)
CSARKGLAESYEQYL

SEQ ID NO: 745995 - protein, 14 aa, Homo sapiens
  CDR3 for alpha chain variable domain of TCR clone 372998 (TRAV17, TRAJ57)
CATDPQGGSETLVF

SEQ ID NO: 745996 - protein, 15 aa, Homo sapiens
  CDR3 for beta chain variable domain of TCR clone 372998 (TRBV5-1, TRBJ2-7)
CASSLDLTSSYEQYF

SEQ ID NO: 745997 - protein, 16 aa, Homo sapiens
  CDR3 for alpha chain variable domain of TCR clone 372999 (TRAV1-2, TRAJ10)
CAVRGVLTGGGNKLTF

SEQ ID NO: 745998 - protein, 12 aa, Homo sapiens
  CDR3 for beta chain variable domain of TCR clone 372999 (TRBV11-2, TRBJ2-1)
CASSPGNNEQFV

SEQ ID NO: 745999 - protein, 16 aa, Homo sapiens
  CDR3 for alpha chain variable domain of TCR clone 373000 (TRAV30, TRAJ24)
CGPEIVDADSWGKFQF

SEQ ID NO: 746000 - protein, 13 aa, Homo sapiens
  CDR3 for beta chain variable domain of TCR clone 373000 (TRBV24-1, TRBJ2-2)
CATSDWSTGELFF

SEQ ID NO: 746001 - protein, 14 aa, Homo sapiens
  CDR3 for alpha chain variable domain of TCR clone 373001 (TRAV8-3, TRAJ9)
CAVRINTGGFKTIF

SEQ ID NO: 746002 - protein, 15 aa, Homo sapiens
  CDR3 for beta chain variable domain of TCR clone 373001 (TRBV10-2, TRBJ2-6)
CASSEQGTGANVLTF

SEQ ID NO: 746003 - protein, 15 aa, Homo sapiens
  CDR3 for alpha chain variable domain of TCR clone 373002 (TRAV26-1, TRAJ52)
CIVSDLGTSYGNLTF

SEQ ID NO: 746004 - protein, 15 aa, Homo sapiens
  CDR3 for beta chain variable domain of TCR clone 373002 (TRBV6-5, TRBJ2-7)
CASSASGRWSYEQYF

SEQ ID NO: 746005 - protein, 13 aa, Homo sapiens
  CDR3 for alpha chain variable domain of TCR clone 373003 (TRAV36/DV7, TRAJ48)
CAVPNFGNEKLTF

SEQ ID NO: 746006 - protein, 15 aa, Homo sapiens
  CDR3 for beta chain variable domain of TCR clone 373003 (TRBV4-3, TRBJ2-3)
CASSLGTRSSDTQHF

SEQ ID NO: 746007 - protein, 13 aa, Homo sapiens
  CDR3 for alpha chain variable domain of TCR clone 373004 (TRAV29/DV5, TRAJ47)
CAASAEYGNKLVF

SEQ ID NO: 746008 - protein, 15 aa, Homo sapiens
  CDR3 for beta chain variable domain of TCR clone 373004 (TRBV4-1, TRBJ2-5)
CASSQASGEYETQYF

SEQ ID NO: 746009 - protein, 14 aa, Homo sapiens
  CDR3 for alpha chain variable domain of TCR clone 373005 (TRAV1-2, TRAJ8)
CAVREDTGFQKLVF

SEQ ID NO: 746010 - protein, 14 aa, Homo sapiens
  CDR3 for beta chain variable domain of TCR clone 373005 (TRBV7-8, TRBJ2-3)
CAISFPDGQDTQYF

SEQ ID NO: 746011 - protein, 19 aa, Homo sapiens
  CDR3 for alpha chain variable domain of TCR clone 373006 (TRAV1-2, TRAJ26)
CLFPLCCERPDNYGQNFVF

SEQ ID NO: 746012 - protein, 17 aa, Homo sapiens
  CDR3 for beta chain variable domain of TCR clone 373006 (TRBV13, TRBJ2-3)
CASSLSRVAGGRNTQYF

SEQ ID NO: 746013 - protein, 12 aa, Homo sapiens
  CDR3 for alpha chain variable domain of TCR clone 373007 (TRAV3, TRAJ27)
CAVRDGAGKSTF

SEQ ID NO: 746014 - protein, 13 aa, Homo sapiens
  CDR3 for beta chain variable domain of TCR clone 373007 (TRBV10-3, TRBJ1-2)
CAINADLNYGYTI

SEQ ID NO: 746015 - protein, 16 aa, Homo sapiens
  CDR3 for alpha chain variable domain of TCR clone 373008 (TRAV3, TRAJ10)
CAVRDMRPGGGNKLPF

SEQ ID NO: 746016 - protein, 14 aa, Homo sapiens
  CDR3 for beta chain variable domain of TCR clone 373008 (TRBV7-8, TRBJ2-3)
CASSLEAGTDTQYF

SEQ ID NO: 746017 - protein, 17 aa, Homo sapiens
  CDR3 for alpha chain variable domain of TCR clone 373009 (TRAV14/DV4, TRAJ4)
CAMREASGRGGYNKLIF

SEQ ID NO: 746018 - protein, 14 aa, Homo sapiens
  CDR3 for beta chain variable domain of TCR clone 373009 (TRBV6-1, TRBJ1-3)
CASVQGGGWKHHIF

SEQ ID NO: 746019 - protein, 15 aa, Homo sapiens
  CDR3 for alpha chain variable domain of TCR clone 373010 (TRAV26-1, TRAJ44)
CIVRIGTGTASKLTF

SEQ ID NO: 746020 - protein, 17 aa, Homo sapiens
  CDR3 for beta chain variable domain of TCR clone 373010 (TRBV13, TRBJ2-3)
CASSLSRVAGGRNTQYF

SEQ ID NO: 746021 - protein, 12 aa, Homo sapiens
  CDR3 for alpha chain variable domain of TCR clone 373011 (TRAV12-3, TRAJ17)
CAMTLTGNTPTF

SEQ ID NO: 746022 - protein, 15 aa, Homo sapiens
  CDR3 for beta chain variable domain of TCR clone 373011 (TRBV20-1, TRBJ2-7)
CSARDRVSGMDEQYF

SEQ ID NO: 746023 - protein, 17 aa, Homo sapiens
  CDR3 for alpha chain variable domain of TCR clone 373012 (TRAV3, TRAJ12)
CAVRDGGRMDSSYKLIF

SEQ ID NO: 746024 - protein, 15 aa, Homo sapiens
  CDR3 for beta chain variable domain of TCR clone 373012 (TRBV6-1, TRBJ2-6)
CASSSRPSGANVLTF

SEQ ID NO: 746025 - protein, 14 aa, Homo sapiens
  CDR3 for alpha chain variable domain of TCR clone 373013 (TRAV26-1, TRAJ34)
CIVRVAYNTDKLIF

SEQ ID NO: 746026 - protein, 17 aa, Homo sapiens
  CDR3 for beta chain variable domain of TCR clone 373013 (TRBV4-1, TRBJ2-3)
CARSQGYVSGGTDTQYF

SEQ ID NO: 746027 - protein, 14 aa, Homo sapiens
  CDR3 for alpha chain variable domain of TCR clone 373014 (TRAV23/DV6, TRAJ58)
CAAAKETSGSRLTF

SEQ ID NO: 746028 - protein, 15 aa, Homo sapiens
  CDR3 for beta chain variable domain of TCR clone 373014 (TRBV20-1, TRBJ1-1)
CSASWDRFLNTEAFF

SEQ ID NO: 746029 - protein, 11 aa, Homo sapiens
  CDR3 for alpha chain variable domain of TCR clone 373015 (TRAV35, TRAJ30)
CAGPGDDKIIF

SEQ ID NO: 746030 - protein, 17 aa, Homo sapiens
  CDR3 for beta chain variable domain of TCR clone 373015 (TRBV18, TRBJ2-1)
CASSKGLSGGADNEQFF

SEQ ID NO: 746031 - protein, 13 aa, Homo sapiens
  CDR3 for alpha chain variable domain of TCR clone 373016 (TRAV27, TRAJ6)
CAGGTRGSYIPTF

SEQ ID NO: 746032 - protein, 14 aa, Homo sapiens
  CDR3 for beta chain variable domain of TCR clone 373016 (TRBV12-4, TRBJ1-1)
CASSIGTGGTEAFF

SEQ ID NO: 746033 - protein, 10 aa, Homo sapiens
  CDR3 for alpha chain variable domain of TCR clone 373017 (TRAV13-2, TRAJ20)
CAENICRVQA

SEQ ID NO: 746034 - protein, 18 aa, Homo sapiens
  CDR3 for beta chain variable domain of TCR clone 373017 (TRBV11-2, TRBJ2-3)
CASSLGGASRGAPNTQYF

SEQ ID NO: 746035 - protein, 13 aa, Homo sapiens
  CDR3 for alpha chain variable domain of TCR clone 373018 (TRAV8-3, TRAJ34)
CAVGSYNTDKLIF

SEQ ID NO: 746036 - protein, 11 aa, Homo sapiens
  CDR3 for beta chain variable domain of TCR clone 373018 (TRBV7-3, TRBJ1-2)
CASSLGDGYTF

SEQ ID NO: 746037 - protein, 12 aa, Homo sapiens
  CDR3 for alpha chain variable domain of TCR clone 373019 (TRAV2, TRAJ5)
CALDTGRRALTF

SEQ ID NO: 746038 - protein, 15 aa, Homo sapiens
  CDR3 for beta chain variable domain of TCR clone 373019 (TRBV10-3, TRBJ2-1)
CAISNVQDRAYEQFF

SEQ ID NO: 746039 - protein, 11 aa, Homo sapiens
  CDR3 for alpha chain variable domain of TCR clone 373020 (TRAV1-1, TRAJ23)
CAVRQGGKLIF

SEQ ID NO: 746040 - protein, 20 aa, Homo sapiens
  CDR3 for beta chain variable domain of TCR clone 373020 (TRBV7-8, TRBJ2-2)
CASSHLFPGPTVHLTGELFF

SEQ ID NO: 746041 - protein, 16 aa, Homo sapiens
  CDR3 for alpha chain variable domain of TCR clone 373021 (TRAV12-2, TRAJ10)
CAVNRVLTGGGNKLTV

SEQ ID NO: 746042 - protein, 14 aa, Homo sapiens
  CDR3 for beta chain variable domain of TCR clone 373021 (TRBV9, TRBJ2-1)
CASSVALAVNEQFF

SEQ ID NO: 746043 - protein, 13 aa, Homo sapiens
  CDR3 for alpha chain variable domain of TCR clone 373022 (TRAV16, TRAJ31)
CALSAHNNARLMF

SEQ ID NO: 746044 - protein, 13 aa, Homo sapiens
  CDR3 for beta chain variable domain of TCR clone 373022 (TRBV6-4, TRBJ1-5)
CASSADLNQPQHF

SEQ ID NO: 746045 - protein, 12 aa, Homo sapiens
  CDR3 for alpha chain variable domain of TCR clone 373023 (TRAV38-1, TRAJ33)
CALRDSNYQLIW

SEQ ID NO: 746046 - protein, 16 aa, Homo sapiens
  CDR3 for beta chain variable domain of TCR clone 373023 (TRBV19, TRBJ2-7)
CASSLTGTSELGEQYF

SEQ ID NO: 746047 - protein, 16 aa, Homo sapiens
  CDR3 for alpha chain variable domain of TCR clone 373024 (TRAV21, TRAJ17)
CAVRPGEEAAGNKLTF

SEQ ID NO: 746048 - protein, 16 aa, Homo sapiens
  CDR3 for beta chain variable domain of TCR clone 373024 (TRBV2, TRBJ2-7)
CASSEPWAGPSYEQYF

SEQ ID NO: 746049 - protein, 19 aa, Homo sapiens
  CDR3 for alpha chain variable domain of TCR clone 373025 (TRAV1-1, TRAJ13)
CLLLLRCEGESGGCQKVTF

SEQ ID NO: 746050 - protein, 19 aa, Homo sapiens
  CDR3 for beta chain variable domain of TCR clone 373025 (TRBV14, TRBJ2-1)
CASSQDQLWEAQEYNEQFF

SEQ ID NO: 746051 - protein, 16 aa, Homo sapiens
  CDR3 for alpha chain variable domain of TCR clone 373026 (TRAV27, TRAJ53)
CAAPEGSGGSNYKLTI

SEQ ID NO: 746052 - protein, 15 aa, Homo sapiens
  CDR3 for beta chain variable domain of TCR clone 373026 (TRBV20-1, TRBJ1-1)
CSASRGVKGNTEAFF

SEQ ID NO: 746053 - protein, 11 aa, Homo sapiens
  CDR3 for alpha chain variable domain of TCR clone 373027 (TRAV29/DV5, TRAJ31)
CAASYRDRIMF

SEQ ID NO: 746054 - protein, 19 aa, Homo sapiens
  CDR3 for beta chain variable domain of TCR clone 373027 (TRBV19, TRBJ2-5)
CASSIGQVTDFFLGETQYF

SEQ ID NO: 746055 - protein, 18 aa, Homo sapiens
  CDR3 for alpha chain variable domain of TCR clone 373028 (TRAV9-2, TRAJ10)
CALSDGALASGGGNKLTV

SEQ ID NO: 746056 - protein, 16 aa, Homo sapiens
  CDR3 for beta chain variable domain of TCR clone 373028 (TRBV28, TRBJ2-7)
CASSSSGTSGSYEQYF

SEQ ID NO: 746057 - protein, 13 aa, Homo sapiens
  CDR3 for alpha chain variable domain of TCR clone 373029 (TRAV2, TRAJ15)
CAVASQAGTALIF

SEQ ID NO: 746058 - protein, 16 aa, Homo sapiens
  CDR3 for beta chain variable domain of TCR clone 373029 (TRBV20-1, TRBJ1-4)
CSAPGQGLSTNEKLFF

SEQ ID NO: 746059 - protein, 16 aa, Homo sapiens
  CDR3 for alpha chain variable domain of TCR clone 373030 (TRAV4, TRAJ42)
CLVGPIYGGSQGNLIF

SEQ ID NO: 746060 - protein, 13 aa, Homo sapiens
  CDR3 for beta chain variable domain of TCR clone 373030 (TRBV11-2, TRBJ2-7)
CASSPLGSYKQYF

SEQ ID NO: 746061 - protein, 15 aa, Homo sapiens
  CDR3 for alpha chain variable domain of TCR clone 373031 (TRAV2, TRAJ22)
CAVPSRGGSARQLTF

SEQ ID NO: 746062 - protein, 13 aa, Homo sapiens
  CDR3 for beta chain variable domain of TCR clone 373031 (TRBV12-5, TRBJ2-5)
ASGSRTHQETQYF

SEQ ID NO: 746063 - protein, 16 aa, Homo sapiens
  CDR3 for alpha chain variable domain of TCR clone 373032 (TRAV16, TRAJ42)
CARKMNYGGSQGNLIF

SEQ ID NO: 746064 - protein, 13 aa, Homo sapiens
  CDR3 for beta chain variable domain of TCR clone 373032 (TRBV20-1, TRBJ2-7)
CSASPTSSYEQYF

SEQ ID NO: 746065 - protein, 11 aa, Homo sapiens
  CDR3 for alpha chain variable domain of TCR clone 373033 (TRAV12-2, TRAJ54)
CAVEGAQKLVF

SEQ ID NO: 746066 - protein, 17 aa, Homo sapiens
  CDR3 for beta chain variable domain of TCR clone 373033 (TRBV18, TRBJ1-3)
CDSSPYPTGPSGNTIYF

SEQ ID NO: 746067 - protein, 14 aa, Homo sapiens
  CDR3 for alpha chain variable domain of TCR clone 373034 (TRAV12-1, TRAJ6)
CVVARIRRKLHTYI

SEQ ID NO: 746068 - protein, 15 aa, Homo sapiens
  CDR3 for beta chain variable domain of TCR clone 373034 (TRBV7-3, TRBJ2-1)
CASSVKASEYNERFF

SEQ ID NO: 746069 - protein, 14 aa, Homo sapiens
  CDR3 for alpha chain variable domain of TCR clone 373035 (TRAV3, TRAJ37)
CAVKESGNTGKLIF

SEQ ID NO: 746070 - protein, 14 aa, Homo sapiens
  CDR3 for beta chain variable domain of TCR clone 373035 (TRBV2, TRBJ1-5)
CASSENSGGQPQHF

SEQ ID NO: 746071 - protein, 14 aa, Homo sapiens
  CDR3 for alpha chain variable domain of TCR clone 373036 (TRAV8-1, TRAJ5)
CAVRTDTGRRALTF

SEQ ID NO: 746072 - protein, 11 aa, Homo sapiens
  CDR3 for beta chain variable domain of TCR clone 373036 (TRBV7-8, TRBJ2-3)
CASGNADTQYF

SEQ ID NO: 746073 - protein, 16 aa, Homo sapiens
  CDR3 for alpha chain variable domain of TCR clone 373037 (TRAV16, TRAJ4)
CALSRMISGGYNKLIF

SEQ ID NO: 746074 - protein, 14 aa, Homo sapiens
  CDR3 for beta chain variable domain of TCR clone 373037 (TRBV4-1, TRBJ2-2)
CASSQAVNTGELFF

SEQ ID NO: 746075 - protein, 13 aa, Homo sapiens
  CDR3 for alpha chain variable domain of TCR clone 373038 (TRAV12-1, TRAJ12)
CVVNIESSYKFIF

SEQ ID NO: 746076 - protein, 15 aa, Homo sapiens
  CDR3 for beta chain variable domain of TCR clone 373038 (TRBV19, TRBJ2-1)
FASSTGTSSYNEQFF

SEQ ID NO: 746077 - protein, 15 aa, Homo sapiens
  CDR3 for alpha chain variable domain of TCR clone 373039 (TRAV26-1, TRAJ44)
CIVRANTGTASKLTF

SEQ ID NO: 746078 - protein, 13 aa, Homo sapiens
  CDR3 for beta chain variable domain of TCR clone 373039 (TRBV10-3, TRBJ2-7)
CASKLAVNYQQYF

SEQ ID NO: 746079 - protein, 10 aa, Homo sapiens
  CDR3 for alpha chain variable domain of TCR clone 373040 (TRAV16, TRAJ26)
CAPEELWSEF

SEQ ID NO: 746080 - protein, 15 aa, Homo sapiens
  CDR3 for beta chain variable domain of TCR clone 373040 (TRBV7-2, TRBJ2-3)
CTSSLTGTSTDTQYF

SEQ ID NO: 746081 - protein, 11 aa, Homo sapiens
  CDR3 for alpha chain variable domain of TCR clone 373041 (TRAV12-2, TRAJ11)
CAVNGYSTLTF

SEQ ID NO: 746082 - protein, 11 aa, Homo sapiens
  CDR3 for beta chain variable domain of TCR clone 373041 (TRBV19, TRBJ1-1)
CASSIGSEAFF

SEQ ID NO: 746083 - protein, 14 aa, Homo sapiens
  CDR3 for alpha chain variable domain of TCR clone 373042 (TRAV3, TRAJ28)
CAVRRGAGSYQLTF

SEQ ID NO: 746084 - protein, 16 aa, Homo sapiens
  CDR3 for beta chain variable domain of TCR clone 373042 (TRBV28, TRBJ2-1)
CASSSPEYPRDNEQFF

SEQ ID NO: 746085 - protein, 11 aa, Homo sapiens
  CDR3 for alpha chain variable domain of TCR clone 373043 (TRAV35, TRAJ30)
CAGERDDKSIF

SEQ ID NO: 746086 - protein, 14 aa, Homo sapiens
  CDR3 for beta chain variable domain of TCR clone 373043 (TRBV15, TRBJ2-5)
CATSGDRGQETQYF

SEQ ID NO: 746087 - protein, 14 aa, Homo sapiens
  CDR3 for alpha chain variable domain of TCR clone 373044 (TRAV17, TRAJ24)
CATLTTDSWGKFQF

SEQ ID NO: 746088 - protein, 16 aa, Homo sapiens
  CDR3 for beta chain variable domain of TCR clone 373044 (TRBV4-2, TRBJ2-7)
CASSQDGGSLRGEQCF

SEQ ID NO: 746089 - protein, 12 aa, Homo sapiens
  CDR3 for alpha chain variable domain of TCR clone 373045 (TRAV12-3, TRAJ17)
CAMTLTGNKLTF

SEQ ID NO: 746090 - protein, 15 aa, Homo sapiens
  CDR3 for beta chain variable domain of TCR clone 373045 (TRBV20-1, TRBJ2-7)
CSGRDRGSGMDEQYF

SEQ ID NO: 746091 - protein, 13 aa, Homo sapiens
  CDR3 for alpha chain variable domain of TCR clone 373046 (TRAV17, TRAJ29)
CATDAFRKHTSCL

SEQ ID NO: 746092 - protein, 13 aa, Homo sapiens
  CDR3 for beta chain variable domain of TCR clone 373046 (TRBV18, TRBJ1-1)
CASSPGRNTEAFF

SEQ ID NO: 746093 - protein, 12 aa, Homo sapiens
  CDR3 for alpha chain variable domain of TCR clone 373047 (TRAV8-3, TRAJ6)
CAGAGGSYIPTF

SEQ ID NO: 746094 - protein, 14 aa, Homo sapiens
  CDR3 for beta chain variable domain of TCR clone 373047 (TRBV27, TRBJ2-7)
CASATGTERREQYF

SEQ ID NO: 746095 - protein, 14 aa, Homo sapiens
  CDR3 for alpha chain variable domain of TCR clone 373048 (TRAV8-3, TRAJ39)
CAVGANNAGNMLTF

SEQ ID NO: 746096 - protein, 15 aa, Homo sapiens
  CDR3 for beta chain variable domain of TCR clone 373048 (TRBV4-3, TRBJ1-1)
CASSQELGPGTEAFF

SEQ ID NO: 746097 - protein, 14 aa, Homo sapiens
  CDR3 for alpha chain variable domain of TCR clone 373049 (TRAV27, TRAJ13)
CRSSNSGGYQKVTF

SEQ ID NO: 746098 - protein, 13 aa, Homo sapiens
  CDR3 for beta chain variable domain of TCR clone 373049 (TRBV12-4, TRBJ1-5)
CASSPDRAQPQHF

SEQ ID NO: 746099 - protein, 13 aa, Homo sapiens
  CDR3 for alpha chain variable domain of TCR clone 373050 (TRAV16, TRAJ10)
CAPAREEETNSPL

SEQ ID NO: 746100 - protein, 11 aa, Homo sapiens
  CDR3 for beta chain variable domain of TCR clone 373050 (TRBV29-1, TRBJ2-5)
CSEDRTGTQYF

SEQ ID NO: 746101 - protein, 17 aa, Homo sapiens
  CDR3 for alpha chain variable domain of TCR clone 373051 (TRAV8-6, TRAJ52)
CAVTRNAGGTSYVKLTF

SEQ ID NO: 746102 - protein, 15 aa, Homo sapiens
  CDR3 for beta chain variable domain of TCR clone 373051 (TRBV2, TRBJ2-1)
CASSELAGSYNEQFF

SEQ ID NO: 746103 - protein, 14 aa, Homo sapiens
  CDR3 for alpha chain variable domain of TCR clone 373052 (TRAV14/DV4, TRAJ34)
CAMREGRPHRQAHL

SEQ ID NO: 746104 - protein, 16 aa, Homo sapiens
  CDR3 for beta chain variable domain of TCR clone 373052 (TRBV12-5, TRBJ2-5)
CASGPRTSGNQETQYF

SEQ ID NO: 746105 - protein, 14 aa, Homo sapiens
  CDR3 for alpha chain variable domain of TCR clone 373053 (TRAV26-1, TRAJ38)
CIADNAGNNSKLIW

SEQ ID NO: 746106 - protein, 13 aa, Homo sapiens
  CDR3 for beta chain variable domain of TCR clone 373053 (TRBV20-1, TRBJ1-1)
CSARGGGNTEAFL

SEQ ID NO: 746107 - protein, 15 aa, Homo sapiens
  CDR3 for alpha chain variable domain of TCR clone 373054 (TRAV23/DV6, TRAJ45)
CAASSAGGGADGLTF

SEQ ID NO: 746108 - protein, 20 aa, Homo sapiens
  CDR3 for beta chain variable domain of TCR clone 373054 (TRBV7-8, TRBJ2-2)
CASSHLFPGPTIHIAGELFF

SEQ ID NO: 746109 - protein, 14 aa, Homo sapiens
  CDR3 for alpha chain variable domain of TCR clone 373055 (TRAV38-1, TRAJ29)
CAFITPSGNTPIVF

SEQ ID NO: 746110 - protein, 14 aa, Homo sapiens
  CDR3 for beta chain variable domain of TCR clone 373055 (TRBV25-1, TRBJ1-1)
CASTHLGGNTEAFF

SEQ ID NO: 746111 - protein, 11 aa, Homo sapiens
  CDR3 for alpha chain variable domain of TCR clone 373056 (TRAV2, TRAJ33)
CAVDSNSQLIW

SEQ ID NO: 746112 - protein, 14 aa, Homo sapiens
  CDR3 for beta chain variable domain of TCR clone 373056 (TRBV11-2, TRBJ2-3)
CASSRLARTDTQYC

SEQ ID NO: 746113 - protein, 12 aa, Homo sapiens
  CDR3 for alpha chain variable domain of TCR clone 373057 (TRAV21, TRAJ11)
CAATSGYSTITF

SEQ ID NO: 746114 - protein, 16 aa, Homo sapiens
  CDR3 for beta chain variable domain of TCR clone 373057 (TRBV28, TRBJ2-2)
CASSLEGGSNTGELFF

SEQ ID NO: 746115 - protein, 16 aa, Homo sapiens
  CDR3 for alpha chain variable domain of TCR clone 373058 (TRAV8-3, TRAJ13)
CAVGAYPSGGYQKVTF

SEQ ID NO: 746116 - protein, 17 aa, Homo sapiens
  CDR3 for beta chain variable domain of TCR clone 373058 (TRBV19, TRBJ1-5)
CASSIVWAEISPSILVM

SEQ ID NO: 746117 - protein, 13 aa, Homo sapiens
  CDR3 for alpha chain variable domain of TCR clone 373059 (TRAV21, TRAJ15)
CAVRNQAGTALIF

SEQ ID NO: 746118 - protein, 16 aa, Homo sapiens
  CDR3 for beta chain variable domain of TCR clone 373059 (TRBV7-2, TRBJ1-2)
CASSSNQDRRGHGYTF

SEQ ID NO: 746119 - protein, 17 aa, Homo sapiens
  CDR3 for alpha chain variable domain of TCR clone 373060 (TRAV12-1, TRAJ42)
CVVMRMNYGGSQGNLIF

SEQ ID NO: 746120 - protein, 15 aa, Homo sapiens
  CDR3 for beta chain variable domain of TCR clone 373060 (TRBV7-2, TRBJ1-1)
CASSLARPAEAFLDK

SEQ ID NO: 746121 - protein, 13 aa, Homo sapiens
  CDR3 for alpha chain variable domain of TCR clone 373061 (TRAV22, TRAJ44)
CALNPGTASKLTF

SEQ ID NO: 746122 - protein, 13 aa, Homo sapiens
  CDR3 for beta chain variable domain of TCR clone 373061 (TRBV15, TRBJ1-6)
CATSPGLNSPLHF

SEQ ID NO: 746123 - protein, 14 aa, Homo sapiens
  CDR3 for alpha chain variable domain of TCR clone 373062 (TRAV16, TRAJ26)
CALSGCNYGQNFVF

SEQ ID NO: 746124 - protein, 16 aa, Homo sapiens
  CDR3 for beta chain variable domain of TCR clone 373062 (TRBV4-3, TRBJ2-5)
CASSQDSIQLQETQYF

SEQ ID NO: 746125 - protein, 14 aa, Homo sapiens
  CDR3 for alpha chain variable domain of TCR clone 373063 (TRAV23/DV6, TRAJ11)
CAASLESGYSTLTF

SEQ ID NO: 746126 - protein, 13 aa, Homo sapiens
  CDR3 for beta chain variable domain of TCR clone 373063 (TRBV4-1, TRBJ2-5)
CASSLTRCETQYF

SEQ ID NO: 746127 - protein, 19 aa, Homo sapiens
  CDR3 for alpha chain variable domain of TCR clone 373064 (TRAV3, TRAJ6)
CAVRDSNPSRSGGSYIPPF

SEQ ID NO: 746128 - protein, 15 aa, Homo sapiens
  CDR3 for beta chain variable domain of TCR clone 373064 (TRBV18, TRBJ2-7)
CASSPTFMDSYEQYF

SEQ ID NO: 746129 - protein, 13 aa, Homo sapiens
  CDR3 for alpha chain variable domain of TCR clone 373065 (TRAV36/DV7, TRAJ37)
CAVFSSNTGKLIF

SEQ ID NO: 746130 - protein, 15 aa, Homo sapiens
  CDR3 for beta chain variable domain of TCR clone 373065 (TRBV20-1, TRBJ1-1)
CSARDPRGEYTAAFF

SEQ ID NO: 746131 - protein, 11 aa, Homo sapiens
  CDR3 for alpha chain variable domain of TCR clone 373066 (TRAV12-2, TRAJ49)
CALQGGNQFYF

SEQ ID NO: 746132 - protein, 15 aa, Homo sapiens
  CDR3 for beta chain variable domain of TCR clone 373066 (TRBV11-2, TRBJ1-2)
CASSLAFVNNYGYTF

SEQ ID NO: 746133 - protein, 15 aa, Homo sapiens
  CDR3 for alpha chain variable domain of TCR clone 373067 (TRAV27, TRAJ38)
CAARRKAGNNRKLIW

SEQ ID NO: 746134 - protein, 13 aa, Homo sapiens
  CDR3 for beta chain variable domain of TCR clone 373067 (TRBV12-5, TRBJ2-3)
CASGERQSDTQYF

SEQ ID NO: 746135 - protein, 15 aa, Homo sapiens
  CDR3 for alpha chain variable domain of TCR clone 373068 (TRAV26-2, TRAJ28)
CILVESWAGSYQLTF

SEQ ID NO: 746136 - protein, 16 aa, Homo sapiens
  CDR3 for beta chain variable domain of TCR clone 373068 (TRBV4-3, TRBJ1-2)
WASSQEIGGASYGYTF

SEQ ID NO: 746137 - protein, 11 aa, Homo sapiens
  CDR3 for alpha chain variable domain of TCR clone 373069 (TRAV1-2, TRAJ34)
SASPNTDKLIF

SEQ ID NO: 746138 - protein, 18 aa, Homo sapiens
  CDR3 for beta chain variable domain of TCR clone 373069 (TRBV3-1, TRBJ2-5)
CASSHAGTSGGGRETQYF

SEQ ID NO: 746139 - protein, 12 aa, Homo sapiens
  CDR3 for alpha chain variable domain of TCR clone 373070 (TRAV27, TRAJ9)
CAGESGGFKTIF

SEQ ID NO: 746140 - protein, 14 aa, Homo sapiens
  CDR3 for beta chain variable domain of TCR clone 373070 (TRBV20-1, TRBJ2-7)
CSAKRGRSSYEQYF

SEQ ID NO: 746141 - protein, 13 aa, Homo sapiens
  CDR3 for alpha chain variable domain of TCR clone 373071 (TRAV2, TRAJ35)
CAPRVGFGNVLHC

SEQ ID NO: 746142 - protein, 15 aa, Homo sapiens
  CDR3 for beta chain variable domain of TCR clone 373071 (TRBV20-1, TRBJ2-7)
CSARDRVSGMDEQYF

SEQ ID NO: 746143 - protein, 11 aa, Homo sapiens
  CDR3 for alpha chain variable domain of TCR clone 373072 (TRAV3, TRAJ21)
CAVGNFNKFYL

SEQ ID NO: 746144 - protein, 16 aa, Homo sapiens
  CDR3 for beta chain variable domain of TCR clone 373072 (TRBV5-4, TRBJ2-3)
CASQQPGAGGADTQYF

SEQ ID NO: 746145 - protein, 13 aa, Homo sapiens
  CDR3 for alpha chain variable domain of TCR clone 373073 (TRAV21, TRAJ27)
CAARPGNAGKATF

SEQ ID NO: 746146 - protein, 12 aa, Homo sapiens
  CDR3 for beta chain variable domain of TCR clone 373073 (TRBV11-2, TRBJ2-2)
CASSLGGGELFF

SEQ ID NO: 746147 - protein, 13 aa, Homo sapiens
  CDR3 for alpha chain variable domain of TCR clone 373074 (TRAV12-2, TRAJ31)
CAVKADNNAKLMF

SEQ ID NO: 746148 - protein, 12 aa, Homo sapiens
  CDR3 for beta chain variable domain of TCR clone 373074 (TRBV19, TRBJ1-5)
CASSIAQQPQHF

SEQ ID NO: 746149 - protein, 11 aa, Homo sapiens
  CDR3 for alpha chain variable domain of TCR clone 373075 (TRAV12-1, TRAJ37)
CVVNPPGKLIF

SEQ ID NO: 746150 - protein, 13 aa, Homo sapiens
  CDR3 for beta chain variable domain of TCR clone 373075 (TRBV12-4, TRBJ1-5)
CASSPDRAQPQHF

SEQ ID NO: 746151 - protein, 15 aa, Homo sapiens
  CDR3 for alpha chain variable domain of TCR clone 373076 (TRAV3, TRAJ29)
CAVRAPLSGNTPLVF

SEQ ID NO: 746152 - protein, 15 aa, Homo sapiens
  CDR3 for beta chain variable domain of TCR clone 373076 (TRBV28, TRBJ1-1)
CASRIKGGLNTEAVF

SEQ ID NO: 746153 - protein, 11 aa, Homo sapiens
  CDR3 for alpha chain variable domain of TCR clone 373077 (TRAV13-1, TRAJ15)
CAATPGTALIF

SEQ ID NO: 746154 - protein, 14 aa, Homo sapiens
  CDR3 for beta chain variable domain of TCR clone 373077 (TRBV25-1, TRBJ1-1)
CASTHLGGNTEAFF

SEQ ID NO: 746155 - protein, 16 aa, Homo sapiens
  CDR3 for alpha chain variable domain of TCR clone 373078 (TRAV8-6, TRAJ53)
CAVTSNSGGSNYKLTF

SEQ ID NO: 746156 - protein, 12 aa, Homo sapiens
  CDR3 for beta chain variable domain of TCR clone 373078 (TRBV7-8, TRBJ2-7)
CASSLGDREQYF

SEQ ID NO: 746157 - protein, 13 aa, Homo sapiens
  CDR3 for alpha chain variable domain of TCR clone 373079 (TRAV13-1, TRAJ21)
CAASIYNFNKFYF

SEQ ID NO: 746158 - protein, 14 aa, Homo sapiens
  CDR3 for beta chain variable domain of TCR clone 373079 (TRBV4-2, TRBJ1-5)
CASSQDSINQPQHF

SEQ ID NO: 746159 - protein, 13 aa, Homo sapiens
  CDR3 for alpha chain variable domain of TCR clone 373080 (TRAV2, TRAJ40)
CAVVTSGTYKYIF

SEQ ID NO: 746160 - protein, 14 aa, Homo sapiens
  CDR3 for beta chain variable domain of TCR clone 373080 (TRBV19, TRBJ2-1)
CASATFVLSGEQFL

SEQ ID NO: 746161 - protein, 13 aa, Homo sapiens
  CDR3 for alpha chain variable domain of TCR clone 373081 (TRAV8-3, TRAJ36)
CAVGATGANNLFF

SEQ ID NO: 746162 - protein, 13 aa, Homo sapiens
  CDR3 for beta chain variable domain of TCR clone 373081 (TRBV6-1, TRBJ1-1)
CASRRQGNTEAFF

SEQ ID NO: 746163 - protein, 14 aa, Homo sapiens
  CDR3 for alpha chain variable domain of TCR clone 373082 (TRAV21, TRAJ15)
CAVSLNQAGTALIF

SEQ ID NO: 746164 - protein, 11 aa, Homo sapiens
  CDR3 for beta chain variable domain of TCR clone 373082 (TRBV20-1, TRBJ2-7)
CSARSSYEQYF

SEQ ID NO: 746165 - protein, 14 aa, Homo sapiens
  CDR3 for alpha chain variable domain of TCR clone 373083 (TRAV38-2/DV8, TRAJ23)
CAYRSQNQGGKLSF

SEQ ID NO: 746166 - protein, 13 aa, Homo sapiens
  CDR3 for beta chain variable domain of TCR clone 373083 (TRBV24-1, TRBJ2-1)
CATSAGPYNEQFF

SEQ ID NO: 746167 - protein, 15 aa, Homo sapiens
  CDR3 for alpha chain variable domain of TCR clone 373084 (TRAV12-3, TRAJ42)
CAMSGHGGRQGNLIF

SEQ ID NO: 746168 - protein, 14 aa, Homo sapiens
  CDR3 for beta chain variable domain of TCR clone 373084 (TRBV7-2, TRBJ1-1)
CASSFLTGTTEAFF

SEQ ID NO: 746169 - protein, 15 aa, Homo sapiens
  CDR3 for alpha chain variable domain of TCR clone 373085 (TRAV8-3, TRAJ27)
CAVGPSKTNAGKSTF

SEQ ID NO: 746170 - protein, 13 aa, Homo sapiens
  CDR3 for beta chain variable domain of TCR clone 373085 (TRBV20-1, TRBJ1-1)
CSAPLVWGTEAFF

SEQ ID NO: 746171 - protein, 23 aa, Homo sapiens
  CDR3 for alpha chain variable domain of TCR clone 373086 (TRAV12-2, TRAJ39)
CSSDSQPSDSATYLCAVNNMLTF

SEQ ID NO: 746172 - protein, 16 aa, Homo sapiens
  CDR3 for beta chain variable domain of TCR clone 373086 (TRBV5-3, TRBJ2-2)
CARSFGTGTNTGELFF

SEQ ID NO: 746173 - protein, 12 aa, Homo sapiens
  CDR3 for alpha chain variable domain of TCR clone 373087 (TRAV1-1, TRAJ8)
CAGGTGFQKLVF

SEQ ID NO: 746174 - protein, 15 aa, Homo sapiens
  CDR3 for beta chain variable domain of TCR clone 373087 (TRBV7-9)
CASSRTGGFNEKLFF

SEQ ID NO: 746175 - protein, 16 aa, Homo sapiens
  CDR3 for alpha chain variable domain of TCR clone 373088 (TRAV38-2/DV8, TRAJ45)
CAYRGNSGGGADGLTF

SEQ ID NO: 746176 - protein, 14 aa, Homo sapiens
  CDR3 for beta chain variable domain of TCR clone 373088 (TRBV11-1, TRBJ2-7)
CASSLEREWGEQYF

SEQ ID NO: 746177 - protein, 13 aa, Homo sapiens
  CDR3 for alpha chain variable domain of TCR clone 373089 (TRAV2, TRAJ40)
CAVVPSGTYKYIF

SEQ ID NO: 746178 - protein, 15 aa, Homo sapiens
  CDR3 for beta chain variable domain of TCR clone 373089 (TRBV11-3, TRBJ2-3)
CASPKDGREGDTQYF

SEQ ID NO: 746179 - protein, 11 aa, Homo sapiens
  CDR3 for alpha chain variable domain of TCR clone 373090 (TRAV26-1, TRAJ29)
CIVRSHTPLVF

SEQ ID NO: 746180 - protein, 13 aa, Homo sapiens
  CDR3 for beta chain variable domain of TCR clone 373090 (TRBV19, TRBJ1-2)
CASSQGQVYGYTF

SEQ ID NO: 746181 - protein, 14 aa, Homo sapiens
  CDR3 for alpha chain variable domain of TCR clone 373091 (TRAV38-1, TRAJ40)
CALRPTSGTYKYIF

SEQ ID NO: 746182 - protein, 13 aa, Homo sapiens
  CDR3 for beta chain variable domain of TCR clone 373091 (TRBV7-3, TRBJ2-1)
CASSLDSYNEQFF

SEQ ID NO: 746183 - protein, 14 aa, Homo sapiens
  CDR3 for alpha chain variable domain of TCR clone 373092 (TRAV12-2, TRAJ17)
CAVLFKAAGNKLTF

SEQ ID NO: 746184 - protein, 18 aa, Homo sapiens
  CDR3 for beta chain variable domain of TCR clone 373092 (TRBV20-1, TRBJ2-3)
CSASGLAGGAGDHRYAVF

SEQ ID NO: 746185 - protein, 15 aa, Homo sapiens
  CDR3 for alpha chain variable domain of TCR clone 373093 (TRAV20, TRAJ58)
CAVQDLETSGSRSTF

SEQ ID NO: 746186 - protein, 12 aa, Homo sapiens
  CDR3 for beta chain variable domain of TCR clone 373093 (TRBV9, TRBJ2-2)
CASSARTRELFF

SEQ ID NO: 746187 - protein, 12 aa, Homo sapiens
  CDR3 for alpha chain variable domain of TCR clone 373094 (TRAV20, TRAJ23)
CAVQAPGGKLIF

SEQ ID NO: 746188 - protein, 14 aa, Homo sapiens
  CDR3 for beta chain variable domain of TCR clone 373094 (TRBV7-6, TRBJ2-3)
CASSLGTVTDTQYF

SEQ ID NO: 746189 - protein, 16 aa, Homo sapiens
  CDR3 for alpha chain variable domain of TCR clone 373095 (TRAV29/DV5, TRAJ39)
CAASLLFNNAGNMLTF

SEQ ID NO: 746190 - protein, 15 aa, Homo sapiens
  CDR3 for beta chain variable domain of TCR clone 373095 (TRBV2, TRBJ2-1)
CASSELAGSYNEQFF

SEQ ID NO: 746191 - protein, 12 aa, Homo sapiens
  CDR3 for alpha chain variable domain of TCR clone 373096 (TRAV13-2, TRAJ23)
CAERNRGGKLIF

SEQ ID NO: 746192 - protein, 14 aa, Homo sapiens
  CDR3 for beta chain variable domain of TCR clone 373096 (TRBV20-1, TRBJ2-4)
CSASGRVGENIQYF

SEQ ID NO: 746193 - protein, 12 aa, Homo sapiens
  CDR3 for alpha chain variable domain of TCR clone 373097 (TRAV8-3, TRAJ20)
CAVGPNDYKLSF

SEQ ID NO: 746194 - protein, 16 aa, Homo sapiens
  CDR3 for beta chain variable domain of TCR clone 373097 (TRBV19, TRBJ2-2)
CASRSPGTGATGELFF

SEQ ID NO: 746195 - protein, 14 aa, Homo sapiens
  CDR3 for alpha chain variable domain of TCR clone 373098 (TRAV12-1, TRAJ40)
CVVYTTSGTYKYIF

SEQ ID NO: 746196 - protein, 17 aa, Homo sapiens
  CDR3 for beta chain variable domain of TCR clone 373098 (TRBV4-2, TRBJ1-1)
CASTQFGGGSGNTEAFF

SEQ ID NO: 746197 - protein, 13 aa, Homo sapiens
  CDR3 for alpha chain variable domain of TCR clone 373099 (TRAV12-2, TRAJ38)
CAVNAGNNRKLIW

SEQ ID NO: 746198 - protein, 13 aa, Homo sapiens
  CDR3 for beta chain variable domain of TCR clone 373099 (TRBV7-9, TRBJ1-1)
CASSRRDTRRAFF

SEQ ID NO: 746199 - protein, 18 aa, Homo sapiens
  CDR3 for alpha chain variable domain of TCR clone 373100 (TRAV26-1, TRAJ23)
CIVRVGLEVGKQGGKLIF

SEQ ID NO: 746200 - protein, 16 aa, Homo sapiens
  CDR3 for beta chain variable domain of TCR clone 373100 (TRBV12-4, TRBJ2-5)
CASSFFVRGRHETQYF

SEQ ID NO: 746201 - protein, 14 aa, Homo sapiens
  CDR3 for alpha chain variable domain of TCR clone 373101 (TRAV26-1, TRAJ38)
CIADNAGNNCKLIL

SEQ ID NO: 746202 - protein, 13 aa, Homo sapiens
  CDR3 for beta chain variable domain of TCR clone 373101 (TRBV20-1, TRBJ1-1)
CSARGGGNTEAFF

SEQ ID NO: 746203 - protein, 12 aa, Homo sapiens
  CDR3 for alpha chain variable domain of TCR clone 373102 (TRAV12-1, TRAJ34)
CVVAGATDKLIF

SEQ ID NO: 746204 - protein, 15 aa, Homo sapiens
  CDR3 for beta chain variable domain of TCR clone 373102 (TRBV2, TRBJ2-1)
CASSELAGSYNEQFF

SEQ ID NO: 746205 - protein, 15 aa, Homo sapiens
  CDR3 for alpha chain variable domain of TCR clone 373103 (TRAV8-3, TRAJ45)
CASSYSGGGADGLTF

SEQ ID NO: 746206 - protein, 14 aa, Homo sapiens
  CDR3 for beta chain variable domain of TCR clone 373103 (TRBV19, TRBJ2-1)
CASPTFVFSGEQFF

SEQ ID NO: 746207 - protein, 18 aa, Homo sapiens
  CDR3 for alpha chain variable domain of TCR clone 373104 (TRAV26-1, TRAJ52)
CIVRVAGAGGTSYGKMTF

SEQ ID NO: 746208 - protein, 13 aa, Homo sapiens
  CDR3 for beta chain variable domain of TCR clone 373104 (TRBV7-8, TRBJ1-2)
CASSAQSYYGYTF

SEQ ID NO: 746209 - protein, 16 aa, Homo sapiens
  CDR3 for alpha chain variable domain of TCR clone 373105 (TRAV3, TRAJ37)
CAVRPHGSGNTGKLIF

SEQ ID NO: 746210 - protein, 14 aa, Homo sapiens
  CDR3 for beta chain variable domain of TCR clone 373105 (TRBV7-9, TRBJ2-1)
CASSPRDSLYEQFF

SEQ ID NO: 746211 - protein, 12 aa, Homo sapiens
  CDR3 for alpha chain variable domain of TCR clone 373106 (TRAV1-1, TRAJ30)
CAVRGRDDKIIF

SEQ ID NO: 746212 - protein, 14 aa, Homo sapiens
  CDR3 for beta chain variable domain of TCR clone 373106 (TRBV7-9, TRBJ2-2)
CASSLVQDTGELFF

SEQ ID NO: 746213 - protein, 12 aa, Homo sapiens
  CDR3 for alpha chain variable domain of TCR clone 373107 (TRAV8-3, TRAJ20)
CAVGANDYKLSF

SEQ ID NO: 746214 - protein, 16 aa, Homo sapiens
  CDR3 for beta chain variable domain of TCR clone 373107 (TRBV12-4, TRBJ2-5)
CASSLSTSGGKETQYF

SEQ ID NO: 746215 - protein, 14 aa, Homo sapiens
  CDR3 for alpha chain variable domain of TCR clone 373108 (TRAV12-3, TRAJ10)
SHLPLTGGGNKLTF

SEQ ID NO: 746216 - protein, 13 aa, Homo sapiens
  CDR3 for beta chain variable domain of TCR clone 373108 (TRBV7-9, TRBJ1-2)
CVSSLKQNYGYTF

SEQ ID NO: 746217 - protein, 16 aa, Homo sapiens
  CDR3 for alpha chain variable domain of TCR clone 373109 (TRAV12-3, TRAJ53)
CAMGPGSGGSNYKLTF

SEQ ID NO: 746218 - protein, 17 aa, Homo sapiens
  CDR3 for beta chain variable domain of TCR clone 373109 (TRBV28, TRBJ2-5)
CASSTPEGDALQETQYF

SEQ ID NO: 746219 - protein, 13 aa, Homo sapiens
  CDR3 for alpha chain variable domain of TCR clone 373110 (TRAV2, TRAJ40)
CAVVTSGTYKCIF

SEQ ID NO: 746220 - protein, 15 aa, Homo sapiens
  CDR3 for beta chain variable domain of TCR clone 373110 (TRBV11-3, TRBJ2-3)
CASLKDGREGDTQYY

SEQ ID NO: 746221 - protein, 12 aa, Homo sapiens
  CDR3 for alpha chain variable domain of TCR clone 373111 (TRAV3, TRAJ39)
CAVIEWSNKLTF

SEQ ID NO: 746222 - protein, 14 aa, Homo sapiens
  CDR3 for beta chain variable domain of TCR clone 373111 (TRBV7-8, TRBJ2-3)
CASSFPDGQDTQYF

SEQ ID NO: 746223 - protein, 16 aa, Homo sapiens
  CDR3 for alpha chain variable domain of TCR clone 373112 (TRAV3, TRAJ13)
CAVRDPNSGGYQKVTF

SEQ ID NO: 746224 - protein, 13 aa, Homo sapiens
  CDR3 for beta chain variable domain of TCR clone 373112 (TRBV7-9, TRBJ2-7)
CPSSLQGSYEQYF

SEQ ID NO: 746225 - protein, 14 aa, Homo sapiens
  CDR3 for alpha chain variable domain of TCR clone 373113 (TRAV26-1, TRAJ26)
CIVRATFLGQNFVF

SEQ ID NO: 746226 - protein, 16 aa, Homo sapiens
  CDR3 for beta chain variable domain of TCR clone 373113 (TRBV12-4, TRBJ2-7)
CASRSTVTGPSYEQYF

SEQ ID NO: 746227 - protein, 13 aa, Homo sapiens
  CDR3 for alpha chain variable domain of TCR clone 373114 (TRAV12-3, TRAJ13)
CAMRSGGYQKVTF

SEQ ID NO: 746228 - protein, 15 aa, Homo sapiens
  CDR3 for beta chain variable domain of TCR clone 373114 (TRBV7-9, TRBJ1-6)
CASSSPGRGNSPLHF

SEQ ID NO: 746229 - protein, 17 aa, Homo sapiens
  CDR3 for alpha chain variable domain of TCR clone 373115 (TRAV3, TRAJ12)
CAVRDGGRMDSSYKLIF

SEQ ID NO: 746230 - protein, 15 aa, Homo sapiens
  CDR3 for beta chain variable domain of TCR clone 373115 (TRBV12-4, TRBJ1-1)
CASSLAVSRGAEAFF

SEQ ID NO: 746231 - protein, 13 aa, Homo sapiens
  CDR3 for alpha chain variable domain of TCR clone 373116 (TRAV1-1, TRAJ9)
CAAKNTGGFKTIF

SEQ ID NO: 746232 - protein, 15 aa, Homo sapiens
  CDR3 for beta chain variable domain of TCR clone 373116 (TRBV10-2, TRBJ2-6)
CASSEQGTGANVLTF

SEQ ID NO: 746233 - protein, 11 aa, Homo sapiens
  CDR3 for alpha chain variable domain of TCR clone 373117 (TRAV27, TRAJ45)
SSGGGADGLTF

SEQ ID NO: 746234 - protein, 17 aa, Homo sapiens
  CDR3 for beta chain variable domain of TCR clone 373117 (TRBV11-2, TRBJ2-1)
CASSLYPPGVECNEQFF

SEQ ID NO: 746235 - protein, 12 aa, Homo sapiens
  CDR3 for alpha chain variable domain of TCR clone 373118 (TRAV21, TRAJ11)
CAATSGYSTLTF

SEQ ID NO: 746236 - protein, 14 aa, Homo sapiens
  CDR3 for beta chain variable domain of TCR clone 373118 (TRBV20-1, TRBJ2-7)
CSAPELAGVGEQSF

SEQ ID NO: 746237 - protein, 18 aa, Homo sapiens
  CDR3 for alpha chain variable domain of TCR clone 373119 (TRAV13-1, TRAJ52)
CAAKNPNAGGTSYGKLTF

SEQ ID NO: 746238 - protein, 11 aa, Homo sapiens
  CDR3 for beta chain variable domain of TCR clone 373119 (TRBV29-1, TRBJ1-1)
CSVEVGTRTFF

SEQ ID NO: 746239 - protein, 14 aa, Homo sapiens
  CDR3 for alpha chain variable domain of TCR clone 373120 (TRAV12-2, TRAJ36)
CAVKISTGAHNLFF

SEQ ID NO: 746240 - protein, 14 aa, Homo sapiens
  CDR3 for beta chain variable domain of TCR clone 373120 (TRBV25-1, TRBJ1-2)
CASSDTTGVVGYTF

SEQ ID NO: 746241 - protein, 12 aa, Homo sapiens
  CDR3 for alpha chain variable domain of TCR clone 373121 (TRAV12-3, TRAJ17)
CAMTLTGNKLTF

SEQ ID NO: 746242 - protein, 15 aa, Homo sapiens
  CDR3 for beta chain variable domain of TCR clone 373121 (TRBV20-1, TRBJ2-7)
CSARDRVCGRDEQYF

SEQ ID NO: 746243 - protein, 14 aa, Homo sapiens
  CDR3 for alpha chain variable domain of TCR clone 373122 (TRAV17, TRAJ5)
CATVALTGSRALTF

SEQ ID NO: 746244 - protein, 14 aa, Homo sapiens
  CDR3 for beta chain variable domain of TCR clone 373122 (TRBV28, TRBJ2-7)
CASSPYGMAYEQYF

SEQ ID NO: 746245 - protein, 14 aa, Homo sapiens
  CDR3 for alpha chain variable domain of TCR clone 373123 (TRAV1-2, TRAJ16)
CAVNRFLDGQKLLF

SEQ ID NO: 746246 - protein, 13 aa, Homo sapiens
  CDR3 for beta chain variable domain of TCR clone 373123 (TRBV20-1, TRBJ1-1)
CSARGGGNTEAFF

SEQ ID NO: 746247 - protein, 15 aa, Homo sapiens
  CDR3 for alpha chain variable domain of TCR clone 373124 (TRAV14/DV4, TRAJ12)
CAMREGWDSSYKLIF

SEQ ID NO: 746248 - protein, 16 aa, Homo sapiens
  CDR3 for beta chain variable domain of TCR clone 373124 (TRBV2, TRBJ2-5)
CASSVTQGVGEETQYF

SEQ ID NO: 746249 - protein, 13 aa, Homo sapiens
  CDR3 for alpha chain variable domain of TCR clone 373125 (TRAV13-1, TRAJ40)
CAAISPGTYEYIF

SEQ ID NO: 746250 - protein, 12 aa, Homo sapiens
  CDR3 for beta chain variable domain of TCR clone 373125 (TRBV3-1, TRBJ2-1)
CASGGLGNEQFF

SEQ ID NO: 746251 - protein, 15 aa, Homo sapiens
  CDR3 for alpha chain variable domain of TCR clone 373126 (TRAV3, TRAJ22)
CAVRDRGGSARPLPF

SEQ ID NO: 746252 - protein, 16 aa, Homo sapiens
  CDR3 for beta chain variable domain of TCR clone 373126 (TRBV5-4, TRBJ2-3)
CASQQPGAGGADTQYF

SEQ ID NO: 746253 - protein, 18 aa, Homo sapiens
  CDR3 for alpha chain variable domain of TCR clone 373127 (TRAV21, TRAJ52)
CAVRPSPAGGTSSGTLTF

SEQ ID NO: 746254 - protein, 16 aa, Homo sapiens
  CDR3 for beta chain variable domain of TCR clone 373127 (TRBV13, TRBJ2-2)
CASSPRTGEHTGELFF

SEQ ID NO: 746255 - protein, 14 aa, Homo sapiens
  CDR3 for alpha chain variable domain of TCR clone 373128 (TRAV1-2, TRAJ28)
CVARSGAGSYQLTF

SEQ ID NO: 746256 - protein, 13 aa, Homo sapiens
  CDR3 for beta chain variable domain of TCR clone 373128 (TRBV7-2, TRBJ1-1)
CASNLKGAKVAFF

SEQ ID NO: 746257 - protein, 11 aa, Homo sapiens
  CDR3 for alpha chain variable domain of TCR clone 373129 (TRAV21, TRAJ34)
CAHYNTDKLIF

SEQ ID NO: 746258 - protein, 16 aa, Homo sapiens
  CDR3 for beta chain variable domain of TCR clone 373129 (TRBV20-1, TRBJ1-4)
CSAPGQGLLTNEKLFF

SEQ ID NO: 746259 - protein, 12 aa, Homo sapiens
  CDR3 for alpha chain variable domain of TCR clone 373130 (TRAV6, TRAJ27)
CSRIRGAGKSTF

SEQ ID NO: 746260 - protein, 14 aa, Homo sapiens
  CDR3 for beta chain variable domain of TCR clone 373130 (TRBV4-1, TRBJ2-7)
CASSQGTTSYEQYF

SEQ ID NO: 746261 - protein, 21 aa, Homo sapiens
  CDR3 for alpha chain variable domain of TCR clone 373131 (TRAV1-1, TRAJ38)
CASNAGNNHIQNPDPAVYQLR

SEQ ID NO: 746262 - protein, 14 aa, Homo sapiens
  CDR3 for beta chain variable domain of TCR clone 373131 (TRBV15, TRBJ2-1)
CATSGVEDYNEQFF

SEQ ID NO: 746263 - protein, 14 aa, Homo sapiens
  CDR3 for alpha chain variable domain of TCR clone 373132 (TRAV26-2, TRAJ32)
CCVGSGGATNKLIF

SEQ ID NO: 746264 - protein, 13 aa, Homo sapiens
  CDR3 for beta chain variable domain of TCR clone 373132 (TRBV12-5, TRBJ2-3)
CASGDRQSDTQYF

SEQ ID NO: 746265 - protein, 16 aa, Homo sapiens
  CDR3 for alpha chain variable domain of TCR clone 373133 (TRAV2, TRAJ26)
TTMLGPPGDYGQNFVF

SEQ ID NO: 746266 - protein, 16 aa, Homo sapiens
  CDR3 for beta chain variable domain of TCR clone 373133 (TRBV13, TRBJ2-2)
CASSPRAGEHTGELFF

SEQ ID NO: 746267 - protein, 13 aa, Homo sapiens
  CDR3 for alpha chain variable domain of TCR clone 373134 (TRAV29/DV5, TRAJ31)
CSASRNNNARLMF

SEQ ID NO: 746268 - protein, 18 aa, Homo sapiens
  CDR3 for beta chain variable domain of TCR clone 373134 (TRBV4-1, TRBJ1-5)
CASSQDPRGQGLNQPQHF

SEQ ID NO: 746269 - protein, 14 aa, Homo sapiens
  CDR3 for alpha chain variable domain of TCR clone 373135 (TRAV2, TRAJ9)
CAVEDRSGGFKTIF

SEQ ID NO: 746270 - protein, 12 aa, Homo sapiens
  CDR3 for beta chain variable domain of TCR clone 373135 (TRBV12-4, TRBJ2-4)
CASSSAGNIQYF

SEQ ID NO: 746271 - protein, 21 aa, Homo sapiens
  CDR3 for alpha chain variable domain of TCR clone 373136 (TRAV20, )
CSVTGANNIQNPDPAVYQLRD

SEQ ID NO: 746272 - protein, 14 aa, Homo sapiens
  CDR3 for beta chain variable domain of TCR clone 373136 (TRBV20-1, TRBJ2-5)
CSALVPGYQETQYF

SEQ ID NO: 746273 - protein, 17 aa, Homo sapiens
  CDR3 for alpha chain variable domain of TCR clone 373137 (TRAV23/DV6, TRAJ57)
CAASSTLSQGGSAKLVF

SEQ ID NO: 746274 - protein, 15 aa, Homo sapiens
  CDR3 for beta chain variable domain of TCR clone 373137 (TRBV20-1, TRBJ2-7)
CSARDRVSGMDEQYF

SEQ ID NO: 746275 - protein, 13 aa, Homo sapiens
  CDR3 for alpha chain variable domain of TCR clone 373138 (TRAV12-2, TRAJ47)
CAVFMEYGNKLVF

SEQ ID NO: 746276 - protein, 14 aa, Homo sapiens
  CDR3 for beta chain variable domain of TCR clone 373138 (TRBV4-1, TRBJ1-5)
CASSQGPTNQPQLF

SEQ ID NO: 746277 - protein, 14 aa, Homo sapiens
  CDR3 for alpha chain variable domain of TCR clone 373139 (TRAV23/DV6, TRAJ21)
CAAYKSAPRDKFYF

SEQ ID NO: 746278 - protein, 15 aa, Homo sapiens
  CDR3 for beta chain variable domain of TCR clone 373139 (TRBV5-4, TRBJ2-2)
CASSLTSRGTGELFF

SEQ ID NO: 746279 - protein, 14 aa, Homo sapiens
  CDR3 for alpha chain variable domain of TCR clone 373140 (TRAV26-1, TRAJ38)
CIADNAGNNRKLIW

SEQ ID NO: 746280 - protein, 13 aa, Homo sapiens
  CDR3 for beta chain variable domain of TCR clone 373140 (TRBV20-1, TRBJ1-2)
CSARGTADYGYTF

SEQ ID NO: 746281 - protein, 13 aa, Homo sapiens
  CDR3 for alpha chain variable domain of TCR clone 373141 (TRAV29/DV5, TRAJ13)
CAARPGGYQKVTF

SEQ ID NO: 746282 - protein, 15 aa, Homo sapiens
  CDR3 for beta chain variable domain of TCR clone 373141 (TRBV12-4, TRBJ1-2)
CASSFPRGLSYGNTF

SEQ ID NO: 746283 - protein, 15 aa, Homo sapiens
  CDR3 for alpha chain variable domain of TCR clone 373142 (TRAV26-1, TRAJ44)
CIVRANTGTASKLTF

SEQ ID NO: 746284 - protein, 12 aa, Homo sapiens
  CDR3 for beta chain variable domain of TCR clone 373142 (TRBV28, TRBJ2-3)
CASRLYRDTQYF

SEQ ID NO: 746285 - protein, 14 aa, Homo sapiens
  CDR3 for alpha chain variable domain of TCR clone 373143 (TRAV1-1, TRAJ5)
CAVRDGAGRRALTF

SEQ ID NO: 746286 - protein, 13 aa, Homo sapiens
  CDR3 for beta chain variable domain of TCR clone 373143 (TRBV7-8, TRBJ1-5)
CASSQGENQPQHF

SEQ ID NO: 746287 - protein, 14 aa, Homo sapiens
  CDR3 for alpha chain variable domain of TCR clone 373144 (TRAV1-2, TRAJ8)
CAVREDTGFQRLVF

SEQ ID NO: 746288 - protein, 13 aa, Homo sapiens
  CDR3 for beta chain variable domain of TCR clone 373144 (TRBV5-1, TRBJ1-2)
CASSIDRPEGYTF

SEQ ID NO: 746289 - protein, 16 aa, Homo sapiens
  CDR3 for alpha chain variable domain of TCR clone 373145 (TRAV14/DV4, TRAJ54)
CAMREGRIQGAQKLVF

SEQ ID NO: 746290 - protein, 15 aa, Homo sapiens
  CDR3 for beta chain variable domain of TCR clone 373145 (TRBV7-9, TRBJ1-6)
CASSSPGRGNSPLHF

SEQ ID NO: 746291 - protein, 17 aa, Homo sapiens
  CDR3 for alpha chain variable domain of TCR clone 373146 (TRAV13-1, TRAJ28)
CAASPPYSGAGSYQLTF

SEQ ID NO: 746292 - protein, 13 aa, Homo sapiens
  CDR3 for beta chain variable domain of TCR clone 373146 (TRBV2, TRBJ2-3)
CASILAGGQGQYF

SEQ ID NO: 746293 - protein, 12 aa, Homo sapiens
  CDR3 for alpha chain variable domain of TCR clone 373147 (TRAV1-1, TRAJ8)
CAGGTGFQKLVF

SEQ ID NO: 746294 - protein, 16 aa, Homo sapiens
  CDR3 for beta chain variable domain of TCR clone 373147 (TRBV12-4, TRBJ1-5)
CASSRPVGGSNQPQYF

SEQ ID NO: 746295 - protein, 12 aa, Homo sapiens
  CDR3 for alpha chain variable domain of TCR clone 373148 (TRAV17, TRAJ29)
CYASSGNTPLVF

SEQ ID NO: 746296 - protein, 13 aa, Homo sapiens
  CDR3 for beta chain variable domain of TCR clone 373148 (TRBV14, TRBJ2-7)
CASSQGRRYEQYF

SEQ ID NO: 746297 - protein, 15 aa, Homo sapiens
  CDR3 for alpha chain variable domain of TCR clone 373149 (TRAV8-3, TRAJ45)
CASSYSGGGADGLTF

SEQ ID NO: 746298 - protein, 16 aa, Homo sapiens
  CDR3 for beta chain variable domain of TCR clone 373149 (TRBV6-6, TRBJ2-1)
CASSYSFSGSYNEQFF

SEQ ID NO: 746299 - protein, 16 aa, Homo sapiens
  CDR3 for alpha chain variable domain of TCR clone 373150 (TRAV30, TRAJ24)
CGTEIVDADSWGKFQF

SEQ ID NO: 746300 - protein, 12 aa, Homo sapiens
  CDR3 for beta chain variable domain of TCR clone 373150 (TRBV11-2, TRBJ2-2)
CASSLGGGELFL

SEQ ID NO: 746301 - protein, 14 aa, Homo sapiens
  CDR3 for alpha chain variable domain of TCR clone 373151 (TRAV12-2, TRAJ13)
CAVKKTGGYQKVTL

SEQ ID NO: 746302 - protein, 15 aa, Homo sapiens
  CDR3 for beta chain variable domain of TCR clone 373151 (TRBV27, TRBJ2-1)
CACSNGGGSSNEQFF

SEQ ID NO: 746303 - protein, 10 aa, Homo sapiens
  CDR3 for alpha chain variable domain of TCR clone 373152 (TRAV12-2, TRAJ49)
RAVRRNQFYF

SEQ ID NO: 746304 - protein, 14 aa, Homo sapiens
  CDR3 for beta chain variable domain of TCR clone 373152 (TRBV7-2, TRBJ2-7)
CASRSQGAAYEQYF

SEQ ID NO: 746305 - protein, 14 aa, Homo sapiens
  CDR3 for alpha chain variable domain of TCR clone 373153 (TRAV29/DV5, TRAJ13)
CAASLSGGYQKVTF

SEQ ID NO: 746306 - protein, 14 aa, Homo sapiens
  CDR3 for beta chain variable domain of TCR clone 373153 (TRBV19, TRBJ2-1)
CASPTFVLSGEQFF

SEQ ID NO: 746307 - protein, 16 aa, Homo sapiens
  CDR3 for alpha chain variable domain of TCR clone 373154 (TRAV3, TRAJ37)
CAVRGKGSGDTGKLIF

SEQ ID NO: 746308 - protein, 14 aa, Homo sapiens
  CDR3 for beta chain variable domain of TCR clone 373154 (TRBV7-2, TRBJ2-7)
CASSPKTSFYEQYF

SEQ ID NO: 746309 - protein, 13 aa, Homo sapiens
  CDR3 for alpha chain variable domain of TCR clone 373155 (TRAV3, TRAJ34)
CAVRAGGTDKLIF

SEQ ID NO: 746310 - protein, 15 aa, Homo sapiens
  CDR3 for beta chain variable domain of TCR clone 373155 (TRBV19, TRBJ2-1)
CASSINREPSHEQFF

SEQ ID NO: 746311 - protein, 12 aa, Homo sapiens
  CDR3 for alpha chain variable domain of TCR clone 373156 (TRAV8-3, TRAJ40)
CAVASGTYIYIF

SEQ ID NO: 746312 - protein, 14 aa, Homo sapiens
  CDR3 for beta chain variable domain of TCR clone 373156 (TRBV12-4, TRBJ2-3)
CASSGQGSTDKQYF

SEQ ID NO: 746313 - protein, 14 aa, Homo sapiens
  CDR3 for alpha chain variable domain of TCR clone 373157 (TRAV1-2, TRAJ16)
CAVNRFSDVQKLLF

SEQ ID NO: 746314 - protein, 18 aa, Homo sapiens
  CDR3 for beta chain variable domain of TCR clone 373157 (TRBV20-1, TRBJ2-6)
CSAETTPTHGSGANVLTF

SEQ ID NO: 746315 - protein, 16 aa, Homo sapiens
  CDR3 for alpha chain variable domain of TCR clone 373158 (TRAV23/DV6, )
CADIQNPDPAVYQLSD

SEQ ID NO: 746316 - protein, 13 aa, Homo sapiens
  CDR3 for beta chain variable domain of TCR clone 373158 (TRBV28, TRBJ2-7)
CARRSSGVYEQYF

SEQ ID NO: 746317 - protein, 11 aa, Homo sapiens
  CDR3 for alpha chain variable domain of TCR clone 373159 (TRAV12-1, TRAJ30)
CVVNGQVKIIF

SEQ ID NO: 746318 - protein, 12 aa, Homo sapiens
  CDR3 for beta chain variable domain of TCR clone 373159 (TRBV27, TRBJ2-2)
CASKLFTGELFF

SEQ ID NO: 746319 - protein, 14 aa, Homo sapiens
  CDR3 for alpha chain variable domain of TCR clone 373160 (TRAV1-2, TRAJ16)
CAVNRFSDGQKLLF

SEQ ID NO: 746320 - protein, 15 aa, Homo sapiens
  CDR3 for beta chain variable domain of TCR clone 373160 (TRBV7-9, TRBJ1-6)
CSSSSPGRGDSPLHF

SEQ ID NO: 746321 - protein, 16 aa, Homo sapiens
  CDR3 for alpha chain variable domain of TCR clone 373161 (TRAV3, TRAJ10)
CAARDMRAGGGNKLTF

SEQ ID NO: 746322 - protein, 14 aa, Homo sapiens
  CDR3 for beta chain variable domain of TCR clone 373161 (TRBV25-1, TRBJ1-1)
CASTHLGGNTEAFF

SEQ ID NO: 746323 - protein, 11 aa, Homo sapiens
  CDR3 for alpha chain variable domain of TCR clone 373162 (TRAV13-2, TRAJ17)
CAENKWGKLQA

SEQ ID NO: 746324 - protein, 16 aa, Homo sapiens
  CDR3 for beta chain variable domain of TCR clone 373162 (TRBV20-1, TRBJ1-2)
SSASMGQGVANYGYTF

SEQ ID NO: 746325 - protein, 15 aa, Homo sapiens
  CDR3 for alpha chain variable domain of TCR clone 373163 (TRAV12-2, TRAJ8)
CAVREENTGFQKLVF

SEQ ID NO: 746326 - protein, 13 aa, Homo sapiens
  CDR3 for beta chain variable domain of TCR clone 373163 (TRBV14, TRBJ1-1)
CASSQEAGTEAFF

SEQ ID NO: 746327 - protein, 14 aa, Homo sapiens
  CDR3 for alpha chain variable domain of TCR clone 373164 (TRAV12-2, TRAJ36)
CAVNPPTGANNLFF

SEQ ID NO: 746328 - protein, 13 aa, Homo sapiens
  CDR3 for beta chain variable domain of TCR clone 373164 (TRBV20-1, TRBJ1-6)
CSAPTGRGSPLHF

SEQ ID NO: 746329 - protein, 15 aa, Homo sapiens
  CDR3 for alpha chain variable domain of TCR clone 373165 (TRAV26-1, TRAJ15)
CIVRPANQAGTALIF

SEQ ID NO: 746330 - protein, 15 aa, Homo sapiens
  CDR3 for beta chain variable domain of TCR clone 373165 (TRBV11-2, TRBJ2-2)
CASSSDRVNAGELFF

SEQ ID NO: 746331 - protein, 13 aa, Homo sapiens
  CDR3 for alpha chain variable domain of TCR clone 373166 (TRAV21, TRAJ20)
CAVGVFADYKLSF

SEQ ID NO: 746332 - protein, 14 aa, Homo sapiens
  CDR3 for beta chain variable domain of TCR clone 373166 (TRBV4-2, TRBJ1-4)
CASSPSSGNETLFF

SEQ ID NO: 746333 - protein, 17 aa, Homo sapiens
  CDR3 for alpha chain variable domain of TCR clone 373167 (TRAV3, TRAJ28)
CAVREAYSGAGSHQLTF

SEQ ID NO: 746334 - protein, 17 aa, Homo sapiens
  CDR3 for beta chain variable domain of TCR clone 373167 (TRBV20-1, TRBJ2-1)
CSASSSGLAGSYNEQFF

SEQ ID NO: 746335 - protein, 18 aa, Homo sapiens
  CDR3 for alpha chain variable domain of TCR clone 373168 (TRAV13-1, TRAJ52)
CAASKRSAGGTSYGKLTF

SEQ ID NO: 746336 - protein, 13 aa, Homo sapiens
  CDR3 for beta chain variable domain of TCR clone 373168 (TRBV14, TRBJ2-7)
CASSYRGAYEQYF

SEQ ID NO: 746337 - protein, 14 aa, Homo sapiens
  CDR3 for alpha chain variable domain of TCR clone 373169 (TRAV1-2, TRAJ8)
CAVREDTGFQKIVF

SEQ ID NO: 746338 - protein, 14 aa, Homo sapiens
  CDR3 for beta chain variable domain of TCR clone 373169 (TRBV29-1, TRBJ2-5)
CSVETSGSGETQYF

SEQ ID NO: 746339 - protein, 15 aa, Homo sapiens
  CDR3 for alpha chain variable domain of TCR clone 373170 (TRAV12-1, TRAJ53)
CATLNSGGSNYKLTF

SEQ ID NO: 746340 - protein, 15 aa, Homo sapiens
  CDR3 for beta chain variable domain of TCR clone 373170 (TRBV20-1, TRBJ2-7)
CSARDRVSGMDEQYF

SEQ ID NO: 746341 - protein, 14 aa, Homo sapiens
  CDR3 for alpha chain variable domain of TCR clone 373171 (TRAV16, TRAJ42)
CALLAGGSQGNLIF

SEQ ID NO: 746342 - protein, 14 aa, Homo sapiens
  CDR3 for beta chain variable domain of TCR clone 373171 (TRBV7-9, TRBJ2-5)
CASSLVGGEEIQYF

SEQ ID NO: 746343 - protein, 14 aa, Homo sapiens
  CDR3 for alpha chain variable domain of TCR clone 373172 (TRAV1-1, TRAJ27)
CAVIYNTNAGKSTF

SEQ ID NO: 746344 - protein, 17 aa, Homo sapiens
  CDR3 for beta chain variable domain of TCR clone 373172 (TRBV18, TRBJ2-2)
CASSQRSSGQGPGELFF

SEQ ID NO: 746345 - protein, 13 aa, Homo sapiens
  CDR3 for alpha chain variable domain of TCR clone 373173 (TRAV17, TRAJ5)
CAPMDTGRRALTF

SEQ ID NO: 746346 - protein, 16 aa, Homo sapiens
  CDR3 for beta chain variable domain of TCR clone 373173 (TRBV27, TRBJ2-7)
SASSSERRDSAYEQYF

SEQ ID NO: 746347 - protein, 15 aa, Homo sapiens
  CDR3 for alpha chain variable domain of TCR clone 373174 (TRAV8-3, TRAJ11)
CAVGLLNSGYSTLTF

SEQ ID NO: 746348 - protein, 14 aa, Homo sapiens
  CDR3 for beta chain variable domain of TCR clone 373174 (TRBV7-6, TRBJ2-3)
CASSVAGGTDTQYF

SEQ ID NO: 746349 - protein, 14 aa, Homo sapiens
  CDR3 for alpha chain variable domain of TCR clone 373175 (TRAV1-2, TRAJ16)
CAVNRFSDGQKLPF

SEQ ID NO: 746350 - protein, 18 aa, Homo sapiens
  CDR3 for beta chain variable domain of TCR clone 373175 (TRBV18, TRBJ1-1)
CASSLPGAPQGAGTEAFF

SEQ ID NO: 746351 - protein, 16 aa, Homo sapiens
  CDR3 for alpha chain variable domain of TCR clone 373176 (TRAV12-3, TRAJ53)
CAMSPGSGGSNFKLTF

SEQ ID NO: 746352 - protein, 13 aa, Homo sapiens
  CDR3 for beta chain variable domain of TCR clone 373176 (TRBV10-3, TRBJ2-7)
CASKLAVNYEQYF

SEQ ID NO: 746353 - protein, 16 aa, Homo sapiens
  CDR3 for alpha chain variable domain of TCR clone 373177 (TRAV17, TRAJ52)
CATGIIGGTSYGKLTV

SEQ ID NO: 746354 - protein, 12 aa, Homo sapiens
  CDR3 for beta chain variable domain of TCR clone 373177 (TRBV7-3, TRBJ2-1)
CASSVINNEQFF

SEQ ID NO: 746355 - protein, 14 aa, Homo sapiens
  CDR3 for alpha chain variable domain of TCR clone 373178 (TRAV23/DV6, TRAJ6)
CAAIPSGVSYIPTF

SEQ ID NO: 746356 - protein, 17 aa, Homo sapiens
  CDR3 for beta chain variable domain of TCR clone 373178 (TRBV7-2, TRBJ2-3)
CASSLGGRAAWRDTQYF

SEQ ID NO: 746357 - protein, 14 aa, Homo sapiens
  CDR3 for alpha chain variable domain of TCR clone 373179 (TRAV13-1, TRAJ35)
CAASKGGFGNVLHC

SEQ ID NO: 746358 - protein, 18 aa, Homo sapiens
  CDR3 for beta chain variable domain of TCR clone 373179 (TRBV5-5, TRBJ1-5)
CASSLRQVKGSSNQPQHF

SEQ ID NO: 746359 - protein, 17 aa, Homo sapiens
  CDR3 for alpha chain variable domain of TCR clone 373180 (TRAV3, TRAJ38)
CAVRDCLNAGNNRKLIW

SEQ ID NO: 746360 - protein, 13 aa, Homo sapiens
  CDR3 for beta chain variable domain of TCR clone 373180 (TRBV23-1, TRBJ1-4)
CASRGKFNERLFF

SEQ ID NO: 746361 - protein, 16 aa, Homo sapiens
  CDR3 for alpha chain variable domain of TCR clone 373181 (TRAV27, TRAJ13)
CAGAKSDSGGYQKVTF

SEQ ID NO: 746362 - protein, 13 aa, Homo sapiens
  CDR3 for beta chain variable domain of TCR clone 373181 (TRBV9, TRBJ2-1)
CASSPSGGNEQFF

SEQ ID NO: 746363 - protein, 19 aa, Homo sapiens
  CDR3 for alpha chain variable domain of TCR clone 373182 (TRAV3, TRAJ6)
CAVRDRNPSRSGVSYIPTF

SEQ ID NO: 746364 - protein, 15 aa, Homo sapiens
  CDR3 for beta chain variable domain of TCR clone 373182 (TRBV18, TRBJ2-7)
CASSPTFMDSYEQYF

SEQ ID NO: 746365 - protein, 12 aa, Homo sapiens
  CDR3 for alpha chain variable domain of TCR clone 373183 (TRAV13-1, TRAJ21)
CAAKEGFNKFYF

SEQ ID NO: 746366 - protein, 19 aa, Homo sapiens
  CDR3 for beta chain variable domain of TCR clone 373183 (TRBV5-1, TRBJ2-3)
CASSLWLAGGITTTDTQYF

SEQ ID NO: 746367 - protein, 10 aa, Homo sapiens
  CDR3 for alpha chain variable domain of TCR clone 373184 (TRAV1-2, TRAJ34)
CAVNTDKLIF

SEQ ID NO: 746368 - protein, 18 aa, Homo sapiens
  CDR3 for beta chain variable domain of TCR clone 373184 (TRBV7-9, TRBJ2-7)
CASSLTTSGSRTWYDQYF

SEQ ID NO: 746369 - protein, 11 aa, Homo sapiens
  CDR3 for alpha chain variable domain of TCR clone 373185 (TRAV2, TRAJ21)
CAVFNFNKFYF

SEQ ID NO: 746370 - protein, 14 aa, Homo sapiens
  CDR3 for beta chain variable domain of TCR clone 373185 (TRBV15, TRBJ2-3)
CATRSGTSTDRQYF

SEQ ID NO: 746371 - protein, 14 aa, Homo sapiens
  CDR3 for alpha chain variable domain of TCR clone 373186 (TRAV1-2, TRAJ16)
CAVNRFSDGQKLFF

SEQ ID NO: 746372 - protein, 14 aa, Homo sapiens
  CDR3 for beta chain variable domain of TCR clone 373186 (TRBV7-9, TRBJ2-3)
CASSLEDGTDTQYF

SEQ ID NO: 746373 - protein, 13 aa, Homo sapiens
  CDR3 for alpha chain variable domain of TCR clone 373187 (TRAV13-1, TRAJ39)
CAASIWAGNMLTC

SEQ ID NO: 746374 - protein, 15 aa, Homo sapiens
  CDR3 for beta chain variable domain of TCR clone 373187 (TRBV7-9, TRBJ1-1)
CASSLLEQGGTEAFF

SEQ ID NO: 746375 - protein, 14 aa, Homo sapiens
  CDR3 for alpha chain variable domain of TCR clone 373188 (TRAV1-2, TRAJ16)
CAVNRFSDGQKLLF

SEQ ID NO: 746376 - protein, 13 aa, Homo sapiens
  CDR3 for beta chain variable domain of TCR clone 373188 (TRBV7-3, TRBJ1-1)
CASSQDWGAEAFC

SEQ ID NO: 746377 - protein, 16 aa, Homo sapiens
  CDR3 for alpha chain variable domain of TCR clone 373189 (TRAV35, TRAJ28)
CAGQKYSGAGSYQLTF

SEQ ID NO: 746378 - protein, 13 aa, Homo sapiens
  CDR3 for beta chain variable domain of TCR clone 373189 (TRBV19, TRBJ1-2)
CASSKGQVYGYTF

SEQ ID NO: 746379 - protein, 14 aa, Homo sapiens
  CDR3 for alpha chain variable domain of TCR clone 373190 (TRAV12-2, TRAJ13)
CAVKKTGGYQNATF

SEQ ID NO: 746380 - protein, 14 aa, Homo sapiens
  CDR3 for beta chain variable domain of TCR clone 373190 (TRBV5-7, TRBJ2-4)
CASTLSGVKNIQYF

SEQ ID NO: 746381 - protein, 10 aa, Homo sapiens
  CDR3 for alpha chain variable domain of TCR clone 373191 (TRAV23/DV6, TRAJ57)
CAASSTLSQG

SEQ ID NO: 746382 - protein, 15 aa, Homo sapiens
  CDR3 for beta chain variable domain of TCR clone 373191 (TRBV7-8, TRBJ2-7)
CASSLERAGSYEQYF

SEQ ID NO: 746383 - protein, 14 aa, Homo sapiens
  CDR3 for alpha chain variable domain of TCR clone 373192 (TRAV16, TRAJ33)
CALSAMDSNYQLIW

SEQ ID NO: 746384 - protein, 19 aa, Homo sapiens
  CDR3 for beta chain variable domain of TCR clone 373192 (TRBV12-4, TRBJ2-1)
CASTLAFDPRDKEANEQFF

SEQ ID NO: 746385 - protein, 14 aa, Homo sapiens
  CDR3 for alpha chain variable domain of TCR clone 373193 (TRAV17, TRAJ34)
CATDSLEGTDKLIF

SEQ ID NO: 746386 - protein, 15 aa, Homo sapiens
  CDR3 for beta chain variable domain of TCR clone 373193 (TRBV7-7, TRBJ2-3)
CASSFGLAPTDTQYF

SEQ ID NO: 746387 - protein, 17 aa, Homo sapiens
  CDR3 for alpha chain variable domain of TCR clone 373194 (TRAV3, TRAJ6)
CAVRDCPRAGGSYIPIF

SEQ ID NO: 746388 - protein, 13 aa, Homo sapiens
  CDR3 for beta chain variable domain of TCR clone 373194 (TRBV20-1, TRBJ1-6)
CSAPLGVGSPLHF

SEQ ID NO: 746389 - protein, 16 aa, Homo sapiens
  CDR3 for alpha chain variable domain of TCR clone 373195 (TRAV4, TRAJ5)
CLVGPDHGHGQESTYA

SEQ ID NO: 746390 - protein, 15 aa, Homo sapiens
  CDR3 for beta chain variable domain of TCR clone 373195 (TRBV27, TRBJ2-5)
CASSLIPSGGETQYF

SEQ ID NO: 746391 - protein, 16 aa, Homo sapiens
  CDR3 for alpha chain variable domain of TCR clone 373196 (TRAV13-1, TRAJ39)
CAASIVMQATCSPLEG

SEQ ID NO: 746392 - protein, 12 aa, Homo sapiens
  CDR3 for beta chain variable domain of TCR clone 373196 (TRBV24-1, TRBJ1-1)
CATSDSDRGAFF

SEQ ID NO: 746393 - protein, 16 aa, Homo sapiens
  CDR3 for alpha chain variable domain of TCR clone 373197 (TRAV12-3, TRAJ53)
CALSPGSGGSNYKLTF

SEQ ID NO: 746394 - protein, 14 aa, Homo sapiens
  CDR3 for beta chain variable domain of TCR clone 373197 (TRBV4-1, TRBJ2-7)
CASSPVAGGDEQYF

SEQ ID NO: 746395 - protein, 13 aa, Homo sapiens
  CDR3 for alpha chain variable domain of TCR clone 373198 (TRAV38-1, TRAJ42)
CARWGGSQGNLIL

SEQ ID NO: 746396 - protein, 10 aa, Homo sapiens
  CDR3 for beta chain variable domain of TCR clone 373198 (TRBV2, TRBJ2-5)
CASSAATKYF

SEQ ID NO: 746397 - protein, 14 aa, Homo sapiens
  CDR3 for alpha chain variable domain of TCR clone 373199 (TRAV35, TRAJ22)
CAGLRPGSARQLTS

SEQ ID NO: 746398 - protein, 15 aa, Homo sapiens
  CDR3 for beta chain variable domain of TCR clone 373199 (TRBV12-4, TRBJ2-5)
CASSPPTGRQETQYV

SEQ ID NO: 746399 - protein, 13 aa, Homo sapiens
  CDR3 for alpha chain variable domain of TCR clone 373200 (TRAV2, TRAJ20)
CAVEGPSEYKLSF

SEQ ID NO: 746400 - protein, 16 aa, Homo sapiens
  CDR3 for beta chain variable domain of TCR clone 373200 (TRBV25-1, TRBJ2-7)
CAGSELTGGGIYERYF

SEQ ID NO: 746401 - protein, 15 aa, Homo sapiens
  CDR3 for alpha chain variable domain of TCR clone 373201 (TRAV2, TRAJ11)
RAVGGRNSGYSTLTF

SEQ ID NO: 746402 - protein, 18 aa, Homo sapiens
  CDR3 for beta chain variable domain of TCR clone 373201 (TRBV11-2, TRBJ2-3)
CASSLGGASRGAPNTQYF

SEQ ID NO: 746403 - protein, 15 aa, Homo sapiens
  CDR3 for alpha chain variable domain of TCR clone 373202 (TRAV3, TRAJ13)
CAVRVYSGGYQKVTF

SEQ ID NO: 746404 - protein, 18 aa, Homo sapiens
  CDR3 for beta chain variable domain of TCR clone 373202 (TRBV7-6, TRBJ2-1)
CASSPRTSGMSSYNEQFF

SEQ ID NO: 746405 - protein, 13 aa, Homo sapiens
  CDR3 for alpha chain variable domain of TCR clone 373203 (TRAV8-6, TRAJ49)
CAVITNTGNQFYF

SEQ ID NO: 746406 - protein, 13 aa, Homo sapiens
  CDR3 for beta chain variable domain of TCR clone 373203 (TRBV19, TRBJ2-5)
CASSETAPETQYF

SEQ ID NO: 746407 - protein, 14 aa, Homo sapiens
  CDR3 for alpha chain variable domain of TCR clone 373204 (TRAV8-4, TRAJ34)
CAVSDPGDTAKLIF

SEQ ID NO: 746408 - protein, 14 aa, Homo sapiens
  CDR3 for beta chain variable domain of TCR clone 373204 (TRBV20-1, TRBJ2-5)
CSARDGRAGETQYF

SEQ ID NO: 746409 - protein, 16 aa, Homo sapiens
  CDR3 for alpha chain variable domain of TCR clone 373205 (TRAV36/DV7, TRAJ30)
CAVETYGLDRDDKIIF

SEQ ID NO: 746410 - protein, 17 aa, Homo sapiens
  CDR3 for beta chain variable domain of TCR clone 373205 (TRBV7-8, TRBJ2-6)
CASSAGTGGAGANVLTF

SEQ ID NO: 746411 - protein, 15 aa, Homo sapiens
  CDR3 for alpha chain variable domain of TCR clone 373206 (TRAV3, TRAJ5)
CAVRDLDTGRRALTF

SEQ ID NO: 746412 - protein, 14 aa, Homo sapiens
  CDR3 for beta chain variable domain of TCR clone 373206 (TRBV9, TRBJ2-1)
CASSVDPRGKEQFF

SEQ ID NO: 746413 - protein, 14 aa, Homo sapiens
  CDR3 for alpha chain variable domain of TCR clone 373207 (TRAV12-1, TRAJ17)
CVVNYKAAGNKLTF

SEQ ID NO: 746414 - protein, 15 aa, Homo sapiens
  CDR3 for beta chain variable domain of TCR clone 373207 (TRBV7-9, TRBJ1-2)
CASSLDREPNYGYTF

SEQ ID NO: 746415 - protein, 13 aa, Homo sapiens
  CDR3 for alpha chain variable domain of TCR clone 373208 (TRAV13-1, TRAJ43)
CAASLSNDNDMRF

SEQ ID NO: 746416 - protein, 15 aa, Homo sapiens
  CDR3 for beta chain variable domain of TCR clone 373208 (TRBV5-1, TRBJ2-1)
CASSQAGYWWNEQFF

SEQ ID NO: 746417 - protein, 15 aa, Homo sapiens
  CDR3 for alpha chain variable domain of TCR clone 373209 (TRAV12-2, TRAJ57)
CAVSRGQGGSEKLVF

SEQ ID NO: 746418 - protein, 15 aa, Homo sapiens
  CDR3 for beta chain variable domain of TCR clone 373209 (TRBV11-2, TRBJ1-6)
CASTGFGTAVSPLHF

SEQ ID NO: 746419 - protein, 13 aa, Homo sapiens
  CDR3 for alpha chain variable domain of TCR clone 373210 (TRAV12-3, TRAJ40)
CAVVTSGTYKYIF

SEQ ID NO: 746420 - protein, 14 aa, Homo sapiens
  CDR3 for beta chain variable domain of TCR clone 373210 (TRBV19, TRBJ2-1)
CASPTFVLSGEQFF

SEQ ID NO: 746421 - protein, 16 aa, Homo sapiens
  CDR3 for alpha chain variable domain of TCR clone 373211 (TRAV30, TRAJ24)
CGTEIVDADSWGKFQF

SEQ ID NO: 746422 - protein, 14 aa, Homo sapiens
  CDR3 for beta chain variable domain of TCR clone 373211 (TRBV19, TRBJ2-1)
CASPTFVLSGAQFF

SEQ ID NO: 746423 - protein, 12 aa, Homo sapiens
  CDR3 for alpha chain variable domain of TCR clone 373212 (TRAV8-3, TRAJ20)
CAVDFNDYELSF

SEQ ID NO: 746424 - protein, 13 aa, Homo sapiens
  CDR3 for beta chain variable domain of TCR clone 373212 (TRBV5-7, TRBJ2-3)
CASSLGRTDTQYF

SEQ ID NO: 746425 - protein, 12 aa, Homo sapiens
  CDR3 for alpha chain variable domain of TCR clone 373213 (TRAV12-2, TRAJ47)
CAVAEYGNKLVF

SEQ ID NO: 746426 - protein, 14 aa, Homo sapiens
  CDR3 for beta chain variable domain of TCR clone 373213 (TRBV20-1, TRBJ1-1)
CGAMGGTANTEAFF

SEQ ID NO: 746427 - protein, 14 aa, Homo sapiens
  CDR3 for alpha chain variable domain of TCR clone 373214 (TRAV12-3, TRAJ37)
CVSEGSSNTGKLIF

SEQ ID NO: 746428 - protein, 14 aa, Homo sapiens
  CDR3 for beta chain variable domain of TCR clone 373214 (TRBV20-1, TRBJ1-1)
CSEQTRIGGTEAFF

SEQ ID NO: 746429 - protein, 14 aa, Homo sapiens
  CDR3 for alpha chain variable domain of TCR clone 373215 (TRAV1-2, TRAJ8)
CAVREDTGFPRLVF

SEQ ID NO: 746430 - protein, 15 aa, Homo sapiens
  CDR3 for beta chain variable domain of TCR clone 373215 (TRBV6-3, TRBJ2-7)
CASSSPGTVFYEQYF

SEQ ID NO: 746431 - protein, 16 aa, Homo sapiens
  CDR3 for alpha chain variable domain of TCR clone 373216 (TRAV1-2, TRAJ10)
CAVRGVLTGGGNKLTF

SEQ ID NO: 746432 - protein, 16 aa, Homo sapiens
  CDR3 for beta chain variable domain of TCR clone 373216 (TRBV6-1, TRBJ2-1)
CASILRQGSSYNEQFF

SEQ ID NO: 746433 - protein, 17 aa, Homo sapiens
  CDR3 for alpha chain variable domain of TCR clone 373217 (TRAV26-1, TRAJ53)
CIVRVDDSGGSNYKLTF

SEQ ID NO: 746434 - protein, 16 aa, Homo sapiens
  CDR3 for beta chain variable domain of TCR clone 373217 (TRBV28, TRBJ1-4)
CASSPPYRGRSEKLFF

SEQ ID NO: 746435 - protein, 13 aa, Homo sapiens
  CDR3 for alpha chain variable domain of TCR clone 373218 (TRAV27, TRAJ29)
CAGAPSRNTPLVF

SEQ ID NO: 746436 - protein, 14 aa, Homo sapiens
  CDR3 for beta chain variable domain of TCR clone 373218 (TRBV7-9, TRBJ2-7)
CASSIGQGAGEQYF

SEQ ID NO: 746437 - protein, 14 aa, Homo sapiens
  CDR3 for alpha chain variable domain of TCR clone 373219 (TRAV12-1, TRAJ3)
CVVNPGRSASKIIF

SEQ ID NO: 746438 - protein, 15 aa, Homo sapiens
  CDR3 for beta chain variable domain of TCR clone 373219 (TRBV5-7, TRBJ1-2)
CAGSSPGQGNYGYTF

SEQ ID NO: 746439 - protein, 16 aa, Homo sapiens
  CDR3 for alpha chain variable domain of TCR clone 373220 (TRAV12-2, TRAJ6)
CAAPLAGSGGSYIPAF

SEQ ID NO: 746440 - protein, 16 aa, Homo sapiens
  CDR3 for beta chain variable domain of TCR clone 373220 (TRBV15, TRBJ2-5)
CATSRYLEAAQETQYF

SEQ ID NO: 746441 - protein, 16 aa, Homo sapiens
  CDR3 for alpha chain variable domain of TCR clone 373221 (TRAV21, TRAJ52)
CAVTNAGGTSYGKLTF

SEQ ID NO: 746442 - protein, 13 aa, Homo sapiens
  CDR3 for beta chain variable domain of TCR clone 373221 (TRBV20-1, TRBJ2-3)
CRARLAGTDTQYF

SEQ ID NO: 746443 - protein, 15 aa, Homo sapiens
  CDR3 for alpha chain variable domain of TCR clone 373222 (TRAV17, TRAJ57)
CATGPSQGGSEKLVF

SEQ ID NO: 746444 - protein, 16 aa, Homo sapiens
  CDR3 for beta chain variable domain of TCR clone 373222 (TRBV12-4, TRBJ1-5)
CASSRPVGGSYQPQHF

SEQ ID NO: 746445 - protein, 16 aa, Homo sapiens
  CDR3 for alpha chain variable domain of TCR clone 373223 (TRAV1-2, TRAJ10)
CAVRGVLTGGGNKLTF

SEQ ID NO: 746446 - protein, 13 aa, Homo sapiens
  CDR3 for beta chain variable domain of TCR clone 373223 (TRBV24-1, TRBJ2-2)
CATTATRTGELFV

SEQ ID NO: 746447 - protein, 13 aa, Homo sapiens
  CDR3 for alpha chain variable domain of TCR clone 373224 (TRAV12-3, TRAJ13)
CAMSPGGYQKVTF

SEQ ID NO: 746448 - protein, 17 aa, Homo sapiens
  CDR3 for beta chain variable domain of TCR clone 373224 (TRBV4-1, TRBJ1-4)
CASSQEGPRGVEEKLFF

SEQ ID NO: 746449 - protein, 14 aa, Homo sapiens
  CDR3 for alpha chain variable domain of TCR clone 373225 (TRAV8-4, TRAJ9)
CAVTFNTGGFKTIF

SEQ ID NO: 746450 - protein, 15 aa, Homo sapiens
  CDR3 for beta chain variable domain of TCR clone 373225 (TRBV7-9, TRBJ2-2)
CASSPETGAGGELLF

SEQ ID NO: 746451 - protein, 14 aa, Homo sapiens
  CDR3 for alpha chain variable domain of TCR clone 373226 (TRAV12-1, TRAJ17)
CVVNYKAAGNKLTF

SEQ ID NO: 746452 - protein, 15 aa, Homo sapiens
  CDR3 for beta chain variable domain of TCR clone 373226 (TRBV11-3, TRBJ2-3)
CASSAGTVVTNTQYF

SEQ ID NO: 746453 - protein, 13 aa, Homo sapiens
  CDR3 for alpha chain variable domain of TCR clone 373227 (TRAV8-3, TRAJ44)
CAVVPGTASKLTF

SEQ ID NO: 746454 - protein, 12 aa, Homo sapiens
  CDR3 for beta chain variable domain of TCR clone 373227 (TRBV19, TRBJ2-1)
CASSMQDTEQFF

SEQ ID NO: 746455 - protein, 17 aa, Homo sapiens
  CDR3 for alpha chain variable domain of TCR clone 373228 (TRAV27, TRAJ26)
CAGARAALDNYGQNFVF

SEQ ID NO: 746456 - protein, 15 aa, Homo sapiens
  CDR3 for beta chain variable domain of TCR clone 373228 (TRBV11-2, TRBJ2-5)
CASSPRSGGLETQYF

SEQ ID NO: 746457 - protein, 12 aa, Homo sapiens
  CDR3 for alpha chain variable domain of TCR clone 373229 (TRAV29/DV5, TRAJ34)
CAASGNTDKLIF

SEQ ID NO: 746458 - protein, 16 aa, Homo sapiens
  CDR3 for beta chain variable domain of TCR clone 373229 (TRBV7-2, TRBJ2-5)
CASSYKTGIGLETQYF

SEQ ID NO: 746459 - protein, 13 aa, Homo sapiens
  CDR3 for alpha chain variable domain of TCR clone 373230 (TRAV17, TRAJ5)
CAPMDTGRRALTF

SEQ ID NO: 746460 - protein, 17 aa, Homo sapiens
  CDR3 for beta chain variable domain of TCR clone 373230 (TRBV4-1, TRBJ2-3)
CASSQWGEAYRPDTQYF

SEQ ID NO: 746461 - protein, 11 aa, Homo sapiens
  CDR3 for alpha chain variable domain of TCR clone 373231 (TRAV3, TRAJ21)
CAVGNFNKFYF

SEQ ID NO: 746462 - protein, 16 aa, Homo sapiens
  CDR3 for beta chain variable domain of TCR clone 373231 (TRBV5-7, TRBJ2-5)
CASTLAPAGGRETQYF

SEQ ID NO: 746463 - protein, 18 aa, Homo sapiens
  CDR3 for alpha chain variable domain of TCR clone 373232 (TRAV13-1, TRAJ52)
CAAKNPNAGGTSYGKLTF

SEQ ID NO: 746464 - protein, 14 aa, Homo sapiens
  CDR3 for beta chain variable domain of TCR clone 373232 (TRBV6-5, TRBJ1-1)
CASSFGRGLTEAFF

SEQ ID NO: 746465 - protein, 12 aa, Homo sapiens
  CDR3 for alpha chain variable domain of TCR clone 373233 (TRAV2, TRAJ31)
CAVEDNNARLMF

SEQ ID NO: 746466 - protein, 12 aa, Homo sapiens
  CDR3 for beta chain variable domain of TCR clone 373233 (TRBV29-1, TRBJ2-3)
CSVTGGADTQYF

SEQ ID NO: 746467 - protein, 17 aa, Homo sapiens
  CDR3 for alpha chain variable domain of TCR clone 373234 (TRAV26-1, TRAJ53)
CIVRVDDSGGSNYKLTF

SEQ ID NO: 746468 - protein, 16 aa, Homo sapiens
  CDR3 for beta chain variable domain of TCR clone 373234 (TRBV7-2, TRBJ1-2)
CASSSNQDRRGHGYTF

SEQ ID NO: 746469 - protein, 13 aa, Homo sapiens
  CDR3 for alpha chain variable domain of TCR clone 373235 (TRAV23/DV6, TRAJ22)
CAPYSVSARQLTF

SEQ ID NO: 746470 - protein, 13 aa, Homo sapiens
  CDR3 for beta chain variable domain of TCR clone 373235 (TRBV6-1, TRBJ1-1)
CASSRQGNTEAFF

SEQ ID NO: 746471 - protein, 14 aa, Homo sapiens
  CDR3 for alpha chain variable domain of TCR clone 373236 (TRAV8-2, TRAJ13)
CVVSGSGGYQKVTF

SEQ ID NO: 746472 - protein, 14 aa, Homo sapiens
  CDR3 for beta chain variable domain of TCR clone 373236 (TRBV5-5, TRBJ1-4)
CASSPRGYNEKLFF

SEQ ID NO: 746473 - protein, 14 aa, Homo sapiens
  CDR3 for alpha chain variable domain of TCR clone 373237 (TRAV3, TRAJ22)
CAVRDYGSARQLTY

SEQ ID NO: 746474 - protein, 13 aa, Homo sapiens
  CDR3 for beta chain variable domain of TCR clone 373237 (TRBV11-2, TRBJ2-5)
CASGHGAKETQYF

SEQ ID NO: 746475 - protein, 14 aa, Homo sapiens
  CDR3 for alpha chain variable domain of TCR clone 373238 (TRAV12-2, TRAJ45)
CAVNKGGGPDGLTF

SEQ ID NO: 746476 - protein, 15 aa, Homo sapiens
  CDR3 for beta chain variable domain of TCR clone 373238 (TRBV20-1, TRBJ2-7)
CSARDRVSGMDEQYF

SEQ ID NO: 746477 - protein, 13 aa, Homo sapiens
  CDR3 for alpha chain variable domain of TCR clone 373239 (TRAV8-2, TRAJ8)
CVVSDLSFQKLVF

SEQ ID NO: 746478 - protein, 16 aa, Homo sapiens
  CDR3 for beta chain variable domain of TCR clone 373239 (TRBV7-3, TRBJ2-2)
CASSLKRGTLSGELFF

SEQ ID NO: 746479 - protein, 13 aa, Homo sapiens
  CDR3 for alpha chain variable domain of TCR clone 373240 (TRAV3, TRAJ21)
CAVREPDFNKSYF

SEQ ID NO: 746480 - protein, 15 aa, Homo sapiens
  CDR3 for beta chain variable domain of TCR clone 373240 (TRBV20-1, TRBJ1-1)
CSASRGVTGNTEAFF

SEQ ID NO: 746481 - protein, 16 aa, Homo sapiens
  CDR3 for alpha chain variable domain of TCR clone 373241 (TRAV8-3, TRAJ18)
CAVALDRGSTLGRLYL

SEQ ID NO: 746482 - protein, 11 aa, Homo sapiens
  CDR3 for beta chain variable domain of TCR clone 373241 (TRBV29-1, TRBJ1-1)
CSVEILTEAFF

SEQ ID NO: 746483 - protein, 18 aa, Homo sapiens
  CDR3 for alpha chain variable domain of TCR clone 373242 (TRAV26-2, TRAJ45)
CILRVDKYSGGGADGLTF

SEQ ID NO: 746484 - protein, 16 aa, Homo sapiens
  CDR3 for beta chain variable domain of TCR clone 373242 (TRBV2, TRBJ1-4)
CATNLLQGATNEKLFF

SEQ ID NO: 746485 - protein, 16 aa, Homo sapiens
  CDR3 for alpha chain variable domain of TCR clone 373243 (TRAV3, TRAJ10)
CAVRDMRAGGGNKLTF

SEQ ID NO: 746486 - protein, 17 aa, Homo sapiens
  CDR3 for beta chain variable domain of TCR clone 373243 (TRBV4-1, TRBJ2-7)
CASSQPTSGSRGYEQYF

SEQ ID NO: 746487 - protein, 15 aa, Homo sapiens
  CDR3 for alpha chain variable domain of TCR clone 373244 (TRAV12-2, TRAJ10)
CREQGTHGRRKQLTF

SEQ ID NO: 746488 - protein, 12 aa, Homo sapiens
  CDR3 for beta chain variable domain of TCR clone 373244 (TRBV28, TRBJ2-7)
CASSFSSYEQYF

SEQ ID NO: 746489 - protein, 13 aa, Homo sapiens
  CDR3 for alpha chain variable domain of TCR clone 373245 (TRAV20, TRAJ21)
CAVEVYNFNKFYF

SEQ ID NO: 746490 - protein, 14 aa, Homo sapiens
  CDR3 for beta chain variable domain of TCR clone 373245 (TRBV12-5, TRBJ2-5)
CASGSRTHQETQYF

SEQ ID NO: 746491 - protein, 11 aa, Homo sapiens
  CDR3 for alpha chain variable domain of TCR clone 373246 (TRAV12-2, TRAJ49)
CAVTGGNPFYF

SEQ ID NO: 746492 - protein, 14 aa, Homo sapiens
  CDR3 for beta chain variable domain of TCR clone 373246 (TRBV6-1, TRBJ1-3)
CASVQGGGGNTIYF

SEQ ID NO: 746493 - protein, 14 aa, Homo sapiens
  CDR3 for alpha chain variable domain of TCR clone 373247 (TRAV20, TRAJ42)
CAVQAGGSQGNLIF

SEQ ID NO: 746494 - protein, 15 aa, Homo sapiens
  CDR3 for beta chain variable domain of TCR clone 373247 (TRBV28, TRBJ1-2)
CASRIQGELWLHLRF

SEQ ID NO: 746495 - protein, 13 aa, Homo sapiens
  CDR3 for alpha chain variable domain of TCR clone 373248 (TRAV36/DV7, TRAJ37)
CAVFSSNTGKLIF

SEQ ID NO: 746496 - protein, 18 aa, Homo sapiens
  CDR3 for beta chain variable domain of TCR clone 373248 (TRBV11-2, TRBJ2-3)
CASSLGGASRGAHNTQYF

SEQ ID NO: 746497 - protein, 15 aa, Homo sapiens
  CDR3 for alpha chain variable domain of TCR clone 373249 (TRAV14/DV4, TRAJ26)
CAMREGQNYGKKFVF

SEQ ID NO: 746498 - protein, 13 aa, Homo sapiens
  CDR3 for beta chain variable domain of TCR clone 373249 (TRBV24-1, TRBJ2-2)
CATSDWSTGELFF

SEQ ID NO: 746499 - protein, 12 aa, Homo sapiens
  CDR3 for alpha chain variable domain of TCR clone 373250 (TRAV12-3, TRAJ48)
CAMSIGNEKLTF

SEQ ID NO: 746500 - protein, 12 aa, Homo sapiens
  CDR3 for beta chain variable domain of TCR clone 373250 (TRBV13, TRBJ2-7)
CASSLQAYEQYF

SEQ ID NO: 746501 - protein, 12 aa, Homo sapiens
  CDR3 for alpha chain variable domain of TCR clone 373251 (TRAV17, TRAJ12)
CATLRSSYKLIF

SEQ ID NO: 746502 - protein, 18 aa, Homo sapiens
  CDR3 for beta chain variable domain of TCR clone 373251 (TRBV12-4, TRBJ2-2)
CASSLVAGTRGRTGELFF

SEQ ID NO: 746503 - protein, 14 aa, Homo sapiens
  CDR3 for alpha chain variable domain of TCR clone 373252 (TRAV1-1, TRAJ27)
CAVIYNTNAGKSTF

SEQ ID NO: 746504 - protein, 16 aa, Homo sapiens
  CDR3 for beta chain variable domain of TCR clone 373252 (TRBV12-5, TRBJ2-5)
CASGPRTSGNQETQYF

SEQ ID NO: 746505 - protein, 14 aa, Homo sapiens
  CDR3 for alpha chain variable domain of TCR clone 373253 (TRAV38-1, TRAJ40)
CALRPTSGTYKYIF

SEQ ID NO: 746506 - protein, 14 aa, Homo sapiens
  CDR3 for beta chain variable domain of TCR clone 373253 (TRBV5-4, TRBJ1-1)
CASSLDSRREEAFF

SEQ ID NO: 746507 - protein, 10 aa, Homo sapiens
  CDR3 for alpha chain variable domain of TCR clone 373254 (TRAV2, TRAJ34)
CAVVNDKLIF

SEQ ID NO: 746508 - protein, 16 aa, Homo sapiens
  CDR3 for beta chain variable domain of TCR clone 373254 (TRBV12-4, TRBJ2-3)
CASSLRLAETTDTQYF

SEQ ID NO: 746509 - protein, 11 aa, Homo sapiens
  CDR3 for alpha chain variable domain of TCR clone 373255 (TRAV2, TRAJ33)
CAVESNYQLLW

SEQ ID NO: 746510 - protein, 12 aa, Homo sapiens
  CDR3 for beta chain variable domain of TCR clone 373255 (TRBV11-2, TRBJ2-2)
CASSLGGGELFF

SEQ ID NO: 746511 - protein, 19 aa, Homo sapiens
  CDR3 for alpha chain variable domain of TCR clone 373256 (TRAV3, TRAJ6)
CAVRDRNPSRSGGSYIPTF

SEQ ID NO: 746512 - protein, 15 aa, Homo sapiens
  CDR3 for beta chain variable domain of TCR clone 373256 (TRBV18, TRBJ2-7)
CPSSPTFMDSYEQYF

SEQ ID NO: 746513 - protein, 21 aa, Homo sapiens
  CDR3 for alpha chain variable domain of TCR clone 373257 (TRAV35, TRAJ52)
CWAGYADGPNAGCTSYGKLTF

SEQ ID NO: 746514 - protein, 12 aa, Homo sapiens
  CDR3 for beta chain variable domain of TCR clone 373257 (TRBV5-1, TRBJ2-7)
CASSFRGYEQYF

SEQ ID NO: 746515 - protein, 11 aa, Homo sapiens
  CDR3 for alpha chain variable domain of TCR clone 373258 (TRAV1-2, TRAJ20)
CAVANDYKLSF

SEQ ID NO: 746516 - protein, 12 aa, Homo sapiens
  CDR3 for beta chain variable domain of TCR clone 373258 (TRBV11-2, TRBJ2-2)
CASSLGGGELLF

SEQ ID NO: 746517 - protein, 13 aa, Homo sapiens
  CDR3 for alpha chain variable domain of TCR clone 373259 (TRAV12-2, TRAJ20)
CAVYPSNDYKLTF

SEQ ID NO: 746518 - protein, 15 aa, Homo sapiens
  CDR3 for beta chain variable domain of TCR clone 373259 (TRBV27, TRBJ2-5)
CASSLCPRGGETQYF

SEQ ID NO: 746519 - protein, 16 aa, Homo sapiens
  CDR3 for alpha chain variable domain of TCR clone 373260 (TRAV30, TRAJ24)
CGTEIVDADSWGKFQF

SEQ ID NO: 746520 - protein, 14 aa, Homo sapiens
  CDR3 for beta chain variable domain of TCR clone 373260 (TRBV19, TRBJ2-1)
CASPTFVFSGEQFF

SEQ ID NO: 746521 - protein, 14 aa, Homo sapiens
  CDR3 for alpha chain variable domain of TCR clone 373261 (TRAV30, TRAJ50)
CGTALKTSYDKVIF

SEQ ID NO: 746522 - protein, 18 aa, Homo sapiens
  CDR3 for beta chain variable domain of TCR clone 373261 (TRBV6-6, TRBJ1-3)
CASSYSKWDSISGNTIYF

SEQ ID NO: 746523 - protein, 15 aa, Homo sapiens
  CDR3 for alpha chain variable domain of TCR clone 373262 (TRAV26-2, TRAJ13)
CILRDLSGGYQKVTF

SEQ ID NO: 746524 - protein, 18 aa, Homo sapiens
  CDR3 for beta chain variable domain of TCR clone 373262 (TRBV11-2, TRBJ2-3)
CASSLGGASRGAPNTQYF

SEQ ID NO: 746525 - protein, 13 aa, Homo sapiens
  CDR3 for alpha chain variable domain of TCR clone 373263 (TRAV21, TRAJ27)
RAARPGNAGKSTF

SEQ ID NO: 746526 - protein, 13 aa, Homo sapiens
  CDR3 for beta chain variable domain of TCR clone 373263 (TRBV20-1, TRBJ1-1)
CSARGGGNTEAFF

SEQ ID NO: 746527 - protein, 15 aa, Homo sapiens
  CDR3 for alpha chain variable domain of TCR clone 373264 (TRAV8-2, TRAJ16)
CVVSDGFSDGQKLLF

SEQ ID NO: 746528 - protein, 16 aa, Homo sapiens
  CDR3 for beta chain variable domain of TCR clone 373264 (TRBV7-2, TRBJ2-3)
CASSLVALYSTDTQYF

SEQ ID NO: 746529 - protein, 16 aa, Homo sapiens
  CDR3 for alpha chain variable domain of TCR clone 373265 (TRAV17, TRAJ17)
YATALQEEAAGNKLTF

SEQ ID NO: 746530 - protein, 12 aa, Homo sapiens
  CDR3 for beta chain variable domain of TCR clone 373265 (TRBV4-2, TRBJ2-5)
CASGGAQETQYF

SEQ ID NO: 746531 - protein, 14 aa, Homo sapiens
  CDR3 for alpha chain variable domain of TCR clone 373266 (TRAV27, TRAJ22)
CAGVSVLGKRQLTF

SEQ ID NO: 746532 - protein, 14 aa, Homo sapiens
  CDR3 for beta chain variable domain of TCR clone 373266 (TRBV11-2, TRBJ2-3)
CASSLGGGANTQYF

SEQ ID NO: 746533 - protein, 13 aa, Homo sapiens
  CDR3 for alpha chain variable domain of TCR clone 373267 (TRAV22, TRAJ9)
CAVGSTGGFKTIF

SEQ ID NO: 746534 - protein, 17 aa, Homo sapiens
  CDR3 for beta chain variable domain of TCR clone 373267 (TRBV7-8, TRBJ2-6)
CASSAGTGGAGANVLTF

SEQ ID NO: 746535 - protein, 14 aa, Homo sapiens
  CDR3 for alpha chain variable domain of TCR clone 373268 (TRAV1-2, TRAJ8)
CAVREDTGFQTLVF

SEQ ID NO: 746536 - protein, 17 aa, Homo sapiens
  CDR3 for beta chain variable domain of TCR clone 373268 (TRBV20-1, TRBJ2-2)
CSASGSGQGGLTGELFF

SEQ ID NO: 746537 - protein, 16 aa, Homo sapiens
  CDR3 for alpha chain variable domain of TCR clone 373269 (TRAV3, TRAJ3)
CAVRDRAKSSASKIIF

SEQ ID NO: 746538 - protein, 16 aa, Homo sapiens
  CDR3 for beta chain variable domain of TCR clone 373269 (TRBV20-1, TRBJ2-4)
CSATSLAELAKNVQYF

SEQ ID NO: 746539 - protein, 15 aa, Homo sapiens
  CDR3 for alpha chain variable domain of TCR clone 373270 (TRAV3, TRAJ4)
CAQNMFSGGYNKLIF

SEQ ID NO: 746540 - protein, 17 aa, Homo sapiens
  CDR3 for beta chain variable domain of TCR clone 373270 (TRBV25-1, TRBJ2-1)
CASSAYGQGRGVYEQFF

SEQ ID NO: 746541 - protein, 15 aa, Homo sapiens
  CDR3 for alpha chain variable domain of TCR clone 373271 (TRAV2, TRAJ24)
CAVVRLKNSWGKLEF

SEQ ID NO: 746542 - protein, 16 aa, Homo sapiens
  CDR3 for beta chain variable domain of TCR clone 373271 (TRBV7-7, TRBJ2-3)
CASSPGTSGSTDTQYF

SEQ ID NO: 746543 - protein, 14 aa, Homo sapiens
  CDR3 for alpha chain variable domain of TCR clone 373272 (TRAV2, TRAJ9)
CAVDPNTGGFKTIF

SEQ ID NO: 746544 - protein, 15 aa, Homo sapiens
  CDR3 for beta chain variable domain of TCR clone 373272 (TRBV20-1, TRBJ1-1)
CSASRGVTGNTEAFF

SEQ ID NO: 746545 - protein, 15 aa, Homo sapiens
  CDR3 for alpha chain variable domain of TCR clone 373273 (TRAV12-1, TRAJ45)
CVVLSGGGGADGLTF

SEQ ID NO: 746546 - protein, 12 aa, Homo sapiens
  CDR3 for beta chain variable domain of TCR clone 373273 (TRBV7-6, TRBJ2-3)
CASSTGTDTQYF

SEQ ID NO: 746547 - protein, 18 aa, Homo sapiens
  CDR3 for alpha chain variable domain of TCR clone 373274 (TRAV21, TRAJ52)
CAVRPSPAGGTSDGKLTF

SEQ ID NO: 746548 - protein, 15 aa, Homo sapiens
  CDR3 for beta chain variable domain of TCR clone 373274 (TRBV7-9, TRBJ2-7)
CASSSSGLAVYEQYF

SEQ ID NO: 746549 - protein, 13 aa, Homo sapiens
  CDR3 for alpha chain variable domain of TCR clone 373275 (TRAV9-2, TRAJ37)
CALHSSNTGKLIF

SEQ ID NO: 746550 - protein, 14 aa, Homo sapiens
  CDR3 for beta chain variable domain of TCR clone 373275 (TRBV7-8, TRBJ2-7)
CASTFRGGPNEQYF

SEQ ID NO: 746551 - protein, 16 aa, Homo sapiens
  CDR3 for alpha chain variable domain of TCR clone 373276 (TRAV26-1, TRAJ23)
CIVRPHGHNQGGKLIF

SEQ ID NO: 746552 - protein, 17 aa, Homo sapiens
  CDR3 for beta chain variable domain of TCR clone 373276 (TRBV6-1, TRBJ2-1)
CASSEGGSGRGRNEQFF

SEQ ID NO: 746553 - protein, 14 aa, Homo sapiens
  CDR3 for alpha chain variable domain of TCR clone 373277 (TRAV12-2, TRAJ13)
CAVKKTGGYQKVTF

SEQ ID NO: 746554 - protein, 13 aa, Homo sapiens
  CDR3 for beta chain variable domain of TCR clone 373277 (TRBV20-1, TRBJ1-1)
CSARCGGNTEAFF

SEQ ID NO: 746555 - protein, 13 aa, Homo sapiens
  CDR3 for alpha chain variable domain of TCR clone 373278 (TRAV2, TRAJ15)
CAVASQAGTALLF

SEQ ID NO: 746556 - protein, 16 aa, Homo sapiens
  CDR3 for beta chain variable domain of TCR clone 373278 (TRBV7-8, TRBJ2-4)
CASSAERTLAKNIQYF

SEQ ID NO: 746557 - protein, 14 aa, Homo sapiens
  CDR3 for alpha chain variable domain of TCR clone 373279 (TRAV35, TRAJ24)
YAGPRRDSWGKLQF

SEQ ID NO: 746558 - protein, 12 aa, Homo sapiens
  CDR3 for beta chain variable domain of TCR clone 373279 (TRBV12-4, TRBJ2-3)
CVSSLGQDTQYF

SEQ ID NO: 746559 - protein, 12 aa, Homo sapiens
  CDR3 for alpha chain variable domain of TCR clone 373280 (TRAV23/DV6, TRAJ36)
CAASNEANNLFF

SEQ ID NO: 746560 - protein, 13 aa, Homo sapiens
  CDR3 for beta chain variable domain of TCR clone 373280 (TRBV19, TRBJ2-2)
CASSIWSTGELFF

SEQ ID NO: 746561 - protein, 16 aa, Homo sapiens
  CDR3 for alpha chain variable domain of TCR clone 373281 (TRAV30, TRAJ24)
CGTEIVDADSWGKFQF

SEQ ID NO: 746562 - protein, 18 aa, Homo sapiens
  CDR3 for beta chain variable domain of TCR clone 373281 (TRBV20-1, TRBJ2-6)
CSAETTPTHGSGANGLTF

SEQ ID NO: 746563 - protein, 13 aa, Homo sapiens
  CDR3 for alpha chain variable domain of TCR clone 373282 (TRAV3, TRAJ15)
CAVRDNAGTALIF

SEQ ID NO: 746564 - protein, 15 aa, Homo sapiens
  CDR3 for beta chain variable domain of TCR clone 373282 (TRBV11-1, TRBJ2-7)
CASSLNYGASYEQYF

SEQ ID NO: 746565 - protein, 15 aa, Homo sapiens
  CDR3 for alpha chain variable domain of TCR clone 373283 (TRAV38-1, TRAJ37)
CAFIHCSGNTGKLIF

SEQ ID NO: 746566 - protein, 14 aa, Homo sapiens
  CDR3 for beta chain variable domain of TCR clone 373283 (TRBV29-1, TRBJ2-5)
CSVETSGSGETQYF

SEQ ID NO: 746567 - protein, 15 aa, Homo sapiens
  CDR3 for alpha chain variable domain of TCR clone 373284 (TRAV8-3, TRAJ40)
CAVGGRTSGTYKYIF

SEQ ID NO: 746568 - protein, 14 aa, Homo sapiens
  CDR3 for beta chain variable domain of TCR clone 373284 (TRBV19, TRBJ1-2)
CASSLQGQAYGYTF

SEQ ID NO: 746569 - protein, 12 aa, Homo sapiens
  CDR3 for alpha chain variable domain of TCR clone 373285 (TRAV12-3, TRAJ54)
CGADRGAQKLVF

SEQ ID NO: 746570 - protein, 17 aa, Homo sapiens
  CDR3 for beta chain variable domain of TCR clone 373285 (TRBV11-2, TRBJ2-1)
CASSLYPPGVEYNEQFF

SEQ ID NO: 746571 - protein, 12 aa, Homo sapiens
  CDR3 for alpha chain variable domain of TCR clone 373286 (TRAV8-3, TRAJ26)
CAGDNYGQNFVF

SEQ ID NO: 746572 - protein, 11 aa, Homo sapiens
  CDR3 for beta chain variable domain of TCR clone 373286 (TRBV29-1, TRBJ2-5)
CSEDRTGTQYV

SEQ ID NO: 746573 - protein, 13 aa, Homo sapiens
  CDR3 for alpha chain variable domain of TCR clone 373287 (TRAV1-2, TRAJ9)
CAALNTGGFKTIF

SEQ ID NO: 746574 - protein, 12 aa, Homo sapiens
  CDR3 for beta chain variable domain of TCR clone 373287 (TRBV7-9, TRBJ1-1)
CASSFGPTEAFF

SEQ ID NO: 746575 - protein, 13 aa, Homo sapiens
  CDR3 for alpha chain variable domain of TCR clone 373288 (TRAV23/DV6, TRAJ20)
CAARTSNDYKLSF

SEQ ID NO: 746576 - protein, 14 aa, Homo sapiens
  CDR3 for beta chain variable domain of TCR clone 373288 (TRBV19, TRBJ2-1)
CASSPGLAPNEQFF

SEQ ID NO: 746577 - protein, 15 aa, Homo sapiens
  CDR3 for alpha chain variable domain of TCR clone 373289 (TRAV17, TRAJ37)
CATDGGSSNTGKLIF

SEQ ID NO: 746578 - protein, 15 aa, Homo sapiens
  CDR3 for beta chain variable domain of TCR clone 373289 (TRBV28, TRBJ2-5)
CASSSGRKIQETQYF

SEQ ID NO: 746579 - protein, 15 aa, Homo sapiens
  CDR3 for alpha chain variable domain of TCR clone 373290 (TRAV3, TRAJ5)
CAVRDLYTGRRALTF

SEQ ID NO: 746580 - protein, 15 aa, Homo sapiens
  CDR3 for beta chain variable domain of TCR clone 373290 (TRBV20-1, TRBJ2-1)
CSARSPGGPGNEQFF

SEQ ID NO: 746581 - protein, 17 aa, Homo sapiens
  CDR3 for alpha chain variable domain of TCR clone 373291 (TRAV9-2, TRAJ45)
CALSGYYSGGGADGLTF

SEQ ID NO: 746582 - protein, 17 aa, Homo sapiens
  CDR3 for beta chain variable domain of TCR clone 373291 (TRBV7-8, TRBJ1-5)
CASSLQGQSFSDQTQHF

SEQ ID NO: 746583 - protein, 14 aa, Homo sapiens
  CDR3 for alpha chain variable domain of TCR clone 373292 (TRAV16, TRAJ17)
CALSGRAAGNKLTF

SEQ ID NO: 746584 - protein, 15 aa, Homo sapiens
  CDR3 for beta chain variable domain of TCR clone 373292 (TRBV4-2, TRBJ1-1)
CASSQEDLPRTEAFF

SEQ ID NO: 746585 - protein, 15 aa, Homo sapiens
  CDR3 for alpha chain variable domain of TCR clone 373293 (TRAV12-1, TRAJ9)
CVVSFGDTGGFKTIF

SEQ ID NO: 746586 - protein, 14 aa, Homo sapiens
  CDR3 for beta chain variable domain of TCR clone 373293 (TRBV19, TRBJ2-1)
CASPTFVLSGEQFF

SEQ ID NO: 746587 - protein, 13 aa, Homo sapiens
  CDR3 for alpha chain variable domain of TCR clone 373294 (TRAV12-2, TRAJ52)
CAVSGTSYVKLTF

SEQ ID NO: 746588 - protein, 16 aa, Homo sapiens
  CDR3 for beta chain variable domain of TCR clone 373294 (TRBV5-7, TRBJ2-7)
RASSPTSGRELDEQYF

SEQ ID NO: 746589 - protein, 16 aa, Homo sapiens
  CDR3 for alpha chain variable domain of TCR clone 373295 (TRAV30, TRAJ24)
CGTEIVDADSWGKFQF

SEQ ID NO: 746590 - protein, 19 aa, Homo sapiens
  CDR3 for beta chain variable domain of TCR clone 373295 (TRBV25-1, TRBJ2-2)
CAILVYRVDRGLKTGELFF

SEQ ID NO: 746591 - protein, 14 aa, Homo sapiens
  CDR3 for alpha chain variable domain of TCR clone 373296 (TRAV13-1, TRAJ35)
CAASKGGFGNVLHC

SEQ ID NO: 746592 - protein, 15 aa, Homo sapiens
  CDR3 for beta chain variable domain of TCR clone 373296 (TRBV7-9, TRBJ1-4)
CASSRTGGFNEKLFF

SEQ ID NO: 746593 - protein, 16 aa, Homo sapiens
  CDR3 for alpha chain variable domain of TCR clone 373297 (TRAV1-2, TRAJ10)
CAVRGILTGGGNKLTF

SEQ ID NO: 746594 - protein, 15 aa, Homo sapiens
  CDR3 for beta chain variable domain of TCR clone 373297 (TRBV7-2, TRBJ2-1)
CASTHGTGIYNEQFF

SEQ ID NO: 746595 - protein, 14 aa, Homo sapiens
  CDR3 for alpha chain variable domain of TCR clone 373298 (TRAV12-2, TRAJ13)
CAVKKTGCYQKVTF

SEQ ID NO: 746596 - protein, 13 aa, Homo sapiens
  CDR3 for beta chain variable domain of TCR clone 373298 (TRBV11-2, TRBJ2-5)
CASSSTGEETQYF

SEQ ID NO: 746597 - protein, 13 aa, Homo sapiens
  CDR3 for alpha chain variable domain of TCR clone 373299 (TRAV27, TRAJ57)
CAGFQGGSEKLVF

SEQ ID NO: 746598 - protein, 14 aa, Homo sapiens
  CDR3 for beta chain variable domain of TCR clone 373299 (TRBV20-1, TRBJ1-2)
CSGRKDGRAYCYTF

SEQ ID NO: 746599 - protein, 11 aa, Homo sapiens
  CDR3 for alpha chain variable domain of TCR clone 373300 (TRAV1-2, TRAJ20)
CAVANDYKLSF

SEQ ID NO: 746600 - protein, 15 aa, Homo sapiens
  CDR3 for beta chain variable domain of TCR clone 373300 (TRBV11-2, TRBJ1-1)
CASSFSTRMNTEAFF

SEQ ID NO: 746601 - protein, 16 aa, Homo sapiens
  CDR3 for alpha chain variable domain of TCR clone 373301 (TRAV14/DV4, TRAJ53)
CAMREGGGGSNYKLTF

SEQ ID NO: 746602 - protein, 15 aa, Homo sapiens
  CDR3 for beta chain variable domain of TCR clone 373301 (TRBV6-3, TRBJ2-2)
CASSFLATLTGELFF

SEQ ID NO: 746603 - protein, 19 aa, Homo sapiens
  CDR3 for alpha chain variable domain of TCR clone 373302 (TRAV21, TRAJ20)
SLVTQPPTSVLPNDYKLSL

SEQ ID NO: 746604 - protein, 14 aa, Homo sapiens
  CDR3 for beta chain variable domain of TCR clone 373302 (TRBV7-2, TRBJ1-3)
CASSRLRSGNTLYF

SEQ ID NO: 746605 - protein, 15 aa, Homo sapiens
  CDR3 for alpha chain variable domain of TCR clone 373303 (TRAV8-3, TRAJ11)
CAVGLLNSGHSILTF

SEQ ID NO: 746606 - protein, 16 aa, Homo sapiens
  CDR3 for beta chain variable domain of TCR clone 373303 (TRBV7-9, TRBJ1-2)
CASSLGFSSGEDGYTF

SEQ ID NO: 746607 - protein, 13 aa, Homo sapiens
  CDR3 for alpha chain variable domain of TCR clone 373304 (TRAV8-4, TRAJ10)
CAAFTGGGNKLTF

SEQ ID NO: 746608 - protein, 12 aa, Homo sapiens
  CDR3 for beta chain variable domain of TCR clone 373304 (TRBV3-1, TRBJ2-1)
CASSQGSSRQFF

SEQ ID NO: 746609 - protein, 14 aa, Homo sapiens
  CDR3 for alpha chain variable domain of TCR clone 373305 (TRAV2, TRAJ37)
CAVDFTSNTGKLNF

SEQ ID NO: 746610 - protein, 12 aa, Homo sapiens
  CDR3 for beta chain variable domain of TCR clone 373305 (TRBV11-2, TRBJ2-2)
CASSLGGGELFF

SEQ ID NO: 746611 - protein, 13 aa, Homo sapiens
  CDR3 for alpha chain variable domain of TCR clone 373306 (TRAV13-1, TRAJ4)
CAASIGGYNRLIF

SEQ ID NO: 746612 - protein, 16 aa, Homo sapiens
  CDR3 for beta chain variable domain of TCR clone 373306 (TRBV20-1, TRBJ2-1)
CSAPGLAGSYSDEQFF

SEQ ID NO: 746613 - protein, 14 aa, Homo sapiens
  CDR3 for alpha chain variable domain of TCR clone 373307 (TRAV12-2, TRAJ6)
CASTWGGGCYIPTF

SEQ ID NO: 746614 - protein, 13 aa, Homo sapiens
  CDR3 for beta chain variable domain of TCR clone 373307 (TRBV2, TRBJ1-1)
CASSEGGNTEAFF

SEQ ID NO: 746615 - protein, 14 aa, Homo sapiens
  CDR3 for alpha chain variable domain of TCR clone 373308 (TRAV26-1, TRAJ57)
CIRACQGGSEKLVF

SEQ ID NO: 746616 - protein, 13 aa, Homo sapiens
  CDR3 for beta chain variable domain of TCR clone 373308 (TRBV19, TRBJ2-7)
CASSLTTSYEQYF

SEQ ID NO: 746617 - protein, 18 aa, Homo sapiens
  CDR3 for alpha chain variable domain of TCR clone 373309 (TRAV13-1, TRAJ52)
CAASKRGAGGTSYGKLTF

SEQ ID NO: 746618 - protein, 13 aa, Homo sapiens
  CDR3 for beta chain variable domain of TCR clone 373309 (TRBV12-4, TRBJ1-2)
CACSLRQGKGYSF

SEQ ID NO: 746619 - protein, 14 aa, Homo sapiens
  CDR3 for alpha chain variable domain of TCR clone 373310 (TRAV1-2, TRAJ16)
CAVNGFSDGQKLLF

SEQ ID NO: 746620 - protein, 11 aa, Homo sapiens
  CDR3 for beta chain variable domain of TCR clone 373310 (TRBV7-8, TRBJ2-7)
CASSLSLEQYF

SEQ ID NO: 746621 - protein, 14 aa, Homo sapiens
  CDR3 for alpha chain variable domain of TCR clone 373311 (TRAV2, TRAJ9)
CAVEDRSGGFKTIF

SEQ ID NO: 746622 - protein, 17 aa, Homo sapiens
  CDR3 for beta chain variable domain of TCR clone 373311 (TRBV5-1, TRBJ2-7)
CASSKPEGREASYEQYF

SEQ ID NO: 746623 - protein, 14 aa, Homo sapiens
  CDR3 for alpha chain variable domain of TCR clone 373312 (TRAV8-3, TRAJ9)
CAVVYNTGGFKTIF

SEQ ID NO: 746624 - protein, 14 aa, Homo sapiens
  CDR3 for beta chain variable domain of TCR clone 373312 (TRBV11-2, TRBJ1-3)
CASSPRTGGNTIYF

SEQ ID NO: 746625 - protein, 12 aa, Homo sapiens
  CDR3 for alpha chain variable domain of TCR clone 373313 (TRAV22, TRAJ54)
CAVVQGAQKLVF

SEQ ID NO: 746626 - protein, 14 aa, Homo sapiens
  CDR3 for beta chain variable domain of TCR clone 373313 (TRBV12-4, TRBJ2-1)
CASSLGQGASEQFF

SEQ ID NO: 746627 - protein, 13 aa, Homo sapiens
  CDR3 for alpha chain variable domain of TCR clone 373314 (TRAV1-1, TRAJ31)
CASYLNNNARLMF

SEQ ID NO: 746628 - protein, 13 aa, Homo sapiens
  CDR3 for beta chain variable domain of TCR clone 373314 (TRBV15, TRBJ1-6)
CATSGGLNSPLQF

SEQ ID NO: 746629 - protein, 16 aa, Homo sapiens
  CDR3 for alpha chain variable domain of TCR clone 373315 (TRAV16, TRAJ4)
CALSRMFSGGYNKLIF

SEQ ID NO: 746630 - protein, 16 aa, Homo sapiens
  CDR3 for beta chain variable domain of TCR clone 373315 (TRBV24-1, TRBJ2-3)
CANSDPGTGATDTQYF

SEQ ID NO: 746631 - protein, 17 aa, Homo sapiens
  CDR3 for alpha chain variable domain of TCR clone 373316 (TRAV8-3, TRAJ52)
CAVGAEAGGTGYGKVTF

SEQ ID NO: 746632 - protein, 15 aa, Homo sapiens
  CDR3 for beta chain variable domain of TCR clone 373316 (TRBV5-1, TRBJ2-5)
CASSRQGLGQETQYF

SEQ ID NO: 746633 - protein, 14 aa, Homo sapiens
  CDR3 for alpha chain variable domain of TCR clone 373317 (TRAV12-2, TRAJ13)
CAVKKTGGYQKVTF

SEQ ID NO: 746634 - protein, 18 aa, Homo sapiens
  CDR3 for beta chain variable domain of TCR clone 373317 (TRBV11-2, TRBJ2-3)
CASSLGGASRGATNTQYF

SEQ ID NO: 746635 - protein, 12 aa, Homo sapiens
  CDR3 for alpha chain variable domain of TCR clone 373318 (TRAV13-1, TRAJ15)
CAASQAGTALIF

SEQ ID NO: 746636 - protein, 14 aa, Homo sapiens
  CDR3 for beta chain variable domain of TCR clone 373318 (TRBV11-1, TRBJ2-7)
CASSFRQGSYEQYF

SEQ ID NO: 746637 - protein, 17 aa, Homo sapiens
  CDR3 for alpha chain variable domain of TCR clone 373319 (TRAV26-2, TRAJ52)
CILRVTAGGTSYGKLTF

SEQ ID NO: 746638 - protein, 15 aa, Homo sapiens
  CDR3 for beta chain variable domain of TCR clone 373319 (TRBV7-2, TRBJ2-2)
CASSLGGRNTGELSF

SEQ ID NO: 746639 - protein, 13 aa, Homo sapiens
  CDR3 for alpha chain variable domain of TCR clone 373320 (TRAV8-3, TRAJ40)
CAVDPSGTYKYIF

SEQ ID NO: 746640 - protein, 13 aa, Homo sapiens
  CDR3 for beta chain variable domain of TCR clone 373320 (TRBV7-2, TRBJ2-5)
CASSQTSVETQYF

SEQ ID NO: 746641 - protein, 11 aa, Homo sapiens
  CDR3 for alpha chain variable domain of TCR clone 373321 (TRAV13-1, TRAJ52)
PGGTSYGKLTF

SEQ ID NO: 746642 - protein, 16 aa, Homo sapiens
  CDR3 for beta chain variable domain of TCR clone 373321 (TRBV28, TRBJ2-7)
CASSPWVATGDLSQYV

SEQ ID NO: 746643 - protein, 13 aa, Homo sapiens
  CDR3 for alpha chain variable domain of TCR clone 373322 (TRAV17, TRAJ26)
CATVDNYGQNFVF

SEQ ID NO: 746644 - protein, 16 aa, Homo sapiens
  CDR3 for beta chain variable domain of TCR clone 373322 (TRBV2, TRBJ2-1)
CASSVGGSLSYNEEFF

SEQ ID NO: 746645 - protein, 14 aa, Homo sapiens
  CDR3 for alpha chain variable domain of TCR clone 373323 (TRAV21, TRAJ35)
CAVMPIGFGNGLHW

SEQ ID NO: 746646 - protein, 12 aa, Homo sapiens
  CDR3 for beta chain variable domain of TCR clone 373323 (TRBV7-9, TRBJ2-7)
CASSIKREEQYF

SEQ ID NO: 746647 - protein, 11 aa, Homo sapiens
  CDR3 for alpha chain variable domain of TCR clone 373324 (TRAV1-1, TRAJ23)
CAVRQGGKLIF

SEQ ID NO: 746648 - protein, 20 aa, Homo sapiens
  CDR3 for beta chain variable domain of TCR clone 373324 (TRBV7-8, TRBJ2-2)
CVSSRLFPGPTIHITGELFF

SEQ ID NO: 746649 - protein, 16 aa, Homo sapiens
  CDR3 for alpha chain variable domain of TCR clone 373325 (TRAV3, TRAJ37)
CAVRGKGSGNTGKLIF

SEQ ID NO: 746650 - protein, 16 aa, Homo sapiens
  CDR3 for beta chain variable domain of TCR clone 373325 (TRBV19, TRBJ1-5)
CASSIDRGGPRQPQHF

SEQ ID NO: 746651 - protein, 12 aa, Homo sapiens
  CDR3 for alpha chain variable domain of TCR clone 373326 (TRAV1-2, TRAJ42)
CVAGGSQGSRIF

SEQ ID NO: 746652 - protein, 12 aa, Homo sapiens
  CDR3 for beta chain variable domain of TCR clone 373326 (TRBV24-1, TRBJ1-1)
CATSDSDRGAFF

SEQ ID NO: 746653 - protein, 15 aa, Homo sapiens
  CDR3 for alpha chain variable domain of TCR clone 373327 (TRAV21, TRAJ53)
FATLNSGGSNYKLTF

SEQ ID NO: 746654 - protein, 16 aa, Homo sapiens
  CDR3 for beta chain variable domain of TCR clone 373327 (TRBV9, TRBJ2-1)
CASSVGGGGNYNEQFF

SEQ ID NO: 746655 - protein, 11 aa, Homo sapiens
  CDR3 for alpha chain variable domain of TCR clone 373328 (TRAV1-1, TRAJ20)
CAVFNDYRLSF

SEQ ID NO: 746656 - protein, 14 aa, Homo sapiens
  CDR3 for beta chain variable domain of TCR clone 373328 (TRBV7-6, TRBJ2-3)
CASSLGTVTDTQYF

SEQ ID NO: 746657 - protein, 13 aa, Homo sapiens
  CDR3 for alpha chain variable domain of TCR clone 373329 (TRAV16, TRAJ9)
SALSNTGGFKTIF

SEQ ID NO: 746658 - protein, 14 aa, Homo sapiens
  CDR3 for beta chain variable domain of TCR clone 373329 (TRBV5-1, TRBJ2-1)
CASSLEGPVYEQFF

SEQ ID NO: 746659 - protein, 13 aa, Homo sapiens
  CDR3 for alpha chain variable domain of TCR clone 373330 (TRAV21, TRAJ27)
CAARPGTAGKSTF

SEQ ID NO: 746660 - protein, 13 aa, Homo sapiens
  CDR3 for beta chain variable domain of TCR clone 373330 (TRBV7-3, TRBJ2-7)
CASSQAGGYEQYF

SEQ ID NO: 746661 - protein, 14 aa, Homo sapiens
  CDR3 for alpha chain variable domain of TCR clone 373331 (TRAV8-3, TRAJ4)
CAVGASGVYNKLIF

SEQ ID NO: 746662 - protein, 12 aa, Homo sapiens
  CDR3 for beta chain variable domain of TCR clone 373331 (TRBV7-9, TRBJ1-4)
CASSTDREKLFF

SEQ ID NO: 746663 - protein, 13 aa, Homo sapiens
  CDR3 for alpha chain variable domain of TCR clone 373332 (TRAV27, TRAJ41)
CAGEGNSGYALNF

SEQ ID NO: 746664 - protein, 14 aa, Homo sapiens
  CDR3 for beta chain variable domain of TCR clone 373332 (TRBV19, TRBJ2-5)
CASSMTGQQETQYF

SEQ ID NO: 746665 - protein, 21 aa, Homo sapiens
  CDR3 for alpha chain variable domain of TCR clone 373333 (TRAV21, TRAJ41)
SLVTQPPTSVQFLYSGYALNF

SEQ ID NO: 746666 - protein, 16 aa, Homo sapiens
  CDR3 for beta chain variable domain of TCR clone 373333 (TRBV15, TRBJ2-7)
CATSRGRAGGTYEQYF

SEQ ID NO: 746667 - protein, 15 aa, Homo sapiens
  CDR3 for alpha chain variable domain of TCR clone 373334 (TRAV12-2, TRAJ9)
CAVNNGRTGGFKTIF

SEQ ID NO: 746668 - protein, 14 aa, Homo sapiens
  CDR3 for beta chain variable domain of TCR clone 373334 (TRBV4-1, TRBJ1-4)
CASSQERKNEKLFF

SEQ ID NO: 746669 - protein, 13 aa, Homo sapiens
  CDR3 for alpha chain variable domain of TCR clone 373335 (TRAV12-2, TRAJ35)
CAVSAGFGNVLHC

SEQ ID NO: 746670 - protein, 14 aa, Homo sapiens
  CDR3 for beta chain variable domain of TCR clone 373335 (TRBV28, TRBJ2-5)
CASSLRVLEETQYF

SEQ ID NO: 746671 - protein, 12 aa, Homo sapiens
  CDR3 for alpha chain variable domain of TCR clone 373336 (TRAV8-6, TRAJ11)
CAVSSGYSTLTF

SEQ ID NO: 746672 - protein, 15 aa, Homo sapiens
  CDR3 for beta chain variable domain of TCR clone 373336 (TRBV7-9, TRBJ2-5)
CASSSYRGHQETQYF

SEQ ID NO: 746673 - protein, 13 aa, Homo sapiens
  CDR3 for alpha chain variable domain of TCR clone 373337 (TRAV35, TRAJ42)
CAGFPGSQGNLLF

SEQ ID NO: 746674 - protein, 14 aa, Homo sapiens
  CDR3 for beta chain variable domain of TCR clone 373337 (TRBV7-2, TRBJ2-7)
CASRSQGAAYKQYF

SEQ ID NO: 746675 - protein, 18 aa, Homo sapiens
  CDR3 for alpha chain variable domain of TCR clone 373338 (TRAV1-2, TRAJ18)
CAVRDMGDSGSTLGRLYF

SEQ ID NO: 746676 - protein, 16 aa, Homo sapiens
  CDR3 for beta chain variable domain of TCR clone 373338 (TRBV29-1, TRBJ1-2)
CSVEANRDIANYGYTF

SEQ ID NO: 746677 - protein, 13 aa, Homo sapiens
  CDR3 for alpha chain variable domain of TCR clone 373339 (TRAV21, TRAJ15)
CAVSQPGRNCSDL

SEQ ID NO: 746678 - protein, 11 aa, Homo sapiens
  CDR3 for beta chain variable domain of TCR clone 373339 (TRBV20-1, TRBJ2-7)
CSARTSYEQYF

SEQ ID NO: 746679 - protein, 16 aa, Homo sapiens
  CDR3 for alpha chain variable domain of TCR clone 373340 (TRAV12-2, TRAJ45)
CAVNMYSGGGADGLTF

SEQ ID NO: 746680 - protein, 13 aa, Homo sapiens
  CDR3 for beta chain variable domain of TCR clone 373340 (TRBV7-3, TRBJ1-1)
CASSQDWGAEAFF

SEQ ID NO: 746681 - protein, 14 aa, Homo sapiens
  CDR3 for alpha chain variable domain of TCR clone 373341 (TRAV26-1, TRAJ45)
CIVRVVGGADGLPF

SEQ ID NO: 746682 - protein, 16 aa, Homo sapiens
  CDR3 for beta chain variable domain of TCR clone 373341 (TRBV7-9, TRBJ1-1)
CASSLTQVRSNPEAFF

SEQ ID NO: 746683 - protein, 11 aa, Homo sapiens
  CDR3 for alpha chain variable domain of TCR clone 373342 (TRAV27, TRAJ40)
SLTSGTYKYIF

SEQ ID NO: 746684 - protein, 16 aa, Homo sapiens
  CDR3 for beta chain variable domain of TCR clone 373342 (TRBV12-5, TRBJ2-5)
CASGPRTSGNQETQYF

SEQ ID NO: 746685 - protein, 12 aa, Homo sapiens
  CDR3 for alpha chain variable domain of TCR clone 373343 (TRAV13-1, TRAJ21)
CAAKEGFNKFYF

SEQ ID NO: 746686 - protein, 14 aa, Homo sapiens
  CDR3 for beta chain variable domain of TCR clone 373343 (TRBV5-1, TRBJ2-7)
CASSRGESLYEQYC

SEQ ID NO: 746687 - protein, 11 aa, Homo sapiens
  CDR3 for alpha chain variable domain of TCR clone 373344 (TRAV8-4, TRAJ50)
CAVSLYDKVMF

SEQ ID NO: 746688 - protein, 12 aa, Homo sapiens
  CDR3 for beta chain variable domain of TCR clone 373344 (TRBV12-4, TRBJ2-7)
CASSLGGYEQYF

SEQ ID NO: 746689 - protein, 17 aa, Homo sapiens
  CDR3 for alpha chain variable domain of TCR clone 373345 (TRAV4, TRAJ18)
CLVGERSVGSTLGRLYC

SEQ ID NO: 746690 - protein, 14 aa, Homo sapiens
  CDR3 for beta chain variable domain of TCR clone 373345 (TRBV6-5, TRBJ1-2)
CGSSYDGTGGGYTF

SEQ ID NO: 746691 - protein, 16 aa, Homo sapiens
  CDR3 for alpha chain variable domain of TCR clone 373346 (TRAV3, TRAJ10)
CAVRDMRAGGGNKLTF

SEQ ID NO: 746692 - protein, 14 aa, Homo sapiens
  CDR3 for beta chain variable domain of TCR clone 373346 (TRBV6-6, TRBJ2-5)
CQQSRGGLEETQYF

SEQ ID NO: 746693 - protein, 14 aa, Homo sapiens
  CDR3 for alpha chain variable domain of TCR clone 373347 (TRAV12-3, TRAJ10)
SHLPLTGGGNKLTF

SEQ ID NO: 746694 - protein, 14 aa, Homo sapiens
  CDR3 for beta chain variable domain of TCR clone 373347 (TRBV20-1, TRBJ2-5)
CSALVPGDQETQYF

SEQ ID NO: 746695 - protein, 16 aa, Homo sapiens
  CDR3 for alpha chain variable domain of TCR clone 373348 (TRAV14/DV4, TRAJ17)
CAMREAGRAAGNKLTF

SEQ ID NO: 746696 - protein, 13 aa, Homo sapiens
  CDR3 for beta chain variable domain of TCR clone 373348 (TRBV11-1, TRBJ2-7)
CASSGRLDNEQYF

SEQ ID NO: 746697 - protein, 15 aa, Homo sapiens
  CDR3 for alpha chain variable domain of TCR clone 373349 (TRAV17, TRAJ6)
CATDLPSGGGYIPTF

SEQ ID NO: 746698 - protein, 16 aa, Homo sapiens
  CDR3 for beta chain variable domain of TCR clone 373349 (TRBV4-1, TRBJ2-7)
CASSQDPTGYSYEQYF

SEQ ID NO: 746699 - protein, 12 aa, Homo sapiens
  CDR3 for alpha chain variable domain of TCR clone 373350 (TRAV36/DV7, TRAJ40)
RAVGTGTYKYIF

SEQ ID NO: 746700 - protein, 14 aa, Homo sapiens
  CDR3 for beta chain variable domain of TCR clone 373350 (TRBV19, TRBJ2-3)
CASSIDLGGDTQYF

SEQ ID NO: 746701 - protein, 12 aa, Homo sapiens
  CDR3 for alpha chain variable domain of TCR clone 373351 (TRAV13-1, TRAJ21)
CAAKEGFNKFYF

SEQ ID NO: 746702 - protein, 17 aa, Homo sapiens
  CDR3 for beta chain variable domain of TCR clone 373351 (TRBV20-1, TRBJ2-1)
CSASSSGLAVSYNEQFF

SEQ ID NO: 746703 - protein, 11 aa, Homo sapiens
  CDR3 for alpha chain variable domain of TCR clone 373352 (TRAV16, TRAJ49)
CSLNTGNQFYF

SEQ ID NO: 746704 - protein, 12 aa, Homo sapiens
  CDR3 for beta chain variable domain of TCR clone 373352 (TRBV7-9, TRBJ1-4)
CANSTDREKLFF

SEQ ID NO: 746705 - protein, 12 aa, Homo sapiens
  CDR3 for alpha chain variable domain of TCR clone 373353 (TRAV13-1, TRAJ53)
CAAGGSNYKLTF

SEQ ID NO: 746706 - protein, 13 aa, Homo sapiens
  CDR3 for beta chain variable domain of TCR clone 373353 (TRBV29-1, TRBJ2-1)
CSVEGGRVNEQFF

SEQ ID NO: 746707 - protein, 15 aa, Homo sapiens
  CDR3 for alpha chain variable domain of TCR clone 373354 (TRAV12-2, TRAJ9)
CAVNNERTGGFKTIF

SEQ ID NO: 746708 - protein, 14 aa, Homo sapiens
  CDR3 for beta chain variable domain of TCR clone 373354 (TRBV4-1, TRBJ1-4)
CASSQERQNEKLFF

SEQ ID NO: 746709 - protein, 15 aa, Homo sapiens
  CDR3 for alpha chain variable domain of TCR clone 373355 (TRAV8-6, TRAJ37)
CAVIFSSGNPGKLIF

SEQ ID NO: 746710 - protein, 15 aa, Homo sapiens
  CDR3 for beta chain variable domain of TCR clone 373355 (TRBV25-1, TRBJ2-4)
CASSETESAKNIQYF

SEQ ID NO: 746711 - protein, 15 aa, Homo sapiens
  CDR3 for alpha chain variable domain of TCR clone 373356 (TRAV21, TRAJ53)
CATLNSGGSNYKLTF

SEQ ID NO: 746712 - protein, 13 aa, Homo sapiens
  CDR3 for beta chain variable domain of TCR clone 373356 (TRBV4-1, TRBJ2-2)
CASSQENTGELFF

SEQ ID NO: 746713 - protein, 12 aa, Homo sapiens
  CDR3 for alpha chain variable domain of TCR clone 373357 (TRAV21, TRAJ33)
CAVQDSNYQLIW

SEQ ID NO: 746714 - protein, 16 aa, Homo sapiens
  CDR3 for beta chain variable domain of TCR clone 373357 (TRBV12-4, TRBJ1-4)
CASSLKGIGHGEKLFF

SEQ ID NO: 746715 - protein, 13 aa, Homo sapiens
  CDR3 for alpha chain variable domain of TCR clone 373358 (TRAV21, TRAJ27)
CAARPGNAGKSPF

SEQ ID NO: 746716 - protein, 14 aa, Homo sapiens
  CDR3 for beta chain variable domain of TCR clone 373358 (TRBV7-6, TRBJ2-3)
CATSLGTVTDTQYF

SEQ ID NO: 746717 - protein, 16 aa, Homo sapiens
  CDR3 for alpha chain variable domain of TCR clone 373359 (TRAV38-1, TRAJ56)
CAFMKRQTGANSKLTF

SEQ ID NO: 746718 - protein, 14 aa, Homo sapiens
  CDR3 for beta chain variable domain of TCR clone 373359 (TRBV18, TRBJ2-7)
CASSPRGGAYEQYF

SEQ ID NO: 746719 - protein, 14 aa, Homo sapiens
  CDR3 for alpha chain variable domain of TCR clone 373360 (TRAV12-2, TRAJ40)
CAVKIPSGTYKYIF

SEQ ID NO: 746720 - protein, 13 aa, Homo sapiens
  CDR3 for beta chain variable domain of TCR clone 373360 (TRBV7-9, TRBJ1-2)
CASSLKQNDGYTF

SEQ ID NO: 746721 - protein, 15 aa, Homo sapiens
  CDR3 for alpha chain variable domain of TCR clone 373361 (TRAV8-3, TRAJ44)
CAVVPALPVNSPLGL

SEQ ID NO: 746722 - protein, 14 aa, Homo sapiens
  CDR3 for beta chain variable domain of TCR clone 373361 (TRBV11-2, TRBJ2-3)
CASSRLARTDTQYF

SEQ ID NO: 746723 - protein, 14 aa, Homo sapiens
  CDR3 for alpha chain variable domain of TCR clone 373362 (TRAV3, TRAJ21)
CAVRDAYNFNKFYF

SEQ ID NO: 746724 - protein, 16 aa, Homo sapiens
  CDR3 for beta chain variable domain of TCR clone 373362 (TRBV7-9, TRBJ1-2)
CASSLGFSSGEDGYTF

SEQ ID NO: 746725 - protein, 16 aa, Homo sapiens
  CDR3 for alpha chain variable domain of TCR clone 373363 (TRAV16, TRAJ4)
CALSRMFSCCYNKLIF

SEQ ID NO: 746726 - protein, 16 aa, Homo sapiens
  CDR3 for beta chain variable domain of TCR clone 373363 (TRBV24-1, TRBJ2-3)
CATSDPGTGATDTQYF

SEQ ID NO: 746727 - protein, 13 aa, Homo sapiens
  CDR3 for alpha chain variable domain of TCR clone 373364 (TRAV12-2, TRAJ15)
CAVFNQAGTALIF

SEQ ID NO: 746728 - protein, 14 aa, Homo sapiens
  CDR3 for beta chain variable domain of TCR clone 373364 (TRBV7-8, TRBJ1-5)
CQQPGGCADQPQHF

SEQ ID NO: 746729 - protein, 13 aa, Homo sapiens
  CDR3 for alpha chain variable domain of TCR clone 373365 (TRAV27, TRAJ3)
ASLRGSSASKIIF

SEQ ID NO: 746730 - protein, 15 aa, Homo sapiens
  CDR3 for beta chain variable domain of TCR clone 373365 (TRBV4-1, TRBJ1-4)
CASSDTGGTNEKLFF

SEQ ID NO: 746731 - protein, 12 aa, Homo sapiens
  CDR3 for alpha chain variable domain of TCR clone 373366 (TRAV12-3, TRAJ41)
CAMSYSGNALNF

SEQ ID NO: 746732 - protein, 13 aa, Homo sapiens
  CDR3 for beta chain variable domain of TCR clone 373366 (TRBV7-3, TRBJ2-1)
CASSLDSYNEQFF

SEQ ID NO: 746733 - protein, 18 aa, Homo sapiens
  CDR3 for alpha chain variable domain of TCR clone 373367 (TRAV26-1, TRAJ52)
CIVRIAGAGGTSYGKLTF

SEQ ID NO: 746734 - protein, 13 aa, Homo sapiens
  CDR3 for beta chain variable domain of TCR clone 373367 (TRBV7-8, TRBJ1-2)
CASSAQSYYGYTF

SEQ ID NO: 746735 - protein, 12 aa, Homo sapiens
  CDR3 for alpha chain variable domain of TCR clone 373368 (TRAV12-1, TRAJ34)
CVVPFNTDKLIF

SEQ ID NO: 746736 - protein, 14 aa, Homo sapiens
  CDR3 for beta chain variable domain of TCR clone 373368 (TRBV19, TRBJ1-1)
CASLRTGLNTEAFF

SEQ ID NO: 746737 - protein, 15 aa, Homo sapiens
  CDR3 for alpha chain variable domain of TCR clone 373369 (TRAV2, TRAJ15)
CAVEDREQAGTALIF

SEQ ID NO: 746738 - protein, 13 aa, Homo sapiens
  CDR3 for beta chain variable domain of TCR clone 373369 (TRBV10-2, TRBJ2-7)
CPSGTSGGYEQYF

SEQ ID NO: 746739 - protein, 17 aa, Homo sapiens
  CDR3 for alpha chain variable domain of TCR clone 373370 (TRAV3, TRAJ6)
CAVRDGPRAGGSYIPTF

SEQ ID NO: 746740 - protein, 17 aa, Homo sapiens
  CDR3 for beta chain variable domain of TCR clone 373370 (TRBV13, TRBJ2-3)
CASSLARVAGGRNTQYF

SEQ ID NO: 746741 - protein, 13 aa, Homo sapiens
  CDR3 for alpha chain variable domain of TCR clone 373371 (TRAV13-2, TRAJ53)
CAVIMGSNYKLTF

SEQ ID NO: 746742 - protein, 13 aa, Homo sapiens
  CDR3 for beta chain variable domain of TCR clone 373371 (TRBV4-1, TRBJ2-2)
CASSQENTGELFF

SEQ ID NO: 746743 - protein, 14 aa, Homo sapiens
  CDR3 for alpha chain variable domain of TCR clone 373372 (TRAV12-1, TRAJ3)
CGAARYSSASKIIS

SEQ ID NO: 746744 - protein, 15 aa, Homo sapiens
  CDR3 for beta chain variable domain of TCR clone 373372 (TRBV7-2, TRBJ2-6)
CASSREGSGANVLTF

SEQ ID NO: 746745 - protein, 14 aa, Homo sapiens
  CDR3 for alpha chain variable domain of TCR clone 373373 (TRAV16, TRAJ37)
SALDISGNTGKLIF

SEQ ID NO: 746746 - protein, 11 aa, Homo sapiens
  CDR3 for beta chain variable domain of TCR clone 373373 (TRBV6-1, TRBJ2-1)
CASISSNEQFF

SEQ ID NO: 746747 - protein, 16 aa, Homo sapiens
  CDR3 for alpha chain variable domain of TCR clone 373374 (TRAV12-2, TRAJ45)
CAVKRNPGGGADGLIF

SEQ ID NO: 746748 - protein, 12 aa, Homo sapiens
  CDR3 for beta chain variable domain of TCR clone 373374 (TRBV6-1, TRBJ2-5)
CASSEGRETQYF

SEQ ID NO: 746749 - protein, 12 aa, Homo sapiens
  CDR3 for alpha chain variable domain of TCR clone 373375 (TRAV4, TRAJ6)
CLAPGGSYIPTF

SEQ ID NO: 746750 - protein, 15 aa, Homo sapiens
  CDR3 for beta chain variable domain of TCR clone 373375 (TRBV7-2, TRBJ2-1)
CASSSGLAGGNEQFF

SEQ ID NO: 746751 - protein, 14 aa, Homo sapiens
  CDR3 for alpha chain variable domain of TCR clone 373376 (TRAV12-1, TRAJ30)
CVVNIGGRDDKIIF

SEQ ID NO: 746752 - protein, 15 aa, Homo sapiens
  CDR3 for beta chain variable domain of TCR clone 373376 (TRBV18, TRBJ2-1)
CASSPRGSSYNEQFF

SEQ ID NO: 746753 - protein, 14 aa, Homo sapiens
  CDR3 for alpha chain variable domain of TCR clone 373377 (TRAV2, TRAJ11)
CAVVPHSGYSTLTF

SEQ ID NO: 746754 - protein, 15 aa, Homo sapiens
  CDR3 for beta chain variable domain of TCR clone 373377 (TRBV4-1, TRBJ1-3)
CASSQDLRVGNTIYF

SEQ ID NO: 746755 - protein, 14 aa, Homo sapiens
  CDR3 for alpha chain variable domain of TCR clone 373378 (TRAV29/DV5, TRAJ45)
CAASFRGGADGLTF

SEQ ID NO: 746756 - protein, 17 aa, Homo sapiens
  CDR3 for beta chain variable domain of TCR clone 373378 (TRBV28, TRBJ2-5)
CASSRQGGLAGAETQYF

SEQ ID NO: 746757 - protein, 17 aa, Homo sapiens
  CDR3 for alpha chain variable domain of TCR clone 373379 (TRAV26-1, TRAJ58)
CIVRVGAEETSGSRLTV

SEQ ID NO: 746758 - protein, 18 aa, Homo sapiens
  CDR3 for beta chain variable domain of TCR clone 373379 (TRBV7-9, TRBJ2-7)
CASSLTTRGSRTWYEQYF

SEQ ID NO: 746759 - protein, 15 aa, Homo sapiens
  CDR3 for alpha chain variable domain of TCR clone 373380 (TRAV17, TRAJ6)
CVTDEMSGGSYIPTF

SEQ ID NO: 746760 - protein, 16 aa, Homo sapiens
  CDR3 for beta chain variable domain of TCR clone 373380 (TRBV12-4, TRBJ1-4)
CASSSNRETTNEKLFF

SEQ ID NO: 746761 - protein, 18 aa, Homo sapiens
  CDR3 for alpha chain variable domain of TCR clone 373381 (TRAV26-1, TRAJ22)
CIVRVALISSGSARHLTF

SEQ ID NO: 746762 - protein, 12 aa, Homo sapiens
  CDR3 for beta chain variable domain of TCR clone 373381 (TRBV13, TRBJ2-5)
CQQPEVGETQYF

SEQ ID NO: 746763 - protein, 13 aa, Homo sapiens
  CDR3 for alpha chain variable domain of TCR clone 373382 (TRAV2, TRAJ15)
CAVASQAGTALIF

SEQ ID NO: 746764 - protein, 15 aa, Homo sapiens
  CDR3 for beta chain variable domain of TCR clone 373382 (TRBV20-1, TRBJ2-1)
CSARFSAGGLNEQFF

SEQ ID NO: 746765 - protein, 12 aa, Homo sapiens
  CDR3 for alpha chain variable domain of TCR clone 373383 (TRAV13-1, TRAJ15)
CAASQSGTALIF

SEQ ID NO: 746766 - protein, 18 aa, Homo sapiens
  CDR3 for beta chain variable domain of TCR clone 373383 (TRBV7-9, TRBJ2-3)
CASSLPINGQISTDTQYF

SEQ ID NO: 746767 - protein, 11 aa, Homo sapiens
  CDR3 for alpha chain variable domain of TCR clone 373384 (TRAV3, TRAJ17)
CAEAAGNKLTF

SEQ ID NO: 746768 - protein, 15 aa, Homo sapiens
  CDR3 for beta chain variable domain of TCR clone 373384 (TRBV12-4, TRBJ2-7)
FASSLGSGGPYEQYF

SEQ ID NO: 746769 - protein, 11 aa, Homo sapiens
  CDR3 for alpha chain variable domain of TCR clone 373385 (TRAV30, TRAJ23)
CGTEIAGKLIF

SEQ ID NO: 746770 - protein, 16 aa, Homo sapiens
  CDR3 for beta chain variable domain of TCR clone 373385 (TRBV7-2, TRBJ2-7)
CASPSQAASGGYEQYF

SEQ ID NO: 746771 - protein, 11 aa, Homo sapiens
  CDR3 for alpha chain variable domain of TCR clone 373386 (TRAV17, TRAJ31)
CATDRTARLMF

SEQ ID NO: 746772 - protein, 15 aa, Homo sapiens
  CDR3 for beta chain variable domain of TCR clone 373386 (TRBV20-1, TRBJ2-1)
CSASSAGSSYNEQFF

SEQ ID NO: 746773 - protein, 13 aa, Homo sapiens
  CDR3 for alpha chain variable domain of TCR clone 373387 (TRAV8-3, TRAJ7)
CAVGAYGNNRLAF

SEQ ID NO: 746774 - protein, 15 aa, Homo sapiens
  CDR3 for beta chain variable domain of TCR clone 373387 (TRBV6-3, TRBJ2-7)
CASSSPGTVFYEQYF

SEQ ID NO: 746775 - protein, 13 aa, Homo sapiens
  CDR3 for alpha chain variable domain of TCR clone 373388 (TRAV12-2, TRAJ4)
CAVRSGGYNKRIF

SEQ ID NO: 746776 - protein, 15 aa, Homo sapiens
  CDR3 for beta chain variable domain of TCR clone 373388 (TRBV10-3, TRBJ2-1)
CAISDVQDRAYEQFF

SEQ ID NO: 746777 - protein, 14 aa, Homo sapiens
  CDR3 for alpha chain variable domain of TCR clone 373389 (TRAV8-4, TRAJ9)
CAVRINTEGFETIF

SEQ ID NO: 746778 - protein, 15 aa, Homo sapiens
  CDR3 for beta chain variable domain of TCR clone 373389 (TRBV10-2, TRBJ2-6)
CASSEQGTGANVLTF

SEQ ID NO: 746779 - protein, 13 aa, Homo sapiens
  CDR3 for alpha chain variable domain of TCR clone 373390 (TRAV14/DV4, TRAJ20)
CAMRESNDYTLSF

SEQ ID NO: 746780 - protein, 15 aa, Homo sapiens
  CDR3 for beta chain variable domain of TCR clone 373390 (TRBV7-9, TRBJ1-1)
CASSRPGTANTEAFF

SEQ ID NO: 746781 - protein, 12 aa, Homo sapiens
  CDR3 for alpha chain variable domain of TCR clone 373391 (TRAV35, TRAJ49)
CAGWNTGNQFYF

SEQ ID NO: 746782 - protein, 14 aa, Homo sapiens
  CDR3 for beta chain variable domain of TCR clone 373391 (TRBV6-5, TRBJ1-6)
CASSDRAGNSPLHF

SEQ ID NO: 746783 - protein, 15 aa, Homo sapiens
  CDR3 for alpha chain variable domain of TCR clone 373392 (TRAV21, TRAJ53)
CATLNSGGRNYKLTF

SEQ ID NO: 746784 - protein, 16 aa, Homo sapiens
  CDR3 for beta chain variable domain of TCR clone 373392 (TRBV12-4, TRBJ2-3)
CASSLRLAETTDTQYF

SEQ ID NO: 746785 - protein, 12 aa, Homo sapiens
  CDR3 for alpha chain variable domain of TCR clone 373393 (TRAV8-3, TRAJ20)
CAVGANDYKLSF

SEQ ID NO: 746786 - protein, 15 aa, Homo sapiens
  CDR3 for beta chain variable domain of TCR clone 373393 (TRBV3-1, TRBJ2-1)
CASSQQPSGGNEQFF

SEQ ID NO: 746787 - protein, 12 aa, Homo sapiens
  CDR3 for alpha chain variable domain of TCR clone 373394 (TRAV21, TRAJ49)
CAVNDGGNQCYF

SEQ ID NO: 746788 - protein, 14 aa, Homo sapiens
  CDR3 for beta chain variable domain of TCR clone 373394 (TRBV18, TRBJ2-7)
CASSPRGGSYEQYF

SEQ ID NO: 746789 - protein, 12 aa, Homo sapiens
  CDR3 for alpha chain variable domain of TCR clone 373395 (TRAV12-1, TRAJ50)
CVGRTSYDKVIF

SEQ ID NO: 746790 - protein, 12 aa, Homo sapiens
  CDR3 for beta chain variable domain of TCR clone 373395 (TRBV5-7, TRBJ1-1)
CASSLVGAEAFF

SEQ ID NO: 746791 - protein, 12 aa, Homo sapiens
  CDR3 for alpha chain variable domain of TCR clone 373396 (TRAV2, TRAJ9)
CAVGAGGFKTIF

SEQ ID NO: 746792 - protein, 16 aa, Homo sapiens
  CDR3 for beta chain variable domain of TCR clone 373396 (TRBV24-1, TRBJ2-3)
CATCDRRQDLTDTQYF

SEQ ID NO: 746793 - protein, 16 aa, Homo sapiens
  CDR3 for alpha chain variable domain of TCR clone 373397 (TRAV3, TRAJ37)
CAVRVRGSCNTGKLIF

SEQ ID NO: 746794 - protein, 13 aa, Homo sapiens
  CDR3 for beta chain variable domain of TCR clone 373397 (TRBV14, TRBJ2-1)
CASSQDRRNEQFF

SEQ ID NO: 746795 - protein, 13 aa, Homo sapiens
  CDR3 for alpha chain variable domain of TCR clone 373398 (TRAV21, TRAJ57)
CAVTQGGSEKQVF

SEQ ID NO: 746796 - protein, 15 aa, Homo sapiens
  CDR3 for beta chain variable domain of TCR clone 373398 (TRBV5-1, TRBJ1-1)
CASSSTTGTNTEAFF

SEQ ID NO: 746797 - protein, 10 aa, Homo sapiens
  CDR3 for alpha chain variable domain of TCR clone 373399 (TRAV12-2, TRAJ20)
CAVYLYKLSF

SEQ ID NO: 746798 - protein, 15 aa, Homo sapiens
  CDR3 for beta chain variable domain of TCR clone 373399 (TRBV5-1, TRBJ2-1)
CASKGLAGVYNEQFF

SEQ ID NO: 746799 - protein, 21 aa, Homo sapiens
  CDR3 for alpha chain variable domain of TCR clone 373400 (TRAV8-3, TRAJ32)
CAVEVVLQTSSSLDLALCLLS

SEQ ID NO: 746800 - protein, 15 aa, Homo sapiens
  CDR3 for beta chain variable domain of TCR clone 373400 (TRBV7-2, TRBJ2-1)
CASSSRTSREDEQFF

SEQ ID NO: 746801 - protein, 14 aa, Homo sapiens
  CDR3 for alpha chain variable domain of TCR clone 373401 (TRAV2, TRAJ9)
CAVEDRSGGFKTIF

SEQ ID NO: 746802 - protein, 16 aa, Homo sapiens
  CDR3 for beta chain variable domain of TCR clone 373401 (TRBV7-3, TRBJ2-1)
CASSLEAYRSYNEQFF

SEQ ID NO: 746803 - protein, 13 aa, Homo sapiens
  CDR3 for alpha chain variable domain of TCR clone 373402 (TRAV21, TRAJ27)
CAARPGNAGKSTF

SEQ ID NO: 746804 - protein, 14 aa, Homo sapiens
  CDR3 for beta chain variable domain of TCR clone 373402 (TRBV28, TRBJ2-7)
CASTFYGRAHEQYF

SEQ ID NO: 746805 - protein, 15 aa, Homo sapiens
  CDR3 for alpha chain variable domain of TCR clone 373403 (TRAV23/DV6, TRAJ18)
CAARYRGSTLGRMHF

SEQ ID NO: 746806 - protein, 13 aa, Homo sapiens
  CDR3 for beta chain variable domain of TCR clone 373403 (TRBV7-2, TRBJ2-7)
CASSSPSGSEQYF

SEQ ID NO: 746807 - protein, 14 aa, Homo sapiens
  CDR3 for alpha chain variable domain of TCR clone 373404 (TRAV1-2, TRAJ16)
CAVNRFSDGQKLLF

SEQ ID NO: 746808 - protein, 17 aa, Homo sapiens
  CDR3 for beta chain variable domain of TCR clone 373404 (TRBV4-1, TRBJ1-5)
CASSQQPPTVANQPQHF

SEQ ID NO: 746809 - protein, 12 aa, Homo sapiens
  CDR3 for alpha chain variable domain of TCR clone 373405 (TRAV12-1, TRAJ34)
CVVAGATDKLIF

SEQ ID NO: 746810 - protein, 15 aa, Homo sapiens
  CDR3 for beta chain variable domain of TCR clone 373405 (TRBV4-1, TRBJ2-5)
CASSQWDLYQETQYF

SEQ ID NO: 746811 - protein, 20 aa, Homo sapiens
  CDR3 for alpha chain variable domain of TCR clone 373406 (TRAV8-3, TRAJ45)
LSTSVLWGSYSGGGADGLTF

SEQ ID NO: 746812 - protein, 11 aa, Homo sapiens
  CDR3 for beta chain variable domain of TCR clone 373406 (TRBV20-1, TRBJ2-5)
CSADRAETQYV

SEQ ID NO: 746813 - protein, 13 aa, Homo sapiens
  CDR3 for alpha chain variable domain of TCR clone 373407 (TRAV38-2/DV8, TRAJ45)
CAYVGGGADGLTF

SEQ ID NO: 746814 - protein, 14 aa, Homo sapiens
  CDR3 for beta chain variable domain of TCR clone 373407 (TRBV18, TRBJ2-5)
CASSPGVSQETQYF

SEQ ID NO: 746815 - protein, 13 aa, Homo sapiens
  CDR3 for alpha chain variable domain of TCR clone 373408 (TRAV14/DV4, TRAJ4)
CAMQAGGYNKLIF

SEQ ID NO: 746816 - protein, 15 aa, Homo sapiens
  CDR3 for beta chain variable domain of TCR clone 373408 (TRBV11-3, TRBJ1-1)
CASSLGGPGDTEAFF

SEQ ID NO: 746817 - protein, 14 aa, Homo sapiens
  CDR3 for alpha chain variable domain of TCR clone 373409 (TRAV1-2, TRAJ8)
CAVREDTGFQKLVF

SEQ ID NO: 746818 - protein, 16 aa, Homo sapiens
  CDR3 for beta chain variable domain of TCR clone 373409 (TRBV12-4, TRBJ2-3)
CASSPETGGFSDTQYF

SEQ ID NO: 746819 - protein, 11 aa, Homo sapiens
  CDR3 for alpha chain variable domain of TCR clone 373410 (TRAV13-1, TRAJ39)
CAAHAGNMFTF

SEQ ID NO: 746820 - protein, 15 aa, Homo sapiens
  CDR3 for beta chain variable domain of TCR clone 373410 (TRBV20-1, TRBJ2-7)
CSARDRVSGMDEQYF

SEQ ID NO: 746821 - protein, 14 aa, Homo sapiens
  CDR3 for alpha chain variable domain of TCR clone 373411 (TRAV21, TRAJ35)
CAVMPIGFGNVLQC

SEQ ID NO: 746822 - protein, 12 aa, Homo sapiens
  CDR3 for beta chain variable domain of TCR clone 373411 (TRBV7-9, TRBJ2-7)
CASSIKREEQYL

SEQ ID NO: 746823 - protein, 15 aa, Homo sapiens
  CDR3 for alpha chain variable domain of TCR clone 373412 (TRAV21, TRAJ13)
CAVRPTSGGYQKVTC

SEQ ID NO: 746824 - protein, 18 aa, Homo sapiens
  CDR3 for beta chain variable domain of TCR clone 373412 (TRBV11-3, TRBJ2-1)
CASSSYPGGRDSYNEQFF

SEQ ID NO: 746825 - protein, 13 aa, Homo sapiens
  CDR3 for alpha chain variable domain of TCR clone 373413 (TRAV26-1, TRAJ35)
CIVSRRVGEMLHC

SEQ ID NO: 746826 - protein, 15 aa, Homo sapiens
  CDR3 for beta chain variable domain of TCR clone 373413 (TRBV7-3, TRBJ2-7)
CASSLTPTGYDEQYF

SEQ ID NO: 746827 - protein, 14 aa, Homo sapiens
  CDR3 for alpha chain variable domain of TCR clone 373414 (TRAV1-2, TRAJ16)
CAVNRFSDGQKLLF

SEQ ID NO: 746828 - protein, 13 aa, Homo sapiens
  CDR3 for beta chain variable domain of TCR clone 373414 (TRBV4-1, TRBJ2-2)
CAGSQENTGELFF

SEQ ID NO: 746829 - protein, 16 aa, Homo sapiens
  CDR3 for alpha chain variable domain of TCR clone 373415 (TRAV3, TRAJ10)
CSVRDMRAGGGNKLTF

SEQ ID NO: 746830 - protein, 15 aa, Homo sapiens
  CDR3 for beta chain variable domain of TCR clone 373415 (TRBV20-1, TRBJ2-1)
CSASSAGSSYNEQFF

SEQ ID NO: 746831 - protein, 15 aa, Homo sapiens
  CDR3 for alpha chain variable domain of TCR clone 373416 (TRAV3, TRAJ22)
CAVRDRGGSARQLTF

SEQ ID NO: 746832 - protein, 13 aa, Homo sapiens
  CDR3 for beta chain variable domain of TCR clone 373416 (TRBV2, TRBJ1-5)
CATAGPGNQAQHF

SEQ ID NO: 746833 - protein, 17 aa, Homo sapiens
  CDR3 for alpha chain variable domain of TCR clone 373417 (TRAV27, TRAJ18)
CAGLHRCRGSTLGRLDF

SEQ ID NO: 746834 - protein, 14 aa, Homo sapiens
  CDR3 for beta chain variable domain of TCR clone 373417 (TRBV20-1, TRBJ1-5)
CSARGRGSDQPQHF

SEQ ID NO: 746835 - protein, 13 aa, Homo sapiens
  CDR3 for alpha chain variable domain of TCR clone 373418 (TRAV12-3, TRAJ4)
CNEQAGGYIKLIF

SEQ ID NO: 746836 - protein, 15 aa, Homo sapiens
  CDR3 for beta chain variable domain of TCR clone 373418 (TRBV5-1, TRBJ1-1)
CASSLSDLGGTEAFF

SEQ ID NO: 746837 - protein, 13 aa, Homo sapiens
  CDR3 for alpha chain variable domain of TCR clone 373419 (TRAV30, TRAJ24)
CGTVTDSWGKLQL

SEQ ID NO: 746838 - protein, 14 aa, Homo sapiens
  CDR3 for beta chain variable domain of TCR clone 373419 (TRBV25-1, TRBJ1-1)
CASTHLGGNTEAFF

SEQ ID NO: 746839 - protein, 14 aa, Homo sapiens
  CDR3 for alpha chain variable domain of TCR clone 373420 (TRAV21, TRAJ35)
CAVMPLGFGNVLHC

SEQ ID NO: 746840 - protein, 12 aa, Homo sapiens
  CDR3 for beta chain variable domain of TCR clone 373420 (TRBV7-9, TRBJ2-7)
CASSIKREEQHF

SEQ ID NO: 746841 - protein, 11 aa, Homo sapiens
  CDR3 for alpha chain variable domain of TCR clone 373421 (TRAV21, TRAJ21)
CAADNFNKFYF

SEQ ID NO: 746842 - protein, 17 aa, Homo sapiens
  CDR3 for beta chain variable domain of TCR clone 373421 (TRBV27, TRBJ2-1)
CASSSERGGQSADEQFF

SEQ ID NO: 746843 - protein, 15 aa, Homo sapiens
  CDR3 for alpha chain variable domain of TCR clone 373422 (TRAV26-1, TRAJ56)
CIVRVATGANSKLTF

SEQ ID NO: 746844 - protein, 15 aa, Homo sapiens
  CDR3 for beta chain variable domain of TCR clone 373422 (TRBV27, TRBJ2-7)
CASRPQREGQREQYF

SEQ ID NO: 746845 - protein, 14 aa, Homo sapiens
  CDR3 for alpha chain variable domain of TCR clone 373423 (TRAV29/DV5, TRAJ32)
CAAAYGGATNRLIF

SEQ ID NO: 746846 - protein, 11 aa, Homo sapiens
  CDR3 for beta chain variable domain of TCR clone 373423 (TRBV11-2, TRBJ2-2)
CASSLPGELFF

SEQ ID NO: 746847 - protein, 15 aa, Homo sapiens
  CDR3 for alpha chain variable domain of TCR clone 373424 (TRAV3, TRAJ4)
CAVRDGTGGYNKLLF

SEQ ID NO: 746848 - protein, 13 aa, Homo sapiens
  CDR3 for beta chain variable domain of TCR clone 373424 (TRBV10-3, TRBJ2-7)
CASKLAVNYEQYF

SEQ ID NO: 746849 - protein, 14 aa, Homo sapiens
  CDR3 for alpha chain variable domain of TCR clone 373425 (TRAV23/DV6, TRAJ8)
CAATKNTGFQKLVF

SEQ ID NO: 746850 - protein, 16 aa, Homo sapiens
  CDR3 for beta chain variable domain of TCR clone 373425 (TRBV4-1, TRBJ2-6)
CASSQVGDPGANVLTF

SEQ ID NO: 746851 - protein, 14 aa, Homo sapiens
  CDR3 for alpha chain variable domain of TCR clone 373426 (TRAV13-1, TRAJ9)
CAASALTGGFKTVF

SEQ ID NO: 746852 - protein, 15 aa, Homo sapiens
  CDR3 for beta chain variable domain of TCR clone 373426 (TRBV7-2, TRBJ2-1)
CASSFRESSYNEQFF

SEQ ID NO: 746853 - protein, 14 aa, Homo sapiens
  CDR3 for alpha chain variable domain of TCR clone 373427 (TRAV1-2, TRAJ8)
CAVREDTGFQKLVF

SEQ ID NO: 746854 - protein, 12 aa, Homo sapiens
  CDR3 for beta chain variable domain of TCR clone 373427 (TRBV11-2, TRBJ2-2)
CARSLPTGELFF

SEQ ID NO: 746855 - protein, 14 aa, Homo sapiens
  CDR3 for alpha chain variable domain of TCR clone 373428 (TRAV12-1, TRAJ17)
CVVNYKAAGNKLTF

SEQ ID NO: 746856 - protein, 11 aa, Homo sapiens
  CDR3 for beta chain variable domain of TCR clone 373428 (TRBV28, TRBJ2-1)
CASSSGPEQFF

SEQ ID NO: 746857 - protein, 15 aa, Homo sapiens
  CDR3 for alpha chain variable domain of TCR clone 373429 (TRAV34, TRAJ38)
CGADFTPGNNRKLIW

SEQ ID NO: 746858 - protein, 12 aa, Homo sapiens
  CDR3 for beta chain variable domain of TCR clone 373429 (TRBV7-9, TRBJ1-4)
CASSTDREKLFF

SEQ ID NO: 746859 - protein, 14 aa, Homo sapiens
  CDR3 for alpha chain variable domain of TCR clone 373430 (TRAV1-1, TRAJ27)
CAVIYNTNAGKSTF

SEQ ID NO: 746860 - protein, 14 aa, Homo sapiens
  CDR3 for beta chain variable domain of TCR clone 373430 (TRBV19, TRBJ2-1)
CASPTFVLSGEQFV

SEQ ID NO: 746861 - protein, 15 aa, Homo sapiens
  CDR3 for alpha chain variable domain of TCR clone 373431 (TRAV3, TRAJ22)
CAMRDRGGFARQLTF

SEQ ID NO: 746862 - protein, 13 aa, Homo sapiens
  CDR3 for beta chain variable domain of TCR clone 373431 (TRBV7-3, TRBJ2-1)
CASSPVAYNEQFF

SEQ ID NO: 746863 - protein, 14 aa, Homo sapiens
  CDR3 for alpha chain variable domain of TCR clone 373432 (TRAV16, TRAJ17)
CALSGRAAGNKLTF

SEQ ID NO: 746864 - protein, 15 aa, Homo sapiens
  CDR3 for beta chain variable domain of TCR clone 373432 (TRBV3-1, TRBJ1-2)
CASSATRLPEGGYTF

SEQ ID NO: 746865 - protein, 14 aa, Homo sapiens
  CDR3 for alpha chain variable domain of TCR clone 373433 (TRAV12-2, TRAJ6)
CASKWGGGSYIPTF

SEQ ID NO: 746866 - protein, 14 aa, Homo sapiens
  CDR3 for beta chain variable domain of TCR clone 373433 (TRBV20-1, TRBJ2-5)
CSASDSGSGETQYF

SEQ ID NO: 746867 - protein, 14 aa, Homo sapiens
  CDR3 for alpha chain variable domain of TCR clone 373434 (TRAV8-1, TRAJ5)
CAVRTETGRRALTF

SEQ ID NO: 746868 - protein, 14 aa, Homo sapiens
  CDR3 for beta chain variable domain of TCR clone 373434 (TRBV19, TRBJ2-1)
CASPTFVLSGEQFF

SEQ ID NO: 746869 - protein, 16 aa, Homo sapiens
  CDR3 for alpha chain variable domain of TCR clone 373435 (TRAV16, TRAJ52)
CALSAAGGTSYGKLTF

SEQ ID NO: 746870 - protein, 14 aa, Homo sapiens
  CDR3 for beta chain variable domain of TCR clone 373435 (TRBV5-5, TRBJ2-7)
CASSLGQGTYEQYF

SEQ ID NO: 746871 - protein, 15 aa, Homo sapiens
  CDR3 for alpha chain variable domain of TCR clone 373436 (TRAV4, TRAJ10)
CLVSDEEGGGNKLTF

SEQ ID NO: 746872 - protein, 15 aa, Homo sapiens
  CDR3 for beta chain variable domain of TCR clone 373436 (TRBV7-2, TRBJ2-7)
CASSLTGQGTYEQYF

SEQ ID NO: 746873 - protein, 14 aa, Homo sapiens
  CDR3 for alpha chain variable domain of TCR clone 373437 (TRAV12-2, TRAJ44)
CAVNKAGTASKLTF

SEQ ID NO: 746874 - protein, 15 aa, Homo sapiens
  CDR3 for beta chain variable domain of TCR clone 373437 (TRBV9, TRBJ1-6)
CASSVAGTGDSPLHF

SEQ ID NO: 746875 - protein, 14 aa, Homo sapiens
  CDR3 for alpha chain variable domain of TCR clone 373438 (TRAV12-2, TRAJ40)
CAVKIPSGTYKYIF

SEQ ID NO: 746876 - protein, 14 aa, Homo sapiens
  CDR3 for beta chain variable domain of TCR clone 373438 (TRBV19, TRBJ2-3)
CASSAPRGTDTQYF

SEQ ID NO: 746877 - protein, 11 aa, Homo sapiens
  CDR3 for alpha chain variable domain of TCR clone 373439 (TRAV2, TRAJ33)
CAVDSNYQLIW

SEQ ID NO: 746878 - protein, 14 aa, Homo sapiens
  CDR3 for beta chain variable domain of TCR clone 373439 (TRBV19, TRBJ2-2)
CAGSTLHRSGELFF

SEQ ID NO: 746879 - protein, 13 aa, Homo sapiens
  CDR3 for alpha chain variable domain of TCR clone 373440 (TRAV13-2, TRAJ13)
CAERPGGYQKVTF

SEQ ID NO: 746880 - protein, 13 aa, Homo sapiens
  CDR3 for beta chain variable domain of TCR clone 373440 (TRBV7-2, TRBJ2-2)
CASSLAVTGELFF

SEQ ID NO: 746881 - protein, 16 aa, Homo sapiens
  CDR3 for alpha chain variable domain of TCR clone 373441 (TRAV30, TRAJ24)
CGTEIVDADSWGKFQF

SEQ ID NO: 746882 - protein, 17 aa, Homo sapiens
  CDR3 for beta chain variable domain of TCR clone 373441 (TRBV20-1, TRBJ2-1)
CSAATRLVGTRYNEQFF

SEQ ID NO: 746883 - protein, 10 aa, Homo sapiens
  CDR3 for alpha chain variable domain of TCR clone 373442 (TRAV12-1, TRAJ43)
CVVHNNDKRF

SEQ ID NO: 746884 - protein, 13 aa, Homo sapiens
  CDR3 for beta chain variable domain of TCR clone 373442 (TRBV12-4, TRBJ1-2)
CASSSGLTVISTF

SEQ ID NO: 746885 - protein, 18 aa, Homo sapiens
  CDR3 for alpha chain variable domain of TCR clone 373443 (TRAV13-1, TRAJ52)
CAASKRSAGGTSYGKLTF

SEQ ID NO: 746886 - protein, 16 aa, Homo sapiens
  CDR3 for beta chain variable domain of TCR clone 373443 (TRBV5-1, TRBJ2-1)
CASSLTLAGGRNEQFF

SEQ ID NO: 746887 - protein, 14 aa, Homo sapiens
  CDR3 for alpha chain variable domain of TCR clone 373444 (TRAV12-3, TRAJ10)
SHLPLTGGGNKLTF

SEQ ID NO: 746888 - protein, 15 aa, Homo sapiens
  CDR3 for beta chain variable domain of TCR clone 373444 (TRBV11-2, TRBJ1-3)
CARSLDGTVGNTIYC

SEQ ID NO: 746889 - protein, 14 aa, Homo sapiens
  CDR3 for alpha chain variable domain of TCR clone 373445 (TRAV12-3, TRAJ29)
CAMISLSGNTPLVF

SEQ ID NO: 746890 - protein, 13 aa, Homo sapiens
  CDR3 for beta chain variable domain of TCR clone 373445 (TRBV20-1, TRBJ2-2)
CSASAAGTGELFF

SEQ ID NO: 746891 - protein, 10 aa, Homo sapiens
  CDR3 for alpha chain variable domain of TCR clone 373446 (TRAV13-1, TRAJ30)
CAARDDEIIF

SEQ ID NO: 746892 - protein, 15 aa, Homo sapiens
  CDR3 for beta chain variable domain of TCR clone 373446 (TRBV9, TRBJ1-6)
CASSVAGTGDSPLHF

SEQ ID NO: 746893 - protein, 11 aa, Homo sapiens
  CDR3 for alpha chain variable domain of TCR clone 373447 (TRAV1-1, TRAJ20)
CAVANDYKLSF

SEQ ID NO: 746894 - protein, 18 aa, Homo sapiens
  CDR3 for beta chain variable domain of TCR clone 373447 (TRBV20-1, TRBJ2-6)
CSAETTPTHGSGANVLTF

SEQ ID NO: 746895 - protein, 16 aa, Homo sapiens
  CDR3 for alpha chain variable domain of TCR clone 373448 (TRAV3, TRAJ10)
CAVRDMRAGGGNTLTF

SEQ ID NO: 746896 - protein, 15 aa, Homo sapiens
  CDR3 for beta chain variable domain of TCR clone 373448 (TRBV20-1, TRBJ2-7)
CSARDRVSGMDEQYF

SEQ ID NO: 746897 - protein, 14 aa, Homo sapiens
  CDR3 for alpha chain variable domain of TCR clone 373449 (TRAV12-1, TRAJ17)
CVVNFKAAGNQLTF

SEQ ID NO: 746898 - protein, 17 aa, Homo sapiens
  CDR3 for beta chain variable domain of TCR clone 373449 (TRBV20-1, TRBJ2-1)
CSASASGLAGSYNEQFF

SEQ ID NO: 746899 - protein, 23 aa, Homo sapiens
  CDR3 for alpha chain variable domain of TCR clone 373450 (TRAV12-2, TRAJ36)
SLLIRDSQPSDSATLERANNLFF

SEQ ID NO: 746900 - protein, 13 aa, Homo sapiens
  CDR3 for beta chain variable domain of TCR clone 373450 (TRBV24-1, TRBJ2-1)
CATSAGPYNEQFF

SEQ ID NO: 746901 - protein, 15 aa, Homo sapiens
  CDR3 for alpha chain variable domain of TCR clone 373451 (TRAV25, TRAJ52)
CAGRPGGTSYGKLTF

SEQ ID NO: 746902 - protein, 14 aa, Homo sapiens
  CDR3 for beta chain variable domain of TCR clone 373451 (TRBV19, TRBJ2-5)
CQPWTSGAQETKYF

SEQ ID NO: 746903 - protein, 12 aa, Homo sapiens
  CDR3 for alpha chain variable domain of TCR clone 373452 (TRAV20, TRAJ56)
CAVTGANSKLTF

SEQ ID NO: 746904 - protein, 15 aa, Homo sapiens
  CDR3 for beta chain variable domain of TCR clone 373452 (TRBV11-2, TRBJ2-2)
CASSSDRVNAGELFF

SEQ ID NO: 746905 - protein, 13 aa, Homo sapiens
  CDR3 for alpha chain variable domain of TCR clone 373453 (TRAV23/DV6, TRAJ49)
CAASHSTGNQFYF

SEQ ID NO: 746906 - protein, 15 aa, Homo sapiens
  CDR3 for beta chain variable domain of TCR clone 373453 (TRBV6-5, TRBJ2-1)
CASSYDAGAGNDQFF

SEQ ID NO: 746907 - protein, 13 aa, Homo sapiens
  CDR3 for alpha chain variable domain of TCR clone 373454 (TRAV13-2, TRAJ53)
CAENMGSNYKLTF

SEQ ID NO: 746908 - protein, 13 aa, Homo sapiens
  CDR3 for beta chain variable domain of TCR clone 373454 (TRBV4-1, TRBJ2-2)
CASSQENTGELFY

SEQ ID NO: 746909 - protein, 15 aa, Homo sapiens
  CDR3 for alpha chain variable domain of TCR clone 373455 (TRAV17, TRAJ52)
CATEAGGTSYGKLTF

SEQ ID NO: 746910 - protein, 12 aa, Homo sapiens
  CDR3 for beta chain variable domain of TCR clone 373455 (TRBV11-2, TRBJ2-2)
CASSLPTGELFF

SEQ ID NO: 746911 - protein, 13 aa, Homo sapiens
  CDR3 for alpha chain variable domain of TCR clone 373456 (TRAV20, TRAJ54)
CAVQAGGAQKLVF

SEQ ID NO: 746912 - protein, 14 aa, Homo sapiens
  CDR3 for beta chain variable domain of TCR clone 373456 (TRBV11-2, TRBJ1-2)
CASSLGTANYGYTF

SEQ ID NO: 746913 - protein, 16 aa, Homo sapiens
  CDR3 for alpha chain variable domain of TCR clone 373457 (TRAV12-2, TRAJ32)
CAVNLGQGGATNKLIF

SEQ ID NO: 746914 - protein, 16 aa, Homo sapiens
  CDR3 for beta chain variable domain of TCR clone 373457 (TRBV20-1, TRBJ2-3)
CSARLHSAGAIDTQYF

SEQ ID NO: 746915 - protein, 17 aa, Homo sapiens
  CDR3 for alpha chain variable domain of TCR clone 373458 (TRAV3, TRAJ6)
CAVRAGPRAGGSYIPTF

SEQ ID NO: 746916 - protein, 12 aa, Homo sapiens
  CDR3 for beta chain variable domain of TCR clone 373458 (TRBV7-9, TRBJ1-1)
CASSLVETEAFF

SEQ ID NO: 746917 - protein, 11 aa, Homo sapiens
  CDR3 for alpha chain variable domain of TCR clone 373459 (TRAV1-1, TRAJ23)
CVVRQGGKLSS

SEQ ID NO: 746918 - protein, 20 aa, Homo sapiens
  CDR3 for beta chain variable domain of TCR clone 373459 (TRBV7-8, TRBJ2-2)
CASSHLFPGPTIHITGELFF

SEQ ID NO: 746919 - protein, 10 aa, Homo sapiens
  CDR3 for alpha chain variable domain of TCR clone 373460 (TRAV1-2, TRAJ16)
CAPRGQKLLF

SEQ ID NO: 746920 - protein, 16 aa, Homo sapiens
  CDR3 for beta chain variable domain of TCR clone 373460 (TRBV18, TRBJ1-3)
CASSLGILNGENTMYF

SEQ ID NO: 746921 - protein, 15 aa, Homo sapiens
  CDR3 for alpha chain variable domain of TCR clone 373461 (TRAV8-4, TRAJ40)
CAVSDDTSGTYKYVF

SEQ ID NO: 746922 - protein, 14 aa, Homo sapiens
  CDR3 for beta chain variable domain of TCR clone 373461 (TRBV6-1, TRBJ1-3)
CASVQGGGGNTIYF

SEQ ID NO: 746923 - protein, 12 aa, Homo sapiens
  CDR3 for alpha chain variable domain of TCR clone 373462 (TRAV13-1, TRAJ21)
CAAKEGFNKFYF

SEQ ID NO: 746924 - protein, 14 aa, Homo sapiens
  CDR3 for beta chain variable domain of TCR clone 373462 (TRBV7-8, TRBJ2-5)
CASSLSGGGETQYF

SEQ ID NO: 746925 - protein, 14 aa, Homo sapiens
  CDR3 for alpha chain variable domain of TCR clone 373463 (TRAV9-2, TRAJ39)
CALYIYNAGNMLTF

SEQ ID NO: 746926 - protein, 13 aa, Homo sapiens
  CDR3 for beta chain variable domain of TCR clone 373463 (TRBV7-8, TRBJ2-1)
CASTRDAVDEQFF

SEQ ID NO: 746927 - protein, 15 aa, Homo sapiens
  CDR3 for alpha chain variable domain of TCR clone 373464 (TRAV1-2, TRAJ30)
CAVRPHGNRDDKIIF

SEQ ID NO: 746928 - protein, 11 aa, Homo sapiens
  CDR3 for beta chain variable domain of TCR clone 373464 (TRBV11-2, TRBJ2-2)
CASSLPGELFF

SEQ ID NO: 746929 - protein, 14 aa, Homo sapiens
  CDR3 for alpha chain variable domain of TCR clone 373465 (TRAV29/DV5, TRAJ44)
CAAFLFGTASKLTL

SEQ ID NO: 746930 - protein, 15 aa, Homo sapiens
  CDR3 for beta chain variable domain of TCR clone 373465 (TRBV7-3, TRBJ2-2)
CASSETGRGTGELFF

SEQ ID NO: 746931 - protein, 14 aa, Homo sapiens
  CDR3 for alpha chain variable domain of TCR clone 373466 (TRAV26-1, TRAJ38)
CIDDNAGNNRKLIW

SEQ ID NO: 746932 - protein, 15 aa, Homo sapiens
  CDR3 for beta chain variable domain of TCR clone 373466 (TRBV4-1, TRBJ1-1)
CASSQEWGHYTEAFF

SEQ ID NO: 746933 - protein, 17 aa, Homo sapiens
  CDR3 for alpha chain variable domain of TCR clone 373467 (TRAV3, TRAJ6)
CAVRDGPRAGGSDIPTF

SEQ ID NO: 746934 - protein, 14 aa, Homo sapiens
  CDR3 for beta chain variable domain of TCR clone 373467 (TRBV7-2, TRBJ2-7)
SASSPKTSFYEQYF

SEQ ID NO: 746935 - protein, 13 aa, Homo sapiens
  CDR3 for alpha chain variable domain of TCR clone 373468 (TRAV26-2, TRAJ43)
CILRAVNNNDMRF

SEQ ID NO: 746936 - protein, 15 aa, Homo sapiens
  CDR3 for beta chain variable domain of TCR clone 373468 (TRBV7-2, TRBJ2-1)
CASTHGTGIYNAQFF

SEQ ID NO: 746937 - protein, 14 aa, Homo sapiens
  CDR3 for alpha chain variable domain of TCR clone 373469 (TRAV3, TRAJ20)
CAVRDSFNDYKLSF

SEQ ID NO: 746938 - protein, 14 aa, Homo sapiens
  CDR3 for beta chain variable domain of TCR clone 373469 (TRBV19, TRBJ2-1)
CASPTFVLSGEKFF

SEQ ID NO: 746939 - protein, 14 aa, Homo sapiens
  CDR3 for alpha chain variable domain of TCR clone 373470 (TRAV12-2, TRAJ48)
CAVNAFFGNEKLTF

SEQ ID NO: 746940 - protein, 13 aa, Homo sapiens
  CDR3 for beta chain variable domain of TCR clone 373470 (TRBV28, TRBJ2-7)
CAGAQQGLDELYF

SEQ ID NO: 746941 - protein, 13 aa, Homo sapiens
  CDR3 for alpha chain variable domain of TCR clone 373471 (TRAV12-1, TRAJ26)
CVVRRNYGQNFVF

SEQ ID NO: 746942 - protein, 17 aa, Homo sapiens
  CDR3 for beta chain variable domain of TCR clone 373471 (TRBV4-1, TRBJ1-4)
CASSQEGPRGVEEKLFF

SEQ ID NO: 746943 - protein, 14 aa, Homo sapiens
  CDR3 for alpha chain variable domain of TCR clone 373472 (TRAV12-3, TRAJ10)
SHLPLTGGGNKLTF

SEQ ID NO: 746944 - protein, 15 aa, Homo sapiens
  CDR3 for beta chain variable domain of TCR clone 373472 (TRBV20-1, TRBJ1-6)
CSARAASSYNSPLLF

SEQ ID NO: 746945 - protein, 11 aa, Homo sapiens
  CDR3 for alpha chain variable domain of TCR clone 373473 (TRAV22, TRAJ27)
CAGVNAGKSTF

SEQ ID NO: 746946 - protein, 16 aa, Homo sapiens
  CDR3 for beta chain variable domain of TCR clone 373473 (TRBV27, TRBJ2-2)
CASSLSGFWVTGELFF

SEQ ID NO: 746947 - protein, 14 aa, Homo sapiens
  CDR3 for alpha chain variable domain of TCR clone 373474 (TRAV12-3, TRAJ35)
CAMSLIGFGNVLHR

SEQ ID NO: 746948 - protein, 16 aa, Homo sapiens
  CDR3 for beta chain variable domain of TCR clone 373474 (TRBV7-6, TRBJ2-7)
CQQLSSASGNSYEQYF

SEQ ID NO: 746949 - protein, 13 aa, Homo sapiens
  CDR3 for alpha chain variable domain of TCR clone 373475 (TRAV1-2, TRAJ9)
CAVLNTGGFKTIF

SEQ ID NO: 746950 - protein, 14 aa, Homo sapiens
  CDR3 for beta chain variable domain of TCR clone 373475 (TRBV7-2, TRBJ1-1)
CASSFLTGTTEDFF

SEQ ID NO: 746951 - protein, 15 aa, Homo sapiens
  CDR3 for alpha chain variable domain of TCR clone 373476 (TRAV3, TRAJ40)
CAVRDVTSGTYKYIF

SEQ ID NO: 746952 - protein, 13 aa, Homo sapiens
  CDR3 for beta chain variable domain of TCR clone 373476 (TRBV7-9, TRBJ1-2)
CASSVKQNYGYTF

SEQ ID NO: 746953 - protein, 15 aa, Homo sapiens
  CDR3 for alpha chain variable domain of TCR clone 373477 (TRAV4, TRAJ10)
CLVCDEEGGGNKLTF

SEQ ID NO: 746954 - protein, 15 aa, Homo sapiens
  CDR3 for beta chain variable domain of TCR clone 373477 (TRBV7-2, TRBJ2-7)
CASSLTGQGTYEQYF

SEQ ID NO: 746955 - protein, 15 aa, Homo sapiens
  CDR3 for alpha chain variable domain of TCR clone 373478 (TRAV13-1, TRAJ44)
CAASRGGGTASKLTF

SEQ ID NO: 746956 - protein, 12 aa, Homo sapiens
  CDR3 for beta chain variable domain of TCR clone 373478 (TRBV6-3, TRBJ2-7)
CASSLTPYEQYF

SEQ ID NO: 746957 - protein, 11 aa, Homo sapiens
  CDR3 for alpha chain variable domain of TCR clone 373479 (TRAV12-3, TRAJ27)
CAMANAGKSTF

SEQ ID NO: 746958 - protein, 13 aa, Homo sapiens
  CDR3 for beta chain variable domain of TCR clone 373479 (TRBV4-1, TRBJ2-2)
RQQPRVNTGELFF

SEQ ID NO: 746959 - protein, 16 aa, Homo sapiens
  CDR3 for alpha chain variable domain of TCR clone 373480 (TRAV13-1, TRAJ22)
CAAKGGRSGSARQLTF

SEQ ID NO: 746960 - protein, 15 aa, Homo sapiens
  CDR3 for beta chain variable domain of TCR clone 373480 (TRBV9, TRBJ1-6)
CASSVAGTGDSPLYF

SEQ ID NO: 746961 - protein, 12 aa, Homo sapiens
  CDR3 for alpha chain variable domain of TCR clone 373481 (TRAV3, TRAJ31)
CAVRDGYARLMF

SEQ ID NO: 746962 - protein, 18 aa, Homo sapiens
  CDR3 for beta chain variable domain of TCR clone 373481 (TRBV7-2, TRBJ2-3)
CASSLKREGSGITDTQYF

SEQ ID NO: 746963 - protein, 16 aa, Homo sapiens
  CDR3 for alpha chain variable domain of TCR clone 373482 (TRAV30, TRAJ49)
SAAQRVGPNTGNQFYF

SEQ ID NO: 746964 - protein, 15 aa, Homo sapiens
  CDR3 for beta chain variable domain of TCR clone 373482 (TRBV2, TRBJ2-1)
CASSELAGSYNDQFF

SEQ ID NO: 746965 - protein, 12 aa, Homo sapiens
  CDR3 for alpha chain variable domain of TCR clone 373483 (TRAV1-2, TRAJ33)
CAALDSNYQLIW

SEQ ID NO: 746966 - protein, 19 aa, Homo sapiens
  CDR3 for beta chain variable domain of TCR clone 373483 (TRBV2, TRBJ2-7)
CASSDDETSGRANDYEQYF

SEQ ID NO: 746967 - protein, 12 aa, Homo sapiens
  CDR3 for alpha chain variable domain of TCR clone 373484 (TRAV2, TRAJ9)
CAVGAGGFKTIF

SEQ ID NO: 746968 - protein, 13 aa, Homo sapiens
  CDR3 for beta chain variable domain of TCR clone 373484 (TRBV9, TRBJ2-1)
CASSVGQGGEQFF

SEQ ID NO: 746969 - protein, 13 aa, Homo sapiens
  CDR3 for alpha chain variable domain of TCR clone 373485 (TRAV13-2, TRAJ53)
CAENMGSNYKLTF

SEQ ID NO: 746970 - protein, 14 aa, Homo sapiens
  CDR3 for beta chain variable domain of TCR clone 373485 (TRBV6-1, TRBJ1-3)
CASVQGGGGNTIYF

SEQ ID NO: 746971 - protein, 14 aa, Homo sapiens
  CDR3 for alpha chain variable domain of TCR clone 373486 (TRAV8-4, TRAJ29)
CAVSAVEGNTPLVF

SEQ ID NO: 746972 - protein, 13 aa, Homo sapiens
  CDR3 for beta chain variable domain of TCR clone 373486 (TRBV12-4, TRBJ2-7)
CASSFQGGYEQYF

SEQ ID NO: 746973 - protein, 17 aa, Homo sapiens
  CDR3 for alpha chain variable domain of TCR clone 373487 (TRAV12-3, TRAJ18)
CAMIRADRGSTLGRLYF

SEQ ID NO: 746974 - protein, 14 aa, Homo sapiens
  CDR3 for beta chain variable domain of TCR clone 373487 (TRBV5-7, TRBJ1-6)
CASAPWPADSPLHF

SEQ ID NO: 746975 - protein, 14 aa, Homo sapiens
  CDR3 for alpha chain variable domain of TCR clone 373488 (TRAV8-6, TRAJ30)
CAVRPVNRDDKIIF

SEQ ID NO: 746976 - protein, 14 aa, Homo sapiens
  CDR3 for beta chain variable domain of TCR clone 373488 (TRBV19, TRBJ2-1)
CASPTFVLSGEQFF

SEQ ID NO: 746977 - protein, 15 aa, Homo sapiens
  CDR3 for alpha chain variable domain of TCR clone 373489 (TRAV3, TRAJ5)
CAVRDLDTGRRALTF

SEQ ID NO: 746978 - protein, 14 aa, Homo sapiens
  CDR3 for beta chain variable domain of TCR clone 373489 (TRBV12-4, TRBJ1-4)
CASRMTGRSEKLFF

SEQ ID NO: 746979 - protein, 14 aa, Homo sapiens
  CDR3 for alpha chain variable domain of TCR clone 373490 (TRAV12-2, TRAJ13)
CAVKKTGGYQKVTF

SEQ ID NO: 746980 - protein, 12 aa, Homo sapiens
  CDR3 for beta chain variable domain of TCR clone 373490 (TRBV27, TRBJ2-2)
CASSLPTGELFF

SEQ ID NO: 746981 - protein, 13 aa, Homo sapiens
  CDR3 for alpha chain variable domain of TCR clone 373491 (TRAV12-3, TRAJ9)
CAMRNTGGFKTIF

SEQ ID NO: 746982 - protein, 17 aa, Homo sapiens
  CDR3 for beta chain variable domain of TCR clone 373491 (TRBV12-4, TRBJ2-7)
CASSYHGWDRASYEQYF

SEQ ID NO: 746983 - protein, 15 aa, Homo sapiens
  CDR3 for alpha chain variable domain of TCR clone 373492 (TRAV12-1, TRAJ4)
RVVNPFSGGYNKLIF

SEQ ID NO: 746984 - protein, 16 aa, Homo sapiens
  CDR3 for beta chain variable domain of TCR clone 373492 (TRBV5-1, TRBJ1-1)
CASSNTGTEVGTEAFF

SEQ ID NO: 746985 - protein, 13 aa, Homo sapiens
  CDR3 for alpha chain variable domain of TCR clone 373493 (TRAV12-3, TRAJ13)
CAMSSGGYKKVTF

SEQ ID NO: 746986 - protein, 14 aa, Homo sapiens
  CDR3 for beta chain variable domain of TCR clone 373493 (TRBV19, TRBJ2-2)
CASSTLHRSGELFF

SEQ ID NO: 746987 - protein, 13 aa, Homo sapiens
  CDR3 for alpha chain variable domain of TCR clone 373494 (TRAV2, TRAJ40)
CAVVTSGTYKYIF

SEQ ID NO: 746988 - protein, 14 aa, Homo sapiens
  CDR3 for beta chain variable domain of TCR clone 373494 (TRBV19, TRBJ1-6)
CASSTDGWNSPLHF

SEQ ID NO: 746989 - protein, 15 aa, Homo sapiens
  CDR3 for alpha chain variable domain of TCR clone 373495 (TRAV8-1, TRAJ4)
CAVNATSGGYNKLIF

SEQ ID NO: 746990 - protein, 14 aa, Homo sapiens
  CDR3 for beta chain variable domain of TCR clone 373495 (TRBV25-1, TRBJ1-1)
CASTHLGGNTEAFF

SEQ ID NO: 746991 - protein, 15 aa, Homo sapiens
  CDR3 for alpha chain variable domain of TCR clone 373496 (TRAV8-3, TRAJ45)
CASSSSGGGADGLTF

SEQ ID NO: 746992 - protein, 13 aa, Homo sapiens
  CDR3 for beta chain variable domain of TCR clone 373496 (TRBV10-3, TRBJ2-7)
CASKLAVSYERYF

SEQ ID NO: 746993 - protein, 15 aa, Homo sapiens
  CDR3 for alpha chain variable domain of TCR clone 373497 (TRAV8-3, TRAJ45)
CASSYSGGGADGLTF

SEQ ID NO: 746994 - protein, 14 aa, Homo sapiens
  CDR3 for beta chain variable domain of TCR clone 373497 (TRBV7-3, TRBJ2-7)
CAGSLKADSYEQYF

SEQ ID NO: 746995 - protein, 11 aa, Homo sapiens
  CDR3 for alpha chain variable domain of TCR clone 373498 (TRAV12-3, TRAJ16)
LTGGDGQKLLF

SEQ ID NO: 746996 - protein, 13 aa, Homo sapiens
  CDR3 for beta chain variable domain of TCR clone 373498 (TRBV12-4, TRBJ1-4)
CASAMGRNEKLFF

SEQ ID NO: 746997 - protein, 14 aa, Homo sapiens
  CDR3 for alpha chain variable domain of TCR clone 373499 (TRAV12-1, TRAJ23)
CVVMIYNQGGKLIF

SEQ ID NO: 746998 - protein, 23 aa, Homo sapiens
  CDR3 for beta chain variable domain of TCR clone 373499 (TRBV7-3, TRBJ1-6)
WASSLTSRDEASDPSSYNSPLHF

SEQ ID NO: 746999 - protein, 16 aa, Homo sapiens
  CDR3 for alpha chain variable domain of TCR clone 373500 (TRAV23/DV6, TRAJ9)
CAASIGGNTGGFRTIF

SEQ ID NO: 747000 - protein, 14 aa, Homo sapiens
  CDR3 for beta chain variable domain of TCR clone 373500 (TRBV9, TRBJ2-7)
CASSVGVGSYEQYF

SEQ ID NO: 747001 - protein, 14 aa, Homo sapiens
  CDR3 for alpha chain variable domain of TCR clone 373501 (TRAV12-1, TRAJ23)
CVVNAAGRKAYLRT

SEQ ID NO: 747002 - protein, 17 aa, Homo sapiens
  CDR3 for beta chain variable domain of TCR clone 373501 (TRBV20-1, TRBJ2-1)
CSAPPRLAGTRYNEQFF

SEQ ID NO: 747003 - protein, 11 aa, Homo sapiens
  CDR3 for alpha chain variable domain of TCR clone 373502 (TRAV12-3, TRAJ27)
CAMANAGKSTF

SEQ ID NO: 747004 - protein, 13 aa, Homo sapiens
  CDR3 for beta chain variable domain of TCR clone 373502 (TRBV20-1, TRBJ1-1)
CSARVGGNTEPFF

SEQ ID NO: 747005 - protein, 14 aa, Homo sapiens
  CDR3 for alpha chain variable domain of TCR clone 373503 (TRAV2, TRAJ9)
CAVEDRSGGFKTFF

SEQ ID NO: 747006 - protein, 19 aa, Homo sapiens
  CDR3 for beta chain variable domain of TCR clone 373503 (TRBV25-1, TRBJ2-2)
CAILVYRVDRGRKTGELFF

SEQ ID NO: 747007 - protein, 12 aa, Homo sapiens
  CDR3 for alpha chain variable domain of TCR clone 373504 (TRAV20, TRAJ20)
CAVQVNDYKLSF

SEQ ID NO: 747008 - protein, 20 aa, Homo sapiens
  CDR3 for beta chain variable domain of TCR clone 373504 (TRBV7-8, TRBJ2-1)
CASSLAHRLAGVRSYNEQFF

SEQ ID NO: 747009 - protein, 14 aa, Homo sapiens
  CDR3 for alpha chain variable domain of TCR clone 373505 (TRAV2, TRAJ9)
CAVEDRSGGFKTIF

SEQ ID NO: 747010 - protein, 14 aa, Homo sapiens
  CDR3 for beta chain variable domain of TCR clone 373505 (TRBV7-2, TRBJ2-7)
CASRSQGAAYEQCF

SEQ ID NO: 747011 - protein, 12 aa, Homo sapiens
  CDR3 for alpha chain variable domain of TCR clone 373506 (TRAV30, TRAJ39)
CGRGNAGNMLTF

SEQ ID NO: 747012 - protein, 17 aa, Homo sapiens
  CDR3 for beta chain variable domain of TCR clone 373506 (TRBV28, TRBJ2-3)
CASTASGRDLSTDTQYF

SEQ ID NO: 747013 - protein, 13 aa, Homo sapiens
  CDR3 for alpha chain variable domain of TCR clone 373507 (TRAV12-3, TRAJ54)
CAMTLQGAKKLVF

SEQ ID NO: 747014 - protein, 14 aa, Homo sapiens
  CDR3 for beta chain variable domain of TCR clone 373507 (TRBV4-1, TRBJ2-2)
CASSQAVSTGELFF

SEQ ID NO: 747015 - protein, 11 aa, Homo sapiens
  CDR3 for alpha chain variable domain of TCR clone 373508 (TRAV13-1, TRAJ6)
CATLGSYIPTF

SEQ ID NO: 747016 - protein, 13 aa, Homo sapiens
  CDR3 for beta chain variable domain of TCR clone 373508 (TRBV6-6, TRBJ2-1)
CASRLHQGDEQFF

SEQ ID NO: 747017 - protein, 13 aa, Homo sapiens
  CDR3 for alpha chain variable domain of TCR clone 373509 (TRAV8-6, TRAJ49)
CAVITNTGNQFYF

SEQ ID NO: 747018 - protein, 14 aa, Homo sapiens
  CDR3 for beta chain variable domain of TCR clone 373509 (TRBV28, TRBJ1-5)
CASSLFPGVQPQHF

SEQ ID NO: 747019 - protein, 13 aa, Homo sapiens
  CDR3 for alpha chain variable domain of TCR clone 373510 (TRAV8-6, TRAJ32)
CAVSDRATNKLIF

SEQ ID NO: 747020 - protein, 13 aa, Homo sapiens
  CDR3 for beta chain variable domain of TCR clone 373510 (TRBV11-2, TRBJ2-7)
CASSLDVGYEQYF

SEQ ID NO: 747021 - protein, 15 aa, Homo sapiens
  CDR3 for alpha chain variable domain of TCR clone 373511 (TRAV3, TRAJ4)
CAVRVGTGGYNKLIF

SEQ ID NO: 747022 - protein, 13 aa, Homo sapiens
  CDR3 for beta chain variable domain of TCR clone 373511 (TRBV10-3, TRBJ2-7)
CASKLAVNYEQYF

SEQ ID NO: 747023 - protein, 12 aa, Homo sapiens
  CDR3 for alpha chain variable domain of TCR clone 373512 (TRAV17, TRAJ30)
CATDARDDTIIF

SEQ ID NO: 747024 - protein, 15 aa, Homo sapiens
  CDR3 for beta chain variable domain of TCR clone 373512 (TRBV4-1, TRBJ2-1)
CASSQGGELYNEQFF

SEQ ID NO: 747025 - protein, 15 aa, Homo sapiens
  CDR3 for alpha chain variable domain of TCR clone 373513 (TRAV8-3, TRAJ45)
LASSYSVGGADGLTF

SEQ ID NO: 747026 - protein, 13 aa, Homo sapiens
  CDR3 for beta chain variable domain of TCR clone 373513 (TRBV10-3, TRBJ2-7)
CASKLAVNYEQYF

SEQ ID NO: 747027 - protein, 12 aa, Homo sapiens
  CDR3 for alpha chain variable domain of TCR clone 373514 (TRAV29/DV5, TRAJ34)
CAASGNTDKLIF

SEQ ID NO: 747028 - protein, 16 aa, Homo sapiens
  CDR3 for beta chain variable domain of TCR clone 373514 (TRBV25-1, TRBJ1-1)
CASSGDRDRGRIEAFF

SEQ ID NO: 747029 - protein, 14 aa, Homo sapiens
  CDR3 for alpha chain variable domain of TCR clone 373515 (TRAV20, TRAJ42)
CAVQAGGSQGNLIF

SEQ ID NO: 747030 - protein, 15 aa, Homo sapiens
  CDR3 for beta chain variable domain of TCR clone 373515 (TRBV4-1, TRBJ1-4)
CASSDTGGTNEKLFF

SEQ ID NO: 747031 - protein, 16 aa, Homo sapiens
  CDR3 for alpha chain variable domain of TCR clone 373516 (TRAV12-1, TRAJ12)
CVVDNLLMDSSYKLIF

SEQ ID NO: 747032 - protein, 13 aa, Homo sapiens
  CDR3 for beta chain variable domain of TCR clone 373516 (TRBV11-2, TRBJ2-1)
CASSSEAYNEQFF

SEQ ID NO: 747033 - protein, 17 aa, Homo sapiens
  CDR3 for alpha chain variable domain of TCR clone 373517 (TRAV13-1, TRAJ52)
CAAGRNAGGTSYGKLTF

SEQ ID NO: 747034 - protein, 16 aa, Homo sapiens
  CDR3 for beta chain variable domain of TCR clone 373517 (TRBV27, TRBJ2-2)
CASSFRGLVRTGELFF

SEQ ID NO: 747035 - protein, 17 aa, Homo sapiens
  CDR3 for alpha chain variable domain of TCR clone 373518 (TRAV20, TRAJ57)
CAVRAIVAQGGSDKLVF

SEQ ID NO: 747036 - protein, 13 aa, Homo sapiens
  CDR3 for beta chain variable domain of TCR clone 373518 (TRBV20-1, TRBJ2-5)
CSAFVGGGETQYF

SEQ ID NO: 747037 - protein, 13 aa, Homo sapiens
  CDR3 for alpha chain variable domain of TCR clone 373519 (TRAV8-3, TRAJ47)
CAVGARRGNKLVF

SEQ ID NO: 747038 - protein, 16 aa, Homo sapiens
  CDR3 for beta chain variable domain of TCR clone 373519 (TRBV6-3, TRBJ2-1)
CASSYRRGGSYNEQFF

SEQ ID NO: 747039 - protein, 12 aa, Homo sapiens
  CDR3 for alpha chain variable domain of TCR clone 373520 (TRAV13-2, TRAJ23)
CAERHRGGKLIF

SEQ ID NO: 747040 - protein, 15 aa, Homo sapiens
  CDR3 for beta chain variable domain of TCR clone 373520 (TRBV7-9, TRBJ1-6)
FASSSPGRGNSPLHF

SEQ ID NO: 747041 - protein, 13 aa, Homo sapiens
  CDR3 for alpha chain variable domain of TCR clone 373521 (TRAV8-3, TRAJ28)
CAMGAVGSYQLTF

SEQ ID NO: 747042 - protein, 15 aa, Homo sapiens
  CDR3 for beta chain variable domain of TCR clone 373521 (TRBV28, TRBJ2-5)
CASSLGQGSIETQYF

SEQ ID NO: 747043 - protein, 15 aa, Homo sapiens
  CDR3 for alpha chain variable domain of TCR clone 373522 (TRAV3, TRAJ4)
RAVRDGTGGYNKLIF

SEQ ID NO: 747044 - protein, 16 aa, Homo sapiens
  CDR3 for beta chain variable domain of TCR clone 373522 (TRBV27, TRBJ2-2)
CASSSSGVSNTWELFF

SEQ ID NO: 747045 - protein, 13 aa, Homo sapiens
  CDR3 for alpha chain variable domain of TCR clone 373523 (TRAV3, TRAJ34)
CAVRDYNTDKLIF

SEQ ID NO: 747046 - protein, 16 aa, Homo sapiens
  CDR3 for beta chain variable domain of TCR clone 373523 (TRBV12-5, TRBJ2-5)
CASGPRTSGNQETQYF

SEQ ID NO: 747047 - protein, 14 aa, Homo sapiens
  CDR3 for alpha chain variable domain of TCR clone 373524 (TRAV12-2, TRAJ12)
CAVINRDSSYKLIF

SEQ ID NO: 747048 - protein, 14 aa, Homo sapiens
  CDR3 for beta chain variable domain of TCR clone 373524 (TRBV7-9, TRBJ2-1)
CASSPRDSLYEQFF

SEQ ID NO: 747049 - protein, 13 aa, Homo sapiens
  CDR3 for alpha chain variable domain of TCR clone 373525 (TRAV13-1, TRAJ43)
CAASKNNNNDMRF

SEQ ID NO: 747050 - protein, 17 aa, Homo sapiens
  CDR3 for beta chain variable domain of TCR clone 373525 (TRBV7-9, TRBJ2-1)
CASSLVASYPSYNEQFF

SEQ ID NO: 747051 - protein, 13 aa, Homo sapiens
  CDR3 for alpha chain variable domain of TCR clone 373526 (TRAV3, TRAJ16)
CAVRDRNGQKLLF

SEQ ID NO: 747052 - protein, 15 aa, Homo sapiens
  CDR3 for beta chain variable domain of TCR clone 373526 (TRBV5-1, TRBJ2-1)
CASSPRRAPYNEQFF

SEQ ID NO: 747053 - protein, 14 aa, Homo sapiens
  CDR3 for alpha chain variable domain of TCR clone 373527 (TRAV1-2, TRAJ8)
CAMREDTGFQKLVF

SEQ ID NO: 747054 - protein, 13 aa, Homo sapiens
  CDR3 for beta chain variable domain of TCR clone 373527 (TRBV14, TRBJ2-7)
CASSQDRRYEQYF

SEQ ID NO: 747055 - protein, 16 aa, Homo sapiens
  CDR3 for alpha chain variable domain of TCR clone 373528 (TRAV26-1, TRAJ22)
IASSEYRSGSARQLTF

SEQ ID NO: 747056 - protein, 16 aa, Homo sapiens
  CDR3 for beta chain variable domain of TCR clone 373528 (TRBV24-1, TRBJ2-3)
CATSDPGTGATDTQYF

SEQ ID NO: 747057 - protein, 16 aa, Homo sapiens
  CDR3 for alpha chain variable domain of TCR clone 373529 (TRAV3, TRAJ37)
CAVRGKGSGKPGKLIF

SEQ ID NO: 747058 - protein, 13 aa, Homo sapiens
  CDR3 for beta chain variable domain of TCR clone 373529 (TRBV14, TRBJ2-7)
CASSQDRRYEQYF

SEQ ID NO: 747059 - protein, 14 aa, Homo sapiens
  CDR3 for alpha chain variable domain of TCR clone 373530 (TRAV26-1, TRAJ39)
CIVRGSRAGYMLTF

SEQ ID NO: 747060 - protein, 15 aa, Homo sapiens
  CDR3 for beta chain variable domain of TCR clone 373530 (TRBV7-9, TRBJ1-5)
CASSQGHQPNQTQHF

SEQ ID NO: 747061 - protein, 12 aa, Homo sapiens
  CDR3 for alpha chain variable domain of TCR clone 373531 (TRAV13-1, TRAJ49)
CAASPMGNQFYF

SEQ ID NO: 747062 - protein, 18 aa, Homo sapiens
  CDR3 for beta chain variable domain of TCR clone 373531 (TRBV7-9, TRBJ2-7)
CASSLTTSGSRTWYEQYF

SEQ ID NO: 747063 - protein, 15 aa, Homo sapiens
  CDR3 for alpha chain variable domain of TCR clone 373532 (TRAV8-3, TRAJ45)
CASSYSGGGADGLTF

SEQ ID NO: 747064 - protein, 13 aa, Homo sapiens
  CDR3 for beta chain variable domain of TCR clone 373532 (TRBV9, TRBJ2-1)
CASSPSGGNEQFF

SEQ ID NO: 747065 - protein, 15 aa, Homo sapiens
  CDR3 for alpha chain variable domain of TCR clone 373533 (TRAV12-1, TRAJ44)
CVVDTPQGTASKLTF

SEQ ID NO: 747066 - protein, 13 aa, Homo sapiens
  CDR3 for beta chain variable domain of TCR clone 373533 (TRBV19, TRBJ1-2)
CASSVPGQDGYTF

SEQ ID NO: 747067 - protein, 14 aa, Homo sapiens
  CDR3 for alpha chain variable domain of TCR clone 373534 (TRAV8-3, TRAJ39)
CAVWAWGAGNMLTF

SEQ ID NO: 747068 - protein, 16 aa, Homo sapiens
  CDR3 for beta chain variable domain of TCR clone 373534 (TRBV7-2, TRBJ1-3)
CASSSGRVLSGNAIYF

SEQ ID NO: 747069 - protein, 14 aa, Homo sapiens
  CDR3 for alpha chain variable domain of TCR clone 373535 (TRAV3, TRAJ36)
CAVRDGPGSNNLFF

SEQ ID NO: 747070 - protein, 19 aa, Homo sapiens
  CDR3 for beta chain variable domain of TCR clone 373535 (TRBV19, TRBJ2-6)
CASTPTWGRAASGANVLTF

SEQ ID NO: 747071 - protein, 13 aa, Homo sapiens
  CDR3 for alpha chain variable domain of TCR clone 373536 (TRAV12-2, TRAJ20)
CAVYRSNDYKLSF

SEQ ID NO: 747072 - protein, 15 aa, Homo sapiens
  CDR3 for beta chain variable domain of TCR clone 373536 (TRBV27, TRBJ2-5)
CASSLYPRGGETQYF

SEQ ID NO: 747073 - protein, 14 aa, Homo sapiens
  CDR3 for alpha chain variable domain of TCR clone 373537 (TRAV12-2, TRAJ40)
CAVKIPSGTYKYLF

SEQ ID NO: 747074 - protein, 16 aa, Homo sapiens
  CDR3 for beta chain variable domain of TCR clone 373537 (TRBV28, TRBJ2-5)
CASSFSPAGGWETQYF

SEQ ID NO: 747075 - protein, 12 aa, Homo sapiens
  CDR3 for alpha chain variable domain of TCR clone 373538 (TRAV12-3, TRAJ17)
CAMTLTGNKLTF

SEQ ID NO: 747076 - protein, 14 aa, Homo sapiens
  CDR3 for beta chain variable domain of TCR clone 373538 (TRBV7-3, TRBJ2-1)
CASSLAGGTNEQFV

SEQ ID NO: 747077 - protein, 21 aa, Homo sapiens
  CDR3 for alpha chain variable domain of TCR clone 373539 (TRAV36/DV7, TRAJ39)
TATQTGDSAIYLPNAGNMLTF

SEQ ID NO: 747078 - protein, 14 aa, Homo sapiens
  CDR3 for beta chain variable domain of TCR clone 373539 (TRBV18, TRBJ2-5)
CASSPGVSQETQYF

SEQ ID NO: 747079 - protein, 13 aa, Homo sapiens
  CDR3 for alpha chain variable domain of TCR clone 373540 (TRAV8-2, TRAJ47)
CVVSEGEGNKLVF

SEQ ID NO: 747080 - protein, 16 aa, Homo sapiens
  CDR3 for beta chain variable domain of TCR clone 373540 (TRBV5-1, TRBJ1-1)
CASSKTGTEVGTEAFF

SEQ ID NO: 747081 - protein, 14 aa, Homo sapiens
  CDR3 for alpha chain variable domain of TCR clone 373541 (TRAV13-2, TRAJ17)
CAENSKAAGNKLTF

SEQ ID NO: 747082 - protein, 15 aa, Homo sapiens
  CDR3 for beta chain variable domain of TCR clone 373541 (TRBV27, TRBJ2-1)
CASSNGEGPPMSSSS

SEQ ID NO: 747083 - protein, 14 aa, Homo sapiens
  CDR3 for alpha chain variable domain of TCR clone 373542 (TRAV34, TRAJ44)
CGADGTGTASKLNF

SEQ ID NO: 747084 - protein, 15 aa, Homo sapiens
  CDR3 for beta chain variable domain of TCR clone 373542 (TRBV5-1, TRBJ2-1)
CASSPPRAPYNEQFF

SEQ ID NO: 747085 - protein, 13 aa, Homo sapiens
  CDR3 for alpha chain variable domain of TCR clone 373543 (TRAV12-3, TRAJ33)
CAMSVNSNYQLIW

SEQ ID NO: 747086 - protein, 17 aa, Homo sapiens
  CDR3 for beta chain variable domain of TCR clone 373543 (TRBV28, TRBJ2-3)
CASRNPSYGFSTDTQYF

SEQ ID NO: 747087 - protein, 16 aa, Homo sapiens
  CDR3 for alpha chain variable domain of TCR clone 373544 (TRAV30, TRAJ24)
CGTEIVDVDSWGKFQF

SEQ ID NO: 747088 - protein, 12 aa, Homo sapiens
  CDR3 for beta chain variable domain of TCR clone 373544 (TRBV11-2, TRBJ2-2)
CASGLGGGELFF

SEQ ID NO: 747089 - protein, 16 aa, Homo sapiens
  CDR3 for alpha chain variable domain of TCR clone 373545 (TRAV26-1, TRAJ38)
CLVRPLNAGNNRKLIW

SEQ ID NO: 747090 - protein, 13 aa, Homo sapiens
  CDR3 for beta chain variable domain of TCR clone 373545 (TRBV18, TRBJ1-1)
CASSPNGDTEAFF

SEQ ID NO: 747091 - protein, 14 aa, Homo sapiens
  CDR3 for alpha chain variable domain of TCR clone 373546 (TRAV8-1, TRAJ27)
CAVNVGTNAGKSTF

SEQ ID NO: 747092 - protein, 17 aa, Homo sapiens
  CDR3 for beta chain variable domain of TCR clone 373546 (TRBV7-8, TRBJ2-6)
CASSAGTGGAGANVLTF

SEQ ID NO: 747093 - protein, 18 aa, Homo sapiens
  CDR3 for alpha chain variable domain of TCR clone 373547 (TRAV26-1, TRAJ22)
CIVRVALISSGSARQLTF

SEQ ID NO: 747094 - protein, 15 aa, Homo sapiens
  CDR3 for beta chain variable domain of TCR clone 373547 (TRBV6-1, TRBJ2-4)
CASSEAVWTINIQYF

SEQ ID NO: 747095 - protein, 14 aa, Homo sapiens
  CDR3 for alpha chain variable domain of TCR clone 373548 (TRAV36/DV7, TRAJ57)
CAVGFPGGSEKLGF

SEQ ID NO: 747096 - protein, 16 aa, Homo sapiens
  CDR3 for beta chain variable domain of TCR clone 373548 (TRBV7-2, TRBJ2-5)
CASSYKTGISLETQYF

SEQ ID NO: 747097 - protein, 17 aa, Homo sapiens
  CDR3 for alpha chain variable domain of TCR clone 373549 (TRAV13-1, TRAJ52)
CADFPNAGGTSYGKLTF

SEQ ID NO: 747098 - protein, 14 aa, Homo sapiens
  CDR3 for beta chain variable domain of TCR clone 373549 (TRBV11-2, TRBJ2-3)
CASSLYAGRDTQYF

SEQ ID NO: 747099 - protein, 11 aa, Homo sapiens
  CDR3 for alpha chain variable domain of TCR clone 373550 (TRAV3, TRAJ21)
CAVGNFNKFCF

SEQ ID NO: 747100 - protein, 13 aa, Homo sapiens
  CDR3 for beta chain variable domain of TCR clone 373550 (TRBV20-1, TRBJ2-5)
CSARGDYQGTQYF

SEQ ID NO: 747101 - protein, 14 aa, Homo sapiens
  CDR3 for alpha chain variable domain of TCR clone 373551 (TRAV2, TRAJ9)
CAVEDRSGGFKTIF

SEQ ID NO: 747102 - protein, 14 aa, Homo sapiens
  CDR3 for beta chain variable domain of TCR clone 373551 (TRBV5-1, TRBJ2-2)
CASSFRERTGELFF

SEQ ID NO: 747103 - protein, 15 aa, Homo sapiens
  CDR3 for alpha chain variable domain of TCR clone 373552 (TRAV21, TRAJ32)
CAVNSYGGATNKLIF

SEQ ID NO: 747104 - protein, 18 aa, Homo sapiens
  CDR3 for beta chain variable domain of TCR clone 373552 (TRBV7-9, TRBJ2-1)
CASSTGLAGGSSYNEQFF

SEQ ID NO: 747105 - protein, 14 aa, Homo sapiens
  CDR3 for alpha chain variable domain of TCR clone 373553 (TRAV3, TRAJ21)
CAVRDAYNFNKFYF

SEQ ID NO: 747106 - protein, 15 aa, Homo sapiens
  CDR3 for beta chain variable domain of TCR clone 373553 (TRBV6-5, TRBJ1-5)
CASSYSWDGNQPQHF

SEQ ID NO: 747107 - protein, 16 aa, Homo sapiens
  CDR3 for alpha chain variable domain of TCR clone 373554 (TRAV29/DV5, TRAJ39)
CAASLLFNNAGHMLTF

SEQ ID NO: 747108 - protein, 16 aa, Homo sapiens
  CDR3 for beta chain variable domain of TCR clone 373554 (TRBV19, TRBJ2-6)
CASSMSGLSGANVLTF

SEQ ID NO: 747109 - protein, 12 aa, Homo sapiens
  CDR3 for alpha chain variable domain of TCR clone 373555 (TRAV12-1, TRAJ40)
CVVPSVTYKYIF

SEQ ID NO: 747110 - protein, 15 aa, Homo sapiens
  CDR3 for beta chain variable domain of TCR clone 373555 (TRBV12-4, TRBJ2-1)
CASSPLSGRNNEQFF

SEQ ID NO: 747111 - protein, 13 aa, Homo sapiens
  CDR3 for alpha chain variable domain of TCR clone 373556 (TRAV21, TRAJ22)
CAVKSGSARQLTF

SEQ ID NO: 747112 - protein, 19 aa, Homo sapiens
  CDR3 for beta chain variable domain of TCR clone 373556 (TRBV6-5, TRBJ2-7)
CASSYSNRGSNPFTYEQYV

SEQ ID NO: 747113 - protein, 16 aa, Homo sapiens
  CDR3 for alpha chain variable domain of TCR clone 373557 (TRAV23/DV6, TRAJ48)
CAASSVVNFGNYKLTF

SEQ ID NO: 747114 - protein, 15 aa, Homo sapiens
  CDR3 for beta chain variable domain of TCR clone 373557 (TRBV20-1, TRBJ2-5)
CSAGLAGVSQETQYF

SEQ ID NO: 747115 - protein, 16 aa, Homo sapiens
  CDR3 for alpha chain variable domain of TCR clone 373558 (TRAV3, TRAJ40)
CAVRDRIASGTYKYIF

SEQ ID NO: 747116 - protein, 16 aa, Homo sapiens
  CDR3 for beta chain variable domain of TCR clone 373558 (TRBV6-1, TRBJ1-2)
CASSEANSIINDGYTF

SEQ ID NO: 747117 - protein, 13 aa, Homo sapiens
  CDR3 for alpha chain variable domain of TCR clone 373559 (TRAV12-1, TRAJ39)
CGDDNNAGNMLTF

SEQ ID NO: 747118 - protein, 16 aa, Homo sapiens
  CDR3 for beta chain variable domain of TCR clone 373559 (TRBV7-2, TRBJ1-2)
CASSSNQDRRGHGDTF

SEQ ID NO: 747119 - protein, 13 aa, Homo sapiens
  CDR3 for alpha chain variable domain of TCR clone 373560 (TRAV6, TRAJ4)
CSLLRGGYNKLVF

SEQ ID NO: 747120 - protein, 16 aa, Homo sapiens
  CDR3 for beta chain variable domain of TCR clone 373560 (TRBV5-1, TRBJ2-1)
CASSIRSGGSYNEQFF

SEQ ID NO: 747121 - protein, 18 aa, Homo sapiens
  CDR3 for alpha chain variable domain of TCR clone 373561 (TRAV13-1, TRAJ52)
CAAKNPNAGGTSYVKLTF

SEQ ID NO: 747122 - protein, 14 aa, Homo sapiens
  CDR3 for beta chain variable domain of TCR clone 373561 (TRBV7-3, TRBJ2-1)
CASSLAGGTNEQFF

SEQ ID NO: 747123 - protein, 14 aa, Homo sapiens
  CDR3 for alpha chain variable domain of TCR clone 373562 (TRAV8-2, TRAJ4)
CVVSPSGGYNKLIF

SEQ ID NO: 747124 - protein, 15 aa, Homo sapiens
  CDR3 for beta chain variable domain of TCR clone 373562 (TRBV4-1, TRBJ1-4)
CASSDTAGTNEKLFF

SEQ ID NO: 747125 - protein, 13 aa, Homo sapiens
  CDR3 for alpha chain variable domain of TCR clone 373563 (TRAV26-1, TRAJ34)
CIVRPWITDKLIF

SEQ ID NO: 747126 - protein, 14 aa, Homo sapiens
  CDR3 for beta chain variable domain of TCR clone 373563 (TRBV7-2, TRBJ2-1)
CASRSQGAAYEQFF

SEQ ID NO: 747127 - protein, 13 aa, Homo sapiens
  CDR3 for alpha chain variable domain of TCR clone 373564 (TRAV27, TRAJ41)
CAGEGNSGYAPNF

SEQ ID NO: 747128 - protein, 14 aa, Homo sapiens
  CDR3 for beta chain variable domain of TCR clone 373564 (TRBV11-2, TRBJ2-7)
CASSLGAGAYEQYF

SEQ ID NO: 747129 - protein, 18 aa, Homo sapiens
  CDR3 for alpha chain variable domain of TCR clone 373565 (TRAV26-2, TRAJ45)
CILRVDKYSGGGADGLTF

SEQ ID NO: 747130 - protein, 16 aa, Homo sapiens
  CDR3 for beta chain variable domain of TCR clone 373565 (TRBV2, TRBJ1-4)
CASNLLQGATNDTLFF

SEQ ID NO: 747131 - protein, 14 aa, Homo sapiens
  CDR3 for alpha chain variable domain of TCR clone 373566 (TRAV12-2, TRAJ13)
CAVKKNGGYQKVTF

SEQ ID NO: 747132 - protein, 15 aa, Homo sapiens
  CDR3 for beta chain variable domain of TCR clone 373566 (TRBV19, TRBJ1-6)
CASSTQGAVGSPLHF

SEQ ID NO: 747133 - protein, 14 aa, Homo sapiens
  CDR3 for alpha chain variable domain of TCR clone 373567 (TRAV12-2, TRAJ9)
CAMNMEGGGFKTIF

SEQ ID NO: 747134 - protein, 14 aa, Homo sapiens
  CDR3 for beta chain variable domain of TCR clone 373567 (TRBV2, TRBJ2-5)
CASSEVLAQETQYF

SEQ ID NO: 747135 - protein, 14 aa, Homo sapiens
  CDR3 for alpha chain variable domain of TCR clone 373568 (TRAV23/DV6, TRAJ57)
CAASNQGGSAKLGF

SEQ ID NO: 747136 - protein, 13 aa, Homo sapiens
  CDR3 for beta chain variable domain of TCR clone 373568 (TRBV11-2, TRBJ2-7)
CASSSYPSYEQYF

SEQ ID NO: 747137 - protein, 14 aa, Homo sapiens
  CDR3 for alpha chain variable domain of TCR clone 373569 (TRAV26-1, TRAJ34)
CIVRVAYNTDKLIF

SEQ ID NO: 747138 - protein, 13 aa, Homo sapiens
  CDR3 for beta chain variable domain of TCR clone 373569 (TRBV7-9, TRBJ2-7)
CASSFAGAYEQYF

SEQ ID NO: 747139 - protein, 13 aa, Homo sapiens
  CDR3 for alpha chain variable domain of TCR clone 373570 (TRAV36/DV7, TRAJ34)
CAVGEVNTDKLIF

SEQ ID NO: 747140 - protein, 14 aa, Homo sapiens
  CDR3 for beta chain variable domain of TCR clone 373570 (TRBV5-1, TRBJ2-3)
CASSDRGSTDTQYF

SEQ ID NO: 747141 - protein, 15 aa, Homo sapiens
  CDR3 for alpha chain variable domain of TCR clone 373571 (TRAV27, TRAJ38)
CAARRNAGNNRKLIW

SEQ ID NO: 747142 - protein, 17 aa, Homo sapiens
  CDR3 for beta chain variable domain of TCR clone 373571 (TRBV20-1, TRBJ2-2)
CSASGSVQGGLTGELFF

SEQ ID NO: 747143 - protein, 17 aa, Homo sapiens
  CDR3 for alpha chain variable domain of TCR clone 373572 (TRAV3, TRAJ7)
CAVRDMSPLEGTTDSLL

SEQ ID NO: 747144 - protein, 16 aa, Homo sapiens
  CDR3 for beta chain variable domain of TCR clone 373572 (TRBV7-2, TRBJ2-5)
CASSPFPTGGEETQYF

SEQ ID NO: 747145 - protein, 13 aa, Homo sapiens
  CDR3 for alpha chain variable domain of TCR clone 373573 (TRAV12-3, TRAJ7)
CAMSASGNNRLAF

SEQ ID NO: 747146 - protein, 12 aa, Homo sapiens
  CDR3 for beta chain variable domain of TCR clone 373573 (TRBV11-2, TRBJ2-1)
CASSPGNNEQFF

SEQ ID NO: 747147 - protein, 13 aa, Homo sapiens
  CDR3 for alpha chain variable domain of TCR clone 373574 (TRAV8-3, TRAJ40)
CAVGAQYLRNLQI

SEQ ID NO: 747148 - protein, 15 aa, Homo sapiens
  CDR3 for beta chain variable domain of TCR clone 373574 (TRBV4-2, TRBJ2-7)
CASSQQRTFHYEQYF

SEQ ID NO: 747149 - protein, 12 aa, Homo sapiens
  CDR3 for alpha chain variable domain of TCR clone 373575 (TRAV12-2, TRAJ31)
CAVNTPDARLMF

SEQ ID NO: 747150 - protein, 15 aa, Homo sapiens
  CDR3 for beta chain variable domain of TCR clone 373575 (TRBV4-2, TRBJ1-1)
CASSQDQGLNTEAVF

SEQ ID NO: 747151 - protein, 14 aa, Homo sapiens
  CDR3 for alpha chain variable domain of TCR clone 373576 (TRAV8-3, TRAJ4)
CAVGAASGYNQLIF

SEQ ID NO: 747152 - protein, 13 aa, Homo sapiens
  CDR3 for beta chain variable domain of TCR clone 373576 (TRBV2, TRBJ2-5)
CASSALRGETQYF

SEQ ID NO: 747153 - protein, 12 aa, Homo sapiens
  CDR3 for alpha chain variable domain of TCR clone 373577 (TRAV16, TRAJ9)
CALISGGFKTIF

SEQ ID NO: 747154 - protein, 14 aa, Homo sapiens
  CDR3 for beta chain variable domain of TCR clone 373577 (TRBV7-9, TRBJ2-1)
CASSLAGPYNEQFF

SEQ ID NO: 747155 - protein, 15 aa, Homo sapiens
  CDR3 for alpha chain variable domain of TCR clone 373578 (TRAV8-3, TRAJ11)
CAVGLLNSGYSTLTF

SEQ ID NO: 747156 - protein, 16 aa, Homo sapiens
  CDR3 for beta chain variable domain of TCR clone 373578 (TRBV19, TRBJ1-1)
CASRVDVTGAAWGAFF

SEQ ID NO: 747157 - protein, 14 aa, Homo sapiens
  CDR3 for alpha chain variable domain of TCR clone 373579 (TRAV2, TRAJ22)
CAVEVKRAARQLNF

SEQ ID NO: 747158 - protein, 14 aa, Homo sapiens
  CDR3 for beta chain variable domain of TCR clone 373579 (TRBV19, TRBJ2-2)
CASTPGYSGGELFF

SEQ ID NO: 747159 - protein, 12 aa, Homo sapiens
  CDR3 for alpha chain variable domain of TCR clone 373580 (TRAV2, TRAJ9)
CAVGAGGFKTIF

SEQ ID NO: 747160 - protein, 15 aa, Homo sapiens
  CDR3 for beta chain variable domain of TCR clone 373580 (TRBV13, TRBJ1-5)
CASSLKGGGEQPQHF

SEQ ID NO: 747161 - protein, 14 aa, Homo sapiens
  CDR3 for alpha chain variable domain of TCR clone 373581 (TRAV12-2, TRAJ24)
CAVTPADSWGKLQF

SEQ ID NO: 747162 - protein, 12 aa, Homo sapiens
  CDR3 for beta chain variable domain of TCR clone 373581 (TRBV6-4, TRBJ2-2)
CAIRENTGELFF

SEQ ID NO: 747163 - protein, 14 aa, Homo sapiens
  CDR3 for alpha chain variable domain of TCR clone 373582 (TRAV12-3, TRAJ10)
SHLPLTGGGNKLTF

SEQ ID NO: 747164 - protein, 15 aa, Homo sapiens
  CDR3 for beta chain variable domain of TCR clone 373582 (TRBV13, TRBJ1-2)
CASSSPRGVRYGYTF

SEQ ID NO: 747165 - protein, 17 aa, Homo sapiens
  CDR3 for alpha chain variable domain of TCR clone 373583 (TRAV8-4, TRAJ11)
CAVSDRGENSGYSTLTF

SEQ ID NO: 747166 - protein, 17 aa, Homo sapiens
  CDR3 for beta chain variable domain of TCR clone 373583 (TRBV18, TRBJ2-2)
CASSPSDPWQNTGELFF

SEQ ID NO: 747167 - protein, 12 aa, Homo sapiens
  CDR3 for alpha chain variable domain of TCR clone 373584 (TRAV35, TRAJ43)
CAGAYNNNDMRF

SEQ ID NO: 747168 - protein, 14 aa, Homo sapiens
  CDR3 for beta chain variable domain of TCR clone 373584 (TRBV2, TRBJ2-2)
CASSWQGAPGELFF

SEQ ID NO: 747169 - protein, 14 aa, Homo sapiens
  CDR3 for alpha chain variable domain of TCR clone 373585 (TRAV1-2, TRAJ8)
FAVREDTGFQKLVF

SEQ ID NO: 747170 - protein, 13 aa, Homo sapiens
  CDR3 for beta chain variable domain of TCR clone 373585 (TRBV10-3, TRBJ2-7)
CASKLAVNYEQYF

SEQ ID NO: 747171 - protein, 14 aa, Homo sapiens
  CDR3 for alpha chain variable domain of TCR clone 373586 (TRAV8-4, TRAJ8)
CAVSFGTGFQKLVF

SEQ ID NO: 747172 - protein, 15 aa, Homo sapiens
  CDR3 for beta chain variable domain of TCR clone 373586 (TRBV2, TRBJ2-3)
CASSGEGTGTDTQYF

SEQ ID NO: 747173 - protein, 10 aa, Homo sapiens
  CDR3 for alpha chain variable domain of TCR clone 373587 (TRAV2, TRAJ34)
CAVVNDKLIF

SEQ ID NO: 747174 - protein, 15 aa, Homo sapiens
  CDR3 for beta chain variable domain of TCR clone 373587 (TRBV3-1, TRBJ2-2)
CASSQDWTRAGELFV

SEQ ID NO: 747175 - protein, 15 aa, Homo sapiens
  CDR3 for alpha chain variable domain of TCR clone 373588 (TRAV13-2, TRAJ5)
CAENPHWTDRRALTF

SEQ ID NO: 747176 - protein, 14 aa, Homo sapiens
  CDR3 for beta chain variable domain of TCR clone 373588 (TRBV5-6, TRBJ2-7)
CASSLKGATGEQYF

SEQ ID NO: 747177 - protein, 11 aa, Homo sapiens
  CDR3 for alpha chain variable domain of TCR clone 373589 (TRAV1-2, TRAJ10)
CFTGGGNKLTF

SEQ ID NO: 747178 - protein, 15 aa, Homo sapiens
  CDR3 for beta chain variable domain of TCR clone 373589 (TRBV7-9, TRBJ2-7)
CASSPGGGLTYEQYL

SEQ ID NO: 747179 - protein, 13 aa, Homo sapiens
  CDR3 for alpha chain variable domain of TCR clone 373590 (TRAV3, TRAJ21)
CAVREPDFNKFYF

SEQ ID NO: 747180 - protein, 13 aa, Homo sapiens
  CDR3 for beta chain variable domain of TCR clone 373590 (TRBV7-3, TRBJ2-5)
CASSFRGGETQYF

SEQ ID NO: 747181 - protein, 12 aa, Homo sapiens
  CDR3 for alpha chain variable domain of TCR clone 373591 (TRAV8-3, TRAJ26)
CAGDNYGHNFVF

SEQ ID NO: 747182 - protein, 12 aa, Homo sapiens
  CDR3 for beta chain variable domain of TCR clone 373591 (TRBV11-2, TRBJ2-2)
CASSLGGGELFF

SEQ ID NO: 747183 - protein, 12 aa, Homo sapiens
  CDR3 for alpha chain variable domain of TCR clone 373592 (TRAV13-1, TRAJ20)
CAASRGDYKLSF

SEQ ID NO: 747184 - protein, 14 aa, Homo sapiens
  CDR3 for beta chain variable domain of TCR clone 373592 (TRBV7-2, TRBJ2-7)
CASRSQGAAYEQYF

SEQ ID NO: 747185 - protein, 12 aa, Homo sapiens
  CDR3 for alpha chain variable domain of TCR clone 373593 (TRAV1-2, TRAJ24)
CAEGGSWGKFQF

SEQ ID NO: 747186 - protein, 15 aa, Homo sapiens
  CDR3 for beta chain variable domain of TCR clone 373593 (TRBV6-1, TRBJ2-7)
CASSEGVGNPYEQYF

SEQ ID NO: 747187 - protein, 15 aa, Homo sapiens
  CDR3 for alpha chain variable domain of TCR clone 373594 (TRAV29/DV5, TRAJ42)
CAAKTDGGSQGNLIS

SEQ ID NO: 747188 - protein, 10 aa, Homo sapiens
  CDR3 for beta chain variable domain of TCR clone 373594 (TRBV5-1, TRBJ2-2)
CASSSQGGTP

SEQ ID NO: 747189 - protein, 14 aa, Homo sapiens
  CDR3 for alpha chain variable domain of TCR clone 373595 (TRAV17, TRAJ18)
CACDRGSTLGRLYV

SEQ ID NO: 747190 - protein, 15 aa, Homo sapiens
  CDR3 for beta chain variable domain of TCR clone 373595 (TRBV5-1, TRBJ2-1)
CASSLVGTVKNEQFF

SEQ ID NO: 747191 - protein, 17 aa, Homo sapiens
  CDR3 for alpha chain variable domain of TCR clone 373596 (TRAV38-1, TRAJ28)
CAFMKPTSGAGSYQLTF

SEQ ID NO: 747192 - protein, 12 aa, Homo sapiens
  CDR3 for beta chain variable domain of TCR clone 373596 (TRBV5-7, TRBJ1-2)
CASSDGPYGYTF

SEQ ID NO: 747193 - protein, 14 aa, Homo sapiens
  CDR3 for alpha chain variable domain of TCR clone 373597 (TRAV1-2, TRAJ8)
CAVREDTGFQKLVF

SEQ ID NO: 747194 - protein, 13 aa, Homo sapiens
  CDR3 for beta chain variable domain of TCR clone 373597 (TRBV12-4, TRBJ1-5)
CASSPDRPQPQHF

SEQ ID NO: 747195 - protein, 16 aa, Homo sapiens
  CDR3 for alpha chain variable domain of TCR clone 373598 (TRAV30, TRAJ24)
CGTENVDADSWGKFQF

SEQ ID NO: 747196 - protein, 15 aa, Homo sapiens
  CDR3 for beta chain variable domain of TCR clone 373598 (TRBV6-5, TRBJ2-3)
CASSLNGDYTDTQYF

SEQ ID NO: 747197 - protein, 11 aa, Homo sapiens
  CDR3 for alpha chain variable domain of TCR clone 373599 (TRAV3, TRAJ21)
CAVGNFNKFYF

SEQ ID NO: 747198 - protein, 13 aa, Homo sapiens
  CDR3 for beta chain variable domain of TCR clone 373599 (TRBV24-1, TRBJ2-2)
CATSDWSTGELFF

SEQ ID NO: 747199 - protein, 13 aa, Homo sapiens
  CDR3 for alpha chain variable domain of TCR clone 373600 (TRAV21, TRAJ20)
CAVGVFADYKLSF

SEQ ID NO: 747200 - protein, 17 aa, Homo sapiens
  CDR3 for beta chain variable domain of TCR clone 373600 (TRBV20-1, TRBJ2-2)
CSASGSGQGGLTGELFF

SEQ ID NO: 747201 - protein, 14 aa, Homo sapiens
  CDR3 for alpha chain variable domain of TCR clone 373601 (TRAV17, TRAJ35)
CSTDRPGFGYVLHC

SEQ ID NO: 747202 - protein, 19 aa, Homo sapiens
  CDR3 for beta chain variable domain of TCR clone 373601 (TRBV11-3, TRBJ2-2)
CASSTRPGAKTTNTGELFF

SEQ ID NO: 747203 - protein, 15 aa, Homo sapiens
  CDR3 for alpha chain variable domain of TCR clone 373602 (TRAV3, TRAJ5)
CALSDLDTGRRALTF

SEQ ID NO: 747204 - protein, 13 aa, Homo sapiens
  CDR3 for beta chain variable domain of TCR clone 373602 (TRBV12-4, TRBJ2-7)
CASSPTETYEQYF

SEQ ID NO: 747205 - protein, 14 aa, Homo sapiens
  CDR3 for alpha chain variable domain of TCR clone 373603 (TRAV1-2, TRAJ16)
CAVNRFSDCQKLLF

SEQ ID NO: 747206 - protein, 12 aa, Homo sapiens
  CDR3 for beta chain variable domain of TCR clone 373603 (TRBV7-2, TRBJ2-5)
CASSQYQETQYF

SEQ ID NO: 747207 - protein, 13 aa, Homo sapiens
  CDR3 for alpha chain variable domain of TCR clone 373604 (TRAV14/DV4, TRAJ16)
CAMREGSGQKLLF

SEQ ID NO: 747208 - protein, 15 aa, Homo sapiens
  CDR3 for beta chain variable domain of TCR clone 373604 (TRBV7-9, TRBJ2-7)
CASSLDLDRGYEQFF

SEQ ID NO: 747209 - protein, 14 aa, Homo sapiens
  CDR3 for alpha chain variable domain of TCR clone 373605 (TRAV36/DV7, TRAJ44)
CCGANTGTASKLTF

SEQ ID NO: 747210 - protein, 16 aa, Homo sapiens
  CDR3 for beta chain variable domain of TCR clone 373605 (TRBV7-9, TRBJ1-2)
CASSLGFSSGEDGHTF

SEQ ID NO: 747211 - protein, 19 aa, Homo sapiens
  CDR3 for alpha chain variable domain of TCR clone 373606 (TRAV26-1, TRAJ22)
CCVLLHRWVFSGSARQLTF

SEQ ID NO: 747212 - protein, 19 aa, Homo sapiens
  CDR3 for beta chain variable domain of TCR clone 373606 (TRBV19, TRBJ2-5)
CASSIGQVTEFFLGETQYF

SEQ ID NO: 747213 - protein, 16 aa, Homo sapiens
  CDR3 for alpha chain variable domain of TCR clone 373607 (TRAV21, TRAJ17)
CAVRPGEEAAGNKLTF

SEQ ID NO: 747214 - protein, 16 aa, Homo sapiens
  CDR3 for beta chain variable domain of TCR clone 373607 (TRBV2, TRBJ2-7)
CASSEPWTGPSYELYF

SEQ ID NO: 747215 - protein, 18 aa, Homo sapiens
  CDR3 for alpha chain variable domain of TCR clone 373608 (TRAV21, TRAJ52)
CAVRPSPAGGTSYGRLTF

SEQ ID NO: 747216 - protein, 17 aa, Homo sapiens
  CDR3 for beta chain variable domain of TCR clone 373608 (TRBV13, TRBJ2-3)
CDSSLSRVAGGRNTQYF

SEQ ID NO: 747217 - protein, 12 aa, Homo sapiens
  CDR3 for alpha chain variable domain of TCR clone 373609 (TRAV17, TRAJ12)
CATLRSSYKLIF

SEQ ID NO: 747218 - protein, 16 aa, Homo sapiens
  CDR3 for beta chain variable domain of TCR clone 373609 (TRBV5-1, TRBJ1-1)
CASSSGGNSLNTEAFF

SEQ ID NO: 747219 - protein, 15 aa, Homo sapiens
  CDR3 for alpha chain variable domain of TCR clone 373610 (TRAV21, TRAJ24)
CAARSSTDSWGKLQF

SEQ ID NO: 747220 - protein, 15 aa, Homo sapiens
  CDR3 for beta chain variable domain of TCR clone 373610 (TRBV4-1, TRBJ2-7)
CASSQNTGGLYEQYF

SEQ ID NO: 747221 - protein, 14 aa, Homo sapiens
  CDR3 for alpha chain variable domain of TCR clone 373611 (TRAV27, TRAJ23)
CARLSYNQGGKLIF

SEQ ID NO: 747222 - protein, 15 aa, Homo sapiens
  CDR3 for beta chain variable domain of TCR clone 373611 (TRBV19, TRBJ2-2)
CASSLNRGVTGELFF

SEQ ID NO: 747223 - protein, 14 aa, Homo sapiens
  CDR3 for alpha chain variable domain of TCR clone 373612 (TRAV12-2, TRAJ32)
CAHPESGAINKLIF

SEQ ID NO: 747224 - protein, 14 aa, Homo sapiens
  CDR3 for beta chain variable domain of TCR clone 373612 (TRBV4-2, TRBJ2-3)
CASRETRAPGMQYF

SEQ ID NO: 747225 - protein, 11 aa, Homo sapiens
  CDR3 for alpha chain variable domain of TCR clone 373613 (TRAV3, TRAJ21)
CAVGKFNKFYF

SEQ ID NO: 747226 - protein, 13 aa, Homo sapiens
  CDR3 for beta chain variable domain of TCR clone 373613 (TRBV7-9, TRBJ1-2)
CASSLKQNYGYTF

SEQ ID NO: 747227 - protein, 15 aa, Homo sapiens
  CDR3 for alpha chain variable domain of TCR clone 373614 (TRAV30, TRAJ32)
CGTEIHGGATNKLIF

SEQ ID NO: 747228 - protein, 13 aa, Homo sapiens
  CDR3 for beta chain variable domain of TCR clone 373614 (TRBV6-3, TRBJ2-7)
CASSFSGGYEQYF

SEQ ID NO: 747229 - protein, 14 aa, Homo sapiens
  CDR3 for alpha chain variable domain of TCR clone 373615 (TRAV17, TRAJ6)
CATPAMGGSYIPTF

SEQ ID NO: 747230 - protein, 14 aa, Homo sapiens
  CDR3 for beta chain variable domain of TCR clone 373615 (TRBV19, TRBJ2-1)
CASPTFVLSGEQFF

SEQ ID NO: 747231 - protein, 14 aa, Homo sapiens
  CDR3 for alpha chain variable domain of TCR clone 373616 (TRAV21, TRAJ58)
CAVRRGRSGSRLTF

SEQ ID NO: 747232 - protein, 14 aa, Homo sapiens
  CDR3 for beta chain variable domain of TCR clone 373616 (TRBV19, TRBJ2-1)
CASPTFVLSGEQFF

SEQ ID NO: 747233 - protein, 14 aa, Homo sapiens
  CDR3 for alpha chain variable domain of TCR clone 373617 (TRAV26-1, TRAJ38)
CIADNAGNNRKLIW

SEQ ID NO: 747234 - protein, 16 aa, Homo sapiens
  CDR3 for beta chain variable domain of TCR clone 373617 (TRBV7-6, TRBJ2-1)
CASSAPGPSSYNEQFF

SEQ ID NO: 747235 - protein, 13 aa, Homo sapiens
  CDR3 for alpha chain variable domain of TCR clone 373618 (TRAV12-3, TRAJ49)
CAMSRNTGNQFSF

SEQ ID NO: 747236 - protein, 16 aa, Homo sapiens
  CDR3 for beta chain variable domain of TCR clone 373618 (TRBV5-8, TRBJ2-2)
CASSLINPGGAGELFF

SEQ ID NO: 747237 - protein, 11 aa, Homo sapiens
  CDR3 for alpha chain variable domain of TCR clone 373619 (TRAV26-2, TRAJ45)
PIVGSADGLTF

SEQ ID NO: 747238 - protein, 20 aa, Homo sapiens
  CDR3 for beta chain variable domain of TCR clone 373619 (TRBV28, TRBJ2-1)
CASTPIGRSPGLAGGNEQFF

SEQ ID NO: 747239 - protein, 11 aa, Homo sapiens
  CDR3 for alpha chain variable domain of TCR clone 373620 (TRAV12-1, TRAJ26)
CVVAYGQNFVF

SEQ ID NO: 747240 - protein, 15 aa, Homo sapiens
  CDR3 for beta chain variable domain of TCR clone 373620 (TRBV12-4, TRBJ2-5)
CASSGTEQAQETQYF

SEQ ID NO: 747241 - protein, 13 aa, Homo sapiens
  CDR3 for alpha chain variable domain of TCR clone 373621 (TRAV10, TRAJ45)
CVGSGGGADGLTF

SEQ ID NO: 747242 - protein, 15 aa, Homo sapiens
  CDR3 for beta chain variable domain of TCR clone 373621 (TRBV5-1, TRBJ2-7)
GASSLYPDGGYEQYF

SEQ ID NO: 747243 - protein, 19 aa, Homo sapiens
  CDR3 for alpha chain variable domain of TCR clone 373622 (TRAV26-1, TRAJ52)
CIIRAHRNAGGTSYGKLTF

SEQ ID NO: 747244 - protein, 15 aa, Homo sapiens
  CDR3 for beta chain variable domain of TCR clone 373622 (TRBV5-1, TRBJ2-7)
CASSLNGGPAREQYF

SEQ ID NO: 747245 - protein, 16 aa, Homo sapiens
  CDR3 for alpha chain variable domain of TCR clone 373623 (TRAV3, TRAJ37)
CAVRPHGSGNTGKLIF

SEQ ID NO: 747246 - protein, 15 aa, Homo sapiens
  CDR3 for beta chain variable domain of TCR clone 373623 (TRBV20-1, TRBJ2-7)
CSARGRGPSSYEQYF

SEQ ID NO: 747247 - protein, 11 aa, Homo sapiens
  CDR3 for alpha chain variable domain of TCR clone 373624 (TRAV3, TRAJ21)
CAVGNFNKFYF

SEQ ID NO: 747248 - protein, 16 aa, Homo sapiens
  CDR3 for beta chain variable domain of TCR clone 373624 (TRBV20-1, TRBJ1-2)
CSASMGQGVANYGYTV

SEQ ID NO: 747249 - protein, 16 aa, Homo sapiens
  CDR3 for alpha chain variable domain of TCR clone 373625 (TRAV30, TRAJ24)
CGTELVDADSWGKFQF

SEQ ID NO: 747250 - protein, 13 aa, Homo sapiens
  CDR3 for beta chain variable domain of TCR clone 373625 (TRBV20-1, TRBJ1-1)
CSARGGGNTEAFF

SEQ ID NO: 747251 - protein, 17 aa, Homo sapiens
  CDR3 for alpha chain variable domain of TCR clone 373626 (TRAV3, TRAJ42)
CAVRDRDYGGSQGNLIF

SEQ ID NO: 747252 - protein, 16 aa, Homo sapiens
  CDR3 for beta chain variable domain of TCR clone 373626 (TRBV10-3, TRBJ2-2)
CASSFGQGANTGELFF

SEQ ID NO: 747253 - protein, 14 aa, Homo sapiens
  CDR3 for alpha chain variable domain of TCR clone 373627 (TRAV38-1, TRAJ29)
CAFITPSGNTPLVF

SEQ ID NO: 747254 - protein, 14 aa, Homo sapiens
  CDR3 for beta chain variable domain of TCR clone 373627 (TRBV18, TRBJ2-7)
CASSRRGGAYEQYF

SEQ ID NO: 747255 - protein, 12 aa, Homo sapiens
  CDR3 for alpha chain variable domain of TCR clone 373628 (TRAV21, TRAJ11)
CAVRGGNSTLTF

SEQ ID NO: 747256 - protein, 15 aa, Homo sapiens
  CDR3 for beta chain variable domain of TCR clone 373628 (TRBV6-1, TRBJ2-7)
CASSEPIAATTQQYF

SEQ ID NO: 747257 - protein, 15 aa, Homo sapiens
  CDR3 for alpha chain variable domain of TCR clone 373629 (TRAV12-1, TRAJ45)
CVVLSGGGGADGLTF

SEQ ID NO: 747258 - protein, 14 aa, Homo sapiens
  CDR3 for beta chain variable domain of TCR clone 373629 (TRBV7-3, TRBJ2-3)
CASSPSARTDTKYF

SEQ ID NO: 747259 - protein, 18 aa, Homo sapiens
  CDR3 for alpha chain variable domain of TCR clone 373630 (TRAV26-2, TRAJ54)
CILRDVEVGIQGAQKLVF

SEQ ID NO: 747260 - protein, 17 aa, Homo sapiens
  CDR3 for beta chain variable domain of TCR clone 373630 (TRBV20-1, TRBJ1-5)
CSASLSPGQGGDQPQHF

SEQ ID NO: 747261 - protein, 16 aa, Homo sapiens
  CDR3 for alpha chain variable domain of TCR clone 373631 (TRAV29/DV5, TRAJ36)
CAASAIPTTGANNLFF

SEQ ID NO: 747262 - protein, 14 aa, Homo sapiens
  CDR3 for beta chain variable domain of TCR clone 373631 (TRBV6-1, TRBJ1-3)
CASVQGGGGNTIYF

SEQ ID NO: 747263 - protein, 15 aa, Homo sapiens
  CDR3 for alpha chain variable domain of TCR clone 373632 (TRAV2, TRAJ11)
CAVGGRNSGDSTLTF

SEQ ID NO: 747264 - protein, 14 aa, Homo sapiens
  CDR3 for beta chain variable domain of TCR clone 373632 (TRBV4-1, TRBJ2-2)
CASSQAVNTGELFF

SEQ ID NO: 747265 - protein, 10 aa, Homo sapiens
  CDR3 for alpha chain variable domain of TCR clone 373633 (TRAV30, TRAJ48)
CGIGIEKLTF

SEQ ID NO: 747266 - protein, 16 aa, Homo sapiens
  CDR3 for beta chain variable domain of TCR clone 373633 (TRBV20-1, TRBJ1-4)
CSAPGQGLLTNEKLFF

SEQ ID NO: 747267 - protein, 11 aa, Homo sapiens
  CDR3 for alpha chain variable domain of TCR clone 373634 (TRAV3, TRAJ13)
CAVTSYQKVTF

SEQ ID NO: 747268 - protein, 14 aa, Homo sapiens
  CDR3 for beta chain variable domain of TCR clone 373634 (TRBV7-9, TRBJ2-7)
CQSSSGLAVYEQYF

SEQ ID NO: 747269 - protein, 13 aa, Homo sapiens
  CDR3 for alpha chain variable domain of TCR clone 373635 (TRAV3, TRAJ15)
CAVRDQAGTALIF

SEQ ID NO: 747270 - protein, 14 aa, Homo sapiens
  CDR3 for beta chain variable domain of TCR clone 373635 (TRBV7-8, TRBJ2-3)
CASSLGAGTDTQYF

SEQ ID NO: 747271 - protein, 18 aa, Homo sapiens
  CDR3 for alpha chain variable domain of TCR clone 373636 (TRAV13-1, TRAJ52)
CAASKRSAGGTSYGKLTF

SEQ ID NO: 747272 - protein, 13 aa, Homo sapiens
  CDR3 for beta chain variable domain of TCR clone 373636 (TRBV12-4, TRBJ1-2)
YASSLRQGKGYTF

SEQ ID NO: 747273 - protein, 14 aa, Homo sapiens
  CDR3 for alpha chain variable domain of TCR clone 373637 (TRAV1-2, TRAJ16)
CAVNRFSDGQKLPF

SEQ ID NO: 747274 - protein, 12 aa, Homo sapiens
  CDR3 for beta chain variable domain of TCR clone 373637 (TRBV12-4, TRBJ2-3)
CASSLGQDTQYF

SEQ ID NO: 747275 - protein, 12 aa, Homo sapiens
  CDR3 for alpha chain variable domain of TCR clone 373638 (TRAV1-1, TRAJ20)
CAVREDDYKLSF

SEQ ID NO: 747276 - protein, 18 aa, Homo sapiens
  CDR3 for beta chain variable domain of TCR clone 373638 (TRBV20-1, TRBJ2-3)
CSASGLAGGLGTTDTQYF

SEQ ID NO: 747277 - protein, 12 aa, Homo sapiens
  CDR3 for alpha chain variable domain of TCR clone 373639 (TRAV1-1, TRAJ9)
CAVDTGGFKTIF

SEQ ID NO: 747278 - protein, 13 aa, Homo sapiens
  CDR3 for beta chain variable domain of TCR clone 373639 (TRBV7-3, TRBJ2-5)
CASSFRGGETQYF

SEQ ID NO: 747279 - protein, 15 aa, Homo sapiens
  CDR3 for alpha chain variable domain of TCR clone 373640 (TRAV8-3, TRAJ45)
CASSYSGGGAVVLTF

SEQ ID NO: 747280 - protein, 13 aa, Homo sapiens
  CDR3 for beta chain variable domain of TCR clone 373640 (TRBV10-3, TRBJ2-7)
CASKLAVNYEQYF

SEQ ID NO: 747281 - protein, 14 aa, Homo sapiens
  CDR3 for alpha chain variable domain of TCR clone 373641 (TRAV25, TRAJ42)
CAGNYGGSQGNLIF

SEQ ID NO: 747282 - protein, 14 aa, Homo sapiens
  CDR3 for beta chain variable domain of TCR clone 373641 (TRBV19, TRBJ2-1)
CASPTFVLSGEQFF

SEQ ID NO: 747283 - protein, 12 aa, Homo sapiens
  CDR3 for alpha chain variable domain of TCR clone 373642 (TRAV13-1, TRAJ48)
CAANFGNEKLTF

SEQ ID NO: 747284 - protein, 15 aa, Homo sapiens
  CDR3 for beta chain variable domain of TCR clone 373642 (TRBV5-1, TRBJ2-1)
CASSPPRAPYNEQFF

SEQ ID NO: 747285 - protein, 13 aa, Homo sapiens
  CDR3 for alpha chain variable domain of TCR clone 373643 (TRAV1-2, TRAJ9)
CAALNTGGFKTIF

SEQ ID NO: 747286 - protein, 14 aa, Homo sapiens
  CDR3 for beta chain variable domain of TCR clone 373643 (TRBV20-1, TRBJ2-5)
CSARYRGLQETQYF

SEQ ID NO: 747287 - protein, 15 aa, Homo sapiens
  CDR3 for alpha chain variable domain of TCR clone 373644 (TRAV8-3, TRAJ45)
CASSYSGGGADGLTF

SEQ ID NO: 747288 - protein, 17 aa, Homo sapiens
  CDR3 for beta chain variable domain of TCR clone 373644 (TRBV4-1, TRBJ2-1)
CASSQGRGGGLYNEQFF

SEQ ID NO: 747289 - protein, 17 aa, Homo sapiens
  CDR3 for alpha chain variable domain of TCR clone 373645 (TRAV13-1, TRAJ31)
CAPRDRLMFGDGTQLVV

SEQ ID NO: 747290 - protein, 13 aa, Homo sapiens
  CDR3 for beta chain variable domain of TCR clone 373645 (TRBV7-9, TRBJ2-3)
CASSPGSTDTQYF

SEQ ID NO: 747291 - protein, 18 aa, Homo sapiens
  CDR3 for alpha chain variable domain of TCR clone 373646 (TRAV26-1, TRAJ23)
CIVRVGLEVWSQGGKLIF

SEQ ID NO: 747292 - protein, 18 aa, Homo sapiens
  CDR3 for beta chain variable domain of TCR clone 373646 (TRBV11-2, TRBJ2-3)
CASSLGGASRGAPNTQYF

SEQ ID NO: 747293 - protein, 13 aa, Homo sapiens
  CDR3 for alpha chain variable domain of TCR clone 373647 (TRAV2, TRAJ40)
CAVVTSGTYKYIF

SEQ ID NO: 747294 - protein, 12 aa, Homo sapiens
  CDR3 for beta chain variable domain of TCR clone 373647 (TRBV6-3, TRBJ2-7)
CASSLAPYEQYF

SEQ ID NO: 747295 - protein, 12 aa, Homo sapiens
  CDR3 for alpha chain variable domain of TCR clone 373648 (TRAV13-2, TRAJ31)
CAESYNNARLMF

SEQ ID NO: 747296 - protein, 13 aa, Homo sapiens
  CDR3 for beta chain variable domain of TCR clone 373648 (TRBV24-1, TRBJ1-3)
CATMADSGNTVYF

SEQ ID NO: 747297 - protein, 17 aa, Homo sapiens
  CDR3 for alpha chain variable domain of TCR clone 373649 (TRAV3, TRAJ17)
DSALDSPRGAAGNKLTF

SEQ ID NO: 747298 - protein, 16 aa, Homo sapiens
  CDR3 for beta chain variable domain of TCR clone 373649 (TRBV7-6, TRBJ2-1)
CASSAPGPSSYNEQFF

SEQ ID NO: 747299 - protein, 14 aa, Homo sapiens
  CDR3 for alpha chain variable domain of TCR clone 373650 (TRAV13-1, TRAJ35)
CAASKGGFGNVLHC

SEQ ID NO: 747300 - protein, 14 aa, Homo sapiens
  CDR3 for beta chain variable domain of TCR clone 373650 (TRBV19, TRBJ2-1)
CASPTFVVSGEQFF

SEQ ID NO: 747301 - protein, 17 aa, Homo sapiens
  CDR3 for alpha chain variable domain of TCR clone 373651 (TRAV3, TRAJ6)
CAVRDGPRAGGSYIPTF

SEQ ID NO: 747302 - protein, 17 aa, Homo sapiens
  CDR3 for beta chain variable domain of TCR clone 373651 (TRBV28, TRBJ2-7)
CASSPGLAGGDSSEQYF

SEQ ID NO: 747303 - protein, 13 aa, Homo sapiens
  CDR3 for alpha chain variable domain of TCR clone 373652 (TRAV16, TRAJ31)
CALIAHNNARLMF

SEQ ID NO: 747304 - protein, 17 aa, Homo sapiens
  CDR3 for beta chain variable domain of TCR clone 373652 (TRBV12-4, TRBJ2-1)
CASSPGLAGGRINEQFF

SEQ ID NO: 747305 - protein, 12 aa, Homo sapiens
  CDR3 for alpha chain variable domain of TCR clone 373653 (TRAV12-1, TRAJ40)
CVVYSGTYKYIF

SEQ ID NO: 747306 - protein, 17 aa, Homo sapiens
  CDR3 for beta chain variable domain of TCR clone 373653 (TRBV11-3, TRBJ1-5)
CASSQLTGLRGNQPQHF

SEQ ID NO: 747307 - protein, 15 aa, Homo sapiens
  CDR3 for alpha chain variable domain of TCR clone 373654 (TRAV13-1, TRAJ52)
CAATSPRTSYGKLTF

SEQ ID NO: 747308 - protein, 15 aa, Homo sapiens
  CDR3 for beta chain variable domain of TCR clone 373654 (TRBV5-8, TRBJ1-5)
CASSSTPGSNQPQHF

SEQ ID NO: 747309 - protein, 12 aa, Homo sapiens
  CDR3 for alpha chain variable domain of TCR clone 373655 (TRAV1-2, TRAJ42)
CVAGGSQGNLIF

SEQ ID NO: 747310 - protein, 12 aa, Homo sapiens
  CDR3 for beta chain variable domain of TCR clone 373655 (TRBV24-1, TRBJ1-1)
CATSDSDRGAFF

SEQ ID NO: 747311 - protein, 11 aa, Homo sapiens
  CDR3 for alpha chain variable domain of TCR clone 373656 (TRAV2, TRAJ13)
CASGGYQKVTF

SEQ ID NO: 747312 - protein, 15 aa, Homo sapiens
  CDR3 for beta chain variable domain of TCR clone 373656 (TRBV11-3, TRBJ2-3)
CASLRDGREGDTQYF

SEQ ID NO: 747313 - protein, 14 aa, Homo sapiens
  CDR3 for alpha chain variable domain of TCR clone 373657 (TRAV13-1, TRAJ8)
CAASEDTGFQKLVF

SEQ ID NO: 747314 - protein, 12 aa, Homo sapiens
  CDR3 for beta chain variable domain of TCR clone 373657 (TRBV19, TRBJ1-4)
CASKDWPGGLFF

SEQ ID NO: 747315 - protein, 15 aa, Homo sapiens
  CDR3 for alpha chain variable domain of TCR clone 373658 (TRAV12-2, TRAJ43)
CAFDMRFGAGTRLTV

SEQ ID NO: 747316 - protein, 13 aa, Homo sapiens
  CDR3 for beta chain variable domain of TCR clone 373658 (TRBV7-8, TRBJ2-7)
CASSLTGGREQYF

SEQ ID NO: 747317 - protein, 18 aa, Homo sapiens
  CDR3 for alpha chain variable domain of TCR clone 373659 (TRAV13-1, TRAJ52)
CAASKGSAGGTSYGKLTF

SEQ ID NO: 747318 - protein, 11 aa, Homo sapiens
  CDR3 for beta chain variable domain of TCR clone 373659 (TRBV11-2, TRBJ2-2)
CASSLPGELFF

SEQ ID NO: 747319 - protein, 15 aa, Homo sapiens
  CDR3 for alpha chain variable domain of TCR clone 373660 (TRAV12-3, TRAJ27)
CAMRAYNTNAGKSTF

SEQ ID NO: 747320 - protein, 18 aa, Homo sapiens
  CDR3 for beta chain variable domain of TCR clone 373660 (TRBV7-9, TRBJ2-7)
CASSLTTSGSRTWYEQYF

SEQ ID NO: 747321 - protein, 13 aa, Homo sapiens
  CDR3 for alpha chain variable domain of TCR clone 373661 (TRAV21, TRAJ20)
CAVGVFADYKLSF

SEQ ID NO: 747322 - protein, 14 aa, Homo sapiens
  CDR3 for beta chain variable domain of TCR clone 373661 (TRBV4-2, TRBJ1-4)
CASSPSSGNEKRFF

SEQ ID NO: 747323 - protein, 21 aa, Homo sapiens
  CDR3 for alpha chain variable domain of TCR clone 373662 (TRAV3, )
CAVRPTPDIQNPDPAVYQLRV

SEQ ID NO: 747324 - protein, 15 aa, Homo sapiens
  CDR3 for beta chain variable domain of TCR clone 373662 (TRBV11-3, TRBJ2-5)
CASSDTSGGIETQYF

SEQ ID NO: 747325 - protein, 12 aa, Homo sapiens
  CDR3 for alpha chain variable domain of TCR clone 373663 (TRAV3, TRAJ27)
CAVRDKSGKSTV

SEQ ID NO: 747326 - protein, 14 aa, Homo sapiens
  CDR3 for beta chain variable domain of TCR clone 373663 (TRBV5-1, TRBJ1-2)
CASSVDSTNYGYTF

SEQ ID NO: 747327 - protein, 15 aa, Homo sapiens
  CDR3 for alpha chain variable domain of TCR clone 373664 (TRAV20, TRAJ53)
CAVQASGGSNYKLTF

SEQ ID NO: 747328 - protein, 15 aa, Homo sapiens
  CDR3 for beta chain variable domain of TCR clone 373664 (TRBV9, TRBJ2-1)
CASSLAGSSYNEQLF

SEQ ID NO: 747329 - protein, 21 aa, Homo sapiens
  CDR3 for alpha chain variable domain of TCR clone 373665 (TRAV21, )
CAVRQDAGNNHIQNPDTAVYQ

SEQ ID NO: 747330 - protein, 16 aa, Homo sapiens
  CDR3 for beta chain variable domain of TCR clone 373665 (TRBV4-2, TRBJ1-1)
CASRPLDGGGDTEAFF

SEQ ID NO: 747331 - protein, 14 aa, Homo sapiens
  CDR3 for alpha chain variable domain of TCR clone 373666 (TRAV2, TRAJ9)
CAVEDRSGGFKNIF

SEQ ID NO: 747332 - protein, 14 aa, Homo sapiens
  CDR3 for beta chain variable domain of TCR clone 373666 (TRBV4-1, TRBJ2-2)
CASSQAVNTGELFF

SEQ ID NO: 747333 - protein, 17 aa, Homo sapiens
  CDR3 for alpha chain variable domain of TCR clone 373667 (TRAV3, TRAJ6)
VAVRDGPRAGGSYIPTF

SEQ ID NO: 747334 - protein, 18 aa, Homo sapiens
  CDR3 for beta chain variable domain of TCR clone 373667 (TRBV7-9, TRBJ2-7)
CASSLTTSGSRTWYEQYF

SEQ ID NO: 747335 - protein, 14 aa, Homo sapiens
  CDR3 for alpha chain variable domain of TCR clone 373668 (TRAV3, TRAJ9)
CAVRINTGGFKTIF

SEQ ID NO: 747336 - protein, 15 aa, Homo sapiens
  CDR3 for beta chain variable domain of TCR clone 373668 (TRBV7-2, TRBJ1-2)
CASSLARRSIYGYTF

SEQ ID NO: 747337 - protein, 13 aa, Homo sapiens
  CDR3 for alpha chain variable domain of TCR clone 373669 (TRAV27, TRAJ45)
CRSSGGGADGLTF

SEQ ID NO: 747338 - protein, 13 aa, Homo sapiens
  CDR3 for beta chain variable domain of TCR clone 373669 (TRBV7-2, TRBJ2-2)
CASSSVRAGELFF

SEQ ID NO: 747339 - protein, 12 aa, Homo sapiens
  CDR3 for alpha chain variable domain of TCR clone 373670 (TRAV13-1, TRAJ17)
CAARTAGNQLTF

SEQ ID NO: 747340 - protein, 15 aa, Homo sapiens
  CDR3 for beta chain variable domain of TCR clone 373670 (TRBV7-6, TRBJ1-1)
CASSPQGGANTEAFF

SEQ ID NO: 747341 - protein, 16 aa, Homo sapiens
  CDR3 for alpha chain variable domain of TCR clone 373671 (TRAV13-2, TRAJ53)
CEENANSGGSNYKLTF

SEQ ID NO: 747342 - protein, 19 aa, Homo sapiens
  CDR3 for beta chain variable domain of TCR clone 373671 (TRBV28, TRBJ2-7)
CASSYSGTSRLGWVYEQYF

SEQ ID NO: 747343 - protein, 14 aa, Homo sapiens
  CDR3 for alpha chain variable domain of TCR clone 373672 (TRAV27, TRAJ6)
CAGARSGGSYIPTF

SEQ ID NO: 747344 - protein, 12 aa, Homo sapiens
  CDR3 for beta chain variable domain of TCR clone 373672 (TRBV15, TRBJ1-1)
CATSRENTEAFF

SEQ ID NO: 747345 - protein, 14 aa, Homo sapiens
  CDR3 for alpha chain variable domain of TCR clone 373673 (TRAV26-1, TRAJ39)
CIVRGSRAGNMLTF

SEQ ID NO: 747346 - protein, 11 aa, Homo sapiens
  CDR3 for beta chain variable domain of TCR clone 373673 (TRBV6-3, TRBJ2-3)
CATGQADTQYF

SEQ ID NO: 747347 - protein, 14 aa, Homo sapiens
  CDR3 for alpha chain variable domain of TCR clone 373674 (TRAV21, TRAJ48)
CAVRQGFGNEKLTF

SEQ ID NO: 747348 - protein, 17 aa, Homo sapiens
  CDR3 for beta chain variable domain of TCR clone 373674 (TRBV13, TRBJ2-3)
CASSLSRVAGGGNTQYF

SEQ ID NO: 747349 - protein, 13 aa, Homo sapiens
  CDR3 for alpha chain variable domain of TCR clone 373675 (TRAV21, TRAJ9)
CAVRRSGGFKTIF

SEQ ID NO: 747350 - protein, 19 aa, Homo sapiens
  CDR3 for beta chain variable domain of TCR clone 373675 (TRBV28, TRBJ2-1)
CQHPYWTVTGTAGGNEQFF

SEQ ID NO: 747351 - protein, 13 aa, Homo sapiens
  CDR3 for alpha chain variable domain of TCR clone 373676 (TRAV29/DV5, TRAJ49)
CAASTNAGNQFYF

SEQ ID NO: 747352 - protein, 13 aa, Homo sapiens
  CDR3 for beta chain variable domain of TCR clone 373676 (TRBV7-2, TRBJ1-4)
CASSLAGLEKLFF

SEQ ID NO: 747353 - protein, 16 aa, Homo sapiens
  CDR3 for alpha chain variable domain of TCR clone 373677 (TRAV27, TRAJ52)
CAGPSAGGTSYGKLKF

SEQ ID NO: 747354 - protein, 16 aa, Homo sapiens
  CDR3 for beta chain variable domain of TCR clone 373677 (TRBV7-9, TRBJ2-1)
CASSLGGAVGDNEQFF

SEQ ID NO: 747355 - protein, 13 aa, Homo sapiens
  CDR3 for alpha chain variable domain of TCR clone 373678 (TRAV20, TRAJ20)
CAVQNPNDYKLSF

SEQ ID NO: 747356 - protein, 12 aa, Homo sapiens
  CDR3 for beta chain variable domain of TCR clone 373678 (TRBV18, TRBJ2-7)
CASSPNNNEQYF

SEQ ID NO: 747357 - protein, 14 aa, Homo sapiens
  CDR3 for alpha chain variable domain of TCR clone 373679 (TRAV8-2, TRAJ37)
CVVSLTGNTGKLIF

SEQ ID NO: 747358 - protein, 14 aa, Homo sapiens
  CDR3 for beta chain variable domain of TCR clone 373679 (TRBV2, TRBJ2-7)
CASSLTSGGYEQYF

SEQ ID NO: 747359 - protein, 18 aa, Homo sapiens
  CDR3 for alpha chain variable domain of TCR clone 373680 (TRAV26-1, TRAJ52)
CIVRVEGAGGTSYGKLTF

SEQ ID NO: 747360 - protein, 13 aa, Homo sapiens
  CDR3 for beta chain variable domain of TCR clone 373680 (TRBV7-3, TRBJ1-2)
CASSLERGYGDTF

SEQ ID NO: 747361 - protein, 11 aa, Homo sapiens
  CDR3 for alpha chain variable domain of TCR clone 373681 (TRAV12-1, TRAJ43)
CVEYDNNDMRF

SEQ ID NO: 747362 - protein, 15 aa, Homo sapiens
  CDR3 for beta chain variable domain of TCR clone 373681 (TRBV5-1, TRBJ2-3)
CASSVTSGSTDTQYF

SEQ ID NO: 747363 - protein, 14 aa, Homo sapiens
  CDR3 for alpha chain variable domain of TCR clone 373682 (TRAV35, TRAJ33)
CAGSSQDSNYQLIW

SEQ ID NO: 747364 - protein, 15 aa, Homo sapiens
  CDR3 for beta chain variable domain of TCR clone 373682 (TRBV20-1, TRBJ2-7)
CSAESGTSGGYEQYF

SEQ ID NO: 747365 - protein, 12 aa, Homo sapiens
  CDR3 for alpha chain variable domain of TCR clone 373683 (TRAV16, TRAJ26)
CALRSYGQNFVF

SEQ ID NO: 747366 - protein, 14 aa, Homo sapiens
  CDR3 for beta chain variable domain of TCR clone 373683 (TRBV10-3, TRBJ2-1)
CTISSDLAYNEQFF

SEQ ID NO: 747367 - protein, 14 aa, Homo sapiens
  CDR3 for alpha chain variable domain of TCR clone 373684 (TRAV12-2, TRAJ44)
CAVNPAGTASKLTF

SEQ ID NO: 747368 - protein, 15 aa, Homo sapiens
  CDR3 for beta chain variable domain of TCR clone 373684 (TRBV7-9, TRBJ2-1)
CASSQTGTSVDEQFF

SEQ ID NO: 747369 - protein, 18 aa, Homo sapiens
  CDR3 for alpha chain variable domain of TCR clone 373685 (TRAV21, TRAJ52)
CAVRPSPAGGTSYGKLTF

SEQ ID NO: 747370 - protein, 12 aa, Homo sapiens
  CDR3 for beta chain variable domain of TCR clone 373685 (TRBV11-2, TRBJ2-5)
CASSPPAETQYF

SEQ ID NO: 747371 - protein, 14 aa, Homo sapiens
  CDR3 for alpha chain variable domain of TCR clone 373686 (TRAV8-1, TRAJ5)
CAVRTDKGRRALTF

SEQ ID NO: 747372 - protein, 15 aa, Homo sapiens
  CDR3 for beta chain variable domain of TCR clone 373686 (TRBV10-2, TRBJ2-6)
CASSEQGTGANVLTF

SEQ ID NO: 747373 - protein, 14 aa, Homo sapiens
  CDR3 for alpha chain variable domain of TCR clone 373687 (TRAV13-1, TRAJ44)
CAAKATGTASKLTF

SEQ ID NO: 747374 - protein, 13 aa, Homo sapiens
  CDR3 for beta chain variable domain of TCR clone 373687 (TRBV28, TRBJ2-7)
CAGAQQGLDEQYF

SEQ ID NO: 747375 - protein, 17 aa, Homo sapiens
  CDR3 for alpha chain variable domain of TCR clone 373688 (TRAV13-1, TRAJ23)
CAASKRFHRLRKAYLRT

SEQ ID NO: 747376 - protein, 14 aa, Homo sapiens
  CDR3 for beta chain variable domain of TCR clone 373688 (TRBV5-4, TRBJ1-1)
CASSLDSRRDEAFF

SEQ ID NO: 747377 - protein, 18 aa, Homo sapiens
  CDR3 for alpha chain variable domain of TCR clone 373689 (TRAV26-1, TRAJ23)
CIVRVGLEGWNQGGKLIF

SEQ ID NO: 747378 - protein, 15 aa, Homo sapiens
  CDR3 for beta chain variable domain of TCR clone 373689 (TRBV10-3, TRBJ2-3)
CAISDWDRDTDTQYF

SEQ ID NO: 747379 - protein, 13 aa, Homo sapiens
  CDR3 for alpha chain variable domain of TCR clone 373690 (TRAV6, TRAJ23)
CALDQNQGGKLIF

SEQ ID NO: 747380 - protein, 15 aa, Homo sapiens
  CDR3 for beta chain variable domain of TCR clone 373690 (TRBV28, TRBJ1-2)
CASSGSEQRAFGYTV

SEQ ID NO: 747381 - protein, 13 aa, Homo sapiens
  CDR3 for alpha chain variable domain of TCR clone 373691 (TRAV12-2, TRAJ40)
CREDPLRNLKYIF

SEQ ID NO: 747382 - protein, 13 aa, Homo sapiens
  CDR3 for beta chain variable domain of TCR clone 373691 (TRBV7-9, TRBJ1-2)
CASSLKQNYGYTF

SEQ ID NO: 747383 - protein, 13 aa, Homo sapiens
  CDR3 for alpha chain variable domain of TCR clone 373692 (TRAV8-6, TRAJ21)
CAVSPSSLNKFYS

SEQ ID NO: 747384 - protein, 14 aa, Homo sapiens
  CDR3 for beta chain variable domain of TCR clone 373692 (TRBV7-9, TRBJ2-5)
CASSLDTAQETQYF

SEQ ID NO: 747385 - protein, 12 aa, Homo sapiens
  CDR3 for alpha chain variable domain of TCR clone 373693 (TRAV27, TRAJ41)
CAGKNSGYALNF

SEQ ID NO: 747386 - protein, 13 aa, Homo sapiens
  CDR3 for beta chain variable domain of TCR clone 373693 (TRBV12-4, TRBJ1-1)
CASSPGTGFEAFF

SEQ ID NO: 747387 - protein, 13 aa, Homo sapiens
  CDR3 for alpha chain variable domain of TCR clone 373694 (TRAV3, TRAJ21)
CAAREPDFNKFYF

SEQ ID NO: 747388 - protein, 16 aa, Homo sapiens
  CDR3 for beta chain variable domain of TCR clone 373694 (TRBV7-3, TRBJ2-2)
CASSLKRGTLSGELFF

SEQ ID NO: 747389 - protein, 18 aa, Homo sapiens
  CDR3 for alpha chain variable domain of TCR clone 373695 (TRAV12-2, )
CAVEDIQKPDPAVYQLRD

SEQ ID NO: 747390 - protein, 18 aa, Homo sapiens
  CDR3 for beta chain variable domain of TCR clone 373695 (TRBV11-2, TRBJ2-3)
CASGLGGASRGAPNTQYF

SEQ ID NO: 747391 - protein, 11 aa, Homo sapiens
  CDR3 for alpha chain variable domain of TCR clone 373696 (TRAV17, TRAJ9)
CATTGGFTTIF

SEQ ID NO: 747392 - protein, 20 aa, Homo sapiens
  CDR3 for beta chain variable domain of TCR clone 373696 (TRBV7-8, TRBJ2-2)
CASSHLFPGPTIHITGELFF

SEQ ID NO: 747393 - protein, 12 aa, Homo sapiens
  CDR3 for alpha chain variable domain of TCR clone 373697 (TRAV12-3, TRAJ17)
CAMTLTGNKLTF

SEQ ID NO: 747394 - protein, 15 aa, Homo sapiens
  CDR3 for beta chain variable domain of TCR clone 373697 (TRBV20-1, TRBJ2-7)
CSARDPVSGMDEQFF

SEQ ID NO: 747395 - protein, 13 aa, Homo sapiens
  CDR3 for alpha chain variable domain of TCR clone 373698 (TRAV8-3, TRAJ43)
CAVGPDNNNDMRF

SEQ ID NO: 747396 - protein, 12 aa, Homo sapiens
  CDR3 for beta chain variable domain of TCR clone 373698 (TRBV7-2, TRBJ1-6)
CARSLSSSPLHF

SEQ ID NO: 747397 - protein, 13 aa, Homo sapiens
  CDR3 for alpha chain variable domain of TCR clone 373699 (TRAV1-2, TRAJ15)
CAGVNQAGTALIF

SEQ ID NO: 747398 - protein, 14 aa, Homo sapiens
  CDR3 for beta chain variable domain of TCR clone 373699 (TRBV2, TRBJ2-1)
CASGVGRSGNEQFF

SEQ ID NO: 747399 - protein, 15 aa, Homo sapiens
  CDR3 for alpha chain variable domain of TCR clone 373700 (TRAV3, TRAJ20)
CAVRDIKFSDYKPSF

SEQ ID NO: 747400 - protein, 13 aa, Homo sapiens
  CDR3 for beta chain variable domain of TCR clone 373700 (TRBV20-1, TRBJ1-1)
CSARVGGNTEAFF

SEQ ID NO: 747401 - protein, 13 aa, Homo sapiens
  CDR3 for alpha chain variable domain of TCR clone 373701 (TRAV8-3, TRAJ47)
CAVSMEYGNKLVF

SEQ ID NO: 747402 - protein, 14 aa, Homo sapiens
  CDR3 for beta chain variable domain of TCR clone 373701 (TRBV12-4, TRBJ2-5)
CASSFGASGGTQYF

SEQ ID NO: 747403 - protein, 15 aa, Homo sapiens
  CDR3 for alpha chain variable domain of TCR clone 373702 (TRAV27, TRAJ24)
CAGSMTTDSWGKLQF

SEQ ID NO: 747404 - protein, 15 aa, Homo sapiens
  CDR3 for beta chain variable domain of TCR clone 373702 (TRBV6-6, TRBJ1-5)
CASSSPRGQGQHQHF

SEQ ID NO: 747405 - protein, 12 aa, Homo sapiens
  CDR3 for alpha chain variable domain of TCR clone 373703 (TRAV17, TRAJ4)
CATDGGYNKLIF

SEQ ID NO: 747406 - protein, 13 aa, Homo sapiens
  CDR3 for beta chain variable domain of TCR clone 373703 (TRBV29-1, TRBJ2-2)
CSPTGVNTGELFF

SEQ ID NO: 747407 - protein, 10 aa, Homo sapiens
  CDR3 for alpha chain variable domain of TCR clone 373704 (TRAV13-1, TRAJ27)
CAPLARQINL

SEQ ID NO: 747408 - protein, 13 aa, Homo sapiens
  CDR3 for beta chain variable domain of TCR clone 373704 (TRBV28, TRBJ1-2)
CAGRDRGNYGYTF

SEQ ID NO: 747409 - protein, 16 aa, Homo sapiens
  CDR3 for alpha chain variable domain of TCR clone 373705 (TRAV26-1, TRAJ53)
CIVRVAMGGSNYKLTF

SEQ ID NO: 747410 - protein, 14 aa, Homo sapiens
  CDR3 for beta chain variable domain of TCR clone 373705 (TRBV7-9, TRBJ1-5)
CSSSPQGQPSILVM

SEQ ID NO: 747411 - protein, 16 aa, Homo sapiens
  CDR3 for alpha chain variable domain of TCR clone 373706 (TRAV12-1, TRAJ28)
CVVIAYSGAGSYQLTF

SEQ ID NO: 747412 - protein, 15 aa, Homo sapiens
  CDR3 for beta chain variable domain of TCR clone 373706 (TRBV14, TRBJ1-1)
CASSQEGVGFTEAFF

SEQ ID NO: 747413 - protein, 13 aa, Homo sapiens
  CDR3 for alpha chain variable domain of TCR clone 373707 (TRAV2, TRAJ40)
CAVVTSGTYEYIF

SEQ ID NO: 747414 - protein, 15 aa, Homo sapiens
  CDR3 for beta chain variable domain of TCR clone 373707 (TRBV27, TRBJ1-6)
CASSFDRGLGSPLHF

SEQ ID NO: 747415 - protein, 23 aa, Homo sapiens
  CDR3 for alpha chain variable domain of TCR clone 373708 (TRAV26-1, )
CIADNAGNNNIQNPDPAVYQLRD

SEQ ID NO: 747416 - protein, 15 aa, Homo sapiens
  CDR3 for beta chain variable domain of TCR clone 373708 (TRBV20-1, TRBJ2-7)
CSARDRVSGMDEQYF

SEQ ID NO: 747417 - protein, 18 aa, Homo sapiens
  CDR3 for alpha chain variable domain of TCR clone 373709 (TRAV12-3, TRAJ52)
CAMSRTNAGGTNYGKLTF

SEQ ID NO: 747418 - protein, 17 aa, Homo sapiens
  CDR3 for beta chain variable domain of TCR clone 373709 (TRBV13, TRBJ2-3)
CASSLSRVAGGRNTQYF

SEQ ID NO: 747419 - protein, 14 aa, Homo sapiens
  CDR3 for alpha chain variable domain of TCR clone 373710 (TRAV2, TRAJ9)
CVVEDRSGGFKTIF

SEQ ID NO: 747420 - protein, 14 aa, Homo sapiens
  CDR3 for beta chain variable domain of TCR clone 373710 (TRBV7-8, TRBJ2-3)
CASSFPDGQDTQYF

SEQ ID NO: 747421 - protein, 12 aa, Homo sapiens
  CDR3 for alpha chain variable domain of TCR clone 373711 (TRAV27, TRAJ9)
CAGESGGFKTIF

SEQ ID NO: 747422 - protein, 14 aa, Homo sapiens
  CDR3 for beta chain variable domain of TCR clone 373711 (TRBV7-9, TRBJ2-1)
CASSPRDSLYEQFF

SEQ ID NO: 747423 - protein, 21 aa, Homo sapiens
  CDR3 for alpha chain variable domain of TCR clone 373712 (TRAV17, TRAJ28)
CFLLLCYGPAAGWGWEFQLTF

SEQ ID NO: 747424 - protein, 16 aa, Homo sapiens
  CDR3 for beta chain variable domain of TCR clone 373712 (TRBV25-1, TRBJ1-1)
CASSGDRDRGRIEAFF

SEQ ID NO: 747425 - protein, 15 aa, Homo sapiens
  CDR3 for alpha chain variable domain of TCR clone 373713 (TRAV13-1, TRAJ36)
CAASIRQTGANNLFF

SEQ ID NO: 747426 - protein, 14 aa, Homo sapiens
  CDR3 for beta chain variable domain of TCR clone 373713 (TRBV19, TRBJ2-1)
CASPTFVLSGEQFF

SEQ ID NO: 747427 - protein, 14 aa, Homo sapiens
  CDR3 for alpha chain variable domain of TCR clone 373714 (TRAV13-2, TRAJ39)
CAEILNNAGNMLTF

SEQ ID NO: 747428 - protein, 13 aa, Homo sapiens
  CDR3 for beta chain variable domain of TCR clone 373714 (TRBV7-9, TRBJ1-2)
CASSLKQNYGYTF

SEQ ID NO: 747429 - protein, 11 aa, Homo sapiens
  CDR3 for alpha chain variable domain of TCR clone 373715 (TRAV21, TRAJ31)
CAVRNNARLMF

SEQ ID NO: 747430 - protein, 13 aa, Homo sapiens
  CDR3 for beta chain variable domain of TCR clone 373715 (TRBV15, TRBJ1-6)
CATSGGLNSPLHF

SEQ ID NO: 747431 - protein, 13 aa, Homo sapiens
  CDR3 for alpha chain variable domain of TCR clone 373716 (TRAV8-6, TRAJ48)
CAGVNFGNEKLTF

SEQ ID NO: 747432 - protein, 12 aa, Homo sapiens
  CDR3 for beta chain variable domain of TCR clone 373716 (TRBV11-2, TRBJ2-4)
CASSSASGSKYF

SEQ ID NO: 747433 - protein, 12 aa, Homo sapiens
  CDR3 for alpha chain variable domain of TCR clone 373717 (TRAV35, TRAJ30)
CAGLNRDYKIIS

SEQ ID NO: 747434 - protein, 15 aa, Homo sapiens
  CDR3 for beta chain variable domain of TCR clone 373717 (TRBV18, TRBJ2-3)
CASSPLAGETDTQYF

SEQ ID NO: 747435 - protein, 13 aa, Homo sapiens
  CDR3 for alpha chain variable domain of TCR clone 373718 (TRAV13-1, TRAJ5)
CAASDTGRRALTF

SEQ ID NO: 747436 - protein, 16 aa, Homo sapiens
  CDR3 for beta chain variable domain of TCR clone 373718 (TRBV12-5, TRBJ2-5)
CASGPRTSGNQETQYL

SEQ ID NO: 747437 - protein, 14 aa, Homo sapiens
  CDR3 for alpha chain variable domain of TCR clone 373719 (TRAV23/DV6, TRAJ8)
CAAGKATGFQKPAF

SEQ ID NO: 747438 - protein, 15 aa, Homo sapiens
  CDR3 for beta chain variable domain of TCR clone 373719 (TRBV28, TRBJ2-3)
CASSPDRQGANTQYF

SEQ ID NO: 747439 - protein, 15 aa, Homo sapiens
  CDR3 for alpha chain variable domain of TCR clone 373720 (TRAV1-1, TRAJ23)
CAVREGDNQGGKLIF

SEQ ID NO: 747440 - protein, 15 aa, Homo sapiens
  CDR3 for beta chain variable domain of TCR clone 373720 (TRBV7-9, TRBJ1-5)
CASSQGHQPNQPQHF

SEQ ID NO: 747441 - protein, 10 aa, Homo sapiens
  CDR3 for alpha chain variable domain of TCR clone 373721 (TRAV20, TRAJ22)
CAAPARQLTF

SEQ ID NO: 747442 - protein, 14 aa, Homo sapiens
  CDR3 for beta chain variable domain of TCR clone 373721 (TRBV19, TRBJ2-1)
CASSMGSGETEQFF

SEQ ID NO: 747443 - protein, 11 aa, Homo sapiens
  CDR3 for alpha chain variable domain of TCR clone 373722 (TRAV3, TRAJ13)
CAVTSYQKVTF

SEQ ID NO: 747444 - protein, 13 aa, Homo sapiens
  CDR3 for beta chain variable domain of TCR clone 373722 (TRBV4-2, TRBJ1-1)
CASSQAGNTEAFF

SEQ ID NO: 747445 - protein, 16 aa, Homo sapiens
  CDR3 for alpha chain variable domain of TCR clone 373723 (TRAV12-2, TRAJ45)
CAVKRNPGGGADGLTF

SEQ ID NO: 747446 - protein, 14 aa, Homo sapiens
  CDR3 for beta chain variable domain of TCR clone 373723 (TRBV7-9, TRBJ2-1)
CASSPRDSLYEQFF

SEQ ID NO: 747447 - protein, 13 aa, Homo sapiens
  CDR3 for alpha chain variable domain of TCR clone 373724 (TRAV1-1, TRAJ38)
CASNAGNNRKLIW

SEQ ID NO: 747448 - protein, 13 aa, Homo sapiens
  CDR3 for beta chain variable domain of TCR clone 373724 (TRBV7-9, TRBJ2-3)
CASSPKGPNTQYF

SEQ ID NO: 747449 - protein, 13 aa, Homo sapiens
  CDR3 for alpha chain variable domain of TCR clone 373725 (TRAV8-4, TRAJ49)
CAVSDPGGNQFYF

SEQ ID NO: 747450 - protein, 13 aa, Homo sapiens
  CDR3 for beta chain variable domain of TCR clone 373725 (TRBV19, TRBJ1-2)
CASSVPGQDGYTF

SEQ ID NO: 747451 - protein, 14 aa, Homo sapiens
  CDR3 for alpha chain variable domain of TCR clone 373726 (TRAV13-1, TRAJ28)
CAASPGAGSYQLTF

SEQ ID NO: 747452 - protein, 13 aa, Homo sapiens
  CDR3 for beta chain variable domain of TCR clone 373726 (TRBV4-2, TRBJ1-1)
CASSQAGNTEAFF

SEQ ID NO: 747453 - protein, 15 aa, Homo sapiens
  CDR3 for alpha chain variable domain of TCR clone 373727 (TRAV12-1, TRAJ8)
CVVNVENTGFQKLVF

SEQ ID NO: 747454 - protein, 15 aa, Homo sapiens
  CDR3 for beta chain variable domain of TCR clone 373727 (TRBV12-4, TRBJ1-6)
CASSLGQGFRSPLLF

SEQ ID NO: 747455 - protein, 14 aa, Homo sapiens
  CDR3 for alpha chain variable domain of TCR clone 373728 (TRAV8-3, TRAJ4)
CAVGAAGGYNKLIF

SEQ ID NO: 747456 - protein, 13 aa, Homo sapiens
  CDR3 for beta chain variable domain of TCR clone 373728 (TRBV4-2, TRBJ1-1)
CASSQAGNTEAFL

SEQ ID NO: 747457 - protein, 14 aa, Homo sapiens
  CDR3 for alpha chain variable domain of TCR clone 373729 (TRAV17, TRAJ57)
SATDPQGGSEKLVF

SEQ ID NO: 747458 - protein, 13 aa, Homo sapiens
  CDR3 for beta chain variable domain of TCR clone 373729 (TRBV19, TRBJ2-7)
CASSPRQSYEQYF

SEQ ID NO: 747459 - protein, 14 aa, Homo sapiens
  CDR3 for alpha chain variable domain of TCR clone 373730 (TRAV12-2, TRAJ15)
CAPHTGQAGTALIF

SEQ ID NO: 747460 - protein, 12 aa, Homo sapiens
  CDR3 for beta chain variable domain of TCR clone 373730 (TRBV11-2, TRBJ2-7)
CASSLPTYEQYF

SEQ ID NO: 747461 - protein, 15 aa, Homo sapiens
  CDR3 for alpha chain variable domain of TCR clone 373731 (TRAV8-4, TRAJ48)
CAVSAAYFGNEELTF

SEQ ID NO: 747462 - protein, 12 aa, Homo sapiens
  CDR3 for beta chain variable domain of TCR clone 373731 (TRBV3-1, TRBJ2-5)
CASSQGGETQYF

SEQ ID NO: 747463 - protein, 15 aa, Homo sapiens
  CDR3 for alpha chain variable domain of TCR clone 373732 (TRAV14/DV4, TRAJ39)
CAMRAVNNAGNMLTF

SEQ ID NO: 747464 - protein, 14 aa, Homo sapiens
  CDR3 for beta chain variable domain of TCR clone 373732 (TRBV9, TRBJ2-3)
CASSLEGGLTYAVF

SEQ ID NO: 747465 - protein, 14 aa, Homo sapiens
  CDR3 for alpha chain variable domain of TCR clone 373733 (TRAV8-6, TRAJ9)
CAVSSYTGGFKTIF

SEQ ID NO: 747466 - protein, 15 aa, Homo sapiens
  CDR3 for beta chain variable domain of TCR clone 373733 (TRBV7-2, TRBJ2-2)
CASSLVSQFTGELFF

SEQ ID NO: 747467 - protein, 15 aa, Homo sapiens
  CDR3 for alpha chain variable domain of TCR clone 373734 (TRAV8-3, TRAJ45)
CASSYSGGGADGLTF

SEQ ID NO: 747468 - protein, 15 aa, Homo sapiens
  CDR3 for beta chain variable domain of TCR clone 373734 (TRBV20-1, TRBJ2-7)
CSARDRVSGMDEQHF

SEQ ID NO: 747469 - protein, 18 aa, Homo sapiens
  CDR3 for alpha chain variable domain of TCR clone 373735 (TRAV26-1, TRAJ5)
CIVRVVPPRDTGRRAVTF

SEQ ID NO: 747470 - protein, 15 aa, Homo sapiens
  CDR3 for beta chain variable domain of TCR clone 373735 (TRBV7-9, TRBJ2-7)
CASSLPMGQANEQYF

SEQ ID NO: 747471 - protein, 15 aa, Homo sapiens
  CDR3 for alpha chain variable domain of TCR clone 373736 (TRAV16, TRAJ26)
CITVLQRNYDQNFVF

SEQ ID NO: 747472 - protein, 15 aa, Homo sapiens
  CDR3 for beta chain variable domain of TCR clone 373736 (TRBV7-2, TRBJ2-3)
CASSLTGTSTDTQYF

SEQ ID NO: 747473 - protein, 14 aa, Homo sapiens
  CDR3 for alpha chain variable domain of TCR clone 373737 (TRAV12-2, TRAJ13)
CAVKKTGGYQKVTF

SEQ ID NO: 747474 - protein, 13 aa, Homo sapiens
  CDR3 for beta chain variable domain of TCR clone 373737 (TRBV12-4, TRBJ1-2)
CASSFIWLHLRCG

SEQ ID NO: 747475 - protein, 16 aa, Homo sapiens
  CDR3 for alpha chain variable domain of TCR clone 373738 (TRAV38-1, TRAJ45)
CAFMKGSGGGADGLTC

SEQ ID NO: 747476 - protein, 15 aa, Homo sapiens
  CDR3 for beta chain variable domain of TCR clone 373738 (TRBV7-2, TRBJ2-3)
CASSSTGLETDTQYF

SEQ ID NO: 747477 - protein, 16 aa, Homo sapiens
  CDR3 for alpha chain variable domain of TCR clone 373739 (TRAV30, TRAJ24)
CGTEIVDADSWGKFQF

SEQ ID NO: 747478 - protein, 17 aa, Homo sapiens
  CDR3 for beta chain variable domain of TCR clone 373739 (TRBV7-2, TRBJ2-7)
CARSAFGSSGPSPEQYF

SEQ ID NO: 747479 - protein, 16 aa, Homo sapiens
  CDR3 for alpha chain variable domain of TCR clone 373740 (TRAV29/DV5, TRAJ39)
CAASLLFNNAGNMLTF

SEQ ID NO: 747480 - protein, 16 aa, Homo sapiens
  CDR3 for beta chain variable domain of TCR clone 373740 (TRBV19, TRBJ2-6)
CASSMSGLSGANVLAF

SEQ ID NO: 747481 - protein, 12 aa, Homo sapiens
  CDR3 for alpha chain variable domain of TCR clone 373741 (TRAV13-1, TRAJ21)
CAAKEGFNKFYF

SEQ ID NO: 747482 - protein, 13 aa, Homo sapiens
  CDR3 for beta chain variable domain of TCR clone 373741 (TRBV19, TRBJ1-2)
CASSQGQVYGYTF

SEQ ID NO: 747483 - protein, 13 aa, Homo sapiens
  CDR3 for alpha chain variable domain of TCR clone 373742 (TRAV8-3, TRAJ28)
CAVGAVGSYQLTF

SEQ ID NO: 747484 - protein, 14 aa, Homo sapiens
  CDR3 for beta chain variable domain of TCR clone 373742 (TRBV7-2, TRBJ2-3)
CASSQTGSSYTQYF

SEQ ID NO: 747485 - protein, 20 aa, Homo sapiens
  CDR3 for alpha chain variable domain of TCR clone 373743 (TRAV12-1, TRAJ42)
SSVIQPPTSVKGGSQGNPIF

SEQ ID NO: 747486 - protein, 17 aa, Homo sapiens
  CDR3 for beta chain variable domain of TCR clone 373743 (TRBV4-1, TRBJ1-3)
CASSPQRGIRFGNTIYF

SEQ ID NO: 747487 - protein, 17 aa, Homo sapiens
  CDR3 for alpha chain variable domain of TCR clone 373744 (TRAV12-2, TRAJ6)
CAPQGPPRAGGSYIPTF

SEQ ID NO: 747488 - protein, 16 aa, Homo sapiens
  CDR3 for beta chain variable domain of TCR clone 373744 (TRBV19, TRBJ2-2)
CAGSTARASNTGELFF

SEQ ID NO: 747489 - protein, 15 aa, Homo sapiens
  CDR3 for alpha chain variable domain of TCR clone 373745 (TRAV3, TRAJ3)
CAVRDRDISASKIIF

SEQ ID NO: 747490 - protein, 12 aa, Homo sapiens
  CDR3 for beta chain variable domain of TCR clone 373745 (TRBV29-1, TRBJ2-3)
CSVTGGADTQYF

SEQ ID NO: 747491 - protein, 18 aa, Homo sapiens
  CDR3 for alpha chain variable domain of TCR clone 373746 (TRAV20, TRAJ37)
CAGCSSNRQTNLWARDNF

SEQ ID NO: 747492 - protein, 11 aa, Homo sapiens
  CDR3 for beta chain variable domain of TCR clone 373746 (TRBV12-4, TRBJ2-3)
CASTATDTQYF

SEQ ID NO: 747493 - protein, 12 aa, Homo sapiens
  CDR3 for alpha chain variable domain of TCR clone 373747 (TRAV12-3, TRAJ17)
CAMTLTGNKQTF

SEQ ID NO: 747494 - protein, 15 aa, Homo sapiens
  CDR3 for beta chain variable domain of TCR clone 373747 (TRBV20-1, TRBJ2-7)
CSARDRVSGMDEQYF

SEQ ID NO: 747495 - protein, 17 aa, Homo sapiens
  CDR3 for alpha chain variable domain of TCR clone 373748 (TRAV3, TRAJ6)
CAVRDGPRAGGGDIPTF

SEQ ID NO: 747496 - protein, 14 aa, Homo sapiens
  CDR3 for beta chain variable domain of TCR clone 373748 (TRBV7-2, TRBJ2-7)
CASSPKTSFYEQYF

SEQ ID NO: 747497 - protein, 14 aa, Homo sapiens
  CDR3 for alpha chain variable domain of TCR clone 373749 (TRAV13-1, TRAJ44)
CAAKATGTASKLTF

SEQ ID NO: 747498 - protein, 13 aa, Homo sapiens
  CDR3 for beta chain variable domain of TCR clone 373749 (TRBV5-5, TRBJ1-2)
CASSFWRGEDYTY

SEQ ID NO: 747499 - protein, 14 aa, Homo sapiens
  CDR3 for alpha chain variable domain of TCR clone 373750 (TRAV1-2, TRAJ33)
CAVRAPDSNYQLIW

SEQ ID NO: 747500 - protein, 15 aa, Homo sapiens
  CDR3 for beta chain variable domain of TCR clone 373750 (TRBV10-3, TRBJ2-3)
CAISLTSGCTDTQYF

SEQ ID NO: 747501 - protein, 14 aa, Homo sapiens
  CDR3 for alpha chain variable domain of TCR clone 373751 (TRAV12-3, TRAJ56)
CAMSVTGANSKLTF

SEQ ID NO: 747502 - protein, 17 aa, Homo sapiens
  CDR3 for beta chain variable domain of TCR clone 373751 (TRBV20-1, TRBJ2-3)
CSASRLGRGGSADTQYF

SEQ ID NO: 747503 - protein, 11 aa, Homo sapiens
  CDR3 for alpha chain variable domain of TCR clone 373752 (TRAV3, TRAJ21)
CAVGNFNKFYF

SEQ ID NO: 747504 - protein, 13 aa, Homo sapiens
  CDR3 for beta chain variable domain of TCR clone 373752 (TRBV12-5, TRBJ2-3)
CASGDRQSDTQYL

SEQ ID NO: 747505 - protein, 13 aa, Homo sapiens
  CDR3 for alpha chain variable domain of TCR clone 373753 (TRAV8-3, TRAJ21)
CAVGAYNFNKFYF

SEQ ID NO: 747506 - protein, 13 aa, Homo sapiens
  CDR3 for beta chain variable domain of TCR clone 373753 (TRBV7-9, TRBJ1-2)
CASSPSNFWGYIF

SEQ ID NO: 747507 - protein, 14 aa, Homo sapiens
  CDR3 for alpha chain variable domain of TCR clone 373754 (TRAV1-2, TRAJ8)
CAVREDTGFQKLVF

SEQ ID NO: 747508 - protein, 17 aa, Homo sapiens
  CDR3 for beta chain variable domain of TCR clone 373754 (TRBV15, TRBJ1-5)
CATSRAPPGTRNQPQHF

SEQ ID NO: 747509 - protein, 14 aa, Homo sapiens
  CDR3 for alpha chain variable domain of TCR clone 373755 (TRAV1-2, TRAJ16)
CAVNRFSDGQKLLF

SEQ ID NO: 747510 - protein, 14 aa, Homo sapiens
  CDR3 for beta chain variable domain of TCR clone 373755 (TRBV25-1, TRBJ1-1)
CASTHLGGNTEAVF

SEQ ID NO: 747511 - protein, 14 aa, Homo sapiens
  CDR3 for alpha chain variable domain of TCR clone 373756 (TRAV14/DV4, TRAJ15)
CALRLDQAGTALIF

SEQ ID NO: 747512 - protein, 16 aa, Homo sapiens
  CDR3 for beta chain variable domain of TCR clone 373756 (TRBV12-5, TRBJ2-5)
CASGPRTSGNQETQYF

SEQ ID NO: 747513 - protein, 14 aa, Homo sapiens
  CDR3 for alpha chain variable domain of TCR clone 373757 (TRAV12-3, TRAJ10)
SHLPLTGGGNKLTF

SEQ ID NO: 747514 - protein, 14 aa, Homo sapiens
  CDR3 for beta chain variable domain of TCR clone 373757 (TRBV7-9, TRBJ1-5)
CASTQTGLNQPQHF

SEQ ID NO: 747515 - protein, 15 aa, Homo sapiens
  CDR3 for alpha chain variable domain of TCR clone 373758 (TRAV8-6, TRAJ42)
CAVRGRKPRKSHLWK

SEQ ID NO: 747516 - protein, 13 aa, Homo sapiens
  CDR3 for beta chain variable domain of TCR clone 373758 (TRBV7-3, TRBJ1-1)
CASSQEWGAEAFF

SEQ ID NO: 747517 - protein, 14 aa, Homo sapiens
  CDR3 for alpha chain variable domain of TCR clone 373759 (TRAV12-2, TRAJ40)
CAVKIPSGTYKYIF

SEQ ID NO: 747518 - protein, 15 aa, Homo sapiens
  CDR3 for beta chain variable domain of TCR clone 373759 (TRBV11-2, TRBJ2-1)
CASSKNRGLIYEQFF

SEQ ID NO: 747519 - protein, 15 aa, Homo sapiens
  CDR3 for alpha chain variable domain of TCR clone 373760 (TRAV8-4, TRAJ37)
CAVSTRSGNTGKLLF

SEQ ID NO: 747520 - protein, 20 aa, Homo sapiens
  CDR3 for beta chain variable domain of TCR clone 373760 (TRBV7-8, TRBJ2-2)
CASSHLFPGPTIHITGELFF

SEQ ID NO: 747521 - protein, 13 aa, Homo sapiens
  CDR3 for alpha chain variable domain of TCR clone 373761 (TRAV23/DV6, TRAJ58)
CSASEIGGSRLTF

SEQ ID NO: 747522 - protein, 14 aa, Homo sapiens
  CDR3 for beta chain variable domain of TCR clone 373761 (TRBV28, TRBJ2-5)
CASSRLAGGETQYF

SEQ ID NO: 747523 - protein, 12 aa, Homo sapiens
  CDR3 for alpha chain variable domain of TCR clone 373762 (TRAV3, TRAJ20)
CAVRDHDYKLSF

SEQ ID NO: 747524 - protein, 15 aa, Homo sapiens
  CDR3 for beta chain variable domain of TCR clone 373762 (TRBV9, TRBJ1-6)
CASSVAGTGDSHLHF

SEQ ID NO: 747525 - protein, 10 aa, Homo sapiens
  CDR3 for alpha chain variable domain of TCR clone 373763 (TRAV30, TRAJ48)
CGIGNEKLNF

SEQ ID NO: 747526 - protein, 16 aa, Homo sapiens
  CDR3 for beta chain variable domain of TCR clone 373763 (TRBV20-1, TRBJ1-2)
CSASMGQGVANYGYTF

SEQ ID NO: 747527 - protein, 17 aa, Homo sapiens
  CDR3 for alpha chain variable domain of TCR clone 373764 (TRAV8-6, TRAJ8)
CAVKEGIENTGFHKLVF

SEQ ID NO: 747528 - protein, 12 aa, Homo sapiens
  CDR3 for beta chain variable domain of TCR clone 373764 (TRBV19, TRBJ1-4)
CASKDWPGGLFF

SEQ ID NO: 747529 - protein, 16 aa, Homo sapiens
  CDR3 for alpha chain variable domain of TCR clone 373765 (TRAV3, TRAJ10)
CAVRDMRAGGANKLTF

SEQ ID NO: 747530 - protein, 13 aa, Homo sapiens
  CDR3 for beta chain variable domain of TCR clone 373765 (TRBV12-4, TRBJ2-7)
CASSPTETYEQYF

SEQ ID NO: 747531 - protein, 12 aa, Homo sapiens
  CDR3 for alpha chain variable domain of TCR clone 373766 (TRAV3, TRAJ27)
CAVRDGAGKSTF

SEQ ID NO: 747532 - protein, 14 aa, Homo sapiens
  CDR3 for beta chain variable domain of TCR clone 373766 (TRBV7-2, TRBJ1-3)
CASSLGTAGNTIYF

SEQ ID NO: 747533 - protein, 18 aa, Homo sapiens
  CDR3 for alpha chain variable domain of TCR clone 373767 (TRAV21, TRAJ52)
CAVRPPPAGGTSYGKLTF

SEQ ID NO: 747534 - protein, 15 aa, Homo sapiens
  CDR3 for beta chain variable domain of TCR clone 373767 (TRBV20-1, TRBJ2-7)
CSARKGLAESYEQYF

SEQ ID NO: 747535 - protein, 18 aa, Homo sapiens
  CDR3 for alpha chain variable domain of TCR clone 373768 (TRAV26-1, TRAJ27)
CIVRPSFNYNTNAGKSTF

SEQ ID NO: 747536 - protein, 15 aa, Homo sapiens
  CDR3 for beta chain variable domain of TCR clone 373768 (TRBV20-1, TRBJ2-2)
CSAIPGHSNTGELFF

SEQ ID NO: 747537 - protein, 13 aa, Homo sapiens
  CDR3 for alpha chain variable domain of TCR clone 373769 (TRAV27, TRAJ41)
CAGEGNSGYALNF

SEQ ID NO: 747538 - protein, 15 aa, Homo sapiens
  CDR3 for beta chain variable domain of TCR clone 373769 (TRBV10-2, TRBJ2-5)
CASKPEDRRQETQYF

SEQ ID NO: 747539 - protein, 14 aa, Homo sapiens
  CDR3 for alpha chain variable domain of TCR clone 373770 (TRAV26-1, TRAJ38)
CIADNAGNNRKLML

SEQ ID NO: 747540 - protein, 13 aa, Homo sapiens
  CDR3 for beta chain variable domain of TCR clone 373770 (TRBV20-1, TRBJ1-1)
CSARGGGNTEAFF

SEQ ID NO: 747541 - protein, 13 aa, Homo sapiens
  CDR3 for alpha chain variable domain of TCR clone 373771 (TRAV26-2, TRAJ53)
CILSGGSNYKLTF

SEQ ID NO: 747542 - protein, 13 aa, Homo sapiens
  CDR3 for beta chain variable domain of TCR clone 373771 (TRBV7-2, TRBJ2-2)
CASSLAVTGELFF

SEQ ID NO: 747543 - protein, 15 aa, Homo sapiens
  CDR3 for alpha chain variable domain of TCR clone 373772 (TRAV3, TRAJ22)
CAVRDRGGSARHMTF

SEQ ID NO: 747544 - protein, 14 aa, Homo sapiens
  CDR3 for beta chain variable domain of TCR clone 373772 (TRBV20-1, TRBJ1-1)
CSAQTRIGGTEAFF

SEQ ID NO: 747545 - protein, 16 aa, Homo sapiens
  CDR3 for alpha chain variable domain of TCR clone 373773 (TRAV30, TRAJ24)
CGTEIVDADSWGKFQF

SEQ ID NO: 747546 - protein, 18 aa, Homo sapiens
  CDR3 for beta chain variable domain of TCR clone 373773 (TRBV20-1, TRBJ2-6)
CSAETTATHGSGANVLTF

SEQ ID NO: 747547 - protein, 14 aa, Homo sapiens
  CDR3 for alpha chain variable domain of TCR clone 373774 (TRAV38-1, TRAJ40)
CALRPTSGTYNYIF

SEQ ID NO: 747548 - protein, 16 aa, Homo sapiens
  CDR3 for beta chain variable domain of TCR clone 373774 (TRBV7-3, TRBJ2-2)
CASSLKRGTLSGELFF

SEQ ID NO: 747549 - protein, 13 aa, Homo sapiens
  CDR3 for alpha chain variable domain of TCR clone 373775 (TRAV12-2, TRAJ10)
CAVPTGGGNKLTF

SEQ ID NO: 747550 - protein, 11 aa, Homo sapiens
  CDR3 for beta chain variable domain of TCR clone 373775 (TRBV6-1, TRBJ2-1)
CASISSNEQFL

SEQ ID NO: 747551 - protein, 13 aa, Homo sapiens
  CDR3 for alpha chain variable domain of TCR clone 373776 (TRAV12-3, TRAJ9)
CAMRNTGGFKTIF

SEQ ID NO: 747552 - protein, 14 aa, Homo sapiens
  CDR3 for beta chain variable domain of TCR clone 373776 (TRBV11-2, TRBJ2-7)
YASSSTGEGYEQYF

SEQ ID NO: 747553 - protein, 13 aa, Homo sapiens
  CDR3 for alpha chain variable domain of TCR clone 373777 (TRAV29/DV5, TRAJ49)
CAASTNTGNQFHF

SEQ ID NO: 747554 - protein, 13 aa, Homo sapiens
  CDR3 for beta chain variable domain of TCR clone 373777 (TRBV7-2, TRBJ1-4)
CASSLAGLEKLFF

SEQ ID NO: 747555 - protein, 12 aa, Homo sapiens
  CDR3 for alpha chain variable domain of TCR clone 373778 (TRAV27, TRAJ40)
CRGASGTYKYIF

SEQ ID NO: 747556 - protein, 12 aa, Homo sapiens
  CDR3 for beta chain variable domain of TCR clone 373778 (TRBV4-1, TRBJ2-5)
CASGEREETQYF

SEQ ID NO: 747557 - protein, 12 aa, Homo sapiens
  CDR3 for alpha chain variable domain of TCR clone 373779 (TRAV17, TRAJ20)
CATYSNDYKPSF

SEQ ID NO: 747558 - protein, 11 aa, Homo sapiens
  CDR3 for beta chain variable domain of TCR clone 373779 (TRBV4-1, TRBJ2-2)
CASEHTGELFF

SEQ ID NO: 747559 - protein, 13 aa, Homo sapiens
  CDR3 for alpha chain variable domain of TCR clone 373780 (TRAV1-1, TRAJ9)
CAAKNTGGFKTIF

SEQ ID NO: 747560 - protein, 16 aa, Homo sapiens
  CDR3 for beta chain variable domain of TCR clone 373780 (TRBV20-1, TRBJ2-1)
EDSSLEGYRSYNEQFF

SEQ ID NO: 747561 - protein, 13 aa, Homo sapiens
  CDR3 for alpha chain variable domain of TCR clone 373781 (TRAV3, TRAJ41)
CAVSSNAGYALNF

SEQ ID NO: 747562 - protein, 13 aa, Homo sapiens
  CDR3 for beta chain variable domain of TCR clone 373781 (TRBV20-1, TRBJ2-2)
CSALSGGAGELFF

SEQ ID NO: 747563 - protein, 16 aa, Homo sapiens
  CDR3 for alpha chain variable domain of TCR clone 373782 (TRAV8-3, TRAJ10)
CAVGPTLTGGGNKLTF

SEQ ID NO: 747564 - protein, 16 aa, Homo sapiens
  CDR3 for beta chain variable domain of TCR clone 373782 (TRBV7-2, TRBJ2-5)
CASSSKWLSGQETQYF

SEQ ID NO: 747565 - protein, 14 aa, Homo sapiens
  CDR3 for alpha chain variable domain of TCR clone 373783 (TRAV1-2, TRAJ8)
CAVREDTGFQKLVF

SEQ ID NO: 747566 - protein, 13 aa, Homo sapiens
  CDR3 for beta chain variable domain of TCR clone 373783 (TRBV12-4, TRBJ1-2)
CVSSSGLTVISTF

SEQ ID NO: 747567 - protein, 15 aa, Homo sapiens
  CDR3 for alpha chain variable domain of TCR clone 373784 (TRAV21, TRAJ45)
CAVNPPGGGADGLTF

SEQ ID NO: 747568 - protein, 12 aa, Homo sapiens
  CDR3 for beta chain variable domain of TCR clone 373784 (TRBV12-4, TRBJ2-7)
CASSLGGYEQYF

SEQ ID NO: 747569 - protein, 13 aa, Homo sapiens
  CDR3 for alpha chain variable domain of TCR clone 373785 (TRAV8-3, TRAJ28)
CAVGAVGSYQLTF

SEQ ID NO: 747570 - protein, 15 aa, Homo sapiens
  CDR3 for beta chain variable domain of TCR clone 373785 (TRBV7-2, TRBJ1-5)
CASSLDRGQDQPQHF

SEQ ID NO: 747571 - protein, 15 aa, Homo sapiens
  CDR3 for alpha chain variable domain of TCR clone 373786 (TRAV8-3, TRAJ15)
CAVGAPNQAGTALVF

SEQ ID NO: 747572 - protein, 14 aa, Homo sapiens
  CDR3 for beta chain variable domain of TCR clone 373786 (TRBV20-1, TRBJ2-1)
CSPNDEASYNEQFF

SEQ ID NO: 747573 - protein, 13 aa, Homo sapiens
  CDR3 for alpha chain variable domain of TCR clone 373787 (TRAV2, TRAJ40)
CAVVTSGTYTYIF

SEQ ID NO: 747574 - protein, 14 aa, Homo sapiens
  CDR3 for beta chain variable domain of TCR clone 373787 (TRBV19, TRBJ2-3)
CASSAPRGTDTQYF

SEQ ID NO: 747575 - protein, 13 aa, Homo sapiens
  CDR3 for alpha chain variable domain of TCR clone 373788 (TRAV20, TRAJ34)
CAVRSYNTDKLIF

SEQ ID NO: 747576 - protein, 12 aa, Homo sapiens
  CDR3 for beta chain variable domain of TCR clone 373788 (TRBV11-3, TRBJ2-1)
CASSPGNNEQFF

SEQ ID NO: 747577 - protein, 13 aa, Homo sapiens
  CDR3 for alpha chain variable domain of TCR clone 373789 (TRAV3, TRAJ27)
CPVRPLGAGKSTF

SEQ ID NO: 747578 - protein, 15 aa, Homo sapiens
  CDR3 for beta chain variable domain of TCR clone 373789 (TRBV11-3, TRBJ2-3)
CASLKDGREGDTQYF

SEQ ID NO: 747579 - protein, 17 aa, Homo sapiens
  CDR3 for alpha chain variable domain of TCR clone 373790 (TRAV8-6, TRAJ58)
CAVSSWVGETSGSRLTF

SEQ ID NO: 747580 - protein, 16 aa, Homo sapiens
  CDR3 for beta chain variable domain of TCR clone 373790 (TRBV11-2, TRBJ2-7)
CASSPTTGGVSYEQYF

SEQ ID NO: 747581 - protein, 14 aa, Homo sapiens
  CDR3 for alpha chain variable domain of TCR clone 373791 (TRAV30, TRAJ26)
CGTEIVSYGQNFVF

SEQ ID NO: 747582 - protein, 15 aa, Homo sapiens
  CDR3 for beta chain variable domain of TCR clone 373791 (TRBV5-1, TRBJ2-7)
CASSLDLTSSYEQYF

SEQ ID NO: 747583 - protein, 12 aa, Homo sapiens
  CDR3 for alpha chain variable domain of TCR clone 373792 (TRAV12-3, TRAJ17)
CAMTLTGNTLTF

SEQ ID NO: 747584 - protein, 14 aa, Homo sapiens
  CDR3 for beta chain variable domain of TCR clone 373792 (TRBV7-2, TRBJ2-7)
CASRSQGAAYEQYF

SEQ ID NO: 747585 - protein, 14 aa, Homo sapiens
  CDR3 for alpha chain variable domain of TCR clone 373793 (TRAV12-3, TRAJ5)
CAMTWDPGRRALTF

SEQ ID NO: 747586 - protein, 14 aa, Homo sapiens
  CDR3 for beta chain variable domain of TCR clone 373793 (TRBV10-2, TRBJ1-5)
CASSSTGRNQPQHF

SEQ ID NO: 747587 - protein, 13 aa, Homo sapiens
  CDR3 for alpha chain variable domain of TCR clone 373794 (TRAV12-3, TRAJ7)
CAMSASGNNRIAC

SEQ ID NO: 747588 - protein, 14 aa, Homo sapiens
  CDR3 for beta chain variable domain of TCR clone 373794 (TRBV13, TRBJ2-5)
CASSLGPRGETQYF

SEQ ID NO: 747589 - protein, 14 aa, Homo sapiens
  CDR3 for alpha chain variable domain of TCR clone 373795 (TRAV17, TRAJ6)
CATDASGGSYIPTF

SEQ ID NO: 747590 - protein, 19 aa, Homo sapiens
  CDR3 for beta chain variable domain of TCR clone 373795 (TRBV4-3, TRBJ2-7)
CASSQEFIGWQVTLYEQYF

SEQ ID NO: 747591 - protein, 13 aa, Homo sapiens
  CDR3 for alpha chain variable domain of TCR clone 373796 (TRAV21, TRAJ57)
CAVTQGGSEKLVF

SEQ ID NO: 747592 - protein, 11 aa, Homo sapiens
  CDR3 for beta chain variable domain of TCR clone 373796 (TRBV11-2, TRBJ2-2)
CASSLPGELFL

SEQ ID NO: 747593 - protein, 15 aa, Homo sapiens
  CDR3 for alpha chain variable domain of TCR clone 373797 (TRAV2, TRAJ24)
CAVEVLTDSWGKYQF

SEQ ID NO: 747594 - protein, 14 aa, Homo sapiens
  CDR3 for beta chain variable domain of TCR clone 373797 (TRBV19, TRBJ2-1)
CASSMGSGRRSSSS

SEQ ID NO: 747595 - protein, 18 aa, Homo sapiens
  CDR3 for alpha chain variable domain of TCR clone 373798 (TRAV13-1, TRAJ52)
CAASKRSADGTSYGKLTF

SEQ ID NO: 747596 - protein, 14 aa, Homo sapiens
  CDR3 for beta chain variable domain of TCR clone 373798 (TRBV12-5, TRBJ2-5)
CASGSRTHQETQYF

SEQ ID NO: 747597 - protein, 13 aa, Homo sapiens
  CDR3 for alpha chain variable domain of TCR clone 373799 (TRAV27, TRAJ45)
CRSSGGGADGLTF

SEQ ID NO: 747598 - protein, 13 aa, Homo sapiens
  CDR3 for beta chain variable domain of TCR clone 373799 (TRBV5-5, TRBJ1-2)
CASSFWRGEDYTF

SEQ ID NO: 747599 - protein, 13 aa, Homo sapiens
  CDR3 for alpha chain variable domain of TCR clone 373800 (TRAV13-2, TRAJ48)
GAEMDFGNEKLAF

SEQ ID NO: 747600 - protein, 15 aa, Homo sapiens
  CDR3 for beta chain variable domain of TCR clone 373800 (TRBV7-9, TRBJ1-6)
CASSSPGRGNSPLHF

SEQ ID NO: 747601 - protein, 16 aa, Homo sapiens
  CDR3 for alpha chain variable domain of TCR clone 373801 (TRAV30, TRAJ24)
CGTEIEDADSWGKFQF

SEQ ID NO: 747602 - protein, 15 aa, Homo sapiens
  CDR3 for beta chain variable domain of TCR clone 373801 (TRBV7-2, TRBJ2-3)
CASSLRGGSTDTQYF

SEQ ID NO: 747603 - protein, 18 aa, Homo sapiens
  CDR3 for alpha chain variable domain of TCR clone 373802 (TRAV29/DV5, TRAJ52)
CAAGFRGAGGTSYGKLTF

SEQ ID NO: 747604 - protein, 14 aa, Homo sapiens
  CDR3 for beta chain variable domain of TCR clone 373802 (TRBV4-1, TRBJ1-6)
CASSPGSDSSPLHF

SEQ ID NO: 747605 - protein, 14 aa, Homo sapiens
  CDR3 for alpha chain variable domain of TCR clone 373803 (TRAV12-2, TRAJ45)
CALPARGGADGLTF

SEQ ID NO: 747606 - protein, 14 aa, Homo sapiens
  CDR3 for beta chain variable domain of TCR clone 373803 (TRBV18, TRBJ1-5)
CASSPGNSKQPQHF

SEQ ID NO: 747607 - protein, 17 aa, Homo sapiens
  CDR3 for alpha chain variable domain of TCR clone 373804 (TRAV8-6, TRAJ8)
CAVKEGIENTGFQKLVF

SEQ ID NO: 747608 - protein, 12 aa, Homo sapiens
  CDR3 for beta chain variable domain of TCR clone 373804 (TRBV19, TRBJ1-4)
CASKDWPGGLCF

SEQ ID NO: 747609 - protein, 12 aa, Homo sapiens
  CDR3 for alpha chain variable domain of TCR clone 373805 (TRAV3, TRAJ43)
CDVRDPNNDMRF

SEQ ID NO: 747610 - protein, 17 aa, Homo sapiens
  CDR3 for beta chain variable domain of TCR clone 373805 (TRBV7-8, TRBJ2-6)
CASSAGTGGAGANVLTF

SEQ ID NO: 747611 - protein, 17 aa, Homo sapiens
  CDR3 for alpha chain variable domain of TCR clone 373806 (TRAV26-1, TRAJ37)
CIVRVVTVSSNTGKLIF

SEQ ID NO: 747612 - protein, 15 aa, Homo sapiens
  CDR3 for beta chain variable domain of TCR clone 373806 (TRBV2, TRBJ2-2)
CASSRETVGTGELFF

SEQ ID NO: 747613 - protein, 14 aa, Homo sapiens
  CDR3 for alpha chain variable domain of TCR clone 373807 (TRAV16, TRAJ48)
CALTPGSGNEKLTF

SEQ ID NO: 747614 - protein, 14 aa, Homo sapiens
  CDR3 for beta chain variable domain of TCR clone 373807 (TRBV7-2, TRBJ2-7)
CASSSISGFSEQYF

SEQ ID NO: 747615 - protein, 12 aa, Homo sapiens
  CDR3 for alpha chain variable domain of TCR clone 373808 (TRAV4, TRAJ26)
CLVGDYGQNFVF

SEQ ID NO: 747616 - protein, 18 aa, Homo sapiens
  CDR3 for beta chain variable domain of TCR clone 373808 (TRBV7-2, TRBJ2-6)
CASSLNPFLGTGANDLTF

SEQ ID NO: 747617 - protein, 15 aa, Homo sapiens
  CDR3 for alpha chain variable domain of TCR clone 373809 (TRAV12-1, TRAJ44)
CVVFVNTGTASKLTF

SEQ ID NO: 747618 - protein, 16 aa, Homo sapiens
  CDR3 for beta chain variable domain of TCR clone 373809 (TRBV20-1, TRBJ2-5)
CIPGGTSGGYMETQYF

SEQ ID NO: 747619 - protein, 17 aa, Homo sapiens
  CDR3 for alpha chain variable domain of TCR clone 373810 (TRAV3, TRAJ6)
CAVRDGPRAGGSYIPTF

SEQ ID NO: 747620 - protein, 14 aa, Homo sapiens
  CDR3 for beta chain variable domain of TCR clone 373810 (TRBV20-1, TRBJ2-7)
CSAKTGTGGYEQYF

SEQ ID NO: 747621 - protein, 12 aa, Homo sapiens
  CDR3 for alpha chain variable domain of TCR clone 373811 (TRAV8-3, TRAJ26)
CAGDNYGQNFVF

SEQ ID NO: 747622 - protein, 15 aa, Homo sapiens
  CDR3 for beta chain variable domain of TCR clone 373811 (TRBV9, TRBJ2-1)
CASSLAGSSYNEQFY

SEQ ID NO: 747623 - protein, 13 aa, Homo sapiens
  CDR3 for alpha chain variable domain of TCR clone 373812 (TRAV3, TRAJ27)
CAVRPLGAGKSTV

SEQ ID NO: 747624 - protein, 13 aa, Homo sapiens
  CDR3 for beta chain variable domain of TCR clone 373812 (TRBV7-9, TRBJ2-3)
CASSPGSTDTQYG

SEQ ID NO: 747625 - protein, 13 aa, Homo sapiens
  CDR3 for alpha chain variable domain of TCR clone 373813 (TRAV8-3, TRAJ21)
CAVGAYNFNKFYF

SEQ ID NO: 747626 - protein, 13 aa, Homo sapiens
  CDR3 for beta chain variable domain of TCR clone 373813 (TRBV12-4, TRBJ1-1)
CASSPGTGFEAFF

SEQ ID NO: 747627 - protein, 14 aa, Homo sapiens
  CDR3 for alpha chain variable domain of TCR clone 373814 (TRAV12-1, TRAJ13)
CVVIDSGGYQKVTF

SEQ ID NO: 747628 - protein, 12 aa, Homo sapiens
  CDR3 for beta chain variable domain of TCR clone 373814 (TRBV29-1, TRBJ2-3)
CRVTGGADTQYF

SEQ ID NO: 747629 - protein, 14 aa, Homo sapiens
  CDR3 for alpha chain variable domain of TCR clone 373815 (TRAV8-3, TRAJ15)
CAVGRHQAGTALIF

SEQ ID NO: 747630 - protein, 15 aa, Homo sapiens
  CDR3 for beta chain variable domain of TCR clone 373815 (TRBV27, TRBJ2-1)
CASSNGEGSSNEQFF

SEQ ID NO: 747631 - protein, 12 aa, Homo sapiens
  CDR3 for alpha chain variable domain of TCR clone 373816 (TRAV12-3, TRAJ40)
CAMSSGTYKYIF

SEQ ID NO: 747632 - protein, 15 aa, Homo sapiens
  CDR3 for beta chain variable domain of TCR clone 373816 (TRBV7-3, TRBJ2-2)
CASSETEQGTGELFF

SEQ ID NO: 747633 - protein, 15 aa, Homo sapiens
  CDR3 for alpha chain variable domain of TCR clone 373817 (TRAV26-1, TRAJ22)
CIVRVSFWFCKATDL

SEQ ID NO: 747634 - protein, 15 aa, Homo sapiens
  CDR3 for beta chain variable domain of TCR clone 373817 (TRBV28, TRBJ2-3)
CASSPDRQGANTQYF

SEQ ID NO: 747635 - protein, 13 aa, Homo sapiens
  CDR3 for alpha chain variable domain of TCR clone 373818 (TRAV1-2, TRAJ9)
CAALNTGGFKTIF

SEQ ID NO: 747636 - protein, 15 aa, Homo sapiens
  CDR3 for beta chain variable domain of TCR clone 373818 (TRBV29-1, TRBJ2-1)
CSVPGTSGGSGRWFF

SEQ ID NO: 747637 - protein, 15 aa, Homo sapiens
  CDR3 for alpha chain variable domain of TCR clone 373819 (TRAV17, TRAJ57)
CATGPSQGGSEKLVF

SEQ ID NO: 747638 - protein, 13 aa, Homo sapiens
  CDR3 for beta chain variable domain of TCR clone 373819 (TRBV27, TRBJ1-1)
CASSLSIGAEAFF

SEQ ID NO: 747639 - protein, 13 aa, Homo sapiens
  CDR3 for alpha chain variable domain of TCR clone 373820 (TRAV20, TRAJ31)
CAVQAIGGARLMF

SEQ ID NO: 747640 - protein, 13 aa, Homo sapiens
  CDR3 for beta chain variable domain of TCR clone 373820 (TRBV20-1, TRBJ1-1)
CSARGGGNTEAFF

SEQ ID NO: 747641 - protein, 17 aa, Homo sapiens
  CDR3 for alpha chain variable domain of TCR clone 373821 (TRAV14/DV4, TRAJ42)
CAMRGKFYGGSQGNLIF

SEQ ID NO: 747642 - protein, 12 aa, Homo sapiens
  CDR3 for beta chain variable domain of TCR clone 373821 (TRBV11-2, TRBJ2-2)
CASSLGGGELFF

SEQ ID NO: 747643 - protein, 14 aa, Homo sapiens
  CDR3 for alpha chain variable domain of TCR clone 373822 (TRAV8-2, TRAJ23)
CVVSDDNQGGKLIF

SEQ ID NO: 747644 - protein, 16 aa, Homo sapiens
  CDR3 for beta chain variable domain of TCR clone 373822 (TRBV6-1, TRBJ2-5)
CASSETLDRGAETQYF

SEQ ID NO: 747645 - protein, 12 aa, Homo sapiens
  CDR3 for alpha chain variable domain of TCR clone 373823 (TRAV3, TRAJ39)
CAVIEGSTMLTF

SEQ ID NO: 747646 - protein, 14 aa, Homo sapiens
  CDR3 for beta chain variable domain of TCR clone 373823 (TRBV7-8, TRBJ2-3)
CASSFPDGQDTQYF

SEQ ID NO: 747647 - protein, 14 aa, Homo sapiens
  CDR3 for alpha chain variable domain of TCR clone 373824 (TRAV23/DV6, TRAJ49)
CAASTPNTGNQLYF

SEQ ID NO: 747648 - protein, 14 aa, Homo sapiens
  CDR3 for beta chain variable domain of TCR clone 373824 (TRBV18, TRBJ2-3)
CASSETSASDTQYF

SEQ ID NO: 747649 - protein, 14 aa, Homo sapiens
  CDR3 for alpha chain variable domain of TCR clone 373825 (TRAV17, TRAJ32)
CATDPGGATNKLIF

SEQ ID NO: 747650 - protein, 16 aa, Homo sapiens
  CDR3 for beta chain variable domain of TCR clone 373825 (TRBV5-3, TRBJ2-2)
CARSFGTGTNTGELFF

SEQ ID NO: 747651 - protein, 12 aa, Homo sapiens
  CDR3 for alpha chain variable domain of TCR clone 373826 (TRAV8-3, TRAJ20)
CAVGSNDYKLSF

SEQ ID NO: 747652 - protein, 15 aa, Homo sapiens
  CDR3 for beta chain variable domain of TCR clone 373826 (TRBV11-2, TRBJ2-1)
CASSLGTSGLNEQFF

SEQ ID NO: 747653 - protein, 17 aa, Homo sapiens
  CDR3 for alpha chain variable domain of TCR clone 373827 (TRAV3, TRAJ6)
CAVRDGPRAGGSYIPTF

SEQ ID NO: 747654 - protein, 15 aa, Homo sapiens
  CDR3 for beta chain variable domain of TCR clone 373827 (TRBV10-3, TRBJ2-7)
CAISTFSGVKGEQYF

SEQ ID NO: 747655 - protein, 14 aa, Homo sapiens
  CDR3 for alpha chain variable domain of TCR clone 373828 (TRAV12-2, TRAJ17)
CAVLFKAAGNKLTF

SEQ ID NO: 747656 - protein, 15 aa, Homo sapiens
  CDR3 for beta chain variable domain of TCR clone 373828 (TRBV18, TRBJ2-1)
CASSPPSASYNEQFF

SEQ ID NO: 747657 - protein, 14 aa, Homo sapiens
  CDR3 for alpha chain variable domain of TCR clone 373829 (TRAV21, TRAJ45)
CAVSSGGGADGLNV

SEQ ID NO: 747658 - protein, 15 aa, Homo sapiens
  CDR3 for beta chain variable domain of TCR clone 373829 (TRBV6-1, TRBJ2-4)
CASSEAVWTIDIQYF

SEQ ID NO: 747659 - protein, 13 aa, Homo sapiens
  CDR3 for alpha chain variable domain of TCR clone 373830 (TRAV38-1, TRAJ42)
CARWGGSQGNLIF

SEQ ID NO: 747660 - protein, 14 aa, Homo sapiens
  CDR3 for beta chain variable domain of TCR clone 373830 (TRBV7-8, TRBJ2-3)
CASSLEAGTDTQYF

SEQ ID NO: 747661 - protein, 14 aa, Homo sapiens
  CDR3 for alpha chain variable domain of TCR clone 373831 (TRAV8-3, TRAJ35)
CAVVPQGFGNVLPC

SEQ ID NO: 747662 - protein, 15 aa, Homo sapiens
  CDR3 for beta chain variable domain of TCR clone 373831 (TRBV9, TRBJ1-6)
CASSVAGTGDSPLHF

SEQ ID NO: 747663 - protein, 16 aa, Homo sapiens
  CDR3 for alpha chain variable domain of TCR clone 373832 (TRAV30, TRAJ24)
CGTEIVDADSWGKFQF

SEQ ID NO: 747664 - protein, 12 aa, Homo sapiens
  CDR3 for beta chain variable domain of TCR clone 373832 (TRBV20-1, TRBJ2-7)
CSAALKMGEQYF

SEQ ID NO: 747665 - protein, 17 aa, Homo sapiens
  CDR3 for alpha chain variable domain of TCR clone 373833 (TRAV3, TRAJ42)
CAVRDRDYGGSHGNLIF

SEQ ID NO: 747666 - protein, 14 aa, Homo sapiens
  CDR3 for beta chain variable domain of TCR clone 373833 (TRBV12-5, TRBJ2-5)
CASGSRTHQETQYF

SEQ ID NO: 747667 - protein, 14 aa, Homo sapiens
  CDR3 for alpha chain variable domain of TCR clone 373834 (TRAV12-3, TRAJ57)
CAMSAWGGSEKLVF

SEQ ID NO: 747668 - protein, 13 aa, Homo sapiens
  CDR3 for beta chain variable domain of TCR clone 373834 (TRBV18, TRBJ2-5)
CQLTWGVQETQYF

SEQ ID NO: 747669 - protein, 11 aa, Homo sapiens
  CDR3 for alpha chain variable domain of TCR clone 373835 (TRAV12-1, TRAJ15)
CVVNAGTALIF

SEQ ID NO: 747670 - protein, 16 aa, Homo sapiens
  CDR3 for beta chain variable domain of TCR clone 373835 (TRBV12-5, TRBJ2-5)
CASGPRTSGNQETQYF

SEQ ID NO: 747671 - protein, 13 aa, Homo sapiens
  CDR3 for alpha chain variable domain of TCR clone 373836 (TRAV13-1, TRAJ21)
CAASIYNFNKFYF

SEQ ID NO: 747672 - protein, 12 aa, Homo sapiens
  CDR3 for beta chain variable domain of TCR clone 373836 (TRBV19, TRBJ1-5)
CASSIAQQPQHC

SEQ ID NO: 747673 - protein, 15 aa, Homo sapiens
  CDR3 for alpha chain variable domain of TCR clone 373837 (TRAV2, TRAJ9)
CAVEDRGTGGVKIIF

SEQ ID NO: 747674 - protein, 16 aa, Homo sapiens
  CDR3 for beta chain variable domain of TCR clone 373837 (TRBV24-1, TRBJ2-3)
CATSDPGTGATDTQYF

SEQ ID NO: 747675 - protein, 17 aa, Homo sapiens
  CDR3 for alpha chain variable domain of TCR clone 373838 (TRAV3, TRAJ6)
CAVRDGPRAGGSYIPRC

SEQ ID NO: 747676 - protein, 13 aa, Homo sapiens
  CDR3 for beta chain variable domain of TCR clone 373838 (TRBV27, TRBJ2-1)
CASRTLGVGEQFF

SEQ ID NO: 747677 - protein, 13 aa, Homo sapiens
  CDR3 for alpha chain variable domain of TCR clone 373839 (TRAV27, TRAJ39)
CAGPNNAGNMLTF

SEQ ID NO: 747678 - protein, 14 aa, Homo sapiens
  CDR3 for beta chain variable domain of TCR clone 373839 (TRBV19, TRBJ2-1)
CASPTFVLSGEQFF

SEQ ID NO: 747679 - protein, 11 aa, Homo sapiens
  CDR3 for alpha chain variable domain of TCR clone 373840 (TRAV3, TRAJ21)
CPVGNFYKFHF

SEQ ID NO: 747680 - protein, 16 aa, Homo sapiens
  CDR3 for beta chain variable domain of TCR clone 373840 (TRBV19, TRBJ2-1)
CASSKAGPSSYNEQFF

SEQ ID NO: 747681 - protein, 13 aa, Homo sapiens
  CDR3 for alpha chain variable domain of TCR clone 373841 (TRAV23/DV6, TRAJ12)
CAPRVDSSYKLIF

SEQ ID NO: 747682 - protein, 14 aa, Homo sapiens
  CDR3 for beta chain variable domain of TCR clone 373841 (TRBV13, TRBJ2-5)
CASSLVRVGETQYF

SEQ ID NO: 747683 - protein, 14 aa, Homo sapiens
  CDR3 for alpha chain variable domain of TCR clone 373842 (TRAV3, TRAJ34)
CAVRDLNNTDKPIF

SEQ ID NO: 747684 - protein, 13 aa, Homo sapiens
  CDR3 for beta chain variable domain of TCR clone 373842 (TRBV20-1, TRBJ1-1)
CSARGGGNTEAFF

SEQ ID NO: 747685 - protein, 13 aa, Homo sapiens
  CDR3 for alpha chain variable domain of TCR clone 373843 (TRAV3, TRAJ21)
CAVREPDFNKFYF

SEQ ID NO: 747686 - protein, 14 aa, Homo sapiens
  CDR3 for beta chain variable domain of TCR clone 373843 (TRBV4-2, TRBJ2-1)
CTSGLDRAYNEQFF

SEQ ID NO: 747687 - protein, 12 aa, Homo sapiens
  CDR3 for alpha chain variable domain of TCR clone 373844 (TRAV29/DV5, TRAJ49)
CAALNTGNQFYF

SEQ ID NO: 747688 - protein, 14 aa, Homo sapiens
  CDR3 for beta chain variable domain of TCR clone 373844 (TRBV2, TRBJ2-2)
CDSSEWTPTGELFF

SEQ ID NO: 747689 - protein, 16 aa, Homo sapiens
  CDR3 for alpha chain variable domain of TCR clone 373845 (TRAV20, TRAJ38)
CAVQASNAGNNRKPIW

SEQ ID NO: 747690 - protein, 16 aa, Homo sapiens
  CDR3 for beta chain variable domain of TCR clone 373845 (TRBV7-8, TRBJ2-6)
CASRVGVSSGANVLTF

SEQ ID NO: 747691 - protein, 15 aa, Homo sapiens
  CDR3 for alpha chain variable domain of TCR clone 373846 (TRAV26-1, TRAJ44)
CIVRANTGTASKLTF

SEQ ID NO: 747692 - protein, 18 aa, Homo sapiens
  CDR3 for beta chain variable domain of TCR clone 373846 (TRBV7-9, TRBJ2-7)
CASSLTTSGSSTWYEQYF

SEQ ID NO: 747693 - protein, 11 aa, Homo sapiens
  CDR3 for alpha chain variable domain of TCR clone 373847 (TRAV35, TRAJ30)
CAGLRDDKIIL

SEQ ID NO: 747694 - protein, 15 aa, Homo sapiens
  CDR3 for beta chain variable domain of TCR clone 373847 (TRBV2, TRBJ1-3)
CASSISPRSGNTIYF

SEQ ID NO: 747695 - protein, 14 aa, Homo sapiens
  CDR3 for alpha chain variable domain of TCR clone 373848 (TRAV26-1, TRAJ48)
CIVRVGFGNEKLTF

SEQ ID NO: 747696 - protein, 13 aa, Homo sapiens
  CDR3 for beta chain variable domain of TCR clone 373848 (TRBV11-3, TRBJ2-3)
CARSHDTKDTQYF

SEQ ID NO: 747697 - protein, 16 aa, Homo sapiens
  CDR3 for alpha chain variable domain of TCR clone 373849 (TRAV16, TRAJ37)
CSKWPDGSSNTGKLIF

SEQ ID NO: 747698 - protein, 13 aa, Homo sapiens
  CDR3 for beta chain variable domain of TCR clone 373849 (TRBV7-2, TRBJ2-2)
CASSLAVTGELFL

SEQ ID NO: 747699 - protein, 14 aa, Homo sapiens
  CDR3 for alpha chain variable domain of TCR clone 373850 (TRAV8-4, TRAJ39)
CAVSLNNAGNMLTF

SEQ ID NO: 747700 - protein, 14 aa, Homo sapiens
  CDR3 for beta chain variable domain of TCR clone 373850 (TRBV7-9, TRBJ2-5)
CASSLVGGEETQYF

SEQ ID NO: 747701 - protein, 14 aa, Homo sapiens
  CDR3 for alpha chain variable domain of TCR clone 373851 (TRAV12-1, TRAJ24)
CVVRSTDSWGKFQF

SEQ ID NO: 747702 - protein, 13 aa, Homo sapiens
  CDR3 for beta chain variable domain of TCR clone 373851 (TRBV2, TRBJ2-3)
CASILAGGQGQCF

SEQ ID NO: 747703 - protein, 16 aa, Homo sapiens
  CDR3 for alpha chain variable domain of TCR clone 373852 (TRAV3, TRAJ37)
CAVRGRGSGNTGKLIF

SEQ ID NO: 747704 - protein, 13 aa, Homo sapiens
  CDR3 for beta chain variable domain of TCR clone 373852 (TRBV14, TRBJ2-7)
CASRQDRRGEQYF

SEQ ID NO: 747705 - protein, 14 aa, Homo sapiens
  CDR3 for alpha chain variable domain of TCR clone 373853 (TRAV29/DV5, TRAJ45)
CAASFRGCADGLTF

SEQ ID NO: 747706 - protein, 11 aa, Homo sapiens
  CDR3 for beta chain variable domain of TCR clone 373853 (TRBV11-2, TRBJ2-2)
CASSLPGALFF

SEQ ID NO: 747707 - protein, 18 aa, Homo sapiens
  CDR3 for alpha chain variable domain of TCR clone 373854 (TRAV12-3, TRAJ52)
CAMSVGGAGGTSYGKLTF

SEQ ID NO: 747708 - protein, 10 aa, Homo sapiens
  CDR3 for beta chain variable domain of TCR clone 373854 (TRBV19, TRBJ1-1)
CASRQVEAFF

SEQ ID NO: 747709 - protein, 13 aa, Homo sapiens
  CDR3 for alpha chain variable domain of TCR clone 373855 (TRAV8-6, TRAJ13)
CAWRDGGYQKVTF

SEQ ID NO: 747710 - protein, 15 aa, Homo sapiens
  CDR3 for beta chain variable domain of TCR clone 373855 (TRBV7-9, TRBJ2-2)
CASRPEGTSTGELFF

SEQ ID NO: 747711 - protein, 15 aa, Homo sapiens
  CDR3 for alpha chain variable domain of TCR clone 373856 (TRAV26-1, TRAJ29)
CIVRVDGSGNTPLVF

SEQ ID NO: 747712 - protein, 14 aa, Homo sapiens
  CDR3 for beta chain variable domain of TCR clone 373856 (TRBV25-1, TRBJ1-1)
CASTHLGGNTEAFF

SEQ ID NO: 747713 - protein, 14 aa, Homo sapiens
  CDR3 for alpha chain variable domain of TCR clone 373857 (TRAV12-3, TRAJ33)
CAMSVPGSNYQLIC

SEQ ID NO: 747714 - protein, 12 aa, Homo sapiens
  CDR3 for beta chain variable domain of TCR clone 373857 (TRBV7-8, TRBJ2-7)
CASSLGDREQYF

SEQ ID NO: 747715 - protein, 20 aa, Homo sapiens
  CDR3 for alpha chain variable domain of TCR clone 373858 (TRAV1-1, TRAJ4)
CLLLLRCEVFLSGGYNKLIF

SEQ ID NO: 747716 - protein, 16 aa, Homo sapiens
  CDR3 for beta chain variable domain of TCR clone 373858 (TRBV28, TRBJ1-4)
CASSSPYRGRSDKLFF

SEQ ID NO: 747717 - protein, 14 aa, Homo sapiens
  CDR3 for alpha chain variable domain of TCR clone 373859 (TRAV12-3, TRAJ15)
CAMFPPQAGTALIF

SEQ ID NO: 747718 - protein, 14 aa, Homo sapiens
  CDR3 for beta chain variable domain of TCR clone 373859 (TRBV20-1, TRBJ2-2)
CSARKRLTTGELFF

SEQ ID NO: 747719 - protein, 13 aa, Homo sapiens
  CDR3 for alpha chain variable domain of TCR clone 373860 (TRAV12-2, TRAJ4)
CAVRSGGYNKLIV

SEQ ID NO: 747720 - protein, 15 aa, Homo sapiens
  CDR3 for beta chain variable domain of TCR clone 373860 (TRBV10-3, TRBJ2-1)
CAISDVQDRAYEQFF

SEQ ID NO: 747721 - protein, 15 aa, Homo sapiens
  CDR3 for alpha chain variable domain of TCR clone 373861 (TRAV4, TRAJ39)
CLVGPNNNAGNMLNF

SEQ ID NO: 747722 - protein, 14 aa, Homo sapiens
  CDR3 for beta chain variable domain of TCR clone 373861 (TRBV19, TRBJ2-1)
CASPTFVLSGEQFF

SEQ ID NO: 747723 - protein, 14 aa, Homo sapiens
  CDR3 for alpha chain variable domain of TCR clone 373862 (TRAV1-2, TRAJ16)
CAVNRFSDCQKLLF

SEQ ID NO: 747724 - protein, 14 aa, Homo sapiens
  CDR3 for beta chain variable domain of TCR clone 373862 (TRBV19, TRBJ1-1)
CATTSGTRGTEAFF

SEQ ID NO: 747725 - protein, 15 aa, Homo sapiens
  CDR3 for alpha chain variable domain of TCR clone 373863 (TRAV17, TRAJ16)
CATALRFSDGQKLLF

SEQ ID NO: 747726 - protein, 16 aa, Homo sapiens
  CDR3 for beta chain variable domain of TCR clone 373863 (TRBV11-2, TRBJ1-2)
CASSPSGREANYGYTF

SEQ ID NO: 747727 - protein, 18 aa, Homo sapiens
  CDR3 for alpha chain variable domain of TCR clone 373864 (TRAV26-1, TRAJ38)
CCVLLHRRYAGNNRKLIW

SEQ ID NO: 747728 - protein, 15 aa, Homo sapiens
  CDR3 for beta chain variable domain of TCR clone 373864 (TRBV9, TRBJ2-1)
CASSLAGSSYNEQFF

SEQ ID NO: 747729 - protein, 14 aa, Homo sapiens
  CDR3 for alpha chain variable domain of TCR clone 373865 (TRAV17, TRAJ58)
CATDGETSGSRLTL

SEQ ID NO: 747730 - protein, 15 aa, Homo sapiens
  CDR3 for beta chain variable domain of TCR clone 373865 (TRBV6-3, TRBJ2-7)
CASSSPGTVFYEQYF

SEQ ID NO: 747731 - protein, 15 aa, Homo sapiens
  CDR3 for alpha chain variable domain of TCR clone 373866 (TRAV2, TRAJ11)
CAVGGRHSGYSTLTF

SEQ ID NO: 747732 - protein, 14 aa, Homo sapiens
  CDR3 for beta chain variable domain of TCR clone 373866 (TRBV4-1, TRBJ2-2)
CASSQAVNTGELFF

SEQ ID NO: 747733 - protein, 16 aa, Homo sapiens
  CDR3 for alpha chain variable domain of TCR clone 373867 (TRAV30, TRAJ24)
CGTEIVDADSWGKFQF

SEQ ID NO: 747734 - protein, 18 aa, Homo sapiens
  CDR3 for beta chain variable domain of TCR clone 373867 (TRBV7-9, TRBJ2-7)
CASSLTTGGSRTGYEQYF

SEQ ID NO: 747735 - protein, 14 aa, Homo sapiens
  CDR3 for alpha chain variable domain of TCR clone 373868 (TRAV25, TRAJ22)
CAIRSSGSARQLTF

SEQ ID NO: 747736 - protein, 16 aa, Homo sapiens
  CDR3 for beta chain variable domain of TCR clone 373868 (TRBV4-2, TRBJ1-1)
CASSPSPGRAAPEAFF

SEQ ID NO: 747737 - protein, 13 aa, Homo sapiens
  CDR3 for alpha chain variable domain of TCR clone 373869 (TRAV13-1, TRAJ11)
CAAVLAGYSTLTF

SEQ ID NO: 747738 - protein, 17 aa, Homo sapiens
  CDR3 for beta chain variable domain of TCR clone 373869 (TRBV25-1, TRBJ2-7)
CASSDASVVFSSYEQYF

SEQ ID NO: 747739 - protein, 15 aa, Homo sapiens
  CDR3 for alpha chain variable domain of TCR clone 373870 (TRAV2, TRAJ22)
CAVPSRGGSARQLTF

SEQ ID NO: 747740 - protein, 13 aa, Homo sapiens
  CDR3 for beta chain variable domain of TCR clone 373870 (TRBV7-3, TRBJ1-1)
CASSQDWGAEAFF

SEQ ID NO: 747741 - protein, 15 aa, Homo sapiens
  CDR3 for alpha chain variable domain of TCR clone 373871 (TRAV12-3, TRAJ6)
CAMSATTGGGYIPTF

SEQ ID NO: 747742 - protein, 16 aa, Homo sapiens
  CDR3 for beta chain variable domain of TCR clone 373871 (TRBV20-1, TRBJ1-2)
CSASMGQGVANYGYAF

SEQ ID NO: 747743 - protein, 14 aa, Homo sapiens
  CDR3 for alpha chain variable domain of TCR clone 373872 (TRAV1-2, TRAJ16)
RAVNRFSDGQKLLF

SEQ ID NO: 747744 - protein, 14 aa, Homo sapiens
  CDR3 for beta chain variable domain of TCR clone 373872 (TRBV11-2, TRBJ1-1)
CASSTQRGRTEAFF

SEQ ID NO: 747745 - protein, 13 aa, Homo sapiens
  CDR3 for alpha chain variable domain of TCR clone 373873 (TRAV20, TRAJ31)
CAVQAWNNARLMF

SEQ ID NO: 747746 - protein, 18 aa, Homo sapiens
  CDR3 for beta chain variable domain of TCR clone 373873 (TRBV6-6, TRBJ2-1)
CTSVPAVGGEGPYNEQFF

SEQ ID NO: 747747 - protein, 13 aa, Homo sapiens
  CDR3 for alpha chain variable domain of TCR clone 373874 (TRAV21, TRAJ15)
CAVANQAGTALIF

SEQ ID NO: 747748 - protein, 14 aa, Homo sapiens
  CDR3 for beta chain variable domain of TCR clone 373874 (TRBV27, TRBJ2-2)
CASSLWAATGELFF

SEQ ID NO: 747749 - protein, 15 aa, Homo sapiens
  CDR3 for alpha chain variable domain of TCR clone 373875 (TRAV38-2/DV8, TRAJ26)
CAYRSRDNYGQNFVF

SEQ ID NO: 747750 - protein, 14 aa, Homo sapiens
  CDR3 for beta chain variable domain of TCR clone 373875 (TRBV29-1, TRBJ1-3)
CSVAYRVVGNTIYF

SEQ ID NO: 747751 - protein, 11 aa, Homo sapiens
  CDR3 for alpha chain variable domain of TCR clone 373876 (TRAV3, TRAJ21)
CAVGNFSKFYF

SEQ ID NO: 747752 - protein, 15 aa, Homo sapiens
  CDR3 for beta chain variable domain of TCR clone 373876 (TRBV27, TRBJ2-1)
CASSNGGGSSNEQFF

SEQ ID NO: 747753 - protein, 18 aa, Homo sapiens
  CDR3 for alpha chain variable domain of TCR clone 373877 (TRAV21, TRAJ52)
CAVRPSPAGGTSYGKLTF

SEQ ID NO: 747754 - protein, 15 aa, Homo sapiens
  CDR3 for beta chain variable domain of TCR clone 373877 (TRBV19, TRBJ2-1)
CASSYSGSPYNEQFF

SEQ ID NO: 747755 - protein, 15 aa, Homo sapiens
  CDR3 for alpha chain variable domain of TCR clone 373878 (TRAV26-2, TRAJ39)
CSLRGNNNAGNMLTF

SEQ ID NO: 747756 - protein, 15 aa, Homo sapiens
  CDR3 for beta chain variable domain of TCR clone 373878 (TRBV5-4, TRBJ1-1)
CASSSLGGANTEAFF

SEQ ID NO: 747757 - protein, 18 aa, Homo sapiens
  CDR3 for alpha chain variable domain of TCR clone 373879 (TRAV17, TRAJ45)
CATSLDLYSGGGAYGLTF

SEQ ID NO: 747758 - protein, 13 aa, Homo sapiens
  CDR3 for beta chain variable domain of TCR clone 373879 (TRBV10-3, TRBJ2-7)
CASKLAVNYEQYL

SEQ ID NO: 747759 - protein, 14 aa, Homo sapiens
  CDR3 for alpha chain variable domain of TCR clone 373880 (TRAV38-1, TRAJ40)
CALRPTSGTYKYIF

SEQ ID NO: 747760 - protein, 14 aa, Homo sapiens
  CDR3 for beta chain variable domain of TCR clone 373880 (TRBV25-1, TRBJ1-1)
CARTHLGGNTGAFF

SEQ ID NO: 747761 - protein, 14 aa, Homo sapiens
  CDR3 for alpha chain variable domain of TCR clone 373881 (TRAV12-1, TRAJ17)
CVVNYKAAGNKLTL

SEQ ID NO: 747762 - protein, 16 aa, Homo sapiens
  CDR3 for beta chain variable domain of TCR clone 373881 (TRBV7-2, TRBJ1-6)
CASSSFESSYNSPLHF

SEQ ID NO: 747763 - protein, 11 aa, Homo sapiens
  CDR3 for alpha chain variable domain of TCR clone 373882 (TRAV4, TRAJ20)
CLVGDKVTTTS

SEQ ID NO: 747764 - protein, 15 aa, Homo sapiens
  CDR3 for beta chain variable domain of TCR clone 373882 (TRBV4-1, TRBJ2-5)
CASSQWDLYQETQYF

SEQ ID NO: 747765 - protein, 14 aa, Homo sapiens
  CDR3 for alpha chain variable domain of TCR clone 373883 (TRAV26-1, TRAJ45)
CIEVTGGGADGLTF

SEQ ID NO: 747766 - protein, 16 aa, Homo sapiens
  CDR3 for beta chain variable domain of TCR clone 373883 (TRBV4-1, TRBJ1-2)
CASSQEGSSGIYGYTF

SEQ ID NO: 747767 - protein, 14 aa, Homo sapiens
  CDR3 for alpha chain variable domain of TCR clone 373884 (TRAV8-1, TRAJ22)
CAAPSSGSARQLTF

SEQ ID NO: 747768 - protein, 13 aa, Homo sapiens
  CDR3 for beta chain variable domain of TCR clone 373884 (TRBV3-1, TRBJ1-1)
CASSPGVITEAFF

SEQ ID NO: 747769 - protein, 14 aa, Homo sapiens
  CDR3 for alpha chain variable domain of TCR clone 373885 (TRAV1-2, TRAJ16)
CAVNRFSDGQKLLF

SEQ ID NO: 747770 - protein, 14 aa, Homo sapiens
  CDR3 for beta chain variable domain of TCR clone 373885 (TRBV4-1, TRBJ1-1)
CASSPPGVNTEAFF

SEQ ID NO: 747771 - protein, 12 aa, Homo sapiens
  CDR3 for alpha chain variable domain of TCR clone 373886 (TRAV9-2, TRAJ5)
CVVDTGRRELTF

SEQ ID NO: 747772 - protein, 14 aa, Homo sapiens
  CDR3 for beta chain variable domain of TCR clone 373886 (TRBV5-1, TRBJ1-1)
CASSSTGEDTEAFF

SEQ ID NO: 747773 - protein, 14 aa, Homo sapiens
  CDR3 for alpha chain variable domain of TCR clone 373887 (TRAV13-1, TRAJ3)
CSKGGYSSASKIIF

SEQ ID NO: 747774 - protein, 15 aa, Homo sapiens
  CDR3 for beta chain variable domain of TCR clone 373887 (TRBV20-1, TRBJ2-1)
CSASSAGSSYNEQFF

SEQ ID NO: 747775 - protein, 14 aa, Homo sapiens
  CDR3 for alpha chain variable domain of TCR clone 373888 (TRAV23/DV6, TRAJ40)
CAARKNSGTYKYIF

SEQ ID NO: 747776 - protein, 17 aa, Homo sapiens
  CDR3 for beta chain variable domain of TCR clone 373888 (TRBV6-5, TRBJ2-3)
CASSYTTGTGRGDTQYF

SEQ ID NO: 747777 - protein, 21 aa, Homo sapiens
  CDR3 for alpha chain variable domain of TCR clone 373889 (TRAV1-2, TRAJ18)
CAVRGEAQPWGGYTLEEELSC

SEQ ID NO: 747778 - protein, 13 aa, Homo sapiens
  CDR3 for beta chain variable domain of TCR clone 373889 (TRBV20-1, TRBJ1-1)
CSARVGGNTETFF

SEQ ID NO: 747779 - protein, 14 aa, Homo sapiens
  CDR3 for alpha chain variable domain of TCR clone 373890 (TRAV12-1, TRAJ12)
CVVTRMDSSYKLIF

SEQ ID NO: 747780 - protein, 15 aa, Homo sapiens
  CDR3 for beta chain variable domain of TCR clone 373890 (TRBV24-1, TRBJ2-1)
CATSGSGGFYNEQFF

SEQ ID NO: 747781 - protein, 15 aa, Homo sapiens
  CDR3 for alpha chain variable domain of TCR clone 373891 (TRAV13-1, TRAJ44)
CAASSGGGTASQLTF

SEQ ID NO: 747782 - protein, 18 aa, Homo sapiens
  CDR3 for beta chain variable domain of TCR clone 373891 (TRBV4-1, TRBJ2-7)
CASSQDTGAGSGLNEQYF

SEQ ID NO: 747783 - protein, 14 aa, Homo sapiens
  CDR3 for alpha chain variable domain of TCR clone 373892 (TRAV12-3, TRAJ10)
SHLPLTGGGNKLTF

SEQ ID NO: 747784 - protein, 14 aa, Homo sapiens
  CDR3 for beta chain variable domain of TCR clone 373892 (TRBV4-2, TRBJ2-1)
CASSLDRAYNEQFF

SEQ ID NO: 747785 - protein, 12 aa, Homo sapiens
  CDR3 for alpha chain variable domain of TCR clone 373893 (TRAV1-1, TRAJ9)
CAVDTGGFITIF

SEQ ID NO: 747786 - protein, 14 aa, Homo sapiens
  CDR3 for beta chain variable domain of TCR clone 373893 (TRBV7-8, TRBJ2-5)
CASSATGGQETQYF

SEQ ID NO: 747787 - protein, 15 aa, Homo sapiens
  CDR3 for alpha chain variable domain of TCR clone 373894 (TRAV26-1, TRAJ40)
CIVRVTTSGTYKYIF

SEQ ID NO: 747788 - protein, 12 aa, Homo sapiens
  CDR3 for beta chain variable domain of TCR clone 373894 (TRBV7-9, TRBJ1-4)
CPSSTDREKLFF

SEQ ID NO: 747789 - protein, 13 aa, Homo sapiens
  CDR3 for alpha chain variable domain of TCR clone 373895 (TRAV21, TRAJ11)
CAVPNSGYSTLTS

SEQ ID NO: 747790 - protein, 13 aa, Homo sapiens
  CDR3 for beta chain variable domain of TCR clone 373895 (TRBV3-1, TRBJ2-7)
CASSLRDGYGQYF

SEQ ID NO: 747791 - protein, 16 aa, Homo sapiens
  CDR3 for alpha chain variable domain of TCR clone 373896 (TRAV3, TRAJ37)
CAVRPHGSGNTGKLIF

SEQ ID NO: 747792 - protein, 16 aa, Homo sapiens
  CDR3 for beta chain variable domain of TCR clone 373896 (TRBV20-1, TRBJ1-4)
CSAPGQGLLTNERLFF

SEQ ID NO: 747793 - protein, 15 aa, Homo sapiens
  CDR3 for alpha chain variable domain of TCR clone 373897 (TRAV30, TRAJ53)
CGTEIGGGSNYKLTF

SEQ ID NO: 747794 - protein, 12 aa, Homo sapiens
  CDR3 for beta chain variable domain of TCR clone 373897 (TRBV11-2, TRBJ2-5)
CASSLGQETQYF

SEQ ID NO: 747795 - protein, 16 aa, Homo sapiens
  CDR3 for alpha chain variable domain of TCR clone 373898 (TRAV12-1, TRAJ28)
CVVIAYSGAGSYQLTF

SEQ ID NO: 747796 - protein, 15 aa, Homo sapiens
  CDR3 for beta chain variable domain of TCR clone 373898 (TRBV14, TRBJ1-1)
CASSQEGMGFTVAFF

SEQ ID NO: 747797 - protein, 13 aa, Homo sapiens
  CDR3 for alpha chain variable domain of TCR clone 373899 (TRAV12-3, TRAJ41)
CAIAPNSGYALNF

SEQ ID NO: 747798 - protein, 14 aa, Homo sapiens
  CDR3 for beta chain variable domain of TCR clone 373899 (TRBV7-2, TRBJ1-3)
CASSLGTARNTIYF

SEQ ID NO: 747799 - protein, 13 aa, Homo sapiens
  CDR3 for alpha chain variable domain of TCR clone 373900 (TRAV8-4, TRAJ10)
CAAFTGGGNKITF

SEQ ID NO: 747800 - protein, 12 aa, Homo sapiens
  CDR3 for beta chain variable domain of TCR clone 373900 (TRBV3-1, TRBJ2-1)
CASSQGSSGQFF

SEQ ID NO: 747801 - protein, 12 aa, Homo sapiens
  CDR3 for alpha chain variable domain of TCR clone 373901 (TRAV12-3, TRAJ17)
CAITLTGNKLTF

SEQ ID NO: 747802 - protein, 15 aa, Homo sapiens
  CDR3 for beta chain variable domain of TCR clone 373901 (TRBV20-1, TRBJ2-7)
CSARNRVSGMDEQYF

SEQ ID NO: 747803 - protein, 13 aa, Homo sapiens
  CDR3 for alpha chain variable domain of TCR clone 373902 (TRAV27, TRAJ41)
CAGEGNSGYAINF

SEQ ID NO: 747804 - protein, 13 aa, Homo sapiens
  CDR3 for beta chain variable domain of TCR clone 373902 (TRBV19, TRBJ1-2)
CASSAPGQDGYTF

SEQ ID NO: 747805 - protein, 14 aa, Homo sapiens
  CDR3 for alpha chain variable domain of TCR clone 373903 (TRAV16, TRAJ17)
CAPRIKAAGNKLNF

SEQ ID NO: 747806 - protein, 14 aa, Homo sapiens
  CDR3 for beta chain variable domain of TCR clone 373903 (TRBV2, TRBJ2-7)
CASSLTSGGYEQYF

SEQ ID NO: 747807 - protein, 13 aa, Homo sapiens
  CDR3 for alpha chain variable domain of TCR clone 373904 (TRAV13-1, TRAJ21)
CAASIYNFNKFYF

SEQ ID NO: 747808 - protein, 12 aa, Homo sapiens
  CDR3 for beta chain variable domain of TCR clone 373904 (TRBV11-2, TRBJ2-1)
CASSPGNNEHFF

SEQ ID NO: 747809 - protein, 13 aa, Homo sapiens
  CDR3 for alpha chain variable domain of TCR clone 373905 (TRAV29/DV5, TRAJ31)
CAASRNNNARLMF

SEQ ID NO: 747810 - protein, 14 aa, Homo sapiens
  CDR3 for beta chain variable domain of TCR clone 373905 (TRBV7-8, TRBJ2-1)
CATERERSYNEQFF

SEQ ID NO: 747811 - protein, 14 aa, Homo sapiens
  CDR3 for alpha chain variable domain of TCR clone 373906 (TRAV17, TRAJ57)
CATDPQGGPEKLVF

SEQ ID NO: 747812 - protein, 15 aa, Homo sapiens
  CDR3 for beta chain variable domain of TCR clone 373906 (TRBV12-4, TRBJ1-2)
CASRLGVAGNYGYTF

SEQ ID NO: 747813 - protein, 13 aa, Homo sapiens
  CDR3 for alpha chain variable domain of TCR clone 373907 (TRAV29/DV5, TRAJ31)
CAASRNNNARLMF

SEQ ID NO: 747814 - protein, 15 aa, Homo sapiens
  CDR3 for beta chain variable domain of TCR clone 373907 (TRBV7-3, TRBJ2-2)
CASSETGQGTGELFF

SEQ ID NO: 747815 - protein, 12 aa, Homo sapiens
  CDR3 for alpha chain variable domain of TCR clone 373908 (TRAV27, TRAJ33)
CAGEDSNYQLIW

SEQ ID NO: 747816 - protein, 19 aa, Homo sapiens
  CDR3 for beta chain variable domain of TCR clone 373908 (TRBV7-3, TRBJ1-3)
CASSPLGRGLLETPYILER

SEQ ID NO: 747817 - protein, 12 aa, Homo sapiens
  CDR3 for alpha chain variable domain of TCR clone 373909 (TRAV12-3, TRAJ17)
CAMTLTGNKLTF

SEQ ID NO: 747818 - protein, 13 aa, Homo sapiens
  CDR3 for beta chain variable domain of TCR clone 373909 (TRBV2, TRBJ1-4)
CASSDLFSEKLFF

SEQ ID NO: 747819 - protein, 13 aa, Homo sapiens
  CDR3 for alpha chain variable domain of TCR clone 373910 (TRAV12-3, TRAJ54)
CAMTLQGTKKLVF

SEQ ID NO: 747820 - protein, 14 aa, Homo sapiens
  CDR3 for beta chain variable domain of TCR clone 373910 (TRBV4-1, TRBJ2-2)
CASSQAVNTGELFF

SEQ ID NO: 747821 - protein, 17 aa, Homo sapiens
  CDR3 for alpha chain variable domain of TCR clone 373911 (TRAV3, TRAJ6)
CAVRDDPRAGGSYIPTF

SEQ ID NO: 747822 - protein, 13 aa, Homo sapiens
  CDR3 for beta chain variable domain of TCR clone 373911 (TRBV19, TRBJ2-7)
CASSIDRTYEQYF

SEQ ID NO: 747823 - protein, 18 aa, Homo sapiens
  CDR3 for alpha chain variable domain of TCR clone 373912 (TRAV12-3, TRAJ52)
CAMSVGGAGGTSYGKLTF

SEQ ID NO: 747824 - protein, 13 aa, Homo sapiens
  CDR3 for beta chain variable domain of TCR clone 373912 (TRBV12-4, TRBJ2-3)
CASSSPLGGTQYF

SEQ ID NO: 747825 - protein, 11 aa, Homo sapiens
  CDR3 for alpha chain variable domain of TCR clone 373913 (TRAV1-1, TRAJ23)
CAVRQGGKLIF

SEQ ID NO: 747826 - protein, 15 aa, Homo sapiens
  CDR3 for beta chain variable domain of TCR clone 373913 (TRBV4-3, TRBJ1-1)
CASSQELGRGTEAFL

SEQ ID NO: 747827 - protein, 13 aa, Homo sapiens
  CDR3 for alpha chain variable domain of TCR clone 373914 (TRAV20, TRAJ37)
CAGCSSNTGKLIF

SEQ ID NO: 747828 - protein, 15 aa, Homo sapiens
  CDR3 for beta chain variable domain of TCR clone 373914 (TRBV7-3, TRBJ2-1)
CASSQRGGALIEQFV

SEQ ID NO: 747829 - protein, 10 aa, Homo sapiens
  CDR3 for alpha chain variable domain of TCR clone 373915 (TRAV22, TRAJ20)
CALNDYKLSF

SEQ ID NO: 747830 - protein, 19 aa, Homo sapiens
  CDR3 for beta chain variable domain of TCR clone 373915 (TRBV5-1, TRBJ2-3)
CASSLWLAGGITTTDTQYF

SEQ ID NO: 747831 - protein, 14 aa, Homo sapiens
  CDR3 for alpha chain variable domain of TCR clone 373916 (TRAV12-2, TRAJ13)
CAVKKTGGYQKVTF

SEQ ID NO: 747832 - protein, 15 aa, Homo sapiens
  CDR3 for beta chain variable domain of TCR clone 373916 (TRBV12-4, TRBJ2-1)
CTSSNGGGSSNEQFF

SEQ ID NO: 747833 - protein, 15 aa, Homo sapiens
  CDR3 for alpha chain variable domain of TCR clone 373917 (TRAV17, TRAJ56)
CATEPFTGANSKLTF

SEQ ID NO: 747834 - protein, 14 aa, Homo sapiens
  CDR3 for beta chain variable domain of TCR clone 373917 (TRBV13, TRBJ2-7)
CASSLKGASYEQYF

SEQ ID NO: 747835 - protein, 15 aa, Homo sapiens
  CDR3 for alpha chain variable domain of TCR clone 373918 (TRAV4, TRAJ12)
CLVGDSMDSSYKLIF

SEQ ID NO: 747836 - protein, 14 aa, Homo sapiens
  CDR3 for beta chain variable domain of TCR clone 373918 (TRBV7-2, TRBJ1-1)
CASSHRQGRTEAFF

SEQ ID NO: 747837 - protein, 14 aa, Homo sapiens
  CDR3 for alpha chain variable domain of TCR clone 373919 (TRAV36/DV7, TRAJ32)
CAVGHVGATNKLIF

SEQ ID NO: 747838 - protein, 17 aa, Homo sapiens
  CDR3 for beta chain variable domain of TCR clone 373919 (TRBV7-7, TRBJ2-3)
CASSLGGGITSTDTQYF

SEQ ID NO: 747839 - protein, 14 aa, Homo sapiens
  CDR3 for alpha chain variable domain of TCR clone 373920 (TRAV12-3, TRAJ10)
SHLPLTGGGNKLTF

SEQ ID NO: 747840 - protein, 15 aa, Homo sapiens
  CDR3 for beta chain variable domain of TCR clone 373920 (TRBV13, TRBJ2-1)
CASSLPSGLNNEQFF

SEQ ID NO: 747841 - protein, 14 aa, Homo sapiens
  CDR3 for alpha chain variable domain of TCR clone 373921 (TRAV12-2, TRAJ44)
CAVNPAGTASKLTF

SEQ ID NO: 747842 - protein, 17 aa, Homo sapiens
  CDR3 for beta chain variable domain of TCR clone 373921 (TRBV19, TRBJ2-7)
CAVAPLVAVRPEGTSGR

SEQ ID NO: 747843 - protein, 14 aa, Homo sapiens
  CDR3 for alpha chain variable domain of TCR clone 373922 (TRAV38-1, TRAJ45)
CASHSGGGADGPTF

SEQ ID NO: 747844 - protein, 13 aa, Homo sapiens
  CDR3 for beta chain variable domain of TCR clone 373922 (TRBV10-3, TRBJ1-2)
CAISERDSYGYAF

SEQ ID NO: 747845 - protein, 14 aa, Homo sapiens
  CDR3 for alpha chain variable domain of TCR clone 373923 (TRAV13-1, TRAJ29)
CAASSNSGNTPLVF

SEQ ID NO: 747846 - protein, 13 aa, Homo sapiens
  CDR3 for beta chain variable domain of TCR clone 373923 (TRBV15, TRBJ1-6)
CATSGGLNSPLHF

SEQ ID NO: 747847 - protein, 14 aa, Homo sapiens
  CDR3 for alpha chain variable domain of TCR clone 373924 (TRAV16, TRAJ15)
CALSFNLAGTALIF

SEQ ID NO: 747848 - protein, 16 aa, Homo sapiens
  CDR3 for beta chain variable domain of TCR clone 373924 (TRBV9, TRBJ2-7)
CASSAGPDRSPYEQYF

SEQ ID NO: 747849 - protein, 17 aa, Homo sapiens
  CDR3 for alpha chain variable domain of TCR clone 373925 (TRAV1-1, TRAJ28)
CAVDPAYSGAGGYQLTF

SEQ ID NO: 747850 - protein, 14 aa, Homo sapiens
  CDR3 for beta chain variable domain of TCR clone 373925 (TRBV19, TRBJ2-1)
CASPTFVLSGEQFF

SEQ ID NO: 747851 - protein, 13 aa, Homo sapiens
  CDR3 for alpha chain variable domain of TCR clone 373926 (TRAV8-3, TRAJ36)
CAVGATGANNLFF

SEQ ID NO: 747852 - protein, 15 aa, Homo sapiens
  CDR3 for beta chain variable domain of TCR clone 373926 (TRBV7-2, TRBJ1-2)
CASSPRAGWYYGDTF

SEQ ID NO: 747853 - protein, 11 aa, Homo sapiens
  CDR3 for alpha chain variable domain of TCR clone 373927 (TRAV2, TRAJ13)
CASGGYQKVTF

SEQ ID NO: 747854 - protein, 12 aa, Homo sapiens
  CDR3 for beta chain variable domain of TCR clone 373927 (TRBV12-5, TRBJ2-3)
CASQASTDTQYF

SEQ ID NO: 747855 - protein, 14 aa, Homo sapiens
  CDR3 for alpha chain variable domain of TCR clone 373928 (TRAV26-1, TRAJ49)
CIVRLTNTGNQFYF

SEQ ID NO: 747856 - protein, 13 aa, Homo sapiens
  CDR3 for beta chain variable domain of TCR clone 373928 (TRBV4-1, TRBJ2-7)
CASSHGQAYEQYF

SEQ ID NO: 747857 - protein, 12 aa, Homo sapiens
  CDR3 for alpha chain variable domain of TCR clone 373929 (TRAV21, TRAJ33)
CAKMDSTYQLIW

SEQ ID NO: 747858 - protein, 13 aa, Homo sapiens
  CDR3 for beta chain variable domain of TCR clone 373929 (TRBV12-4, TRBJ2-5)
CASSPGTEETQYF

SEQ ID NO: 747859 - protein, 15 aa, Homo sapiens
  CDR3 for alpha chain variable domain of TCR clone 373930 (TRAV26-1, TRAJ40)
CIVRVTTSGTYKYIF

SEQ ID NO: 747860 - protein, 12 aa, Homo sapiens
  CDR3 for beta chain variable domain of TCR clone 373930 (TRBV7-9, TRBJ1-4)
CASSTDRERLFF

SEQ ID NO: 747861 - protein, 11 aa, Homo sapiens
  CDR3 for alpha chain variable domain of TCR clone 373931 (TRAV21, TRAJ20)
CAVRDDYKLSF

SEQ ID NO: 747862 - protein, 11 aa, Homo sapiens
  CDR3 for beta chain variable domain of TCR clone 373931 (TRBV12-4, TRBJ2-3)
CASTATDTQYF

SEQ ID NO: 747863 - protein, 12 aa, Homo sapiens
  CDR3 for alpha chain variable domain of TCR clone 373932 (TRAV38-1, TRAJ47)
CAFETYGNKLVF

SEQ ID NO: 747864 - protein, 14 aa, Homo sapiens
  CDR3 for beta chain variable domain of TCR clone 373932 (TRBV20-1, TRBJ2-2)
CSAPDTANTGELVF

SEQ ID NO: 747865 - protein, 14 aa, Homo sapiens
  CDR3 for alpha chain variable domain of TCR clone 373933 (TRAV1-1, TRAJ27)
CAVIYNTNAGKSTF

SEQ ID NO: 747866 - protein, 14 aa, Homo sapiens
  CDR3 for beta chain variable domain of TCR clone 373933 (TRBV7-2, TRBJ2-1)
CQQLRTSGGNEQFF

SEQ ID NO: 747867 - protein, 15 aa, Homo sapiens
  CDR3 for alpha chain variable domain of TCR clone 373934 (TRAV17, TRAJ37)
CATDHGSSNTGKLIF

SEQ ID NO: 747868 - protein, 14 aa, Homo sapiens
  CDR3 for beta chain variable domain of TCR clone 373934 (TRBV7-2, TRBJ2-7)
CASSPKTSFYEQYF

SEQ ID NO: 747869 - protein, 16 aa, Homo sapiens
  CDR3 for alpha chain variable domain of TCR clone 373935 (TRAV3, TRAJ10)
CAVRDMRAGGGKKLTF

SEQ ID NO: 747870 - protein, 17 aa, Homo sapiens
  CDR3 for beta chain variable domain of TCR clone 373935 (TRBV20-1, TRBJ2-2)
CSASGSGQGGLTGELFF

SEQ ID NO: 747871 - protein, 13 aa, Homo sapiens
  CDR3 for alpha chain variable domain of TCR clone 373936 (TRAV12-2, TRAJ34)
CALSKGDTEKLIF

SEQ ID NO: 747872 - protein, 13 aa, Homo sapiens
  CDR3 for beta chain variable domain of TCR clone 373936 (TRBV20-1, TRBJ2-1)
CSASGTPGDEQFF

SEQ ID NO: 747873 - protein, 17 aa, Homo sapiens
  CDR3 for alpha chain variable domain of TCR clone 373937 (TRAV36/DV7, TRAJ52)
CAVAQRAGGTSYGKLTF

SEQ ID NO: 747874 - protein, 15 aa, Homo sapiens
  CDR3 for beta chain variable domain of TCR clone 373937 (TRBV6-6, TRBJ2-7)
CASSYSYGGSYEQYF

SEQ ID NO: 747875 - protein, 14 aa, Homo sapiens
  CDR3 for alpha chain variable domain of TCR clone 373938 (TRAV1-2, TRAJ8)
CAVREDTGFQKLVF

SEQ ID NO: 747876 - protein, 15 aa, Homo sapiens
  CDR3 for beta chain variable domain of TCR clone 373938 (TRBV24-1, TRBJ2-2)
CATSDLSGNTGELFF

SEQ ID NO: 747877 - protein, 13 aa, Homo sapiens
  CDR3 for alpha chain variable domain of TCR clone 373939 (TRAV3, TRAJ15)
CAVRDQAGTALIF

SEQ ID NO: 747878 - protein, 13 aa, Homo sapiens
  CDR3 for beta chain variable domain of TCR clone 373939 (TRBV15, TRBJ1-1)
CATSRGIQARAFF

SEQ ID NO: 747879 - protein, 13 aa, Homo sapiens
  CDR3 for alpha chain variable domain of TCR clone 373940 (TRAV21, TRAJ34)
CAVSEGDTDKLIF

SEQ ID NO: 747880 - protein, 16 aa, Homo sapiens
  CDR3 for beta chain variable domain of TCR clone 373940 (TRBV20-1, TRBJ2-1)
CSASASGYSSYNEQFF

SEQ ID NO: 747881 - protein, 14 aa, Homo sapiens
  CDR3 for alpha chain variable domain of TCR clone 373941 (TRAV21, TRAJ35)
GAVMPIGFGNVLHG

SEQ ID NO: 747882 - protein, 12 aa, Homo sapiens
  CDR3 for beta chain variable domain of TCR clone 373941 (TRBV7-9, TRBJ2-7)
CASSIKREEQYF

SEQ ID NO: 747883 - protein, 15 aa, Homo sapiens
  CDR3 for alpha chain variable domain of TCR clone 373942 (TRAV3, TRAJ8)
CAVRDNETGFQKLVF

SEQ ID NO: 747884 - protein, 13 aa, Homo sapiens
  CDR3 for beta chain variable domain of TCR clone 373942 (TRBV19, TRBJ2-7)
CASSAGHGYEQYF

SEQ ID NO: 747885 - protein, 12 aa, Homo sapiens
  CDR3 for alpha chain variable domain of TCR clone 373943 (TRAV21, TRAJ49)
CAVRNTGNQFYF

SEQ ID NO: 747886 - protein, 16 aa, Homo sapiens
  CDR3 for beta chain variable domain of TCR clone 373943 (TRBV7-3, TRBJ2-2)
CASSLKRGTLSGELFF

SEQ ID NO: 747887 - protein, 13 aa, Homo sapiens
  CDR3 for alpha chain variable domain of TCR clone 373944 (TRAV2, TRAJ15)
CAVASQAGTALIF

SEQ ID NO: 747888 - protein, 16 aa, Homo sapiens
  CDR3 for beta chain variable domain of TCR clone 373944 (TRBV5-1, TRBJ1-1)
CASSSRGNSLNTEAFF

SEQ ID NO: 747889 - protein, 12 aa, Homo sapiens
  CDR3 for alpha chain variable domain of TCR clone 373945 (TRAV30, TRAJ43)
CGTEERGNNMRF

SEQ ID NO: 747890 - protein, 13 aa, Homo sapiens
  CDR3 for beta chain variable domain of TCR clone 373945 (TRBV12-4, TRBJ1-2)
CASSSGGKDGYTF

SEQ ID NO: 747891 - protein, 18 aa, Homo sapiens
  CDR3 for alpha chain variable domain of TCR clone 373946 (TRAV12-3, TRAJ52)
CAMSVGGAGGTSYGKLTF

SEQ ID NO: 747892 - protein, 16 aa, Homo sapiens
  CDR3 for beta chain variable domain of TCR clone 373946 (TRBV7-2, TRBJ2-5)
CASSSKWLSGQETQYF

SEQ ID NO: 747893 - protein, 15 aa, Homo sapiens
  CDR3 for alpha chain variable domain of TCR clone 373947 (TRAV17, TRAJ23)
CATDAEDNQGGKRIF

SEQ ID NO: 747894 - protein, 12 aa, Homo sapiens
  CDR3 for beta chain variable domain of TCR clone 373947 (TRBV2, TRBJ2-1)
CAKREGYNEQLF

SEQ ID NO: 747895 - protein, 10 aa, Homo sapiens
  CDR3 for alpha chain variable domain of TCR clone 373948 (TRAV38-2/DV8, TRAJ54)
QIQGAQKLVF

SEQ ID NO: 747896 - protein, 17 aa, Homo sapiens
  CDR3 for beta chain variable domain of TCR clone 373948 (TRBV6-1, TRBJ2-3)
CASSEALRLISTDTQYF

SEQ ID NO: 747897 - protein, 16 aa, Homo sapiens
  CDR3 for alpha chain variable domain of TCR clone 373949 (TRAV12-2, TRAJ28)
CAVITDSGAGSYQLTF

SEQ ID NO: 747898 - protein, 14 aa, Homo sapiens
  CDR3 for beta chain variable domain of TCR clone 373949 (TRBV19, TRBJ2-5)
CASSIEHSQETQYF

SEQ ID NO: 747899 - protein, 15 aa, Homo sapiens
  CDR3 for alpha chain variable domain of TCR clone 373950 (TRAV8-2, TRAJ40)
CVVLGTTSGTYKYIF

SEQ ID NO: 747900 - protein, 13 aa, Homo sapiens
  CDR3 for beta chain variable domain of TCR clone 373950 (TRBV5-1, TRBJ1-1)
CASSLRGGTEAFF

SEQ ID NO: 747901 - protein, 12 aa, Homo sapiens
  CDR3 for alpha chain variable domain of TCR clone 373951 (TRAV12-3, TRAJ17)
CAMTLTGNKLTF

SEQ ID NO: 747902 - protein, 13 aa, Homo sapiens
  CDR3 for beta chain variable domain of TCR clone 373951 (TRBV7-3, TRBJ1-1)
CASSQDWVAEAFF

SEQ ID NO: 747903 - protein, 11 aa, Homo sapiens
  CDR3 for alpha chain variable domain of TCR clone 373952 (TRAV3, TRAJ21)
SAVGNLNKFYF

SEQ ID NO: 747904 - protein, 16 aa, Homo sapiens
  CDR3 for beta chain variable domain of TCR clone 373952 (TRBV19, TRBJ2-1)
CASSKAGPSSYNEQFF

SEQ ID NO: 747905 - protein, 13 aa, Homo sapiens
  CDR3 for alpha chain variable domain of TCR clone 373953 (TRAV12-3, TRAJ33)
CAMSVNSNYQLIW

SEQ ID NO: 747906 - protein, 12 aa, Homo sapiens
  CDR3 for beta chain variable domain of TCR clone 373953 (TRBV11-2, TRBJ2-2)
CASSVGGGELFF

SEQ ID NO: 747907 - protein, 13 aa, Homo sapiens
  CDR3 for alpha chain variable domain of TCR clone 373954 (TRAV25, TRAJ26)
CAGMDNYGQKFVF

SEQ ID NO: 747908 - protein, 15 aa, Homo sapiens
  CDR3 for beta chain variable domain of TCR clone 373954 (TRBV10-3, TRBJ2-1)
CAIRNGTSGHDEQFF

SEQ ID NO: 747909 - protein, 14 aa, Homo sapiens
  CDR3 for alpha chain variable domain of TCR clone 373955 (TRAV35, TRAJ34)
CAGQSSYNTDKLIF

SEQ ID NO: 747910 - protein, 15 aa, Homo sapiens
  CDR3 for beta chain variable domain of TCR clone 373955 (TRBV4-3, TRBJ2-1)
CASSQVLSSYNEQFF

SEQ ID NO: 747911 - protein, 12 aa, Homo sapiens
  CDR3 for alpha chain variable domain of TCR clone 373956 (TRAV26-1, TRAJ48)
CIAVFGNEKLTF

SEQ ID NO: 747912 - protein, 13 aa, Homo sapiens
  CDR3 for beta chain variable domain of TCR clone 373956 (TRBV7-7, TRBJ2-3)
CASSLSRADTQYF

SEQ ID NO: 747913 - protein, 15 aa, Homo sapiens
  CDR3 for alpha chain variable domain of TCR clone 373957 (TRAV12-1, TRAJ9)
CVVSFGDTGGFKTMF

SEQ ID NO: 747914 - protein, 19 aa, Homo sapiens
  CDR3 for beta chain variable domain of TCR clone 373957 (TRBV25-1, TRBJ2-2)
CAILVYRVDRGRKTGELFF

SEQ ID NO: 747915 - protein, 16 aa, Homo sapiens
  CDR3 for alpha chain variable domain of TCR clone 373958 (TRAV21, TRAJ52)
CAVTNAGGTSYGKLTS

SEQ ID NO: 747916 - protein, 11 aa, Homo sapiens
  CDR3 for beta chain variable domain of TCR clone 373958 (TRBV2, TRBJ1-1)
CASREGTEAFF

SEQ ID NO: 747917 - protein, 16 aa, Homo sapiens
  CDR3 for alpha chain variable domain of TCR clone 373959 (TRAV1-1, TRAJ29)
CAVRSNRNSGNTPLVF

SEQ ID NO: 747918 - protein, 15 aa, Homo sapiens
  CDR3 for beta chain variable domain of TCR clone 373959 (TRBV29-1, TRBJ2-1)
CSVGRHALFYNEQFF

SEQ ID NO: 747919 - protein, 14 aa, Homo sapiens
  CDR3 for alpha chain variable domain of TCR clone 373960 (TRAV17, TRAJ29)
CATDQNSGNTPLVF

SEQ ID NO: 747920 - protein, 14 aa, Homo sapiens
  CDR3 for beta chain variable domain of TCR clone 373960 (TRBV19, TRBJ2-1)
CASPTFVLSGEQFF

SEQ ID NO: 747921 - protein, 13 aa, Homo sapiens
  CDR3 for alpha chain variable domain of TCR clone 373961 (TRAV26-1, TRAJ48)
CIVRVVGDEKVTF

SEQ ID NO: 747922 - protein, 16 aa, Homo sapiens
  CDR3 for beta chain variable domain of TCR clone 373961 (TRBV12-5, TRBJ2-5)
CASGPRTRGNQETQYF

SEQ ID NO: 747923 - protein, 12 aa, Homo sapiens
  CDR3 for alpha chain variable domain of TCR clone 373962 (TRAV12-3, TRAJ20)
CAMVRGDYKLSF

SEQ ID NO: 747924 - protein, 14 aa, Homo sapiens
  CDR3 for beta chain variable domain of TCR clone 373962 (TRBV5-5, TRBJ1-5)
CASSGQGVDQPQHS

SEQ ID NO: 747925 - protein, 10 aa, Homo sapiens
  CDR3 for alpha chain variable domain of TCR clone 373963 (TRAV8-3, TRAJ44)
CAVGAVVYRH

SEQ ID NO: 747926 - protein, 15 aa, Homo sapiens
  CDR3 for beta chain variable domain of TCR clone 373963 (TRBV6-5, TRBJ1-2)
CASSYSQAFNYGCTF

SEQ ID NO: 747927 - protein, 12 aa, Homo sapiens
  CDR3 for alpha chain variable domain of TCR clone 373964 (TRAV36/DV7, TRAJ54)
CAVVRGAQKLVF

SEQ ID NO: 747928 - protein, 16 aa, Homo sapiens
  CDR3 for beta chain variable domain of TCR clone 373964 (TRBV7-3, TRBJ1-1)
CASSLKGGTLKLPLDK

SEQ ID NO: 747929 - protein, 12 aa, Homo sapiens
  CDR3 for alpha chain variable domain of TCR clone 373965 (TRAV12-2, TRAJ21)
CAPSDNFNKFYF

SEQ ID NO: 747930 - protein, 17 aa, Homo sapiens
  CDR3 for beta chain variable domain of TCR clone 373965 (TRBV4-1, TRBJ2-3)
CASSQVLQGGGTDTQYF

SEQ ID NO: 747931 - protein, 17 aa, Homo sapiens
  CDR3 for alpha chain variable domain of TCR clone 373966 (TRAV26-1, TRAJ53)
CIVRVDDSGGSNYKLHL

SEQ ID NO: 747932 - protein, 15 aa, Homo sapiens
  CDR3 for beta chain variable domain of TCR clone 373966 (TRBV20-1, TRBJ2-7)
CSARVPAAYFYEQYF

SEQ ID NO: 747933 - protein, 15 aa, Homo sapiens
  CDR3 for alpha chain variable domain of TCR clone 373967 (TRAV25, TRAJ52)
CAGRPGGTSYGKLTF

SEQ ID NO: 747934 - protein, 14 aa, Homo sapiens
  CDR3 for beta chain variable domain of TCR clone 373967 (TRBV12-4, TRBJ1-1)
CASRPGQGRTEAFF

SEQ ID NO: 747935 - protein, 13 aa, Homo sapiens
  CDR3 for alpha chain variable domain of TCR clone 373968 (TRAV8-6, TRAJ43)
CAVSDLGNNDMRF

SEQ ID NO: 747936 - protein, 18 aa, Homo sapiens
  CDR3 for beta chain variable domain of TCR clone 373968 (TRBV18, TRBJ2-3)
CASSYTSGAAGGTDTQYF

SEQ ID NO: 747937 - protein, 17 aa, Homo sapiens
  CDR3 for alpha chain variable domain of TCR clone 373969 (TRAV27, TRAJ18)
CAGLHRGRGSTLGRLYF

SEQ ID NO: 747938 - protein, 15 aa, Homo sapiens
  CDR3 for beta chain variable domain of TCR clone 373969 (TRBV6-5, TRBJ2-1)
CASSYDAGAGNEQFF

SEQ ID NO: 747939 - protein, 13 aa, Homo sapiens
  CDR3 for alpha chain variable domain of TCR clone 373970 (TRAV8-3, TRAJ28)
CAVGAVGSYKRTF

SEQ ID NO: 747940 - protein, 14 aa, Homo sapiens
  CDR3 for beta chain variable domain of TCR clone 373970 (TRBV7-2, TRBJ2-7)
CASRSQGAAYEQYF

SEQ ID NO: 747941 - protein, 12 aa, Homo sapiens
  CDR3 for alpha chain variable domain of TCR clone 373971 (TRAV17, TRAJ20)
CATDGDDYKLSF

SEQ ID NO: 747942 - protein, 15 aa, Homo sapiens
  CDR3 for beta chain variable domain of TCR clone 373971 (TRBV28, TRBJ2-1)
CASSIIAGGRSEQFF

SEQ ID NO: 747943 - protein, 16 aa, Homo sapiens
  CDR3 for alpha chain variable domain of TCR clone 373972 (TRAV1-2, TRAJ33)
CAVRAISMDSNYQLIW

SEQ ID NO: 747944 - protein, 13 aa, Homo sapiens
  CDR3 for beta chain variable domain of TCR clone 373972 (TRBV3-1, TRBJ1-1)
CASSPGVITEAFF

SEQ ID NO: 747945 - protein, 14 aa, Homo sapiens
  CDR3 for alpha chain variable domain of TCR clone 373973 (TRAV9-2, TRAJ39)
CALYIYNAGNMLTF

SEQ ID NO: 747946 - protein, 16 aa, Homo sapiens
  CDR3 for beta chain variable domain of TCR clone 373973 (TRBV5-1, TRBJ2-3)
CASSVFPMSSTDTQYF

SEQ ID NO: 747947 - protein, 14 aa, Homo sapiens
  CDR3 for alpha chain variable domain of TCR clone 373974 (TRAV12-2, TRAJ13)
CAVKKTGGYQKVTF

SEQ ID NO: 747948 - protein, 15 aa, Homo sapiens
  CDR3 for beta chain variable domain of TCR clone 373974 (TRBV20-1, TRBJ1-5)
CSARGSVDSNQPQHF

SEQ ID NO: 747949 - protein, 17 aa, Homo sapiens
  CDR3 for alpha chain variable domain of TCR clone 373975 (TRAV17, TRAJ28)
CATDAVYSGAGSYQLTF

SEQ ID NO: 747950 - protein, 16 aa, Homo sapiens
  CDR3 for beta chain variable domain of TCR clone 373975 (TRBV6-1, TRBJ2-5)
CASCETLDRGAETQYF

SEQ ID NO: 747951 - protein, 11 aa, Homo sapiens
  CDR3 for alpha chain variable domain of TCR clone 373976 (TRAV17, TRAJ43)
CATPRSNDMRF

SEQ ID NO: 747952 - protein, 15 aa, Homo sapiens
  CDR3 for beta chain variable domain of TCR clone 373976 (TRBV7-2, TRBJ1-2)
CASSPRAGWNYGYTF

SEQ ID NO: 747953 - protein, 20 aa, Homo sapiens
  CDR3 for alpha chain variable domain of TCR clone 373977 (TRAV26-1, TRAJ42)
CCVLLHRQTYYGGSQGNLIF

SEQ ID NO: 747954 - protein, 16 aa, Homo sapiens
  CDR3 for beta chain variable domain of TCR clone 373977 (TRBV11-2, TRBJ2-5)
CASSGQGYSPQETQYF

SEQ ID NO: 747955 - protein, 14 aa, Homo sapiens
  CDR3 for alpha chain variable domain of TCR clone 373978 (TRAV12-3, TRAJ37)
CVSEGSSNTGKLIF

SEQ ID NO: 747956 - protein, 14 aa, Homo sapiens
  CDR3 for beta chain variable domain of TCR clone 373978 (TRBV20-1, TRBJ1-1)
CSAQTRIGGTDAFF

SEQ ID NO: 747957 - protein, 15 aa, Homo sapiens
  CDR3 for alpha chain variable domain of TCR clone 373979 (TRAV17, TRAJ52)
CATEAGGTSYGKLTF

SEQ ID NO: 747958 - protein, 16 aa, Homo sapiens
  CDR3 for beta chain variable domain of TCR clone 373979 (TRBV20-1, TRBJ2-1)
CSAGKPAGGPYNEQFF

SEQ ID NO: 747959 - protein, 15 aa, Homo sapiens
  CDR3 for alpha chain variable domain of TCR clone 373980 (TRAV8-2, TRAJ16)
SVVSDGFSDGQKLLF

SEQ ID NO: 747960 - protein, 14 aa, Homo sapiens
  CDR3 for beta chain variable domain of TCR clone 373980 (TRBV7-3, TRBJ1-1)
CASSLGTGYTEAFF

SEQ ID NO: 747961 - protein, 16 aa, Homo sapiens
  CDR3 for alpha chain variable domain of TCR clone 373981 (TRAV35, TRAJ37)
CWAFLRGSSNTGKLIF

SEQ ID NO: 747962 - protein, 11 aa, Homo sapiens
  CDR3 for beta chain variable domain of TCR clone 373981 (TRBV19, TRBJ1-1)
CASSIGSEAFF

SEQ ID NO: 747963 - protein, 13 aa, Homo sapiens
  CDR3 for alpha chain variable domain of TCR clone 373982 (TRAV23/DV6, TRAJ27)
CAASKPMQANQPL

SEQ ID NO: 747964 - protein, 12 aa, Homo sapiens
  CDR3 for beta chain variable domain of TCR clone 373982 (TRBV11-2, TRBJ2-2)
CAVPRNTGELFF

SEQ ID NO: 747965 - protein, 14 aa, Homo sapiens
  CDR3 for alpha chain variable domain of TCR clone 373983 (TRAV27, TRAJ36)
CAGPPKRGANNLFF

SEQ ID NO: 747966 - protein, 13 aa, Homo sapiens
  CDR3 for beta chain variable domain of TCR clone 373983 (TRBV7-9, TRBJ2-3)
CASSPGSTDTQYF

SEQ ID NO: 747967 - protein, 13 aa, Homo sapiens
  CDR3 for alpha chain variable domain of TCR clone 373984 (TRAV17, TRAJ39)
CATADNAGNMLTF

SEQ ID NO: 747968 - protein, 14 aa, Homo sapiens
  CDR3 for beta chain variable domain of TCR clone 373984 (TRBV19, TRBJ1-2)
CASSPTGGAGGYTF

SEQ ID NO: 747969 - protein, 11 aa, Homo sapiens
  CDR3 for alpha chain variable domain of TCR clone 373985 (TRAV17, TRAJ9)
CATTGGFKTMF

SEQ ID NO: 747970 - protein, 14 aa, Homo sapiens
  CDR3 for beta chain variable domain of TCR clone 373985 (TRBV7-9, TRBJ2-2)
CASSGLADTVELFF

SEQ ID NO: 747971 - protein, 11 aa, Homo sapiens
  CDR3 for alpha chain variable domain of TCR clone 373986 (TRAV12-1, TRAJ43)
CVEYDNNDMRF

SEQ ID NO: 747972 - protein, 12 aa, Homo sapiens
  CDR3 for beta chain variable domain of TCR clone 373986 (TRBV7-2, TRBJ1-2)
CASRDSIYGYTF

SEQ ID NO: 747973 - protein, 14 aa, Homo sapiens
  CDR3 for alpha chain variable domain of TCR clone 373987 (TRAV27, TRAJ17)
CRSTIRAAGNKLTF

SEQ ID NO: 747974 - protein, 15 aa, Homo sapiens
  CDR3 for beta chain variable domain of TCR clone 373987 (TRBV5-7, TRBJ2-5)
CQHLSPAGGRETQYF

SEQ ID NO: 747975 - protein, 12 aa, Homo sapiens
  CDR3 for alpha chain variable domain of TCR clone 373988 (TRAV1-1, TRAJ9)
CAVPTGGFKTIF

SEQ ID NO: 747976 - protein, 12 aa, Homo sapiens
  CDR3 for beta chain variable domain of TCR clone 373988 (TRBV11-2, TRBJ2-2)
CASSLGGGELFF

SEQ ID NO: 747977 - protein, 14 aa, Homo sapiens
  CDR3 for alpha chain variable domain of TCR clone 373989 (TRAV1-2, TRAJ8)
CAVREDTGCQKLVF

SEQ ID NO: 747978 - protein, 12 aa, Homo sapiens
  CDR3 for beta chain variable domain of TCR clone 373989 (TRBV11-2, TRBJ2-2)
CASSLPTGELFF

SEQ ID NO: 747979 - protein, 12 aa, Homo sapiens
  CDR3 for alpha chain variable domain of TCR clone 373990 (TRAV3, TRAJ31)
CAVRDGNARLMF

SEQ ID NO: 747980 - protein, 17 aa, Homo sapiens
  CDR3 for beta chain variable domain of TCR clone 373990 (TRBV13, TRBJ2-3)
CASSLSRVAGGRNTQYF

SEQ ID NO: 747981 - protein, 14 aa, Homo sapiens
  CDR3 for alpha chain variable domain of TCR clone 373991 (TRAV26-1, TRAJ38)
FIADNAGNNRKLIW

SEQ ID NO: 747982 - protein, 13 aa, Homo sapiens
  CDR3 for beta chain variable domain of TCR clone 373991 (TRBV19, TRBJ1-2)
CASSVPGQDGYTF

SEQ ID NO: 747983 - protein, 12 aa, Homo sapiens
  CDR3 for alpha chain variable domain of TCR clone 373992 (TRAV8-2, TRAJ30)
CVVSDRDEKIIF

SEQ ID NO: 747984 - protein, 16 aa, Homo sapiens
  CDR3 for beta chain variable domain of TCR clone 373992 (TRBV7-9, TRBJ2-1)
CASSDVAGGSYNEQFF

SEQ ID NO: 747985 - protein, 14 aa, Homo sapiens
  CDR3 for alpha chain variable domain of TCR clone 373993 (TRAV12-2, TRAJ13)
CAVKKTGGYQKVTF

SEQ ID NO: 747986 - protein, 15 aa, Homo sapiens
  CDR3 for beta chain variable domain of TCR clone 373993 (TRBV9, TRBJ2-1)
CASSVGSGFYSEQFF

SEQ ID NO: 747987 - protein, 14 aa, Homo sapiens
  CDR3 for alpha chain variable domain of TCR clone 373994 (TRAV1-2, TRAJ16)
CAVNRFSDGQKLLL

SEQ ID NO: 747988 - protein, 13 aa, Homo sapiens
  CDR3 for beta chain variable domain of TCR clone 373994 (TRBV20-1, TRBJ1-1)
CSARGGGNTEAFF

SEQ ID NO: 747989 - protein, 13 aa, Homo sapiens
  CDR3 for alpha chain variable domain of TCR clone 373995 (TRAV2, TRAJ40)
CAVVTSGTYKYIF

SEQ ID NO: 747990 - protein, 15 aa, Homo sapiens
  CDR3 for beta chain variable domain of TCR clone 373995 (TRBV11-3, TRBJ2-3)
CASRKDGREGDKQYF

SEQ ID NO: 747991 - protein, 17 aa, Homo sapiens
  CDR3 for alpha chain variable domain of TCR clone 373996 (TRAV3, TRAJ12)
CAVRDGGRMDSSYKLIF

SEQ ID NO: 747992 - protein, 14 aa, Homo sapiens
  CDR3 for beta chain variable domain of TCR clone 373996 (TRBV4-1, TRBJ2-2)
CASSQAVNTGELFF

SEQ ID NO: 747993 - protein, 12 aa, Homo sapiens
  CDR3 for alpha chain variable domain of TCR clone 373997 (TRAV25, TRAJ11)
CAGASGYSTLTF

SEQ ID NO: 747994 - protein, 15 aa, Homo sapiens
  CDR3 for beta chain variable domain of TCR clone 373997 (TRBV19, TRBJ2-1)
CASSTGTSSYNEQFF

SEQ ID NO: 747995 - protein, 15 aa, Homo sapiens
  CDR3 for alpha chain variable domain of TCR clone 373998 (TRAV3, TRAJ5)
CAVRALDTGRRALTF

SEQ ID NO: 747996 - protein, 13 aa, Homo sapiens
  CDR3 for beta chain variable domain of TCR clone 373998 (TRBV12-4, TRBJ2-7)
CASSPTEPDEQYF

SEQ ID NO: 747997 - protein, 17 aa, Homo sapiens
  CDR3 for alpha chain variable domain of TCR clone 373999 (TRAV2, TRAJ22)
ILQVREADAAEKRQLTF

SEQ ID NO: 747998 - protein, 16 aa, Homo sapiens
  CDR3 for beta chain variable domain of TCR clone 373999 (TRBV2, TRBJ2-5)
CASSETQGVGEETQYF

SEQ ID NO: 747999 - protein, 13 aa, Homo sapiens
  CDR3 for alpha chain variable domain of TCR clone 374000 (TRAV17, TRAJ40)
CATRSPGTYTYIF

SEQ ID NO: 748000 - protein, 13 aa, Homo sapiens
  CDR3 for beta chain variable domain of TCR clone 374000 (TRBV2, TRBJ1-5)
CATAGPGNQPQHF

SEQ ID NO: 748001 - protein, 12 aa, Homo sapiens
  CDR3 for alpha chain variable domain of TCR clone 374001 (TRAV25, TRAJ11)
CAGYSGYSTLTF

SEQ ID NO: 748002 - protein, 13 aa, Homo sapiens
  CDR3 for beta chain variable domain of TCR clone 374001 (TRBV7-9, TRBJ1-2)
CASSLKRNYGYTF

SEQ ID NO: 748003 - protein, 11 aa, Homo sapiens
  CDR3 for alpha chain variable domain of TCR clone 374002 (TRAV13-1, TRAJ52)
PGGTSYGKLTF

SEQ ID NO: 748004 - protein, 16 aa, Homo sapiens
  CDR3 for beta chain variable domain of TCR clone 374002 (TRBV28, TRBJ2-7)
CASSPWVATGDHSQYF

SEQ ID NO: 748005 - protein, 16 aa, Homo sapiens
  CDR3 for alpha chain variable domain of TCR clone 374003 (TRAV30, TRAJ24)
CGTEIVDADSWGKFPF

SEQ ID NO: 748006 - protein, 13 aa, Homo sapiens
  CDR3 for beta chain variable domain of TCR clone 374003 (TRBV20-1, TRBJ1-1)
CSAPPGGHTEAFF

SEQ ID NO: 748007 - protein, 14 aa, Homo sapiens
  CDR3 for alpha chain variable domain of TCR clone 374004 (TRAV38-1, TRAJ48)
CAFMANFGNEKLTF

SEQ ID NO: 748008 - protein, 18 aa, Homo sapiens
  CDR3 for beta chain variable domain of TCR clone 374004 (TRBV4-1, TRBJ2-7)
CASRPSGGARITSSTSGR

SEQ ID NO: 748009 - protein, 14 aa, Homo sapiens
  CDR3 for alpha chain variable domain of TCR clone 374005 (TRAV1-2, TRAJ16)
CAVNRFSDVQKLLF

SEQ ID NO: 748010 - protein, 14 aa, Homo sapiens
  CDR3 for beta chain variable domain of TCR clone 374005 (TRBV20-1, TRBJ1-1)
CSAQTRIGGTEAFF

SEQ ID NO: 748011 - protein, 13 aa, Homo sapiens
  CDR3 for alpha chain variable domain of TCR clone 374006 (TRAV21, TRAJ27)
CAARPGNAGKSTI

SEQ ID NO: 748012 - protein, 14 aa, Homo sapiens
  CDR3 for beta chain variable domain of TCR clone 374006 (TRBV11-2, TRBJ2-7)
CASGLGAGAYEQYF

SEQ ID NO: 748013 - protein, 11 aa, Homo sapiens
  CDR3 for alpha chain variable domain of TCR clone 374007 (TRAV13-1, TRAJ43)
CAAHNNNDMRF

SEQ ID NO: 748014 - protein, 13 aa, Homo sapiens
  CDR3 for beta chain variable domain of TCR clone 374007 (TRBV7-3, TRBJ1-1)
CASSQDWGAEAFF

SEQ ID NO: 748015 - protein, 13 aa, Homo sapiens
  CDR3 for alpha chain variable domain of TCR clone 374008 (TRAV29/DV5, TRAJ49)
CAASVGTGNPFYF

SEQ ID NO: 748016 - protein, 14 aa, Homo sapiens
  CDR3 for beta chain variable domain of TCR clone 374008 (TRBV5-5, TRBJ2-7)
CASSPPRGLWEQYF

SEQ ID NO: 748017 - protein, 12 aa, Homo sapiens
  CDR3 for alpha chain variable domain of TCR clone 374009 (TRAV8-3, TRAJ26)
CAGDNYGQNFVF

SEQ ID NO: 748018 - protein, 15 aa, Homo sapiens
  CDR3 for beta chain variable domain of TCR clone 374009 (TRBV28, TRBJ2-7)
CASSPGGRGFYEQYF

SEQ ID NO: 748019 - protein, 13 aa, Homo sapiens
  CDR3 for alpha chain variable domain of TCR clone 374010 (TRAV8-3, TRAJ48)
CAVVPFGTEKLTF

SEQ ID NO: 748020 - protein, 14 aa, Homo sapiens
  CDR3 for beta chain variable domain of TCR clone 374010 (TRBV12-5, TRBJ2-5)
CASGSRTHQETQYF

SEQ ID NO: 748021 - protein, 14 aa, Homo sapiens
  CDR3 for alpha chain variable domain of TCR clone 374011 (TRAV13-2, TRAJ57)
CAENFQGGSEKLVF

SEQ ID NO: 748022 - protein, 16 aa, Homo sapiens
  CDR3 for beta chain variable domain of TCR clone 374011 (TRBV20-1, TRBJ1-2)
CSASMGQGVANYGYTF

SEQ ID NO: 748023 - protein, 14 aa, Homo sapiens
  CDR3 for alpha chain variable domain of TCR clone 374012 (TRAV13-1, TRAJ10)
CAAKEPGGGNKLTF

SEQ ID NO: 748024 - protein, 16 aa, Homo sapiens
  CDR3 for beta chain variable domain of TCR clone 374012 (TRBV7-9, TRBJ2-3)
CASSPWREVGTDTQYF

SEQ ID NO: 748025 - protein, 14 aa, Homo sapiens
  CDR3 for alpha chain variable domain of TCR clone 374013 (TRAV21, TRAJ35)
CAVMPIGFGNVLHC

SEQ ID NO: 748026 - protein, 15 aa, Homo sapiens
  CDR3 for beta chain variable domain of TCR clone 374013 (TRBV7-9, TRBJ2-7)
CASSLGGGSPYEQYF

SEQ ID NO: 748027 - protein, 12 aa, Homo sapiens
  CDR3 for alpha chain variable domain of TCR clone 374014 (TRAV13-1, TRAJ16)
CAAVSDGQKLLF

SEQ ID NO: 748028 - protein, 16 aa, Homo sapiens
  CDR3 for beta chain variable domain of TCR clone 374014 (TRBV7-2, TRBJ2-1)
CASSLVAGAGHNEQFF

SEQ ID NO: 748029 - protein, 12 aa, Homo sapiens
  CDR3 for alpha chain variable domain of TCR clone 374015 (TRAV21, TRAJ11)
CAVRGGNSTLTF

SEQ ID NO: 748030 - protein, 12 aa, Homo sapiens
  CDR3 for beta chain variable domain of TCR clone 374015 (TRBV11-3, TRBJ1-1)
CASSHRQGEAFF

SEQ ID NO: 748031 - protein, 14 aa, Homo sapiens
  CDR3 for alpha chain variable domain of TCR clone 374016 (TRAV8-4, TRAJ9)
CAVRINTGGFKTIF

SEQ ID NO: 748032 - protein, 15 aa, Homo sapiens
  CDR3 for beta chain variable domain of TCR clone 374016 (TRBV10-2, TRBJ2-6)
CASSELGTGANVLTF

SEQ ID NO: 748033 - protein, 12 aa, Homo sapiens
  CDR3 for alpha chain variable domain of TCR clone 374017 (TRAV29/DV5, TRAJ15)
CASDQAGTALIF

SEQ ID NO: 748034 - protein, 15 aa, Homo sapiens
  CDR3 for beta chain variable domain of TCR clone 374017 (TRBV11-2, TRBJ2-2)
CASSSDRVNAGELFF

SEQ ID NO: 748035 - protein, 17 aa, Homo sapiens
  CDR3 for alpha chain variable domain of TCR clone 374018 (TRAV17, TRAJ28)
CATDPRRGGAGSYQLTF

SEQ ID NO: 748036 - protein, 15 aa, Homo sapiens
  CDR3 for beta chain variable domain of TCR clone 374018 (TRBV9, TRBJ1-6)
CASSVAGTGDSPLHF

SEQ ID NO: 748037 - protein, 14 aa, Homo sapiens
  CDR3 for alpha chain variable domain of TCR clone 374019 (TRAV1-2, TRAJ8)
CAVREDPGFQKLVF

SEQ ID NO: 748038 - protein, 13 aa, Homo sapiens
  CDR3 for beta chain variable domain of TCR clone 374019 (TRBV10-3, TRBJ2-7)
CASKLAVNYEQYF

SEQ ID NO: 748039 - protein, 13 aa, Homo sapiens
  CDR3 for alpha chain variable domain of TCR clone 374020 (TRAV13-1, TRAJ6)
CAASKGGSYIPTF

SEQ ID NO: 748040 - protein, 15 aa, Homo sapiens
  CDR3 for beta chain variable domain of TCR clone 374020 (TRBV12-4, TRBJ2-5)
CASSPPTGLQEAQYF

SEQ ID NO: 748041 - protein, 13 aa, Homo sapiens
  CDR3 for alpha chain variable domain of TCR clone 374021 (TRAV27, TRAJ6)
GAGGTRGSYIPTF

SEQ ID NO: 748042 - protein, 14 aa, Homo sapiens
  CDR3 for beta chain variable domain of TCR clone 374021 (TRBV6-3, TRBJ1-1)
CASSYQRRDTEAFF

SEQ ID NO: 748043 - protein, 14 aa, Homo sapiens
  CDR3 for alpha chain variable domain of TCR clone 374022 (TRAV1-2, TRAJ8)
CAVREDTGFQKLVF

SEQ ID NO: 748044 - protein, 12 aa, Homo sapiens
  CDR3 for beta chain variable domain of TCR clone 374022 (TRBV2, TRBJ2-1)
CAYGPPCNEQFF

SEQ ID NO: 748045 - protein, 14 aa, Homo sapiens
  CDR3 for alpha chain variable domain of TCR clone 374023 (TRAV16, TRAJ31)
CSKWRRGDNARLMF

SEQ ID NO: 748046 - protein, 15 aa, Homo sapiens
  CDR3 for beta chain variable domain of TCR clone 374023 (TRBV2, TRBJ2-1)
CASSEEREGDNEQFF

SEQ ID NO: 748047 - protein, 15 aa, Homo sapiens
  CDR3 for alpha chain variable domain of TCR clone 374024 (TRAV8-4, TRAJ37)
RAVSRGSGNTGKLIF

SEQ ID NO: 748048 - protein, 13 aa, Homo sapiens
  CDR3 for beta chain variable domain of TCR clone 374024 (TRBV20-1, TRBJ2-7)
CSATHTSGYEQYF

SEQ ID NO: 748049 - protein, 13 aa, Homo sapiens
  CDR3 for alpha chain variable domain of TCR clone 374025 (TRAV1-2, TRAJ9)
CAVLNTGGFETIF

SEQ ID NO: 748050 - protein, 13 aa, Homo sapiens
  CDR3 for beta chain variable domain of TCR clone 374025 (TRBV19, TRBJ2-7)
CASRKAGGSEQYF

SEQ ID NO: 748051 - protein, 15 aa, Homo sapiens
  CDR3 for alpha chain variable domain of TCR clone 374026 (TRAV14/DV4, TRAJ15)
CAMRGSNQAGTALIF

SEQ ID NO: 748052 - protein, 19 aa, Homo sapiens
  CDR3 for beta chain variable domain of TCR clone 374026 (TRBV25-1, TRBJ2-2)
CAILVYRVDRGRKTGELFF

SEQ ID NO: 748053 - protein, 14 aa, Homo sapiens
  CDR3 for alpha chain variable domain of TCR clone 374027 (TRAV12-2, TRAJ44)
CAVNKAGTASKLTF

SEQ ID NO: 748054 - protein, 15 aa, Homo sapiens
  CDR3 for beta chain variable domain of TCR clone 374027 (TRBV4-1, TRBJ2-7)
CASSQNTGRLYEQYF

SEQ ID NO: 748055 - protein, 13 aa, Homo sapiens
  CDR3 for alpha chain variable domain of TCR clone 374028 (TRAV27, TRAJ37)
CAGGPSNTGKLIF

SEQ ID NO: 748056 - protein, 11 aa, Homo sapiens
  CDR3 for beta chain variable domain of TCR clone 374028 (TRBV3-1, TRBJ2-4)
CASSRSDIQYF

SEQ ID NO: 748057 - protein, 16 aa, Homo sapiens
  CDR3 for alpha chain variable domain of TCR clone 374029 (TRAV3, TRAJ37)
CAVRGKGSGNTGKLIL

SEQ ID NO: 748058 - protein, 14 aa, Homo sapiens
  CDR3 for beta chain variable domain of TCR clone 374029 (TRBV20-1, TRBJ2-3)
CSARGGTRTDTQYF

SEQ ID NO: 748059 - protein, 14 aa, Homo sapiens
  CDR3 for alpha chain variable domain of TCR clone 374030 (TRAV2, TRAJ22)
CAVGRCGSARQLTF

SEQ ID NO: 748060 - protein, 14 aa, Homo sapiens
  CDR3 for beta chain variable domain of TCR clone 374030 (TRBV19, TRBJ2-1)
CASPTFVLSGEQFF

SEQ ID NO: 748061 - protein, 14 aa, Homo sapiens
  CDR3 for alpha chain variable domain of TCR clone 374031 (TRAV8-1, TRAJ36)
CAVNSPTGANNLFF

SEQ ID NO: 748062 - protein, 15 aa, Homo sapiens
  CDR3 for beta chain variable domain of TCR clone 374031 (TRBV7-2, TRBJ2-3)
CASSLDQGGTDTQYF

SEQ ID NO: 748063 - protein, 15 aa, Homo sapiens
  CDR3 for alpha chain variable domain of TCR clone 374032 (TRAV21, TRAJ53)
CATLNSGGSNYKLTF

SEQ ID NO: 748064 - protein, 15 aa, Homo sapiens
  CDR3 for beta chain variable domain of TCR clone 374032 (TRBV11-2, TRBJ1-6)
CASSLDPWAVSPLHF

SEQ ID NO: 748065 - protein, 14 aa, Homo sapiens
  CDR3 for alpha chain variable domain of TCR clone 374033 (TRAV38-1, TRAJ45)
CASHSGGGADGLTF

SEQ ID NO: 748066 - protein, 13 aa, Homo sapiens
  CDR3 for beta chain variable domain of TCR clone 374033 (TRBV10-3, TRBJ1-2)
CAISERDCYGYTF

SEQ ID NO: 748067 - protein, 16 aa, Homo sapiens
  CDR3 for alpha chain variable domain of TCR clone 374034 (TRAV3, TRAJ10)
CAVRDMRAGGGKKLSF

SEQ ID NO: 748068 - protein, 16 aa, Homo sapiens
  CDR3 for beta chain variable domain of TCR clone 374034 (TRBV20-1, TRBJ1-4)
CSAPGQGLLTNEKLFF

SEQ ID NO: 748069 - protein, 15 aa, Homo sapiens
  CDR3 for alpha chain variable domain of TCR clone 374035 (TRAV13-1, TRAJ10)
CAAAVVTGGGNKLTF

SEQ ID NO: 748070 - protein, 13 aa, Homo sapiens
  CDR3 for beta chain variable domain of TCR clone 374035 (TRBV28, TRBJ2-5)
CAGVSRGEETQYF

SEQ ID NO: 748071 - protein, 14 aa, Homo sapiens
  CDR3 for alpha chain variable domain of TCR clone 374036 (TRAV9-2, TRAJ39)
CALYIYNAGNMLTF

SEQ ID NO: 748072 - protein, 12 aa, Homo sapiens
  CDR3 for beta chain variable domain of TCR clone 374036 (TRBV28, TRBJ2-6)
CAIQAGANDLTF

SEQ ID NO: 748073 - protein, 16 aa, Homo sapiens
  CDR3 for alpha chain variable domain of TCR clone 374037 (TRAV26-1, TRAJ40)
CIVRVGTTPGTYKYIF

SEQ ID NO: 748074 - protein, 12 aa, Homo sapiens
  CDR3 for beta chain variable domain of TCR clone 374037 (TRBV7-9, TRBJ2-7)
CATRTDAYEQYF

SEQ ID NO: 748075 - protein, 15 aa, Homo sapiens
  CDR3 for alpha chain variable domain of TCR clone 374038 (TRAV3, TRAJ22)
CAVRDRGGSGRQLTF

SEQ ID NO: 748076 - protein, 13 aa, Homo sapiens
  CDR3 for beta chain variable domain of TCR clone 374038 (TRBV12-4, TRBJ1-2)
CASSLRQGKGYTF

SEQ ID NO: 748077 - protein, 15 aa, Homo sapiens
  CDR3 for alpha chain variable domain of TCR clone 374039 (TRAV26-2, TRAJ39)
CSLRGNNNAGNMLTF

SEQ ID NO: 748078 - protein, 14 aa, Homo sapiens
  CDR3 for beta chain variable domain of TCR clone 374039 (TRBV12-5, TRBJ2-5)
CASGSRTHQETQYF

SEQ ID NO: 748079 - protein, 14 aa, Homo sapiens
  CDR3 for alpha chain variable domain of TCR clone 374040 (TRAV13-2, TRAJ43)
CAEIPTYNNNDMRF

SEQ ID NO: 748080 - protein, 15 aa, Homo sapiens
  CDR3 for beta chain variable domain of TCR clone 374040 (TRBV7-9, TRBJ2-2)
CASGSLDTFPGELFF

SEQ ID NO: 748081 - protein, 14 aa, Homo sapiens
  CDR3 for alpha chain variable domain of TCR clone 374041 (TRAV12-2, TRAJ13)
CAVQKTGGYQKVTF

SEQ ID NO: 748082 - protein, 14 aa, Homo sapiens
  CDR3 for beta chain variable domain of TCR clone 374041 (TRBV10-3, TRBJ2-2)
CATFGQLNTGELFF

SEQ ID NO: 748083 - protein, 13 aa, Homo sapiens
  CDR3 for alpha chain variable domain of TCR clone 374042 (TRAV17, TRAJ9)
CATDYTGGFKTIF

SEQ ID NO: 748084 - protein, 13 aa, Homo sapiens
  CDR3 for beta chain variable domain of TCR clone 374042 (TRBV12-4, TRBJ1-1)
CASSLGGTTEAFF

SEQ ID NO: 748085 - protein, 15 aa, Homo sapiens
  CDR3 for alpha chain variable domain of TCR clone 374043 (TRAV8-3, TRAJ11)
CAVGLLSSGYSTLTF

SEQ ID NO: 748086 - protein, 15 aa, Homo sapiens
  CDR3 for beta chain variable domain of TCR clone 374043 (TRBV11-3, TRBJ2-7)
CASSPGPASSYEQYF

SEQ ID NO: 748087 - protein, 14 aa, Homo sapiens
  CDR3 for alpha chain variable domain of TCR clone 374044 (TRAV8-4, TRAJ29)
CAVSAVEGNTHLVF

SEQ ID NO: 748088 - protein, 13 aa, Homo sapiens
  CDR3 for beta chain variable domain of TCR clone 374044 (TRBV12-4, TRBJ2-7)
CASSFQGRYEQYF

SEQ ID NO: 748089 - protein, 15 aa, Homo sapiens
  CDR3 for alpha chain variable domain of TCR clone 374045 (TRAV2, TRAJ40)
CAVVTSEPTNTSLEQ

SEQ ID NO: 748090 - protein, 14 aa, Homo sapiens
  CDR3 for beta chain variable domain of TCR clone 374045 (TRBV19, TRBJ2-1)
CASPTFVLSGEQFF

SEQ ID NO: 748091 - protein, 14 aa, Homo sapiens
  CDR3 for alpha chain variable domain of TCR clone 374046 (TRAV16, TRAJ54)
CALSGLQGAQKLVF

SEQ ID NO: 748092 - protein, 17 aa, Homo sapiens
  CDR3 for beta chain variable domain of TCR clone 374046 (TRBV28, TRBJ2-5)
CASSRQGGLAGAETQYF

SEQ ID NO: 748093 - protein, 11 aa, Homo sapiens
  CDR3 for alpha chain variable domain of TCR clone 374047 (TRAV17, TRAJ43)
CATPRSNDMRF

SEQ ID NO: 748094 - protein, 13 aa, Homo sapiens
  CDR3 for beta chain variable domain of TCR clone 374047 (TRBV7-7, TRBJ1-1)
CASSLGANTEAFF

SEQ ID NO: 748095 - protein, 14 aa, Homo sapiens
  CDR3 for alpha chain variable domain of TCR clone 374048 (TRAV9-2, TRAJ39)
CALYIYNAGNMLTF

SEQ ID NO: 748096 - protein, 15 aa, Homo sapiens
  CDR3 for beta chain variable domain of TCR clone 374048 (TRBV20-1, TRBJ2-5)
CSASPLAGGQETQYF

SEQ ID NO: 748097 - protein, 18 aa, Homo sapiens
  CDR3 for alpha chain variable domain of TCR clone 374049 (TRAV12-3, TRAJ52)
CAMSVGGAGGTSYGKLTF

SEQ ID NO: 748098 - protein, 13 aa, Homo sapiens
  CDR3 for beta chain variable domain of TCR clone 374049 (TRBV13, TRBJ2-1)
CASSLTGNNEQFF

SEQ ID NO: 748099 - protein, 17 aa, Homo sapiens
  CDR3 for alpha chain variable domain of TCR clone 374050 (TRAV26-1, TRAJ47)
CIVPSLLYMEYGNKLVC

SEQ ID NO: 748100 - protein, 14 aa, Homo sapiens
  CDR3 for beta chain variable domain of TCR clone 374050 (TRBV7-3, TRBJ1-5)
RASSFSGCNQPQHF

SEQ ID NO: 748101 - protein, 11 aa, Homo sapiens
  CDR3 for alpha chain variable domain of TCR clone 374051 (TRAV12-3, TRAJ43)
CAMSVSNDMRF

SEQ ID NO: 748102 - protein, 16 aa, Homo sapiens
  CDR3 for beta chain variable domain of TCR clone 374051 (TRBV2, TRBJ2-3)
CASSTSVDGVTDTQYF

SEQ ID NO: 748103 - protein, 13 aa, Homo sapiens
  CDR3 for alpha chain variable domain of TCR clone 374052 (TRAV12-2, TRAJ26)
CAVTDPYGQNFVF

SEQ ID NO: 748104 - protein, 14 aa, Homo sapiens
  CDR3 for beta chain variable domain of TCR clone 374052 (TRBV18, TRBJ2-7)
CASSPRGGAYEQYF

SEQ ID NO: 748105 - protein, 14 aa, Homo sapiens
  CDR3 for alpha chain variable domain of TCR clone 374053 (TRAV1-2, TRAJ8)
CAVREDTGFQKLVF

SEQ ID NO: 748106 - protein, 15 aa, Homo sapiens
  CDR3 for beta chain variable domain of TCR clone 374053 (TRBV27, TRBJ2-7)
CASSFLSGGSYEQYF

SEQ ID NO: 748107 - protein, 11 aa, Homo sapiens
  CDR3 for alpha chain variable domain of TCR clone 374054 (TRAV13-1, TRAJ23)
CAASSQGKLIF

SEQ ID NO: 748108 - protein, 13 aa, Homo sapiens
  CDR3 for beta chain variable domain of TCR clone 374054 (TRBV7-3, TRBJ2-5)
WASSFRGGETQYF

SEQ ID NO: 748109 - protein, 15 aa, Homo sapiens
  CDR3 for alpha chain variable domain of TCR clone 374055 (TRAV23/DV6, TRAJ32)
CAASKMGGATNKLIF

SEQ ID NO: 748110 - protein, 15 aa, Homo sapiens
  CDR3 for beta chain variable domain of TCR clone 374055 (TRBV28, TRBJ2-7)
CASSPGGRGFYEQYF

SEQ ID NO: 748111 - protein, 13 aa, Homo sapiens
  CDR3 for alpha chain variable domain of TCR clone 374056 (TRAV12-3, TRAJ13)
CAMTSGGYQKVTF

SEQ ID NO: 748112 - protein, 11 aa, Homo sapiens
  CDR3 for beta chain variable domain of TCR clone 374056 (TRBV7-9, TRBJ2-3)
CASSGPDTQYF

SEQ ID NO: 748113 - protein, 11 aa, Homo sapiens
  CDR3 for alpha chain variable domain of TCR clone 374057 (TRAV35, TRAJ34)
CWARNTDKLIF

SEQ ID NO: 748114 - protein, 13 aa, Homo sapiens
  CDR3 for beta chain variable domain of TCR clone 374057 (TRBV19, TRBJ2-7)
CASSSDRTYERYF

SEQ ID NO: 748115 - protein, 19 aa, Homo sapiens
  CDR3 for alpha chain variable domain of TCR clone 374058 (TRAV2, TRAJ32)
TTVLSTPPGQGGATNKLIF

SEQ ID NO: 748116 - protein, 12 aa, Homo sapiens
  CDR3 for beta chain variable domain of TCR clone 374058 (TRBV20-1, TRBJ2-7)
CSAITPTKEQYF

SEQ ID NO: 748117 - protein, 13 aa, Homo sapiens
  CDR3 for alpha chain variable domain of TCR clone 374059 (TRAV13-2, TRAJ13)
CAERPGGYQRVTF

SEQ ID NO: 748118 - protein, 16 aa, Homo sapiens
  CDR3 for beta chain variable domain of TCR clone 374059 (TRBV18, TRBJ2-5)
CASSPPSSGGEKTQYF

SEQ ID NO: 748119 - protein, 12 aa, Homo sapiens
  CDR3 for alpha chain variable domain of TCR clone 374060 (TRAV1-1, TRAJ8)
CAGGTGFQKVVF

SEQ ID NO: 748120 - protein, 13 aa, Homo sapiens
  CDR3 for beta chain variable domain of TCR clone 374060 (TRBV7-3, TRBJ1-1)
CASSQDWGAEAFF

SEQ ID NO: 748121 - protein, 13 aa, Homo sapiens
  CDR3 for alpha chain variable domain of TCR clone 374061 (TRAV17, TRAJ5)
CAHMDTGRRALTF

SEQ ID NO: 748122 - protein, 14 aa, Homo sapiens
  CDR3 for beta chain variable domain of TCR clone 374061 (TRBV6-6, TRBJ2-5)
CQQSRGGLEETQYF

SEQ ID NO: 748123 - protein, 14 aa, Homo sapiens
  CDR3 for alpha chain variable domain of TCR clone 374062 (TRAV12-2, TRAJ13)
CAVKKTGGYQKVPF

SEQ ID NO: 748124 - protein, 14 aa, Homo sapiens
  CDR3 for beta chain variable domain of TCR clone 374062 (TRBV25-1, TRBJ1-1)
CASTHLGGNTEAFF

SEQ ID NO: 748125 - protein, 14 aa, Homo sapiens
  CDR3 for alpha chain variable domain of TCR clone 374063 (TRAV23/DV6, TRAJ13)
CAAMYSGGYQKVTF

SEQ ID NO: 748126 - protein, 21 aa, Homo sapiens
  CDR3 for beta chain variable domain of TCR clone 374063 (TRBV7-9, TRBJ2-1)
RGTRPCISVPAAPGTLYEQFF

SEQ ID NO: 748127 - protein, 12 aa, Homo sapiens
  CDR3 for alpha chain variable domain of TCR clone 374064 (TRAV1-2, TRAJ26)
CAVRYYGQNFVF

SEQ ID NO: 748128 - protein, 14 aa, Homo sapiens
  CDR3 for beta chain variable domain of TCR clone 374064 (TRBV11-1, TRBJ2-7)
CDSSFRQGSYEQYF

SEQ ID NO: 748129 - protein, 11 aa, Homo sapiens
  CDR3 for alpha chain variable domain of TCR clone 374065 (TRAV12-3, TRAJ43)
SAMSVSNDMRF

SEQ ID NO: 748130 - protein, 13 aa, Homo sapiens
  CDR3 for beta chain variable domain of TCR clone 374065 (TRBV20-1, TRBJ1-1)
CSAPLGGGTEAFF

SEQ ID NO: 748131 - protein, 14 aa, Homo sapiens
  CDR3 for alpha chain variable domain of TCR clone 374066 (TRAV1-2, TRAJ8)
CAVREDTGFQKLVF

SEQ ID NO: 748132 - protein, 14 aa, Homo sapiens
  CDR3 for beta chain variable domain of TCR clone 374066 (TRBV10-3, TRBJ1-3)
CAIRGQRAGNTIYF

SEQ ID NO: 748133 - protein, 14 aa, Homo sapiens
  CDR3 for alpha chain variable domain of TCR clone 374067 (TRAV26-1, TRAJ48)
CIVRVGFGNEKLTF

SEQ ID NO: 748134 - protein, 11 aa, Homo sapiens
  CDR3 for beta chain variable domain of TCR clone 374067 (TRBV6-3, TRBJ2-3)
CATGQADTQYF

SEQ ID NO: 748135 - protein, 14 aa, Homo sapiens
  CDR3 for alpha chain variable domain of TCR clone 374068 (TRAV26-2, TRAJ32)
CILFRGGATNKLTF

SEQ ID NO: 748136 - protein, 15 aa, Homo sapiens
  CDR3 for beta chain variable domain of TCR clone 374068 (TRBV2, TRBJ2-2)
CASSGFGAGTGELFF

SEQ ID NO: 748137 - protein, 16 aa, Homo sapiens
  CDR3 for alpha chain variable domain of TCR clone 374069 (TRAV12-3, TRAJ53)
CAMIPGSGGSDYKLTF

SEQ ID NO: 748138 - protein, 11 aa, Homo sapiens
  CDR3 for beta chain variable domain of TCR clone 374069 (TRBV29-1, TRBJ2-5)
CSEDRTGTQYF

SEQ ID NO: 748139 - protein, 15 aa, Homo sapiens
  CDR3 for alpha chain variable domain of TCR clone 374070 (TRAV35, TRAJ24)
CAGQSAQGSWGKLQF

SEQ ID NO: 748140 - protein, 13 aa, Homo sapiens
  CDR3 for beta chain variable domain of TCR clone 374070 (TRBV28, TRBJ2-5)
CASSFAGGETQYF

SEQ ID NO: 748141 - protein, 15 aa, Homo sapiens
  CDR3 for alpha chain variable domain of TCR clone 374071 (TRAV17, TRAJ22)
CATAPISGSARQLTF

SEQ ID NO: 748142 - protein, 13 aa, Homo sapiens
  CDR3 for beta chain variable domain of TCR clone 374071 (TRBV6-5, TRBJ1-2)
CASSLDTYYGYSF

SEQ ID NO: 748143 - protein, 11 aa, Homo sapiens
  CDR3 for alpha chain variable domain of TCR clone 374072 (TRAV17, TRAJ39)
CATGAGNMLTL

SEQ ID NO: 748144 - protein, 16 aa, Homo sapiens
  CDR3 for beta chain variable domain of TCR clone 374072 (TRBV5-1, TRBJ2-1)
CASSFGVSGSYNEPLF

SEQ ID NO: 748145 - protein, 13 aa, Homo sapiens
  CDR3 for alpha chain variable domain of TCR clone 374073 (TRAV17, TRAJ34)
CATDLYNTDKLIF

SEQ ID NO: 748146 - protein, 15 aa, Homo sapiens
  CDR3 for beta chain variable domain of TCR clone 374073 (TRBV11-2, TRBJ2-3)
CASSLRGGSTDTQYF

SEQ ID NO: 748147 - protein, 16 aa, Homo sapiens
  CDR3 for alpha chain variable domain of TCR clone 374074 (TRAV3, TRAJ3)
CDVRDRAKSSASKIIF

SEQ ID NO: 748148 - protein, 16 aa, Homo sapiens
  CDR3 for beta chain variable domain of TCR clone 374074 (TRBV20-1, TRBJ2-4)
CSATSLAELAKNIQYF

SEQ ID NO: 748149 - protein, 10 aa, Homo sapiens
  CDR3 for alpha chain variable domain of TCR clone 374075 (TRAV23/DV6, TRAJ57)
CAASSTLSQG

SEQ ID NO: 748150 - protein, 14 aa, Homo sapiens
  CDR3 for beta chain variable domain of TCR clone 374075 (TRBV5-4, TRBJ2-2)
CASRLDGGTGELFF

SEQ ID NO: 748151 - protein, 15 aa, Homo sapiens
  CDR3 for alpha chain variable domain of TCR clone 374076 (TRAV12-1, TRAJ45)
CVVLSGGGGADGRTF

SEQ ID NO: 748152 - protein, 15 aa, Homo sapiens
  CDR3 for beta chain variable domain of TCR clone 374076 (TRBV20-1, TRBJ2-7)
CSARDRVSGMDEQYF

SEQ ID NO: 748153 - protein, 12 aa, Homo sapiens
  CDR3 for alpha chain variable domain of TCR clone 374077 (TRAV21, TRAJ33)
CAKMDSNCQLIW

SEQ ID NO: 748154 - protein, 14 aa, Homo sapiens
  CDR3 for beta chain variable domain of TCR clone 374077 (TRBV2, TRBJ2-7)
CASSRTSGGYEQYF

SEQ ID NO: 748155 - protein, 13 aa, Homo sapiens
  CDR3 for alpha chain variable domain of TCR clone 374078 (TRAV12-2, TRAJ40)
CAVKGPGTNKYIF

SEQ ID NO: 748156 - protein, 15 aa, Homo sapiens
  CDR3 for beta chain variable domain of TCR clone 374078 (TRBV28, TRBJ1-2)
CASSFRDRPSYGYTF

SEQ ID NO: 748157 - protein, 12 aa, Homo sapiens
  CDR3 for alpha chain variable domain of TCR clone 374079 (TRAV12-2, TRAJ44)
CADTGTASKLTF

SEQ ID NO: 748158 - protein, 16 aa, Homo sapiens
  CDR3 for beta chain variable domain of TCR clone 374079 (TRBV12-4, TRBJ1-5)
CASSRPVGGSNQPQHF

SEQ ID NO: 748159 - protein, 10 aa, Homo sapiens
  CDR3 for alpha chain variable domain of TCR clone 374080 (TRAV12-3, TRAJ18)
CAMSAEAQPW

SEQ ID NO: 748160 - protein, 13 aa, Homo sapiens
  CDR3 for beta chain variable domain of TCR clone 374080 (TRBV7-3, TRBJ1-2)
CASSLKRGYGYTF

SEQ ID NO: 748161 - protein, 17 aa, Homo sapiens
  CDR3 for alpha chain variable domain of TCR clone 374081 (TRAV3, TRAJ42)
CAVRDRDYGGSQGNLIF

SEQ ID NO: 748162 - protein, 13 aa, Homo sapiens
  CDR3 for beta chain variable domain of TCR clone 374081 (TRBV20-1, TRBJ2-5)
CSARRGSGATQYF

SEQ ID NO: 748163 - protein, 15 aa, Homo sapiens
  CDR3 for alpha chain variable domain of TCR clone 374082 (TRAV26-1, TRAJ29)
CIVRVEGSGNTPLVF

SEQ ID NO: 748164 - protein, 13 aa, Homo sapiens
  CDR3 for beta chain variable domain of TCR clone 374082 (TRBV7-2, TRBJ2-4)
CASSREHANIQYF

SEQ ID NO: 748165 - protein, 15 aa, Homo sapiens
  CDR3 for alpha chain variable domain of TCR clone 374083 (TRAV38-1, TRAJ37)
CAFIFGSGNTGKLIF

SEQ ID NO: 748166 - protein, 13 aa, Homo sapiens
  CDR3 for beta chain variable domain of TCR clone 374083 (TRBV7-3, TRBJ1-2)
CASSLKRGYGYTF

SEQ ID NO: 748167 - protein, 13 aa, Homo sapiens
  CDR3 for alpha chain variable domain of TCR clone 374084 (TRAV12-2, TRAJ18)
CAVRGSTLGRLYF

SEQ ID NO: 748168 - protein, 15 aa, Homo sapiens
  CDR3 for beta chain variable domain of TCR clone 374084 (TRBV27, TRBJ1-5)
CASSSSGTGNQPQHF

SEQ ID NO: 748169 - protein, 18 aa, Homo sapiens
  CDR3 for alpha chain variable domain of TCR clone 374085 (TRAV26-2, TRAJ45)
CILRLWGYSGGGADGLTF

SEQ ID NO: 748170 - protein, 17 aa, Homo sapiens
  CDR3 for beta chain variable domain of TCR clone 374085 (TRBV28, TRBJ2-3)
CASNPTPAGGRVDTQYF

SEQ ID NO: 748171 - protein, 14 aa, Homo sapiens
  CDR3 for alpha chain variable domain of TCR clone 374086 (TRAV12-3, TRAJ10)
SQLPLTGGGNKLTF

SEQ ID NO: 748172 - protein, 14 aa, Homo sapiens
  CDR3 for beta chain variable domain of TCR clone 374086 (TRBV7-2, TRBJ2-2)
CASSLNSNTGELFF

SEQ ID NO: 748173 - protein, 17 aa, Homo sapiens
  CDR3 for alpha chain variable domain of TCR clone 374087 (TRAV29/DV5, TRAJ10)
CSVLLGRATGGGSKLTF

SEQ ID NO: 748174 - protein, 14 aa, Homo sapiens
  CDR3 for beta chain variable domain of TCR clone 374087 (TRBV11-2, TRBJ2-5)
CASSRTGGIETQYF

SEQ ID NO: 748175 - protein, 11 aa, Homo sapiens
  CDR3 for alpha chain variable domain of TCR clone 374088 (TRAV3, TRAJ21)
CAVGNFNKFYF

SEQ ID NO: 748176 - protein, 15 aa, Homo sapiens
  CDR3 for beta chain variable domain of TCR clone 374088 (TRBV20-1, TRBJ1-1)
CSASRGVTGNTEAFF

SEQ ID NO: 748177 - protein, 13 aa, Homo sapiens
  CDR3 for alpha chain variable domain of TCR clone 374089 (TRAV3, TRAJ27)
CAVRPLGAGKSTS

SEQ ID NO: 748178 - protein, 13 aa, Homo sapiens
  CDR3 for beta chain variable domain of TCR clone 374089 (TRBV7-9, TRBJ2-3)
CASSPRSTDTQYF

SEQ ID NO: 748179 - protein, 15 aa, Homo sapiens
  CDR3 for alpha chain variable domain of TCR clone 374090 (TRAV20, TRAJ41)
CAVQANSNSWYALNF

SEQ ID NO: 748180 - protein, 18 aa, Homo sapiens
  CDR3 for beta chain variable domain of TCR clone 374090 (TRBV7-9, TRBJ2-7)
CASSLTTSGSRTWYEQYF

SEQ ID NO: 748181 - protein, 16 aa, Homo sapiens
  CDR3 for alpha chain variable domain of TCR clone 374091 (TRAV8-3, TRAJ44)
CAVGTLMTGAASKLTF

SEQ ID NO: 748182 - protein, 17 aa, Homo sapiens
  CDR3 for beta chain variable domain of TCR clone 374091 (TRBV11-2, TRBJ2-1)
CASSLYPPGVEYNEQFF

SEQ ID NO: 748183 - protein, 14 aa, Homo sapiens
  CDR3 for alpha chain variable domain of TCR clone 374092 (TRAV38-1, TRAJ45)
CAYYSGGGADGLTF

SEQ ID NO: 748184 - protein, 18 aa, Homo sapiens
  CDR3 for beta chain variable domain of TCR clone 374092 (TRBV5-5, TRBJ1-5)
CASSLRQVKGSSNQPQHF

SEQ ID NO: 748185 - protein, 15 aa, Homo sapiens
  CDR3 for alpha chain variable domain of TCR clone 374093 (TRAV23/DV6, TRAJ38)
CAASGGAGNNRKLIC

SEQ ID NO: 748186 - protein, 13 aa, Homo sapiens
  CDR3 for beta chain variable domain of TCR clone 374093 (TRBV7-2, TRBJ1-2)
CASSLPGLYGYTF

SEQ ID NO: 748187 - protein, 14 aa, Homo sapiens
  CDR3 for alpha chain variable domain of TCR clone 374094 (TRAV1-2, TRAJ17)
CALRRGAAGNKLTS

SEQ ID NO: 748188 - protein, 13 aa, Homo sapiens
  CDR3 for beta chain variable domain of TCR clone 374094 (TRBV9, TRBJ2-1)
CASSVGQGGEQFF

SEQ ID NO: 748189 - protein, 18 aa, Homo sapiens
  CDR3 for alpha chain variable domain of TCR clone 374095 (TRAV12-2, )
CAVEDIQDPDPAVYQLRD

SEQ ID NO: 748190 - protein, 16 aa, Homo sapiens
  CDR3 for beta chain variable domain of TCR clone 374095 (TRBV6-1, TRBJ1-2)
CASSGAWQGRSHGYTF

SEQ ID NO: 748191 - protein, 14 aa, Homo sapiens
  CDR3 for alpha chain variable domain of TCR clone 374096 (TRAV2, TRAJ9)
CAVEDRSGGFKTIF

SEQ ID NO: 748192 - protein, 14 aa, Homo sapiens
  CDR3 for beta chain variable domain of TCR clone 374096 (TRBV20-1, TRBJ2-3)
CSARGGTSTDTQYF

SEQ ID NO: 748193 - protein, 14 aa, Homo sapiens
  CDR3 for alpha chain variable domain of TCR clone 374097 (TRAV26-1, TRAJ45)
CIAVTGGGADGLTF

SEQ ID NO: 748194 - protein, 14 aa, Homo sapiens
  CDR3 for beta chain variable domain of TCR clone 374097 (TRBV2, TRBJ2-1)
CASSYRGTHNEQFF

SEQ ID NO: 748195 - protein, 16 aa, Homo sapiens
  CDR3 for alpha chain variable domain of TCR clone 374098 (TRAV12-3, TRAJ53)
CAISPGGGGSNYKLPF

SEQ ID NO: 748196 - protein, 16 aa, Homo sapiens
  CDR3 for beta chain variable domain of TCR clone 374098 (TRBV4-2, TRBJ1-1)
CASSQAGFGMNTEAFF

SEQ ID NO: 748197 - protein, 13 aa, Homo sapiens
  CDR3 for alpha chain variable domain of TCR clone 374099 (TRAV29/DV5, TRAJ31)
CAASRNNNAILMF

SEQ ID NO: 748198 - protein, 12 aa, Homo sapiens
  CDR3 for beta chain variable domain of TCR clone 374099 (TRBV14, TRBJ2-5)
CASSQLKETQYF

SEQ ID NO: 748199 - protein, 18 aa, Homo sapiens
  CDR3 for alpha chain variable domain of TCR clone 374100 (TRAV21, TRAJ52)
CAVRPSPAGGTRYGRLTF

SEQ ID NO: 748200 - protein, 15 aa, Homo sapiens
  CDR3 for beta chain variable domain of TCR clone 374100 (TRBV20-1, TRBJ1-5)
CSAFKNGQRNQPQHF

SEQ ID NO: 748201 - protein, 15 aa, Homo sapiens
  CDR3 for alpha chain variable domain of TCR clone 374101 (TRAV8-1, TRAJ6)
CAVNANPGGSYIPTF

SEQ ID NO: 748202 - protein, 12 aa, Homo sapiens
  CDR3 for beta chain variable domain of TCR clone 374101 (TRBV5-7, TRBJ2-7)
CASSVQGGEQCF

SEQ ID NO: 748203 - protein, 12 aa, Homo sapiens
  CDR3 for alpha chain variable domain of TCR clone 374102 (TRAV8-4, TRAJ37)
CAKYSNTGKLIF

SEQ ID NO: 748204 - protein, 15 aa, Homo sapiens
  CDR3 for beta chain variable domain of TCR clone 374102 (TRBV5-1, TRBJ2-3)
CASSYTSGSTDTQYF

SEQ ID NO: 748205 - protein, 14 aa, Homo sapiens
  CDR3 for alpha chain variable domain of TCR clone 374103 (TRAV34, TRAJ44)
CGADGTGTASKLTF

SEQ ID NO: 748206 - protein, 15 aa, Homo sapiens
  CDR3 for beta chain variable domain of TCR clone 374103 (TRBV7-8, TRBJ2-1)
CASSLADSLYNEQFF

SEQ ID NO: 748207 - protein, 13 aa, Homo sapiens
  CDR3 for alpha chain variable domain of TCR clone 374104 (TRAV17, TRAJ5)
YAPMDTGRRALTF

SEQ ID NO: 748208 - protein, 14 aa, Homo sapiens
  CDR3 for beta chain variable domain of TCR clone 374104 (TRBV19, TRBJ2-1)
CASPTFVLSGEQFF

SEQ ID NO: 748209 - protein, 14 aa, Homo sapiens
  CDR3 for alpha chain variable domain of TCR clone 374105 (TRAV16, TRAJ26)
CITVLSAYGQNFVF

SEQ ID NO: 748210 - protein, 14 aa, Homo sapiens
  CDR3 for beta chain variable domain of TCR clone 374105 (TRBV7-2, TRBJ2-7)
CASRSQGAEYEQYF

SEQ ID NO: 748211 - protein, 16 aa, Homo sapiens
  CDR3 for alpha chain variable domain of TCR clone 374106 (TRAV3, TRAJ10)
CAVRDMRAGGGNKITF

SEQ ID NO: 748212 - protein, 16 aa, Homo sapiens
  CDR3 for beta chain variable domain of TCR clone 374106 (TRBV24-1, TRBJ2-3)
CATSDPGTGATDTQYF

SEQ ID NO: 748213 - protein, 15 aa, Homo sapiens
  CDR3 for alpha chain variable domain of TCR clone 374107 (TRAV12-2, TRAJ52)
CAVTSGGTSYGKLTF

SEQ ID NO: 748214 - protein, 15 aa, Homo sapiens
  CDR3 for beta chain variable domain of TCR clone 374107 (TRBV7-8, TRBJ2-1)
CASSPGFISGNEQFF

SEQ ID NO: 748215 - protein, 17 aa, Homo sapiens
  CDR3 for alpha chain variable domain of TCR clone 374108 (TRAV12-1, TRAJ42)
CVVMRMHYGGSQGNLIF

SEQ ID NO: 748216 - protein, 13 aa, Homo sapiens
  CDR3 for beta chain variable domain of TCR clone 374108 (TRBV7-2, TRBJ1-1)
CASSLARPAEAFF

SEQ ID NO: 748217 - protein, 15 aa, Homo sapiens
  CDR3 for alpha chain variable domain of TCR clone 374109 (TRAV22, TRAJ45)
CAAKYSGGGADGLTF

SEQ ID NO: 748218 - protein, 12 aa, Homo sapiens
  CDR3 for beta chain variable domain of TCR clone 374109 (TRBV11-2, TRBJ2-3)
GASRGAPNTQYF

SEQ ID NO: 748219 - protein, 15 aa, Homo sapiens
  CDR3 for alpha chain variable domain of TCR clone 374110 (TRAV12-3, TRAJ53)
CNERPIEGSNYKLPF

SEQ ID NO: 748220 - protein, 13 aa, Homo sapiens
  CDR3 for beta chain variable domain of TCR clone 374110 (TRBV15, TRBJ1-1)
CATSRGIQARAFF

SEQ ID NO: 748221 - protein, 16 aa, Homo sapiens
  CDR3 for alpha chain variable domain of TCR clone 374111 (TRAV3, TRAJ10)
CAVRDMRAGGGNKLTF

SEQ ID NO: 748222 - protein, 14 aa, Homo sapiens
  CDR3 for beta chain variable domain of TCR clone 374111 (TRBV7-6, TRBJ2-3)
CASSLGRVTDTQYF

SEQ ID NO: 748223 - protein, 22 aa, Homo sapiens
  CDR3 for alpha chain variable domain of TCR clone 374112 (TRAV21, TRAJ35)
CAVMPIGFGNVLHCGSDPQVIV

SEQ ID NO: 748224 - protein, 12 aa, Homo sapiens
  CDR3 for beta chain variable domain of TCR clone 374112 (TRBV7-9, TRBJ2-7)
CASSIKREEQYF

SEQ ID NO: 748225 - protein, 15 aa, Homo sapiens
  CDR3 for alpha chain variable domain of TCR clone 374113 (TRAV20, TRAJ58)
CAVQDLETSSSRLTF

SEQ ID NO: 748226 - protein, 12 aa, Homo sapiens
  CDR3 for beta chain variable domain of TCR clone 374113 (TRBV9, TRBJ2-2)
CASSARTRELFF

SEQ ID NO: 748227 - protein, 18 aa, Homo sapiens
  CDR3 for alpha chain variable domain of TCR clone 374114 (TRAV26-2, TRAJ45)
CILRVDKYSGGGADGLTF

SEQ ID NO: 748228 - protein, 13 aa, Homo sapiens
  CDR3 for beta chain variable domain of TCR clone 374114 (TRBV19, TRBJ1-1)
CASSGQVNTEAFF

SEQ ID NO: 748229 - protein, 12 aa, Homo sapiens
  CDR3 for alpha chain variable domain of TCR clone 374115 (TRAV26-1, TRAJ43)
CIVRPRGDDMRF

SEQ ID NO: 748230 - protein, 17 aa, Homo sapiens
  CDR3 for beta chain variable domain of TCR clone 374115 (TRBV4-1, TRBJ1-4)
CASSQEGPRGVEEKLFF

SEQ ID NO: 748231 - protein, 16 aa, Homo sapiens
  CDR3 for alpha chain variable domain of TCR clone 374116 (TRAV30, TRAJ24)
CGTEIVDADSWGKFQF

SEQ ID NO: 748232 - protein, 16 aa, Homo sapiens
  CDR3 for beta chain variable domain of TCR clone 374116 (TRBV12-5, TRBJ2-5)
CASGPRTSGNRETQYF

SEQ ID NO: 748233 - protein, 12 aa, Homo sapiens
  CDR3 for alpha chain variable domain of TCR clone 374117 (TRAV4, TRAJ21)
CLVGDSFNKFYF

SEQ ID NO: 748234 - protein, 15 aa, Homo sapiens
  CDR3 for beta chain variable domain of TCR clone 374117 (TRBV7-3, TRBJ2-1)
CASSLDGNSYNEQFF

SEQ ID NO: 748235 - protein, 11 aa, Homo sapiens
  CDR3 for alpha chain variable domain of TCR clone 374118 (TRAV3, TRAJ18)
CAVRDRRGSTL

SEQ ID NO: 748236 - protein, 15 aa, Homo sapiens
  CDR3 for beta chain variable domain of TCR clone 374118 (TRBV7-9, TRBJ1-6)
CASSSPGRGNSPLHF

SEQ ID NO: 748237 - protein, 12 aa, Homo sapiens
  CDR3 for alpha chain variable domain of TCR clone 374119 (TRAV3, TRAJ31)
CAVRDGNARLMF

SEQ ID NO: 748238 - protein, 14 aa, Homo sapiens
  CDR3 for beta chain variable domain of TCR clone 374119 (TRBV15, TRBJ2-3)
CATRSGTSTDTQYF

SEQ ID NO: 748239 - protein, 13 aa, Homo sapiens
  CDR3 for alpha chain variable domain of TCR clone 374120 (TRAV22, TRAJ29)
CAMGGSGNTPLVF

SEQ ID NO: 748240 - protein, 13 aa, Homo sapiens
  CDR3 for beta chain variable domain of TCR clone 374120 (TRBV4-2, TRBJ1-1)
CASSQAGNTEAFF

SEQ ID NO: 748241 - protein, 12 aa, Homo sapiens
  CDR3 for alpha chain variable domain of TCR clone 374121 (TRAV13-1, TRAJ48)
CAARVGGEKLTF

SEQ ID NO: 748242 - protein, 15 aa, Homo sapiens
  CDR3 for beta chain variable domain of TCR clone 374121 (TRBV12-4, TRBJ2-5)
CASSPPTGLQETQYF

SEQ ID NO: 748243 - protein, 16 aa, Homo sapiens
  CDR3 for alpha chain variable domain of TCR clone 374122 (TRAV1-2, TRAJ10)
CAVRGVLTGGGNKLTF

SEQ ID NO: 748244 - protein, 17 aa, Homo sapiens
  CDR3 for beta chain variable domain of TCR clone 374122 (TRBV18, TRBJ1-5)
CASSPTMGQGTNQPQHF

SEQ ID NO: 748245 - protein, 15 aa, Homo sapiens
  CDR3 for alpha chain variable domain of TCR clone 374123 (TRAV35, TRAJ40)
CAGQLGTSGSYEYIF

SEQ ID NO: 748246 - protein, 14 aa, Homo sapiens
  CDR3 for beta chain variable domain of TCR clone 374123 (TRBV7-3, TRBJ2-1)
CASSLAGGTNEQFF

SEQ ID NO: 748247 - protein, 16 aa, Homo sapiens
  CDR3 for alpha chain variable domain of TCR clone 374124 (TRAV16, TRAJ42)
CALSGYYAGSQGNLIF

SEQ ID NO: 748248 - protein, 14 aa, Homo sapiens
  CDR3 for beta chain variable domain of TCR clone 374124 (TRBV3-1, TRBJ2-5)
CASSQAVRQETQYF

SEQ ID NO: 748249 - protein, 14 aa, Homo sapiens
  CDR3 for alpha chain variable domain of TCR clone 374125 (TRAV8-4, TRAJ48)
CAVSETFGNEKLTF

SEQ ID NO: 748250 - protein, 15 aa, Homo sapiens
  CDR3 for beta chain variable domain of TCR clone 374125 (TRBV6-3, TRBJ2-7)
CASSSPGTVFYEQYF

SEQ ID NO: 748251 - protein, 13 aa, Homo sapiens
  CDR3 for alpha chain variable domain of TCR clone 374126 (TRAV12-2, TRAJ15)
CSVFNQAGTALIF

SEQ ID NO: 748252 - protein, 23 aa, Homo sapiens
  CDR3 for beta chain variable domain of TCR clone 374126 (TRBV7-8, TRBJ1-5)
RRTPPCISVPAAGGGGADQPQHF

SEQ ID NO: 748253 - protein, 12 aa, Homo sapiens
  CDR3 for alpha chain variable domain of TCR clone 374127 (TRAV1-2, TRAJ33)
CAALDSNYQLIW

SEQ ID NO: 748254 - protein, 13 aa, Homo sapiens
  CDR3 for beta chain variable domain of TCR clone 374127 (TRBV12-4, TRBJ2-2)
CASSITGSGELFF

SEQ ID NO: 748255 - protein, 18 aa, Homo sapiens
  CDR3 for alpha chain variable domain of TCR clone 374128 (TRAV8-4, TRAJ52)
CAVTRANAGGTSDGKLTF

SEQ ID NO: 748256 - protein, 20 aa, Homo sapiens
  CDR3 for beta chain variable domain of TCR clone 374128 (TRBV19, TRBJ2-1)
CASSISRTVTSTRLNNEQFF

SEQ ID NO: 748257 - protein, 13 aa, Homo sapiens
  CDR3 for alpha chain variable domain of TCR clone 374129 (TRAV12-3, TRAJ43)
CAMIRPNNNDMRF

SEQ ID NO: 748258 - protein, 13 aa, Homo sapiens
  CDR3 for beta chain variable domain of TCR clone 374129 (TRBV9, TRBJ2-1)
CASSPSGGNEQFF

SEQ ID NO: 748259 - protein, 16 aa, Homo sapiens
  CDR3 for alpha chain variable domain of TCR clone 374130 (TRAV3, TRAJ37)
CAVRPHGSGNTGELIL

SEQ ID NO: 748260 - protein, 16 aa, Homo sapiens
  CDR3 for beta chain variable domain of TCR clone 374130 (TRBV7-3, TRBJ2-3)
CASSLSGYRPEDTQYF

SEQ ID NO: 748261 - protein, 11 aa, Homo sapiens
  CDR3 for alpha chain variable domain of TCR clone 374131 (TRAV1-2, TRAJ20)
CAVANDYKLSF

SEQ ID NO: 748262 - protein, 18 aa, Homo sapiens
  CDR3 for beta chain variable domain of TCR clone 374131 (TRBV20-1, TRBJ2-6)
CSAETTQNKGYGEKVMIL

SEQ ID NO: 748263 - protein, 12 aa, Homo sapiens
  CDR3 for alpha chain variable domain of TCR clone 374132 (TRAV23/DV6, TRAJ30)
WAASKGDDKIIF

SEQ ID NO: 748264 - protein, 18 aa, Homo sapiens
  CDR3 for beta chain variable domain of TCR clone 374132 (TRBV10-3, TRBJ2-3)
CAISESRVGPMRGDTQYF

SEQ ID NO: 748265 - protein, 18 aa, Homo sapiens
  CDR3 for alpha chain variable domain of TCR clone 374133 (TRAV12-2, )
CAVEDIQNPDPAVYQLRD

SEQ ID NO: 748266 - protein, 18 aa, Homo sapiens
  CDR3 for beta chain variable domain of TCR clone 374133 (TRBV11-2, TRBJ2-3)
CASSLGGAARGAPNTQYF

SEQ ID NO: 748267 - protein, 15 aa, Homo sapiens
  CDR3 for alpha chain variable domain of TCR clone 374134 (TRAV2, TRAJ9)
CAVEDRGTVGFKTIF

SEQ ID NO: 748268 - protein, 13 aa, Homo sapiens
  CDR3 for beta chain variable domain of TCR clone 374134 (TRBV20-1, TRBJ1-1)
CSARGGGNTEAFF

SEQ ID NO: 748269 - protein, 15 aa, Homo sapiens
  CDR3 for alpha chain variable domain of TCR clone 374135 (TRAV23/DV6, TRAJ38)
CAASGGAGNNRTLIW

SEQ ID NO: 748270 - protein, 13 aa, Homo sapiens
  CDR3 for beta chain variable domain of TCR clone 374135 (TRBV7-2, TRBJ1-2)
CASSLPGLYGYTF

SEQ ID NO: 748271 - protein, 12 aa, Homo sapiens
  CDR3 for alpha chain variable domain of TCR clone 374136 (TRAV3, TRAJ43)
CSLRDPNNDMRF

SEQ ID NO: 748272 - protein, 14 aa, Homo sapiens
  CDR3 for beta chain variable domain of TCR clone 374136 (TRBV5-1, TRBJ2-3)
CASSLFGPTDTQYF

SEQ ID NO: 748273 - protein, 14 aa, Homo sapiens
  CDR3 for alpha chain variable domain of TCR clone 374137 (TRAV21, TRAJ35)
CAVMPIGFGNVLHC

SEQ ID NO: 748274 - protein, 13 aa, Homo sapiens
  CDR3 for beta chain variable domain of TCR clone 374137 (TRBV7-8, TRBJ2-7)
RRVRLTEMGEQYF

SEQ ID NO: 748275 - protein, 13 aa, Homo sapiens
  CDR3 for alpha chain variable domain of TCR clone 374138 (TRAV13-1, TRAJ11)
CAAVLAGYSTLTF

SEQ ID NO: 748276 - protein, 14 aa, Homo sapiens
  CDR3 for beta chain variable domain of TCR clone 374138 (TRBV5-1, TRBJ1-6)
CASRPGTSNSPLHF

SEQ ID NO: 748277 - protein, 14 aa, Homo sapiens
  CDR3 for alpha chain variable domain of TCR clone 374139 (TRAV16, TRAJ17)
CAPRIKAAGNKLTF

SEQ ID NO: 748278 - protein, 15 aa, Homo sapiens
  CDR3 for beta chain variable domain of TCR clone 374139 (TRBV3-1, TRBJ2-7)
CASSQGVGVKVEQYF

SEQ ID NO: 748279 - protein, 14 aa, Homo sapiens
  CDR3 for alpha chain variable domain of TCR clone 374140 (TRAV41, TRAJ57)
CAVLLQGGSEKLVF

SEQ ID NO: 748280 - protein, 12 aa, Homo sapiens
  CDR3 for beta chain variable domain of TCR clone 374140 (TRBV10-3, TRBJ1-1)
CATTDRPPEAFF

SEQ ID NO: 748281 - protein, 11 aa, Homo sapiens
  CDR3 for alpha chain variable domain of TCR clone 374141 (TRAV21, TRAJ11)
CAVNGYSTLSF

SEQ ID NO: 748282 - protein, 11 aa, Homo sapiens
  CDR3 for beta chain variable domain of TCR clone 374141 (TRBV19, TRBJ1-1)
CASSIGSEAFF

SEQ ID NO: 748283 - protein, 14 aa, Homo sapiens
  CDR3 for alpha chain variable domain of TCR clone 374142 (TRAV26-1, TRAJ39)
CIVRGSRAGNMLTF

SEQ ID NO: 748284 - protein, 13 aa, Homo sapiens
  CDR3 for beta chain variable domain of TCR clone 374142 (TRBV27, TRBJ2-7)
CASSLRHRYEQYF

SEQ ID NO: 748285 - protein, 16 aa, Homo sapiens
  CDR3 for alpha chain variable domain of TCR clone 374143 (TRAV30, TRAJ49)
SAAQRVGPSTGNQFYF

SEQ ID NO: 748286 - protein, 15 aa, Homo sapiens
  CDR3 for beta chain variable domain of TCR clone 374143 (TRBV2, TRBJ2-1)
CASSELAGSYNEQFF

SEQ ID NO: 748287 - protein, 14 aa, Homo sapiens
  CDR3 for alpha chain variable domain of TCR clone 374144 (TRAV30, TRAJ33)
CGTVAPRSNYQLIW

SEQ ID NO: 748288 - protein, 15 aa, Homo sapiens
  CDR3 for beta chain variable domain of TCR clone 374144 (TRBV4-1, TRBJ1-4)
CASSDTGGTNEKLFF

SEQ ID NO: 748289 - protein, 16 aa, Homo sapiens
  CDR3 for alpha chain variable domain of TCR clone 374145 (TRAV13-1, TRAJ52)
CAAKDAGGTSYGKLTF

SEQ ID NO: 748290 - protein, 11 aa, Homo sapiens
  CDR3 for beta chain variable domain of TCR clone 374145 (TRBV12-4, TRBJ2-3)
CASTATDTQYF

SEQ ID NO: 748291 - protein, 14 aa, Homo sapiens
  CDR3 for alpha chain variable domain of TCR clone 374146 (TRAV12-2, TRAJ13)
CAVKKTWGYQKVTF

SEQ ID NO: 748292 - protein, 15 aa, Homo sapiens
  CDR3 for beta chain variable domain of TCR clone 374146 (TRBV19, TRBJ1-6)
CASSTQGAVGSPLHF

SEQ ID NO: 748293 - protein, 18 aa, Homo sapiens
  CDR3 for alpha chain variable domain of TCR clone 374147 (TRAV13-2, TRAJ10)
CAASLPPTLTGGGNTLTF

SEQ ID NO: 748294 - protein, 15 aa, Homo sapiens
  CDR3 for beta chain variable domain of TCR clone 374147 (TRBV7-9, TRBJ2-7)
CASSLALAGAYEQYF

SEQ ID NO: 748295 - protein, 16 aa, Homo sapiens
  CDR3 for alpha chain variable domain of TCR clone 374148 (TRAV30, TRAJ24)
CGTEIVDADSWGKFQV

SEQ ID NO: 748296 - protein, 14 aa, Homo sapiens
  CDR3 for beta chain variable domain of TCR clone 374148 (TRBV3-1, TRBJ2-7)
CASTRTSGSYEQYF

SEQ ID NO: 748297 - protein, 22 aa, Homo sapiens
  CDR3 for alpha chain variable domain of TCR clone 374149 (TRAV8-2, TRAJ45)
HLTKPSAHMSDAAESSADGLTF

SEQ ID NO: 748298 - protein, 13 aa, Homo sapiens
  CDR3 for beta chain variable domain of TCR clone 374149 (TRBV7-3, TRBJ2-1)
CASSPVAYNEQFF

SEQ ID NO: 748299 - protein, 14 aa, Homo sapiens
  CDR3 for alpha chain variable domain of TCR clone 374150 (TRAV13-2, TRAJ17)
CAENSKAAGKKLTF

SEQ ID NO: 748300 - protein, 13 aa, Homo sapiens
  CDR3 for beta chain variable domain of TCR clone 374150 (TRBV7-9, TRBJ2-1)
CASSWESYNEQFF

SEQ ID NO: 748301 - protein, 14 aa, Homo sapiens
  CDR3 for alpha chain variable domain of TCR clone 374151 (TRAV3, TRAJ40)
CAVRDMIGTYKYIF

SEQ ID NO: 748302 - protein, 16 aa, Homo sapiens
  CDR3 for beta chain variable domain of TCR clone 374151 (TRBV18, TRBJ2-7)
CASSPGRAGGAYEQYF

SEQ ID NO: 748303 - protein, 13 aa, Homo sapiens
  CDR3 for alpha chain variable domain of TCR clone 374152 (TRAV3, TRAJ21)
CTVREPDFNKFYF

SEQ ID NO: 748304 - protein, 17 aa, Homo sapiens
  CDR3 for beta chain variable domain of TCR clone 374152 (TRBV7-8, TRBJ2-6)
CASSAGTGGAGASVLTF

SEQ ID NO: 748305 - protein, 23 aa, Homo sapiens
  CDR3 for alpha chain variable domain of TCR clone 374153 (TRAV26-1, TRAJ38)
CIADNAGNNHIQNPDPAVYQLRD

SEQ ID NO: 748306 - protein, 12 aa, Homo sapiens
  CDR3 for beta chain variable domain of TCR clone 374153 (TRBV2, TRBJ2-3)
CASSGRFDTQYF

SEQ ID NO: 748307 - protein, 15 aa, Homo sapiens
  CDR3 for alpha chain variable domain of TCR clone 374154 (TRAV3, TRAJ6)
CAVRDGMGRRKLHTY

SEQ ID NO: 748308 - protein, 15 aa, Homo sapiens
  CDR3 for beta chain variable domain of TCR clone 374154 (TRBV9, TRBJ2-1)
CASSLAGSSYNEQYF

SEQ ID NO: 748309 - protein, 13 aa, Homo sapiens
  CDR3 for alpha chain variable domain of TCR clone 374155 (TRAV26-1, TRAJ34)
CIVRPWITDQLIF

SEQ ID NO: 748310 - protein, 13 aa, Homo sapiens
  CDR3 for beta chain variable domain of TCR clone 374155 (TRBV5-1, TRBJ2-1)
CASSLGSYNEQFF

SEQ ID NO: 748311 - protein, 15 aa, Homo sapiens
  CDR3 for alpha chain variable domain of TCR clone 374156 (TRAV3, TRAJ13)
CAVRDIGGGYQKVTF

SEQ ID NO: 748312 - protein, 13 aa, Homo sapiens
  CDR3 for beta chain variable domain of TCR clone 374156 (TRBV7-9, TRBJ1-2)
CASSLKQNYGYSF

SEQ ID NO: 748313 - protein, 14 aa, Homo sapiens
  CDR3 for alpha chain variable domain of TCR clone 374157 (TRAV29/DV5, TRAJ36)
CAARRKTGANNLFF

SEQ ID NO: 748314 - protein, 16 aa, Homo sapiens
  CDR3 for beta chain variable domain of TCR clone 374157 (TRBV28, TRBJ2-6)
CASSFRTYSGANVLTF

SEQ ID NO: 748315 - protein, 14 aa, Homo sapiens
  CDR3 for alpha chain variable domain of TCR clone 374158 (TRAV38-1, TRAJ57)
CAFMNTGGSEKMVF

SEQ ID NO: 748316 - protein, 12 aa, Homo sapiens
  CDR3 for beta chain variable domain of TCR clone 374158 (TRBV20-1, TRBJ1-5)
CSTSQGNQPQHF

SEQ ID NO: 748317 - protein, 14 aa, Homo sapiens
  CDR3 for alpha chain variable domain of TCR clone 374159 (TRAV41, TRAJ57)
CAVLLQGGAEKLVL

SEQ ID NO: 748318 - protein, 12 aa, Homo sapiens
  CDR3 for beta chain variable domain of TCR clone 374159 (TRBV10-3, TRBJ1-1)
CATMDRPPEAFF

SEQ ID NO: 748319 - protein, 21 aa, Homo sapiens
  CDR3 for alpha chain variable domain of TCR clone 374160 (TRAV26-1, TRAJ38)
CIADNAGNNHIQNTDPAVYQL

SEQ ID NO: 748320 - protein, 13 aa, Homo sapiens
  CDR3 for beta chain variable domain of TCR clone 374160 (TRBV20-1, TRBJ1-1)
CSARGGGNTEAFF

SEQ ID NO: 748321 - protein, 11 aa, Homo sapiens
  CDR3 for alpha chain variable domain of TCR clone 374161 (TRAV21, TRAJ34)
CAVTNTDKLIF

SEQ ID NO: 748322 - protein, 15 aa, Homo sapiens
  CDR3 for beta chain variable domain of TCR clone 374161 (TRBV11-3, TRBJ2-7)
CASSPGPASSYEQYF

SEQ ID NO: 748323 - protein, 14 aa, Homo sapiens
  CDR3 for alpha chain variable domain of TCR clone 374162 (TRAV12-3, TRAJ10)
SHLPLTGGGDKLTF

SEQ ID NO: 748324 - protein, 12 aa, Homo sapiens
  CDR3 for beta chain variable domain of TCR clone 374162 (TRBV7-9, TRBJ2-7)
CATRTDAYEQYF

SEQ ID NO: 748325 - protein, 11 aa, Homo sapiens
  CDR3 for alpha chain variable domain of TCR clone 374163 (TRAV26-1, TRAJ37)
CIVRVGRKLIF

SEQ ID NO: 748326 - protein, 13 aa, Homo sapiens
  CDR3 for beta chain variable domain of TCR clone 374163 (TRBV12-4, TRBJ2-7)
RASSPTETYEQYF

SEQ ID NO: 748327 - protein, 11 aa, Homo sapiens
  CDR3 for alpha chain variable domain of TCR clone 374164 (TRAV3, TRAJ21)
CAVGNLNKFYF

SEQ ID NO: 748328 - protein, 16 aa, Homo sapiens
  CDR3 for beta chain variable domain of TCR clone 374164 (TRBV19, TRBJ2-1)
CASSKAGPSSYNEQLF

SEQ ID NO: 748329 - protein, 15 aa, Homo sapiens
  CDR3 for alpha chain variable domain of TCR clone 374165 (TRAV27, TRAJ38)
CAARRNAGNNRKLIW

SEQ ID NO: 748330 - protein, 13 aa, Homo sapiens
  CDR3 for beta chain variable domain of TCR clone 374165 (TRBV5-7, TRBJ2-5)
CASSADYRETQYF

SEQ ID NO: 748331 - protein, 13 aa, Homo sapiens
  CDR3 for alpha chain variable domain of TCR clone 374166 (TRAV27, TRAJ57)
CAGFQGGSEKLVF

SEQ ID NO: 748332 - protein, 16 aa, Homo sapiens
  CDR3 for beta chain variable domain of TCR clone 374166 (TRBV12-5, TRBJ2-5)
CASGPRTSGNQETQYF

SEQ ID NO: 748333 - protein, 15 aa, Homo sapiens
  CDR3 for alpha chain variable domain of TCR clone 374167 (TRAV35, TRAJ23)
CAGPLGNNQGGKLIF

SEQ ID NO: 748334 - protein, 14 aa, Homo sapiens
  CDR3 for beta chain variable domain of TCR clone 374167 (TRBV7-9, TRBJ1-1)
CASTPLQSYTEACF

SEQ ID NO: 748335 - protein, 15 aa, Homo sapiens
  CDR3 for alpha chain variable domain of TCR clone 374168 (TRAV17, TRAJ4)
CATGTWSGGYNKLIF

SEQ ID NO: 748336 - protein, 13 aa, Homo sapiens
  CDR3 for beta chain variable domain of TCR clone 374168 (TRBV6-6, TRBJ2-7)
CASSPKHLAEQCF

SEQ ID NO: 748337 - protein, 15 aa, Homo sapiens
  CDR3 for alpha chain variable domain of TCR clone 374169 (TRAV3, TRAJ4)
CAVRDGTGGYNKLIF

SEQ ID NO: 748338 - protein, 11 aa, Homo sapiens
  CDR3 for beta chain variable domain of TCR clone 374169 (TRBV27, TRBJ2-2)
CASSSSGYRTP

SEQ ID NO: 748339 - protein, 14 aa, Homo sapiens
  CDR3 for alpha chain variable domain of TCR clone 374170 (TRAV4, TRAJ6)
CLVGEAGGSYIPTF

SEQ ID NO: 748340 - protein, 14 aa, Homo sapiens
  CDR3 for beta chain variable domain of TCR clone 374170 (TRBV23-1, TRBJ2-5)
CASSFLRSQETQYF

SEQ ID NO: 748341 - protein, 13 aa, Homo sapiens
  CDR3 for alpha chain variable domain of TCR clone 374171 (TRAV17, TRAJ9)
CATDYTGGVKTIF

SEQ ID NO: 748342 - protein, 15 aa, Homo sapiens
  CDR3 for beta chain variable domain of TCR clone 374171 (TRBV6-3, TRBJ2-7)
CASSSPGTVFYEQYF

SEQ ID NO: 748343 - protein, 16 aa, Homo sapiens
  CDR3 for alpha chain variable domain of TCR clone 374172 (TRAV17, TRAJ36)
CATVSLNWGKQPLLWD

SEQ ID NO: 748344 - protein, 12 aa, Homo sapiens
  CDR3 for beta chain variable domain of TCR clone 374172 (TRBV4-1, TRBJ1-1)
CASQLGTGEAFF

SEQ ID NO: 748345 - protein, 16 aa, Homo sapiens
  CDR3 for alpha chain variable domain of TCR clone 374173 (TRAV26-1, TRAJ53)
CIVRVAMGGSNFKLTF

SEQ ID NO: 748346 - protein, 12 aa, Homo sapiens
  CDR3 for beta chain variable domain of TCR clone 374173 (TRBV7-9, TRBJ1-5)
CASSPQGQPQHF

SEQ ID NO: 748347 - protein, 12 aa, Homo sapiens
  CDR3 for alpha chain variable domain of TCR clone 374174 (TRAV21, TRAJ23)
GAVMLQGGKLIF

SEQ ID NO: 748348 - protein, 16 aa, Homo sapiens
  CDR3 for beta chain variable domain of TCR clone 374174 (TRBV7-3, TRBJ2-2)
CASSLKRGTLSGELFF

SEQ ID NO: 748349 - protein, 16 aa, Homo sapiens
  CDR3 for alpha chain variable domain of TCR clone 374175 (TRAV3, TRAJ37)
CAVRGKGSVNTGKLIF

SEQ ID NO: 748350 - protein, 15 aa, Homo sapiens
  CDR3 for beta chain variable domain of TCR clone 374175 (TRBV9, TRBJ1-4)
CASSVGGSTNEKLFF

SEQ ID NO: 748351 - protein, 14 aa, Homo sapiens
  CDR3 for alpha chain variable domain of TCR clone 374176 (TRAV1-2, TRAJ8)
CAVREDTGFQKLVF

SEQ ID NO: 748352 - protein, 14 aa, Homo sapiens
  CDR3 for beta chain variable domain of TCR clone 374176 (TRBV28, TRBJ2-7)
CASSGLAEPAEQYF

SEQ ID NO: 748353 - protein, 16 aa, Homo sapiens
  CDR3 for alpha chain variable domain of TCR clone 374177 (TRAV8-3, TRAJ13)
CAVGAYPSVGYPKVTF

SEQ ID NO: 748354 - protein, 15 aa, Homo sapiens
  CDR3 for beta chain variable domain of TCR clone 374177 (TRBV19, TRBJ1-5)
CASSIVWADNQPQHF

SEQ ID NO: 748355 - protein, 14 aa, Homo sapiens
  CDR3 for alpha chain variable domain of TCR clone 374178 (TRAV3, TRAJ9)
CAVRGNTGGFKTIF

SEQ ID NO: 748356 - protein, 16 aa, Homo sapiens
  CDR3 for beta chain variable domain of TCR clone 374178 (TRBV7-2, TRBJ2-7)
CSSSLGLAGGAYEQYF

SEQ ID NO: 748357 - protein, 12 aa, Homo sapiens
  CDR3 for alpha chain variable domain of TCR clone 374179 (TRAV12-2, TRAJ42)
CAVGGSQGNLIF

SEQ ID NO: 748358 - protein, 13 aa, Homo sapiens
  CDR3 for beta chain variable domain of TCR clone 374179 (TRBV11-2, TRBJ1-6)
CASSLDVGSPLHF

SEQ ID NO: 748359 - protein, 12 aa, Homo sapiens
  CDR3 for alpha chain variable domain of TCR clone 374180 (TRAV2, TRAJ9)
CAVVAGGFKTIF

SEQ ID NO: 748360 - protein, 16 aa, Homo sapiens
  CDR3 for beta chain variable domain of TCR clone 374180 (TRBV19, TRBJ1-6)
CASSVAPVAGNSPLHF

SEQ ID NO: 748361 - protein, 16 aa, Homo sapiens
  CDR3 for alpha chain variable domain of TCR clone 374181 (TRAV16, TRAJ4)
CARSRMFSGGSNKLIF

SEQ ID NO: 748362 - protein, 16 aa, Homo sapiens
  CDR3 for beta chain variable domain of TCR clone 374181 (TRBV24-1, TRBJ2-3)
CATSDPGTGATDTQYF

SEQ ID NO: 748363 - protein, 15 aa, Homo sapiens
  CDR3 for alpha chain variable domain of TCR clone 374182 (TRAV12-3, TRAJ6)
CAMSATSGGSYIPTF

SEQ ID NO: 748364 - protein, 15 aa, Homo sapiens
  CDR3 for beta chain variable domain of TCR clone 374182 (TRBV7-9, TRBJ1-5)
CASSQGHQPNQPQHF

SEQ ID NO: 748365 - protein, 12 aa, Homo sapiens
  CDR3 for alpha chain variable domain of TCR clone 374183 (TRAV35, TRAJ12)
CAGMDRSYKLIF

SEQ ID NO: 748366 - protein, 14 aa, Homo sapiens
  CDR3 for beta chain variable domain of TCR clone 374183 (TRBV28, TRBJ2-5)
CASSLYRGTETQYF

SEQ ID NO: 748367 - protein, 15 aa, Homo sapiens
  CDR3 for alpha chain variable domain of TCR clone 374184 (TRAV26-1, TRAJ29)
CIVRVEGSGNTPLVF

SEQ ID NO: 748368 - protein, 13 aa, Homo sapiens
  CDR3 for beta chain variable domain of TCR clone 374184 (TRBV28, TRBJ2-4)
CASSQSSKNIQYF

SEQ ID NO: 748369 - protein, 13 aa, Homo sapiens
  CDR3 for alpha chain variable domain of TCR clone 374185 (TRAV2, TRAJ15)
CAVASQAGTALIF

SEQ ID NO: 748370 - protein, 15 aa, Homo sapiens
  CDR3 for beta chain variable domain of TCR clone 374185 (TRBV5-1, TRBJ2-2)
CTSSLRQGDTGELFF

SEQ ID NO: 748371 - protein, 16 aa, Homo sapiens
  CDR3 for alpha chain variable domain of TCR clone 374186 (TRAV30, TRAJ24)
CGTAIVGADSWGKFQF

SEQ ID NO: 748372 - protein, 14 aa, Homo sapiens
  CDR3 for beta chain variable domain of TCR clone 374186 (TRBV12-5, TRBJ2-5)
CASGSRTHQETQYF

SEQ ID NO: 748373 - protein, 11 aa, Homo sapiens
  CDR3 for alpha chain variable domain of TCR clone 374187 (TRAV12-3, TRAJ49)
CAANTGNQFYF

SEQ ID NO: 748374 - protein, 18 aa, Homo sapiens
  CDR3 for beta chain variable domain of TCR clone 374187 (TRBV4-1, TRBJ1-5)
CASSQDPRGQGLNQPQHF

SEQ ID NO: 748375 - protein, 14 aa, Homo sapiens
  CDR3 for alpha chain variable domain of TCR clone 374188 (TRAV27, TRAJ36)
ASTSPPSRANNLFF

SEQ ID NO: 748376 - protein, 15 aa, Homo sapiens
  CDR3 for beta chain variable domain of TCR clone 374188 (TRBV15, TRBJ2-1)
CATSRPGQGLHEQFF

SEQ ID NO: 748377 - protein, 14 aa, Homo sapiens
  CDR3 for alpha chain variable domain of TCR clone 374189 (TRAV2, TRAJ9)
CAVEDRSGGFKTIF

SEQ ID NO: 748378 - protein, 13 aa, Homo sapiens
  CDR3 for beta chain variable domain of TCR clone 374189 (TRBV6-4, TRBJ1-5)
CASSADLNQPQQF

SEQ ID NO: 748379 - protein, 11 aa, Homo sapiens
  CDR3 for alpha chain variable domain of TCR clone 374190 (TRAV2, TRAJ23)
CAVETRGKLIF

SEQ ID NO: 748380 - protein, 17 aa, Homo sapiens
  CDR3 for beta chain variable domain of TCR clone 374190 (TRBV13, TRBJ2-3)
CASSLSRVAGGRNTQYF

SEQ ID NO: 748381 - protein, 14 aa, Homo sapiens
  CDR3 for alpha chain variable domain of TCR clone 374191 (TRAV9-2, TRAJ38)
CALSNAGNNRKLIW

SEQ ID NO: 748382 - protein, 15 aa, Homo sapiens
  CDR3 for beta chain variable domain of TCR clone 374191 (TRBV5-1, TRBJ2-1)
CASSPPRAPYNEQFF

SEQ ID NO: 748383 - protein, 13 aa, Homo sapiens
  CDR3 for alpha chain variable domain of TCR clone 374192 (TRAV13-2, TRAJ42)
CAENGGSQGNLIF

SEQ ID NO: 748384 - protein, 13 aa, Homo sapiens
  CDR3 for beta chain variable domain of TCR clone 374192 (TRBV5-1, TRBJ2-2)
CASIVARTGELFF

SEQ ID NO: 748385 - protein, 13 aa, Homo sapiens
  CDR3 for alpha chain variable domain of TCR clone 374193 (TRAV12-1, TRAJ20)
CVVNGPNDYKLSF

SEQ ID NO: 748386 - protein, 12 aa, Homo sapiens
  CDR3 for beta chain variable domain of TCR clone 374193 (TRBV11-2, TRBJ2-1)
CASSVQREGQFF

SEQ ID NO: 748387 - protein, 11 aa, Homo sapiens
  CDR3 for alpha chain variable domain of TCR clone 374194 (TRAV21, TRAJ41)
CAVRSGYALNF

SEQ ID NO: 748388 - protein, 14 aa, Homo sapiens
  CDR3 for beta chain variable domain of TCR clone 374194 (TRBV19, TRBJ2-5)
CASSMTGQQETQYF

SEQ ID NO: 748389 - protein, 12 aa, Homo sapiens
  CDR3 for alpha chain variable domain of TCR clone 374195 (TRAV27, TRAJ36)
CAGMTGANNLFF

SEQ ID NO: 748390 - protein, 14 aa, Homo sapiens
  CDR3 for beta chain variable domain of TCR clone 374195 (TRBV12-4, TRBJ2-3)
CASSLVPSTDSQYF

SEQ ID NO: 748391 - protein, 13 aa, Homo sapiens
  CDR3 for alpha chain variable domain of TCR clone 374196 (TRAV26-2, TRAJ43)
CILRAVNNNDMRF

SEQ ID NO: 748392 - protein, 16 aa, Homo sapiens
  CDR3 for beta chain variable domain of TCR clone 374196 (TRBV12-4, TRBJ1-5)
CASSRPVGGSNQPQHF

SEQ ID NO: 748393 - protein, 16 aa, Homo sapiens
  CDR3 for alpha chain variable domain of TCR clone 374197 (TRAV8-3, TRAJ42)
CAVGEGNGGSQGNLIF

SEQ ID NO: 748394 - protein, 14 aa, Homo sapiens
  CDR3 for beta chain variable domain of TCR clone 374197 (TRBV7-2, TRBJ2-1)
CANSRGGARNEQFF

SEQ ID NO: 748395 - protein, 12 aa, Homo sapiens
  CDR3 for alpha chain variable domain of TCR clone 374198 (TRAV13-1, TRAJ5)
CAAKAGRRALTL

SEQ ID NO: 748396 - protein, 15 aa, Homo sapiens
  CDR3 for beta chain variable domain of TCR clone 374198 (TRBV11-2, TRBJ2-1)
CASSLGTSGLNEQFF

SEQ ID NO: 748397 - protein, 10 aa, Homo sapiens
  CDR3 for alpha chain variable domain of TCR clone 374199 (TRAV1-1, TRAJ36)
CAVRDTLLPG

SEQ ID NO: 748398 - protein, 17 aa, Homo sapiens
  CDR3 for beta chain variable domain of TCR clone 374199 (TRBV11-2, TRBJ2-1)
CASSLYPPGVEYNEQFF

SEQ ID NO: 748399 - protein, 14 aa, Homo sapiens
  CDR3 for alpha chain variable domain of TCR clone 374200 (TRAV8-3, TRAJ23)
CAVIIYNQGGKLIL

SEQ ID NO: 748400 - protein, 15 aa, Homo sapiens
  CDR3 for beta chain variable domain of TCR clone 374200 (TRBV18, TRBJ2-1)
CASSPPSASYNEQFF

SEQ ID NO: 748401 - protein, 13 aa, Homo sapiens
  CDR3 for alpha chain variable domain of TCR clone 374201 (TRAV35, TRAJ36)
CAGPRIGANNLFF

SEQ ID NO: 748402 - protein, 14 aa, Homo sapiens
  CDR3 for beta chain variable domain of TCR clone 374201 (TRBV13, TRBJ2-5)
CASSLGPRGETQYF

SEQ ID NO: 748403 - protein, 15 aa, Homo sapiens
  CDR3 for alpha chain variable domain of TCR clone 374202 (TRAV21, TRAJ40)
CAVRPQTSGTYKYIC

SEQ ID NO: 748404 - protein, 13 aa, Homo sapiens
  CDR3 for beta chain variable domain of TCR clone 374202 (TRBV7-2, TRBJ2-2)
CASSSARAGELFF

SEQ ID NO: 748405 - protein, 14 aa, Homo sapiens
  CDR3 for alpha chain variable domain of TCR clone 374203 (TRAV1-2, TRAJ8)
CAVRADTGFQKLVF

SEQ ID NO: 748406 - protein, 12 aa, Homo sapiens
  CDR3 for beta chain variable domain of TCR clone 374203 (TRBV11-2, TRBJ2-2)
CASSLGGGELFF

SEQ ID NO: 748407 - protein, 11 aa, Homo sapiens
  CDR3 for alpha chain variable domain of TCR clone 374204 (TRAV3, TRAJ21)
CAVGNFNKFYF

SEQ ID NO: 748408 - protein, 14 aa, Homo sapiens
  CDR3 for beta chain variable domain of TCR clone 374204 (TRBV7-9, TRBJ1-1)
CASSLVHQNTEAFF

SEQ ID NO: 748409 - protein, 11 aa, Homo sapiens
  CDR3 for alpha chain variable domain of TCR clone 374205 (TRAV2, TRAJ33)
CAVDSNYQLIW

SEQ ID NO: 748410 - protein, 14 aa, Homo sapiens
  CDR3 for beta chain variable domain of TCR clone 374205 (TRBV15, TRBJ2-5)
CATSGDRGQETQYF

SEQ ID NO: 748411 - protein, 13 aa, Homo sapiens
  CDR3 for alpha chain variable domain of TCR clone 374206 (TRAV29/DV5, TRAJ58)
CAGEETSGSRLTF

SEQ ID NO: 748412 - protein, 15 aa, Homo sapiens
  CDR3 for beta chain variable domain of TCR clone 374206 (TRBV11-3, TRBJ2-3)
CASLKDGREGDTQYF

SEQ ID NO: 748413 - protein, 16 aa, Homo sapiens
  CDR3 for alpha chain variable domain of TCR clone 374207 (TRAV30, TRAJ24)
CGTAIVVADSWGKFQF

SEQ ID NO: 748414 - protein, 14 aa, Homo sapiens
  CDR3 for beta chain variable domain of TCR clone 374207 (TRBV12-5, TRBJ2-5)
CASGSRTHQETQYF

SEQ ID NO: 748415 - protein, 13 aa, Homo sapiens
  CDR3 for alpha chain variable domain of TCR clone 374208 (TRAV12-2, TRAJ23)
CAVSYNQGGKLIF

SEQ ID NO: 748416 - protein, 14 aa, Homo sapiens
  CDR3 for beta chain variable domain of TCR clone 374208 (TRBV19, TRBJ2-2)
CASSILLERGELFF

SEQ ID NO: 748417 - protein, 12 aa, Homo sapiens
  CDR3 for alpha chain variable domain of TCR clone 374209 (TRAV1-1, TRAJ9)
CAVDTGGFKTIF

SEQ ID NO: 748418 - protein, 16 aa, Homo sapiens
  CDR3 for beta chain variable domain of TCR clone 374209 (TRBV7-2, TRBJ1-4)
CASSLAPGRRDEKLFF

SEQ ID NO: 748419 - protein, 12 aa, Homo sapiens
  CDR3 for alpha chain variable domain of TCR clone 374210 (TRAV2, TRAJ31)
CAVEDNNARLMF

SEQ ID NO: 748420 - protein, 16 aa, Homo sapiens
  CDR3 for beta chain variable domain of TCR clone 374210 (TRBV10-3, TRBJ2-1)
CAISAVGDGGGGEQFF

SEQ ID NO: 748421 - protein, 17 aa, Homo sapiens
  CDR3 for alpha chain variable domain of TCR clone 374211 (TRAV17, TRAJ52)
CATERTSGGTGYGKLTF

SEQ ID NO: 748422 - protein, 13 aa, Homo sapiens
  CDR3 for beta chain variable domain of TCR clone 374211 (TRBV7-9, TRBJ1-2)
CASSLKQNYGYTF

SEQ ID NO: 748423 - protein, 12 aa, Homo sapiens
  CDR3 for alpha chain variable domain of TCR clone 374212 (TRAV13-1, TRAJ21)
CAAFFNFNKFYF

SEQ ID NO: 748424 - protein, 14 aa, Homo sapiens
  CDR3 for beta chain variable domain of TCR clone 374212 (TRBV4-1, TRBJ2-7)
CASRLTSGSYEQSF

SEQ ID NO: 748425 - protein, 14 aa, Homo sapiens
  CDR3 for alpha chain variable domain of TCR clone 374213 (TRAV17, TRAJ6)
CATNPAGGSYIPTF

SEQ ID NO: 748426 - protein, 15 aa, Homo sapiens
  CDR3 for beta chain variable domain of TCR clone 374213 (TRBV12-4, TRBJ1-4)
CASAMGHNEKLFLAV

SEQ ID NO: 748427 - protein, 15 aa, Homo sapiens
  CDR3 for alpha chain variable domain of TCR clone 374214 (TRAV26-1, TRAJ39)
CIVRDGSNAGDMLTF

SEQ ID NO: 748428 - protein, 14 aa, Homo sapiens
  CDR3 for beta chain variable domain of TCR clone 374214 (TRBV10-3, TRBJ1-2)
CAIRAGTGDYGYTF

SEQ ID NO: 748429 - protein, 13 aa, Homo sapiens
  CDR3 for alpha chain variable domain of TCR clone 374215 (TRAV29/DV5, TRAJ31)
CAASRNNNARLMF

SEQ ID NO: 748430 - protein, 12 aa, Homo sapiens
  CDR3 for beta chain variable domain of TCR clone 374215 (TRBV14, TRBJ2-5)
CASSQLEETQYF

SEQ ID NO: 748431 - protein, 16 aa, Homo sapiens
  CDR3 for alpha chain variable domain of TCR clone 374216 (TRAV3, TRAJ37)
CAVRGKGSGNTGKLIF

SEQ ID NO: 748432 - protein, 16 aa, Homo sapiens
  CDR3 for beta chain variable domain of TCR clone 374216 (TRBV12-5, TRBJ2-5)
CASGPRTSGSQETQYL

SEQ ID NO: 748433 - protein, 16 aa, Homo sapiens
  CDR3 for alpha chain variable domain of TCR clone 374217 (TRAV27, TRAJ52)
CAGAPAGCTSDGKLTF

SEQ ID NO: 748434 - protein, 12 aa, Homo sapiens
  CDR3 for beta chain variable domain of TCR clone 374217 (TRBV27, TRBJ2-1)
CASRGFYNEQFF

SEQ ID NO: 748435 - protein, 12 aa, Homo sapiens
  CDR3 for alpha chain variable domain of TCR clone 374218 (TRAV26-1, TRAJ43)
CIVRPRGDDMRF

SEQ ID NO: 748436 - protein, 16 aa, Homo sapiens
  CDR3 for beta chain variable domain of TCR clone 374218 (TRBV3-1, TRBJ2-1)
CASSQGGRGSFDEQFF

SEQ ID NO: 748437 - protein, 15 aa, Homo sapiens
  CDR3 for alpha chain variable domain of TCR clone 374219 (TRAV17, TRAJ10)
CATDASGVGGNKLTF

SEQ ID NO: 748438 - protein, 14 aa, Homo sapiens
  CDR3 for beta chain variable domain of TCR clone 374219 (TRBV20-1, TRBJ2-5)
CSVPYRGRAETQYF

SEQ ID NO: 748439 - protein, 14 aa, Homo sapiens
  CDR3 for alpha chain variable domain of TCR clone 374220 (TRAV21, TRAJ45)
CAVSSGGSADGLTF

SEQ ID NO: 748440 - protein, 15 aa, Homo sapiens
  CDR3 for beta chain variable domain of TCR clone 374220 (TRBV9, TRBJ2-3)
CASSAYEAGTDTQYF

SEQ ID NO: 748441 - protein, 12 aa, Homo sapiens
  CDR3 for alpha chain variable domain of TCR clone 374221 (TRAV12-3, TRAJ17)
CAMTLTGNKLTF

SEQ ID NO: 748442 - protein, 15 aa, Homo sapiens
  CDR3 for beta chain variable domain of TCR clone 374221 (TRBV12-4, TRBJ2-5)
CASSPPTCLQETQYF

SEQ ID NO: 748443 - protein, 12 aa, Homo sapiens
  CDR3 for alpha chain variable domain of TCR clone 374222 (TRAV2, TRAJ31)
CAVEEGNARLMF

SEQ ID NO: 748444 - protein, 18 aa, Homo sapiens
  CDR3 for beta chain variable domain of TCR clone 374222 (TRBV7-9, TRBJ2-3)
CASSVDLAGLATPDTQYF

SEQ ID NO: 748445 - protein, 14 aa, Homo sapiens
  CDR3 for alpha chain variable domain of TCR clone 374223 (TRAV12-3, TRAJ10)
SHLPMTGGGNKLTF

SEQ ID NO: 748446 - protein, 15 aa, Homo sapiens
  CDR3 for beta chain variable domain of TCR clone 374223 (TRBV7-8, TRBJ2-7)
CASSLGTGNPYEQYF

SEQ ID NO: 748447 - protein, 17 aa, Homo sapiens
  CDR3 for alpha chain variable domain of TCR clone 374224 (TRAV26-1, TRAJ28)
CIVRVPDSGAGSYQLTF

SEQ ID NO: 748448 - protein, 17 aa, Homo sapiens
  CDR3 for beta chain variable domain of TCR clone 374224 (TRBV28, TRBJ2-7)
CASSPLPAGGKPYEQYF

SEQ ID NO: 748449 - protein, 14 aa, Homo sapiens
  CDR3 for alpha chain variable domain of TCR clone 374225 (TRAV35, TRAJ33)
CWPRGKDSNYQLIW

SEQ ID NO: 748450 - protein, 11 aa, Homo sapiens
  CDR3 for beta chain variable domain of TCR clone 374225 (TRBV10-3, TRBJ2-7)
CAISEGLEQYF

SEQ ID NO: 748451 - protein, 16 aa, Homo sapiens
  CDR3 for alpha chain variable domain of TCR clone 374226 (TRAV23/DV6, TRAJ9)
CAARIGGNTGGFKTIF

SEQ ID NO: 748452 - protein, 13 aa, Homo sapiens
  CDR3 for beta chain variable domain of TCR clone 374226 (TRBV12-4, TRBJ1-1)
CASSPGTGFEAFF

SEQ ID NO: 748453 - protein, 11 aa, Homo sapiens
  CDR3 for alpha chain variable domain of TCR clone 374227 (TRAV12-2, TRAJ29)
CAVTLRSPLVF

SEQ ID NO: 748454 - protein, 15 aa, Homo sapiens
  CDR3 for beta chain variable domain of TCR clone 374227 (TRBV6-3, TRBJ2-7)
CASSSPGTVFYEQYF

SEQ ID NO: 748455 - protein, 14 aa, Homo sapiens
  CDR3 for alpha chain variable domain of TCR clone 374228 (TRAV1-2, TRAJ16)
CAVNRFSDCQKLLF

SEQ ID NO: 748456 - protein, 13 aa, Homo sapiens
  CDR3 for beta chain variable domain of TCR clone 374228 (TRBV20-1, TRBJ1-1)
CSARAGGNTEAFF

SEQ ID NO: 748457 - protein, 14 aa, Homo sapiens
  CDR3 for alpha chain variable domain of TCR clone 374229 (TRAV12-1, TRAJ22)
CVAFSSGSARQLTF

SEQ ID NO: 748458 - protein, 20 aa, Homo sapiens
  CDR3 for beta chain variable domain of TCR clone 374229 (TRBV15, TRBJ2-1)
WGTQPCTCVPPAEVDTARFF

SEQ ID NO: 748459 - protein, 14 aa, Homo sapiens
  CDR3 for alpha chain variable domain of TCR clone 374230 (TRAV13-2, TRAJ17)
CAENSKAAGNKLTF

SEQ ID NO: 748460 - protein, 20 aa, Homo sapiens
  CDR3 for beta chain variable domain of TCR clone 374230 (TRBV28, TRBJ2-1)
CASPPIGRSPGLAGGNEQFF

SEQ ID NO: 748461 - protein, 12 aa, Homo sapiens
  CDR3 for alpha chain variable domain of TCR clone 374231 (TRAV8-3, TRAJ20)
CAVGANYYNLSF

SEQ ID NO: 748462 - protein, 16 aa, Homo sapiens
  CDR3 for beta chain variable domain of TCR clone 374231 (TRBV19, TRBJ2-2)
CASRSPGTGATGELFF

SEQ ID NO: 748463 - protein, 15 aa, Homo sapiens
  CDR3 for alpha chain variable domain of TCR clone 374232 (TRAV8-3, TRAJ11)
CAVGLLYSGYSTLTF

SEQ ID NO: 748464 - protein, 23 aa, Homo sapiens
  CDR3 for beta chain variable domain of TCR clone 374232 (TRBV7-9, TRBJ1-2)
EAQLEKSRLLSDRFSSGEDGYTF

SEQ ID NO: 748465 - protein, 16 aa, Homo sapiens
  CDR3 for alpha chain variable domain of TCR clone 374233 (TRAV8-3, TRAJ22)
CAVDLLGPGSARQLTF

SEQ ID NO: 748466 - protein, 14 aa, Homo sapiens
  CDR3 for beta chain variable domain of TCR clone 374233 (TRBV11-2, TRBJ2-7)
CASSVELEGYEQYF

SEQ ID NO: 748467 - protein, 13 aa, Homo sapiens
  CDR3 for alpha chain variable domain of TCR clone 374234 (TRAV3, TRAJ21)
CAVREPDFNKFYF

SEQ ID NO: 748468 - protein, 16 aa, Homo sapiens
  CDR3 for beta chain variable domain of TCR clone 374234 (TRBV12-4, TRBJ2-5)
CASSFFVGGRQETQYF

SEQ ID NO: 748469 - protein, 17 aa, Homo sapiens
  CDR3 for alpha chain variable domain of TCR clone 374235 (TRAV3, TRAJ6)
CAVIDGPRAGGSYIPTF

SEQ ID NO: 748470 - protein, 14 aa, Homo sapiens
  CDR3 for beta chain variable domain of TCR clone 374235 (TRBV7-2, TRBJ2-7)
CASSPKTSFYEQYF

SEQ ID NO: 748471 - protein, 15 aa, Homo sapiens
  CDR3 for alpha chain variable domain of TCR clone 374236 (TRAV17, TRAJ4)
CATGTWSCGYNKLIF

SEQ ID NO: 748472 - protein, 15 aa, Homo sapiens
  CDR3 for beta chain variable domain of TCR clone 374236 (TRBV20-1, TRBJ2-7)
CSARDRVSGMDEQYF

SEQ ID NO: 748473 - protein, 16 aa, Homo sapiens
  CDR3 for alpha chain variable domain of TCR clone 374237 (TRAV17, TRAJ53)
CATDALSGGSNYKLTF

SEQ ID NO: 748474 - protein, 12 aa, Homo sapiens
  CDR3 for beta chain variable domain of TCR clone 374237 (TRBV5-1, TRBJ2-7)
CASSFRGYEQYS

SEQ ID NO: 748475 - protein, 14 aa, Homo sapiens
  CDR3 for alpha chain variable domain of TCR clone 374238 (TRAV26-1, TRAJ38)
CIAYNAGNNRKLIW

SEQ ID NO: 748476 - protein, 14 aa, Homo sapiens
  CDR3 for beta chain variable domain of TCR clone 374238 (TRBV19, TRBJ2-7)
CASSTSQLAYEQYF

SEQ ID NO: 748477 - protein, 14 aa, Homo sapiens
  CDR3 for alpha chain variable domain of TCR clone 374239 (TRAV12-2, TRAJ13)
CAVKKTGGYQKVNF

SEQ ID NO: 748478 - protein, 15 aa, Homo sapiens
  CDR3 for beta chain variable domain of TCR clone 374239 (TRBV10-2, TRBJ2-6)
CASSEQGTGANVLTF

SEQ ID NO: 748479 - protein, 13 aa, Homo sapiens
  CDR3 for alpha chain variable domain of TCR clone 374240 (TRAV12-2, TRAJ42)
CAVKRGSQGNIIF

SEQ ID NO: 748480 - protein, 13 aa, Homo sapiens
  CDR3 for beta chain variable domain of TCR clone 374240 (TRBV7-9, TRBJ2-3)
CASSPGSTDTQYF

SEQ ID NO: 748481 - protein, 15 aa, Homo sapiens
  CDR3 for alpha chain variable domain of TCR clone 374241 (TRAV17, TRAJ35)
RATAFVIGFGNVLHC

SEQ ID NO: 748482 - protein, 17 aa, Homo sapiens
  CDR3 for beta chain variable domain of TCR clone 374241 (TRBV7-3, TRBJ2-3)
CASSLMKRMRGAGTQYF

SEQ ID NO: 748483 - protein, 15 aa, Homo sapiens
  CDR3 for alpha chain variable domain of TCR clone 374242 (TRAV21, TRAJ53)
CATLNSGRSNYKLTF

SEQ ID NO: 748484 - protein, 14 aa, Homo sapiens
  CDR3 for beta chain variable domain of TCR clone 374242 (TRBV7-2, TRBJ2-7)
CASRSQGAAYEQYF

SEQ ID NO: 748485 - protein, 11 aa, Homo sapiens
  CDR3 for alpha chain variable domain of TCR clone 374243 (TRAV17, TRAJ39)
CATGASNMLTF

SEQ ID NO: 748486 - protein, 16 aa, Homo sapiens
  CDR3 for beta chain variable domain of TCR clone 374243 (TRBV5-1, TRBJ2-1)
CASSFGVSGSYNEQFF

SEQ ID NO: 748487 - protein, 12 aa, Homo sapiens
  CDR3 for alpha chain variable domain of TCR clone 374244 (TRAV16, TRAJ10)
CSRTGGGNKLTF

SEQ ID NO: 748488 - protein, 16 aa, Homo sapiens
  CDR3 for beta chain variable domain of TCR clone 374244 (TRBV7-3, TRBJ2-2)
CAISLKRGTLSGELFF

SEQ ID NO: 748489 - protein, 14 aa, Homo sapiens
  CDR3 for alpha chain variable domain of TCR clone 374245 (TRAV4, TRAJ39)
CLVGPHNNAGNTLT

SEQ ID NO: 748490 - protein, 13 aa, Homo sapiens
  CDR3 for beta chain variable domain of TCR clone 374245 (TRBV11-2, TRBJ2-5)
CASSSTGEETQYF

SEQ ID NO: 748491 - protein, 11 aa, Homo sapiens
  CDR3 for alpha chain variable domain of TCR clone 374246 (TRAV12-1, TRAJ43)
CVEYDNNDMRF

SEQ ID NO: 748492 - protein, 15 aa, Homo sapiens
  CDR3 for beta chain variable domain of TCR clone 374246 (TRBV18, TRBJ2-5)
CAISPRASEAETQYF

SEQ ID NO: 748493 - protein, 15 aa, Homo sapiens
  CDR3 for alpha chain variable domain of TCR clone 374247 (TRAV26-1, TRAJ56)
CIVRVATGANSKLTF

SEQ ID NO: 748494 - protein, 17 aa, Homo sapiens
  CDR3 for beta chain variable domain of TCR clone 374247 (TRBV27, TRBJ2-7)
CASSPSGRANASSTSGW

SEQ ID NO: 748495 - protein, 11 aa, Homo sapiens
  CDR3 for alpha chain variable domain of TCR clone 374248 (TRAV27, TRAJ47)
CRSNQGNTLAF

SEQ ID NO: 748496 - protein, 16 aa, Homo sapiens
  CDR3 for beta chain variable domain of TCR clone 374248 (TRBV7-9, TRBJ2-1)
CASSDVAGGSYNEQLF

SEQ ID NO: 748497 - protein, 14 aa, Homo sapiens
  CDR3 for alpha chain variable domain of TCR clone 374249 (TRAV1-2, TRAJ8)
CAVRADTGFQKLVF

SEQ ID NO: 748498 - protein, 16 aa, Homo sapiens
  CDR3 for beta chain variable domain of TCR clone 374249 (TRBV7-3, TRBJ2-2)
CASSLKRGTLSGELFF

SEQ ID NO: 748499 - protein, 14 aa, Homo sapiens
  CDR3 for alpha chain variable domain of TCR clone 374250 (TRAV3, TRAJ9)
CAVRLNTGGFKTIF

SEQ ID NO: 748500 - protein, 15 aa, Homo sapiens
  CDR3 for beta chain variable domain of TCR clone 374250 (TRBV7-2, TRBJ2-1)
CPSSLASGRVNEQFF

SEQ ID NO: 748501 - protein, 15 aa, Homo sapiens
  CDR3 for alpha chain variable domain of TCR clone 374251 (TRAV20, TRAJ23)
CAVQAVRNQGGKLIF

SEQ ID NO: 748502 - protein, 16 aa, Homo sapiens
  CDR3 for beta chain variable domain of TCR clone 374251 (TRBV27, TRBJ2-7)
CASSNQGRGWAYEQYF

SEQ ID NO: 748503 - protein, 15 aa, Homo sapiens
  CDR3 for alpha chain variable domain of TCR clone 374252 (TRAV12-1, TRAJ44)
CVVDTPQATASKLTL

SEQ ID NO: 748504 - protein, 13 aa, Homo sapiens
  CDR3 for beta chain variable domain of TCR clone 374252 (TRBV27, TRBJ2-1)
CASSSGSYNEQFF

SEQ ID NO: 748505 - protein, 12 aa, Homo sapiens
  CDR3 for alpha chain variable domain of TCR clone 374253 (TRAV3, TRAJ43)
CAVRDPNNDMRF

SEQ ID NO: 748506 - protein, 15 aa, Homo sapiens
  CDR3 for beta chain variable domain of TCR clone 374253 (TRBV6-5, TRBJ2-1)
CASSYDAGGGNEQFF

SEQ ID NO: 748507 - protein, 13 aa, Homo sapiens
  CDR3 for alpha chain variable domain of TCR clone 374254 (TRAV2, TRAJ23)
CAVEANQGGKLIF

SEQ ID NO: 748508 - protein, 14 aa, Homo sapiens
  CDR3 for beta chain variable domain of TCR clone 374254 (TRBV25-1, TRBJ1-1)
CASTHLGGNTEAFF

SEQ ID NO: 748509 - protein, 14 aa, Homo sapiens
  CDR3 for alpha chain variable domain of TCR clone 374255 (TRAV12-2, TRAJ4)
CAADLSGGYNKLIL

SEQ ID NO: 748510 - protein, 13 aa, Homo sapiens
  CDR3 for beta chain variable domain of TCR clone 374255 (TRBV7-9, TRBJ1-2)
CASSLKQNYGYTF

SEQ ID NO: 748511 - protein, 13 aa, Homo sapiens
  CDR3 for alpha chain variable domain of TCR clone 374256 (TRAV24, TRAJ42)
CAFSTGSKGNLIF

SEQ ID NO: 748512 - protein, 19 aa, Homo sapiens
  CDR3 for beta chain variable domain of TCR clone 374256 (TRBV5-1, TRBJ2-3)
CASSLWLAGGITTTDTQYF

SEQ ID NO: 748513 - protein, 12 aa, Homo sapiens
  CDR3 for alpha chain variable domain of TCR clone 374257 (TRAV13-2, TRAJ37)
CAEKGNTGKLIF

SEQ ID NO: 748514 - protein, 14 aa, Homo sapiens
  CDR3 for beta chain variable domain of TCR clone 374257 (TRBV6-5, TRBJ2-7)
CASSTTGGPYEQHF

SEQ ID NO: 748515 - protein, 15 aa, Homo sapiens
  CDR3 for alpha chain variable domain of TCR clone 374258 (TRAV38-1, TRAJ37)
CAFIHGSGNTGKLIF

SEQ ID NO: 748516 - protein, 14 aa, Homo sapiens
  CDR3 for beta chain variable domain of TCR clone 374258 (TRBV7-9, TRBJ2-7)
CASSLAATSSTSGR

SEQ ID NO: 748517 - protein, 14 aa, Homo sapiens
  CDR3 for alpha chain variable domain of TCR clone 374259 (TRAV1-2, TRAJ8)
CAVREDTGFQKLVF

SEQ ID NO: 748518 - protein, 12 aa, Homo sapiens
  CDR3 for beta chain variable domain of TCR clone 374259 (TRBV5-1, TRBJ1-1)
CASSFGNTEAFF

SEQ ID NO: 748519 - protein, 11 aa, Homo sapiens
  CDR3 for alpha chain variable domain of TCR clone 374260 (TRAV3, TRAJ21)
CAVGNFNKFYF

SEQ ID NO: 748520 - protein, 13 aa, Homo sapiens
  CDR3 for beta chain variable domain of TCR clone 374260 (TRBV19, TRBJ2-1)
CATSRGVYNEQFF

SEQ ID NO: 748521 - protein, 15 aa, Homo sapiens
  CDR3 for alpha chain variable domain of TCR clone 374261 (TRAV8-1, TRAJ37)
CALNKGSGNTGKLIF

SEQ ID NO: 748522 - protein, 17 aa, Homo sapiens
  CDR3 for beta chain variable domain of TCR clone 374261 (TRBV12-4, TRBJ1-1)
CASSLLGFRTMNTEAFF

SEQ ID NO: 748523 - protein, 14 aa, Homo sapiens
  CDR3 for alpha chain variable domain of TCR clone 374262 (TRAV13-1, TRAJ35)
CAASKGGFGNVLHC

SEQ ID NO: 748524 - protein, 14 aa, Homo sapiens
  CDR3 for beta chain variable domain of TCR clone 374262 (TRBV4-1, TRBJ2-2)
YASSQAVNTGELFF

SEQ ID NO: 748525 - protein, 12 aa, Homo sapiens
  CDR3 for alpha chain variable domain of TCR clone 374263 (TRAV27, TRAJ13)
CAGAGGYQKVTF

SEQ ID NO: 748526 - protein, 15 aa, Homo sapiens
  CDR3 for beta chain variable domain of TCR clone 374263 (TRBV11-3, TRBJ2-7)
CASSPGPASSYEQYF

SEQ ID NO: 748527 - protein, 13 aa, Homo sapiens
  CDR3 for alpha chain variable domain of TCR clone 374264 (TRAV20, TRAJ48)
CAVQGVGNEKLTF

SEQ ID NO: 748528 - protein, 14 aa, Homo sapiens
  CDR3 for beta chain variable domain of TCR clone 374264 (TRBV27, TRBJ2-7)
CASSFRDGPYQQYF

SEQ ID NO: 748529 - protein, 15 aa, Homo sapiens
  CDR3 for alpha chain variable domain of TCR clone 374265 (TRAV8-6, TRAJ23)
CAVREFYNHGGKLIF

SEQ ID NO: 748530 - protein, 15 aa, Homo sapiens
  CDR3 for beta chain variable domain of TCR clone 374265 (TRBV20-1, TRBJ2-1)
CSAITGTSGSNEQFF

SEQ ID NO: 748531 - protein, 18 aa, Homo sapiens
  CDR3 for alpha chain variable domain of TCR clone 374266 (TRAV21, TRAJ52)
SAVRPSPAGGTSYGKLTF

SEQ ID NO: 748532 - protein, 14 aa, Homo sapiens
  CDR3 for beta chain variable domain of TCR clone 374266 (TRBV4-1, TRBJ2-2)
CASSQAVNTGELFF

SEQ ID NO: 748533 - protein, 14 aa, Homo sapiens
  CDR3 for alpha chain variable domain of TCR clone 374267 (TRAV1-1, TRAJ30)
CAVRSLNRDDKIIF

SEQ ID NO: 748534 - protein, 15 aa, Homo sapiens
  CDR3 for beta chain variable domain of TCR clone 374267 (TRBV27, TRBJ1-4)
CASSAQQDLNEKLFI

SEQ ID NO: 748535 - protein, 12 aa, Homo sapiens
  CDR3 for alpha chain variable domain of TCR clone 374268 (TRAV23/DV6, TRAJ30)
CAASKGDDKIIF

SEQ ID NO: 748536 - protein, 14 aa, Homo sapiens
  CDR3 for beta chain variable domain of TCR clone 374268 (TRBV7-9, TRBJ2-1)
CASSSMVGFGEQFF

SEQ ID NO: 748537 - protein, 14 aa, Homo sapiens
  CDR3 for alpha chain variable domain of TCR clone 374269 (TRAV35, TRAJ22)
CAVLRPGSARQLIF

SEQ ID NO: 748538 - protein, 15 aa, Homo sapiens
  CDR3 for beta chain variable domain of TCR clone 374269 (TRBV12-5, TRBJ2-2)
CASGRLGGNTGELFF

SEQ ID NO: 748539 - protein, 15 aa, Homo sapiens
  CDR3 for alpha chain variable domain of TCR clone 374270 (TRAV8-3, TRAJ45)
CASSYSGGGADGLTF

SEQ ID NO: 748540 - protein, 12 aa, Homo sapiens
  CDR3 for beta chain variable domain of TCR clone 374270 (TRBV12-4, TRBJ2-3)
CASSLGQDTQYF

SEQ ID NO: 748541 - protein, 15 aa, Homo sapiens
  CDR3 for alpha chain variable domain of TCR clone 374271 (TRAV12-2, TRAJ43)
CAFDMRFVAGTRLTV

SEQ ID NO: 748542 - protein, 15 aa, Homo sapiens
  CDR3 for beta chain variable domain of TCR clone 374271 (TRBV7-3, TRBJ2-2)
CASSETGQGTGELFF

SEQ ID NO: 748543 - protein, 14 aa, Homo sapiens
  CDR3 for alpha chain variable domain of TCR clone 374272 (TRAV16, TRAJ37)
CALDISGNTGKLIF

SEQ ID NO: 748544 - protein, 16 aa, Homo sapiens
  CDR3 for beta chain variable domain of TCR clone 374272 (TRBV11-3, TRBJ2-5)
CASSSVVAGSTETQYF

SEQ ID NO: 748545 - protein, 11 aa, Homo sapiens
  CDR3 for alpha chain variable domain of TCR clone 374273 (TRAV2, TRAJ33)
CAVDSNYQLIW

SEQ ID NO: 748546 - protein, 15 aa, Homo sapiens
  CDR3 for beta chain variable domain of TCR clone 374273 (TRBV19, TRBJ1-1)
CASTSGQTQNTEAFF

SEQ ID NO: 748547 - protein, 15 aa, Homo sapiens
  CDR3 for alpha chain variable domain of TCR clone 374274 (TRAV12-1, TRAJ9)
CVVSFGDTGGFKTIF

SEQ ID NO: 748548 - protein, 13 aa, Homo sapiens
  CDR3 for beta chain variable domain of TCR clone 374274 (TRBV2, TRBJ1-4)
CASSERAGETLFF

SEQ ID NO: 748549 - protein, 15 aa, Homo sapiens
  CDR3 for alpha chain variable domain of TCR clone 374275 (TRAV8-3, TRAJ45)
CAVEGSEGVADGLTF

SEQ ID NO: 748550 - protein, 16 aa, Homo sapiens
  CDR3 for beta chain variable domain of TCR clone 374275 (TRBV6-5, TRBJ2-6)
CASSYPLSSGANVLTF

SEQ ID NO: 748551 - protein, 13 aa, Homo sapiens
  CDR3 for alpha chain variable domain of TCR clone 374276 (TRAV21, TRAJ20)
CAVGLRVDYKLSF

SEQ ID NO: 748552 - protein, 16 aa, Homo sapiens
  CDR3 for beta chain variable domain of TCR clone 374276 (TRBV12-4, TRBJ2-7)
CASRSTGTGPSYEQYF

SEQ ID NO: 748553 - protein, 15 aa, Homo sapiens
  CDR3 for alpha chain variable domain of TCR clone 374277 (TRAV3, TRAJ22)
CAVRDRGGSARQLTF

SEQ ID NO: 748554 - protein, 14 aa, Homo sapiens
  CDR3 for beta chain variable domain of TCR clone 374277 (TRBV7-2, TRBJ1-3)
CASSRLRSGNTIYF

SEQ ID NO: 748555 - protein, 11 aa, Homo sapiens
  CDR3 for alpha chain variable domain of TCR clone 374278 (TRAV13-2, TRAJ31)
CAENMDARLMF

SEQ ID NO: 748556 - protein, 15 aa, Homo sapiens
  CDR3 for beta chain variable domain of TCR clone 374278 (TRBV7-8, TRBJ1-2)
CASSLVRDGGPGYTF

SEQ ID NO: 748557 - protein, 11 aa, Homo sapiens
  CDR3 for alpha chain variable domain of TCR clone 374279 (TRAV1-2, TRAJ20)
CAVSNDDKLSF

SEQ ID NO: 748558 - protein, 16 aa, Homo sapiens
  CDR3 for beta chain variable domain of TCR clone 374279 (TRBV12-5, TRBJ2-5)
CASGPRTSGNQETQYF

SEQ ID NO: 748559 - protein, 12 aa, Homo sapiens
  CDR3 for alpha chain variable domain of TCR clone 374280 (TRAV17, TRAJ30)
CATDAGDDKIIF

SEQ ID NO: 748560 - protein, 16 aa, Homo sapiens
  CDR3 for beta chain variable domain of TCR clone 374280 (TRBV5-7, TRBJ2-7)
CASSPTSGRELDEQYF

SEQ ID NO: 748561 - protein, 14 aa, Homo sapiens
  CDR3 for alpha chain variable domain of TCR clone 374281 (TRAV13-1, TRAJ6)
CAASNGGGSYIHTF

SEQ ID NO: 748562 - protein, 15 aa, Homo sapiens
  CDR3 for beta chain variable domain of TCR clone 374281 (TRBV10-3, TRBJ2-5)
CAIRPGDVDLGTQYF

SEQ ID NO: 748563 - protein, 13 aa, Homo sapiens
  CDR3 for alpha chain variable domain of TCR clone 374282 (TRAV30, TRAJ26)
CGTAIPLGQNFVF

SEQ ID NO: 748564 - protein, 16 aa, Homo sapiens
  CDR3 for beta chain variable domain of TCR clone 374282 (TRBV6-1, TRBJ1-5)
CASRDIAGQINQPQHF

SEQ ID NO: 748565 - protein, 12 aa, Homo sapiens
  CDR3 for alpha chain variable domain of TCR clone 374283 (TRAV12-3, TRAJ17)
CAMTLIGNKLTF

SEQ ID NO: 748566 - protein, 16 aa, Homo sapiens
  CDR3 for beta chain variable domain of TCR clone 374283 (TRBV2, TRBJ2-3)
CASSTSVEGVTDTQYF

SEQ ID NO: 748567 - protein, 13 aa, Homo sapiens
  CDR3 for alpha chain variable domain of TCR clone 374284 (TRAV17, TRAJ9)
CATDYTGGFKTIF

SEQ ID NO: 748568 - protein, 14 aa, Homo sapiens
  CDR3 for beta chain variable domain of TCR clone 374284 (TRBV19, TRBJ2-5)
CASSMTGQQETQYC

SEQ ID NO: 748569 - protein, 11 aa, Homo sapiens
  CDR3 for alpha chain variable domain of TCR clone 374285 (TRAV13-1, TRAJ20)
CAASNDYKLSF

SEQ ID NO: 748570 - protein, 19 aa, Homo sapiens
  CDR3 for beta chain variable domain of TCR clone 374285 (TRBV2, TRBJ2-2)
CASSQPGLAGGGNTGELFF

SEQ ID NO: 748571 - protein, 12 aa, Homo sapiens
  CDR3 for alpha chain variable domain of TCR clone 374286 (TRAV26-1, TRAJ17)
CIVRSAGNKLTF

SEQ ID NO: 748572 - protein, 17 aa, Homo sapiens
  CDR3 for beta chain variable domain of TCR clone 374286 (TRBV20-1, TRBJ2-1)
CSASSSGLAGSYNEQFF

SEQ ID NO: 748573 - protein, 16 aa, Homo sapiens
  CDR3 for alpha chain variable domain of TCR clone 374287 (TRAV30, TRAJ24)
CGTEIVDADSWGKFQF

SEQ ID NO: 748574 - protein, 14 aa, Homo sapiens
  CDR3 for beta chain variable domain of TCR clone 374287 (TRBV28, TRBJ1-4)
CASSFGTFDEKLFF

SEQ ID NO: 748575 - protein, 14 aa, Homo sapiens
  CDR3 for alpha chain variable domain of TCR clone 374288 (TRAV1-2, TRAJ16)
CAVNRFSDGQKLPF

SEQ ID NO: 748576 - protein, 14 aa, Homo sapiens
  CDR3 for beta chain variable domain of TCR clone 374288 (TRBV20-1, TRBJ2-7)
CSAKRGRSSYEQYF

SEQ ID NO: 748577 - protein, 11 aa, Homo sapiens
  CDR3 for alpha chain variable domain of TCR clone 374289 (TRAV17, TRAJ39)
CATNPYNMLTF

SEQ ID NO: 748578 - protein, 13 aa, Homo sapiens
  CDR3 for beta chain variable domain of TCR clone 374289 (TRBV7-8, TRBJ2-1)
CASTRDAVDEQFF

SEQ ID NO: 748579 - protein, 16 aa, Homo sapiens
  CDR3 for alpha chain variable domain of TCR clone 374290 (TRAV30, TRAJ24)
CGTEIVDSDSWGKFQF

SEQ ID NO: 748580 - protein, 15 aa, Homo sapiens
  CDR3 for beta chain variable domain of TCR clone 374290 (TRBV5-1, TRBJ1-1)
CASSLAPRGNTEAFF

SEQ ID NO: 748581 - protein, 17 aa, Homo sapiens
  CDR3 for alpha chain variable domain of TCR clone 374291 (TRAV12-3, TRAJ6)
CAMSARGGAGGSYIPTF

SEQ ID NO: 748582 - protein, 20 aa, Homo sapiens
  CDR3 for beta chain variable domain of TCR clone 374291 (TRBV7-8, TRBJ2-2)
FASSHLFPGPTIHITGELFF

SEQ ID NO: 748583 - protein, 14 aa, Homo sapiens
  CDR3 for alpha chain variable domain of TCR clone 374292 (TRAV26-1, TRAJ39)
CIVFTNNAGNMLTF

SEQ ID NO: 748584 - protein, 15 aa, Homo sapiens
  CDR3 for beta chain variable domain of TCR clone 374292 (TRBV19, TRBJ2-4)
CASSLTGLTKNIKYF

SEQ ID NO: 748585 - protein, 14 aa, Homo sapiens
  CDR3 for alpha chain variable domain of TCR clone 374293 (TRAV9-2, TRAJ39)
FALYIYNAGNMPTF

SEQ ID NO: 748586 - protein, 14 aa, Homo sapiens
  CDR3 for beta chain variable domain of TCR clone 374293 (TRBV19, TRBJ2-1)
CASPTFVLSGEQFF

SEQ ID NO: 748587 - protein, 16 aa, Homo sapiens
  CDR3 for alpha chain variable domain of TCR clone 374294 (TRAV26-1, TRAJ38)
CSVRVELGGNNRKLIW

SEQ ID NO: 748588 - protein, 14 aa, Homo sapiens
  CDR3 for beta chain variable domain of TCR clone 374294 (TRBV5-1, TRBJ2-3)
CASSPGLAADTQYF

SEQ ID NO: 748589 - protein, 17 aa, Homo sapiens
  CDR3 for alpha chain variable domain of TCR clone 374295 (TRAV3, TRAJ6)
CAVRDGPRAGGSYIPTF

SEQ ID NO: 748590 - protein, 14 aa, Homo sapiens
  CDR3 for beta chain variable domain of TCR clone 374295 (TRBV11-1, TRBJ2-7)
CASTFAVPSYEQYF

SEQ ID NO: 748591 - protein, 14 aa, Homo sapiens
  CDR3 for alpha chain variable domain of TCR clone 374296 (TRAV12-2, TRAJ45)
CAVNIGGGADGLTF

SEQ ID NO: 748592 - protein, 15 aa, Homo sapiens
  CDR3 for beta chain variable domain of TCR clone 374296 (TRBV6-5, TRBJ2-1)
CASSYDAGAGNEQFF

SEQ ID NO: 748593 - protein, 16 aa, Homo sapiens
  CDR3 for alpha chain variable domain of TCR clone 374297 (TRAV30, TRAJ24)
CGTEIVDADSWGKFQF

SEQ ID NO: 748594 - protein, 15 aa, Homo sapiens
  CDR3 for beta chain variable domain of TCR clone 374297 (TRBV12-4, TRBJ2-2)
CSSSPNDSGTGELFF

SEQ ID NO: 748595 - protein, 14 aa, Homo sapiens
  CDR3 for alpha chain variable domain of TCR clone 374298 (TRAV12-3, TRAJ29)
CAMILLSGNTPLVF

SEQ ID NO: 748596 - protein, 19 aa, Homo sapiens
  CDR3 for beta chain variable domain of TCR clone 374298 (TRBV25-1, TRBJ2-2)
CAILVYRVDRGRKTGELFF

SEQ ID NO: 748597 - protein, 19 aa, Homo sapiens
  CDR3 for alpha chain variable domain of TCR clone 374299 (TRAV25, TRAJ20)
TATQTTDVGILPHDYKLSF

SEQ ID NO: 748598 - protein, 11 aa, Homo sapiens
  CDR3 for beta chain variable domain of TCR clone 374299 (TRBV29-1, TRBJ2-5)
CSEDRTGTQYF

SEQ ID NO: 748599 - protein, 14 aa, Homo sapiens
  CDR3 for alpha chain variable domain of TCR clone 374300 (TRAV12-2, TRAJ13)
CAVKKTGGYQKVTF

SEQ ID NO: 748600 - protein, 14 aa, Homo sapiens
  CDR3 for beta chain variable domain of TCR clone 374300 (TRBV5-5, TRBJ2-7)
WASSLGQGTYEQYF

SEQ ID NO: 748601 - protein, 14 aa, Homo sapiens
  CDR3 for alpha chain variable domain of TCR clone 374301 (TRAV12-1, TRAJ17)
CVVNYKAAGNKLTF

SEQ ID NO: 748602 - protein, 15 aa, Homo sapiens
  CDR3 for beta chain variable domain of TCR clone 374301 (TRBV27, TRBJ1-5)
CASSLGTGFDQPQHF

SEQ ID NO: 748603 - protein, 12 aa, Homo sapiens
  CDR3 for alpha chain variable domain of TCR clone 374302 (TRAV13-1, TRAJ15)
CAASQAGTTLIF

SEQ ID NO: 748604 - protein, 18 aa, Homo sapiens
  CDR3 for beta chain variable domain of TCR clone 374302 (TRBV7-9, TRBJ2-3)
CASSLPINGQISTDTQYF

SEQ ID NO: 748605 - protein, 23 aa, Homo sapiens
  CDR3 for alpha chain variable domain of TCR clone 374303 (TRAV26-1, TRAJ22)
CIVRVSFWFCKATDLWIWDAITV

SEQ ID NO: 748606 - protein, 13 aa, Homo sapiens
  CDR3 for beta chain variable domain of TCR clone 374303 (TRBV7-9, TRBJ1-2)
CASSLKQNYGYTF

SEQ ID NO: 748607 - protein, 14 aa, Homo sapiens
  CDR3 for alpha chain variable domain of TCR clone 374304 (TRAV23/DV6, TRAJ13)
CSLAGGGGYQKVTF

SEQ ID NO: 748608 - protein, 14 aa, Homo sapiens
  CDR3 for beta chain variable domain of TCR clone 374304 (TRBV6-1, TRBJ2-1)
CASAGGAIKNEQFF

SEQ ID NO: 748609 - protein, 13 aa, Homo sapiens
  CDR3 for alpha chain variable domain of TCR clone 374305 (TRAV13-1, TRAJ5)
CAARVTGRRALTF

SEQ ID NO: 748610 - protein, 15 aa, Homo sapiens
  CDR3 for beta chain variable domain of TCR clone 374305 (TRBV7-9, TRBJ2-1)
CASSQRGGALIEQFF

SEQ ID NO: 748611 - protein, 12 aa, Homo sapiens
  CDR3 for alpha chain variable domain of TCR clone 374306 (TRAV12-2, TRAJ7)
CAGMRGNNRLAF

SEQ ID NO: 748612 - protein, 15 aa, Homo sapiens
  CDR3 for beta chain variable domain of TCR clone 374306 (TRBV2, TRBJ2-1)
CASSELAGGYNEQFF

SEQ ID NO: 748613 - protein, 15 aa, Homo sapiens
  CDR3 for alpha chain variable domain of TCR clone 374307 (TRAV8-2, TRAJ28)
CVVSESGAGSYQLTF

SEQ ID NO: 748614 - protein, 16 aa, Homo sapiens
  CDR3 for beta chain variable domain of TCR clone 374307 (TRBV6-1, TRBJ2-5)
CASSETLDSGAETQYF

SEQ ID NO: 748615 - protein, 14 aa, Homo sapiens
  CDR3 for alpha chain variable domain of TCR clone 374308 (TRAV23/DV6, TRAJ37)
CAASTSSNTGKLIF

SEQ ID NO: 748616 - protein, 17 aa, Homo sapiens
  CDR3 for beta chain variable domain of TCR clone 374308 (TRBV5-1, TRBJ2-2)
CASSEKPNFANTGELFF

SEQ ID NO: 748617 - protein, 13 aa, Homo sapiens
  CDR3 for alpha chain variable domain of TCR clone 374309 (TRAV27, TRAJ41)
CAGEGSSGYALNF

SEQ ID NO: 748618 - protein, 14 aa, Homo sapiens
  CDR3 for beta chain variable domain of TCR clone 374309 (TRBV7-2, TRBJ1-1)
CASSFLTGTAEAFF

SEQ ID NO: 748619 - protein, 12 aa, Homo sapiens
  CDR3 for alpha chain variable domain of TCR clone 374310 (TRAV22, TRAJ36)
CAVGTGANNLFF

SEQ ID NO: 748620 - protein, 17 aa, Homo sapiens
  CDR3 for beta chain variable domain of TCR clone 374310 (TRBV15, TRBJ1-4)
CATSRYGTGDPNETLFF

SEQ ID NO: 748621 - protein, 14 aa, Homo sapiens
  CDR3 for alpha chain variable domain of TCR clone 374311 (TRAV1-2, TRAJ16)
CAVNRFSVGQKLLF

SEQ ID NO: 748622 - protein, 13 aa, Homo sapiens
  CDR3 for beta chain variable domain of TCR clone 374311 (TRBV28, TRBJ2-5)
CASSFAGGETQYF

SEQ ID NO: 748623 - protein, 11 aa, Homo sapiens
  CDR3 for alpha chain variable domain of TCR clone 374312 (TRAV4, TRAJ31)
CLVGDNARLMF

SEQ ID NO: 748624 - protein, 17 aa, Homo sapiens
  CDR3 for beta chain variable domain of TCR clone 374312 (TRBV7-8, TRBJ2-6)
CASSAGTGGAGANVLTF

SEQ ID NO: 748625 - protein, 13 aa, Homo sapiens
  CDR3 for alpha chain variable domain of TCR clone 374313 (TRAV12-2, TRAJ24)
CAVSTERWGKLQF

SEQ ID NO: 748626 - protein, 14 aa, Homo sapiens
  CDR3 for beta chain variable domain of TCR clone 374313 (TRBV25-1, TRBJ1-1)
CASTHLGGNTEAFF

SEQ ID NO: 748627 - protein, 15 aa, Homo sapiens
  CDR3 for alpha chain variable domain of TCR clone 374314 (TRAV4, TRAJ36)
CLVGDRQTGANNLFF

SEQ ID NO: 748628 - protein, 15 aa, Homo sapiens
  CDR3 for beta chain variable domain of TCR clone 374314 (TRBV7-6, TRBJ2-1)
CASSSPAGEGNEQFF

SEQ ID NO: 748629 - protein, 14 aa, Homo sapiens
  CDR3 for alpha chain variable domain of TCR clone 374315 (TRAV4, TRAJ41)
CLVGDGDSGYALNF

SEQ ID NO: 748630 - protein, 13 aa, Homo sapiens
  CDR3 for beta chain variable domain of TCR clone 374315 (TRBV11-2, TRBJ2-5)
CASSSTGEETQYF

SEQ ID NO: 748631 - protein, 16 aa, Homo sapiens
  CDR3 for alpha chain variable domain of TCR clone 374316 (TRAV17, TRAJ35)
CATAEGGIGFGNVLHG

SEQ ID NO: 748632 - protein, 19 aa, Homo sapiens
  CDR3 for beta chain variable domain of TCR clone 374316 (TRBV19, TRBJ2-5)
CASSIGQVTDFFLGETQYF

SEQ ID NO: 748633 - protein, 14 aa, Homo sapiens
  CDR3 for alpha chain variable domain of TCR clone 374317 (TRAV26-1, TRAJ38)
FIPDNAGSNRKLIW

SEQ ID NO: 748634 - protein, 17 aa, Homo sapiens
  CDR3 for beta chain variable domain of TCR clone 374317 (TRBV15, TRBJ1-1)
CATSRVGGADGDTEAFF

SEQ ID NO: 748635 - protein, 15 aa, Homo sapiens
  CDR3 for alpha chain variable domain of TCR clone 374318 (TRAV25, TRAJ52)
CAGRPGGTSYGKLTF

SEQ ID NO: 748636 - protein, 14 aa, Homo sapiens
  CDR3 for beta chain variable domain of TCR clone 374318 (TRBV25-1, TRBJ1-2)
CASSDTTGVVGYTF

SEQ ID NO: 748637 - protein, 16 aa, Homo sapiens
  CDR3 for alpha chain variable domain of TCR clone 374319 (TRAV21, TRAJ52)
CAVTNAGGTSYGKLTF

SEQ ID NO: 748638 - protein, 17 aa, Homo sapiens
  CDR3 for beta chain variable domain of TCR clone 374319 (TRBV20-1, TRBJ2-1)
CSASSSGLAGSYNEQFF

SEQ ID NO: 748639 - protein, 15 aa, Homo sapiens
  CDR3 for alpha chain variable domain of TCR clone 374320 (TRAV20, TRAJ28)
CAVQYSWAGSYQLTF

SEQ ID NO: 748640 - protein, 12 aa, Homo sapiens
  CDR3 for beta chain variable domain of TCR clone 374320 (TRBV12-4, TRBJ1-3)
CASRASGNTIDF

SEQ ID NO: 748641 - protein, 14 aa, Homo sapiens
  CDR3 for alpha chain variable domain of TCR clone 374321 (TRAV12-3, TRAJ11)
CAMTTNSGYSTFTF

SEQ ID NO: 748642 - protein, 16 aa, Homo sapiens
  CDR3 for beta chain variable domain of TCR clone 374321 (TRBV20-1, TRBJ1-1)
CSARALTQGMNTEAFF

SEQ ID NO: 748643 - protein, 12 aa, Homo sapiens
  CDR3 for alpha chain variable domain of TCR clone 374322 (TRAV25, TRAJ20)
CAGRSNDYKLSF

SEQ ID NO: 748644 - protein, 14 aa, Homo sapiens
  CDR3 for beta chain variable domain of TCR clone 374322 (TRBV7-6, TRBJ2-3)
CASSLGTVTDTQYF

SEQ ID NO: 748645 - protein, 17 aa, Homo sapiens
  CDR3 for alpha chain variable domain of TCR clone 374323 (TRAV2, TRAJ22)
ILQVREADAAEQRQLTF

SEQ ID NO: 748646 - protein, 12 aa, Homo sapiens
  CDR3 for beta chain variable domain of TCR clone 374323 (TRBV3-1, TRBJ2-1)
CASSQGSSGQFF

SEQ ID NO: 748647 - protein, 11 aa, Homo sapiens
  CDR3 for alpha chain variable domain of TCR clone 374324 (TRAV36/DV7, TRAJ49)
WRVNTGNQFYF

SEQ ID NO: 748648 - protein, 13 aa, Homo sapiens
  CDR3 for beta chain variable domain of TCR clone 374324 (TRBV10-3, TRBJ2-7)
CASKLAVNYEQYF

SEQ ID NO: 748649 - protein, 14 aa, Homo sapiens
  CDR3 for alpha chain variable domain of TCR clone 374325 (TRAV1-2, TRAJ16)
CAVNRFSDGQQLLF

SEQ ID NO: 748650 - protein, 13 aa, Homo sapiens
  CDR3 for beta chain variable domain of TCR clone 374325 (TRBV20-1, TRBJ1-1)
CSARGGGNTEAFF

SEQ ID NO: 748651 - protein, 14 aa, Homo sapiens
  CDR3 for alpha chain variable domain of TCR clone 374326 (TRAV2, TRAJ9)
CAVEDRSGGFKAIF

SEQ ID NO: 748652 - protein, 13 aa, Homo sapiens
  CDR3 for beta chain variable domain of TCR clone 374326 (TRBV19, TRBJ1-2)
CASSVPGQDGYTF

SEQ ID NO: 748653 - protein, 16 aa, Homo sapiens
  CDR3 for alpha chain variable domain of TCR clone 374327 (TRAV12-1, TRAJ45)
CVVIRHSGGGADGLTF

SEQ ID NO: 748654 - protein, 12 aa, Homo sapiens
  CDR3 for beta chain variable domain of TCR clone 374327 (TRBV6-5, TRBJ2-2)
CASRQITGELFF

SEQ ID NO: 748655 - protein, 14 aa, Homo sapiens
  CDR3 for alpha chain variable domain of TCR clone 374328 (TRAV1-2, TRAJ8)
CAVREDTGFQKLVF

SEQ ID NO: 748656 - protein, 14 aa, Homo sapiens
  CDR3 for beta chain variable domain of TCR clone 374328 (TRBV19, TRBJ1-2)
CASSVLGYNYGYTY

SEQ ID NO: 748657 - protein, 15 aa, Homo sapiens
  CDR3 for alpha chain variable domain of TCR clone 374329 (TRAV27, TRAJ38)
CAARRNAGNNRKLIW

SEQ ID NO: 748658 - protein, 12 aa, Homo sapiens
  CDR3 for beta chain variable domain of TCR clone 374329 (TRBV2, TRBJ2-1)
CAYGPPGNEQFF

SEQ ID NO: 748659 - protein, 20 aa, Homo sapiens
  CDR3 for alpha chain variable domain of TCR clone 374330 (TRAV12-1, TRAJ42)
SSVIQPPTSVKGGSQGNLIF

SEQ ID NO: 748660 - protein, 12 aa, Homo sapiens
  CDR3 for beta chain variable domain of TCR clone 374330 (TRBV7-2, TRBJ1-5)
CASSLWSQPQHF

SEQ ID NO: 748661 - protein, 16 aa, Homo sapiens
  CDR3 for alpha chain variable domain of TCR clone 374331 (TRAV3, TRAJ42)
CAVRRNYGGSQGNLIF

SEQ ID NO: 748662 - protein, 13 aa, Homo sapiens
  CDR3 for beta chain variable domain of TCR clone 374331 (TRBV10-2, TRBJ2-7)
CASGASGGYEQYF

SEQ ID NO: 748663 - protein, 11 aa, Homo sapiens
  CDR3 for alpha chain variable domain of TCR clone 374332 (TRAV12-3, TRAJ41)
CAMNAREALNF

SEQ ID NO: 748664 - protein, 16 aa, Homo sapiens
  CDR3 for beta chain variable domain of TCR clone 374332 (TRBV7-8, TRBJ2-3)
CASSTEGQRERDTQYF

SEQ ID NO: 748665 - protein, 16 aa, Homo sapiens
  CDR3 for alpha chain variable domain of TCR clone 374333 (TRAV23/DV6, TRAJ48)
CAASGVVNFENEKLTF

SEQ ID NO: 748666 - protein, 15 aa, Homo sapiens
  CDR3 for beta chain variable domain of TCR clone 374333 (TRBV7-9, TRBJ2-1)
CASSLGWGRANEQFF

SEQ ID NO: 748667 - protein, 14 aa, Homo sapiens
  CDR3 for alpha chain variable domain of TCR clone 374334 (TRAV35, TRAJ42)
CAGRYGGSQGNLIF

SEQ ID NO: 748668 - protein, 12 aa, Homo sapiens
  CDR3 for beta chain variable domain of TCR clone 374334 (TRBV12-4, TRBJ2-7)
CASSLRGYEQYF

SEQ ID NO: 748669 - protein, 11 aa, Homo sapiens
  CDR3 for alpha chain variable domain of TCR clone 374335 (TRAV13-1, TRAJ30)
CAASRDDKILF

SEQ ID NO: 748670 - protein, 15 aa, Homo sapiens
  CDR3 for beta chain variable domain of TCR clone 374335 (TRBV18, TRBJ1-1)
CASSPSSWVNTEAFF

SEQ ID NO: 748671 - protein, 12 aa, Homo sapiens
  CDR3 for alpha chain variable domain of TCR clone 374336 (TRAV3, TRAJ7)
CADLLWEQQTRF

SEQ ID NO: 748672 - protein, 17 aa, Homo sapiens
  CDR3 for beta chain variable domain of TCR clone 374336 (TRBV7-3, TRBJ2-5)
CASSFRGGRPSTSGQAR

SEQ ID NO: 748673 - protein, 11 aa, Homo sapiens
  CDR3 for alpha chain variable domain of TCR clone 374337 (TRAV27, TRAJ47)
SIVEYGNKLVF

SEQ ID NO: 748674 - protein, 18 aa, Homo sapiens
  CDR3 for beta chain variable domain of TCR clone 374337 (TRBV2, TRBJ2-1)
CASRGLAGGPRTYNEQFC

SEQ ID NO: 748675 - protein, 15 aa, Homo sapiens
  CDR3 for alpha chain variable domain of TCR clone 374338 (TRAV12-3, TRAJ42)
CAMSGHGGSQGNLIF

SEQ ID NO: 748676 - protein, 13 aa, Homo sapiens
  CDR3 for beta chain variable domain of TCR clone 374338 (TRBV19, TRBJ2-5)
CASSGRAGETQYL

SEQ ID NO: 748677 - protein, 14 aa, Homo sapiens
  CDR3 for alpha chain variable domain of TCR clone 374339 (TRAV35, TRAJ22)
CAGLRPGSARHLTF

SEQ ID NO: 748678 - protein, 14 aa, Homo sapiens
  CDR3 for beta chain variable domain of TCR clone 374339 (TRBV4-1, TRBJ2-7)
CASSPVAGGDEQYF

SEQ ID NO: 748679 - protein, 15 aa, Homo sapiens
  CDR3 for alpha chain variable domain of TCR clone 374340 (TRAV16, TRAJ6)
CALNDASGGSYIPTF

SEQ ID NO: 748680 - protein, 14 aa, Homo sapiens
  CDR3 for beta chain variable domain of TCR clone 374340 (TRBV20-1, TRBJ1-1)
CSAQTRIGGTEAFF

SEQ ID NO: 748681 - protein, 14 aa, Homo sapiens
  CDR3 for alpha chain variable domain of TCR clone 374341 (TRAV12-2, TRAJ45)
CALPERGGADGLTF

SEQ ID NO: 748682 - protein, 15 aa, Homo sapiens
  CDR3 for beta chain variable domain of TCR clone 374341 (TRBV20-1, TRBJ2-7)
CSARDRVSGMDEQYF

SEQ ID NO: 748683 - protein, 15 aa, Homo sapiens
  CDR3 for alpha chain variable domain of TCR clone 374342 (TRAV3, TRAJ10)
CAVRDGTGGGNKLTF

SEQ ID NO: 748684 - protein, 15 aa, Homo sapiens
  CDR3 for beta chain variable domain of TCR clone 374342 (TRBV4-2, TRBJ1-4)
CASSLVQREVEKLSF

SEQ ID NO: 748685 - protein, 17 aa, Homo sapiens
  CDR3 for alpha chain variable domain of TCR clone 374343 (TRAV23/DV6, TRAJ57)
CAASSTLSQGGSEKLVF

SEQ ID NO: 748686 - protein, 14 aa, Homo sapiens
  CDR3 for beta chain variable domain of TCR clone 374343 (TRBV25-1, TRBJ1-1)
CASPPLGGNTEAFF

SEQ ID NO: 748687 - protein, 14 aa, Homo sapiens
  CDR3 for alpha chain variable domain of TCR clone 374344 (TRAV12-2, TRAJ40)
YAVKIPSGTSKYIF

SEQ ID NO: 748688 - protein, 14 aa, Homo sapiens
  CDR3 for beta chain variable domain of TCR clone 374344 (TRBV20-1, TRBJ1-1)
CSAQTRIGGTEAFF

SEQ ID NO: 748689 - protein, 13 aa, Homo sapiens
  CDR3 for alpha chain variable domain of TCR clone 374345 (TRAV27, TRAJ6)
CAGGTRGSYIPTI

SEQ ID NO: 748690 - protein, 14 aa, Homo sapiens
  CDR3 for beta chain variable domain of TCR clone 374345 (TRBV6-1, TRBJ1-3)
CASVQGGGGNTIYF

SEQ ID NO: 748691 - protein, 12 aa, Homo sapiens
  CDR3 for alpha chain variable domain of TCR clone 374346 (TRAV20, TRAJ56)
CAVTGANSKLTF

SEQ ID NO: 748692 - protein, 15 aa, Homo sapiens
  CDR3 for beta chain variable domain of TCR clone 374346 (TRBV11-1, TRBJ2-7)
CASSLNYGASYEQYF

SEQ ID NO: 748693 - protein, 16 aa, Homo sapiens
  CDR3 for alpha chain variable domain of TCR clone 374347 (TRAV26-1, TRAJ58)
IASSESGETSGSRLTF

SEQ ID NO: 748694 - protein, 12 aa, Homo sapiens
  CDR3 for beta chain variable domain of TCR clone 374347 (TRBV29-1, TRBJ2-3)
CSVTGGADTQYF

SEQ ID NO: 748695 - protein, 14 aa, Homo sapiens
  CDR3 for alpha chain variable domain of TCR clone 374348 (TRAV30, TRAJ32)
CTEILGGATNKLIF

SEQ ID NO: 748696 - protein, 17 aa, Homo sapiens
  CDR3 for beta chain variable domain of TCR clone 374348 (TRBV5-4, TRBJ2-1)
CASSSAGGRGPYNEQFF

SEQ ID NO: 748697 - protein, 14 aa, Homo sapiens
  CDR3 for alpha chain variable domain of TCR clone 374349 (TRAV1-2, TRAJ16)
CAVNRFSDGQKLLL

SEQ ID NO: 748698 - protein, 15 aa, Homo sapiens
  CDR3 for beta chain variable domain of TCR clone 374349 (TRBV7-9, TRBJ1-4)
CASSARTGGNEKLFC

SEQ ID NO: 748699 - protein, 16 aa, Homo sapiens
  CDR3 for alpha chain variable domain of TCR clone 374350 (TRAV16, TRAJ4)
CARSRMFSGGYNKLIF

SEQ ID NO: 748700 - protein, 16 aa, Homo sapiens
  CDR3 for beta chain variable domain of TCR clone 374350 (TRBV24-1, TRBJ2-3)
CATSDPGTGAADTQYF

SEQ ID NO: 748701 - protein, 14 aa, Homo sapiens
  CDR3 for alpha chain variable domain of TCR clone 374351 (TRAV1-2, TRAJ8)
CAVREDTGFQKLVF

SEQ ID NO: 748702 - protein, 13 aa, Homo sapiens
  CDR3 for beta chain variable domain of TCR clone 374351 (TRBV15, TRBJ2-7)
CATSTTGHYEQFF

SEQ ID NO: 748703 - protein, 11 aa, Homo sapiens
  CDR3 for alpha chain variable domain of TCR clone 374352 (TRAV23/DV6, TRAJ17)
CKWAAGNKLTF

SEQ ID NO: 748704 - protein, 15 aa, Homo sapiens
  CDR3 for beta chain variable domain of TCR clone 374352 (TRBV6-3, TRBJ2-7)
CASSSPGTVFYEQYF

SEQ ID NO: 748705 - protein, 15 aa, Homo sapiens
  CDR3 for alpha chain variable domain of TCR clone 374353 (TRAV12-3, TRAJ6)
CAMSATSGGSYIPTF

SEQ ID NO: 748706 - protein, 15 aa, Homo sapiens
  CDR3 for beta chain variable domain of TCR clone 374353 (TRBV6-4, TRBJ2-1)
CASSDSTGGYNEQFF

SEQ ID NO: 748707 - protein, 15 aa, Homo sapiens
  CDR3 for alpha chain variable domain of TCR clone 374354 (TRAV17, TRAJ13)
CATDAGSGGYQKVTF

SEQ ID NO: 748708 - protein, 16 aa, Homo sapiens
  CDR3 for beta chain variable domain of TCR clone 374354 (TRBV11-2, TRBJ2-1)
CQQLIPPRLEYNEQFF

SEQ ID NO: 748709 - protein, 12 aa, Homo sapiens
  CDR3 for alpha chain variable domain of TCR clone 374355 (TRAV16, TRAJ10)
CSRTGGGNKLTF

SEQ ID NO: 748710 - protein, 16 aa, Homo sapiens
  CDR3 for beta chain variable domain of TCR clone 374355 (TRBV4-1, TRBJ2-1)
CASSQQGAWESNEQFF

SEQ ID NO: 748711 - protein, 15 aa, Homo sapiens
  CDR3 for alpha chain variable domain of TCR clone 374356 (TRAV3, TRAJ13)
CAVRVYSGGYQKVTF

SEQ ID NO: 748712 - protein, 15 aa, Homo sapiens
  CDR3 for beta chain variable domain of TCR clone 374356 (TRBV5-7, TRBJ1-2)
FASSLGVAANYGYTF

SEQ ID NO: 748713 - protein, 14 aa, Homo sapiens
  CDR3 for alpha chain variable domain of TCR clone 374357 (TRAV20, TRAJ37)
CAVQEASNKGKLIF

SEQ ID NO: 748714 - protein, 15 aa, Homo sapiens
  CDR3 for beta chain variable domain of TCR clone 374357 (TRBV10-3, TRBJ2-5)
CAISESRDRGETQYF

SEQ ID NO: 748715 - protein, 16 aa, Homo sapiens
  CDR3 for alpha chain variable domain of TCR clone 374358 (TRAV30, TRAJ24)
CGTEIVDADSWGKFQF

SEQ ID NO: 748716 - protein, 15 aa, Homo sapiens
  CDR3 for beta chain variable domain of TCR clone 374358 (TRBV4-2, TRBJ2-2)
CASRATGGTIGELFF

SEQ ID NO: 748717 - protein, 15 aa, Homo sapiens
  CDR3 for alpha chain variable domain of TCR clone 374359 (TRAV8-3, TRAJ34)
DAAEYFCAIPGKLIF

SEQ ID NO: 748718 - protein, 15 aa, Homo sapiens
  CDR3 for beta chain variable domain of TCR clone 374359 (TRBV5-7, TRBJ2-1)
YASSRRLAGDNEQFF

SEQ ID NO: 748719 - protein, 13 aa, Homo sapiens
  CDR3 for alpha chain variable domain of TCR clone 374360 (TRAV16, TRAJ28)
CAPTGAGSYQLTL

SEQ ID NO: 748720 - protein, 16 aa, Homo sapiens
  CDR3 for beta chain variable domain of TCR clone 374360 (TRBV28, TRBJ1-5)
CDSSLTGQGWNQPQHF

SEQ ID NO: 748721 - protein, 15 aa, Homo sapiens
  CDR3 for alpha chain variable domain of TCR clone 374361 (TRAV21, TRAJ53)
CATVNSGGSNYKLTF

SEQ ID NO: 748722 - protein, 17 aa, Homo sapiens
  CDR3 for beta chain variable domain of TCR clone 374361 (TRBV11-2, TRBJ2-1)
CASSLYPPGVEYNEQFF

SEQ ID NO: 748723 - protein, 15 aa, Homo sapiens
  CDR3 for alpha chain variable domain of TCR clone 374362 (TRAV20, TRAJ24)
CAAQAAPDSWGKFQF

SEQ ID NO: 748724 - protein, 14 aa, Homo sapiens
  CDR3 for beta chain variable domain of TCR clone 374362 (TRBV20-1, TRBJ1-1)
CSARDRGQGSEAFF

SEQ ID NO: 748725 - protein, 15 aa, Homo sapiens
  CDR3 for alpha chain variable domain of TCR clone 374363 (TRAV8-3, TRAJ15)
CAVGAPNQAGTALIF

SEQ ID NO: 748726 - protein, 15 aa, Homo sapiens
  CDR3 for beta chain variable domain of TCR clone 374363 (TRBV9, TRBJ1-6)
CASSVAGTGDSPLHF

SEQ ID NO: 748727 - protein, 13 aa, Homo sapiens
  CDR3 for alpha chain variable domain of TCR clone 374364 (TRAV8-3, TRAJ43)
CAVVPYNNNDMRF

SEQ ID NO: 748728 - protein, 15 aa, Homo sapiens
  CDR3 for beta chain variable domain of TCR clone 374364 (TRBV27, TRBJ1-6)
CASSFDRGLGSPLHF

SEQ ID NO: 748729 - protein, 14 aa, Homo sapiens
  CDR3 for alpha chain variable domain of TCR clone 374365 (TRAV12-2, TRAJ5)
CAVNRSTGRRALTF

SEQ ID NO: 748730 - protein, 13 aa, Homo sapiens
  CDR3 for beta chain variable domain of TCR clone 374365 (TRBV11-2, TRBJ1-3)
CASSLEPVNTIYF

SEQ ID NO: 748731 - protein, 17 aa, Homo sapiens
  CDR3 for alpha chain variable domain of TCR clone 374366 (TRAV36/DV7, TRAJ52)
CAVAQRAGGTSYGKLTF

SEQ ID NO: 748732 - protein, 13 aa, Homo sapiens
  CDR3 for beta chain variable domain of TCR clone 374366 (TRBV11-2, TRBJ2-5)
CASSSTGEETQYF

SEQ ID NO: 748733 - protein, 19 aa, Homo sapiens
  CDR3 for alpha chain variable domain of TCR clone 374367 (TRAV3, TRAJ37)
CAVRDIVGGYPGNTGKLIF

SEQ ID NO: 748734 - protein, 14 aa, Homo sapiens
  CDR3 for beta chain variable domain of TCR clone 374367 (TRBV7-8, TRBJ2-3)
CASSLEAGTDTQYF

SEQ ID NO: 748735 - protein, 10 aa, Homo sapiens
  CDR3 for alpha chain variable domain of TCR clone 374368 (TRAV38-1, TRAJ34)
CAVMDDKPIF

SEQ ID NO: 748736 - protein, 14 aa, Homo sapiens
  CDR3 for beta chain variable domain of TCR clone 374368 (TRBV7-2, TRBJ2-2)
CASSLNSNNGELFF

SEQ ID NO: 748737 - protein, 12 aa, Homo sapiens
  CDR3 for alpha chain variable domain of TCR clone 374369 (TRAV13-2, TRAJ23)
CAERHRGGKLIF

SEQ ID NO: 748738 - protein, 17 aa, Homo sapiens
  CDR3 for beta chain variable domain of TCR clone 374369 (TRBV28, TRBJ2-5)
CASSRQGGLAGAETQYF

SEQ ID NO: 748739 - protein, 12 aa, Homo sapiens
  CDR3 for alpha chain variable domain of TCR clone 374370 (TRAV8-4, TRAJ4)
CAVTGGYNKLIF

SEQ ID NO: 748740 - protein, 14 aa, Homo sapiens
  CDR3 for beta chain variable domain of TCR clone 374370 (TRBV4-1, TRBJ2-2)
CASSQAVNTGELFF

SEQ ID NO: 748741 - protein, 14 aa, Homo sapiens
  CDR3 for alpha chain variable domain of TCR clone 374371 (TRAV8-3, TRAJ36)
CAVGPITGANNLFF

SEQ ID NO: 748742 - protein, 15 aa, Homo sapiens
  CDR3 for beta chain variable domain of TCR clone 374371 (TRBV7-6, TRBJ2-5)
CASSKPTGPQETQYF

SEQ ID NO: 748743 - protein, 11 aa, Homo sapiens
  CDR3 for alpha chain variable domain of TCR clone 374372 (TRAV21, TRAJ34)
CAVTNTDKPIF

SEQ ID NO: 748744 - protein, 14 aa, Homo sapiens
  CDR3 for beta chain variable domain of TCR clone 374372 (TRBV7-2, TRBJ2-2)
CASSSDGHTGELFF

SEQ ID NO: 748745 - protein, 12 aa, Homo sapiens
  CDR3 for alpha chain variable domain of TCR clone 374373 (TRAV13-1, TRAJ21)
CAAKEGFNKFYF

SEQ ID NO: 748746 - protein, 12 aa, Homo sapiens
  CDR3 for beta chain variable domain of TCR clone 374373 (TRBV7-8, TRBJ2-7)
CASSLSDIGQYF

SEQ ID NO: 748747 - protein, 17 aa, Homo sapiens
  CDR3 for alpha chain variable domain of TCR clone 374374 (TRAV3, TRAJ6)
CAVRDGPRAGGRHIPTF

SEQ ID NO: 748748 - protein, 14 aa, Homo sapiens
  CDR3 for beta chain variable domain of TCR clone 374374 (TRBV7-2, TRBJ2-7)
CASSPKTSFYEQYF

SEQ ID NO: 748749 - protein, 13 aa, Homo sapiens
  CDR3 for alpha chain variable domain of TCR clone 374375 (TRAV8-3, TRAJ21)
CAVGAYNFIKFYF

SEQ ID NO: 748750 - protein, 16 aa, Homo sapiens
  CDR3 for beta chain variable domain of TCR clone 374375 (TRBV19, TRBJ2-1)
CASSMGGGSSYNEQFF

SEQ ID NO: 748751 - protein, 15 aa, Homo sapiens
  CDR3 for alpha chain variable domain of TCR clone 374376 (TRAV13-1, TRAJ27)
CAARELNTNAGKSTF

SEQ ID NO: 748752 - protein, 14 aa, Homo sapiens
  CDR3 for beta chain variable domain of TCR clone 374376 (TRBV7-3, TRBJ2-1)
CASSLAGGTNEQFF

SEQ ID NO: 748753 - protein, 14 aa, Homo sapiens
  CDR3 for alpha chain variable domain of TCR clone 374377 (TRAV2, TRAJ37)
CAVDFTCNTGKLIF

SEQ ID NO: 748754 - protein, 19 aa, Homo sapiens
  CDR3 for beta chain variable domain of TCR clone 374377 (TRBV19, TRBJ2-5)
CASSIGQVTDFFLGETQYF

SEQ ID NO: 748755 - protein, 12 aa, Homo sapiens
  CDR3 for alpha chain variable domain of TCR clone 374378 (TRAV13-2, TRAJ23)
CAERHRGGKLIF

SEQ ID NO: 748756 - protein, 19 aa, Homo sapiens
  CDR3 for beta chain variable domain of TCR clone 374378 (TRBV7-9, TRBJ2-1)
CASSHNRGALLRSYNEQFF

SEQ ID NO: 748757 - protein, 14 aa, Homo sapiens
  CDR3 for alpha chain variable domain of TCR clone 374379 (TRAV14/DV4, TRAJ15)
CAMRRDQAGTALIF

SEQ ID NO: 748758 - protein, 17 aa, Homo sapiens
  CDR3 for beta chain variable domain of TCR clone 374379 (TRBV7-2, TRBJ2-3)
CASSLMKRMRGADTQYF

SEQ ID NO: 748759 - protein, 18 aa, Homo sapiens
  CDR3 for alpha chain variable domain of TCR clone 374380 (TRAV17, TRAJ10)
CFLLLFYILTGGGNKLTF

SEQ ID NO: 748760 - protein, 15 aa, Homo sapiens
  CDR3 for beta chain variable domain of TCR clone 374380 (TRBV12-4, TRBJ2-5)
CASSPPTGLQETQYF

SEQ ID NO: 748761 - protein, 13 aa, Homo sapiens
  CDR3 for alpha chain variable domain of TCR clone 374381 (TRAV27, TRAJ17)
CSGAATSGNKLTF

SEQ ID NO: 748762 - protein, 15 aa, Homo sapiens
  CDR3 for beta chain variable domain of TCR clone 374381 (TRBV5-1, TRBJ2-3)
CASRNQAGSTDTQYF

SEQ ID NO: 748763 - protein, 18 aa, Homo sapiens
  CDR3 for alpha chain variable domain of TCR clone 374382 (TRAV3, TRAJ17)
CAVRARRGGRSCRQQANF

SEQ ID NO: 748764 - protein, 14 aa, Homo sapiens
  CDR3 for beta chain variable domain of TCR clone 374382 (TRBV19, TRBJ2-2)
CATTGHANTGELFF

SEQ ID NO: 748765 - protein, 14 aa, Homo sapiens
  CDR3 for alpha chain variable domain of TCR clone 374383 (TRAV9-2, TRAJ39)
CALYIYNAGNMLTF

SEQ ID NO: 748766 - protein, 14 aa, Homo sapiens
  CDR3 for beta chain variable domain of TCR clone 374383 (TRBV27, TRBJ2-1)
CASSATGGYNEQFF

SEQ ID NO: 748767 - protein, 13 aa, Homo sapiens
  CDR3 for alpha chain variable domain of TCR clone 374384 (TRAV3, TRAJ29)
CAVRDIIDTPLVF

SEQ ID NO: 748768 - protein, 14 aa, Homo sapiens
  CDR3 for beta chain variable domain of TCR clone 374384 (TRBV27, TRBJ2-1)
CASSATGRYNDQFF

SEQ ID NO: 748769 - protein, 14 aa, Homo sapiens
  CDR3 for alpha chain variable domain of TCR clone 374385 (TRAV12-3, TRAJ10)
SHLPLTGGGNKLIF

SEQ ID NO: 748770 - protein, 15 aa, Homo sapiens
  CDR3 for beta chain variable domain of TCR clone 374385 (TRBV27, TRBJ1-5)
CASSLGTGFDQPQHF

SEQ ID NO: 748771 - protein, 12 aa, Homo sapiens
  CDR3 for alpha chain variable domain of TCR clone 374386 (TRAV12-2, TRAJ21)
CAVRYNFNKFYF

SEQ ID NO: 748772 - protein, 16 aa, Homo sapiens
  CDR3 for beta chain variable domain of TCR clone 374386 (TRBV12-5, TRBJ2-5)
CASGPRTSGNQETQYF

SEQ ID NO: 748773 - protein, 14 aa, Homo sapiens
  CDR3 for alpha chain variable domain of TCR clone 374387 (TRAV12-1, TRAJ3)
CVVNPGSSASKILF

SEQ ID NO: 748774 - protein, 15 aa, Homo sapiens
  CDR3 for beta chain variable domain of TCR clone 374387 (TRBV5-7, TRBJ1-2)
CAGSSPGQGNYGYTF

SEQ ID NO: 748775 - protein, 13 aa, Homo sapiens
  CDR3 for alpha chain variable domain of TCR clone 374388 (TRAV39, TRAJ58)
CAGEETSGSRLTF

SEQ ID NO: 748776 - protein, 14 aa, Homo sapiens
  CDR3 for beta chain variable domain of TCR clone 374388 (TRBV19, TRBJ2-1)
CASPTFVLSGEQFF

SEQ ID NO: 748777 - protein, 15 aa, Homo sapiens
  CDR3 for alpha chain variable domain of TCR clone 374389 (TRAV14/DV4, TRAJ46)
CAMREKKSSGDKLTC

SEQ ID NO: 748778 - protein, 13 aa, Homo sapiens
  CDR3 for beta chain variable domain of TCR clone 374389 (TRBV20-1, TRBJ2-5)
CSAREAFQETQYF

SEQ ID NO: 748779 - protein, 12 aa, Homo sapiens
  CDR3 for alpha chain variable domain of TCR clone 374390 (TRAV8-3, TRAJ26)
CVGDNYGQNFVF

SEQ ID NO: 748780 - protein, 17 aa, Homo sapiens
  CDR3 for beta chain variable domain of TCR clone 374390 (TRBV6-1, TRBJ1-1)
CASSPGTGGRIGTEAFF

SEQ ID NO: 748781 - protein, 16 aa, Homo sapiens
  CDR3 for alpha chain variable domain of TCR clone 374391 (TRAV13-2, TRAJ22)
CAENRGSSGSARQLTF

SEQ ID NO: 748782 - protein, 15 aa, Homo sapiens
  CDR3 for beta chain variable domain of TCR clone 374391 (TRBV6-3, TRBJ2-7)
CASNSPGTVFYEQYF

SEQ ID NO: 748783 - protein, 13 aa, Homo sapiens
  CDR3 for alpha chain variable domain of TCR clone 374392 (TRAV8-3, TRAJ36)
CAVGATRANNLFF

SEQ ID NO: 748784 - protein, 16 aa, Homo sapiens
  CDR3 for beta chain variable domain of TCR clone 374392 (TRBV20-1, TRBJ1-4)
CSAPGQGLLTNEKLFF

SEQ ID NO: 748785 - protein, 13 aa, Homo sapiens
  CDR3 for alpha chain variable domain of TCR clone 374393 (TRAV2, TRAJ20)
CAVEDPSEYKLSF

SEQ ID NO: 748786 - protein, 16 aa, Homo sapiens
  CDR3 for beta chain variable domain of TCR clone 374393 (TRBV25-1, TRBJ2-7)
CASGELTGGGIYEQYF

SEQ ID NO: 748787 - protein, 15 aa, Homo sapiens
  CDR3 for alpha chain variable domain of TCR clone 374394 (TRAV35, TRAJ40)
CAGQLGTLGTYKYIF

SEQ ID NO: 748788 - protein, 14 aa, Homo sapiens
  CDR3 for beta chain variable domain of TCR clone 374394 (TRBV7-3, TRBJ2-1)
CASGLAGGTNEQFF

SEQ ID NO: 748789 - protein, 14 aa, Homo sapiens
  CDR3 for alpha chain variable domain of TCR clone 374395 (TRAV38-1, TRAJ40)
CALRPTSGTYKYIF

SEQ ID NO: 748790 - protein, 14 aa, Homo sapiens
  CDR3 for beta chain variable domain of TCR clone 374395 (TRBV7-2, TRBJ2-3)
CASRFSRPSDTQYF

SEQ ID NO: 748791 - protein, 19 aa, Homo sapiens
  CDR3 for alpha chain variable domain of TCR clone 374396 (TRAV38-1, TRAJ53)
CAFMKHGIERGGSNYKLTF

SEQ ID NO: 748792 - protein, 13 aa, Homo sapiens
  CDR3 for beta chain variable domain of TCR clone 374396 (TRBV19, TRBJ2-7)
CASSPRQSYEQYF

SEQ ID NO: 748793 - protein, 13 aa, Homo sapiens
  CDR3 for alpha chain variable domain of TCR clone 374397 (TRAV13-2, TRAJ48)
CSEMDFGNEKLTF

SEQ ID NO: 748794 - protein, 13 aa, Homo sapiens
  CDR3 for beta chain variable domain of TCR clone 374397 (TRBV7-9, TRBJ1-2)
CASSLKQNYGYTF

SEQ ID NO: 748795 - protein, 12 aa, Homo sapiens
  CDR3 for alpha chain variable domain of TCR clone 374398 (TRAV2, TRAJ33)
CAFMDSNYQFIW

SEQ ID NO: 748796 - protein, 16 aa, Homo sapiens
  CDR3 for beta chain variable domain of TCR clone 374398 (TRBV2, TRBJ2-7)
CASSEPWTGPSYEQYF

SEQ ID NO: 748797 - protein, 12 aa, Homo sapiens
  CDR3 for alpha chain variable domain of TCR clone 374399 (TRAV8-2, TRAJ30)
CVGSDRDDKIIF

SEQ ID NO: 748798 - protein, 16 aa, Homo sapiens
  CDR3 for beta chain variable domain of TCR clone 374399 (TRBV5-4, TRBJ2-5)
CAESPGLAGTQETQYF

SEQ ID NO: 748799 - protein, 12 aa, Homo sapiens
  CDR3 for alpha chain variable domain of TCR clone 374400 (TRAV13-1, TRAJ49)
CAAPNTGNQFYF

SEQ ID NO: 748800 - protein, 17 aa, Homo sapiens
  CDR3 for beta chain variable domain of TCR clone 374400 (TRBV25-1, TRBJ2-7)
CASSDARLVFSSYEQYF

SEQ ID NO: 748801 - protein, 14 aa, Homo sapiens
  CDR3 for alpha chain variable domain of TCR clone 374401 (TRAV3, TRAJ9)
CAVRLNTGGFKTTF

SEQ ID NO: 748802 - protein, 16 aa, Homo sapiens
  CDR3 for beta chain variable domain of TCR clone 374401 (TRBV12-5, TRBJ2-5)
CASGPRTSGNQETQYF

SEQ ID NO: 748803 - protein, 14 aa, Homo sapiens
  CDR3 for alpha chain variable domain of TCR clone 374402 (TRAV12-3, TRAJ37)
CVSEGSSNTGKLIF

SEQ ID NO: 748804 - protein, 14 aa, Homo sapiens
  CDR3 for beta chain variable domain of TCR clone 374402 (TRBV20-1, TRBJ1-1)
CSAQTRIGCTEAFF

SEQ ID NO: 748805 - protein, 16 aa, Homo sapiens
  CDR3 for alpha chain variable domain of TCR clone 374403 (TRAV3, TRAJ37)
CAVRPLGSGNTGKLIF

SEQ ID NO: 748806 - protein, 15 aa, Homo sapiens
  CDR3 for beta chain variable domain of TCR clone 374403 (TRBV27, TRBJ2-1)
CASSNGGGSSNEQFF

SEQ ID NO: 748807 - protein, 14 aa, Homo sapiens
  CDR3 for alpha chain variable domain of TCR clone 374404 (TRAV2, TRAJ37)
CAVDFTSNTGKLIF

SEQ ID NO: 748808 - protein, 12 aa, Homo sapiens
  CDR3 for beta chain variable domain of TCR clone 374404 (TRBV20-1, TRBJ1-1)
KCSIGGGTEAFF

SEQ ID NO: 748809 - protein, 12 aa, Homo sapiens
  CDR3 for alpha chain variable domain of TCR clone 374405 (TRAV1-2, TRAJ33)
CAALDSNYQLIW

SEQ ID NO: 748810 - protein, 16 aa, Homo sapiens
  CDR3 for beta chain variable domain of TCR clone 374405 (TRBV6-4, TRBJ1-2)
CASSDAVGDPNYGYSF

SEQ ID NO: 748811 - protein, 16 aa, Homo sapiens
  CDR3 for alpha chain variable domain of TCR clone 374406 (TRAV30, TRAJ24)
CGTEIVVADSWGKFQF

SEQ ID NO: 748812 - protein, 17 aa, Homo sapiens
  CDR3 for beta chain variable domain of TCR clone 374406 (TRBV7-2, TRBJ2-7)
CASSPFGSSGPSPEQYF

SEQ ID NO: 748813 - protein, 12 aa, Homo sapiens
  CDR3 for alpha chain variable domain of TCR clone 374407 (TRAV27, TRAJ48)
CAGARGNEKLTF

SEQ ID NO: 748814 - protein, 14 aa, Homo sapiens
  CDR3 for beta chain variable domain of TCR clone 374407 (TRBV12-5, TRBJ2-5)
CASGSRTHQETEYF

SEQ ID NO: 748815 - protein, 14 aa, Homo sapiens
  CDR3 for alpha chain variable domain of TCR clone 374408 (TRAV12-1, TRAJ4)
CVVNRSGGYNKLIF

SEQ ID NO: 748816 - protein, 15 aa, Homo sapiens
  CDR3 for beta chain variable domain of TCR clone 374408 (TRBV12-4, TRBJ2-5)
CASSPPTGLQETQYF

SEQ ID NO: 748817 - protein, 15 aa, Homo sapiens
  CDR3 for alpha chain variable domain of TCR clone 374409 (TRAV2, TRAJ24)
CAVVRLKNSWGKLQF

SEQ ID NO: 748818 - protein, 16 aa, Homo sapiens
  CDR3 for beta chain variable domain of TCR clone 374409 (TRBV7-7, TRBJ2-3)
CASSPGTSGSTNTQYF

SEQ ID NO: 748819 - protein, 16 aa, Homo sapiens
  CDR3 for alpha chain variable domain of TCR clone 374410 (TRAV13-2, TRAJ52)
CRESPTGGTSYGKLTF

SEQ ID NO: 748820 - protein, 16 aa, Homo sapiens
  CDR3 for beta chain variable domain of TCR clone 374410 (TRBV7-3, TRBJ2-2)
CASSLKRGTLSGELFF

SEQ ID NO: 748821 - protein, 11 aa, Homo sapiens
  CDR3 for alpha chain variable domain of TCR clone 374411 (TRAV17, TRAJ43)
CATDVTGEMRF

SEQ ID NO: 748822 - protein, 14 aa, Homo sapiens
  CDR3 for beta chain variable domain of TCR clone 374411 (TRBV12-4, TRBJ1-1)
CASRPGQGRTEAFF

SEQ ID NO: 748823 - protein, 12 aa, Homo sapiens
  CDR3 for alpha chain variable domain of TCR clone 374412 (TRAV13-1, TRAJ9)
CASHTGGFKTIF

SEQ ID NO: 748824 - protein, 18 aa, Homo sapiens
  CDR3 for beta chain variable domain of TCR clone 374412 (TRBV11-2, TRBJ2-3)
CASSVGGAARGAPNTQYF

SEQ ID NO: 748825 - protein, 13 aa, Homo sapiens
  CDR3 for alpha chain variable domain of TCR clone 374413 (TRAV27, TRAJ49)
FAPRPYTVNQVYF

SEQ ID NO: 748826 - protein, 16 aa, Homo sapiens
  CDR3 for beta chain variable domain of TCR clone 374413 (TRBV4-1, TRBJ1-2)
CASSQDAGQVLYGYTF

SEQ ID NO: 748827 - protein, 16 aa, Homo sapiens
  CDR3 for alpha chain variable domain of TCR clone 374414 (TRAV8-3, TRAJ22)
CAVDLLGPGSARQLTF

SEQ ID NO: 748828 - protein, 11 aa, Homo sapiens
  CDR3 for beta chain variable domain of TCR clone 374414 (TRBV11-2, TRBJ2-2)
CASSLPGELFF

SEQ ID NO: 748829 - protein, 14 aa, Homo sapiens
  CDR3 for alpha chain variable domain of TCR clone 374415 (TRAV1-2, TRAJ16)
CAGNRFSDGQKLLF

SEQ ID NO: 748830 - protein, 16 aa, Homo sapiens
  CDR3 for beta chain variable domain of TCR clone 374415 (TRBV15, TRBJ2-3)
CATSRDLGIVTDTQYF

SEQ ID NO: 748831 - protein, 11 aa, Homo sapiens
  CDR3 for alpha chain variable domain of TCR clone 374416 (TRAV21, TRAJ33)
CAVLSNYQLIW

SEQ ID NO: 748832 - protein, 15 aa, Homo sapiens
  CDR3 for beta chain variable domain of TCR clone 374416 (TRBV11-2, TRBJ2-7)
CASSLMVGGSHEQYF

SEQ ID NO: 748833 - protein, 14 aa, Homo sapiens
  CDR3 for alpha chain variable domain of TCR clone 374417 (TRAV23/DV6, TRAJ13)
CAASDSGGYQKVTF

SEQ ID NO: 748834 - protein, 16 aa, Homo sapiens
  CDR3 for beta chain variable domain of TCR clone 374417 (TRBV7-3, TRBJ2-2)
CASSLKRGTLSGELLF

SEQ ID NO: 748835 - protein, 16 aa, Homo sapiens
  CDR3 for alpha chain variable domain of TCR clone 374418 (TRAV27, TRAJ57)
CAGALGTQGGSEKLVF

SEQ ID NO: 748836 - protein, 16 aa, Homo sapiens
  CDR3 for beta chain variable domain of TCR clone 374418 (TRBV19, TRBJ2-1)
CASSKAGPSSYNEQFF

SEQ ID NO: 748837 - protein, 15 aa, Homo sapiens
  CDR3 for alpha chain variable domain of TCR clone 374419 (TRAV6, TRAJ4)
CALGGFSGGFNKLIF

SEQ ID NO: 748838 - protein, 13 aa, Homo sapiens
  CDR3 for beta chain variable domain of TCR clone 374419 (TRBV19, TRBJ1-2)
CASSVPGQDGYTF

SEQ ID NO: 748839 - protein, 13 aa, Homo sapiens
  CDR3 for alpha chain variable domain of TCR clone 374420 (TRAV8-4, TRAJ34)
CAGSEDNTDKLIF

SEQ ID NO: 748840 - protein, 14 aa, Homo sapiens
  CDR3 for beta chain variable domain of TCR clone 374420 (TRBV7-2, TRBJ1-2)
CASSQTGSTYGYTF

SEQ ID NO: 748841 - protein, 12 aa, Homo sapiens
  CDR3 for alpha chain variable domain of TCR clone 374421 (TRAV2, TRAJ5)
CALDTGRRALTF

SEQ ID NO: 748842 - protein, 15 aa, Homo sapiens
  CDR3 for beta chain variable domain of TCR clone 374421 (TRBV10-3, TRBJ2-1)
CAISDVQDRAYERFF

SEQ ID NO: 748843 - protein, 11 aa, Homo sapiens
  CDR3 for alpha chain variable domain of TCR clone 374422 (TRAV4, TRAJ31)
CLVGDNARLMF

SEQ ID NO: 748844 - protein, 16 aa, Homo sapiens
  CDR3 for beta chain variable domain of TCR clone 374422 (TRBV7-2, TRBJ2-5)
CASSSKWLSGQETQFF

SEQ ID NO: 748845 - protein, 14 aa, Homo sapiens
  CDR3 for alpha chain variable domain of TCR clone 374423 (TRAV16, TRAJ15)
CALSGPQAGTALIF

SEQ ID NO: 748846 - protein, 14 aa, Homo sapiens
  CDR3 for beta chain variable domain of TCR clone 374423 (TRBV4-1, TRBJ2-2)
CASSQAVNTGELFF

SEQ ID NO: 748847 - protein, 19 aa, Homo sapiens
  CDR3 for alpha chain variable domain of TCR clone 374424 (TRAV17, TRAJ40)
TASRAADTASYFCASKYIF

SEQ ID NO: 748848 - protein, 13 aa, Homo sapiens
  CDR3 for beta chain variable domain of TCR clone 374424 (TRBV11-2, TRBJ2-1)
CASSLDLVNEQFF

SEQ ID NO: 748849 - protein, 14 aa, Homo sapiens
  CDR3 for alpha chain variable domain of TCR clone 374425 (TRAV1-2, TRAJ16)
CTVNRFSDGQKLLF

SEQ ID NO: 748850 - protein, 16 aa, Homo sapiens
  CDR3 for beta chain variable domain of TCR clone 374425 (TRBV19, TRBJ2-1)
CASSKAGPSSYNEQFF

SEQ ID NO: 748851 - protein, 23 aa, Homo sapiens
  CDR3 for alpha chain variable domain of TCR clone 374426 (TRAV12-2, TRAJ36)
SLLIRDSQPSDSATLERANNLFF

SEQ ID NO: 748852 - protein, 17 aa, Homo sapiens
  CDR3 for beta chain variable domain of TCR clone 374426 (TRBV4-1, TRBJ2-5)
CASSQDLTGGPIETQYF

SEQ ID NO: 748853 - protein, 17 aa, Homo sapiens
  CDR3 for alpha chain variable domain of TCR clone 374427 (TRAV4, TRAJ18)
CLVGERSVGSTLGRRYL

SEQ ID NO: 748854 - protein, 16 aa, Homo sapiens
  CDR3 for beta chain variable domain of TCR clone 374427 (TRBV19, TRBJ2-1)
CASSKAGPSSYNEQFF

SEQ ID NO: 748855 - protein, 14 aa, Homo sapiens
  CDR3 for alpha chain variable domain of TCR clone 374428 (TRAV2, TRAJ9)
CAVADRSGGFKTIF

SEQ ID NO: 748856 - protein, 11 aa, Homo sapiens
  CDR3 for beta chain variable domain of TCR clone 374428 (TRBV7-9, TRBJ2-5)
CASSLGETQYF

SEQ ID NO: 748857 - protein, 13 aa, Homo sapiens
  CDR3 for alpha chain variable domain of TCR clone 374429 (TRAV27, TRAJ29)
CAGAHSGNTPLVF

SEQ ID NO: 748858 - protein, 12 aa, Homo sapiens
  CDR3 for beta chain variable domain of TCR clone 374429 (TRBV5-5, TRBJ2-5)
CASSYFGETQYF

SEQ ID NO: 748859 - protein, 13 aa, Homo sapiens
  CDR3 for alpha chain variable domain of TCR clone 374430 (TRAV26-1, TRAJ33)
SIVRVEGNYQLIW

SEQ ID NO: 748860 - protein, 16 aa, Homo sapiens
  CDR3 for beta chain variable domain of TCR clone 374430 (TRBV15, TRBJ2-7)
CATSRDRGRRRGEQYF

SEQ ID NO: 748861 - protein, 16 aa, Homo sapiens
  CDR3 for alpha chain variable domain of TCR clone 374431 (TRAV12-2, TRAJ40)
CAVIRGGTSGTYKYIF

SEQ ID NO: 748862 - protein, 16 aa, Homo sapiens
  CDR3 for beta chain variable domain of TCR clone 374431 (TRBV24-1, TRBJ2-3)
CATSDPGTGATDTQYF

SEQ ID NO: 748863 - protein, 16 aa, Homo sapiens
  CDR3 for alpha chain variable domain of TCR clone 374432 (TRAV13-1, TRAJ58)
CAASSPYAPSGSRLTF

SEQ ID NO: 748864 - protein, 16 aa, Homo sapiens
  CDR3 for beta chain variable domain of TCR clone 374432 (TRBV7-3, TRBJ2-2)
CASSLKRGTLSGELFF

SEQ ID NO: 748865 - protein, 13 aa, Homo sapiens
  CDR3 for alpha chain variable domain of TCR clone 374433 (TRAV13-1, TRAJ10)
CAALEGGGNKLTF

SEQ ID NO: 748866 - protein, 11 aa, Homo sapiens
  CDR3 for beta chain variable domain of TCR clone 374433 (TRBV11-2, TRBJ2-2)
CASSLPGELFF

SEQ ID NO: 748867 - protein, 13 aa, Homo sapiens
  CDR3 for alpha chain variable domain of TCR clone 374434 (TRAV27, TRAJ45)
CRSSGGGADGLTF

SEQ ID NO: 748868 - protein, 15 aa, Homo sapiens
  CDR3 for beta chain variable domain of TCR clone 374434 (TRBV7-9, TRBJ1-6)
CASSSPGRGNSPLHF

SEQ ID NO: 748869 - protein, 15 aa, Homo sapiens
  CDR3 for alpha chain variable domain of TCR clone 374435 (TRAV23/DV6, TRAJ39)
CAASMSNNAGNMLTF

SEQ ID NO: 748870 - protein, 16 aa, Homo sapiens
  CDR3 for beta chain variable domain of TCR clone 374435 (TRBV4-1, TRBJ2-1)
CASSPSAGGHDNEQFF

SEQ ID NO: 748871 - protein, 17 aa, Homo sapiens
  CDR3 for alpha chain variable domain of TCR clone 374436 (TRAV3, TRAJ28)
CAVREAYSGAGSYPLTF

SEQ ID NO: 748872 - protein, 18 aa, Homo sapiens
  CDR3 for beta chain variable domain of TCR clone 374436 (TRBV27, TRBJ2-1)
CASGNRAVGVGSKNEQFF

SEQ ID NO: 748873 - protein, 12 aa, Homo sapiens
  CDR3 for alpha chain variable domain of TCR clone 374437 (TRAV9-2, TRAJ57)
CALRSGSEKLVF

SEQ ID NO: 748874 - protein, 15 aa, Homo sapiens
  CDR3 for beta chain variable domain of TCR clone 374437 (TRBV20-1, TRBJ2-7)
CSARDRVSGMDEQYF

SEQ ID NO: 748875 - protein, 14 aa, Homo sapiens
  CDR3 for alpha chain variable domain of TCR clone 374438 (TRAV1-1, TRAJ28)
CAAPSGAGSYQPTF

SEQ ID NO: 748876 - protein, 15 aa, Homo sapiens
  CDR3 for beta chain variable domain of TCR clone 374438 (TRBV28, TRBJ2-1)
CASSIIAGGRSEQFF

SEQ ID NO: 748877 - protein, 12 aa, Homo sapiens
  CDR3 for alpha chain variable domain of TCR clone 374439 (TRAV12-2, TRAJ10)
WGVTGGGNKLTF

SEQ ID NO: 748878 - protein, 17 aa, Homo sapiens
  CDR3 for beta chain variable domain of TCR clone 374439 (TRBV7-9, TRBJ2-3)
CASSPTVAGDLTDTQYF

SEQ ID NO: 748879 - protein, 13 aa, Homo sapiens
  CDR3 for alpha chain variable domain of TCR clone 374440 (TRAV8-3, TRAJ36)
CAVGATGANNLFF

SEQ ID NO: 748880 - protein, 13 aa, Homo sapiens
  CDR3 for beta chain variable domain of TCR clone 374440 (TRBV7-3, TRBJ2-1)
CQQLSGGTNEQFF

SEQ ID NO: 748881 - protein, 17 aa, Homo sapiens
  CDR3 for alpha chain variable domain of TCR clone 374441 (TRAV14/DV4, TRAJ4)
CAMREASGRGGYNKLIC

SEQ ID NO: 748882 - protein, 14 aa, Homo sapiens
  CDR3 for beta chain variable domain of TCR clone 374441 (TRBV19, TRBJ2-7)
CASSMGQGAIEQYF

SEQ ID NO: 748883 - protein, 13 aa, Homo sapiens
  CDR3 for alpha chain variable domain of TCR clone 374442 (TRAV10, TRAJ43)
CVVSATNNNDMRF

SEQ ID NO: 748884 - protein, 17 aa, Homo sapiens
  CDR3 for beta chain variable domain of TCR clone 374442 (TRBV7-3, TRBJ2-3)
CASSLMKRMRGADTQYF

SEQ ID NO: 748885 - protein, 11 aa, Homo sapiens
  CDR3 for alpha chain variable domain of TCR clone 374443 (TRAV21, TRAJ34)
CAVTNTDKLIF

SEQ ID NO: 748886 - protein, 15 aa, Homo sapiens
  CDR3 for beta chain variable domain of TCR clone 374443 (TRBV28, TRBJ2-5)
CASSSGRTIQETQYF

SEQ ID NO: 748887 - protein, 12 aa, Homo sapiens
  CDR3 for alpha chain variable domain of TCR clone 374444 (TRAV3, TRAJ26)
CAVRDYGQNFVF

SEQ ID NO: 748888 - protein, 12 aa, Homo sapiens
  CDR3 for beta chain variable domain of TCR clone 374444 (TRBV7-9, TRBJ2-7)
CASSFGSYEQYF

SEQ ID NO: 748889 - protein, 14 aa, Homo sapiens
  CDR3 for alpha chain variable domain of TCR clone 374445 (TRAV2, TRAJ9)
CAVEDRSGGFKTIF

SEQ ID NO: 748890 - protein, 14 aa, Homo sapiens
  CDR3 for beta chain variable domain of TCR clone 374445 (TRBV7-9, TRBJ2-7)
CASSPSRGQNEQYF

SEQ ID NO: 748891 - protein, 12 aa, Homo sapiens
  CDR3 for alpha chain variable domain of TCR clone 374446 (TRAV12-3, TRAJ17)
CAMTLTGNKLTF

SEQ ID NO: 748892 - protein, 16 aa, Homo sapiens
  CDR3 for beta chain variable domain of TCR clone 374446 (TRBV5-1, TRBJ1-1)
CASSSGGNSLNTEAFF

SEQ ID NO: 748893 - protein, 14 aa, Homo sapiens
  CDR3 for alpha chain variable domain of TCR clone 374447 (TRAV2, TRAJ39)
CAVEGDNAGNMLTF

SEQ ID NO: 748894 - protein, 14 aa, Homo sapiens
  CDR3 for beta chain variable domain of TCR clone 374447 (TRBV28, TRBJ2-4)
CPSSPRARGNIQYF

SEQ ID NO: 748895 - protein, 15 aa, Homo sapiens
  CDR3 for alpha chain variable domain of TCR clone 374448 (TRAV26-1, TRAJ22)
CIVRVSFWFFKATDL

SEQ ID NO: 748896 - protein, 13 aa, Homo sapiens
  CDR3 for beta chain variable domain of TCR clone 374448 (TRBV7-3, TRBJ1-1)
CASSQDWGAEAFF

SEQ ID NO: 748897 - protein, 15 aa, Homo sapiens
  CDR3 for alpha chain variable domain of TCR clone 374449 (TRAV3, TRAJ22)
CAVRDRGGSARQLTF

SEQ ID NO: 748898 - protein, 13 aa, Homo sapiens
  CDR3 for beta chain variable domain of TCR clone 374449 (TRBV5-7, TRBJ1-2)
CASSLGVFNGYTF

SEQ ID NO: 748899 - protein, 11 aa, Homo sapiens
  CDR3 for alpha chain variable domain of TCR clone 374450 (TRAV2, TRAJ33)
CAVESNYQLIW

SEQ ID NO: 748900 - protein, 15 aa, Homo sapiens
  CDR3 for beta chain variable domain of TCR clone 374450 (TRBV7-2, TRBJ2-1)
CASSFQADEYNEQFF

SEQ ID NO: 748901 - protein, 13 aa, Homo sapiens
  CDR3 for alpha chain variable domain of TCR clone 374451 (TRAV2, TRAJ20)
CAVEYPSEYKLSF

SEQ ID NO: 748902 - protein, 16 aa, Homo sapiens
  CDR3 for beta chain variable domain of TCR clone 374451 (TRBV25-1, TRBJ2-7)
CASSELTGGGIYEQYF

SEQ ID NO: 748903 - protein, 14 aa, Homo sapiens
  CDR3 for alpha chain variable domain of TCR clone 374452 (TRAV8-4, TRAJ13)
CAVTLSGGYQKVNL

SEQ ID NO: 748904 - protein, 16 aa, Homo sapiens
  CDR3 for beta chain variable domain of TCR clone 374452 (TRBV5-7, TRBJ1-4)
CASSPSGGLKTEKLFS

SEQ ID NO: 748905 - protein, 14 aa, Homo sapiens
  CDR3 for alpha chain variable domain of TCR clone 374453 (TRAV35, TRAJ38)
CAGANAGNNRKLIL

SEQ ID NO: 748906 - protein, 12 aa, Homo sapiens
  CDR3 for beta chain variable domain of TCR clone 374453 (TRBV19, TRBJ2-7)
CASTDRGYEQYF

SEQ ID NO: 748907 - protein, 15 aa, Homo sapiens
  CDR3 for alpha chain variable domain of TCR clone 374454 (TRAV17, TRAJ52)
CATEAGGTSYGKLTF

SEQ ID NO: 748908 - protein, 11 aa, Homo sapiens
  CDR3 for beta chain variable domain of TCR clone 374454 (TRBV29-1, TRBJ2-5)
CSEDRTGTQYF

SEQ ID NO: 748909 - protein, 12 aa, Homo sapiens
  CDR3 for alpha chain variable domain of TCR clone 374455 (TRAV12-3, TRAJ17)
CAMTLTGNKLTF

SEQ ID NO: 748910 - protein, 12 aa, Homo sapiens
  CDR3 for beta chain variable domain of TCR clone 374455 (TRBV2, TRBJ2-1)
CAYGPPGNEQFL

SEQ ID NO: 748911 - protein, 15 aa, Homo sapiens
  CDR3 for alpha chain variable domain of TCR clone 374456 (TRAV8-3, TRAJ45)
CASSYSGGGADGLTF

SEQ ID NO: 748912 - protein, 16 aa, Homo sapiens
  CDR3 for beta chain variable domain of TCR clone 374456 (TRBV20-1, TRBJ2-2)
CSASASGIPGAGKLFF

SEQ ID NO: 748913 - protein, 14 aa, Homo sapiens
  CDR3 for alpha chain variable domain of TCR clone 374457 (TRAV8-4, TRAJ12)
CAVNPMDSSYKLIF

SEQ ID NO: 748914 - protein, 15 aa, Homo sapiens
  CDR3 for beta chain variable domain of TCR clone 374457 (TRBV5-5, TRBJ2-1)
CASSPEAETYNEQFF

SEQ ID NO: 748915 - protein, 20 aa, Homo sapiens
  CDR3 for alpha chain variable domain of TCR clone 374458 (TRAV12-1, TRAJ42)
SSVIQPPTSVKGGSQGNLIF

SEQ ID NO: 748916 - protein, 18 aa, Homo sapiens
  CDR3 for beta chain variable domain of TCR clone 374458 (TRBV11-2, TRBJ2-3)
CASSLGGASRGAPNTQHF

SEQ ID NO: 748917 - protein, 17 aa, Homo sapiens
  CDR3 for alpha chain variable domain of TCR clone 374459 (TRAV13-1, TRAJ52)
CAASSGAGGTSYGKLTF

SEQ ID NO: 748918 - protein, 13 aa, Homo sapiens
  CDR3 for beta chain variable domain of TCR clone 374459 (TRBV12-4, TRBJ1-2)
CASSSGLTVIATF

SEQ ID NO: 748919 - protein, 13 aa, Homo sapiens
  CDR3 for alpha chain variable domain of TCR clone 374460 (TRAV8-3, TRAJ44)
CAVVPGTASKLTF

SEQ ID NO: 748920 - protein, 17 aa, Homo sapiens
  CDR3 for beta chain variable domain of TCR clone 374460 (TRBV3-1, TRBJ2-3)
CASSQLLDRGHTDTQYF

SEQ ID NO: 748921 - protein, 14 aa, Homo sapiens
  CDR3 for alpha chain variable domain of TCR clone 374461 (TRAV12-3, TRAJ13)
CATLDAGGYQKVTF

SEQ ID NO: 748922 - protein, 12 aa, Homo sapiens
  CDR3 for beta chain variable domain of TCR clone 374461 (TRBV2, TRBJ2-7)
CQQDNTGWEQYF

SEQ ID NO: 748923 - protein, 13 aa, Homo sapiens
  CDR3 for alpha chain variable domain of TCR clone 374462 (TRAV1-2, TRAJ9)
CAALNTGGFKTIL

SEQ ID NO: 748924 - protein, 15 aa, Homo sapiens
  CDR3 for beta chain variable domain of TCR clone 374462 (TRBV24-1, TRBJ2-1)
CATSGSGGFYNEQFF

SEQ ID NO: 748925 - protein, 13 aa, Homo sapiens
  CDR3 for alpha chain variable domain of TCR clone 374463 (TRAV8-1, TRAJ5)
CAVIYTRRRALTF

SEQ ID NO: 748926 - protein, 12 aa, Homo sapiens
  CDR3 for beta chain variable domain of TCR clone 374463 (TRBV25-1, TRBJ2-1)
CASSIRDNEQFF

SEQ ID NO: 748927 - protein, 13 aa, Homo sapiens
  CDR3 for alpha chain variable domain of TCR clone 374464 (TRAV27, TRAJ24)
CAGDRDSWGKLQF

SEQ ID NO: 748928 - protein, 15 aa, Homo sapiens
  CDR3 for beta chain variable domain of TCR clone 374464 (TRBV7-2, TRBJ2-5)
CASRGTSGREETQYF

SEQ ID NO: 748929 - protein, 15 aa, Homo sapiens
  CDR3 for alpha chain variable domain of TCR clone 374465 (TRAV13-1, TRAJ27)
CAARELNTNAGKSTF

SEQ ID NO: 748930 - protein, 15 aa, Homo sapiens
  CDR3 for beta chain variable domain of TCR clone 374465 (TRBV28, TRBJ2-5)
CASSPPWSYQETQYF

SEQ ID NO: 748931 - protein, 14 aa, Homo sapiens
  CDR3 for alpha chain variable domain of TCR clone 374466 (TRAV12-2, TRAJ40)
CAVKIPSGTYKYIF

SEQ ID NO: 748932 - protein, 12 aa, Homo sapiens
  CDR3 for beta chain variable domain of TCR clone 374466 (TRBV6-5, TRBJ2-1)
CASRNDRGQQFF

SEQ ID NO: 748933 - protein, 11 aa, Homo sapiens
  CDR3 for alpha chain variable domain of TCR clone 374467 (TRAV1-1, TRAJ9)
CAVAGGFKTIF

SEQ ID NO: 748934 - protein, 15 aa, Homo sapiens
  CDR3 for beta chain variable domain of TCR clone 374467 (TRBV12-4, TRBJ2-5)
CASSPPTGLQETQYF

SEQ ID NO: 748935 - protein, 16 aa, Homo sapiens
  CDR3 for alpha chain variable domain of TCR clone 374468 (TRAV3, TRAJ21)
CAVRDNERGNFNQFYF

SEQ ID NO: 748936 - protein, 13 aa, Homo sapiens
  CDR3 for beta chain variable domain of TCR clone 374468 (TRBV27, TRBJ2-7)
CASSLATGYEQYF

SEQ ID NO: 748937 - protein, 11 aa, Homo sapiens
  CDR3 for alpha chain variable domain of TCR clone 374469 (TRAV27, TRAJ45)
CAGAQEGVLTD

SEQ ID NO: 748938 - protein, 14 aa, Homo sapiens
  CDR3 for beta chain variable domain of TCR clone 374469 (TRBV7-9, TRBJ2-1)
CASSSMVGFGEQFF

SEQ ID NO: 748939 - protein, 14 aa, Homo sapiens
  CDR3 for alpha chain variable domain of TCR clone 374470 (TRAV14/DV4, TRAJ15)
CAMRRDQAGTALIF

SEQ ID NO: 748940 - protein, 11 aa, Homo sapiens
  CDR3 for beta chain variable domain of TCR clone 374470 (TRBV7-2, TRBJ2-7)
CASSSLLWQYF

SEQ ID NO: 748941 - protein, 13 aa, Homo sapiens
  CDR3 for alpha chain variable domain of TCR clone 374471 (TRAV26-2, TRAJ43)
CILRAVNNNYMRF

SEQ ID NO: 748942 - protein, 17 aa, Homo sapiens
  CDR3 for beta chain variable domain of TCR clone 374471 (TRBV20-1, TRBJ2-2)
CSASGSGQGGLTGELFF

SEQ ID NO: 748943 - protein, 17 aa, Homo sapiens
  CDR3 for alpha chain variable domain of TCR clone 374472 (TRAV26-2, TRAJ52)
CILSSSSGGTSYGKLTF

SEQ ID NO: 748944 - protein, 11 aa, Homo sapiens
  CDR3 for beta chain variable domain of TCR clone 374472 (TRBV19, TRBJ1-1)
CATFRNTEAFF

SEQ ID NO: 748945 - protein, 13 aa, Homo sapiens
  CDR3 for alpha chain variable domain of TCR clone 374473 (TRAV13-1, TRAJ13)
CAASKGGYQKVTF

SEQ ID NO: 748946 - protein, 16 aa, Homo sapiens
  CDR3 for beta chain variable domain of TCR clone 374473 (TRBV18, TRBJ1-2)
YASSPPERVTIYGYTF

SEQ ID NO: 748947 - protein, 14 aa, Homo sapiens
  CDR3 for alpha chain variable domain of TCR clone 374474 (TRAV16, TRAJ26)
CALSGCNYGPNFVF

SEQ ID NO: 748948 - protein, 15 aa, Homo sapiens
  CDR3 for beta chain variable domain of TCR clone 374474 (TRBV10-3, TRBJ2-3)
CAISLTSGGTDTQYF

SEQ ID NO: 748949 - protein, 14 aa, Homo sapiens
  CDR3 for alpha chain variable domain of TCR clone 374475 (TRAV12-1, TRAJ42)
CVVIYGGSQGNIIF

SEQ ID NO: 748950 - protein, 13 aa, Homo sapiens
  CDR3 for beta chain variable domain of TCR clone 374475 (TRBV18, TRBJ2-5)
CASSPPGKETQYF

SEQ ID NO: 748951 - protein, 14 aa, Homo sapiens
  CDR3 for alpha chain variable domain of TCR clone 374476 (TRAV1-2, TRAJ16)
FAVNRFSDGQKLLF

SEQ ID NO: 748952 - protein, 16 aa, Homo sapiens
  CDR3 for beta chain variable domain of TCR clone 374476 (TRBV9, TRBJ2-1)
CASSVGGGGNYNEQFF

SEQ ID NO: 748953 - protein, 16 aa, Homo sapiens
  CDR3 for alpha chain variable domain of TCR clone 374477 (TRAV1-1, TRAJ45)
CAVRAYSGGGADGRTF

SEQ ID NO: 748954 - protein, 13 aa, Homo sapiens
  CDR3 for beta chain variable domain of TCR clone 374477 (TRBV20-1, TRBJ1-2)
CSARGTADYGYSF

SEQ ID NO: 748955 - protein, 12 aa, Homo sapiens
  CDR3 for alpha chain variable domain of TCR clone 374478 (TRAV21, TRAJ13)
PGPSGGYQNVTF

SEQ ID NO: 748956 - protein, 15 aa, Homo sapiens
  CDR3 for beta chain variable domain of TCR clone 374478 (TRBV28, TRBJ2-5)
CASSSPLGGGETQYF

SEQ ID NO: 748957 - protein, 12 aa, Homo sapiens
  CDR3 for alpha chain variable domain of TCR clone 374479 (TRAV8-4, TRAJ43)
CAVSVNNNDMRF

SEQ ID NO: 748958 - protein, 17 aa, Homo sapiens
  CDR3 for beta chain variable domain of TCR clone 374479 (TRBV7-3, TRBJ2-3)
CASSLMKRMRGADTQYF

SEQ ID NO: 748959 - protein, 15 aa, Homo sapiens
  CDR3 for alpha chain variable domain of TCR clone 374480 (TRAV3, TRAJ3)
CAVRDMSSSASKIIF

SEQ ID NO: 748960 - protein, 14 aa, Homo sapiens
  CDR3 for beta chain variable domain of TCR clone 374480 (TRBV19, TRBJ2-1)
CASPTFVLSGEQLF

SEQ ID NO: 748961 - protein, 17 aa, Homo sapiens
  CDR3 for alpha chain variable domain of TCR clone 374481 (TRAV3, TRAJ6)
CAVRDGPRAGGSYIPTF

SEQ ID NO: 748962 - protein, 15 aa, Homo sapiens
  CDR3 for beta chain variable domain of TCR clone 374481 (TRBV28, TRBJ2-1)
CASSLDTSSYNEQFF

SEQ ID NO: 748963 - protein, 14 aa, Homo sapiens
  CDR3 for alpha chain variable domain of TCR clone 374482 (TRAV9-2, TRAJ39)
CALYIYNAGNMLTF

SEQ ID NO: 748964 - protein, 14 aa, Homo sapiens
  CDR3 for beta chain variable domain of TCR clone 374482 (TRBV6-1, TRBJ1-3)
CASVQGGGGSTIYF

SEQ ID NO: 748965 - protein, 11 aa, Homo sapiens
  CDR3 for alpha chain variable domain of TCR clone 374483 (TRAV35, TRAJ34)
CWARNTDKLIF

SEQ ID NO: 748966 - protein, 14 aa, Homo sapiens
  CDR3 for beta chain variable domain of TCR clone 374483 (TRBV5-1, TRBJ2-7)
CASSRGESLYQQYF

SEQ ID NO: 748967 - protein, 14 aa, Homo sapiens
  CDR3 for alpha chain variable domain of TCR clone 374484 (TRAV1-2, TRAJ16)
CTVNRFSDGQKLLF

SEQ ID NO: 748968 - protein, 15 aa, Homo sapiens
  CDR3 for beta chain variable domain of TCR clone 374484 (TRBV6-6, TRBJ2-7)
CASSYSYGGSYEQYF

SEQ ID NO: 748969 - protein, 15 aa, Homo sapiens
  CDR3 for alpha chain variable domain of TCR clone 374485 (TRAV26-1, TRAJ29)
CIVRVEGSGNTTLVF

SEQ ID NO: 748970 - protein, 15 aa, Homo sapiens
  CDR3 for beta chain variable domain of TCR clone 374485 (TRBV7-9, TRBJ1-5)
CASSQGPQPNQPQHF

SEQ ID NO: 748971 - protein, 15 aa, Homo sapiens
  CDR3 for alpha chain variable domain of TCR clone 374486 (TRAV1-2, TRAJ38)
CAVRENAGNNRKPIW

SEQ ID NO: 748972 - protein, 13 aa, Homo sapiens
  CDR3 for beta chain variable domain of TCR clone 374486 (TRBV27, TRBJ1-2)
CASSPSHRGRYSF

SEQ ID NO: 748973 - protein, 13 aa, Homo sapiens
  CDR3 for alpha chain variable domain of TCR clone 374487 (TRAV23/DV6, TRAJ27)
CAASKPMQANQPL

SEQ ID NO: 748974 - protein, 13 aa, Homo sapiens
  CDR3 for beta chain variable domain of TCR clone 374487 (TRBV27, TRBJ2-1)
CASRTLGVGEQFF

SEQ ID NO: 748975 - protein, 13 aa, Homo sapiens
  CDR3 for alpha chain variable domain of TCR clone 374488 (TRAV3, TRAJ27)
CAVRPLGAGKSTF

SEQ ID NO: 748976 - protein, 12 aa, Homo sapiens
  CDR3 for beta chain variable domain of TCR clone 374488 (TRBV7-9, TRBJ2-7)
CATRRDAYEQYF

SEQ ID NO: 748977 - protein, 16 aa, Homo sapiens
  CDR3 for alpha chain variable domain of TCR clone 374489 (TRAV3, TRAJ4)
GAVRPSPSGGYIKLIF

SEQ ID NO: 748978 - protein, 12 aa, Homo sapiens
  CDR3 for beta chain variable domain of TCR clone 374489 (TRBV7-9, TRBJ2-7)
CASSQGVYEQYF

SEQ ID NO: 748979 - protein, 12 aa, Homo sapiens
  CDR3 for alpha chain variable domain of TCR clone 374490 (TRAV12-1, TRAJ31)
CVSWNNNARLMF

SEQ ID NO: 748980 - protein, 15 aa, Homo sapiens
  CDR3 for beta chain variable domain of TCR clone 374490 (TRBV7-2, TRBJ1-5)
CASSLDRGQDQPQHV

SEQ ID NO: 748981 - protein, 14 aa, Homo sapiens
  CDR3 for alpha chain variable domain of TCR clone 374491 (TRAV12-3, TRAJ29)
CAMSPYSGNTPLVF

SEQ ID NO: 748982 - protein, 15 aa, Homo sapiens
  CDR3 for beta chain variable domain of TCR clone 374491 (TRBV27, TRBJ2-1)
CASSNGGGSSNEKFF

SEQ ID NO: 748983 - protein, 14 aa, Homo sapiens
  CDR3 for alpha chain variable domain of TCR clone 374492 (TRAV1-1, TRAJ23)
CAVSIYNQGGKLIF

SEQ ID NO: 748984 - protein, 14 aa, Homo sapiens
  CDR3 for beta chain variable domain of TCR clone 374492 (TRBV7-6, TRBJ2-3)
CASSLGTVTDTQYF

SEQ ID NO: 748985 - protein, 14 aa, Homo sapiens
  CDR3 for alpha chain variable domain of TCR clone 374493 (TRAV26-1, TRAJ48)
CIVRVGFGNEQLTF

SEQ ID NO: 748986 - protein, 13 aa, Homo sapiens
  CDR3 for beta chain variable domain of TCR clone 374493 (TRBV11-3, TRBJ2-3)
CASSHDTKDTQYF

SEQ ID NO: 748987 - protein, 13 aa, Homo sapiens
  CDR3 for alpha chain variable domain of TCR clone 374494 (TRAV8-4, TRAJ39)
STPPPDAGNMLTF

SEQ ID NO: 748988 - protein, 13 aa, Homo sapiens
  CDR3 for beta chain variable domain of TCR clone 374494 (TRBV6-3, TRBJ2-5)
CASRRGIQETQYF

SEQ ID NO: 748989 - protein, 16 aa, Homo sapiens
  CDR3 for alpha chain variable domain of TCR clone 374495 (TRAV8-3, TRAJ13)
CAVGAYASGGYQKVPF

SEQ ID NO: 748990 - protein, 15 aa, Homo sapiens
  CDR3 for beta chain variable domain of TCR clone 374495 (TRBV19, TRBJ1-5)
CASSIVWADNQPQHF

SEQ ID NO: 748991 - protein, 11 aa, Homo sapiens
  CDR3 for alpha chain variable domain of TCR clone 374496 (TRAV16, TRAJ31)
CALFNNARLMF

SEQ ID NO: 748992 - protein, 15 aa, Homo sapiens
  CDR3 for beta chain variable domain of TCR clone 374496 (TRBV5-1, TRBJ2-1)
CASSPPRAPYNEQFF

SEQ ID NO: 748993 - protein, 14 aa, Homo sapiens
  CDR3 for alpha chain variable domain of TCR clone 374497 (TRAV1-2, TRAJ8)
CAVRGDTGFQKLVF

SEQ ID NO: 748994 - protein, 16 aa, Homo sapiens
  CDR3 for beta chain variable domain of TCR clone 374497 (TRBV12-5, TRBJ2-5)
CASGPRTSGNQETQYF

SEQ ID NO: 748995 - protein, 16 aa, Homo sapiens
  CDR3 for alpha chain variable domain of TCR clone 374498 (TRAV30, TRAJ24)
CGTDIVDADSWGKFQS

SEQ ID NO: 748996 - protein, 14 aa, Homo sapiens
  CDR3 for beta chain variable domain of TCR clone 374498 (TRBV12-5, TRBJ2-5)
CASGSRTHQETQYF

SEQ ID NO: 748997 - protein, 10 aa, Homo sapiens
  CDR3 for alpha chain variable domain of TCR clone 374499 (TRAV12-1, TRAJ43)
CVVNPHRFGA

SEQ ID NO: 748998 - protein, 13 aa, Homo sapiens
  CDR3 for beta chain variable domain of TCR clone 374499 (TRBV20-1, TRBJ1-1)
CSARGGGNTEAFF

SEQ ID NO: 748999 - protein, 12 aa, Homo sapiens
  CDR3 for alpha chain variable domain of TCR clone 374500 (TRAV8-3, TRAJ20)
CAVDFNDYKLSF

SEQ ID NO: 749000 - protein, 17 aa, Homo sapiens
  CDR3 for beta chain variable domain of TCR clone 374500 (TRBV7-8, TRBJ2-6)
CASSAGTGGARANVLTF

SEQ ID NO: 749001 - protein, 13 aa, Homo sapiens
  CDR3 for alpha chain variable domain of TCR clone 374501 (TRAV27, TRAJ41)
CAGEGNSGYALNF

SEQ ID NO: 749002 - protein, 13 aa, Homo sapiens
  CDR3 for beta chain variable domain of TCR clone 374501 (TRBV7-2, TRBJ1-2)
CASSLKQNYGYTF

SEQ ID NO: 749003 - protein, 12 aa, Homo sapiens
  CDR3 for alpha chain variable domain of TCR clone 374502 (TRAV21, TRAJ58)
CAPSASGSRLTF

SEQ ID NO: 749004 - protein, 13 aa, Homo sapiens
  CDR3 for beta chain variable domain of TCR clone 374502 (TRBV5-7, TRBJ1-2)
CASSLGVFNGYTF

SEQ ID NO: 749005 - protein, 15 aa, Homo sapiens
  CDR3 for alpha chain variable domain of TCR clone 374503 (TRAV27, TRAJ39)
ASTSVQENAGNMLTF

SEQ ID NO: 749006 - protein, 16 aa, Homo sapiens
  CDR3 for beta chain variable domain of TCR clone 374503 (TRBV13, TRBJ2-2)
CASSPRTGEHTGELFF

SEQ ID NO: 749007 - protein, 14 aa, Homo sapiens
  CDR3 for alpha chain variable domain of TCR clone 374504 (TRAV12-1, TRAJ46)
CVVTAKSSGDKLTF

SEQ ID NO: 749008 - protein, 17 aa, Homo sapiens
  CDR3 for beta chain variable domain of TCR clone 374504 (TRBV4-1, TRBJ2-3)
CASSQDPAGGPLDTQYV

SEQ ID NO: 749009 - protein, 17 aa, Homo sapiens
  CDR3 for alpha chain variable domain of TCR clone 374505 (TRAV29/DV5, TRAJ45)
CAADGPFSGGGADGLTF

SEQ ID NO: 749010 - protein, 15 aa, Homo sapiens
  CDR3 for beta chain variable domain of TCR clone 374505 (TRBV5-1, TRBJ2-3)
CASSVTSGSTDTQYF

SEQ ID NO: 749011 - protein, 15 aa, Homo sapiens
  CDR3 for alpha chain variable domain of TCR clone 374506 (TRAV17, TRAJ57)
CATGPSQGGSAKLVF

SEQ ID NO: 749012 - protein, 16 aa, Homo sapiens
  CDR3 for beta chain variable domain of TCR clone 374506 (TRBV12-4, TRBJ1-5)
CASSRPVGGSNQAQHF

SEQ ID NO: 749013 - protein, 14 aa, Homo sapiens
  CDR3 for alpha chain variable domain of TCR clone 374507 (TRAV12-3, TRAJ43)
CAMSLGVAGTRLTV

SEQ ID NO: 749014 - protein, 13 aa, Homo sapiens
  CDR3 for beta chain variable domain of TCR clone 374507 (TRBV7-9, TRBJ1-2)
CASSLKQNYGYTF

SEQ ID NO: 749015 - protein, 15 aa, Homo sapiens
  CDR3 for alpha chain variable domain of TCR clone 374508 (TRAV8-4, TRAJ45)
CAVIWTGGGSDGLTF

SEQ ID NO: 749016 - protein, 12 aa, Homo sapiens
  CDR3 for beta chain variable domain of TCR clone 374508 (TRBV29-1, TRBJ2-7)
CSVGPSGDEQYF

SEQ ID NO: 749017 - protein, 14 aa, Homo sapiens
  CDR3 for alpha chain variable domain of TCR clone 374509 (TRAV8-1, TRAJ4)
CAVPFSGGYNKLIF

SEQ ID NO: 749018 - protein, 16 aa, Homo sapiens
  CDR3 for beta chain variable domain of TCR clone 374509 (TRBV6-1, TRBJ1-2)
CASSGAWQGRSHVYTF

SEQ ID NO: 749019 - protein, 14 aa, Homo sapiens
  CDR3 for alpha chain variable domain of TCR clone 374510 (TRAV12-2, TRAJ17)
CAVLFKAAGNKLTF

SEQ ID NO: 749020 - protein, 15 aa, Homo sapiens
  CDR3 for beta chain variable domain of TCR clone 374510 (TRBV4-2, TRBJ1-3)
CASSQDGAQGNTIYF

SEQ ID NO: 749021 - protein, 14 aa, Homo sapiens
  CDR3 for alpha chain variable domain of TCR clone 374511 (TRAV2, TRAJ9)
CAVEDRSGGFKSIF

SEQ ID NO: 749022 - protein, 14 aa, Homo sapiens
  CDR3 for beta chain variable domain of TCR clone 374511 (TRBV3-1, TRBJ2-5)
CASSQGPDQETQYF

SEQ ID NO: 749023 - protein, 14 aa, Homo sapiens
  CDR3 for alpha chain variable domain of TCR clone 374512 (TRAV1-2, TRAJ8)
CAVREDTGLQKLVF

SEQ ID NO: 749024 - protein, 16 aa, Homo sapiens
  CDR3 for beta chain variable domain of TCR clone 374512 (TRBV6-1, TRBJ2-5)
CASSETLDRGAETQYF

SEQ ID NO: 749025 - protein, 18 aa, Homo sapiens
  CDR3 for alpha chain variable domain of TCR clone 374513 (TRAV21, TRAJ52)
CAVRPSPAGGTSYGKLTF

SEQ ID NO: 749026 - protein, 14 aa, Homo sapiens
  CDR3 for beta chain variable domain of TCR clone 374513 (TRBV7-9, TRBJ2-1)
CASSSMVGFGEQFF

SEQ ID NO: 749027 - protein, 12 aa, Homo sapiens
  CDR3 for alpha chain variable domain of TCR clone 374514 (TRAV12-3, TRAJ4)
CAMMGAGTRLAV

SEQ ID NO: 749028 - protein, 14 aa, Homo sapiens
  CDR3 for beta chain variable domain of TCR clone 374514 (TRBV10-3, TRBJ1-1)
CAISDTDRGVEDFF

SEQ ID NO: 749029 - protein, 16 aa, Homo sapiens
  CDR3 for alpha chain variable domain of TCR clone 374515 (TRAV12-1, TRAJ45)
CVVNGGIGGGADGLTF

SEQ ID NO: 749030 - protein, 12 aa, Homo sapiens
  CDR3 for beta chain variable domain of TCR clone 374515 (TRBV11-2, TRBJ2-2)
CASSLGGGELFF

SEQ ID NO: 749031 - protein, 18 aa, Homo sapiens
  CDR3 for alpha chain variable domain of TCR clone 374516 (TRAV21, TRAJ52)
CAVRPSPAGGTSHGKLTS

SEQ ID NO: 749032 - protein, 17 aa, Homo sapiens
  CDR3 for beta chain variable domain of TCR clone 374516 (TRBV13, TRBJ2-3)
CASSLSRVAGGRNTQYF

SEQ ID NO: 749033 - protein, 13 aa, Homo sapiens
  CDR3 for alpha chain variable domain of TCR clone 374517 (TRAV21, TRAJ3)
CAVRGSSASKIIF

SEQ ID NO: 749034 - protein, 17 aa, Homo sapiens
  CDR3 for beta chain variable domain of TCR clone 374517 (TRBV5-7, TRBJ2-5)
CASSWIQDRGREGTQYL

SEQ ID NO: 749035 - protein, 15 aa, Homo sapiens
  CDR3 for alpha chain variable domain of TCR clone 374518 (TRAV12-2, TRAJ53)
CAVNGGGGSNYKLTF

SEQ ID NO: 749036 - protein, 13 aa, Homo sapiens
  CDR3 for beta chain variable domain of TCR clone 374518 (TRBV3-1, TRBJ1-1)
CASSPGVITQAFF

SEQ ID NO: 749037 - protein, 18 aa, Homo sapiens
  CDR3 for alpha chain variable domain of TCR clone 374519 (TRAV21, TRAJ52)
CAVRPSPAGGTSYGKLTF

SEQ ID NO: 749038 - protein, 16 aa, Homo sapiens
  CDR3 for beta chain variable domain of TCR clone 374519 (TRBV13, TRBJ2-3)
CQQPLQGGGGRNTQYF

SEQ ID NO: 749039 - protein, 17 aa, Homo sapiens
  CDR3 for alpha chain variable domain of TCR clone 374520 (TRAV3, TRAJ6)
CAVRDGPRAGGSYIPTF

SEQ ID NO: 749040 - protein, 15 aa, Homo sapiens
  CDR3 for beta chain variable domain of TCR clone 374520 (TRBV28, TRBJ2-1)
CASSITAGGRSEQFF

SEQ ID NO: 749041 - protein, 13 aa, Homo sapiens
  CDR3 for alpha chain variable domain of TCR clone 374521 (TRAV2, TRAJ40)
CAVVTSGTYKYIF

SEQ ID NO: 749042 - protein, 14 aa, Homo sapiens
  CDR3 for beta chain variable domain of TCR clone 374521 (TRBV19, TRBJ2-1)
CASQTFVLSSEQFF

SEQ ID NO: 749043 - protein, 16 aa, Homo sapiens
  CDR3 for alpha chain variable domain of TCR clone 374522 (TRAV4, TRAJ22)
CLVGDLYSGYARQLTF

SEQ ID NO: 749044 - protein, 13 aa, Homo sapiens
  CDR3 for beta chain variable domain of TCR clone 374522 (TRBV28, TRBJ2-5)
CASSFAGGETQYF

SEQ ID NO: 749045 - protein, 14 aa, Homo sapiens
  CDR3 for alpha chain variable domain of TCR clone 374523 (TRAV13-1, TRAJ44)
CAAKATGTASKLTF

SEQ ID NO: 749046 - protein, 14 aa, Homo sapiens
  CDR3 for beta chain variable domain of TCR clone 374523 (TRBV19, TRBJ2-1)
CASGRAGPGNEQFF

SEQ ID NO: 749047 - protein, 16 aa, Homo sapiens
  CDR3 for alpha chain variable domain of TCR clone 374524 (TRAV30, TRAJ24)
CGTAVVDADSWGKFQF

SEQ ID NO: 749048 - protein, 14 aa, Homo sapiens
  CDR3 for beta chain variable domain of TCR clone 374524 (TRBV12-5, TRBJ2-5)
CASGSRTHQETQYF

SEQ ID NO: 749049 - protein, 19 aa, Homo sapiens
  CDR3 for alpha chain variable domain of TCR clone 374525 (TRAV26-1, TRAJ28)
CIVRVAHACSGAGSYKLTF

SEQ ID NO: 749050 - protein, 15 aa, Homo sapiens
  CDR3 for beta chain variable domain of TCR clone 374525 (TRBV5-1, TRBJ1-3)
CASSSKTGAGNTIYF

SEQ ID NO: 749051 - protein, 15 aa, Homo sapiens
  CDR3 for alpha chain variable domain of TCR clone 374526 (TRAV3, TRAJ29)
CAVRAPFSGNTPLVF

SEQ ID NO: 749052 - protein, 15 aa, Homo sapiens
  CDR3 for beta chain variable domain of TCR clone 374526 (TRBV28, TRBJ1-1)
CASRIKGGLNTEAFF

SEQ ID NO: 749053 - protein, 12 aa, Homo sapiens
  CDR3 for alpha chain variable domain of TCR clone 374527 (TRAV27, TRAJ13)
CAGVRGYQKVTF

SEQ ID NO: 749054 - protein, 16 aa, Homo sapiens
  CDR3 for beta chain variable domain of TCR clone 374527 (TRBV28, TRBJ2-1)
CASSTSYSGSLNEQFF

SEQ ID NO: 749055 - protein, 14 aa, Homo sapiens
  CDR3 for alpha chain variable domain of TCR clone 374528 (TRAV1-2, TRAJ8)
CAVREDTGFQKLVF

SEQ ID NO: 749056 - protein, 16 aa, Homo sapiens
  CDR3 for beta chain variable domain of TCR clone 374528 (TRBV20-1, TRBJ1-4)
GSAPGQGLLTNEKLFF

SEQ ID NO: 749057 - protein, 15 aa, Homo sapiens
  CDR3 for alpha chain variable domain of TCR clone 374529 (TRAV36/DV7, TRAJ53)
CAVEGSGGSNYKLTF

SEQ ID NO: 749058 - protein, 16 aa, Homo sapiens
  CDR3 for beta chain variable domain of TCR clone 374529 (TRBV7-8, TRBJ2-4)
CASSAERTLAKNIQYF

SEQ ID NO: 749059 - protein, 14 aa, Homo sapiens
  CDR3 for alpha chain variable domain of TCR clone 374530 (TRAV1-2, TRAJ16)
CAVNRFSDGQKLLF

SEQ ID NO: 749060 - protein, 15 aa, Homo sapiens
  CDR3 for beta chain variable domain of TCR clone 374530 (TRBV7-9, TRBJ2-2)
CASGPLDTFPGEMFF

SEQ ID NO: 749061 - protein, 12 aa, Homo sapiens
  CDR3 for alpha chain variable domain of TCR clone 374531 (TRAV13-2, TRAJ58)
CAERRLDSRLTF

SEQ ID NO: 749062 - protein, 15 aa, Homo sapiens
  CDR3 for beta chain variable domain of TCR clone 374531 (TRBV5-1, TRBJ2-5)
CASSSGREMVETQFL

SEQ ID NO: 749063 - protein, 15 aa, Homo sapiens
  CDR3 for alpha chain variable domain of TCR clone 374532 (TRAV1-2, TRAJ15)
CAVDVMGSAGTALIF

SEQ ID NO: 749064 - protein, 13 aa, Homo sapiens
  CDR3 for beta chain variable domain of TCR clone 374532 (TRBV20-1, TRBJ1-1)
CSACDRENTEAFF

SEQ ID NO: 749065 - protein, 16 aa, Homo sapiens
  CDR3 for alpha chain variable domain of TCR clone 374533 (TRAV12-3, TRAJ53)
CAMSPGSGGSNYKLTF

SEQ ID NO: 749066 - protein, 14 aa, Homo sapiens
  CDR3 for beta chain variable domain of TCR clone 374533 (TRBV7-2, TRBJ2-7)
CASSLDPGGGEQYF

SEQ ID NO: 749067 - protein, 16 aa, Homo sapiens
  CDR3 for alpha chain variable domain of TCR clone 374534 (TRAV30, TRAJ24)
CGTEIVDADSWGKFKF

SEQ ID NO: 749068 - protein, 17 aa, Homo sapiens
  CDR3 for beta chain variable domain of TCR clone 374534 (TRBV20-1, TRBJ2-1)
CSARDPLAGVWDNEQFF

SEQ ID NO: 749069 - protein, 10 aa, Homo sapiens
  CDR3 for alpha chain variable domain of TCR clone 374535 (TRAV21, TRAJ17)
CAVTGNKLTF

SEQ ID NO: 749070 - protein, 13 aa, Homo sapiens
  CDR3 for beta chain variable domain of TCR clone 374535 (TRBV7-7, TRBJ2-5)
CASSRSGQETQYF

SEQ ID NO: 749071 - protein, 17 aa, Homo sapiens
  CDR3 for alpha chain variable domain of TCR clone 374536 (TRAV3, TRAJ6)
CAVRDGPRAGGSYIPTF

SEQ ID NO: 749072 - protein, 13 aa, Homo sapiens
  CDR3 for beta chain variable domain of TCR clone 374536 (TRBV12-4, TRBJ2-5)
CASSLGGSRTQYF

SEQ ID NO: 749073 - protein, 16 aa, Homo sapiens
  CDR3 for alpha chain variable domain of TCR clone 374537 (TRAV3, TRAJ37)
CAVRGKGSGNTGKLIF

SEQ ID NO: 749074 - protein, 14 aa, Homo sapiens
  CDR3 for beta chain variable domain of TCR clone 374537 (TRBV7-2, TRBJ2-7)
CASSPKTSFYERYF

SEQ ID NO: 749075 - protein, 13 aa, Homo sapiens
  CDR3 for alpha chain variable domain of TCR clone 374538 (TRAV20, TRAJ37)
CAGCSSNTGKLIF

SEQ ID NO: 749076 - protein, 11 aa, Homo sapiens
  CDR3 for beta chain variable domain of TCR clone 374538 (TRBV12-4, TRBJ2-3)
CASTVTDTQYF

SEQ ID NO: 749077 - protein, 14 aa, Homo sapiens
  CDR3 for alpha chain variable domain of TCR clone 374539 (TRAV1-2, TRAJ29)
CAVRELTSATPLVF

SEQ ID NO: 749078 - protein, 14 aa, Homo sapiens
  CDR3 for beta chain variable domain of TCR clone 374539 (TRBV28, TRBJ1-2)
CASRIQGANYGYTF

SEQ ID NO: 749079 - protein, 15 aa, Homo sapiens
  CDR3 for alpha chain variable domain of TCR clone 374540 (TRAV35, TRAJ40)
CAGQLGTPGTYKYIF

SEQ ID NO: 749080 - protein, 14 aa, Homo sapiens
  CDR3 for beta chain variable domain of TCR clone 374540 (TRBV7-3, TRBJ2-1)
CASSLAGRTNEQFF

SEQ ID NO: 749081 - protein, 15 aa, Homo sapiens
  CDR3 for alpha chain variable domain of TCR clone 374541 (TRAV27, TRAJ38)
CAARRNSCNNRKLIW

SEQ ID NO: 749082 - protein, 13 aa, Homo sapiens
  CDR3 for beta chain variable domain of TCR clone 374541 (TRBV12-5, TRBJ2-3)
CASGDRQSDTQYF

SEQ ID NO: 749083 - protein, 14 aa, Homo sapiens
  CDR3 for alpha chain variable domain of TCR clone 374542 (TRAV1-2, TRAJ16)
CAVNRFSDGQKLLF

SEQ ID NO: 749084 - protein, 14 aa, Homo sapiens
  CDR3 for beta chain variable domain of TCR clone 374542 (TRBV7-6, TRBJ2-3)
FASSLGTVTDTQYF

SEQ ID NO: 749085 - protein, 13 aa, Homo sapiens
  CDR3 for alpha chain variable domain of TCR clone 374543 (TRAV20, TRAJ34)
CAVSSYNTDKLIF

SEQ ID NO: 749086 - protein, 13 aa, Homo sapiens
  CDR3 for beta chain variable domain of TCR clone 374543 (TRBV7-9, TRBJ1-2)
CASSLKQNYCYTF

SEQ ID NO: 749087 - protein, 13 aa, Homo sapiens
  CDR3 for alpha chain variable domain of TCR clone 374544 (TRAV21, TRAJ3)
CCEPYSSASKIIF

SEQ ID NO: 749088 - protein, 15 aa, Homo sapiens
  CDR3 for beta chain variable domain of TCR clone 374544 (TRBV12-4, TRBJ2-5)
CASSPPTGLQETQYF

SEQ ID NO: 749089 - protein, 13 aa, Homo sapiens
  CDR3 for alpha chain variable domain of TCR clone 374545 (TRAV17, TRAJ9)
CATDYTGGFKTTF

SEQ ID NO: 749090 - protein, 13 aa, Homo sapiens
  CDR3 for beta chain variable domain of TCR clone 374545 (TRBV12-4, TRBJ2-2)
CASSITGSGELFF

SEQ ID NO: 749091 - protein, 15 aa, Homo sapiens
  CDR3 for alpha chain variable domain of TCR clone 374546 (TRAV30, TRAJ13)
CGTQGVTGGYQKVTF

SEQ ID NO: 749092 - protein, 15 aa, Homo sapiens
  CDR3 for beta chain variable domain of TCR clone 374546 (TRBV5-1, TRBJ2-5)
CASNFKGGDQETQYF

SEQ ID NO: 749093 - protein, 16 aa, Homo sapiens
  CDR3 for alpha chain variable domain of TCR clone 374547 (TRAV30, TRAJ24)
CGTEIVDAASRGKFQF

SEQ ID NO: 749094 - protein, 14 aa, Homo sapiens
  CDR3 for beta chain variable domain of TCR clone 374547 (TRBV12-5, TRBJ2-5)
CASGSRTHQETQYF

SEQ ID NO: 749095 - protein, 12 aa, Homo sapiens
  CDR3 for alpha chain variable domain of TCR clone 374548 (TRAV12-3, TRAJ32)
CAGGGATNKLIF

SEQ ID NO: 749096 - protein, 15 aa, Homo sapiens
  CDR3 for beta chain variable domain of TCR clone 374548 (TRBV11-3, TRBJ2-2)
CASSLSGLATGELFF

SEQ ID NO: 749097 - protein, 15 aa, Homo sapiens
  CDR3 for alpha chain variable domain of TCR clone 374549 (TRAV12-3, TRAJ6)
CAMSATTGGSYIPTF

SEQ ID NO: 749098 - protein, 13 aa, Homo sapiens
  CDR3 for beta chain variable domain of TCR clone 374549 (TRBV25-1, TRBJ2-5)
CASSPGGVETQYF

SEQ ID NO: 749099 - protein, 14 aa, Homo sapiens
  CDR3 for alpha chain variable domain of TCR clone 374550 (TRAV2, TRAJ13)
CAVPPEGGYQKVTF

SEQ ID NO: 749100 - protein, 15 aa, Homo sapiens
  CDR3 for beta chain variable domain of TCR clone 374550 (TRBV6-3, TRBJ2-7)
CASSSPGTVFYEQYF

SEQ ID NO: 749101 - protein, 15 aa, Homo sapiens
  CDR3 for alpha chain variable domain of TCR clone 374551 (TRAV26-1, TRAJ29)
CIVRVEGSGNTPLVF

SEQ ID NO: 749102 - protein, 14 aa, Homo sapiens
  CDR3 for beta chain variable domain of TCR clone 374551 (TRBV18, TRBJ2-5)
CASSPGLSQETHYF

SEQ ID NO: 749103 - protein, 12 aa, Homo sapiens
  CDR3 for alpha chain variable domain of TCR clone 374552 (TRAV12-3, TRAJ20)
CAMVRGDYKLSF

SEQ ID NO: 749104 - protein, 15 aa, Homo sapiens
  CDR3 for beta chain variable domain of TCR clone 374552 (TRBV10-3, TRBJ2-3)
CAISLTSGGTDTQYF

SEQ ID NO: 749105 - protein, 13 aa, Homo sapiens
  CDR3 for alpha chain variable domain of TCR clone 374553 (TRAV21, TRAJ3)
CAVTGSSASTIIF

SEQ ID NO: 749106 - protein, 14 aa, Homo sapiens
  CDR3 for beta chain variable domain of TCR clone 374553 (TRBV19, TRBJ2-1)
CASPTFVLSGEQFF

SEQ ID NO: 749107 - protein, 14 aa, Homo sapiens
  CDR3 for alpha chain variable domain of TCR clone 374554 (TRAV9-2, TRAJ38)
CALSNAGNNRKLIW

SEQ ID NO: 749108 - protein, 13 aa, Homo sapiens
  CDR3 for beta chain variable domain of TCR clone 374554 (TRBV5-7, TRBJ1-2)
CASSLGTGYGYTF

SEQ ID NO: 749109 - protein, 12 aa, Homo sapiens
  CDR3 for alpha chain variable domain of TCR clone 374555 (TRAV1-1, TRAJ9)
CAVDTGGFKTIF

SEQ ID NO: 749110 - protein, 14 aa, Homo sapiens
  CDR3 for beta chain variable domain of TCR clone 374555 (TRBV19, TRBJ2-7)
CASSMGQGAIEQYF

SEQ ID NO: 749111 - protein, 15 aa, Homo sapiens
  CDR3 for alpha chain variable domain of TCR clone 374556 (TRAV8-3, TRAJ45)
CASSYSGGGADGLTF

SEQ ID NO: 749112 - protein, 15 aa, Homo sapiens
  CDR3 for beta chain variable domain of TCR clone 374556 (TRBV27, TRBJ1-4)
CASSPRHATNEELFF

SEQ ID NO: 749113 - protein, 14 aa, Homo sapiens
  CDR3 for alpha chain variable domain of TCR clone 374557 (TRAV1-2, TRAJ8)
CAVREGTGFQKLVF

SEQ ID NO: 749114 - protein, 12 aa, Homo sapiens
  CDR3 for beta chain variable domain of TCR clone 374557 (TRBV29-1, TRBJ2-3)
CSVTGGADTQYF

SEQ ID NO: 749115 - protein, 13 aa, Homo sapiens
  CDR3 for alpha chain variable domain of TCR clone 374558 (TRAV3, TRAJ15)
CAVRDQSGTALIF

SEQ ID NO: 749116 - protein, 14 aa, Homo sapiens
  CDR3 for beta chain variable domain of TCR clone 374558 (TRBV4-1, TRBJ2-3)
CASSQDWSTDTQYF

SEQ ID NO: 749117 - protein, 11 aa, Homo sapiens
  CDR3 for alpha chain variable domain of TCR clone 374559 (TRAV1-1, TRAJ23)
CAVRQGGKLIF

SEQ ID NO: 749118 - protein, 15 aa, Homo sapiens
  CDR3 for beta chain variable domain of TCR clone 374559 (TRBV7-2, TRBJ2-1)
CASSLASGRVNEQFF

SEQ ID NO: 749119 - protein, 12 aa, Homo sapiens
  CDR3 for alpha chain variable domain of TCR clone 374560 (TRAV12-3, TRAJ17)
CAMTLTGNKLTF

SEQ ID NO: 749120 - protein, 14 aa, Homo sapiens
  CDR3 for beta chain variable domain of TCR clone 374560 (TRBV4-1, TRBJ2-7)
CASSQDREHVEQYL

SEQ ID NO: 749121 - protein, 14 aa, Homo sapiens
  CDR3 for alpha chain variable domain of TCR clone 374561 (TRAV23/DV6, TRAJ24)
CAASLSDSWGKWQF

SEQ ID NO: 749122 - protein, 15 aa, Homo sapiens
  CDR3 for beta chain variable domain of TCR clone 374561 (TRBV9, TRBJ1-6)
CASSVAGTGDSPLHF

SEQ ID NO: 749123 - protein, 17 aa, Homo sapiens
  CDR3 for alpha chain variable domain of TCR clone 374562 (TRAV13-1, TRAJ52)
CAAGRNAGGTSYGKLTF

SEQ ID NO: 749124 - protein, 11 aa, Homo sapiens
  CDR3 for beta chain variable domain of TCR clone 374562 (TRBV11-2, TRBJ2-2)
CASSLPGELFF

SEQ ID NO: 749125 - protein, 18 aa, Homo sapiens
  CDR3 for alpha chain variable domain of TCR clone 374563 (TRAV26-2, TRAJ54)
CILRDVEVGIQGAQKLVF

SEQ ID NO: 749126 - protein, 15 aa, Homo sapiens
  CDR3 for beta chain variable domain of TCR clone 374563 (TRBV29-1, TRBJ2-7)
CSVEFFDRGSYEQYF

SEQ ID NO: 749127 - protein, 14 aa, Homo sapiens
  CDR3 for alpha chain variable domain of TCR clone 374564 (TRAV38-1, TRAJ40)
CALRPTSGTYKYIF

SEQ ID NO: 749128 - protein, 12 aa, Homo sapiens
  CDR3 for beta chain variable domain of TCR clone 374564 (TRBV19, TRBJ2-1)
CASSMQDTEQFF

SEQ ID NO: 749129 - protein, 15 aa, Homo sapiens
  CDR3 for alpha chain variable domain of TCR clone 374565 (TRAV20, TRAJ53)
CAVQASGGSNYKLTF

SEQ ID NO: 749130 - protein, 19 aa, Homo sapiens
  CDR3 for beta chain variable domain of TCR clone 374565 (TRBV7-2, TRBJ2-3)
CASSFLSRNWGGGTDTQYF

SEQ ID NO: 749131 - protein, 13 aa, Homo sapiens
  CDR3 for alpha chain variable domain of TCR clone 374566 (TRAV8-3, TRAJ28)
FSVGAVVSYQLTF

SEQ ID NO: 749132 - protein, 15 aa, Homo sapiens
  CDR3 for beta chain variable domain of TCR clone 374566 (TRBV7-9, TRBJ1-5)
CASSQGHQPNQPQHF

SEQ ID NO: 749133 - protein, 13 aa, Homo sapiens
  CDR3 for alpha chain variable domain of TCR clone 374567 (TRAV13-2, TRAJ5)
CAVMDTGRRALTF

SEQ ID NO: 749134 - protein, 15 aa, Homo sapiens
  CDR3 for beta chain variable domain of TCR clone 374567 (TRBV28, TRBJ2-1)
CASSIIAGGRSEQFF

SEQ ID NO: 749135 - protein, 14 aa, Homo sapiens
  CDR3 for alpha chain variable domain of TCR clone 374568 (TRAV26-1, TRAJ16)
CIVRVPSDGQKLLF

SEQ ID NO: 749136 - protein, 17 aa, Homo sapiens
  CDR3 for beta chain variable domain of TCR clone 374568 (TRBV20-1, TRBJ2-1)
CSASSSGLAGSYNEEFF

SEQ ID NO: 749137 - protein, 15 aa, Homo sapiens
  CDR3 for alpha chain variable domain of TCR clone 374569 (TRAV3, TRAJ3)
CAVRDRDSSASKIIF

SEQ ID NO: 749138 - protein, 12 aa, Homo sapiens
  CDR3 for beta chain variable domain of TCR clone 374569 (TRBV11-2, TRBJ2-1)
CASSPGNNESSS

SEQ ID NO: 749139 - protein, 13 aa, Homo sapiens
  CDR3 for alpha chain variable domain of TCR clone 374570 (TRAV8-6, TRAJ8)
CAVSNTGFQTLVF

SEQ ID NO: 749140 - protein, 15 aa, Homo sapiens
  CDR3 for beta chain variable domain of TCR clone 374570 (TRBV28, TRBJ2-5)
CASSSGRTIQETQYF

SEQ ID NO: 749141 - protein, 12 aa, Homo sapiens
  CDR3 for alpha chain variable domain of TCR clone 374571 (TRAV20, TRAJ39)
CAVGNAGNMLTF

SEQ ID NO: 749142 - protein, 17 aa, Homo sapiens
  CDR3 for beta chain variable domain of TCR clone 374571 (TRBV4-1, TRBJ2-3)
CASSQGYVGGGTDTQYF

SEQ ID NO: 749143 - protein, 13 aa, Homo sapiens
  CDR3 for alpha chain variable domain of TCR clone 374572 (TRAV17, TRAJ39)
CAISTNAGNMLTF

SEQ ID NO: 749144 - protein, 18 aa, Homo sapiens
  CDR3 for beta chain variable domain of TCR clone 374572 (TRBV12-4, TRBJ2-2)
CASSLVAGTRGRTGELFF

SEQ ID NO: 749145 - protein, 10 aa, Homo sapiens
  CDR3 for alpha chain variable domain of TCR clone 374573 (TRAV23/DV6, TRAJ57)
CAASSTLSQG

SEQ ID NO: 749146 - protein, 20 aa, Homo sapiens
  CDR3 for beta chain variable domain of TCR clone 374573 (TRBV7-2, TRBJ2-2)
RRTRPCISVPAARFGPELFF

SEQ ID NO: 749147 - protein, 14 aa, Homo sapiens
  CDR3 for alpha chain variable domain of TCR clone 374574 (TRAV8-4, TRAJ8)
CAVCVGTGFQKLVF

SEQ ID NO: 749148 - protein, 15 aa, Homo sapiens
  CDR3 for beta chain variable domain of TCR clone 374574 (TRBV2, TRBJ2-3)
CASSGEGTGTDTQYF

SEQ ID NO: 749149 - protein, 11 aa, Homo sapiens
  CDR3 for alpha chain variable domain of TCR clone 374575 (TRAV17, TRAJ31)
CATSNNARLMF

SEQ ID NO: 749150 - protein, 15 aa, Homo sapiens
  CDR3 for beta chain variable domain of TCR clone 374575 (TRBV7-9, TRBJ1-6)
CASSSPGRGNSPLHF

SEQ ID NO: 749151 - protein, 13 aa, Homo sapiens
  CDR3 for alpha chain variable domain of TCR clone 374576 (TRAV17, TRAJ15)
CATDARAGTALIF

SEQ ID NO: 749152 - protein, 14 aa, Homo sapiens
  CDR3 for beta chain variable domain of TCR clone 374576 (TRBV7-2, TRBJ2-5)
CAGSIRLTQETQYF

SEQ ID NO: 749153 - protein, 14 aa, Homo sapiens
  CDR3 for alpha chain variable domain of TCR clone 374577 (TRAV17, TRAJ22)
CATSPSGSARQLTF

SEQ ID NO: 749154 - protein, 13 aa, Homo sapiens
  CDR3 for beta chain variable domain of TCR clone 374577 (TRBV12-4, TRBJ1-2)
CASSLRQGKGYTY

SEQ ID NO: 749155 - protein, 16 aa, Homo sapiens
  CDR3 for alpha chain variable domain of TCR clone 374578 (TRAV1-1, TRAJ36)
CAVRDTLLPGANNLFF

SEQ ID NO: 749156 - protein, 14 aa, Homo sapiens
  CDR3 for beta chain variable domain of TCR clone 374578 (TRBV5-1, TRBJ2-1)
CASSFGGGLNEQFF

SEQ ID NO: 749157 - protein, 14 aa, Homo sapiens
  CDR3 for alpha chain variable domain of TCR clone 374579 (TRAV29/DV5, TRAJ37)
CAASGSGNTGKLIF

SEQ ID NO: 749158 - protein, 17 aa, Homo sapiens
  CDR3 for beta chain variable domain of TCR clone 374579 (TRBV4-1, TRBJ2-7)
CASSPFLTSGGLVEQYF

SEQ ID NO: 749159 - protein, 10 aa, Homo sapiens
  CDR3 for alpha chain variable domain of TCR clone 374580 (TRAV26-1, TRAJ40)
CIAGTYKYIY

SEQ ID NO: 749160 - protein, 15 aa, Homo sapiens
  CDR3 for beta chain variable domain of TCR clone 374580 (TRBV19, TRBJ2-1)
CASSSPGVPLDEQFF

SEQ ID NO: 749161 - protein, 13 aa, Homo sapiens
  CDR3 for alpha chain variable domain of TCR clone 374581 (TRAV21, TRAJ57)
CAVTQGGSEKLVI

SEQ ID NO: 749162 - protein, 16 aa, Homo sapiens
  CDR3 for beta chain variable domain of TCR clone 374581 (TRBV29-1, TRBJ2-7)
CSVEDAEDGTAYEQYF

SEQ ID NO: 749163 - protein, 14 aa, Homo sapiens
  CDR3 for alpha chain variable domain of TCR clone 374582 (TRAV20, TRAJ10)
CAVRVEGGGNKLTF

SEQ ID NO: 749164 - protein, 14 aa, Homo sapiens
  CDR3 for beta chain variable domain of TCR clone 374582 (TRBV28, TRBJ2-1)
CASSLNGRNNEQFF

SEQ ID NO: 749165 - protein, 13 aa, Homo sapiens
  CDR3 for alpha chain variable domain of TCR clone 374583 (TRAV2, TRAJ15)
CAVASQAGTALIF

SEQ ID NO: 749166 - protein, 12 aa, Homo sapiens
  CDR3 for beta chain variable domain of TCR clone 374583 (TRBV5-7, TRBJ1-1)
CASSLGRGKAFF

SEQ ID NO: 749167 - protein, 14 aa, Homo sapiens
  CDR3 for alpha chain variable domain of TCR clone 374584 (TRAV23/DV6, TRAJ6)
CAASRSGGSYIPTF

SEQ ID NO: 749168 - protein, 17 aa, Homo sapiens
  CDR3 for beta chain variable domain of TCR clone 374584 (TRBV20-1, TRBJ2-1)
CSASAAGLAGSYNEQFF

SEQ ID NO: 749169 - protein, 12 aa, Homo sapiens
  CDR3 for alpha chain variable domain of TCR clone 374585 (TRAV21, TRAJ11)
CAVRGGDCTLTF

SEQ ID NO: 749170 - protein, 15 aa, Homo sapiens
  CDR3 for beta chain variable domain of TCR clone 374585 (TRBV6-1, TRBJ2-7)
CASSEPIAATTEQYF

SEQ ID NO: 749171 - protein, 15 aa, Homo sapiens
  CDR3 for alpha chain variable domain of TCR clone 374586 (TRAV8-3, TRAJ45)
CASSYSGGGADGLTF

SEQ ID NO: 749172 - protein, 16 aa, Homo sapiens
  CDR3 for beta chain variable domain of TCR clone 374586 (TRBV7-9, TRBJ2-2)
CASSGFGGENTGELFF

SEQ ID NO: 749173 - protein, 13 aa, Homo sapiens
  CDR3 for alpha chain variable domain of TCR clone 374587 (TRAV8-3, TRAJ6)
CAVEKGGSYIPTF

SEQ ID NO: 749174 - protein, 14 aa, Homo sapiens
  CDR3 for beta chain variable domain of TCR clone 374587 (TRBV6-1, TRBJ1-3)
CASVQGGGGSTIYF

SEQ ID NO: 749175 - protein, 15 aa, Homo sapiens
  CDR3 for alpha chain variable domain of TCR clone 374588 (TRAV8-4, TRAJ47)
CAVGDPEEYGNKMVF

SEQ ID NO: 749176 - protein, 15 aa, Homo sapiens
  CDR3 for beta chain variable domain of TCR clone 374588 (TRBV11-2, TRBJ2-1)
CASSVGPDSYNEQFF

SEQ ID NO: 749177 - protein, 14 aa, Homo sapiens
  CDR3 for alpha chain variable domain of TCR clone 374589 (TRAV21, TRAJ8)
CALQRDTGFQKLVF

SEQ ID NO: 749178 - protein, 14 aa, Homo sapiens
  CDR3 for beta chain variable domain of TCR clone 374589 (TRBV19, TRBJ2-3)
CASSVGRGSDTQYF

SEQ ID NO: 749179 - protein, 11 aa, Homo sapiens
  CDR3 for alpha chain variable domain of TCR clone 374590 (TRAV38-2/DV8, TRAJ23)
CALSRKLIFGQ

SEQ ID NO: 749180 - protein, 12 aa, Homo sapiens
  CDR3 for beta chain variable domain of TCR clone 374590 (TRBV11-2, TRBJ2-2)
CASSLGGGELFF

SEQ ID NO: 749181 - protein, 15 aa, Homo sapiens
  CDR3 for alpha chain variable domain of TCR clone 374591 (TRAV23/DV6, TRAJ4)
CAASPLLGGYNKLIL

SEQ ID NO: 749182 - protein, 15 aa, Homo sapiens
  CDR3 for beta chain variable domain of TCR clone 374591 (TRBV7-9, TRBJ1-6)
CASSSPGRGNSPLHF

SEQ ID NO: 749183 - protein, 14 aa, Homo sapiens
  CDR3 for alpha chain variable domain of TCR clone 374592 (TRAV12-2, TRAJ24)
CAVTPADSWGKLQF

SEQ ID NO: 749184 - protein, 15 aa, Homo sapiens
  CDR3 for beta chain variable domain of TCR clone 374592 (TRBV15, TRBJ2-1)
CAISRPGQGLHEQFF

SEQ ID NO: 749185 - protein, 17 aa, Homo sapiens
  CDR3 for alpha chain variable domain of TCR clone 374593 (TRAV3, TRAJ6)
CAVRDGPRAGGSYIPTF

SEQ ID NO: 749186 - protein, 12 aa, Homo sapiens
  CDR3 for beta chain variable domain of TCR clone 374593 (TRBV11-2, TRBJ2-1)
CASSPGNNEQLF

SEQ ID NO: 749187 - protein, 12 aa, Homo sapiens
  CDR3 for alpha chain variable domain of TCR clone 374594 (TRAV8-4, TRAJ37)
CAVGSNTGKLIF

SEQ ID NO: 749188 - protein, 16 aa, Homo sapiens
  CDR3 for beta chain variable domain of TCR clone 374594 (TRBV7-2, TRBJ2-3)
CASSLVGDASTDTQYF

SEQ ID NO: 749189 - protein, 17 aa, Homo sapiens
  CDR3 for alpha chain variable domain of TCR clone 374595 (TRAV1-1, TRAJ9)
CLLLLCCQNTGGFKTIF

SEQ ID NO: 749190 - protein, 14 aa, Homo sapiens
  CDR3 for beta chain variable domain of TCR clone 374595 (TRBV20-1, TRBJ2-1)
CSAQIGGSANEQFF

SEQ ID NO: 749191 - protein, 13 aa, Homo sapiens
  CDR3 for alpha chain variable domain of TCR clone 374596 (TRAV17, TRAJ5)
CATGDTGRRALTF

SEQ ID NO: 749192 - protein, 17 aa, Homo sapiens
  CDR3 for beta chain variable domain of TCR clone 374596 (TRBV11-2, TRBJ2-1)
CASSLYPPGVEYNEQFF

SEQ ID NO: 749193 - protein, 13 aa, Homo sapiens
  CDR3 for alpha chain variable domain of TCR clone 374597 (TRAV6, TRAJ33)
CALPMDSNYQLIC

SEQ ID NO: 749194 - protein, 15 aa, Homo sapiens
  CDR3 for beta chain variable domain of TCR clone 374597 (TRBV11-2, TRBJ2-2)
CASRGLAATTGELFF

SEQ ID NO: 749195 - protein, 13 aa, Homo sapiens
  CDR3 for alpha chain variable domain of TCR clone 374598 (TRAV12-1, TRAJ5)
CGFTDTGRRALTF

SEQ ID NO: 749196 - protein, 16 aa, Homo sapiens
  CDR3 for beta chain variable domain of TCR clone 374598 (TRBV11-2, TRBJ2-7)
CASSPTTGGVSYEQYF

SEQ ID NO: 749197 - protein, 11 aa, Homo sapiens
  CDR3 for alpha chain variable domain of TCR clone 374599 (TRAV3, TRAJ21)
CAVGNFNKFYF

SEQ ID NO: 749198 - protein, 13 aa, Homo sapiens
  CDR3 for beta chain variable domain of TCR clone 374599 (TRBV12-5, TRBJ2-3)
CASQKRGTDTQYF

SEQ ID NO: 749199 - protein, 12 aa, Homo sapiens
  CDR3 for alpha chain variable domain of TCR clone 374600 (TRAV12-1, TRAJ34)
CVVAGATDKLIF

SEQ ID NO: 749200 - protein, 12 aa, Homo sapiens
  CDR3 for beta chain variable domain of TCR clone 374600 (TRBV7-9, TRBJ1-1)
CASSLERGEAFF

SEQ ID NO: 749201 - protein, 13 aa, Homo sapiens
  CDR3 for alpha chain variable domain of TCR clone 374601 (TRAV20, TRAJ37)
CAGCPSNTGKLIF

SEQ ID NO: 749202 - protein, 10 aa, Homo sapiens
  CDR3 for beta chain variable domain of TCR clone 374601 (TRBV4-2, TRBJ2-3)
CASSTRYAVF

SEQ ID NO: 749203 - protein, 13 aa, Homo sapiens
  CDR3 for alpha chain variable domain of TCR clone 374602 (TRAV1-2, TRAJ9)
CAALNTGGFKTIF

SEQ ID NO: 749204 - protein, 16 aa, Homo sapiens
  CDR3 for beta chain variable domain of TCR clone 374602 (TRBV28, TRBJ2-6)
CASSFRTYSGANVLTF

SEQ ID NO: 749205 - protein, 17 aa, Homo sapiens
  CDR3 for alpha chain variable domain of TCR clone 374603 (TRAV3, TRAJ6)
CAVRDGPRAGGSYIPTF

SEQ ID NO: 749206 - protein, 14 aa, Homo sapiens
  CDR3 for beta chain variable domain of TCR clone 374603 (TRBV28, TRBJ2-3)
CASRPGGSTDTQYF

SEQ ID NO: 749207 - protein, 18 aa, Homo sapiens
  CDR3 for alpha chain variable domain of TCR clone 374604 (TRAV21, TRAJ52)
CAVRPSPAGGTSYGKLTF

SEQ ID NO: 749208 - protein, 13 aa, Homo sapiens
  CDR3 for beta chain variable domain of TCR clone 374604 (TRBV20-1, TRBJ2-7)
CSATHTSGYEQYF

SEQ ID NO: 749209 - protein, 12 aa, Homo sapiens
  CDR3 for alpha chain variable domain of TCR clone 374605 (TRAV12-3, TRAJ17)
CAMTLTGNKLTF

SEQ ID NO: 749210 - protein, 15 aa, Homo sapiens
  CDR3 for beta chain variable domain of TCR clone 374605 (TRBV5-7, TRBJ2-1)
CASSRRLAGDNEQFF

SEQ ID NO: 749211 - protein, 17 aa, Homo sapiens
  CDR3 for alpha chain variable domain of TCR clone 374606 (TRAV3, TRAJ6)
CAVRDGPRAGGSYIPTC

SEQ ID NO: 749212 - protein, 14 aa, Homo sapiens
  CDR3 for beta chain variable domain of TCR clone 374606 (TRBV11-2, TRBJ2-3)
CASSRLARTDTQYF

SEQ ID NO: 749213 - protein, 13 aa, Homo sapiens
  CDR3 for alpha chain variable domain of TCR clone 374607 (TRAV17, TRAJ6)
CATGFGGSYIPTF

SEQ ID NO: 749214 - protein, 14 aa, Homo sapiens
  CDR3 for beta chain variable domain of TCR clone 374607 (TRBV5-1, TRBJ2-5)
CASSFGDSQEAQYF

SEQ ID NO: 749215 - protein, 14 aa, Homo sapiens
  CDR3 for alpha chain variable domain of TCR clone 374608 (TRAV8-3, TRAJ39)
CAVGANNAGTMLTF

SEQ ID NO: 749216 - protein, 15 aa, Homo sapiens
  CDR3 for beta chain variable domain of TCR clone 374608 (TRBV4-3, TRBJ1-1)
CACSHELGRGTEAFF

SEQ ID NO: 749217 - protein, 11 aa, Homo sapiens
  CDR3 for alpha chain variable domain of TCR clone 374609 (TRAV35, TRAJ57)
GPQGGSEKLVF

SEQ ID NO: 749218 - protein, 16 aa, Homo sapiens
  CDR3 for beta chain variable domain of TCR clone 374609 (TRBV7-2, TRBJ1-5)
CVSSWTGGPGNQPQHF

SEQ ID NO: 749219 - protein, 14 aa, Homo sapiens
  CDR3 for alpha chain variable domain of TCR clone 374610 (TRAV1-2, TRAJ16)
CAVNRFSDGQKLLF

SEQ ID NO: 749220 - protein, 15 aa, Homo sapiens
  CDR3 for beta chain variable domain of TCR clone 374610 (TRBV28, TRBJ2-5)
CASSQTSGSLETQYF

SEQ ID NO: 749221 - protein, 14 aa, Homo sapiens
  CDR3 for alpha chain variable domain of TCR clone 374611 (TRAV17, TRAJ54)
CATDANQGAQKMVF

SEQ ID NO: 749222 - protein, 12 aa, Homo sapiens
  CDR3 for beta chain variable domain of TCR clone 374611 (TRBV6-3, TRBJ2-1)
CASIGSYNEQSF

SEQ ID NO: 749223 - protein, 13 aa, Homo sapiens
  CDR3 for alpha chain variable domain of TCR clone 374612 (TRAV17, TRAJ34)
CATDLYNTDKLIL

SEQ ID NO: 749224 - protein, 15 aa, Homo sapiens
  CDR3 for beta chain variable domain of TCR clone 374612 (TRBV20-1, TRBJ2-3)
CSATGTSGFTDTQYF

SEQ ID NO: 749225 - protein, 11 aa, Homo sapiens
  CDR3 for alpha chain variable domain of TCR clone 374613 (TRAV21, TRAJ11)
CAVNGYSTLTF

SEQ ID NO: 749226 - protein, 14 aa, Homo sapiens
  CDR3 for beta chain variable domain of TCR clone 374613 (TRBV11-2, TRBJ2-5)
CASRPLAGRETQYF

SEQ ID NO: 749227 - protein, 14 aa, Homo sapiens
  CDR3 for alpha chain variable domain of TCR clone 374614 (TRAV13-1, TRAJ44)
CAAKATGTASKLTF

SEQ ID NO: 749228 - protein, 14 aa, Homo sapiens
  CDR3 for beta chain variable domain of TCR clone 374614 (TRBV11-2, TRBJ2-1)
CASSLSGPYNEQFF

SEQ ID NO: 749229 - protein, 12 aa, Homo sapiens
  CDR3 for alpha chain variable domain of TCR clone 374615 (TRAV17, TRAJ20)
CATDSNDYQLSF

SEQ ID NO: 749230 - protein, 17 aa, Homo sapiens
  CDR3 for beta chain variable domain of TCR clone 374615 (TRBV5-1, TRBJ2-2)
CASSLAGLSGGTGELFF

SEQ ID NO: 749231 - protein, 14 aa, Homo sapiens
  CDR3 for alpha chain variable domain of TCR clone 374616 (TRAV23/DV6, TRAJ4)
CAANLSGGYNKLIF

SEQ ID NO: 749232 - protein, 12 aa, Homo sapiens
  CDR3 for beta chain variable domain of TCR clone 374616 (TRBV6-1, TRBJ1-1)
CASNSPTAEAFF

SEQ ID NO: 749233 - protein, 12 aa, Homo sapiens
  CDR3 for alpha chain variable domain of TCR clone 374617 (TRAV27, TRAJ9)
CAGESGGFKTIF

SEQ ID NO: 749234 - protein, 15 aa, Homo sapiens
  CDR3 for beta chain variable domain of TCR clone 374617 (TRBV6-3, TRBJ2-1)
CASSYASDSYNEQFF

SEQ ID NO: 749235 - protein, 14 aa, Homo sapiens
  CDR3 for alpha chain variable domain of TCR clone 374618 (TRAV17, TRAJ40)
CATALTSGTYTYIF

SEQ ID NO: 749236 - protein, 13 aa, Homo sapiens
  CDR3 for beta chain variable domain of TCR clone 374618 (TRBV27, TRBJ2-1)
CASSSGSYNEQFF

SEQ ID NO: 749237 - protein, 15 aa, Homo sapiens
  CDR3 for alpha chain variable domain of TCR clone 374619 (TRAV23/DV6, TRAJ13)
CAAWPGGGGYQKVTF

SEQ ID NO: 749238 - protein, 17 aa, Homo sapiens
  CDR3 for beta chain variable domain of TCR clone 374619 (TRBV19, TRBJ2-7)
CASSISCYDSYPYEQYF

SEQ ID NO: 749239 - protein, 13 aa, Homo sapiens
  CDR3 for alpha chain variable domain of TCR clone 374620 (TRAV17, TRAJ29)
CATDAFRKHTSCL

SEQ ID NO: 749240 - protein, 13 aa, Homo sapiens
  CDR3 for beta chain variable domain of TCR clone 374620 (TRBV5-7, TRBJ2-6)
CASTSSGANVLTC

SEQ ID NO: 749241 - protein, 16 aa, Homo sapiens
  CDR3 for alpha chain variable domain of TCR clone 374621 (TRAV3, TRAJ32)
CCERRNYGGATNKLTF

SEQ ID NO: 749242 - protein, 13 aa, Homo sapiens
  CDR3 for beta chain variable domain of TCR clone 374621 (TRBV2, TRBJ1-1)
CASSEGGNTEAFF

SEQ ID NO: 749243 - protein, 14 aa, Homo sapiens
  CDR3 for alpha chain variable domain of TCR clone 374622 (TRAV27, TRAJ36)
CAGPPKRGANNLFF

SEQ ID NO: 749244 - protein, 15 aa, Homo sapiens
  CDR3 for beta chain variable domain of TCR clone 374622 (TRBV18, TRBJ2-1)
CASSPASTPNYEQFF

SEQ ID NO: 749245 - protein, 13 aa, Homo sapiens
  CDR3 for alpha chain variable domain of TCR clone 374623 (TRAV27, TRAJ45)
CRSSRGGADGLTF

SEQ ID NO: 749246 - protein, 15 aa, Homo sapiens
  CDR3 for beta chain variable domain of TCR clone 374623 (TRBV9, TRBJ2-2)
CASSDFAGASGELFF

SEQ ID NO: 749247 - protein, 15 aa, Homo sapiens
  CDR3 for alpha chain variable domain of TCR clone 374624 (TRAV8-3, TRAJ27)
CAVGPSKTNAGKSPF

SEQ ID NO: 749248 - protein, 15 aa, Homo sapiens
  CDR3 for beta chain variable domain of TCR clone 374624 (TRBV7-2, TRBJ2-1)
CASSSGLAGGNKQFF

SEQ ID NO: 749249 - protein, 13 aa, Homo sapiens
  CDR3 for alpha chain variable domain of TCR clone 374625 (TRAV12-2, TRAJ40)
CAVKISGTYKYIF

SEQ ID NO: 749250 - protein, 14 aa, Homo sapiens
  CDR3 for beta chain variable domain of TCR clone 374625 (TRBV7-8, TRBJ2-7)
CASSPRDRVYEQYF

SEQ ID NO: 749251 - protein, 12 aa, Homo sapiens
  CDR3 for alpha chain variable domain of TCR clone 374626 (TRAV20, TRAJ37)
CALPSNTGNLIF

SEQ ID NO: 749252 - protein, 14 aa, Homo sapiens
  CDR3 for beta chain variable domain of TCR clone 374626 (TRBV19, TRBJ2-1)
CASPTFVLSGEQFF

SEQ ID NO: 749253 - protein, 10 aa, Homo sapiens
  CDR3 for alpha chain variable domain of TCR clone 374627 (TRAV29/DV5, TRAJ48)
CAAGGEKLTF

SEQ ID NO: 749254 - protein, 14 aa, Homo sapiens
  CDR3 for beta chain variable domain of TCR clone 374627 (TRBV7-9, TRBJ2-5)
CSSSLAPDQETQYS

SEQ ID NO: 749255 - protein, 11 aa, Homo sapiens
  CDR3 for alpha chain variable domain of TCR clone 374628 (TRAV1-2, TRAJ42)
CAGGSQGNLIF

SEQ ID NO: 749256 - protein, 14 aa, Homo sapiens
  CDR3 for beta chain variable domain of TCR clone 374628 (TRBV5-4, TRBJ2-5)
CASSLVRGQETQYF

SEQ ID NO: 749257 - protein, 16 aa, Homo sapiens
  CDR3 for alpha chain variable domain of TCR clone 374629 (TRAV8-4, TRAJ18)
CAVTTNGGSTLGRLYF

SEQ ID NO: 749258 - protein, 14 aa, Homo sapiens
  CDR3 for beta chain variable domain of TCR clone 374629 (TRBV12-4, TRBJ1-2)
CASSSAGHIYGYTF

SEQ ID NO: 749259 - protein, 15 aa, Homo sapiens
  CDR3 for alpha chain variable domain of TCR clone 374630 (TRAV12-3, TRAJ6)
CAMSATTGGSYIPTC

SEQ ID NO: 749260 - protein, 16 aa, Homo sapiens
  CDR3 for beta chain variable domain of TCR clone 374630 (TRBV20-1, TRBJ1-2)
CSASMGQGVANYGYTL

SEQ ID NO: 749261 - protein, 12 aa, Homo sapiens
  CDR3 for alpha chain variable domain of TCR clone 374631 (TRAV17, TRAJ29)
CYASSGNTPLVF

SEQ ID NO: 749262 - protein, 12 aa, Homo sapiens
  CDR3 for beta chain variable domain of TCR clone 374631 (TRBV11-2, TRBJ2-1)
CASSPGNNEQFF

SEQ ID NO: 749263 - protein, 11 aa, Homo sapiens
  CDR3 for alpha chain variable domain of TCR clone 374632 (TRAV4, TRAJ21)
CLIYNFNKFYF

SEQ ID NO: 749264 - protein, 17 aa, Homo sapiens
  CDR3 for beta chain variable domain of TCR clone 374632 (TRBV23-1, TRBJ2-1)
CISAPAVDRDQGGEQFF

SEQ ID NO: 749265 - protein, 18 aa, Homo sapiens
  CDR3 for alpha chain variable domain of TCR clone 374633 (TRAV13-1, TRAJ52)
CAAKNPNAGGTSYGKLTF

SEQ ID NO: 749266 - protein, 15 aa, Homo sapiens
  CDR3 for beta chain variable domain of TCR clone 374633 (TRBV5-1, TRBJ1-2)
CASSPGDRGSYGYTF

SEQ ID NO: 749267 - protein, 11 aa, Homo sapiens
  CDR3 for alpha chain variable domain of TCR clone 374634 (TRAV23/DV6, TRAJ58)
CAARLLRGETM

SEQ ID NO: 749268 - protein, 13 aa, Homo sapiens
  CDR3 for beta chain variable domain of TCR clone 374634 (TRBV6-4, TRBJ1-5)
CASSADLNQPQHF

SEQ ID NO: 749269 - protein, 16 aa, Homo sapiens
  CDR3 for alpha chain variable domain of TCR clone 374635 (TRAV3, TRAJ37)
CAVRPHGSCNTGKLIF

SEQ ID NO: 749270 - protein, 14 aa, Homo sapiens
  CDR3 for beta chain variable domain of TCR clone 374635 (TRBV20-1, TRBJ2-1)
CGARGGSSYNEQFF

SEQ ID NO: 749271 - protein, 12 aa, Homo sapiens
  CDR3 for alpha chain variable domain of TCR clone 374636 (TRAV1-1, TRAJ23)
CAVTNQGGKLIF

SEQ ID NO: 749272 - protein, 14 aa, Homo sapiens
  CDR3 for beta chain variable domain of TCR clone 374636 (TRBV5-7, TRBJ1-1)
CASSLAGDWTEAFF

SEQ ID NO: 749273 - protein, 14 aa, Homo sapiens
  CDR3 for alpha chain variable domain of TCR clone 374637 (TRAV12-2, TRAJ13)
RAVKKTGGYKKVNF

SEQ ID NO: 749274 - protein, 15 aa, Homo sapiens
  CDR3 for beta chain variable domain of TCR clone 374637 (TRBV27, TRBJ2-1)
CASSNGGGSSNEQFF

SEQ ID NO: 749275 - protein, 15 aa, Homo sapiens
  CDR3 for alpha chain variable domain of TCR clone 374638 (TRAV3, TRAJ3)
CVVRDGHSSASKIIF

SEQ ID NO: 749276 - protein, 14 aa, Homo sapiens
  CDR3 for beta chain variable domain of TCR clone 374638 (TRBV28, TRBJ1-4)
CASSFGTFDEKLFF

SEQ ID NO: 749277 - protein, 16 aa, Homo sapiens
  CDR3 for alpha chain variable domain of TCR clone 374639 (TRAV12-1, TRAJ42)
CVVTPYYGGSQGNLIF

SEQ ID NO: 749278 - protein, 12 aa, Homo sapiens
  CDR3 for beta chain variable domain of TCR clone 374639 (TRBV19, TRBJ2-1)
CASSMQDTEQFF

SEQ ID NO: 749279 - protein, 12 aa, Homo sapiens
  CDR3 for alpha chain variable domain of TCR clone 374640 (TRAV20, TRAJ39)
CAVGNAGNMLTF

SEQ ID NO: 749280 - protein, 15 aa, Homo sapiens
  CDR3 for beta chain variable domain of TCR clone 374640 (TRBV11-3, TRBJ2-1)
CASSGGTSSLDEQFF

SEQ ID NO: 749281 - protein, 17 aa, Homo sapiens
  CDR3 for alpha chain variable domain of TCR clone 374641 (TRAV8-1, TRAJ43)
CAVTNDMRFGAGTRLTV

SEQ ID NO: 749282 - protein, 17 aa, Homo sapiens
  CDR3 for beta chain variable domain of TCR clone 374641 (TRBV5-4, TRBJ2-1)
CASGSAGGRGPYNEQFF

SEQ ID NO: 749283 - protein, 15 aa, Homo sapiens
  CDR3 for alpha chain variable domain of TCR clone 374642 (TRAV23/DV6, TRAJ18)
CAARYIGSTLGRLYF

SEQ ID NO: 749284 - protein, 13 aa, Homo sapiens
  CDR3 for beta chain variable domain of TCR clone 374642 (TRBV7-2, TRBJ2-7)
CASSPPSGSEQYF

SEQ ID NO: 749285 - protein, 17 aa, Homo sapiens
  CDR3 for alpha chain variable domain of TCR clone 374643 (TRAV3, TRAJ38)
CAMRDCLNSGNNRKLIW

SEQ ID NO: 749286 - protein, 14 aa, Homo sapiens
  CDR3 for beta chain variable domain of TCR clone 374643 (TRBV5-5, TRBJ1-5)
CASSGQGVDQPQHF

SEQ ID NO: 749287 - protein, 14 aa, Homo sapiens
  CDR3 for alpha chain variable domain of TCR clone 374644 (TRAV1-2, TRAJ8)
CAVREDTGFQELVF

SEQ ID NO: 749288 - protein, 12 aa, Homo sapiens
  CDR3 for beta chain variable domain of TCR clone 374644 (TRBV7-2, TRBJ2-5)
CASSQYQETQYF

SEQ ID NO: 749289 - protein, 13 aa, Homo sapiens
  CDR3 for alpha chain variable domain of TCR clone 374645 (TRAV12-3, TRAJ49)
CAMIPTGWAQFYF

SEQ ID NO: 749290 - protein, 16 aa, Homo sapiens
  CDR3 for beta chain variable domain of TCR clone 374645 (TRBV5-1, TRBJ1-5)
CASSLAGGTSPSILVM

SEQ ID NO: 749291 - protein, 13 aa, Homo sapiens
  CDR3 for alpha chain variable domain of TCR clone 374646 (TRAV12-2, TRAJ37)
CAGGSGNTGKLIF

SEQ ID NO: 749292 - protein, 15 aa, Homo sapiens
  CDR3 for beta chain variable domain of TCR clone 374646 (TRBV12-4, TRBJ2-5)
CASSPPTGLQETQYF

SEQ ID NO: 749293 - protein, 15 aa, Homo sapiens
  CDR3 for alpha chain variable domain of TCR clone 374647 (TRAV14/DV4, TRAJ22)
CNERGPPGYARQLTF

SEQ ID NO: 749294 - protein, 16 aa, Homo sapiens
  CDR3 for beta chain variable domain of TCR clone 374647 (TRBV19, TRBJ1-6)
CASSVAPVAGNSPLHF

SEQ ID NO: 749295 - protein, 12 aa, Homo sapiens
  CDR3 for alpha chain variable domain of TCR clone 374648 (TRAV12-3, TRAJ17)
CAMTLTGNKLTF

SEQ ID NO: 749296 - protein, 20 aa, Homo sapiens
  CDR3 for beta chain variable domain of TCR clone 374648 (TRBV11-2, TRBJ2-1)
CASSSGLAGGWVSSYNEQFF

SEQ ID NO: 749297 - protein, 14 aa, Homo sapiens
  CDR3 for alpha chain variable domain of TCR clone 374649 (TRAV12-1, TRAJ10)
CVVNSAGGGNKLTF

SEQ ID NO: 749298 - protein, 15 aa, Homo sapiens
  CDR3 for beta chain variable domain of TCR clone 374649 (TRBV7-2, TRBJ2-7)
CASSLKGALTYEQYF

SEQ ID NO: 749299 - protein, 13 aa, Homo sapiens
  CDR3 for alpha chain variable domain of TCR clone 374650 (TRAV13-2, TRAJ13)
CAERPGVYQKVTF

SEQ ID NO: 749300 - protein, 18 aa, Homo sapiens
  CDR3 for beta chain variable domain of TCR clone 374650 (TRBV7-6, TRBJ2-1)
CASSPRTSGMSSYNEQFF

SEQ ID NO: 749301 - protein, 16 aa, Homo sapiens
  CDR3 for alpha chain variable domain of TCR clone 374651 (TRAV3, TRAJ37)
CAVRGKGSGNTGKRIF

SEQ ID NO: 749302 - protein, 15 aa, Homo sapiens
  CDR3 for beta chain variable domain of TCR clone 374651 (TRBV12-4, TRBJ2-5)
CQQFFVRGRQETQYF

SEQ ID NO: 749303 - protein, 14 aa, Homo sapiens
  CDR3 for alpha chain variable domain of TCR clone 374652 (TRAV8-4, TRAJ13)
GAVTLSGGYQKVTF

SEQ ID NO: 749304 - protein, 14 aa, Homo sapiens
  CDR3 for beta chain variable domain of TCR clone 374652 (TRBV7-2, TRBJ1-2)
CASSQTGSTYGYTF

SEQ ID NO: 749305 - protein, 11 aa, Homo sapiens
  CDR3 for alpha chain variable domain of TCR clone 374653 (TRAV21, TRAJ11)
SAVNGYSTLTF

SEQ ID NO: 749306 - protein, 11 aa, Homo sapiens
  CDR3 for beta chain variable domain of TCR clone 374653 (TRBV19, TRBJ1-1)
CASSIGSEAFF

SEQ ID NO: 749307 - protein, 13 aa, Homo sapiens
  CDR3 for alpha chain variable domain of TCR clone 374654 (TRAV27, TRAJ49)
CAPRPYTGNQFYF

SEQ ID NO: 749308 - protein, 18 aa, Homo sapiens
  CDR3 for beta chain variable domain of TCR clone 374654 (TRBV7-3, TRBJ2-5)
CASSLGGEAQGRWETQYF

SEQ ID NO: 749309 - protein, 15 aa, Homo sapiens
  CDR3 for alpha chain variable domain of TCR clone 374655 (TRAV12-3, TRAJ6)
CAMSGTTGGSYIPTF

SEQ ID NO: 749310 - protein, 16 aa, Homo sapiens
  CDR3 for beta chain variable domain of TCR clone 374655 (TRBV20-1, TRBJ1-2)
CSASMGQGVANYGYTF

SEQ ID NO: 749311 - protein, 15 aa, Homo sapiens
  CDR3 for alpha chain variable domain of TCR clone 374656 (TRAV13-2, TRAJ10)
CAENRIGGGGNKLTF

SEQ ID NO: 749312 - protein, 13 aa, Homo sapiens
  CDR3 for beta chain variable domain of TCR clone 374656 (TRBV19, TRBJ2-5)
CASSITTQETQYF

SEQ ID NO: 749313 - protein, 12 aa, Homo sapiens
  CDR3 for alpha chain variable domain of TCR clone 374657 (TRAV3, TRAJ27)
CAGRDKAGKSTF

SEQ ID NO: 749314 - protein, 14 aa, Homo sapiens
  CDR3 for beta chain variable domain of TCR clone 374657 (TRBV5-1, TRBJ1-2)
CASSVDSTNYGYTF

SEQ ID NO: 749315 - protein, 14 aa, Homo sapiens
  CDR3 for alpha chain variable domain of TCR clone 374658 (TRAV26-1, TRAJ26)
CIVRATFLGQNFVF

SEQ ID NO: 749316 - protein, 16 aa, Homo sapiens
  CDR3 for beta chain variable domain of TCR clone 374658 (TRBV12-4, TRBJ2-7)
CASRSTGTGPSDEQYF

SEQ ID NO: 749317 - protein, 13 aa, Homo sapiens
  CDR3 for alpha chain variable domain of TCR clone 374659 (TRAV13-1, TRAJ11)
CAAVLAGYSTLTF

SEQ ID NO: 749318 - protein, 17 aa, Homo sapiens
  CDR3 for beta chain variable domain of TCR clone 374659 (TRBV25-1, TRBJ2-7)
CASSDARVVFSSYEQYS

SEQ ID NO: 749319 - protein, 16 aa, Homo sapiens
  CDR3 for alpha chain variable domain of TCR clone 374660 (TRAV12-2, TRAJ32)
CAVNLGQGGATNKLIF

SEQ ID NO: 749320 - protein, 14 aa, Homo sapiens
  CDR3 for beta chain variable domain of TCR clone 374660 (TRBV5-7, TRBJ1-5)
CASSRTGGGQPQHF

SEQ ID NO: 749321 - protein, 14 aa, Homo sapiens
  CDR3 for alpha chain variable domain of TCR clone 374661 (TRAV25, TRAJ45)
CAGNSGGGADGLPF

SEQ ID NO: 749322 - protein, 14 aa, Homo sapiens
  CDR3 for beta chain variable domain of TCR clone 374661 (TRBV29-1, TRBJ1-2)
CSARRGTQTSGYTF

SEQ ID NO: 749323 - protein, 15 aa, Homo sapiens
  CDR3 for alpha chain variable domain of TCR clone 374662 (TRAV3, TRAJ5)
CAVRDRKTGRRALTF

SEQ ID NO: 749324 - protein, 15 aa, Homo sapiens
  CDR3 for beta chain variable domain of TCR clone 374662 (TRBV19, TRBJ1-1)
CASTSGQIQNTEAFF

SEQ ID NO: 749325 - protein, 10 aa, Homo sapiens
  CDR3 for alpha chain variable domain of TCR clone 374663 (TRAV23/DV6, TRAJ57)
CAASSTLSQG

SEQ ID NO: 749326 - protein, 16 aa, Homo sapiens
  CDR3 for beta chain variable domain of TCR clone 374663 (TRBV19, TRBJ2-7)
CASSPALGQGLYEQYF

SEQ ID NO: 749327 - protein, 17 aa, Homo sapiens
  CDR3 for alpha chain variable domain of TCR clone 374664 (TRAV8-4, TRAJ45)
CAVSEGGSGGGADGLTF

SEQ ID NO: 749328 - protein, 16 aa, Homo sapiens
  CDR3 for beta chain variable domain of TCR clone 374664 (TRBV19, TRBJ2-1)
CASSKAGPSSYNEQFF

SEQ ID NO: 749329 - protein, 11 aa, Homo sapiens
  CDR3 for alpha chain variable domain of TCR clone 374665 (TRAV12-3, TRAJ43)
CAMSVSNDMRF

SEQ ID NO: 749330 - protein, 20 aa, Homo sapiens
  CDR3 for beta chain variable domain of TCR clone 374665 (TRBV28, TRBJ2-1)
CASTPIGRSPGLAGGNEQFV

SEQ ID NO: 749331 - protein, 16 aa, Homo sapiens
  CDR3 for alpha chain variable domain of TCR clone 374666 (TRAV3, TRAJ10)
CAVRAMRAGGGTKLTF

SEQ ID NO: 749332 - protein, 20 aa, Homo sapiens
  CDR3 for beta chain variable domain of TCR clone 374666 (TRBV28, TRBJ2-1)
CASTPIGRSPGLAGGNEQFF

SEQ ID NO: 749333 - protein, 13 aa, Homo sapiens
  CDR3 for alpha chain variable domain of TCR clone 374667 (TRAV2, TRAJ29)
CAEQNSGNTPLVF

SEQ ID NO: 749334 - protein, 13 aa, Homo sapiens
  CDR3 for beta chain variable domain of TCR clone 374667 (TRBV28, TRBJ1-2)
CAGSPGNRNGYTF

SEQ ID NO: 749335 - protein, 13 aa, Homo sapiens
  CDR3 for alpha chain variable domain of TCR clone 374668 (TRAV8-6, TRAJ24)
CAVSSDSWGKLQF

SEQ ID NO: 749336 - protein, 13 aa, Homo sapiens
  CDR3 for beta chain variable domain of TCR clone 374668 (TRBV20-1, TRBJ2-7)
CSATHTSGYEQYF

SEQ ID NO: 749337 - protein, 13 aa, Homo sapiens
  CDR3 for alpha chain variable domain of TCR clone 374669 (TRAV13-1, TRAJ40)
CAAISPGTYNYIF

SEQ ID NO: 749338 - protein, 15 aa, Homo sapiens
  CDR3 for beta chain variable domain of TCR clone 374669 (TRBV9, TRBJ1-6)
CASSVAGTGDSPLHF

SEQ ID NO: 749339 - protein, 13 aa, Homo sapiens
  CDR3 for alpha chain variable domain of TCR clone 374670 (TRAV9-2, TRAJ44)
CALSAGTASKLTF

SEQ ID NO: 749340 - protein, 12 aa, Homo sapiens
  CDR3 for beta chain variable domain of TCR clone 374670 (TRBV11-2, TRBJ2-2)
CASSLGGGELFF

SEQ ID NO: 749341 - protein, 12 aa, Homo sapiens
  CDR3 for alpha chain variable domain of TCR clone 374671 (TRAV13-2, TRAJ8)
CAPWLGFQKLVF

SEQ ID NO: 749342 - protein, 11 aa, Homo sapiens
  CDR3 for beta chain variable domain of TCR clone 374671 (TRBV29-1, TRBJ2-5)
CSEDRAGTQYF

SEQ ID NO: 749343 - protein, 17 aa, Homo sapiens
  CDR3 for alpha chain variable domain of TCR clone 374672 (TRAV4, TRAJ18)
CLVGERSVGSTLGRLYF

SEQ ID NO: 749344 - protein, 16 aa, Homo sapiens
  CDR3 for beta chain variable domain of TCR clone 374672 (TRBV7-3, TRBJ2-2)
CASSLKRGTLSGELFF

SEQ ID NO: 749345 - protein, 16 aa, Homo sapiens
  CDR3 for alpha chain variable domain of TCR clone 374673 (TRAV8-3, TRAJ44)
CAVGASNTGTASKRTF

SEQ ID NO: 749346 - protein, 15 aa, Homo sapiens
  CDR3 for beta chain variable domain of TCR clone 374673 (TRBV27, TRBJ1-5)
CASTFNRGSNQTQHF

SEQ ID NO: 749347 - protein, 14 aa, Homo sapiens
  CDR3 for alpha chain variable domain of TCR clone 374674 (TRAV12-1, TRAJ12)
CVVTRMDSSYKLVF

SEQ ID NO: 749348 - protein, 13 aa, Homo sapiens
  CDR3 for beta chain variable domain of TCR clone 374674 (TRBV20-1, TRBJ1-1)
CSARGGGNTEAFF

SEQ ID NO: 749349 - protein, 13 aa, Homo sapiens
  CDR3 for alpha chain variable domain of TCR clone 374675 (TRAV36/DV7, TRAJ33)
CAVDMDSNYQLLW

SEQ ID NO: 749350 - protein, 16 aa, Homo sapiens
  CDR3 for beta chain variable domain of TCR clone 374675 (TRBV15, TRBJ2-3)
CATRLSGGRAPDTQYF

SEQ ID NO: 749351 - protein, 17 aa, Homo sapiens
  CDR3 for alpha chain variable domain of TCR clone 374676 (TRAV26-1, TRAJ37)
CIVRAITVSSNTGKLIF

SEQ ID NO: 749352 - protein, 15 aa, Homo sapiens
  CDR3 for beta chain variable domain of TCR clone 374676 (TRBV10-1, TRBJ2-3)
CASSATSGGFDTQYF

SEQ ID NO: 749353 - protein, 11 aa, Homo sapiens
  CDR3 for alpha chain variable domain of TCR clone 374677 (TRAV3, TRAJ21)
CAVGNFNKFYF

SEQ ID NO: 749354 - protein, 15 aa, Homo sapiens
  CDR3 for beta chain variable domain of TCR clone 374677 (TRBV4-2, TRBJ2-5)
CASSLSGQGEETQYF

SEQ ID NO: 749355 - protein, 13 aa, Homo sapiens
  CDR3 for alpha chain variable domain of TCR clone 374678 (TRAV23/DV6, TRAJ22)
CASRAGSARQLTF

SEQ ID NO: 749356 - protein, 14 aa, Homo sapiens
  CDR3 for beta chain variable domain of TCR clone 374678 (TRBV7-2, TRBJ2-7)
CASSPKTSFYQQYF

SEQ ID NO: 749357 - protein, 16 aa, Homo sapiens
  CDR3 for alpha chain variable domain of TCR clone 374679 (TRAV3, TRAJ21)
CAVRDIERGNFNKFYF

SEQ ID NO: 749358 - protein, 16 aa, Homo sapiens
  CDR3 for beta chain variable domain of TCR clone 374679 (TRBV12-4, TRBJ1-5)
CAISRPVGGSNQPQHF

SEQ ID NO: 749359 - protein, 16 aa, Homo sapiens
  CDR3 for alpha chain variable domain of TCR clone 374680 (TRAV26-1, TRAJ45)
CIVEKYSGGGADGLTI

SEQ ID NO: 749360 - protein, 16 aa, Homo sapiens
  CDR3 for beta chain variable domain of TCR clone 374680 (TRBV10-3, TRBJ1-6)
CAISERRGQGNSPLHF

SEQ ID NO: 749361 - protein, 16 aa, Homo sapiens
  CDR3 for alpha chain variable domain of TCR clone 374681 (TRAV30, TRAJ24)
CGTEMVDADSWGKFQF

SEQ ID NO: 749362 - protein, 14 aa, Homo sapiens
  CDR3 for beta chain variable domain of TCR clone 374681 (TRBV12-5, TRBJ2-5)
CASGSRTHHETQYF

SEQ ID NO: 749363 - protein, 13 aa, Homo sapiens
  CDR3 for alpha chain variable domain of TCR clone 374682 (TRAV27, TRAJ16)
CAGACSDGQKLLF

SEQ ID NO: 749364 - protein, 16 aa, Homo sapiens
  CDR3 for beta chain variable domain of TCR clone 374682 (TRBV19, TRBJ2-1)
CASSKAGPSSYNEQFF

SEQ ID NO: 749365 - protein, 14 aa, Homo sapiens
  CDR3 for alpha chain variable domain of TCR clone 374683 (TRAV9-2, TRAJ39)
CALYIYNAGNMLTF

SEQ ID NO: 749366 - protein, 13 aa, Homo sapiens
  CDR3 for beta chain variable domain of TCR clone 374683 (TRBV18, TRBJ2-7)
CASSRSGSYEQYF

SEQ ID NO: 749367 - protein, 16 aa, Homo sapiens
  CDR3 for alpha chain variable domain of TCR clone 374684 (TRAV3, TRAJ37)
CAVRPHGSGNTGKLIF

SEQ ID NO: 749368 - protein, 13 aa, Homo sapiens
  CDR3 for beta chain variable domain of TCR clone 374684 (TRBV12-4, TRBJ2-7)
CASSPTETYEHYF

SEQ ID NO: 749369 - protein, 19 aa, Homo sapiens
  CDR3 for alpha chain variable domain of TCR clone 374685 (TRAV29/DV5, TRAJ49)
CSVLLCSKLTVDTGTQFYF

SEQ ID NO: 749370 - protein, 17 aa, Homo sapiens
  CDR3 for beta chain variable domain of TCR clone 374685 (TRBV13, TRBJ2-3)
CASSLSRVAGGRNTQYF

SEQ ID NO: 749371 - protein, 15 aa, Homo sapiens
  CDR3 for alpha chain variable domain of TCR clone 374686 (TRAV25, TRAJ52)
CAGRPGGTSYGKLTF

SEQ ID NO: 749372 - protein, 14 aa, Homo sapiens
  CDR3 for beta chain variable domain of TCR clone 374686 (TRBV25-1, TRBJ1-2)
CASSEAGTAYGYTF

SEQ ID NO: 749373 - protein, 14 aa, Homo sapiens
  CDR3 for alpha chain variable domain of TCR clone 374687 (TRAV13-1, TRAJ35)
CAASKGGFGNVLHC

SEQ ID NO: 749374 - protein, 16 aa, Homo sapiens
  CDR3 for beta chain variable domain of TCR clone 374687 (TRBV5-1, TRBJ2-5)
CASSLSLAGAQETQYF

SEQ ID NO: 749375 - protein, 11 aa, Homo sapiens
  CDR3 for alpha chain variable domain of TCR clone 374688 (TRAV12-1, TRAJ21)
CVVNNFNKFYF

SEQ ID NO: 749376 - protein, 13 aa, Homo sapiens
  CDR3 for beta chain variable domain of TCR clone 374688 (TRBV20-1, TRBJ2-5)
CSAREAFQETQYF

SEQ ID NO: 749377 - protein, 15 aa, Homo sapiens
  CDR3 for alpha chain variable domain of TCR clone 374689 (TRAV9-2, TRAJ56)
CALSDVDGANRKLTF

SEQ ID NO: 749378 - protein, 14 aa, Homo sapiens
  CDR3 for beta chain variable domain of TCR clone 374689 (TRBV5-1, TRBJ2-7)
CASSRGESLYEQYF

SEQ ID NO: 749379 - protein, 17 aa, Homo sapiens
  CDR3 for alpha chain variable domain of TCR clone 374690 (TRAV3, TRAJ6)
CAVSRRTDTGGSYIPTF

SEQ ID NO: 749380 - protein, 18 aa, Homo sapiens
  CDR3 for beta chain variable domain of TCR clone 374690 (TRBV7-2, TRBJ2-3)
CASSLETCRGRKADTQYF

SEQ ID NO: 749381 - protein, 13 aa, Homo sapiens
  CDR3 for alpha chain variable domain of TCR clone 374691 (TRAV24, TRAJ42)
CAFSTGSQGNPIF

SEQ ID NO: 749382 - protein, 19 aa, Homo sapiens
  CDR3 for beta chain variable domain of TCR clone 374691 (TRBV5-1, TRBJ2-3)
CASSLWLAGGITTTDTQYF

SEQ ID NO: 749383 - protein, 14 aa, Homo sapiens
  CDR3 for alpha chain variable domain of TCR clone 374692 (TRAV12-1, TRAJ17)
CVVNYKAAGNKLTF

SEQ ID NO: 749384 - protein, 17 aa, Homo sapiens
  CDR3 for beta chain variable domain of TCR clone 374692 (TRBV20-1, TRBJ2-1)
CSASSSGLAGAYNEQCF

SEQ ID NO: 749385 - protein, 11 aa, Homo sapiens
  CDR3 for alpha chain variable domain of TCR clone 374693 (TRAV26-1, TRAJ37)
CIVRVGRKLIF

SEQ ID NO: 749386 - protein, 13 aa, Homo sapiens
  CDR3 for beta chain variable domain of TCR clone 374693 (TRBV7-2, TRBJ2-2)
CASSLAVTGELFF

SEQ ID NO: 749387 - protein, 16 aa, Homo sapiens
  CDR3 for alpha chain variable domain of TCR clone 374694 (TRAV25, TRAJ53)
CGVEGDSGGSNYKLTF

SEQ ID NO: 749388 - protein, 16 aa, Homo sapiens
  CDR3 for beta chain variable domain of TCR clone 374694 (TRBV4-1, TRBJ2-1)
CASSTYAGGHDNEQFF

SEQ ID NO: 749389 - protein, 14 aa, Homo sapiens
  CDR3 for alpha chain variable domain of TCR clone 374695 (TRAV16, TRAJ33)
CALSAMDSNYKLIW

SEQ ID NO: 749390 - protein, 17 aa, Homo sapiens
  CDR3 for beta chain variable domain of TCR clone 374695 (TRBV25-1, TRBJ2-7)
CASSAARVVFSSYEQYF

SEQ ID NO: 749391 - protein, 17 aa, Homo sapiens
  CDR3 for alpha chain variable domain of TCR clone 374696 (TRAV12-3, TRAJ6)
CAMSARGGAGGSYIPTF

SEQ ID NO: 749392 - protein, 15 aa, Homo sapiens
  CDR3 for beta chain variable domain of TCR clone 374696 (TRBV7-9, TRBJ1-6)
CASSSPGRGNSHLHF

SEQ ID NO: 749393 - protein, 13 aa, Homo sapiens
  CDR3 for alpha chain variable domain of TCR clone 374697 (TRAV12-2, TRAJ10)
CAVPTGGGNKLTF

SEQ ID NO: 749394 - protein, 14 aa, Homo sapiens
  CDR3 for beta chain variable domain of TCR clone 374697 (TRBV5-4, TRBJ1-1)
CASSLDSRRDEALF

SEQ ID NO: 749395 - protein, 15 aa, Homo sapiens
  CDR3 for alpha chain variable domain of TCR clone 374698 (TRAV13-1, TRAJ52)
SYYNAGGTSYGKLTF

SEQ ID NO: 749396 - protein, 11 aa, Homo sapiens
  CDR3 for beta chain variable domain of TCR clone 374698 (TRBV12-4, TRBJ2-2)
CASISAGELFF

SEQ ID NO: 749397 - protein, 14 aa, Homo sapiens
  CDR3 for alpha chain variable domain of TCR clone 374699 (TRAV12-3, TRAJ10)
SHLPLTGGGNKLTF

SEQ ID NO: 749398 - protein, 14 aa, Homo sapiens
  CDR3 for beta chain variable domain of TCR clone 374699 (TRBV19, TRBJ2-1)
CASSRLASINEQFF

SEQ ID NO: 749399 - protein, 13 aa, Homo sapiens
  CDR3 for alpha chain variable domain of TCR clone 374700 (TRAV13-1, TRAJ6)
CAARRGGSYIPTF

SEQ ID NO: 749400 - protein, 13 aa, Homo sapiens
  CDR3 for beta chain variable domain of TCR clone 374700 (TRBV5-8, TRBJ1-2)
CASSLGGNYGYTF

SEQ ID NO: 749401 - protein, 20 aa, Homo sapiens
  CDR3 for alpha chain variable domain of TCR clone 374701 (TRAV21, TRAJ4)
AASQPGDSATLAGGYNKLIF

SEQ ID NO: 749402 - protein, 13 aa, Homo sapiens
  CDR3 for beta chain variable domain of TCR clone 374701 (TRBV7-3, TRBJ1-1)
CASSQDWGAEAFF

SEQ ID NO: 749403 - protein, 14 aa, Homo sapiens
  CDR3 for alpha chain variable domain of TCR clone 374702 (TRAV23/DV6, TRAJ37)
CAASTSSNTGKLIF

SEQ ID NO: 749404 - protein, 13 aa, Homo sapiens
  CDR3 for beta chain variable domain of TCR clone 374702 (TRBV7-7, TRBJ1-1)
CGSSLGANTEAFF

SEQ ID NO: 749405 - protein, 12 aa, Homo sapiens
  CDR3 for alpha chain variable domain of TCR clone 374703 (TRAV13-2, TRAJ23)
CAERHRGGKLIF

SEQ ID NO: 749406 - protein, 15 aa, Homo sapiens
  CDR3 for beta chain variable domain of TCR clone 374703 (TRBV5-7, TRBJ1-2)
CASDLGVAANYGYTF

SEQ ID NO: 749407 - protein, 15 aa, Homo sapiens
  CDR3 for alpha chain variable domain of TCR clone 374704 (TRAV29/DV5, TRAJ29)
CTASERSSGNTPLVF

SEQ ID NO: 749408 - protein, 17 aa, Homo sapiens
  CDR3 for beta chain variable domain of TCR clone 374704 (TRBV4-1, TRBJ1-4)
CASSQEGPRGVEEKLFL

SEQ ID NO: 749409 - protein, 14 aa, Homo sapiens
  CDR3 for alpha chain variable domain of TCR clone 374705 (TRAV1-2, TRAJ8)
FAVREDTGFQKLVF

SEQ ID NO: 749410 - protein, 14 aa, Homo sapiens
  CDR3 for beta chain variable domain of TCR clone 374705 (TRBV29-1, TRBJ2-5)
CSVETSGSGETQYF

SEQ ID NO: 749411 - protein, 14 aa, Homo sapiens
  CDR3 for alpha chain variable domain of TCR clone 374706 (TRAV14/DV4, TRAJ54)
CAMREAPGAQKLVF

SEQ ID NO: 749412 - protein, 15 aa, Homo sapiens
  CDR3 for beta chain variable domain of TCR clone 374706 (TRBV5-1, TRBJ2-7)
CASSLNGGPAREQFF

SEQ ID NO: 749413 - protein, 13 aa, Homo sapiens
  CDR3 for alpha chain variable domain of TCR clone 374707 (TRAV2, TRAJ15)
CAVASQAGTALIF

SEQ ID NO: 749414 - protein, 14 aa, Homo sapiens
  CDR3 for beta chain variable domain of TCR clone 374707 (TRBV11-2, TRBJ2-5)
CASSRTGGIETQYF

SEQ ID NO: 749415 - protein, 13 aa, Homo sapiens
  CDR3 for alpha chain variable domain of TCR clone 374708 (TRAV16, TRAJ26)
CITVRCLGQNFVF

SEQ ID NO: 749416 - protein, 12 aa, Homo sapiens
  CDR3 for beta chain variable domain of TCR clone 374708 (TRBV11-2, TRBJ2-1)
CASSPGNNEQFF

SEQ ID NO: 749417 - protein, 14 aa, Homo sapiens
  CDR3 for alpha chain variable domain of TCR clone 374709 (TRAV8-4, TRAJ9)
CAVSDRTGGFTTIF

SEQ ID NO: 749418 - protein, 13 aa, Homo sapiens
  CDR3 for beta chain variable domain of TCR clone 374709 (TRBV11-2, TRBJ2-7)
CASSLGDSYEQYF

SEQ ID NO: 749419 - protein, 14 aa, Homo sapiens
  CDR3 for alpha chain variable domain of TCR clone 374710 (TRAV12-2, TRAJ40)
CAVKIPSGTYKYVF

SEQ ID NO: 749420 - protein, 13 aa, Homo sapiens
  CDR3 for beta chain variable domain of TCR clone 374710 (TRBV12-4, TRBJ1-1)
CASSPGTGFEAFF

SEQ ID NO: 749421 - protein, 14 aa, Homo sapiens
  CDR3 for alpha chain variable domain of TCR clone 374711 (TRAV36/DV7, TRAJ45)
CPLYSGGGADGLTF

SEQ ID NO: 749422 - protein, 13 aa, Homo sapiens
  CDR3 for beta chain variable domain of TCR clone 374711 (TRBV19, TRBJ2-7)
CASRKAGGSEQYF

SEQ ID NO: 749423 - protein, 17 aa, Homo sapiens
  CDR3 for alpha chain variable domain of TCR clone 374712 (TRAV21, TRAJ52)
CAVGVNAGGTGYGKLTF

SEQ ID NO: 749424 - protein, 13 aa, Homo sapiens
  CDR3 for beta chain variable domain of TCR clone 374712 (TRBV5-1, TRBJ1-2)
CASSFQGNYGYTF

SEQ ID NO: 749425 - protein, 13 aa, Homo sapiens
  CDR3 for alpha chain variable domain of TCR clone 374713 (TRAV20, TRAJ37)
CAGCSSNTGKLIC

SEQ ID NO: 749426 - protein, 11 aa, Homo sapiens
  CDR3 for beta chain variable domain of TCR clone 374713 (TRBV12-4, TRBJ2-3)
CASTATVTQYF

SEQ ID NO: 749427 - protein, 16 aa, Homo sapiens
  CDR3 for alpha chain variable domain of TCR clone 374714 (TRAV16, TRAJ21)
CACGWATTSTNFTLDL

SEQ ID NO: 749428 - protein, 15 aa, Homo sapiens
  CDR3 for beta chain variable domain of TCR clone 374714 (TRBV19, TRBJ2-1)
CASSIQATSYNGQFF

SEQ ID NO: 749429 - protein, 12 aa, Homo sapiens
  CDR3 for alpha chain variable domain of TCR clone 374715 (TRAV9-2, TRAJ40)
CALTSGSYKYIF

SEQ ID NO: 749430 - protein, 16 aa, Homo sapiens
  CDR3 for beta chain variable domain of TCR clone 374715 (TRBV7-7, TRBJ2-2)
CASSPRTGLNTGELFF

SEQ ID NO: 749431 - protein, 13 aa, Homo sapiens
  CDR3 for alpha chain variable domain of TCR clone 374716 (TRAV12-2, TRAJ20)
CAVYPSNDYKLSF

SEQ ID NO: 749432 - protein, 15 aa, Homo sapiens
  CDR3 for beta chain variable domain of TCR clone 374716 (TRBV7-3, TRBJ2-1)
CASSLGQGPFGEQFF

SEQ ID NO: 749433 - protein, 13 aa, Homo sapiens
  CDR3 for alpha chain variable domain of TCR clone 374717 (TRAV21, TRAJ27)
CAARPGNAGKTTF

SEQ ID NO: 749434 - protein, 14 aa, Homo sapiens
  CDR3 for beta chain variable domain of TCR clone 374717 (TRBV11-2, TRBJ2-7)
CASSLGAGAYEQYF

SEQ ID NO: 749435 - protein, 16 aa, Homo sapiens
  CDR3 for alpha chain variable domain of TCR clone 374718 (TRAV30, TRAJ24)
CGPEIVDADSWGKFQF

SEQ ID NO: 749436 - protein, 14 aa, Homo sapiens
  CDR3 for beta chain variable domain of TCR clone 374718 (TRBV7-2, TRBJ2-7)
CASSPKTSFYEQYF

SEQ ID NO: 749437 - protein, 16 aa, Homo sapiens
  CDR3 for alpha chain variable domain of TCR clone 374719 (TRAV22, TRAJ45)
CAVERGKRGGADGLTF

SEQ ID NO: 749438 - protein, 13 aa, Homo sapiens
  CDR3 for beta chain variable domain of TCR clone 374719 (TRBV27, TRBJ1-1)
CASSLSTGAEAFF

SEQ ID NO: 749439 - protein, 16 aa, Homo sapiens
  CDR3 for alpha chain variable domain of TCR clone 374720 (TRAV30, TRAJ24)
CGTEIVDADSWGRFQF

SEQ ID NO: 749440 - protein, 13 aa, Homo sapiens
  CDR3 for beta chain variable domain of TCR clone 374720 (TRBV19, TRBJ2-7)
CASSPRQSYEQYF

SEQ ID NO: 749441 - protein, 16 aa, Homo sapiens
  CDR3 for alpha chain variable domain of TCR clone 374721 (TRAV1-2, TRAJ6)
CAVRDQGTGGSFIPTF

SEQ ID NO: 749442 - protein, 13 aa, Homo sapiens
  CDR3 for beta chain variable domain of TCR clone 374721 (TRBV28, TRBJ2-7)
CASTPGLAGEQYF

SEQ ID NO: 749443 - protein, 18 aa, Homo sapiens
  CDR3 for alpha chain variable domain of TCR clone 374722 (TRAV26-2, TRAJ54)
CILRDVEVGIQGAQKLVF

SEQ ID NO: 749444 - protein, 15 aa, Homo sapiens
  CDR3 for beta chain variable domain of TCR clone 374722 (TRBV20-1, TRBJ1-5)
CSAFKNGQRNQPQHF

SEQ ID NO: 749445 - protein, 13 aa, Homo sapiens
  CDR3 for alpha chain variable domain of TCR clone 374723 (TRAV38-2/DV8, TRAJ29)
CSYRTPGNTPLVF

SEQ ID NO: 749446 - protein, 15 aa, Homo sapiens
  CDR3 for beta chain variable domain of TCR clone 374723 (TRBV6-4, TRBJ2-4)
CASPGTELAKNIQYF

SEQ ID NO: 749447 - protein, 13 aa, Homo sapiens
  CDR3 for alpha chain variable domain of TCR clone 374724 (TRAV1-1, TRAJ30)
CAVRSDRDDKIIF

SEQ ID NO: 749448 - protein, 15 aa, Homo sapiens
  CDR3 for beta chain variable domain of TCR clone 374724 (TRBV18, TRBJ2-6)
CASSPSYAGANVLTF

SEQ ID NO: 749449 - protein, 13 aa, Homo sapiens
  CDR3 for alpha chain variable domain of TCR clone 374725 (TRAV17, TRAJ5)
CAPMDTGRRALTF

SEQ ID NO: 749450 - protein, 16 aa, Homo sapiens
  CDR3 for beta chain variable domain of TCR clone 374725 (TRBV6-6, TRBJ2-1)
CASSYSFSGSYNEQFF

SEQ ID NO: 749451 - protein, 13 aa, Homo sapiens
  CDR3 for alpha chain variable domain of TCR clone 374726 (TRAV2, TRAJ12)
CAVGADSSYKLIF

SEQ ID NO: 749452 - protein, 14 aa, Homo sapiens
  CDR3 for beta chain variable domain of TCR clone 374726 (TRBV7-2, TRBJ1-1)
CASSFLTGTTEAFF

SEQ ID NO: 749453 - protein, 12 aa, Homo sapiens
  CDR3 for alpha chain variable domain of TCR clone 374727 (TRAV23/DV6, TRAJ30)
CAASKGDDKIIF

SEQ ID NO: 749454 - protein, 16 aa, Homo sapiens
  CDR3 for beta chain variable domain of TCR clone 374727 (TRBV5-1, TRBJ2-2)
CASSLWDTTNTGELFF

SEQ ID NO: 749455 - protein, 13 aa, Homo sapiens
  CDR3 for alpha chain variable domain of TCR clone 374728 (TRAV8-1, TRAJ30)
CAVIMNRDDKIIF

SEQ ID NO: 749456 - protein, 14 aa, Homo sapiens
  CDR3 for beta chain variable domain of TCR clone 374728 (TRBV7-2, TRBJ1-6)
CASNLQGANSPLHF

SEQ ID NO: 749457 - protein, 13 aa, Homo sapiens
  CDR3 for alpha chain variable domain of TCR clone 374729 (TRAV1-2, TRAJ9)
CAALNTGGFKTIF

SEQ ID NO: 749458 - protein, 16 aa, Homo sapiens
  CDR3 for beta chain variable domain of TCR clone 374729 (TRBV10-3, TRBJ1-5)
CAISDQVGAPNQPQHF

SEQ ID NO: 749459 - protein, 12 aa, Homo sapiens
  CDR3 for alpha chain variable domain of TCR clone 374730 (TRAV8-3, TRAJ26)
CAGDNYGQNFVF

SEQ ID NO: 749460 - protein, 18 aa, Homo sapiens
  CDR3 for beta chain variable domain of TCR clone 374730 (TRBV12-4, TRBJ2-2)
CASSRSGGAIPNTGELFF

SEQ ID NO: 749461 - protein, 13 aa, Homo sapiens
  CDR3 for alpha chain variable domain of TCR clone 374731 (TRAV36/DV7, TRAJ37)
CAVFSSNTGKLIF

SEQ ID NO: 749462 - protein, 15 aa, Homo sapiens
  CDR3 for beta chain variable domain of TCR clone 374731 (TRBV3-1, TRBJ2-5)
CQSPGQFNGFGTQYF

SEQ ID NO: 749463 - protein, 13 aa, Homo sapiens
  CDR3 for alpha chain variable domain of TCR clone 374732 (TRAV1-2, TRAJ9)
CAALNTGGFKTIF

SEQ ID NO: 749464 - protein, 16 aa, Homo sapiens
  CDR3 for beta chain variable domain of TCR clone 374732 (TRBV28, TRBJ1-4)
CASSSRTGAANENLFF

SEQ ID NO: 749465 - protein, 15 aa, Homo sapiens
  CDR3 for alpha chain variable domain of TCR clone 374733 (TRAV2, TRAJ9)
CAVEDRGTGGFKTIF

SEQ ID NO: 749466 - protein, 13 aa, Homo sapiens
  CDR3 for beta chain variable domain of TCR clone 374733 (TRBV20-1, TRBJ1-1)
CSATGGGNTEAFF

SEQ ID NO: 749467 - protein, 13 aa, Homo sapiens
  CDR3 for alpha chain variable domain of TCR clone 374734 (TRAV8-6, TRAJ16)
CAVSSPDGQKLLF

SEQ ID NO: 749468 - protein, 11 aa, Homo sapiens
  CDR3 for beta chain variable domain of TCR clone 374734 (TRBV11-2, TRBJ2-2)
CASSLPGELFF

SEQ ID NO: 749469 - protein, 15 aa, Homo sapiens
  CDR3 for alpha chain variable domain of TCR clone 374735 (TRAV34, TRAJ38)
CGADFTPGNNRKLIW

SEQ ID NO: 749470 - protein, 14 aa, Homo sapiens
  CDR3 for beta chain variable domain of TCR clone 374735 (TRBV20-1, TRBJ2-1)
CSAQIGGSADEQFF

SEQ ID NO: 749471 - protein, 12 aa, Homo sapiens
  CDR3 for alpha chain variable domain of TCR clone 374736 (TRAV12-3, TRAJ17)
CAMTLTGNKLTF

SEQ ID NO: 749472 - protein, 13 aa, Homo sapiens
  CDR3 for beta chain variable domain of TCR clone 374736 (TRBV2, TRBJ1-4)
CASSERAGEKLFF

SEQ ID NO: 749473 - protein, 10 aa, Homo sapiens
  CDR3 for alpha chain variable domain of TCR clone 374737 (TRAV1-2, TRAJ20)
CVPNDHKPSF

SEQ ID NO: 749474 - protein, 14 aa, Homo sapiens
  CDR3 for beta chain variable domain of TCR clone 374737 (TRBV12-5, TRBJ2-5)
CASGSRTHQETQYF

SEQ ID NO: 749475 - protein, 13 aa, Homo sapiens
  CDR3 for alpha chain variable domain of TCR clone 374738 (TRAV27, TRAJ57)
CRSAQGGSEKLVF

SEQ ID NO: 749476 - protein, 11 aa, Homo sapiens
  CDR3 for beta chain variable domain of TCR clone 374738 (TRBV11-2, TRBJ1-1)
CASSINTEGFF

SEQ ID NO: 749477 - protein, 14 aa, Homo sapiens
  CDR3 for alpha chain variable domain of TCR clone 374739 (TRAV12-2, TRAJ13)
CAVKKTWGYQKVTF

SEQ ID NO: 749478 - protein, 14 aa, Homo sapiens
  CDR3 for beta chain variable domain of TCR clone 374739 (TRBV25-1, TRBJ1-1)
CASTHLGGNTEAFF

SEQ ID NO: 749479 - protein, 17 aa, Homo sapiens
  CDR3 for alpha chain variable domain of TCR clone 374740 (TRAV36/DV7, TRAJ52)
CAVAQRAGGTSYGKLTF

SEQ ID NO: 749480 - protein, 13 aa, Homo sapiens
  CDR3 for beta chain variable domain of TCR clone 374740 (TRBV20-1, TRBJ1-1)
CSAGTVGNTEAVF

SEQ ID NO: 749481 - protein, 23 aa, Homo sapiens
  CDR3 for alpha chain variable domain of TCR clone 374741 (TRAV26-1, TRAJ38)
CIADNAGNNHIQNPDPAVYQLRD

SEQ ID NO: 749482 - protein, 17 aa, Homo sapiens
  CDR3 for beta chain variable domain of TCR clone 374741 (TRBV7-3, TRBJ2-3)
CASSLMKRMRGADTQYF

SEQ ID NO: 749483 - protein, 14 aa, Homo sapiens
  CDR3 for alpha chain variable domain of TCR clone 374742 (TRAV12-3, TRAJ10)
SHLPLTGGGNKLTF

SEQ ID NO: 749484 - protein, 13 aa, Homo sapiens
  CDR3 for beta chain variable domain of TCR clone 374742 (TRBV5-5, TRBJ2-7)
CASSSQTRQRQYF

SEQ ID NO: 749485 - protein, 13 aa, Homo sapiens
  CDR3 for alpha chain variable domain of TCR clone 374743 (TRAV26-1, TRAJ48)
CIVLRVSNEKLTF

SEQ ID NO: 749486 - protein, 14 aa, Homo sapiens
  CDR3 for beta chain variable domain of TCR clone 374743 (TRBV20-1, TRBJ1-5)
CSARDISKNQPQHF

SEQ ID NO: 749487 - protein, 12 aa, Homo sapiens
  CDR3 for alpha chain variable domain of TCR clone 374744 (TRAV1-1, TRAJ8)
CAGGTGFQKLVF

SEQ ID NO: 749488 - protein, 15 aa, Homo sapiens
  CDR3 for beta chain variable domain of TCR clone 374744 (TRBV7-9, TRBJ1-4)
CASSRTGGFTDKLFF

SEQ ID NO: 749489 - protein, 12 aa, Homo sapiens
  CDR3 for alpha chain variable domain of TCR clone 374745 (TRAV13-1, TRAJ11)
CAASKGYSTLTF

SEQ ID NO: 749490 - protein, 13 aa, Homo sapiens
  CDR3 for beta chain variable domain of TCR clone 374745 (TRBV12-5, TRBJ2-3)
CASGDRQSDTQYF

SEQ ID NO: 749491 - protein, 12 aa, Homo sapiens
  CDR3 for alpha chain variable domain of TCR clone 374746 (TRAV3, TRAJ20)
CAVRDPDYKPSF

SEQ ID NO: 749492 - protein, 15 aa, Homo sapiens
  CDR3 for beta chain variable domain of TCR clone 374746 (TRBV7-2, TRBJ2-2)
CASSPTGANTGELFF

SEQ ID NO: 749493 - protein, 14 aa, Homo sapiens
  CDR3 for alpha chain variable domain of TCR clone 374747 (TRAV1-2, TRAJ16)
CAVNRFSDVEKLLF

SEQ ID NO: 749494 - protein, 16 aa, Homo sapiens
  CDR3 for beta chain variable domain of TCR clone 374747 (TRBV19, TRBJ2-1)
CASSEILAGDGNEQFF

SEQ ID NO: 749495 - protein, 14 aa, Homo sapiens
  CDR3 for alpha chain variable domain of TCR clone 374748 (TRAV2, TRAJ37)
CAVDFTSNTGKLIF

SEQ ID NO: 749496 - protein, 14 aa, Homo sapiens
  CDR3 for beta chain variable domain of TCR clone 374748 (TRBV27, TRBJ2-3)
CATWTSGRPWGQYF

SEQ ID NO: 749497 - protein, 17 aa, Homo sapiens
  CDR3 for alpha chain variable domain of TCR clone 374749 (TRAV3, TRAJ6)
CAVRDGPRAGGSYIPTY

SEQ ID NO: 749498 - protein, 14 aa, Homo sapiens
  CDR3 for beta chain variable domain of TCR clone 374749 (TRBV7-2, TRBJ2-7)
CASSPKTSFHEQYF

SEQ ID NO: 749499 - protein, 16 aa, Homo sapiens
  CDR3 for alpha chain variable domain of TCR clone 374750 (TRAV12-2, TRAJ28)
CAVITDSGAGSYQLPF

SEQ ID NO: 749500 - protein, 12 aa, Homo sapiens
  CDR3 for beta chain variable domain of TCR clone 374750 (TRBV9, TRBJ2-2)
CASSLVTGELFF

SEQ ID NO: 749501 - protein, 11 aa, Homo sapiens
  CDR3 for alpha chain variable domain of TCR clone 374751 (TRAV12-1, TRAJ30)
CVVNGQDKIIS

SEQ ID NO: 749502 - protein, 15 aa, Homo sapiens
  CDR3 for beta chain variable domain of TCR clone 374751 (TRBV28, TRBJ2-5)
CASSSGRTIQETQYF

SEQ ID NO: 749503 - protein, 16 aa, Homo sapiens
  CDR3 for alpha chain variable domain of TCR clone 374752 (TRAV13-1, TRAJ48)
CAASIFGDFGNEKLTF

SEQ ID NO: 749504 - protein, 16 aa, Homo sapiens
  CDR3 for beta chain variable domain of TCR clone 374752 (TRBV18, TRBJ1-5)
CASSPYRVEGNQPQHF

SEQ ID NO: 749505 - protein, 15 aa, Homo sapiens
  CDR3 for alpha chain variable domain of TCR clone 374753 (TRAV8-3, TRAJ11)
CAVGLLNSGYNTLTF

SEQ ID NO: 749506 - protein, 19 aa, Homo sapiens
  CDR3 for beta chain variable domain of TCR clone 374753 (TRBV7-9, TRBJ1-2)
EKSRLLSDRFSSGEDGYTF

SEQ ID NO: 749507 - protein, 15 aa, Homo sapiens
  CDR3 for alpha chain variable domain of TCR clone 374754 (TRAV12-3, TRAJ6)
CAMSATTGGSYIPTF

SEQ ID NO: 749508 - protein, 15 aa, Homo sapiens
  CDR3 for beta chain variable domain of TCR clone 374754 (TRBV27, TRBJ2-5)
CASSLYPRGGETQYF

SEQ ID NO: 749509 - protein, 14 aa, Homo sapiens
  CDR3 for alpha chain variable domain of TCR clone 374755 (TRAV35, TRAJ34)
CAGRGTPPSSSLDW

SEQ ID NO: 749510 - protein, 13 aa, Homo sapiens
  CDR3 for beta chain variable domain of TCR clone 374755 (TRBV19, TRBJ2-7)
CASSIDRTYEQYF

SEQ ID NO: 749511 - protein, 11 aa, Homo sapiens
  CDR3 for alpha chain variable domain of TCR clone 374756 (TRAV1-1, TRAJ23)
CAVRQGGKLIF

SEQ ID NO: 749512 - protein, 13 aa, Homo sapiens
  CDR3 for beta chain variable domain of TCR clone 374756 (TRBV19, TRBJ1-2)
CASSPGTGVGYTF

SEQ ID NO: 749513 - protein, 10 aa, Homo sapiens
  CDR3 for alpha chain variable domain of TCR clone 374757 (TRAV26-1, TRAJ22)
CIVSLNFFWF

SEQ ID NO: 749514 - protein, 15 aa, Homo sapiens
  CDR3 for beta chain variable domain of TCR clone 374757 (TRBV9, TRBJ1-6)
CASSVAGTGDSPLHF

SEQ ID NO: 749515 - protein, 16 aa, Homo sapiens
  CDR3 for alpha chain variable domain of TCR clone 374758 (TRAV30, TRAJ24)
CGTEIVDADSWGNFSL

SEQ ID NO: 749516 - protein, 15 aa, Homo sapiens
  CDR3 for beta chain variable domain of TCR clone 374758 (TRBV7-9, TRBJ1-4)
CASSARTGGNEKLFF

SEQ ID NO: 749517 - protein, 16 aa, Homo sapiens
  CDR3 for alpha chain variable domain of TCR clone 374759 (TRAV12-3, TRAJ53)
CAMSPGSGGSHYKLTF

SEQ ID NO: 749518 - protein, 13 aa, Homo sapiens
  CDR3 for beta chain variable domain of TCR clone 374759 (TRBV7-2, TRBJ2-5)
CASSQTSVETQYF

SEQ ID NO: 749519 - protein, 13 aa, Homo sapiens
  CDR3 for alpha chain variable domain of TCR clone 374760 (TRAV21, TRAJ27)
RAARPCNAGKSTF

SEQ ID NO: 749520 - protein, 14 aa, Homo sapiens
  CDR3 for beta chain variable domain of TCR clone 374760 (TRBV7-6, TRBJ2-3)
CASSLGTVTDTQYF

SEQ ID NO: 749521 - protein, 18 aa, Homo sapiens
  CDR3 for alpha chain variable domain of TCR clone 374761 (TRAV12-3, TRAJ52)
CAMSRTNAGATGYGKLTF

SEQ ID NO: 749522 - protein, 17 aa, Homo sapiens
  CDR3 for beta chain variable domain of TCR clone 374761 (TRBV7-3, TRBJ2-3)
CASSLMKRMRGADTQYF

SEQ ID NO: 749523 - protein, 12 aa, Homo sapiens
  CDR3 for alpha chain variable domain of TCR clone 374762 (TRAV13-1, TRAJ49)
CAASPMGNQFYF

SEQ ID NO: 749524 - protein, 17 aa, Homo sapiens
  CDR3 for beta chain variable domain of TCR clone 374762 (TRBV11-2, TRBJ2-1)
CASRLYPPGVEYNEQFF

SEQ ID NO: 749525 - protein, 14 aa, Homo sapiens
  CDR3 for alpha chain variable domain of TCR clone 374763 (TRAV12-2, TRAJ13)
CAVKKTGGYQKVTF

SEQ ID NO: 749526 - protein, 13 aa, Homo sapiens
  CDR3 for beta chain variable domain of TCR clone 374763 (TRBV12-4, TRBJ1-2)
CTSGPAVSYGYTF

SEQ ID NO: 749527 - protein, 12 aa, Homo sapiens
  CDR3 for alpha chain variable domain of TCR clone 374764 (TRAV23/DV6, TRAJ18)
CAASTNHRGSTL

SEQ ID NO: 749528 - protein, 15 aa, Homo sapiens
  CDR3 for beta chain variable domain of TCR clone 374764 (TRBV27, TRBJ2-7)
CASSPDQGRLYEQYF

SEQ ID NO: 749529 - protein, 11 aa, Homo sapiens
  CDR3 for alpha chain variable domain of TCR clone 374765 (TRAV3, TRAJ21)
CAVGNFNKFYF

SEQ ID NO: 749530 - protein, 15 aa, Homo sapiens
  CDR3 for beta chain variable domain of TCR clone 374765 (TRBV11-2, TRBJ2-1)
CASCTGTSGYNEQFF

SEQ ID NO: 749531 - protein, 14 aa, Homo sapiens
  CDR3 for alpha chain variable domain of TCR clone 374766 (TRAV20, TRAJ22)
CAVAMGGSARQLTF

SEQ ID NO: 749532 - protein, 15 aa, Homo sapiens
  CDR3 for beta chain variable domain of TCR clone 374766 (TRBV7-2, TRBJ1-1)
CASSFAGDRDTEAFF

SEQ ID NO: 749533 - protein, 14 aa, Homo sapiens
  CDR3 for alpha chain variable domain of TCR clone 374767 (TRAV12-2, TRAJ13)
CAVKKTGGYQKVTF

SEQ ID NO: 749534 - protein, 15 aa, Homo sapiens
  CDR3 for beta chain variable domain of TCR clone 374767 (TRBV20-1, TRBJ2-1)
CSTRGIGGTYNEQFF

SEQ ID NO: 749535 - protein, 14 aa, Homo sapiens
  CDR3 for alpha chain variable domain of TCR clone 374768 (TRAV12-2, TRAJ9)
CAVNMEGGGFKTIF

SEQ ID NO: 749536 - protein, 14 aa, Homo sapiens
  CDR3 for beta chain variable domain of TCR clone 374768 (TRBV2, TRBJ2-1)
CASSDRAYYNEQFF

SEQ ID NO: 749537 - protein, 14 aa, Homo sapiens
  CDR3 for alpha chain variable domain of TCR clone 374769 (TRAV13-2, TRAJ9)
CAENLETGGFKTIF

SEQ ID NO: 749538 - protein, 16 aa, Homo sapiens
  CDR3 for beta chain variable domain of TCR clone 374769 (TRBV28, TRBJ2-5)
CASSFSPAGAWETQYF

SEQ ID NO: 749539 - protein, 10 aa, Homo sapiens
  CDR3 for alpha chain variable domain of TCR clone 374770 (TRAV2, TRAJ34)
CAVVHDKLIF

SEQ ID NO: 749540 - protein, 14 aa, Homo sapiens
  CDR3 for beta chain variable domain of TCR clone 374770 (TRBV11-2, TRBJ2-3)
CASSRLARTDTQYF

SEQ ID NO: 749541 - protein, 15 aa, Homo sapiens
  CDR3 for alpha chain variable domain of TCR clone 374771 (TRAV17, TRAJ45)
TSVLRTGGGADGLTF

SEQ ID NO: 749542 - protein, 15 aa, Homo sapiens
  CDR3 for beta chain variable domain of TCR clone 374771 (TRBV6-3, TRBJ2-7)
CASSSPGTVFYEHYF

SEQ ID NO: 749543 - protein, 13 aa, Homo sapiens
  CDR3 for alpha chain variable domain of TCR clone 374772 (TRAV8-3, TRAJ43)
CAVGPDNNNDMRF

SEQ ID NO: 749544 - protein, 12 aa, Homo sapiens
  CDR3 for beta chain variable domain of TCR clone 374772 (TRBV7-2, TRBJ1-6)
CASSLTSSPLHF

SEQ ID NO: 749545 - protein, 15 aa, Homo sapiens
  CDR3 for alpha chain variable domain of TCR clone 374773 (TRAV17, TRAJ54)
CATTRSGQGAQKLVF

SEQ ID NO: 749546 - protein, 16 aa, Homo sapiens
  CDR3 for beta chain variable domain of TCR clone 374773 (TRBV12-4, TRBJ2-3)
CASSLRLAETTDTQYF

SEQ ID NO: 749547 - protein, 15 aa, Homo sapiens
  CDR3 for alpha chain variable domain of TCR clone 374774 (TRAV2, TRAJ9)
CAVDDRGTGGFKTIL

SEQ ID NO: 749548 - protein, 16 aa, Homo sapiens
  CDR3 for beta chain variable domain of TCR clone 374774 (TRBV24-1, TRBJ2-3)
CATSDPGTGATDTQYF

SEQ ID NO: 749549 - protein, 12 aa, Homo sapiens
  CDR3 for alpha chain variable domain of TCR clone 374775 (TRAV12-2, TRAJ10)
WGVTGGGNKLTF

SEQ ID NO: 749550 - protein, 12 aa, Homo sapiens
  CDR3 for beta chain variable domain of TCR clone 374775 (TRBV7-9, TRBJ1-5)
CASSPQGQPQHF

SEQ ID NO: 749551 - protein, 13 aa, Homo sapiens
  CDR3 for alpha chain variable domain of TCR clone 374776 (TRAV2, TRAJ40)
CAVVTSGTYKYIF

SEQ ID NO: 749552 - protein, 16 aa, Homo sapiens
  CDR3 for beta chain variable domain of TCR clone 374776 (TRBV15, TRBJ2-5)
CATSRYLEAAQETQYF

SEQ ID NO: 749553 - protein, 17 aa, Homo sapiens
  CDR3 for alpha chain variable domain of TCR clone 374777 (TRAV16, TRAJ58)
CITMLSNGETSGSRLTF

SEQ ID NO: 749554 - protein, 13 aa, Homo sapiens
  CDR3 for beta chain variable domain of TCR clone 374777 (TRBV20-1, TRBJ2-2)
CSASAAGTGELFF

SEQ ID NO: 749555 - protein, 13 aa, Homo sapiens
  CDR3 for alpha chain variable domain of TCR clone 374778 (TRAV36/DV7, TRAJ54)
CAVDIQGAEKLVF

SEQ ID NO: 749556 - protein, 14 aa, Homo sapiens
  CDR3 for beta chain variable domain of TCR clone 374778 (TRBV19, TRBJ2-7)
CASNFRDTFTGMYF

SEQ ID NO: 749557 - protein, 13 aa, Homo sapiens
  CDR3 for alpha chain variable domain of TCR clone 374779 (TRAV13-2, TRAJ13)
CAERPGGYQKATF

SEQ ID NO: 749558 - protein, 15 aa, Homo sapiens
  CDR3 for beta chain variable domain of TCR clone 374779 (TRBV11-3, TRBJ2-7)
CASSPGPASSYEQYF

SEQ ID NO: 749559 - protein, 14 aa, Homo sapiens
  CDR3 for alpha chain variable domain of TCR clone 374780 (TRAV1-1, TRAJ28)
CAAPSGAGSYQLTF

SEQ ID NO: 749560 - protein, 14 aa, Homo sapiens
  CDR3 for beta chain variable domain of TCR clone 374780 (TRBV7-2, TRBJ1-2)
CRQLVSGGDYGYTF

SEQ ID NO: 749561 - protein, 13 aa, Homo sapiens
  CDR3 for alpha chain variable domain of TCR clone 374781 (TRAV2, TRAJ12)
CAVGADSSYKLIF

SEQ ID NO: 749562 - protein, 13 aa, Homo sapiens
  CDR3 for beta chain variable domain of TCR clone 374781 (TRBV10-3, TRBJ2-7)
CASKLAVNYEQYF

SEQ ID NO: 749563 - protein, 13 aa, Homo sapiens
  CDR3 for alpha chain variable domain of TCR clone 374782 (TRAV24, TRAJ37)
CAFSPCNTGKLIF

SEQ ID NO: 749564 - protein, 15 aa, Homo sapiens
  CDR3 for beta chain variable domain of TCR clone 374782 (TRBV7-6, TRBJ2-5)
CASSKPTGPQETQYF

SEQ ID NO: 749565 - protein, 12 aa, Homo sapiens
  CDR3 for alpha chain variable domain of TCR clone 374783 (TRAV4, TRAJ26)
CLVGDYGQNFVF

SEQ ID NO: 749566 - protein, 16 aa, Homo sapiens
  CDR3 for beta chain variable domain of TCR clone 374783 (TRBV5-4, TRBJ2-3)
CASQQPGAGGADTQYF

SEQ ID NO: 749567 - protein, 17 aa, Homo sapiens
  CDR3 for alpha chain variable domain of TCR clone 374784 (TRAV23/DV6, TRAJ58)
CAARLLRGETSGPRLTF

SEQ ID NO: 749568 - protein, 14 aa, Homo sapiens
  CDR3 for beta chain variable domain of TCR clone 374784 (TRBV2, TRBJ2-7)
CARSLTSGGYEQYF

SEQ ID NO: 749569 - protein, 16 aa, Homo sapiens
  CDR3 for alpha chain variable domain of TCR clone 374785 (TRAV26-1, TRAJ37)
CIVRGDGSGNTGKLII

SEQ ID NO: 749570 - protein, 17 aa, Homo sapiens
  CDR3 for beta chain variable domain of TCR clone 374785 (TRBV4-1, TRBJ2-7)
CASSQDPLGVRGGEQYF

SEQ ID NO: 749571 - protein, 13 aa, Homo sapiens
  CDR3 for alpha chain variable domain of TCR clone 374786 (TRAV26-1, TRAJ29)
CIVRRSGNTPLVF

SEQ ID NO: 749572 - protein, 14 aa, Homo sapiens
  CDR3 for beta chain variable domain of TCR clone 374786 (TRBV20-1, TRBJ1-1)
RSAKTPGANTEAFF

SEQ ID NO: 749573 - protein, 15 aa, Homo sapiens
  CDR3 for alpha chain variable domain of TCR clone 374787 (TRAV16, TRAJ20)
CALTGGLRADYKLSF

SEQ ID NO: 749574 - protein, 16 aa, Homo sapiens
  CDR3 for beta chain variable domain of TCR clone 374787 (TRBV11-3, TRBJ2-2)
CASGSRTSPGTGELFF

SEQ ID NO: 749575 - protein, 18 aa, Homo sapiens
  CDR3 for alpha chain variable domain of TCR clone 374788 (TRAV21, TRAJ52)
CAVRPSPAGGTSYGKLTF

SEQ ID NO: 749576 - protein, 17 aa, Homo sapiens
  CDR3 for beta chain variable domain of TCR clone 374788 (TRBV7-9, TRBJ2-3)
CASSPTVAGDLTDTQYF

SEQ ID NO: 749577 - protein, 13 aa, Homo sapiens
  CDR3 for alpha chain variable domain of TCR clone 374789 (TRAV38-1, TRAJ30)
CAFISSGDDKIIF

SEQ ID NO: 749578 - protein, 14 aa, Homo sapiens
  CDR3 for beta chain variable domain of TCR clone 374789 (TRBV20-1, TRBJ1-5)
CSAPGTGVGQPQHF

SEQ ID NO: 749579 - protein, 14 aa, Homo sapiens
  CDR3 for alpha chain variable domain of TCR clone 374790 (TRAV38-1, TRAJ45)
CASHSGGVADGLTF

SEQ ID NO: 749580 - protein, 18 aa, Homo sapiens
  CDR3 for beta chain variable domain of TCR clone 374790 (TRBV24-1, TRBJ2-1)
CATSDLMFLGRGVHEQFF

SEQ ID NO: 749581 - protein, 14 aa, Homo sapiens
  CDR3 for alpha chain variable domain of TCR clone 374791 (TRAV12-2, TRAJ40)
CAVKIPSGTYKYIF

SEQ ID NO: 749582 - protein, 15 aa, Homo sapiens
  CDR3 for beta chain variable domain of TCR clone 374791 (TRBV2, TRBJ2-7)
CASSEGLARSYEQVF

SEQ ID NO: 749583 - protein, 13 aa, Homo sapiens
  CDR3 for alpha chain variable domain of TCR clone 374792 (TRAV13-1, TRAJ12)
CAASTDSSYKLIF

SEQ ID NO: 749584 - protein, 16 aa, Homo sapiens
  CDR3 for beta chain variable domain of TCR clone 374792 (TRBV15, TRBJ2-1)
CATSRERLAGAYEQFF

SEQ ID NO: 749585 - protein, 14 aa, Homo sapiens
  CDR3 for alpha chain variable domain of TCR clone 374793 (TRAV1-2, TRAJ16)
CVVNRFSDGQKLLF

SEQ ID NO: 749586 - protein, 14 aa, Homo sapiens
  CDR3 for beta chain variable domain of TCR clone 374793 (TRBV4-1, TRBJ2-2)
CASSQAVNTGELFF

SEQ ID NO: 749587 - protein, 14 aa, Homo sapiens
  CDR3 for alpha chain variable domain of TCR clone 374794 (TRAV1-2, TRAJ8)
CSVREDTGFQKLVV

SEQ ID NO: 749588 - protein, 15 aa, Homo sapiens
  CDR3 for beta chain variable domain of TCR clone 374794 (TRBV6-3, TRBJ2-7)
CASSSPGTVFYEQYF

SEQ ID NO: 749589 - protein, 15 aa, Homo sapiens
  CDR3 for alpha chain variable domain of TCR clone 374795 (TRAV3, TRAJ22)
CAVRDRGGSARQLTF

SEQ ID NO: 749590 - protein, 13 aa, Homo sapiens
  CDR3 for beta chain variable domain of TCR clone 374795 (TRBV12-4, TRBJ1-2)
CTSVPSVSYGYTF

SEQ ID NO: 749591 - protein, 14 aa, Homo sapiens
  CDR3 for alpha chain variable domain of TCR clone 374796 (TRAV26-2, TRAJ54)
CILRDVRGAQKLVF

SEQ ID NO: 749592 - protein, 15 aa, Homo sapiens
  CDR3 for beta chain variable domain of TCR clone 374796 (TRBV4-1, TRBJ1-4)
CASSDTGGTNENLFF

SEQ ID NO: 749593 - protein, 15 aa, Homo sapiens
  CDR3 for alpha chain variable domain of TCR clone 374797 (TRAV4, TRAJ28)
CLFIWGWELPNHFRE

SEQ ID NO: 749594 - protein, 14 aa, Homo sapiens
  CDR3 for beta chain variable domain of TCR clone 374797 (TRBV7-9, TRBJ2-5)
CASSLDTAQETQYF

SEQ ID NO: 749595 - protein, 12 aa, Homo sapiens
  CDR3 for alpha chain variable domain of TCR clone 374798 (TRAV36/DV7, TRAJ54)
CAVVRGAQKLVF

SEQ ID NO: 749596 - protein, 15 aa, Homo sapiens
  CDR3 for beta chain variable domain of TCR clone 374798 (TRBV7-2, TRBJ2-1)
CASTHGTGIYNEQFF

SEQ ID NO: 749597 - protein, 11 aa, Homo sapiens
  CDR3 for alpha chain variable domain of TCR clone 374799 (TRAV9-2, TRAJ11)
CVPAGYSTLTF

SEQ ID NO: 749598 - protein, 15 aa, Homo sapiens
  CDR3 for beta chain variable domain of TCR clone 374799 (TRBV20-1, TRBJ1-5)
CSTRSGPSMNQPQHF

SEQ ID NO: 749599 - protein, 13 aa, Homo sapiens
  CDR3 for alpha chain variable domain of TCR clone 374800 (TRAV23/DV6, TRAJ22)
CAPYSVSARQLTF

SEQ ID NO: 749600 - protein, 13 aa, Homo sapiens
  CDR3 for beta chain variable domain of TCR clone 374800 (TRBV6-1, TRBJ1-1)
CASRRQGNTEAFF

SEQ ID NO: 749601 - protein, 11 aa, Homo sapiens
  CDR3 for alpha chain variable domain of TCR clone 374801 (TRAV3, TRAJ21)
CAVGNFNKFYF

SEQ ID NO: 749602 - protein, 16 aa, Homo sapiens
  CDR3 for beta chain variable domain of TCR clone 374801 (TRBV19, TRBJ2-1)
CASSKAGPSAYNEQFV

SEQ ID NO: 749603 - protein, 12 aa, Homo sapiens
  CDR3 for alpha chain variable domain of TCR clone 374802 (TRAV17, TRAJ53)
CAGGGSNYQLTF

SEQ ID NO: 749604 - protein, 16 aa, Homo sapiens
  CDR3 for beta chain variable domain of TCR clone 374802 (TRBV11-2, TRBJ2-3)
CASSFQGRGALDTQYF

SEQ ID NO: 749605 - protein, 15 aa, Homo sapiens
  CDR3 for alpha chain variable domain of TCR clone 374803 (TRAV20, TRAJ58)
CAVQDLETSGSRLTF

SEQ ID NO: 749606 - protein, 13 aa, Homo sapiens
  CDR3 for beta chain variable domain of TCR clone 374803 (TRBV20-1, TRBJ1-1)
CSARGGGDTEDFF

SEQ ID NO: 749607 - protein, 14 aa, Homo sapiens
  CDR3 for alpha chain variable domain of TCR clone 374804 (TRAV3, TRAJ6)
CAVRDPWGSYIPTF

SEQ ID NO: 749608 - protein, 16 aa, Homo sapiens
  CDR3 for beta chain variable domain of TCR clone 374804 (TRBV7-2, TRBJ2-5)
CASSLAVSGRGETQYF

SEQ ID NO: 749609 - protein, 14 aa, Homo sapiens
  CDR3 for alpha chain variable domain of TCR clone 374805 (TRAV12-3, TRAJ42)
CAMNYGGSQGNLIF

SEQ ID NO: 749610 - protein, 15 aa, Homo sapiens
  CDR3 for beta chain variable domain of TCR clone 374805 (TRBV19, TRBJ1-5)
CASSIVWADNQPQHF

SEQ ID NO: 749611 - protein, 14 aa, Homo sapiens
  CDR3 for alpha chain variable domain of TCR clone 374806 (TRAV1-2, TRAJ15)
CAVRDRQAGAALIF

SEQ ID NO: 749612 - protein, 15 aa, Homo sapiens
  CDR3 for beta chain variable domain of TCR clone 374806 (TRBV20-1, TRBJ2-7)
CSARDRVSGMDEQYF

SEQ ID NO: 749613 - protein, 12 aa, Homo sapiens
  CDR3 for alpha chain variable domain of TCR clone 374807 (TRAV38-1, TRAJ43)
CAFMTRLADMRF

SEQ ID NO: 749614 - protein, 16 aa, Homo sapiens
  CDR3 for beta chain variable domain of TCR clone 374807 (TRBV27, TRBJ2-2)
CASSSSGVSNTGELFF

SEQ ID NO: 749615 - protein, 13 aa, Homo sapiens
  CDR3 for alpha chain variable domain of TCR clone 374808 (TRAV3, TRAJ4)
CAVSDGGYHKLIF

SEQ ID NO: 749616 - protein, 14 aa, Homo sapiens
  CDR3 for beta chain variable domain of TCR clone 374808 (TRBV12-4, TRBJ1-2)
CASSSSAAGSSYTF

SEQ ID NO: 749617 - protein, 14 aa, Homo sapiens
  CDR3 for alpha chain variable domain of TCR clone 374809 (TRAV1-2, TRAJ8)
CAVRADTGCQKLVF

SEQ ID NO: 749618 - protein, 16 aa, Homo sapiens
  CDR3 for beta chain variable domain of TCR clone 374809 (TRBV19, TRBJ2-3)
CASGTGPNDGTDTQYF

SEQ ID NO: 749619 - protein, 13 aa, Homo sapiens
  CDR3 for alpha chain variable domain of TCR clone 374810 (TRAV13-1, TRAJ6)
CAASKGGSYIPTF

SEQ ID NO: 749620 - protein, 13 aa, Homo sapiens
  CDR3 for beta chain variable domain of TCR clone 374810 (TRBV7-2, TRBJ2-2)
CASSLAVTGELFF

SEQ ID NO: 749621 - protein, 14 aa, Homo sapiens
  CDR3 for alpha chain variable domain of TCR clone 374811 (TRAV8-3, TRAJ39)
CAVGANNAGNMLTF

SEQ ID NO: 749622 - protein, 16 aa, Homo sapiens
  CDR3 for beta chain variable domain of TCR clone 374811 (TRBV6-1, TRBJ2-5)
CASSETLDRGVETQYF

SEQ ID NO: 749623 - protein, 16 aa, Homo sapiens
  CDR3 for alpha chain variable domain of TCR clone 374812 (TRAV3, TRAJ37)
CAVRVRGSGNTGKLIL

SEQ ID NO: 749624 - protein, 12 aa, Homo sapiens
  CDR3 for beta chain variable domain of TCR clone 374812 (TRBV14, TRBJ2-1)
CSSQDRRNEQFF

SEQ ID NO: 749625 - protein, 15 aa, Homo sapiens
  CDR3 for alpha chain variable domain of TCR clone 374813 (TRAV13-1, TRAJ52)
CAATSLRTSYGKLTF

SEQ ID NO: 749626 - protein, 16 aa, Homo sapiens
  CDR3 for beta chain variable domain of TCR clone 374813 (TRBV7-3, TRBJ2-2)
CASSLRRGTLSGELFF

SEQ ID NO: 749627 - protein, 13 aa, Homo sapiens
  CDR3 for alpha chain variable domain of TCR clone 374814 (TRAV35, TRAJ53)
CPGQESSNYKLTF

SEQ ID NO: 749628 - protein, 11 aa, Homo sapiens
  CDR3 for beta chain variable domain of TCR clone 374814 (TRBV29-1, TRBJ2-5)
CSEDRTGTQYL

SEQ ID NO: 749629 - protein, 14 aa, Homo sapiens
  CDR3 for alpha chain variable domain of TCR clone 374815 (TRAV8-3, TRAJ4)
CAVGAAGGYNKLIF

SEQ ID NO: 749630 - protein, 15 aa, Homo sapiens
  CDR3 for beta chain variable domain of TCR clone 374815 (TRBV12-4, TRBJ2-5)
CASNTLAGYQETQYF

SEQ ID NO: 749631 - protein, 15 aa, Homo sapiens
  CDR3 for alpha chain variable domain of TCR clone 374816 (TRAV12-1, TRAJ44)
CVVFVNTGTASKLTF

SEQ ID NO: 749632 - protein, 16 aa, Homo sapiens
  CDR3 for beta chain variable domain of TCR clone 374816 (TRBV7-8, TRBJ2-6)
CQQRRDRGRWGNVLTF

SEQ ID NO: 749633 - protein, 14 aa, Homo sapiens
  CDR3 for alpha chain variable domain of TCR clone 374817 (TRAV12-3, TRAJ10)
SHLPLTGGGNKLTF

SEQ ID NO: 749634 - protein, 17 aa, Homo sapiens
  CDR3 for beta chain variable domain of TCR clone 374817 (TRBV15, TRBJ1-1)
CATSRVGGADGDTEAFF

SEQ ID NO: 749635 - protein, 14 aa, Homo sapiens
  CDR3 for alpha chain variable domain of TCR clone 374818 (TRAV12-2, TRAJ44)
CAVNPAGTASKLTF

SEQ ID NO: 749636 - protein, 13 aa, Homo sapiens
  CDR3 for beta chain variable domain of TCR clone 374818 (TRBV20-1, TRBJ1-6)
CSAALGVGSPLHF

SEQ ID NO: 749637 - protein, 15 aa, Homo sapiens
  CDR3 for alpha chain variable domain of TCR clone 374819 (TRAV38-1, TRAJ37)
CAFINGSGNTGKLIF

SEQ ID NO: 749638 - protein, 12 aa, Homo sapiens
  CDR3 for beta chain variable domain of TCR clone 374819 (TRBV7-9, TRBJ2-7)
CASSCGSYEQYF

SEQ ID NO: 749639 - protein, 15 aa, Homo sapiens
  CDR3 for alpha chain variable domain of TCR clone 374820 (TRAV6, TRAJ4)
CALGGFSGGYNKLIV

SEQ ID NO: 749640 - protein, 13 aa, Homo sapiens
  CDR3 for beta chain variable domain of TCR clone 374820 (TRBV19, TRBJ1-2)
CASSVPGQDGYTF

SEQ ID NO: 749641 - protein, 12 aa, Homo sapiens
  CDR3 for alpha chain variable domain of TCR clone 374821 (TRAV23/DV6, TRAJ58)
CAARLLRGETSV

SEQ ID NO: 749642 - protein, 13 aa, Homo sapiens
  CDR3 for beta chain variable domain of TCR clone 374821 (TRBV11-2, TRBJ2-5)
CASSRGPSETQYF

SEQ ID NO: 749643 - protein, 11 aa, Homo sapiens
  CDR3 for alpha chain variable domain of TCR clone 374822 (TRAV3, TRAJ21)
RAVGNFNKFYF

SEQ ID NO: 749644 - protein, 14 aa, Homo sapiens
  CDR3 for beta chain variable domain of TCR clone 374822 (TRBV20-1, TRBJ2-2)
CSAPDTANTGELFF

SEQ ID NO: 749645 - protein, 18 aa, Homo sapiens
  CDR3 for alpha chain variable domain of TCR clone 374823 (TRAV26-2, TRAJ45)
CILIVDKYSGGGADGLTF

SEQ ID NO: 749646 - protein, 16 aa, Homo sapiens
  CDR3 for beta chain variable domain of TCR clone 374823 (TRBV2, TRBJ1-4)
CASNLLQGATNEKLFF

SEQ ID NO: 749647 - protein, 11 aa, Homo sapiens
  CDR3 for alpha chain variable domain of TCR clone 374824 (TRAV23/DV6, TRAJ49)
CAVPPVTSSIL

SEQ ID NO: 749648 - protein, 13 aa, Homo sapiens
  CDR3 for beta chain variable domain of TCR clone 374824 (TRBV6-1, TRBJ1-1)
CAISRQGNTEAFF

SEQ ID NO: 749649 - protein, 13 aa, Homo sapiens
  CDR3 for alpha chain variable domain of TCR clone 374825 (TRAV12-2, TRAJ20)
CAVYPSNDYKLSF

SEQ ID NO: 749650 - protein, 16 aa, Homo sapiens
  CDR3 for beta chain variable domain of TCR clone 374825 (TRBV24-1, TRBJ2-3)
CATSDPGTGATDTQYS

SEQ ID NO: 749651 - protein, 15 aa, Homo sapiens
  CDR3 for alpha chain variable domain of TCR clone 374826 (TRAV26-1, TRAJ33)
CIVRVAKGSNYQLIW

SEQ ID NO: 749652 - protein, 15 aa, Homo sapiens
  CDR3 for beta chain variable domain of TCR clone 374826 (TRBV6-4, TRBJ2-1)
CASSSGTSGYNEQFF

SEQ ID NO: 749653 - protein, 22 aa, Homo sapiens
  CDR3 for alpha chain variable domain of TCR clone 374827 (TRAV12-2, TRAJ53)
SPVIQPPTSVPPLLSSNYKLTF

SEQ ID NO: 749654 - protein, 13 aa, Homo sapiens
  CDR3 for beta chain variable domain of TCR clone 374827 (TRBV7-7, TRBJ2-3)
CASSLSRADTQYF

SEQ ID NO: 749655 - protein, 13 aa, Homo sapiens
  CDR3 for alpha chain variable domain of TCR clone 374828 (TRAV27, TRAJ49)
CAPSPYTGNQFYF

SEQ ID NO: 749656 - protein, 16 aa, Homo sapiens
  CDR3 for beta chain variable domain of TCR clone 374828 (TRBV4-1, TRBJ1-2)
CASSQDAGQVLYGYTF

SEQ ID NO: 749657 - protein, 15 aa, Homo sapiens
  CDR3 for alpha chain variable domain of TCR clone 374829 (TRAV8-6, TRAJ10)
CAVSDQAGGGNKLTF

SEQ ID NO: 749658 - protein, 15 aa, Homo sapiens
  CDR3 for beta chain variable domain of TCR clone 374829 (TRBV7-2, TRBJ2-1)
CASSPGGGAYNEQFF

SEQ ID NO: 749659 - protein, 16 aa, Homo sapiens
  CDR3 for alpha chain variable domain of TCR clone 374830 (TRAV30, TRAJ24)
CGTEIVDADSWGKFQF

SEQ ID NO: 749660 - protein, 14 aa, Homo sapiens
  CDR3 for beta chain variable domain of TCR clone 374830 (TRBV12-5, TRBJ2-5)
CASGWRTHQETQYF

SEQ ID NO: 749661 - protein, 14 aa, Homo sapiens
  CDR3 for alpha chain variable domain of TCR clone 374831 (TRAV12-3, TRAJ20)
CAMSTRRGDYKLSF

SEQ ID NO: 749662 - protein, 14 aa, Homo sapiens
  CDR3 for beta chain variable domain of TCR clone 374831 (TRBV7-3, TRBJ2-3)
CASSPSARTDTQYF

SEQ ID NO: 749663 - protein, 17 aa, Homo sapiens
  CDR3 for alpha chain variable domain of TCR clone 374832 (TRAV4, TRAJ28)
CLVGDRGLGLGVTNSLS

SEQ ID NO: 749664 - protein, 14 aa, Homo sapiens
  CDR3 for beta chain variable domain of TCR clone 374832 (TRBV4-1, TRBJ2-7)
CASSPVAGGDEQYF

SEQ ID NO: 749665 - protein, 14 aa, Homo sapiens
  CDR3 for alpha chain variable domain of TCR clone 374833 (TRAV2, TRAJ37)
CAVDFTSNTCQLIF

SEQ ID NO: 749666 - protein, 15 aa, Homo sapiens
  CDR3 for beta chain variable domain of TCR clone 374833 (TRBV20-1, TRBJ1-1)
CSASRGVTGNTEAFF

SEQ ID NO: 749667 - protein, 14 aa, Homo sapiens
  CDR3 for alpha chain variable domain of TCR clone 374834 (TRAV16, TRAJ33)
CALSAMDSNYQLIW

SEQ ID NO: 749668 - protein, 12 aa, Homo sapiens
  CDR3 for beta chain variable domain of TCR clone 374834 (TRBV5-5, TRBJ2-5)
CASSYFGETQYF

SEQ ID NO: 749669 - protein, 12 aa, Homo sapiens
  CDR3 for alpha chain variable domain of TCR clone 374835 (TRAV17, TRAJ53)
CATEGSNYKLTF

SEQ ID NO: 749670 - protein, 15 aa, Homo sapiens
  CDR3 for beta chain variable domain of TCR clone 374835 (TRBV11-2, TRBJ2-1)
CASSPAGQSLNEQFF

SEQ ID NO: 749671 - protein, 14 aa, Homo sapiens
  CDR3 for alpha chain variable domain of TCR clone 374836 (TRAV26-1, TRAJ38)
CIADNACNNRKLLL

SEQ ID NO: 749672 - protein, 13 aa, Homo sapiens
  CDR3 for beta chain variable domain of TCR clone 374836 (TRBV20-1, TRBJ1-1)
CSARGGGNTEAFF

SEQ ID NO: 749673 - protein, 13 aa, Homo sapiens
  CDR3 for alpha chain variable domain of TCR clone 374837 (TRAV26-1, TRAJ36)
CIVVGTGANNLFL

SEQ ID NO: 749674 - protein, 16 aa, Homo sapiens
  CDR3 for beta chain variable domain of TCR clone 374837 (TRBV10-3, TRBJ2-1)
CAISGVGDGGGGEQFF

SEQ ID NO: 749675 - protein, 13 aa, Homo sapiens
  CDR3 for alpha chain variable domain of TCR clone 374838 (TRAV27, TRAJ58)
CAGAETSGARWTF

SEQ ID NO: 749676 - protein, 13 aa, Homo sapiens
  CDR3 for beta chain variable domain of TCR clone 374838 (TRBV7-2, TRBJ2-1)
CASNRDRWNEQFF

SEQ ID NO: 749677 - protein, 12 aa, Homo sapiens
  CDR3 for alpha chain variable domain of TCR clone 374839 (TRAV13-1, TRAJ21)
CAAKEGFNKFYF

SEQ ID NO: 749678 - protein, 15 aa, Homo sapiens
  CDR3 for beta chain variable domain of TCR clone 374839 (TRBV19, TRBJ1-6)
CASSTQGAVGSPLHF

SEQ ID NO: 749679 - protein, 18 aa, Homo sapiens
  CDR3 for alpha chain variable domain of TCR clone 374840 (TRAV21, TRAJ52)
CAVRPSPAGGTRYGKLTF

SEQ ID NO: 749680 - protein, 17 aa, Homo sapiens
  CDR3 for beta chain variable domain of TCR clone 374840 (TRBV13, TRBJ2-3)
CASSLSRVAGGRSTQYF

SEQ ID NO: 749681 - protein, 19 aa, Homo sapiens
  CDR3 for alpha chain variable domain of TCR clone 374841 (TRAV17, TRAJ17)
CATDGRLGVIKAAGNKLTF

SEQ ID NO: 749682 - protein, 17 aa, Homo sapiens
  CDR3 for beta chain variable domain of TCR clone 374841 (TRBV12-4, TRBJ1-1)
CASSLSGFRTMNTEAFF

SEQ ID NO: 749683 - protein, 16 aa, Homo sapiens
  CDR3 for alpha chain variable domain of TCR clone 374842 (TRAV30, TRAJ24)
CGTGIVDADSWGKFQF

SEQ ID NO: 749684 - protein, 16 aa, Homo sapiens
  CDR3 for beta chain variable domain of TCR clone 374842 (TRBV6-1, TRBJ2-1)
CASILRQGSSYNEQFF

SEQ ID NO: 749685 - protein, 16 aa, Homo sapiens
  CDR3 for alpha chain variable domain of TCR clone 374843 (TRAV12-3, TRAJ53)
CAMSPGSGGRNNKLTF

SEQ ID NO: 749686 - protein, 11 aa, Homo sapiens
  CDR3 for beta chain variable domain of TCR clone 374843 (TRBV29-1, TRBJ2-5)
CSEDRTGTQYF

SEQ ID NO: 749687 - protein, 13 aa, Homo sapiens
  CDR3 for alpha chain variable domain of TCR clone 374844 (TRAV13-1, TRAJ49)
CAAMLYTGNQFYF

SEQ ID NO: 749688 - protein, 16 aa, Homo sapiens
  CDR3 for beta chain variable domain of TCR clone 374844 (TRBV7-3, TRBJ2-3)
CASSLSGYRPEGTQYF

SEQ ID NO: 749689 - protein, 13 aa, Homo sapiens
  CDR3 for alpha chain variable domain of TCR clone 374845 (TRAV8-4, TRAJ15)
CALTNQAGTAPIF

SEQ ID NO: 749690 - protein, 13 aa, Homo sapiens
  CDR3 for beta chain variable domain of TCR clone 374845 (TRBV11-3, TRBJ2-3)
CASRPVLGDTQYF

SEQ ID NO: 749691 - protein, 14 aa, Homo sapiens
  CDR3 for alpha chain variable domain of TCR clone 374846 (TRAV20, TRAJ56)
CAVQFGGANSKLTF

SEQ ID NO: 749692 - protein, 14 aa, Homo sapiens
  CDR3 for beta chain variable domain of TCR clone 374846 (TRBV11-2, TRBJ2-5)
CASSRTGGIETQYF

SEQ ID NO: 749693 - protein, 17 aa, Homo sapiens
  CDR3 for alpha chain variable domain of TCR clone 374847 (TRAV38-1, TRAJ48)
CAFMRPRSNFGNEKLTF

SEQ ID NO: 749694 - protein, 14 aa, Homo sapiens
  CDR3 for beta chain variable domain of TCR clone 374847 (TRBV12-4, TRBJ1-1)
CASTWTGHDTEAFF

SEQ ID NO: 749695 - protein, 15 aa, Homo sapiens
  CDR3 for alpha chain variable domain of TCR clone 374848 (TRAV12-1, TRAJ47)
CVVTNRLKGGIKLVF

SEQ ID NO: 749696 - protein, 19 aa, Homo sapiens
  CDR3 for beta chain variable domain of TCR clone 374848 (TRBV20-1, TRBJ2-5)
CSARPQGLAGTSKSGTQYF

SEQ ID NO: 749697 - protein, 13 aa, Homo sapiens
  CDR3 for alpha chain variable domain of TCR clone 374849 (TRAV8-4, TRAJ10)
CAAFTGGGNKLTC

SEQ ID NO: 749698 - protein, 15 aa, Homo sapiens
  CDR3 for beta chain variable domain of TCR clone 374849 (TRBV2, TRBJ2-3)
CASSDFEKATDTQYF

SEQ ID NO: 749699 - protein, 18 aa, Homo sapiens
  CDR3 for alpha chain variable domain of TCR clone 374850 (TRAV12-3, TRAJ52)
CAMSRTNAGGTSYGKLTF

SEQ ID NO: 749700 - protein, 13 aa, Homo sapiens
  CDR3 for beta chain variable domain of TCR clone 374850 (TRBV19, TRBJ2-7)
CASSIDRTYEQYF

SEQ ID NO: 749701 - protein, 16 aa, Homo sapiens
  CDR3 for alpha chain variable domain of TCR clone 374851 (TRAV1-2, TRAJ16)
CAVNRFSDGRSCPLQG

SEQ ID NO: 749702 - protein, 14 aa, Homo sapiens
  CDR3 for beta chain variable domain of TCR clone 374851 (TRBV7-9, TRBJ2-3)
CASSLEDGTDTQYF

SEQ ID NO: 749703 - protein, 13 aa, Homo sapiens
  CDR3 for alpha chain variable domain of TCR clone 374852 (TRAV23/DV6, TRAJ22)
CAASSGSARQLTF

SEQ ID NO: 749704 - protein, 15 aa, Homo sapiens
  CDR3 for beta chain variable domain of TCR clone 374852 (TRBV20-1, TRBJ2-7)
CSARDRVSGMDEQYF

SEQ ID NO: 749705 - protein, 14 aa, Homo sapiens
  CDR3 for alpha chain variable domain of TCR clone 374853 (TRAV2, TRAJ9)
CAVEDRSVGFKTIF

SEQ ID NO: 749706 - protein, 15 aa, Homo sapiens
  CDR3 for beta chain variable domain of TCR clone 374853 (TRBV11-1, TRBJ2-3)
CASSLLAGRTDTQYF

SEQ ID NO: 749707 - protein, 15 aa, Homo sapiens
  CDR3 for alpha chain variable domain of TCR clone 374854 (TRAV3, TRAJ17)
CAVRDTGAAGNKLTF

SEQ ID NO: 749708 - protein, 13 aa, Homo sapiens
  CDR3 for beta chain variable domain of TCR clone 374854 (TRBV6-5, TRBJ2-5)
CASSPQGGETQYF

SEQ ID NO: 749709 - protein, 17 aa, Homo sapiens
  CDR3 for alpha chain variable domain of TCR clone 374855 (TRAV12-3, TRAJ6)
CAMSARGGAGGSYIPTF

SEQ ID NO: 749710 - protein, 13 aa, Homo sapiens
  CDR3 for beta chain variable domain of TCR clone 374855 (TRBV4-2, TRBJ1-1)
CASSQAGNTEALF

SEQ ID NO: 749711 - protein, 14 aa, Homo sapiens
  CDR3 for alpha chain variable domain of TCR clone 374856 (TRAV16, TRAJ33)
CALSAMDSNYQLIW

SEQ ID NO: 749712 - protein, 17 aa, Homo sapiens
  CDR3 for beta chain variable domain of TCR clone 374856 (TRBV25-1, TRBJ2-7)
CASSDARVVFSAYEKYF

SEQ ID NO: 749713 - protein, 11 aa, Homo sapiens
  CDR3 for alpha chain variable domain of TCR clone 374857 (TRAV21, TRAJ34)
CAVTNTDKLIF

SEQ ID NO: 749714 - protein, 16 aa, Homo sapiens
  CDR3 for beta chain variable domain of TCR clone 374857 (TRBV2, TRBJ2-1)
CASSVGGSLSYNEQFF

SEQ ID NO: 749715 - protein, 14 aa, Homo sapiens
  CDR3 for alpha chain variable domain of TCR clone 374858 (TRAV12-2, TRAJ45)
CAVYSGGGADGLTF

SEQ ID NO: 749716 - protein, 16 aa, Homo sapiens
  CDR3 for beta chain variable domain of TCR clone 374858 (TRBV4-1, TRBJ2-3)
CASSQSTSGAEDTQYF

SEQ ID NO: 749717 - protein, 14 aa, Homo sapiens
  CDR3 for alpha chain variable domain of TCR clone 374859 (TRAV1-1, TRAJ21)
CAVRTSRNFNKFYF

SEQ ID NO: 749718 - protein, 14 aa, Homo sapiens
  CDR3 for beta chain variable domain of TCR clone 374859 (TRBV6-1, TRBJ1-3)
CASVQGGGGNTIYF

SEQ ID NO: 749719 - protein, 13 aa, Homo sapiens
  CDR3 for alpha chain variable domain of TCR clone 374860 (TRAV13-1, TRAJ11)
CAASIRGYSTLTF

SEQ ID NO: 749720 - protein, 14 aa, Homo sapiens
  CDR3 for beta chain variable domain of TCR clone 374860 (TRBV4-2, TRBJ2-1)
CASGLDRAYNEQFS

SEQ ID NO: 749721 - protein, 12 aa, Homo sapiens
  CDR3 for alpha chain variable domain of TCR clone 374861 (TRAV1-1, TRAJ8)
CAGGTGFQKLVF

SEQ ID NO: 749722 - protein, 15 aa, Homo sapiens
  CDR3 for beta chain variable domain of TCR clone 374861 (TRBV7-9, TRGJ1)
CASSRTGGFNEKLLF

SEQ ID NO: 749723 - protein, 10 aa, Homo sapiens
  CDR3 for alpha chain variable domain of TCR clone 374862 (TRAV23/DV6, TRAJ57)
CAASFTLSQG

SEQ ID NO: 749724 - protein, 14 aa, Homo sapiens
  CDR3 for beta chain variable domain of TCR clone 374862 (TRBV25-1, TRBJ1-1)
CASTPLGGNTEAFF

SEQ ID NO: 749725 - protein, 14 aa, Homo sapiens
  CDR3 for alpha chain variable domain of TCR clone 374863 (TRAV38-1, TRAJ40)
CALRPTSGTYKYIF

SEQ ID NO: 749726 - protein, 13 aa, Homo sapiens
  CDR3 for beta chain variable domain of TCR clone 374863 (TRBV11-2, TRBJ2-1)
CASSLDLVNEQFF

SEQ ID NO: 749727 - protein, 13 aa, Homo sapiens
  CDR3 for alpha chain variable domain of TCR clone 374864 (TRAV8-4, TRAJ3)
CAVSDSGASKIIF

SEQ ID NO: 749728 - protein, 16 aa, Homo sapiens
  CDR3 for beta chain variable domain of TCR clone 374864 (TRBV7-9, TRBJ2-7)
CGSSNHGGQEKYEQYF

SEQ ID NO: 749729 - protein, 12 aa, Homo sapiens
  CDR3 for alpha chain variable domain of TCR clone 374865 (TRAV35, TRAJ39)
LAPNNAGNMLPF

SEQ ID NO: 749730 - protein, 16 aa, Homo sapiens
  CDR3 for beta chain variable domain of TCR clone 374865 (TRBV2, TRBJ2-3)
CASSTSVEGVTDTQYF

SEQ ID NO: 749731 - protein, 12 aa, Homo sapiens
  CDR3 for alpha chain variable domain of TCR clone 374866 (TRAV17, TRAJ57)
CATDGGSEKLVS

SEQ ID NO: 749732 - protein, 12 aa, Homo sapiens
  CDR3 for beta chain variable domain of TCR clone 374866 (TRBV29-1, TRBJ2-2)
CSVDKYTGELFF

SEQ ID NO: 749733 - protein, 11 aa, Homo sapiens
  CDR3 for alpha chain variable domain of TCR clone 374867 (TRAV2, TRAJ13)
CASGGYQKVTF

SEQ ID NO: 749734 - protein, 20 aa, Homo sapiens
  CDR3 for beta chain variable domain of TCR clone 374867 (TRBV19, TRBJ2-1)
CASSISRTVTSTRLNNEQFF

SEQ ID NO: 749735 - protein, 12 aa, Homo sapiens
  CDR3 for alpha chain variable domain of TCR clone 374868 (TRAV12-3, TRAJ17)
CAMTPTGNKLTF

SEQ ID NO: 749736 - protein, 15 aa, Homo sapiens
  CDR3 for beta chain variable domain of TCR clone 374868 (TRBV20-1, TRBJ2-7)
CSARDRVSGMDEQYF

SEQ ID NO: 749737 - protein, 16 aa, Homo sapiens
  CDR3 for alpha chain variable domain of TCR clone 374869 (TRAV1-2, TRAJ10)
CAGRGVLTGGGNKLTF

SEQ ID NO: 749738 - protein, 15 aa, Homo sapiens
  CDR3 for beta chain variable domain of TCR clone 374869 (TRBV7-9, TRBJ1-6)
CASSSPGRGNSPLHF

SEQ ID NO: 749739 - protein, 14 aa, Homo sapiens
  CDR3 for alpha chain variable domain of TCR clone 374870 (TRAV20, TRAJ20)
CAVRRGYNDYKLSF

SEQ ID NO: 749740 - protein, 13 aa, Homo sapiens
  CDR3 for beta chain variable domain of TCR clone 374870 (TRBV19, TRBJ2-5)
CASSETAPETQHF

SEQ ID NO: 749741 - protein, 14 aa, Homo sapiens
  CDR3 for alpha chain variable domain of TCR clone 374871 (TRAV9-2, TRAJ39)
CALYIYNAGNMLTF

SEQ ID NO: 749742 - protein, 15 aa, Homo sapiens
  CDR3 for beta chain variable domain of TCR clone 374871 (TRBV6-1, TRBJ2-5)
CASSEGWGIQETQYF

SEQ ID NO: 749743 - protein, 10 aa, Homo sapiens
  CDR3 for alpha chain variable domain of TCR clone 374872 (TRAV12-1, TRAJ41)
CVVPELKFRV

SEQ ID NO: 749744 - protein, 16 aa, Homo sapiens
  CDR3 for beta chain variable domain of TCR clone 374872 (TRBV4-2, TRBJ2-5)
CASSQELVGSQETQYF

SEQ ID NO: 749745 - protein, 15 aa, Homo sapiens
  CDR3 for alpha chain variable domain of TCR clone 374873 (TRAV14/DV4, TRAJ12)
CAMREERDSSYKLIF

SEQ ID NO: 749746 - protein, 16 aa, Homo sapiens
  CDR3 for beta chain variable domain of TCR clone 374873 (TRBV11-2, TRBJ1-2)
CASSLDLGGNNYGYTF

SEQ ID NO: 749747 - protein, 14 aa, Homo sapiens
  CDR3 for alpha chain variable domain of TCR clone 374874 (TRAV17, TRAJ54)
CATDANQGAQNLVF

SEQ ID NO: 749748 - protein, 15 aa, Homo sapiens
  CDR3 for beta chain variable domain of TCR clone 374874 (TRBV9, TRBJ2-1)
CASSLAGSSYNEQFF

SEQ ID NO: 749749 - protein, 14 aa, Homo sapiens
  CDR3 for alpha chain variable domain of TCR clone 374875 (TRAV12-2, TRAJ6)
CASKWGGGSYIPTL

SEQ ID NO: 749750 - protein, 15 aa, Homo sapiens
  CDR3 for beta chain variable domain of TCR clone 374875 (TRBV5-1, TRBJ2-1)
CASSPPRAPYNEQFF

SEQ ID NO: 749751 - protein, 13 aa, Homo sapiens
  CDR3 for alpha chain variable domain of TCR clone 374876 (TRAV36/DV7, TRAJ34)
CAGRPYNTDKLIY

SEQ ID NO: 749752 - protein, 15 aa, Homo sapiens
  CDR3 for beta chain variable domain of TCR clone 374876 (TRBV27, TRBJ1-6)
CASSFDRGLGSPLHF

SEQ ID NO: 749753 - protein, 15 aa, Homo sapiens
  CDR3 for alpha chain variable domain of TCR clone 374877 (TRAV2, TRAJ9)
CAVEDRGSGGFKTIF

SEQ ID NO: 749754 - protein, 17 aa, Homo sapiens
  CDR3 for beta chain variable domain of TCR clone 374877 (TRBV7-8, TRBJ2-6)
CASSAGTGGAGANVLTF

SEQ ID NO: 749755 - protein, 13 aa, Homo sapiens
  CDR3 for alpha chain variable domain of TCR clone 374878 (TRAV21, TRAJ27)
CAARPGNAGKSTF

SEQ ID NO: 749756 - protein, 15 aa, Homo sapiens
  CDR3 for beta chain variable domain of TCR clone 374878 (TRBV11-3, TRBJ2-7)
CASSPRPASSYEQYF

SEQ ID NO: 749757 - protein, 14 aa, Homo sapiens
  CDR3 for alpha chain variable domain of TCR clone 374879 (TRAV2, TRAJ29)
CAVTPPSGNTPLVF

SEQ ID NO: 749758 - protein, 17 aa, Homo sapiens
  CDR3 for beta chain variable domain of TCR clone 374879 (TRBV7-8, TRBJ1-2)
CASSLRPLQGHLYGYTF

SEQ ID NO: 749759 - protein, 16 aa, Homo sapiens
  CDR3 for alpha chain variable domain of TCR clone 374880 (TRAV1-1, TRAJ29)
CAVRSTRNSGNTPLVF

SEQ ID NO: 749760 - protein, 15 aa, Homo sapiens
  CDR3 for beta chain variable domain of TCR clone 374880 (TRBV10-3, TRBJ2-1)
CAIRNGTSGHNEQFF

SEQ ID NO: 749761 - protein, 13 aa, Homo sapiens
  CDR3 for alpha chain variable domain of TCR clone 374881 (TRAV26-1, )
CIVSNRVEGFWNQ

SEQ ID NO: 749762 - protein, 14 aa, Homo sapiens
  CDR3 for beta chain variable domain of TCR clone 374881 (TRBV20-1, TRBJ2-7)
CSAWTALSSYEQYF

SEQ ID NO: 749763 - protein, 13 aa, Homo sapiens
  CDR3 for alpha chain variable domain of TCR clone 374882 (TRAV12-2, TRAJ40)
CAVAPSGTYKYLF

SEQ ID NO: 749764 - protein, 13 aa, Homo sapiens
  CDR3 for beta chain variable domain of TCR clone 374882 (TRBV11-3, TRBJ2-5)
CASSSGLQETQYF

SEQ ID NO: 749765 - protein, 16 aa, Homo sapiens
  CDR3 for alpha chain variable domain of TCR clone 374883 (TRAV8-3, TRAJ44)
CAVGTLMTGTASKLTF

SEQ ID NO: 749766 - protein, 20 aa, Homo sapiens
  CDR3 for beta chain variable domain of TCR clone 374883 (TRBV11-3, TRBJ2-7)
CASSQRTSGSLRAVLRAGHQ

SEQ ID NO: 749767 - protein, 13 aa, Homo sapiens
  CDR3 for alpha chain variable domain of TCR clone 374884 (TRAV2, TRAJ40)
CAVVTSGTYKYIF

SEQ ID NO: 749768 - protein, 14 aa, Homo sapiens
  CDR3 for beta chain variable domain of TCR clone 374884 (TRBV7-9, TRBJ2-1)
CASRAGGRRNEQFF

SEQ ID NO: 749769 - protein, 15 aa, Homo sapiens
  CDR3 for alpha chain variable domain of TCR clone 374885 (TRAV1-2, TRAJ28)
CGVQYSGAGSYQLTF

SEQ ID NO: 749770 - protein, 13 aa, Homo sapiens
  CDR3 for beta chain variable domain of TCR clone 374885 (TRBV20-1, TRBJ2-7)
CSATHTSGYEQYF

SEQ ID NO: 749771 - protein, 13 aa, Homo sapiens
  CDR3 for alpha chain variable domain of TCR clone 374886 (TRAV12-3, TRAJ9)
CAMRNPGGFKTIF

SEQ ID NO: 749772 - protein, 14 aa, Homo sapiens
  CDR3 for beta chain variable domain of TCR clone 374886 (TRBV11-2, TRBJ2-7)
CASSSTGEGYEQYF

SEQ ID NO: 749773 - protein, 13 aa, Homo sapiens
  CDR3 for alpha chain variable domain of TCR clone 374887 (TRAV2, TRAJ40)
CAVVTSGTYKYIF

SEQ ID NO: 749774 - protein, 17 aa, Homo sapiens
  CDR3 for beta chain variable domain of TCR clone 374887 (TRBV14, TRBJ2-5)
CASSQASGRPSTSGQAR

SEQ ID NO: 749775 - protein, 14 aa, Homo sapiens
  CDR3 for alpha chain variable domain of TCR clone 374888 (TRAV26-1, TRAJ39)
CIVRANNAGNMPTF

SEQ ID NO: 749776 - protein, 18 aa, Homo sapiens
  CDR3 for beta chain variable domain of TCR clone 374888 (TRBV12-4, TRBJ2-4)
CASSRTGAVDVAKNIQYF

SEQ ID NO: 749777 - protein, 15 aa, Homo sapiens
  CDR3 for alpha chain variable domain of TCR clone 374889 (TRAV2, TRAJ22)
CAVPSRGGSARQLPF

SEQ ID NO: 749778 - protein, 14 aa, Homo sapiens
  CDR3 for beta chain variable domain of TCR clone 374889 (TRBV6-1, TRBJ1-3)
CASVQGGGGNTIYF

SEQ ID NO: 749779 - protein, 18 aa, Homo sapiens
  CDR3 for alpha chain variable domain of TCR clone 374890 (TRAV21, TRAJ52)
CAVRPSPAGGTSYGKLTF

SEQ ID NO: 749780 - protein, 14 aa, Homo sapiens
  CDR3 for beta chain variable domain of TCR clone 374890 (TRBV5-1, TRBJ2-2)
CASSLGGGSGELFF

SEQ ID NO: 749781 - protein, 21 aa, Homo sapiens
  CDR3 for alpha chain variable domain of TCR clone 374891 (TRAV1-1, TRAJ6)
CLLLLRCERLERTGGSYIPTF

SEQ ID NO: 749782 - protein, 15 aa, Homo sapiens
  CDR3 for beta chain variable domain of TCR clone 374891 (TRBV7-2, TRBJ2-3)
CASSLVGRGPDTQYF

SEQ ID NO: 749783 - protein, 11 aa, Homo sapiens
  CDR3 for alpha chain variable domain of TCR clone 374892 (TRAV21, TRAJ34)
CAVTNTDKLIF

SEQ ID NO: 749784 - protein, 15 aa, Homo sapiens
  CDR3 for beta chain variable domain of TCR clone 374892 (TRBV11-3, TRBJ2-5)
CASSDTSGGIETQYF

SEQ ID NO: 749785 - protein, 14 aa, Homo sapiens
  CDR3 for alpha chain variable domain of TCR clone 374893 (TRAV8-4, TRAJ48)
CAVSETFGNEKLTF

SEQ ID NO: 749786 - protein, 16 aa, Homo sapiens
  CDR3 for beta chain variable domain of TCR clone 374893 (TRBV20-1, TRBJ1-4)
CSAPGQGLLTNEKLFF

SEQ ID NO: 749787 - protein, 13 aa, Homo sapiens
  CDR3 for alpha chain variable domain of TCR clone 374894 (TRAV12-1, TRAJ21)
CVVIGDNFNKFYF

SEQ ID NO: 749788 - protein, 14 aa, Homo sapiens
  CDR3 for beta chain variable domain of TCR clone 374894 (TRBV7-3, TRBJ2-2)
CASSLYPLTGELFF

SEQ ID NO: 749789 - protein, 15 aa, Homo sapiens
  CDR3 for alpha chain variable domain of TCR clone 374895 (TRAV20, TRAJ43)
CAVQAGKRSNNDMRV

SEQ ID NO: 749790 - protein, 14 aa, Homo sapiens
  CDR3 for beta chain variable domain of TCR clone 374895 (TRBV27, TRBJ2-1)
CASRHLGGGKEQFF

SEQ ID NO: 749791 - protein, 13 aa, Homo sapiens
  CDR3 for alpha chain variable domain of TCR clone 374896 (TRAV27, TRAJ23)
CAGVLPKGGKLIF

SEQ ID NO: 749792 - protein, 12 aa, Homo sapiens
  CDR3 for beta chain variable domain of TCR clone 374896 (TRBV14, TRBJ1-1)
CASSQLKGLAFF

SEQ ID NO: 749793 - protein, 15 aa, Homo sapiens
  CDR3 for alpha chain variable domain of TCR clone 374897 (TRAV17, TRAJ4)
CATGTWSGGYNKLIF

SEQ ID NO: 749794 - protein, 13 aa, Homo sapiens
  CDR3 for beta chain variable domain of TCR clone 374897 (TRBV12-4, TRBJ1-2)
CASSLRQGKGYTF

SEQ ID NO: 749795 - protein, 20 aa, Homo sapiens
  CDR3 for alpha chain variable domain of TCR clone 374898 (TRAV13-1, )
CAASPMDIQNPDPAVYQLRY

SEQ ID NO: 749796 - protein, 13 aa, Homo sapiens
  CDR3 for beta chain variable domain of TCR clone 374898 (TRBV20-1, TRBJ2-2)
CSASAAGTGELFF

SEQ ID NO: 749797 - protein, 17 aa, Homo sapiens
  CDR3 for alpha chain variable domain of TCR clone 374899 (TRAV1-2, TRAJ6)
CAVRDTTRTGGSYIPTF

SEQ ID NO: 749798 - protein, 11 aa, Homo sapiens
  CDR3 for beta chain variable domain of TCR clone 374899 (TRBV24-1, TRBJ2-3)
CHQFRGDTQYF

SEQ ID NO: 749799 - protein, 16 aa, Homo sapiens
  CDR3 for alpha chain variable domain of TCR clone 374900 (TRAV30, TRAJ24)
CGTEIVDADSWGKFQF

SEQ ID NO: 749800 - protein, 14 aa, Homo sapiens
  CDR3 for beta chain variable domain of TCR clone 374900 (TRBV7-9, TRBJ2-2)
CASNGLADTGELFF

SEQ ID NO: 749801 - protein, 13 aa, Homo sapiens
  CDR3 for alpha chain variable domain of TCR clone 374901 (TRAV3, TRAJ36)
CAVRDTGENNLFF

SEQ ID NO: 749802 - protein, 16 aa, Homo sapiens
  CDR3 for beta chain variable domain of TCR clone 374901 (TRBV12-4, TRBJ2-7)
CASSLIGGTGTYEQYF

SEQ ID NO: 749803 - protein, 19 aa, Homo sapiens
  CDR3 for alpha chain variable domain of TCR clone 374902 (TRAV29/DV5, TRAJ49)
CSVLLCSKLTVDTVNQFYF

SEQ ID NO: 749804 - protein, 15 aa, Homo sapiens
  CDR3 for beta chain variable domain of TCR clone 374902 (TRBV9, TRBJ1-6)
CASSVAGTGDSPLHF

SEQ ID NO: 749805 - protein, 14 aa, Homo sapiens
  CDR3 for alpha chain variable domain of TCR clone 374903 (TRAV27, TRAJ58)
CAGDGETSGSRLTF

SEQ ID NO: 749806 - protein, 13 aa, Homo sapiens
  CDR3 for beta chain variable domain of TCR clone 374903 (TRBV7-9, TRBJ2-7)
CASSFAGAYEQYF

SEQ ID NO: 749807 - protein, 23 aa, Homo sapiens
  CDR3 for alpha chain variable domain of TCR clone 374904 (TRAV8-4, )
CARLNPGNNHIQNPDPAVSQLRD

SEQ ID NO: 749808 - protein, 12 aa, Homo sapiens
  CDR3 for beta chain variable domain of TCR clone 374904 (TRBV6-1, TRBJ2-7)
CTSSEPLYEQYF

SEQ ID NO: 749809 - protein, 15 aa, Homo sapiens
  CDR3 for alpha chain variable domain of TCR clone 374905 (TRAV21, TRAJ24)
CAARSSTDSWGKLPF

SEQ ID NO: 749810 - protein, 13 aa, Homo sapiens
  CDR3 for beta chain variable domain of TCR clone 374905 (TRBV11-2, TRBJ2-5)
CASSSTGEETQYS

SEQ ID NO: 749811 - protein, 12 aa, Homo sapiens
  CDR3 for alpha chain variable domain of TCR clone 374906 (TRAV8-3, TRAJ26)
CAGVNYGQNFVF

SEQ ID NO: 749812 - protein, 15 aa, Homo sapiens
  CDR3 for beta chain variable domain of TCR clone 374906 (TRBV28, TRBJ2-5)
CASSPPWSYQETQYF

SEQ ID NO: 749813 - protein, 10 aa, Homo sapiens
  CDR3 for alpha chain variable domain of TCR clone 374907 (TRAV12-3, TRAJ18)
CAMSAEAQPW

SEQ ID NO: 749814 - protein, 14 aa, Homo sapiens
  CDR3 for beta chain variable domain of TCR clone 374907 (TRBV7-8, TRBJ2-7)
CASSPRDRVYEQYF

SEQ ID NO: 749815 - protein, 15 aa, Homo sapiens
  CDR3 for alpha chain variable domain of TCR clone 374908 (TRAV34, TRAJ38)
CGADFTPGYNRKLIW

SEQ ID NO: 749816 - protein, 16 aa, Homo sapiens
  CDR3 for beta chain variable domain of TCR clone 374908 (TRBV12-5, TRBJ2-5)
CASGPRTSGNQETQYF

SEQ ID NO: 749817 - protein, 17 aa, Homo sapiens
  CDR3 for alpha chain variable domain of TCR clone 374909 (TRAV3, TRAJ12)
CAVSDGGRMDSSYKLIF

SEQ ID NO: 749818 - protein, 13 aa, Homo sapiens
  CDR3 for beta chain variable domain of TCR clone 374909 (TRBV4-2, TRBJ1-1)
CASSQAGNTEAFF

SEQ ID NO: 749819 - protein, 16 aa, Homo sapiens
  CDR3 for alpha chain variable domain of TCR clone 374910 (TRAV3, TRAJ10)
CAVRDMRAGGGNKLTF

SEQ ID NO: 749820 - protein, 16 aa, Homo sapiens
  CDR3 for beta chain variable domain of TCR clone 374910 (TRBV7-2, TRBJ2-5)
CQQPRQGRKSRETQYF

SEQ ID NO: 749821 - protein, 12 aa, Homo sapiens
  CDR3 for alpha chain variable domain of TCR clone 374911 (TRAV8-3, TRAJ20)
CAVDFKDYKLSF

SEQ ID NO: 749822 - protein, 12 aa, Homo sapiens
  CDR3 for beta chain variable domain of TCR clone 374911 (TRBV29-1, TRBJ2-3)
CSVTGGADTQYF

SEQ ID NO: 749823 - protein, 12 aa, Homo sapiens
  CDR3 for alpha chain variable domain of TCR clone 374912 (TRAV12-1, TRAJ34)
CVVTFNTDKLMF

SEQ ID NO: 749824 - protein, 14 aa, Homo sapiens
  CDR3 for beta chain variable domain of TCR clone 374912 (TRBV19, TRBJ1-1)
CASLRTGLNTEAFF

SEQ ID NO: 749825 - protein, 12 aa, Homo sapiens
  CDR3 for alpha chain variable domain of TCR clone 374913 (TRAV8-6, TRAJ27)
CAVTRNAGKSTF

SEQ ID NO: 749826 - protein, 15 aa, Homo sapiens
  CDR3 for beta chain variable domain of TCR clone 374913 (TRBV10-3, TRBJ2-2)
CAIRTDREDTGELFF

SEQ ID NO: 749827 - protein, 18 aa, Homo sapiens
  CDR3 for alpha chain variable domain of TCR clone 374914 (TRAV26-2, TRAJ45)
CILRVDKYSGGGADGLTF

SEQ ID NO: 749828 - protein, 16 aa, Homo sapiens
  CDR3 for beta chain variable domain of TCR clone 374914 (TRBV7-2, TRBJ2-7)
CASRSQGRRTSSTSGR

SEQ ID NO: 749829 - protein, 15 aa, Homo sapiens
  CDR3 for alpha chain variable domain of TCR clone 374915 (TRAV26-1, TRAJ48)
CIVRVGDFGNEKLTF

SEQ ID NO: 749830 - protein, 16 aa, Homo sapiens
  CDR3 for beta chain variable domain of TCR clone 374915 (TRBV4-1, TRBJ2-3)
CASSQRSGGLTDTQYF

SEQ ID NO: 749831 - protein, 11 aa, Homo sapiens
  CDR3 for alpha chain variable domain of TCR clone 374916 (TRAV29/DV5, TRAJ47)
CAATYGNKMVF

SEQ ID NO: 749832 - protein, 15 aa, Homo sapiens
  CDR3 for beta chain variable domain of TCR clone 374916 (TRBV7-2, TRBJ2-1)
CASSAGLAGGNEQFF

SEQ ID NO: 749833 - protein, 13 aa, Homo sapiens
  CDR3 for alpha chain variable domain of TCR clone 374917 (TRAV13-1, TRAJ40)
CAARTSGTYKYIF

SEQ ID NO: 749834 - protein, 17 aa, Homo sapiens
  CDR3 for beta chain variable domain of TCR clone 374917 (TRBV13, TRBJ2-3)
CASSLSRVAGGRNTQYF

SEQ ID NO: 749835 - protein, 12 aa, Homo sapiens
  CDR3 for alpha chain variable domain of TCR clone 374918 (TRAV23/DV6, TRAJ30)
CAASKGDDKIIF

SEQ ID NO: 749836 - protein, 12 aa, Homo sapiens
  CDR3 for beta chain variable domain of TCR clone 374918 (TRBV7-6, TRBJ2-3)
CASSWAEDTQYF

SEQ ID NO: 749837 - protein, 17 aa, Homo sapiens
  CDR3 for alpha chain variable domain of TCR clone 374919 (TRAV23/DV6, )
CAADIQNPDPAVYQLRD

SEQ ID NO: 749838 - protein, 14 aa, Homo sapiens
  CDR3 for beta chain variable domain of TCR clone 374919 (TRBV5-7, TRBJ1-6)
RASSFAGHNSPLHF

SEQ ID NO: 749839 - protein, 15 aa, Homo sapiens
  CDR3 for alpha chain variable domain of TCR clone 374920 (TRAV21, TRAJ37)
CAVRPTLSNTGKLIF

SEQ ID NO: 749840 - protein, 17 aa, Homo sapiens
  CDR3 for beta chain variable domain of TCR clone 374920 (TRBV27, TRBJ2-3)
CASSFFPPNTSTDTQYF

SEQ ID NO: 749841 - protein, 13 aa, Homo sapiens
  CDR3 for alpha chain variable domain of TCR clone 374921 (TRAV12-2, TRAJ20)
CAVYPSNDYKLSL

SEQ ID NO: 749842 - protein, 15 aa, Homo sapiens
  CDR3 for beta chain variable domain of TCR clone 374921 (TRBV27, TRBJ2-5)
CASSLYPRGGETQYV

SEQ ID NO: 749843 - protein, 13 aa, Homo sapiens
  CDR3 for alpha chain variable domain of TCR clone 374922 (TRAV30, TRAJ24)
CGTVTDSWGKLQF

SEQ ID NO: 749844 - protein, 13 aa, Homo sapiens
  CDR3 for beta chain variable domain of TCR clone 374922 (TRBV20-1, TRBJ1-6)
CSAPLGVGSPLHF

SEQ ID NO: 749845 - protein, 14 aa, Homo sapiens
  CDR3 for alpha chain variable domain of TCR clone 374923 (TRAV12-2, TRAJ13)
CAVKKTGGYKKVTF

SEQ ID NO: 749846 - protein, 15 aa, Homo sapiens
  CDR3 for beta chain variable domain of TCR clone 374923 (TRBV27, TRBJ2-1)
CASSNGEGPPMSSSS

SEQ ID NO: 749847 - protein, 14 aa, Homo sapiens
  CDR3 for alpha chain variable domain of TCR clone 374924 (TRAV16, TRAJ29)
CALTWNSGNTPLVF

SEQ ID NO: 749848 - protein, 16 aa, Homo sapiens
  CDR3 for beta chain variable domain of TCR clone 374924 (TRBV12-4, TRBJ1-5)
CASSRPVGGSNQPQHF

SEQ ID NO: 749849 - protein, 12 aa, Homo sapiens
  CDR3 for alpha chain variable domain of TCR clone 374925 (TRAV13-1, TRAJ36)
WRGGAGANNLFF

SEQ ID NO: 749850 - protein, 13 aa, Homo sapiens
  CDR3 for beta chain variable domain of TCR clone 374925 (TRBV7-9, TRBJ1-2)
CASSLKQNYGYTF

SEQ ID NO: 749851 - protein, 14 aa, Homo sapiens
  CDR3 for alpha chain variable domain of TCR clone 374926 (TRAV12-2, TRAJ33)
CAVKRSRSNYQLIW

SEQ ID NO: 749852 - protein, 15 aa, Homo sapiens
  CDR3 for beta chain variable domain of TCR clone 374926 (TRBV20-1, TRBJ2-7)
CSARDRVSGMDEQYF

SEQ ID NO: 749853 - protein, 17 aa, Homo sapiens
  CDR3 for alpha chain variable domain of TCR clone 374927 (TRAV16, TRAJ42)
CALRPKLYGGSQGNLIF

SEQ ID NO: 749854 - protein, 13 aa, Homo sapiens
  CDR3 for beta chain variable domain of TCR clone 374927 (TRBV19, TRBJ1-5)
CASSTRRDQPQHF

SEQ ID NO: 749855 - protein, 13 aa, Homo sapiens
  CDR3 for alpha chain variable domain of TCR clone 374928 (TRAV12-3, TRAJ44)
CARTTGTAIKLTF

SEQ ID NO: 749856 - protein, 15 aa, Homo sapiens
  CDR3 for beta chain variable domain of TCR clone 374928 (TRBV29-1, TRBJ1-2)
CSGLDVRGANYGYTF

SEQ ID NO: 749857 - protein, 12 aa, Homo sapiens
  CDR3 for alpha chain variable domain of TCR clone 374929 (TRAV8-3, TRAJ26)
CAGDNYGQNFFI

SEQ ID NO: 749858 - protein, 13 aa, Homo sapiens
  CDR3 for beta chain variable domain of TCR clone 374929 (TRBV20-1, TRBJ2-5)
CSARGDYQETQYF

SEQ ID NO: 749859 - protein, 14 aa, Homo sapiens
  CDR3 for alpha chain variable domain of TCR clone 374930 (TRAV9-2, TRAJ57)
CALSGQCGSEKLVF

SEQ ID NO: 749860 - protein, 15 aa, Homo sapiens
  CDR3 for beta chain variable domain of TCR clone 374930 (TRBV5-1, TRBJ2-1)
CASSPPRAPYNEQFF

SEQ ID NO: 749861 - protein, 14 aa, Homo sapiens
  CDR3 for alpha chain variable domain of TCR clone 374931 (TRAV4, TRAJ9)
CLVGSGTGGFKTIF

SEQ ID NO: 749862 - protein, 15 aa, Homo sapiens
  CDR3 for beta chain variable domain of TCR clone 374931 (TRBV27, TRBJ2-1)
CASSNGGGSSNEQFF

SEQ ID NO: 749863 - protein, 18 aa, Homo sapiens
  CDR3 for alpha chain variable domain of TCR clone 374932 (TRAV21, TRAJ52)
CAVRPSPAGGTSYVKLTF

SEQ ID NO: 749864 - protein, 17 aa, Homo sapiens
  CDR3 for beta chain variable domain of TCR clone 374932 (TRBV20-1, TRBJ2-2)
CSASGSGQGGLTGELFF

SEQ ID NO: 749865 - protein, 15 aa, Homo sapiens
  CDR3 for alpha chain variable domain of TCR clone 374933 (TRAV2, TRAJ9)
CAVEDRGTGGFKTIF

SEQ ID NO: 749866 - protein, 14 aa, Homo sapiens
  CDR3 for beta chain variable domain of TCR clone 374933 (TRBV12-4, TRBJ2-3)
CASTIAGWGDTQYF

SEQ ID NO: 749867 - protein, 12 aa, Homo sapiens
  CDR3 for alpha chain variable domain of TCR clone 374934 (TRAV17, TRAJ53)
CATDGSNYKLTF

SEQ ID NO: 749868 - protein, 19 aa, Homo sapiens
  CDR3 for beta chain variable domain of TCR clone 374934 (TRBV5-1, TRBJ2-3)
CASSLWTSGGITTPDTQYF

SEQ ID NO: 749869 - protein, 14 aa, Homo sapiens
  CDR3 for alpha chain variable domain of TCR clone 374935 (TRAV12-2, TRAJ13)
CAVKKTGGYQKVTF

SEQ ID NO: 749870 - protein, 14 aa, Homo sapiens
  CDR3 for beta chain variable domain of TCR clone 374935 (TRBV18, TRBJ1-5)
CASSPGNSNQPQHF

SEQ ID NO: 749871 - protein, 12 aa, Homo sapiens
  CDR3 for alpha chain variable domain of TCR clone 374936 (TRAV8-3, TRAJ20)
CAVGANDYKLSF

SEQ ID NO: 749872 - protein, 15 aa, Homo sapiens
  CDR3 for beta chain variable domain of TCR clone 374936 (TRBV19, TRBJ2-1)
CASSLETSGYNEQFF

SEQ ID NO: 749873 - protein, 12 aa, Homo sapiens
  CDR3 for alpha chain variable domain of TCR clone 374937 (TRAV13-2, TRAJ23)
CAERHRGGKLIF

SEQ ID NO: 749874 - protein, 14 aa, Homo sapiens
  CDR3 for beta chain variable domain of TCR clone 374937 (TRBV7-3, TRBJ1-1)
CASSRQGGDTEAFF

SEQ ID NO: 749875 - protein, 14 aa, Homo sapiens
  CDR3 for alpha chain variable domain of TCR clone 374938 (TRAV27, TRAJ26)
CAGGGPEYGQNFVF

SEQ ID NO: 749876 - protein, 11 aa, Homo sapiens
  CDR3 for beta chain variable domain of TCR clone 374938 (TRBV19, TRBJ2-5)
CASSIKETQYF

SEQ ID NO: 749877 - protein, 13 aa, Homo sapiens
  CDR3 for alpha chain variable domain of TCR clone 374939 (TRAV13-2, TRAJ13)
CAERPGGYQKVTF

SEQ ID NO: 749878 - protein, 13 aa, Homo sapiens
  CDR3 for beta chain variable domain of TCR clone 374939 (TRBV15, TRBJ1-6)
CATSGGLNSPLHF

SEQ ID NO: 749879 - protein, 15 aa, Homo sapiens
  CDR3 for alpha chain variable domain of TCR clone 374940 (TRAV8-3, TRAJ41)
CAVGSNSNSGYALNF

SEQ ID NO: 749880 - protein, 16 aa, Homo sapiens
  CDR3 for beta chain variable domain of TCR clone 374940 (TRBV12-5, TRBJ2-5)
CASGPRTSGNQETQYF

SEQ ID NO: 749881 - protein, 15 aa, Homo sapiens
  CDR3 for alpha chain variable domain of TCR clone 374941 (TRAV21, TRAJ24)
CAARSSTDSWGQLQF

SEQ ID NO: 749882 - protein, 15 aa, Homo sapiens
  CDR3 for beta chain variable domain of TCR clone 374941 (TRBV4-1, TRBJ2-7)
CASSQNTGRLYEQYF

SEQ ID NO: 749883 - protein, 14 aa, Homo sapiens
  CDR3 for alpha chain variable domain of TCR clone 374942 (TRAV29/DV5, TRAJ36)
CAARRKTVATNLFF

SEQ ID NO: 749884 - protein, 13 aa, Homo sapiens
  CDR3 for beta chain variable domain of TCR clone 374942 (TRBV4-1, TRBJ2-2)
CASSQENTGELFF

SEQ ID NO: 749885 - protein, 13 aa, Homo sapiens
  CDR3 for alpha chain variable domain of TCR clone 374943 (TRAV8-3, TRAJ43)
CAVGPDNNNDMSF

SEQ ID NO: 749886 - protein, 19 aa, Homo sapiens
  CDR3 for beta chain variable domain of TCR clone 374943 (TRBV7-2, TRBJ2-3)
CASSFLSRNWGGGTDTQYF

SEQ ID NO: 749887 - protein, 13 aa, Homo sapiens
  CDR3 for alpha chain variable domain of TCR clone 374944 (TRAV1-1, TRAJ13)
CAVNSGGYQKVTF

SEQ ID NO: 749888 - protein, 12 aa, Homo sapiens
  CDR3 for beta chain variable domain of TCR clone 374944 (TRBV28, TRBJ2-1)
CAGSVQINEQFF

SEQ ID NO: 749889 - protein, 13 aa, Homo sapiens
  CDR3 for alpha chain variable domain of TCR clone 374945 (TRAV3, TRAJ43)
CAVKARNNNYMRF

SEQ ID NO: 749890 - protein, 16 aa, Homo sapiens
  CDR3 for beta chain variable domain of TCR clone 374945 (TRBV7-9, TRBJ2-3)
CASSFSVAGGTDTQYF

SEQ ID NO: 749891 - protein, 15 aa, Homo sapiens
  CDR3 for alpha chain variable domain of TCR clone 374946 (TRAV13-1, TRAJ27)
CAARELNTTAGKSTF

SEQ ID NO: 749892 - protein, 14 aa, Homo sapiens
  CDR3 for beta chain variable domain of TCR clone 374946 (TRBV7-3, TRBJ2-1)
CASSLAGGTNEQFF

SEQ ID NO: 749893 - protein, 14 aa, Homo sapiens
  CDR3 for alpha chain variable domain of TCR clone 374947 (TRAV12-3, TRAJ10)
SHLHLTGGGNKLTF

SEQ ID NO: 749894 - protein, 13 aa, Homo sapiens
  CDR3 for beta chain variable domain of TCR clone 374947 (TRBV2, TRBJ1-6)
CASGRGGISPLHF

SEQ ID NO: 749895 - protein, 11 aa, Homo sapiens
  CDR3 for alpha chain variable domain of TCR clone 374948 (TRAV25, TRAJ11)
CRGFRIQHPTF

SEQ ID NO: 749896 - protein, 14 aa, Homo sapiens
  CDR3 for beta chain variable domain of TCR clone 374948 (TRBV19, TRBJ2-1)
CASPTFVLSGEQFF

SEQ ID NO: 749897 - protein, 10 aa, Homo sapiens
  CDR3 for alpha chain variable domain of TCR clone 374949 (TRAV1-2, TRAJ31)
CVSEDARLMF

SEQ ID NO: 749898 - protein, 16 aa, Homo sapiens
  CDR3 for beta chain variable domain of TCR clone 374949 (TRBV25-1, TRBJ1-1)
CASSGDRDRGRIEAFF

SEQ ID NO: 749899 - protein, 16 aa, Homo sapiens
  CDR3 for alpha chain variable domain of TCR clone 374950 (TRAV30, TRAJ24)
CGTEIVDADSWGKFQF

SEQ ID NO: 749900 - protein, 14 aa, Homo sapiens
  CDR3 for beta chain variable domain of TCR clone 374950 (TRBV13, TRBJ2-1)
CASSPRPRYNEQFV

SEQ ID NO: 749901 - protein, 14 aa, Homo sapiens
  CDR3 for alpha chain variable domain of TCR clone 374951 (TRAV26-1, TRAJ34)
CIVRVAYNTDKLTF

SEQ ID NO: 749902 - protein, 15 aa, Homo sapiens
  CDR3 for beta chain variable domain of TCR clone 374951 (TRBV20-1, TRBJ2-7)
CSARVPAAYFYEQYL

SEQ ID NO: 749903 - protein, 15 aa, Homo sapiens
  CDR3 for alpha chain variable domain of TCR clone 374952 (TRAV8-2, TRAJ42)
CVVSAYMGSQGNLIF

SEQ ID NO: 749904 - protein, 16 aa, Homo sapiens
  CDR3 for beta chain variable domain of TCR clone 374952 (TRBV20-1, TRBJ1-4)
CSAPGQGLLTNEKLFF

SEQ ID NO: 749905 - protein, 12 aa, Homo sapiens
  CDR3 for alpha chain variable domain of TCR clone 374953 (TRAV13-1, TRAJ49)
CAASSTGNKFYF

SEQ ID NO: 749906 - protein, 14 aa, Homo sapiens
  CDR3 for beta chain variable domain of TCR clone 374953 (TRBV7-2, TRBJ2-5)
CASSPAGNQETQYF

SEQ ID NO: 749907 - protein, 15 aa, Homo sapiens
  CDR3 for alpha chain variable domain of TCR clone 374954 (TRAV26-1, TRAJ56)
CIVRVATGADSKLTF

SEQ ID NO: 749908 - protein, 16 aa, Homo sapiens
  CDR3 for beta chain variable domain of TCR clone 374954 (TRBV12-5, TRBJ2-5)
CASGPRTSGNQETQYF

SEQ ID NO: 749909 - protein, 14 aa, Homo sapiens
  CDR3 for alpha chain variable domain of TCR clone 374955 (TRAV1-2, TRAJ16)
CAVNRFSDGQKLLF

SEQ ID NO: 749910 - protein, 16 aa, Homo sapiens
  CDR3 for beta chain variable domain of TCR clone 374955 (TRBV3-1, TRBJ2-1)
CASSQVGGTSYNEQFF

SEQ ID NO: 749911 - protein, 15 aa, Homo sapiens
  CDR3 for alpha chain variable domain of TCR clone 374956 (TRAV17, TRAJ28)
CATVYSGAGSYQLTI

SEQ ID NO: 749912 - protein, 12 aa, Homo sapiens
  CDR3 for beta chain variable domain of TCR clone 374956 (TRBV7-2, TRBJ2-5)
CASSLAKETQYF

SEQ ID NO: 749913 - protein, 14 aa, Homo sapiens
  CDR3 for alpha chain variable domain of TCR clone 374957 (TRAV12-3, TRAJ10)
SHLPLTGGGNKLTF

SEQ ID NO: 749914 - protein, 13 aa, Homo sapiens
  CDR3 for beta chain variable domain of TCR clone 374957 (TRBV29-1, TRBJ2-5)
CSVEATAEGTQYF

SEQ ID NO: 749915 - protein, 15 aa, Homo sapiens
  CDR3 for alpha chain variable domain of TCR clone 374958 (TRAV8-4, TRAJ7)
CAVSGGNYGNNKLAF

SEQ ID NO: 749916 - protein, 11 aa, Homo sapiens
  CDR3 for beta chain variable domain of TCR clone 374958 (TRBV20-1, TRBJ2-1)
CSLSSGSEQFF

SEQ ID NO: 749917 - protein, 16 aa, Homo sapiens
  CDR3 for alpha chain variable domain of TCR clone 374959 (TRAV29/DV5, TRAJ39)
CAASLFFNNAGNMLTF

SEQ ID NO: 749918 - protein, 16 aa, Homo sapiens
  CDR3 for beta chain variable domain of TCR clone 374959 (TRBV19, TRBJ2-6)
CASSMSGLSGANVLTF

SEQ ID NO: 749919 - protein, 15 aa, Homo sapiens
  CDR3 for alpha chain variable domain of TCR clone 374960 (TRAV12-2, TRAJ43)
CAFDMRFGAGTRLTV

SEQ ID NO: 749920 - protein, 13 aa, Homo sapiens
  CDR3 for beta chain variable domain of TCR clone 374960 (TRBV19, TRBJ2-7)
CASSKTGTHEQYF

SEQ ID NO: 749921 - protein, 13 aa, Homo sapiens
  CDR3 for alpha chain variable domain of TCR clone 374961 (TRAV30, TRAJ24)
CGTVTDSWGQLQF

SEQ ID NO: 749922 - protein, 15 aa, Homo sapiens
  CDR3 for beta chain variable domain of TCR clone 374961 (TRBV19, TRBJ1-1)
CASTSGQIQNTEAFF

SEQ ID NO: 749923 - protein, 13 aa, Homo sapiens
  CDR3 for alpha chain variable domain of TCR clone 374962 (TRAV13-2, TRAJ40)
CAEFTSGTYKYIF

SEQ ID NO: 749924 - protein, 16 aa, Homo sapiens
  CDR3 for beta chain variable domain of TCR clone 374962 (TRBV7-2, TRBJ2-5)
CASSSKWLSGQETQYF

SEQ ID NO: 749925 - protein, 11 aa, Homo sapiens
  CDR3 for alpha chain variable domain of TCR clone 374963 (TRAV2, TRAJ13)
CASVGYQKVTF

SEQ ID NO: 749926 - protein, 15 aa, Homo sapiens
  CDR3 for beta chain variable domain of TCR clone 374963 (TRBV9, TRBJ1-6)
CASSVAGTGDSPLHF

SEQ ID NO: 749927 - protein, 23 aa, Homo sapiens
  CDR3 for alpha chain variable domain of TCR clone 374964 (TRAV8-4, TRAJ38)
CARLNAGNNHIQNPDPAVYQLRD

SEQ ID NO: 749928 - protein, 14 aa, Homo sapiens
  CDR3 for beta chain variable domain of TCR clone 374964 (TRBV7-8, TRBJ2-3)
CASSLEAGIDTQYF

SEQ ID NO: 749929 - protein, 11 aa, Homo sapiens
  CDR3 for alpha chain variable domain of TCR clone 374965 (TRAV25, TRAJ5)
CRGGGRRALTF

SEQ ID NO: 749930 - protein, 11 aa, Homo sapiens
  CDR3 for beta chain variable domain of TCR clone 374965 (TRBV29-1, TRBJ2-5)
CSEDRTGTQYF

SEQ ID NO: 749931 - protein, 13 aa, Homo sapiens
  CDR3 for alpha chain variable domain of TCR clone 374966 (TRAV21, TRAJ27)
CAARPGNAGKSTF

SEQ ID NO: 749932 - protein, 14 aa, Homo sapiens
  CDR3 for beta chain variable domain of TCR clone 374966 (TRBV7-8, TRBJ2-5)
CASSATGGQETQYF

SEQ ID NO: 749933 - protein, 14 aa, Homo sapiens
  CDR3 for alpha chain variable domain of TCR clone 374967 (TRAV8-4, TRAJ13)
CAVTLSGGYQKVTL

SEQ ID NO: 749934 - protein, 14 aa, Homo sapiens
  CDR3 for beta chain variable domain of TCR clone 374967 (TRBV7-2, TRBJ1-2)
CARSQTGSNYGYTL

SEQ ID NO: 749935 - protein, 15 aa, Homo sapiens
  CDR3 for alpha chain variable domain of TCR clone 374968 (TRAV3, TRAJ13)
CAVRVYSGGYQKVTF

SEQ ID NO: 749936 - protein, 13 aa, Homo sapiens
  CDR3 for beta chain variable domain of TCR clone 374968 (TRBV19, TRBJ1-2)
CASSQGQVYGYTF

SEQ ID NO: 749937 - protein, 15 aa, Homo sapiens
  CDR3 for alpha chain variable domain of TCR clone 374969 (TRAV21, TRAJ37)
CAVRPTLSNTGKLIF

SEQ ID NO: 749938 - protein, 14 aa, Homo sapiens
  CDR3 for beta chain variable domain of TCR clone 374969 (TRBV4-2, TRBJ2-1)
CASGLDRAYNEQFF

SEQ ID NO: 749939 - protein, 12 aa, Homo sapiens
  CDR3 for alpha chain variable domain of TCR clone 374970 (TRAV21, TRAJ49)
CAVNDGGNQFYF

SEQ ID NO: 749940 - protein, 14 aa, Homo sapiens
  CDR3 for beta chain variable domain of TCR clone 374970 (TRBV7-9, TRBJ2-1)
CASSSDRGLDEQFF

SEQ ID NO: 749941 - protein, 15 aa, Homo sapiens
  CDR3 for alpha chain variable domain of TCR clone 374971 (TRAV13-1, TRAJ16)
CAARYQVARSCSLQG

SEQ ID NO: 749942 - protein, 13 aa, Homo sapiens
  CDR3 for beta chain variable domain of TCR clone 374971 (TRBV4-1, TRBJ2-1)
CASSQAGGDEQFF

SEQ ID NO: 749943 - protein, 15 aa, Homo sapiens
  CDR3 for alpha chain variable domain of TCR clone 374972 (TRAV38-1, TRAJ57)
CAFMDSQGGSEKLVF

SEQ ID NO: 749944 - protein, 13 aa, Homo sapiens
  CDR3 for beta chain variable domain of TCR clone 374972 (TRBV7-3, TRBJ2-5)
CASSIGFFETQYF

SEQ ID NO: 749945 - protein, 13 aa, Homo sapiens
  CDR3 for alpha chain variable domain of TCR clone 374973 (TRAV12-3, TRAJ53)
CAMPGGSNYKLTF

SEQ ID NO: 749946 - protein, 15 aa, Homo sapiens
  CDR3 for beta chain variable domain of TCR clone 374973 (TRBV2, TRBJ2-1)
CATQARLVMIGEQFF

SEQ ID NO: 749947 - protein, 13 aa, Homo sapiens
  CDR3 for alpha chain variable domain of TCR clone 374974 (TRAV8-1, TRAJ23)
CAWRDNQGGKLIF

SEQ ID NO: 749948 - protein, 13 aa, Homo sapiens
  CDR3 for beta chain variable domain of TCR clone 374974 (TRBV20-1, TRBJ2-7)
CSANHTSGYEQYF

SEQ ID NO: 749949 - protein, 15 aa, Homo sapiens
  CDR3 for alpha chain variable domain of TCR clone 374975 (TRAV27, TRAJ56)
CAGRDGTGANSKLTF

SEQ ID NO: 749950 - protein, 14 aa, Homo sapiens
  CDR3 for beta chain variable domain of TCR clone 374975 (TRBV19, TRBJ2-7)
CASTVQGRPYEQYF

SEQ ID NO: 749951 - protein, 12 aa, Homo sapiens
  CDR3 for alpha chain variable domain of TCR clone 374976 (TRAV26-2, TRAJ21)
CILKGNFNKFYF

SEQ ID NO: 749952 - protein, 14 aa, Homo sapiens
  CDR3 for beta chain variable domain of TCR clone 374976 (TRBV12-4, TRBJ1-1)
CASSLGTGGAEAFF

SEQ ID NO: 749953 - protein, 12 aa, Homo sapiens
  CDR3 for alpha chain variable domain of TCR clone 374977 (TRAV29/DV5, TRAJ34)
CAASGNTDKLIF

SEQ ID NO: 749954 - protein, 14 aa, Homo sapiens
  CDR3 for beta chain variable domain of TCR clone 374977 (TRBV11-2, TRBJ2-3)
CASSRLARTDTQYF

SEQ ID NO: 749955 - protein, 16 aa, Homo sapiens
  CDR3 for alpha chain variable domain of TCR clone 374978 (TRAV3, TRAJ5)
CAVRNLMDTGRRALTF

SEQ ID NO: 749956 - protein, 18 aa, Homo sapiens
  CDR3 for beta chain variable domain of TCR clone 374978 (TRBV11-2, TRBJ2-3)
CASSLGGASRGAPNTQYF

SEQ ID NO: 749957 - protein, 14 aa, Homo sapiens
  CDR3 for alpha chain variable domain of TCR clone 374979 (TRAV12-3, TRAJ10)
SHLPLPGGGKKLTF

SEQ ID NO: 749958 - protein, 13 aa, Homo sapiens
  CDR3 for beta chain variable domain of TCR clone 374979 (TRBV2, TRBJ1-6)
CADSGSYNSPLHF

SEQ ID NO: 749959 - protein, 14 aa, Homo sapiens
  CDR3 for alpha chain variable domain of TCR clone 374980 (TRAV8-3, TRAJ4)
CAVGAAGGYSKLIF

SEQ ID NO: 749960 - protein, 17 aa, Homo sapiens
  CDR3 for beta chain variable domain of TCR clone 374980 (TRBV13, TRBJ2-3)
CASSLSRVAGGRNTQYF

SEQ ID NO: 749961 - protein, 14 aa, Homo sapiens
  CDR3 for alpha chain variable domain of TCR clone 374981 (TRAV23/DV6, TRAJ39)
CAASIGNAGNMLTF

SEQ ID NO: 749962 - protein, 12 aa, Homo sapiens
  CDR3 for beta chain variable domain of TCR clone 374981 (TRBV20-1, TRBJ2-5)
CSVGTGCETQYF

SEQ ID NO: 749963 - protein, 12 aa, Homo sapiens
  CDR3 for alpha chain variable domain of TCR clone 374982 (TRAV21, TRAJ31)
CAVWGNNARLMI

SEQ ID NO: 749964 - protein, 16 aa, Homo sapiens
  CDR3 for beta chain variable domain of TCR clone 374982 (TRBV27, TRBJ2-5)
CASSYGPGGQKETQYF

SEQ ID NO: 749965 - protein, 18 aa, Homo sapiens
  CDR3 for alpha chain variable domain of TCR clone 374983 (TRAV21, TRAJ52)
CAVRPSPAGGTSYGKLTF

SEQ ID NO: 749966 - protein, 19 aa, Homo sapiens
  CDR3 for beta chain variable domain of TCR clone 374983 (TRBV5-7, TRBJ2-1)
CASSALRVTGTSVYNEQFF

SEQ ID NO: 749967 - protein, 13 aa, Homo sapiens
  CDR3 for alpha chain variable domain of TCR clone 374984 (TRAV12-2, TRAJ6)
CAVNVSRKLHTYI

SEQ ID NO: 749968 - protein, 16 aa, Homo sapiens
  CDR3 for beta chain variable domain of TCR clone 374984 (TRBV13, TRBJ2-2)
CASSPRTGEHTGELFF

SEQ ID NO: 749969 - protein, 12 aa, Homo sapiens
  CDR3 for alpha chain variable domain of TCR clone 374985 (TRAV29/DV5, TRAJ15)
CASNQAGTALTF

SEQ ID NO: 749970 - protein, 15 aa, Homo sapiens
  CDR3 for beta chain variable domain of TCR clone 374985 (TRBV11-2, TRBJ2-2)
CASSSDRVNAGELFF

SEQ ID NO: 749971 - protein, 14 aa, Homo sapiens
  CDR3 for alpha chain variable domain of TCR clone 374986 (TRAV1-2, TRAJ16)
CAVNRVSDGQKLLF

SEQ ID NO: 749972 - protein, 16 aa, Homo sapiens
  CDR3 for beta chain variable domain of TCR clone 374986 (TRBV12-4, TRBJ2-5)
CASSFFVRGRQETQYF

SEQ ID NO: 749973 - protein, 15 aa, Homo sapiens
  CDR3 for alpha chain variable domain of TCR clone 374987 (TRAV35, TRAJ40)
CAGQLGTSGTYTYIF

SEQ ID NO: 749974 - protein, 17 aa, Homo sapiens
  CDR3 for beta chain variable domain of TCR clone 374987 (TRBV13, TRBJ2-3)
CASSLSRVAGGRNTQYF

SEQ ID NO: 749975 - protein, 11 aa, Homo sapiens
  CDR3 for alpha chain variable domain of TCR clone 374988 (TRAV21, TRAJ11)
CAVNGYSTLTF

SEQ ID NO: 749976 - protein, 11 aa, Homo sapiens
  CDR3 for beta chain variable domain of TCR clone 374988 (TRBV19, TRBJ1-1)
CESGIGSEDLF

SEQ ID NO: 749977 - protein, 18 aa, Homo sapiens
  CDR3 for alpha chain variable domain of TCR clone 374989 (TRAV13-1, TRAJ52)
FAASKRSAGGTSYGKLTF

SEQ ID NO: 749978 - protein, 13 aa, Homo sapiens
  CDR3 for beta chain variable domain of TCR clone 374989 (TRBV7-3, TRBJ1-1)
CASSQDWGAEAFF

SEQ ID NO: 749979 - protein, 14 aa, Homo sapiens
  CDR3 for alpha chain variable domain of TCR clone 374990 (TRAV26-1, TRAJ58)
CIVRVETSGSRLTF

SEQ ID NO: 749980 - protein, 17 aa, Homo sapiens
  CDR3 for beta chain variable domain of TCR clone 374990 (TRBV11-2, TRBJ2-1)
CASSLYPPGVEYSEQFF

SEQ ID NO: 749981 - protein, 21 aa, Homo sapiens
  CDR3 for alpha chain variable domain of TCR clone 374991 (TRAV17, TRAJ7)
CATLGRLAFGRGTKWWSYQIS

SEQ ID NO: 749982 - protein, 13 aa, Homo sapiens
  CDR3 for beta chain variable domain of TCR clone 374991 (TRBV12-4, TRBJ2-7)
CASSLERVREQYF

SEQ ID NO: 749983 - protein, 15 aa, Homo sapiens
  CDR3 for alpha chain variable domain of TCR clone 374992 (TRAV29/DV5, TRAJ53)
CAVSSSGGSNYKMTF

SEQ ID NO: 749984 - protein, 17 aa, Homo sapiens
  CDR3 for beta chain variable domain of TCR clone 374992 (TRBV4-1, TRBJ1-6)
CASSQDRNRDYNSALHF

SEQ ID NO: 749985 - protein, 11 aa, Homo sapiens
  CDR3 for alpha chain variable domain of TCR clone 374993 (TRAV20, TRAJ40)
CAVGGTYKYSF

SEQ ID NO: 749986 - protein, 15 aa, Homo sapiens
  CDR3 for beta chain variable domain of TCR clone 374993 (TRBV6-3, TRBJ2-2)
CASSFLATLAGELFF

SEQ ID NO: 749987 - protein, 13 aa, Homo sapiens
  CDR3 for alpha chain variable domain of TCR clone 374994 (TRAV20, TRAJ21)
CALEGYNFNKFYF

SEQ ID NO: 749988 - protein, 14 aa, Homo sapiens
  CDR3 for beta chain variable domain of TCR clone 374994 (TRBV3-1, TRBJ2-5)
CASSQGPDQETQYF

SEQ ID NO: 749989 - protein, 12 aa, Homo sapiens
  CDR3 for alpha chain variable domain of TCR clone 374995 (TRAV23/DV6, TRAJ17)
CAAKAAGNKLTF

SEQ ID NO: 749990 - protein, 12 aa, Homo sapiens
  CDR3 for beta chain variable domain of TCR clone 374995 (TRBV7-8, TRBJ2-7)
CASSLGDREQYF

SEQ ID NO: 749991 - protein, 12 aa, Homo sapiens
  CDR3 for alpha chain variable domain of TCR clone 374996 (TRAV17, TRAJ12)
CAGGDSSYKLIF

SEQ ID NO: 749992 - protein, 12 aa, Homo sapiens
  CDR3 for beta chain variable domain of TCR clone 374996 (TRBV29-1, TRBJ1-1)
CSEADGNTEAFF

SEQ ID NO: 749993 - protein, 14 aa, Homo sapiens
  CDR3 for alpha chain variable domain of TCR clone 374997 (TRAV26-2, TRAJ38)
CILYNAGNNRRLIW

SEQ ID NO: 749994 - protein, 14 aa, Homo sapiens
  CDR3 for beta chain variable domain of TCR clone 374997 (TRBV19, TRBJ2-1)
CASPTFVLSGEQFF

SEQ ID NO: 749995 - protein, 13 aa, Homo sapiens
  CDR3 for alpha chain variable domain of TCR clone 374998 (TRAV2, TRAJ40)
CAVVPSGTYKYIF

SEQ ID NO: 749996 - protein, 14 aa, Homo sapiens
  CDR3 for beta chain variable domain of TCR clone 374998 (TRBV19, TRBJ2-1)
CASPAFVLSGEQFF

SEQ ID NO: 749997 - protein, 14 aa, Homo sapiens
  CDR3 for alpha chain variable domain of TCR clone 374999 (TRAV20, TRAJ42)
CAVQAGGSQGNLIF

SEQ ID NO: 749998 - protein, 16 aa, Homo sapiens
  CDR3 for beta chain variable domain of TCR clone 374999 (TRBV7-3, TRBJ2-1)
CASSLEGYRSYNEQFF

SEQ ID NO: 749999 - protein, 13 aa, Homo sapiens
  CDR3 for alpha chain variable domain of TCR clone 375000 (TRAV36/DV7, TRAJ37)
CAVFSSNTGKLIF

SEQ ID NO: 750000 - protein, 14 aa, Homo sapiens
  CDR3 for beta chain variable domain of TCR clone 375000 (TRBV7-2, TRBJ2-7)
CASRSQGAAYEQYF

SEQ ID NO: 750001 - protein, 14 aa, Homo sapiens
  CDR3 for alpha chain variable domain of TCR clone 375001 (TRAV20, TRAJ10)
CAVRVEGGGNKLTF

SEQ ID NO: 750002 - protein, 18 aa, Homo sapiens
  CDR3 for beta chain variable domain of TCR clone 375001 (TRBV24-1, TRBJ2-1)
CATSDLTFLGRGVHEQFF

SEQ ID NO: 750003 - protein, 11 aa, Homo sapiens
  CDR3 for alpha chain variable domain of TCR clone 375002 (TRAV1-1, TRAJ23)
CAVRQGGRLIF

SEQ ID NO: 750004 - protein, 14 aa, Homo sapiens
  CDR3 for beta chain variable domain of TCR clone 375002 (TRBV7-8, TRBJ2-3)
CASSLEAGTDTQYF

SEQ ID NO: 750005 - protein, 14 aa, Homo sapiens
  CDR3 for alpha chain variable domain of TCR clone 375003 (TRAV8-1, TRAJ15)
CAVNGQQAGTALIF

SEQ ID NO: 750006 - protein, 14 aa, Homo sapiens
  CDR3 for beta chain variable domain of TCR clone 375003 (TRBV18, TRBJ2-5)
CASSPGVSQETQYF

SEQ ID NO: 750007 - protein, 16 aa, Homo sapiens
  CDR3 for alpha chain variable domain of TCR clone 375004 (TRAV12-3, TRAJ53)
CAMSAGSGGSKYKLTF

SEQ ID NO: 750008 - protein, 13 aa, Homo sapiens
  CDR3 for beta chain variable domain of TCR clone 375004 (TRBV29-1, TRBJ2-3)
CSVGPRGTDTQYF

SEQ ID NO: 750009 - protein, 11 aa, Homo sapiens
  CDR3 for alpha chain variable domain of TCR clone 375005 (TRAV13-2, TRAJ54)
RAVQGAQKLVF

SEQ ID NO: 750010 - protein, 15 aa, Homo sapiens
  CDR3 for beta chain variable domain of TCR clone 375005 (TRBV7-3, TRBJ2-3)
CASSLGLTLGDTQYF

SEQ ID NO: 750011 - protein, 14 aa, Homo sapiens
  CDR3 for alpha chain variable domain of TCR clone 375006 (TRAV12-2, TRAJ40)
CAVKIPSGTYKYIF

SEQ ID NO: 750012 - protein, 18 aa, Homo sapiens
  CDR3 for beta chain variable domain of TCR clone 375006 (TRBV20-1, TRBJ2-6)
CSAETTTTHGSGANVLTF

SEQ ID NO: 750013 - protein, 14 aa, Homo sapiens
  CDR3 for alpha chain variable domain of TCR clone 375007 (TRAV14/DV4, TRAJ54)
YAMREAPGAQKRVF

SEQ ID NO: 750014 - protein, 15 aa, Homo sapiens
  CDR3 for beta chain variable domain of TCR clone 375007 (TRBV5-1, TRBJ2-7)
CASSLNGGPAREQYF

SEQ ID NO: 750015 - protein, 19 aa, Homo sapiens
  CDR3 for alpha chain variable domain of TCR clone 375008 (TRAV2, TRAJ20)
ILQVREADAAVYRDCKLSF

SEQ ID NO: 750016 - protein, 13 aa, Homo sapiens
  CDR3 for beta chain variable domain of TCR clone 375008 (TRBV20-1, TRBJ2-7)
CASQSYGAGEQYF

SEQ ID NO: 750017 - protein, 11 aa, Homo sapiens
  CDR3 for alpha chain variable domain of TCR clone 375009 (TRAV29/DV5, TRAJ31)
CAAMNNARLMF

SEQ ID NO: 750018 - protein, 17 aa, Homo sapiens
  CDR3 for beta chain variable domain of TCR clone 375009 (TRBV10-1, TRBJ2-1)
CASSPQRAGGPFNEQFF

SEQ ID NO: 750019 - protein, 13 aa, Homo sapiens
  CDR3 for alpha chain variable domain of TCR clone 375010 (TRAV12-2, TRAJ49)
CAVNLNTGNQFYF

SEQ ID NO: 750020 - protein, 14 aa, Homo sapiens
  CDR3 for beta chain variable domain of TCR clone 375010 (TRBV7-8, TRBJ2-7)
CASSPRDRVYEQYF

SEQ ID NO: 750021 - protein, 14 aa, Homo sapiens
  CDR3 for alpha chain variable domain of TCR clone 375011 (TRAV8-6, TRAJ48)
CAVSESFGNEKLTF

SEQ ID NO: 750022 - protein, 15 aa, Homo sapiens
  CDR3 for beta chain variable domain of TCR clone 375011 (TRBV5-1, TRBJ1-4)
CASSTVGTRDEKLFF

SEQ ID NO: 750023 - protein, 13 aa, Homo sapiens
  CDR3 for alpha chain variable domain of TCR clone 375012 (TRAV2, TRAJ40)
CAVVTSVTYKYIF

SEQ ID NO: 750024 - protein, 15 aa, Homo sapiens
  CDR3 for beta chain variable domain of TCR clone 375012 (TRBV18, TRBJ1-1)
CASSPRQGENTEAFF

SEQ ID NO: 750025 - protein, 13 aa, Homo sapiens
  CDR3 for alpha chain variable domain of TCR clone 375013 (TRAV26-1, TRAJ40)
CIVATSGTYKYIF

SEQ ID NO: 750026 - protein, 16 aa, Homo sapiens
  CDR3 for beta chain variable domain of TCR clone 375013 (TRBV7-2, TRBJ2-2)
CARSLYRGPNTGELFF

SEQ ID NO: 750027 - protein, 17 aa, Homo sapiens
  CDR3 for alpha chain variable domain of TCR clone 375014 (TRAV3, TRAJ6)
CAVRDGPRAGGSYIPTF

SEQ ID NO: 750028 - protein, 17 aa, Homo sapiens
  CDR3 for beta chain variable domain of TCR clone 375014 (TRBV27, TRBJ2-6)
CASSLTGYASGANVLTF

SEQ ID NO: 750029 - protein, 13 aa, Homo sapiens
  CDR3 for alpha chain variable domain of TCR clone 375015 (TRAV12-1, TRAJ34)
CLVTGYNTDKLIF

SEQ ID NO: 750030 - protein, 16 aa, Homo sapiens
  CDR3 for beta chain variable domain of TCR clone 375015 (TRBV28, TRBJ2-7)
CTSVPAKRGGVYEQYF

SEQ ID NO: 750031 - protein, 23 aa, Homo sapiens
  CDR3 for alpha chain variable domain of TCR clone 375016 (TRAV26-1, TRAJ38)
CIADNAGNNHIQNPDPAVYQLRD

SEQ ID NO: 750032 - protein, 14 aa, Homo sapiens
  CDR3 for beta chain variable domain of TCR clone 375016 (TRBV7-9, TRBJ2-2)
CASSLVQDTGELFF

SEQ ID NO: 750033 - protein, 16 aa, Homo sapiens
  CDR3 for alpha chain variable domain of TCR clone 375017 (TRAV1-2, TRAJ10)
CAVRGVVTGGGNKLTF

SEQ ID NO: 750034 - protein, 13 aa, Homo sapiens
  CDR3 for beta chain variable domain of TCR clone 375017 (TRBV10-3, TRBJ2-7)
CASKLAVNYEQYF

SEQ ID NO: 750035 - protein, 12 aa, Homo sapiens
  CDR3 for alpha chain variable domain of TCR clone 375018 (TRAV13-1, TRAJ21)
CASKEGFNKFYF

SEQ ID NO: 750036 - protein, 16 aa, Homo sapiens
  CDR3 for beta chain variable domain of TCR clone 375018 (TRBV12-4, TRBJ1-4)
CASSLKGIGHGEKLFF

SEQ ID NO: 750037 - protein, 14 aa, Homo sapiens
  CDR3 for alpha chain variable domain of TCR clone 375019 (TRAV1-2, TRAJ8)
CAVREDTGFQKLVF

SEQ ID NO: 750038 - protein, 14 aa, Homo sapiens
  CDR3 for beta chain variable domain of TCR clone 375019 (TRBV5-4, TRBJ1-1)
CASSFDSRRDEAFF

SEQ ID NO: 750039 - protein, 12 aa, Homo sapiens
  CDR3 for alpha chain variable domain of TCR clone 375020 (TRAV16, TRAJ10)
CTRTGGGNKLAF

SEQ ID NO: 750040 - protein, 15 aa, Homo sapiens
  CDR3 for beta chain variable domain of TCR clone 375020 (TRBV6-3, TRBJ2-7)
CASSSPGTVFYEQYF

SEQ ID NO: 750041 - protein, 23 aa, Homo sapiens
  CDR3 for alpha chain variable domain of TCR clone 375021 (TRAV13-2, TRAJ6)
CAEEVHHEEATYLHLEEEPALLF

SEQ ID NO: 750042 - protein, 13 aa, Homo sapiens
  CDR3 for beta chain variable domain of TCR clone 375021 (TRBV9, TRBJ2-7)
CASSVAEYYEQYF

SEQ ID NO: 750043 - protein, 12 aa, Homo sapiens
  CDR3 for alpha chain variable domain of TCR clone 375022 (TRAV12-3, TRAJ20)
GAMVRGDYKLSF

SEQ ID NO: 750044 - protein, 11 aa, Homo sapiens
  CDR3 for beta chain variable domain of TCR clone 375022 (TRBV19, TRBJ1-1)
CASSIGGEAFF

SEQ ID NO: 750045 - protein, 14 aa, Homo sapiens
  CDR3 for alpha chain variable domain of TCR clone 375023 (TRAV30, TRAJ33)
CGTVAPRSNYQLIW

SEQ ID NO: 750046 - protein, 15 aa, Homo sapiens
  CDR3 for beta chain variable domain of TCR clone 375023 (TRBV19, TRBJ1-5)
CASSIVWADNQPQHF

SEQ ID NO: 750047 - protein, 14 aa, Homo sapiens
  CDR3 for alpha chain variable domain of TCR clone 375024 (TRAV38-2/DV8, TRAJ30)
CAYMDGLGGDKIIF

SEQ ID NO: 750048 - protein, 15 aa, Homo sapiens
  CDR3 for beta chain variable domain of TCR clone 375024 (TRBV7-9, TRBJ2-2)
CASRPTDRDTGELFF

SEQ ID NO: 750049 - protein, 15 aa, Homo sapiens
  CDR3 for alpha chain variable domain of TCR clone 375025 (TRAV12-1, TRAJ45)
CVVLSGRGGTDGLTF

SEQ ID NO: 750050 - protein, 13 aa, Homo sapiens
  CDR3 for beta chain variable domain of TCR clone 375025 (TRBV7-3, TRBJ1-1)
CASSQDWGAEAFF

SEQ ID NO: 750051 - protein, 14 aa, Homo sapiens
  CDR3 for alpha chain variable domain of TCR clone 375026 (TRAV1-2, TRAJ16)
CAVNRFSDGQKLLF

SEQ ID NO: 750052 - protein, 15 aa, Homo sapiens
  CDR3 for beta chain variable domain of TCR clone 375026 (TRBV7-9, TRBJ1-4)
CASSARTGGNENLFF

SEQ ID NO: 750053 - protein, 14 aa, Homo sapiens
  CDR3 for alpha chain variable domain of TCR clone 375027 (TRAV2, TRAJ37)
CAVDCTSNTGKLSF

SEQ ID NO: 750054 - protein, 15 aa, Homo sapiens
  CDR3 for beta chain variable domain of TCR clone 375027 (TRBV20-1, TRBJ1-1)
CSASRGVTGNTEAFF

SEQ ID NO: 750055 - protein, 14 aa, Homo sapiens
  CDR3 for alpha chain variable domain of TCR clone 375028 (TRAV8-1, TRAJ23)
CAVGTYNQGGKLMF

SEQ ID NO: 750056 - protein, 16 aa, Homo sapiens
  CDR3 for beta chain variable domain of TCR clone 375028 (TRBV18, TRBJ1-5)
CASSPSTGNSNQPQHS

SEQ ID NO: 750057 - protein, 13 aa, Homo sapiens
  CDR3 for alpha chain variable domain of TCR clone 375029 (TRAV27, TRAJ49)
CAPRPYTGNQFYF

SEQ ID NO: 750058 - protein, 16 aa, Homo sapiens
  CDR3 for beta chain variable domain of TCR clone 375029 (TRBV4-1, TRBJ1-2)
CASRQDAGQVLYGYTF

SEQ ID NO: 750059 - protein, 13 aa, Homo sapiens
  CDR3 for alpha chain variable domain of TCR clone 375030 (TRAV35, TRAJ33)
CAGQLDGVYQLIW

SEQ ID NO: 750060 - protein, 14 aa, Homo sapiens
  CDR3 for beta chain variable domain of TCR clone 375030 (TRBV7-2, TRBJ1-1)
CASSLGGAGTEAFF

SEQ ID NO: 750061 - protein, 11 aa, Homo sapiens
  CDR3 for alpha chain variable domain of TCR clone 375031 (TRAV26-1, TRAJ37)
CIVRVGRKLIF

SEQ ID NO: 750062 - protein, 12 aa, Homo sapiens
  CDR3 for beta chain variable domain of TCR clone 375031 (TRBV5-5, TRBJ2-5)
CASSYFGETQYF

SEQ ID NO: 750063 - protein, 13 aa, Homo sapiens
  CDR3 for alpha chain variable domain of TCR clone 375032 (TRAV21, TRAJ20)
CAVGMRGDYKLSF

SEQ ID NO: 750064 - protein, 13 aa, Homo sapiens
  CDR3 for beta chain variable domain of TCR clone 375032 (TRBV6-1, TRBJ1-1)
CASSREGNTEAFF

SEQ ID NO: 750065 - protein, 14 aa, Homo sapiens
  CDR3 for alpha chain variable domain of TCR clone 375033 (TRAV13-2, TRAJ32)
CAENYGGATNKLIF

SEQ ID NO: 750066 - protein, 15 aa, Homo sapiens
  CDR3 for beta chain variable domain of TCR clone 375033 (TRBV12-4, TRBJ2-5)
CASTLNSGRRETQYF

SEQ ID NO: 750067 - protein, 14 aa, Homo sapiens
  CDR3 for alpha chain variable domain of TCR clone 375034 (TRAV13-1, TRAJ3)
CAASKRSSASKIIF

SEQ ID NO: 750068 - protein, 16 aa, Homo sapiens
  CDR3 for beta chain variable domain of TCR clone 375034 (TRBV15, TRBJ2-3)
CATSRDLGIVTDTQYF

SEQ ID NO: 750069 - protein, 14 aa, Homo sapiens
  CDR3 for alpha chain variable domain of TCR clone 375035 (TRAV1-2, TRAJ8)
CAVREDTGFQKLVF

SEQ ID NO: 750070 - protein, 15 aa, Homo sapiens
  CDR3 for beta chain variable domain of TCR clone 375035 (TRBV4-1, TRBJ2-7)
CAGSQNAGRLYEQYF

SEQ ID NO: 750071 - protein, 14 aa, Homo sapiens
  CDR3 for alpha chain variable domain of TCR clone 375036 (TRAV17, TRAJ34)
CATDSLEGTDKLIF

SEQ ID NO: 750072 - protein, 13 aa, Homo sapiens
  CDR3 for beta chain variable domain of TCR clone 375036 (TRBV11-3, TRBJ2-7)
CASSGTRPYEQYL

SEQ ID NO: 750073 - protein, 18 aa, Homo sapiens
  CDR3 for alpha chain variable domain of TCR clone 375037 (TRAV8-6, TRAJ52)
CAVSRVGAGGTSYGKLTF

SEQ ID NO: 750074 - protein, 14 aa, Homo sapiens
  CDR3 for beta chain variable domain of TCR clone 375037 (TRBV28, TRBJ2-1)
CASSRPGLRDEQFF

SEQ ID NO: 750075 - protein, 17 aa, Homo sapiens
  CDR3 for alpha chain variable domain of TCR clone 375038 (TRAV3, TRAJ38)
CAVRDCLNAGNNRKLIW

SEQ ID NO: 750076 - protein, 14 aa, Homo sapiens
  CDR3 for beta chain variable domain of TCR clone 375038 (TRBV7-2, TRBJ2-7)
CATRSQGAAYEQYF

SEQ ID NO: 750077 - protein, 14 aa, Homo sapiens
  CDR3 for alpha chain variable domain of TCR clone 375039 (TRAV21, TRAJ32)
CCGDYGGATKKLIF

SEQ ID NO: 750078 - protein, 15 aa, Homo sapiens
  CDR3 for beta chain variable domain of TCR clone 375039 (TRBV9, TRBJ1-6)
CASSVAGTGDSPLHF

SEQ ID NO: 750079 - protein, 18 aa, Homo sapiens
  CDR3 for alpha chain variable domain of TCR clone 375040 (TRAV12-3, TRAJ52)
CAMSRTNAGGTSYGKLTF

SEQ ID NO: 750080 - protein, 17 aa, Homo sapiens
  CDR3 for beta chain variable domain of TCR clone 375040 (TRBV7-3, TRBJ2-3)
CDSSLMKRMRGADTQYF

SEQ ID NO: 750081 - protein, 10 aa, Homo sapiens
  CDR3 for alpha chain variable domain of TCR clone 375041 (TRAV1-2, TRAJ23)
CAGQGGKLIF

SEQ ID NO: 750082 - protein, 14 aa, Homo sapiens
  CDR3 for beta chain variable domain of TCR clone 375041 (TRBV12-4, TRBJ1-6)
CASNLQGKGSPLHF

SEQ ID NO: 750083 - protein, 14 aa, Homo sapiens
  CDR3 for alpha chain variable domain of TCR clone 375042 (TRAV2, TRAJ22)
CAVGRGGSARQLTF

SEQ ID NO: 750084 - protein, 16 aa, Homo sapiens
  CDR3 for beta chain variable domain of TCR clone 375042 (TRBV28, TRBJ1-4)
CASSSRTGAANEKLFF

SEQ ID NO: 750085 - protein, 13 aa, Homo sapiens
  CDR3 for alpha chain variable domain of TCR clone 375043 (TRAV12-3, TRAJ7)
CAMSASGNNRLAF

SEQ ID NO: 750086 - protein, 12 aa, Homo sapiens
  CDR3 for beta chain variable domain of TCR clone 375043 (TRBV5-7, TRBJ1-1)
CASSLGRGKAFF

SEQ ID NO: 750087 - protein, 14 aa, Homo sapiens
  CDR3 for alpha chain variable domain of TCR clone 375044 (TRAV16, TRAJ8)
CSLLLNAGFQKLVF

SEQ ID NO: 750088 - protein, 15 aa, Homo sapiens
  CDR3 for beta chain variable domain of TCR clone 375044 (TRBV7-7, TRBJ2-2)
CATSKLAKNTGELFF

SEQ ID NO: 750089 - protein, 12 aa, Homo sapiens
  CDR3 for alpha chain variable domain of TCR clone 375045 (TRAV12-3, TRAJ17)
CAMTLTGNKLTF

SEQ ID NO: 750090 - protein, 13 aa, Homo sapiens
  CDR3 for beta chain variable domain of TCR clone 375045 (TRBV10-3, TRBJ2-7)
CAAKLAVNYEQYF

SEQ ID NO: 750091 - protein, 14 aa, Homo sapiens
  CDR3 for alpha chain variable domain of TCR clone 375046 (TRAV13-1, TRAJ9)
CAASALTGGFKTIF

SEQ ID NO: 750092 - protein, 14 aa, Homo sapiens
  CDR3 for beta chain variable domain of TCR clone 375046 (TRBV12-4, TRBJ1-3)
CASTLTGAGNTIYF

SEQ ID NO: 750093 - protein, 15 aa, Homo sapiens
  CDR3 for alpha chain variable domain of TCR clone 375047 (TRAV12-2, TRAJ43)
CAFDMRFGAGTRLTV

SEQ ID NO: 750094 - protein, 14 aa, Homo sapiens
  CDR3 for beta chain variable domain of TCR clone 375047 (TRBV7-9, TRBJ2-1)
CASSSMVGFGEQFF

SEQ ID NO: 750095 - protein, 11 aa, Homo sapiens
  CDR3 for alpha chain variable domain of TCR clone 375048 (TRAV2, TRAJ13)
CASGGYQKVTF

SEQ ID NO: 750096 - protein, 15 aa, Homo sapiens
  CDR3 for beta chain variable domain of TCR clone 375048 (TRBV6-5, TRBJ2-1)
CASSKGLAGNNEQFF

SEQ ID NO: 750097 - protein, 11 aa, Homo sapiens
  CDR3 for alpha chain variable domain of TCR clone 375049 (TRAV29/DV5, TRAJ49)
CAAVPGNQFYF

SEQ ID NO: 750098 - protein, 16 aa, Homo sapiens
  CDR3 for beta chain variable domain of TCR clone 375049 (TRBV20-1, TRBJ1-4)
CSAPGQGLLTNEKLFF

SEQ ID NO: 750099 - protein, 12 aa, Homo sapiens
  CDR3 for alpha chain variable domain of TCR clone 375050 (TRAV12-3, TRAJ17)
CAMTLTGNKLTF

SEQ ID NO: 750100 - protein, 15 aa, Homo sapiens
  CDR3 for beta chain variable domain of TCR clone 375050 (TRBV20-1, TRBJ2-7)
CSARYRVSWMDEQYF

SEQ ID NO: 750101 - protein, 14 aa, Homo sapiens
  CDR3 for alpha chain variable domain of TCR clone 375051 (TRAV1-2, TRAJ16)
CAVNRFSDGQKLLF

SEQ ID NO: 750102 - protein, 15 aa, Homo sapiens
  CDR3 for beta chain variable domain of TCR clone 375051 (TRBV5-7, TRBJ2-1)
CASSLTGQVYNEQFF

SEQ ID NO: 750103 - protein, 15 aa, Homo sapiens
  CDR3 for alpha chain variable domain of TCR clone 375052 (TRAV14/DV4, TRAJ12)
CAMREERDSSYKLIF

SEQ ID NO: 750104 - protein, 14 aa, Homo sapiens
  CDR3 for beta chain variable domain of TCR clone 375052 (TRBV7-3, TRBJ2-2)
CASSSGGYTGELFF

SEQ ID NO: 750105 - protein, 14 aa, Homo sapiens
  CDR3 for alpha chain variable domain of TCR clone 375053 (TRAV1-1, TRAJ28)
CAVNSGAGSYQLTF

SEQ ID NO: 750106 - protein, 16 aa, Homo sapiens
  CDR3 for beta chain variable domain of TCR clone 375053 (TRBV7-7, TRBJ2-1)
CASSLASGTSYNEQFF

SEQ ID NO: 750107 - protein, 15 aa, Homo sapiens
  CDR3 for alpha chain variable domain of TCR clone 375054 (TRAV17, TRAJ45)
TSVLRTGGGADGLTF

SEQ ID NO: 750108 - protein, 13 aa, Homo sapiens
  CDR3 for beta chain variable domain of TCR clone 375054 (TRBV7-9, TRBJ2-3)
CASSPGSTDTQYF

SEQ ID NO: 750109 - protein, 15 aa, Homo sapiens
  CDR3 for alpha chain variable domain of TCR clone 375055 (TRAV12-2, TRAJ50)
CAVNGLETSYDKVIF

SEQ ID NO: 750110 - protein, 16 aa, Homo sapiens
  CDR3 for beta chain variable domain of TCR clone 375055 (TRBV5-4, TRBJ2-3)
CASRQPGAGGADTQYF

SEQ ID NO: 750111 - protein, 12 aa, Homo sapiens
  CDR3 for alpha chain variable domain of TCR clone 375056 (TRAV29/DV5, TRAJ49)
CAATDTGNQFYF

SEQ ID NO: 750112 - protein, 12 aa, Homo sapiens
  CDR3 for beta chain variable domain of TCR clone 375056 (TRBV28, TRBJ2-1)
CASSVQINEQFF

SEQ ID NO: 750113 - protein, 13 aa, Homo sapiens
  CDR3 for alpha chain variable domain of TCR clone 375057 (TRAV8-3, TRAJ28)
CAVGAAGSYQLTF

SEQ ID NO: 750114 - protein, 13 aa, Homo sapiens
  CDR3 for beta chain variable domain of TCR clone 375057 (TRBV19, TRBJ1-2)
CASSVPGQDGYTF

SEQ ID NO: 750115 - protein, 14 aa, Homo sapiens
  CDR3 for alpha chain variable domain of TCR clone 375058 (TRAV8-4, TRAJ13)
CAVTLCGGYQKVTF

SEQ ID NO: 750116 - protein, 14 aa, Homo sapiens
  CDR3 for beta chain variable domain of TCR clone 375058 (TRBV7-2, TRBJ1-2)
CASSQTGSTYGYTF

SEQ ID NO: 750117 - protein, 11 aa, Homo sapiens
  CDR3 for alpha chain variable domain of TCR clone 375059 (TRAV1-1, TRAJ23)
CAVRQGGKLIF

SEQ ID NO: 750118 - protein, 14 aa, Homo sapiens
  CDR3 for beta chain variable domain of TCR clone 375059 (TRBV7-6, TRBJ1-6)
CASSQAGGGSPLHF

SEQ ID NO: 750119 - protein, 15 aa, Homo sapiens
  CDR3 for alpha chain variable domain of TCR clone 375060 (TRAV8-3, TRAJ27)
RAVGPSKTNAGKSTF

SEQ ID NO: 750120 - protein, 15 aa, Homo sapiens
  CDR3 for beta chain variable domain of TCR clone 375060 (TRBV9, TRBJ1-6)
CASSVAGTGDSPLHF

SEQ ID NO: 750121 - protein, 16 aa, Homo sapiens
  CDR3 for alpha chain variable domain of TCR clone 375061 (TRAV21, TRAJ45)
CAVTMYSGGGADGLTF

SEQ ID NO: 750122 - protein, 12 aa, Homo sapiens
  CDR3 for beta chain variable domain of TCR clone 375061 (TRBV7-8, TRBJ2-7)
CASSLGDREQYF

SEQ ID NO: 750123 - protein, 15 aa, Homo sapiens
  CDR3 for alpha chain variable domain of TCR clone 375062 (TRAV34, TRAJ38)
CGADFTPGNNRKLNW

SEQ ID NO: 750124 - protein, 10 aa, Homo sapiens
  CDR3 for beta chain variable domain of TCR clone 375062 (TRBV6-3, TRBJ2-2)
CASRDGELFF

SEQ ID NO: 750125 - protein, 14 aa, Homo sapiens
  CDR3 for alpha chain variable domain of TCR clone 375063 (TRAV1-2, TRAJ16)
CAVNRFSDGQKLLF

SEQ ID NO: 750126 - protein, 16 aa, Homo sapiens
  CDR3 for beta chain variable domain of TCR clone 375063 (TRBV13, TRBJ2-2)
CASSPRTGVHTGELFF

SEQ ID NO: 750127 - protein, 15 aa, Homo sapiens
  CDR3 for alpha chain variable domain of TCR clone 375064 (TRAV21, TRAJ18)
CAVRDRGSTLGSLYF

SEQ ID NO: 750128 - protein, 17 aa, Homo sapiens
  CDR3 for beta chain variable domain of TCR clone 375064 (TRBV7-2, TRBJ2-3)
CASSSYSGTRRADTQYF

SEQ ID NO: 750129 - protein, 13 aa, Homo sapiens
  CDR3 for alpha chain variable domain of TCR clone 375065 (TRAV27, TRAJ41)
CAGEGTSGYALTF

SEQ ID NO: 750130 - protein, 14 aa, Homo sapiens
  CDR3 for beta chain variable domain of TCR clone 375065 (TRBV7-2, TRBJ1-1)
CASSFLTGTTEAFF

SEQ ID NO: 750131 - protein, 13 aa, Homo sapiens
  CDR3 for alpha chain variable domain of TCR clone 375066 (TRAV2, TRAJ13)
TTVLPGGYQKVTF

SEQ ID NO: 750132 - protein, 14 aa, Homo sapiens
  CDR3 for beta chain variable domain of TCR clone 375066 (TRBV6-1, TRBJ1-3)
CASVQGGGGNTIYF

SEQ ID NO: 750133 - protein, 16 aa, Homo sapiens
  CDR3 for alpha chain variable domain of TCR clone 375067 (TRAV3, TRAJ21)
CAVRDIERGNFNKFYF

SEQ ID NO: 750134 - protein, 14 aa, Homo sapiens
  CDR3 for beta chain variable domain of TCR clone 375067 (TRBV7-9, TRBJ2-7)
CASSLEAVGDEQYF

SEQ ID NO: 750135 - protein, 12 aa, Homo sapiens
  CDR3 for alpha chain variable domain of TCR clone 375068 (TRAV13-1, TRAJ21)
CAAKEGFNKFYF

SEQ ID NO: 750136 - protein, 14 aa, Homo sapiens
  CDR3 for beta chain variable domain of TCR clone 375068 (TRBV18, TRBJ2-7)
CASSLRGGAYEQYF

SEQ ID NO: 750137 - protein, 15 aa, Homo sapiens
  CDR3 for alpha chain variable domain of TCR clone 375069 (TRAV3, TRAJ5)
CVVRDLDTVRRALTF

SEQ ID NO: 750138 - protein, 13 aa, Homo sapiens
  CDR3 for beta chain variable domain of TCR clone 375069 (TRBV12-4, TRBJ2-7)
CASSPTETYEQYF

SEQ ID NO: 750139 - protein, 12 aa, Homo sapiens
  CDR3 for alpha chain variable domain of TCR clone 375070 (TRAV30, TRAJ43)
CGTEERGNDMRF

SEQ ID NO: 750140 - protein, 14 aa, Homo sapiens
  CDR3 for beta chain variable domain of TCR clone 375070 (TRBV15, TRBJ2-5)
CATSSTGYQETQYF

SEQ ID NO: 750141 - protein, 13 aa, Homo sapiens
  CDR3 for alpha chain variable domain of TCR clone 375071 (TRAV21, TRAJ27)
CAARPGNAGKSTF

SEQ ID NO: 750142 - protein, 14 aa, Homo sapiens
  CDR3 for beta chain variable domain of TCR clone 375071 (TRBV11-2, TRBJ2-7)
CASSLGAGACEQYF

SEQ ID NO: 750143 - protein, 10 aa, Homo sapiens
  CDR3 for alpha chain variable domain of TCR clone 375072 (TRAV1-2, TRAJ20)
CACNDYKLSV

SEQ ID NO: 750144 - protein, 15 aa, Homo sapiens
  CDR3 for beta chain variable domain of TCR clone 375072 (TRBV5-1, TRBJ2-3)
CASSVTSGSTDTQYF

SEQ ID NO: 750145 - protein, 11 aa, Homo sapiens
  CDR3 for alpha chain variable domain of TCR clone 375073 (TRAV1-2, TRAJ11)
CAVRGYSTLTF

SEQ ID NO: 750146 - protein, 14 aa, Homo sapiens
  CDR3 for beta chain variable domain of TCR clone 375073 (TRBV12-4, TRBJ2-3)
CASSLGQGTDTQYF

SEQ ID NO: 750147 - protein, 11 aa, Homo sapiens
  CDR3 for alpha chain variable domain of TCR clone 375074 (TRAV2, TRAJ13)
CASGGYQKVTF

SEQ ID NO: 750148 - protein, 12 aa, Homo sapiens
  CDR3 for beta chain variable domain of TCR clone 375074 (TRBV20-1, TRBJ1-1)
QYSTWGGTEAFF

SEQ ID NO: 750149 - protein, 13 aa, Homo sapiens
  CDR3 for alpha chain variable domain of TCR clone 375075 (TRAV29/DV5, TRAJ31)
CAASRNNNARLMF

SEQ ID NO: 750150 - protein, 14 aa, Homo sapiens
  CDR3 for beta chain variable domain of TCR clone 375075 (TRBV2, TRBJ2-3)
CASSEGQNTDTQYF

SEQ ID NO: 750151 - protein, 16 aa, Homo sapiens
  CDR3 for alpha chain variable domain of TCR clone 375076 (TRAV3, TRAJ10)
CAVRDMRSGGGNKLTF

SEQ ID NO: 750152 - protein, 15 aa, Homo sapiens
  CDR3 for beta chain variable domain of TCR clone 375076 (TRBV7-2, TRBJ1-5)
CASSRGQGDNQPQHF

SEQ ID NO: 750153 - protein, 15 aa, Homo sapiens
  CDR3 for alpha chain variable domain of TCR clone 375077 (TRAV3, TRAJ20)
CAVRDIKLSDSKLSF

SEQ ID NO: 750154 - protein, 13 aa, Homo sapiens
  CDR3 for beta chain variable domain of TCR clone 375077 (TRBV20-1, TRBJ1-1)
CSARVGGNTEAFF

SEQ ID NO: 750155 - protein, 13 aa, Homo sapiens
  CDR3 for alpha chain variable domain of TCR clone 375078 (TRAV20, TRAJ20)
CAVQAGSGYKLSF

SEQ ID NO: 750156 - protein, 13 aa, Homo sapiens
  CDR3 for beta chain variable domain of TCR clone 375078 (TRBV12-4, TRBJ2-7)
CASSPTETYEQYF

SEQ ID NO: 750157 - protein, 14 aa, Homo sapiens
  CDR3 for alpha chain variable domain of TCR clone 375079 (TRAV13-1, TRAJ3)
CAADGYSSASKIIF

SEQ ID NO: 750158 - protein, 18 aa, Homo sapiens
  CDR3 for beta chain variable domain of TCR clone 375079 (TRBV7-9, TRBJ2-7)
CASSLTTSGSRTWYEQYF

SEQ ID NO: 750159 - protein, 14 aa, Homo sapiens
  CDR3 for alpha chain variable domain of TCR clone 375080 (TRAV8-4, TRAJ42)
CAGCEGGSQGNLIF

SEQ ID NO: 750160 - protein, 15 aa, Homo sapiens
  CDR3 for beta chain variable domain of TCR clone 375080 (TRBV28, TRBJ2-7)
CASSLEAYPIYEQYF

SEQ ID NO: 750161 - protein, 13 aa, Homo sapiens
  CDR3 for alpha chain variable domain of TCR clone 375081 (TRAV29/DV5, TRAJ33)
CAASVESNYQLIL

SEQ ID NO: 750162 - protein, 14 aa, Homo sapiens
  CDR3 for beta chain variable domain of TCR clone 375081 (TRBV11-2, TRBJ2-5)
CASSRTGGIETQYF

SEQ ID NO: 750163 - protein, 12 aa, Homo sapiens
  CDR3 for alpha chain variable domain of TCR clone 375082 (TRAV13-2, TRAJ8)
CAPWLGFQKLVF

SEQ ID NO: 750164 - protein, 14 aa, Homo sapiens
  CDR3 for beta chain variable domain of TCR clone 375082 (TRBV4-2, TRBJ1-2)
CASSPGGSNYGYTF

SEQ ID NO: 750165 - protein, 15 aa, Homo sapiens
  CDR3 for alpha chain variable domain of TCR clone 375083 (TRAV29/DV5, TRAJ42)
CAAKTDGGSQGNLIF

SEQ ID NO: 750166 - protein, 13 aa, Homo sapiens
  CDR3 for beta chain variable domain of TCR clone 375083 (TRBV7-2, TRBJ2-7)
CASSSPSGSEQYF

SEQ ID NO: 750167 - protein, 15 aa, Homo sapiens
  CDR3 for alpha chain variable domain of TCR clone 375084 (TRAV13-1, TRAJ27)
CAASGGNTNAGKSTF

SEQ ID NO: 750168 - protein, 15 aa, Homo sapiens
  CDR3 for beta chain variable domain of TCR clone 375084 (TRBV12-4, TRBJ1-5)
CASTRQGAGNQPQHF

SEQ ID NO: 750169 - protein, 16 aa, Homo sapiens
  CDR3 for alpha chain variable domain of TCR clone 375085 (TRAV38-1, TRAJ37)
CAFKGDGSSNTGKLIF

SEQ ID NO: 750170 - protein, 13 aa, Homo sapiens
  CDR3 for beta chain variable domain of TCR clone 375085 (TRBV12-4, TRBJ2-5)
CASSIFRRETQYF

SEQ ID NO: 750171 - protein, 18 aa, Homo sapiens
  CDR3 for alpha chain variable domain of TCR clone 375086 (TRAV26-1, TRAJ52)
CIVRGAGAGGTSYGKLTF

SEQ ID NO: 750172 - protein, 13 aa, Homo sapiens
  CDR3 for beta chain variable domain of TCR clone 375086 (TRBV7-8, TRBJ1-2)
CASSAQSYYGDTF

SEQ ID NO: 750173 - protein, 14 aa, Homo sapiens
  CDR3 for alpha chain variable domain of TCR clone 375087 (TRAV9-2, TRAJ39)
CALYIYNAGNMLTF

SEQ ID NO: 750174 - protein, 14 aa, Homo sapiens
  CDR3 for beta chain variable domain of TCR clone 375087 (TRBV19, TRBJ2-1)
CASSLLASINEQFF

SEQ ID NO: 750175 - protein, 15 aa, Homo sapiens
  CDR3 for alpha chain variable domain of TCR clone 375088 (TRAV17, TRAJ57)
CATGPSQGGSEKLVF

SEQ ID NO: 750176 - protein, 15 aa, Homo sapiens
  CDR3 for beta chain variable domain of TCR clone 375088 (TRBV4-1, TRBJ2-1)
CASSQGGELYNEQFF

SEQ ID NO: 750177 - protein, 12 aa, Homo sapiens
  CDR3 for alpha chain variable domain of TCR clone 375089 (TRAV12-3, TRAJ17)
CAMTLTGNKLTF

SEQ ID NO: 750178 - protein, 12 aa, Homo sapiens
  CDR3 for beta chain variable domain of TCR clone 375089 (TRBV19, TRBJ1-1)
CASSTTGIEAFF

SEQ ID NO: 750179 - protein, 11 aa, Homo sapiens
  CDR3 for alpha chain variable domain of TCR clone 375090 (TRAV21, TRAJ11)
CAVNGYSTLTF

SEQ ID NO: 750180 - protein, 12 aa, Homo sapiens
  CDR3 for beta chain variable domain of TCR clone 375090 (TRBV12-4, TRBJ2-7)
CASSLGGYEQYF

SEQ ID NO: 750181 - protein, 13 aa, Homo sapiens
  CDR3 for alpha chain variable domain of TCR clone 375091 (TRAV12-2, TRAJ20)
CAVYPSNDYKLSF

SEQ ID NO: 750182 - protein, 17 aa, Homo sapiens
  CDR3 for beta chain variable domain of TCR clone 375091 (TRBV15, TRBJ1-4)
CATSRYGTGDPNEKLFF

SEQ ID NO: 750183 - protein, 14 aa, Homo sapiens
  CDR3 for alpha chain variable domain of TCR clone 375092 (TRAV12-2, TRAJ40)
CAVKIPSGTYKYIF

SEQ ID NO: 750184 - protein, 13 aa, Homo sapiens
  CDR3 for beta chain variable domain of TCR clone 375092 (TRBV12-4, TRBJ1-5)
CASSPDRAQPQHF

SEQ ID NO: 750185 - protein, 11 aa, Homo sapiens
  CDR3 for alpha chain variable domain of TCR clone 375093 (TRAV3, TRAJ21)
CAVGNFNKFYF

SEQ ID NO: 750186 - protein, 16 aa, Homo sapiens
  CDR3 for beta chain variable domain of TCR clone 375093 (TRBV19, TRBJ2-1)
CASSKALPSSYNEQFF

SEQ ID NO: 750187 - protein, 16 aa, Homo sapiens
  CDR3 for alpha chain variable domain of TCR clone 375094 (TRAV13-1, TRAJ37)
CAASSLGSSNTGKLIF

SEQ ID NO: 750188 - protein, 14 aa, Homo sapiens
  CDR3 for beta chain variable domain of TCR clone 375094 (TRBV11-2, TRBJ2-3)
CASSRLARTDTQYF

SEQ ID NO: 750189 - protein, 13 aa, Homo sapiens
  CDR3 for alpha chain variable domain of TCR clone 375095 (TRAV8-3, TRAJ4)
WVFYSVGYNNLIF

SEQ ID NO: 750190 - protein, 14 aa, Homo sapiens
  CDR3 for beta chain variable domain of TCR clone 375095 (TRBV7-9, TRBJ2-3)
CASSLEDGTDTQYS

SEQ ID NO: 750191 - protein, 15 aa, Homo sapiens
  CDR3 for alpha chain variable domain of TCR clone 375096 (TRAV29/DV5, TRAJ24)
CAASGATDSWGKFQF

SEQ ID NO: 750192 - protein, 13 aa, Homo sapiens
  CDR3 for beta chain variable domain of TCR clone 375096 (TRBV19, TRBJ1-2)
CASSVPGQDGYAF

SEQ ID NO: 750193 - protein, 14 aa, Homo sapiens
  CDR3 for alpha chain variable domain of TCR clone 375097 (TRAV29/DV5, TRAJ36)
CAARRNTGANNLFF

SEQ ID NO: 750194 - protein, 15 aa, Homo sapiens
  CDR3 for beta chain variable domain of TCR clone 375097 (TRBV27, TRBJ2-1)
CASSNGGGSSNEQFF

SEQ ID NO: 750195 - protein, 12 aa, Homo sapiens
  CDR3 for alpha chain variable domain of TCR clone 375098 (TRAV4, TRAJ26)
CLVGDYGQYFVF

SEQ ID NO: 750196 - protein, 16 aa, Homo sapiens
  CDR3 for beta chain variable domain of TCR clone 375098 (TRBV7-2, TRBJ1-2)
CASSSNQDRRGHGYTF

SEQ ID NO: 750197 - protein, 14 aa, Homo sapiens
  CDR3 for alpha chain variable domain of TCR clone 375099 (TRAV12-2, TRAJ13)
CAVKKTGGYQKVTF

SEQ ID NO: 750198 - protein, 15 aa, Homo sapiens
  CDR3 for beta chain variable domain of TCR clone 375099 (TRBV20-1, TRBJ2-7)
CSARDRVAGMDEQYC

SEQ ID NO: 750199 - protein, 14 aa, Homo sapiens
  CDR3 for alpha chain variable domain of TCR clone 375100 (TRAV17, TRAJ57)
CATDPQGGSEKLVF

SEQ ID NO: 750200 - protein, 14 aa, Homo sapiens
  CDR3 for beta chain variable domain of TCR clone 375100 (TRBV5-8, TRBJ2-3)
CASSLRQGTDTQYF

SEQ ID NO: 750201 - protein, 12 aa, Homo sapiens
  CDR3 for alpha chain variable domain of TCR clone 375101 (TRAV26-1, TRAJ54)
CIGGWGAQKLVF

SEQ ID NO: 750202 - protein, 16 aa, Homo sapiens
  CDR3 for beta chain variable domain of TCR clone 375101 (TRBV19, TRBJ1-6)
CARRLEGNLHNSPLHF

SEQ ID NO: 750203 - protein, 12 aa, Homo sapiens
  CDR3 for alpha chain variable domain of TCR clone 375102 (TRAV12-3, TRAJ17)
CAMTLTGNNLTF

SEQ ID NO: 750204 - protein, 15 aa, Homo sapiens
  CDR3 for beta chain variable domain of TCR clone 375102 (TRBV20-1, TRBJ2-7)
CSVRDRVSGMDEQYF

SEQ ID NO: 750205 - protein, 13 aa, Homo sapiens
  CDR3 for alpha chain variable domain of TCR clone 375103 (TRAV25, TRAJ29)
CAGRFVGNTPLVF

SEQ ID NO: 750206 - protein, 15 aa, Homo sapiens
  CDR3 for beta chain variable domain of TCR clone 375103 (TRBV29-1, TRBJ2-1)
CSVRTSLSSYNEQVF

SEQ ID NO: 750207 - protein, 14 aa, Homo sapiens
  CDR3 for alpha chain variable domain of TCR clone 375104 (TRAV16, TRAJ54)
CALSLIQGAQKLVF

SEQ ID NO: 750208 - protein, 14 aa, Homo sapiens
  CDR3 for beta chain variable domain of TCR clone 375104 (TRBV6-6, TRBJ2-7)
CASSDSGAGYGQYF

SEQ ID NO: 750209 - protein, 14 aa, Homo sapiens
  CDR3 for alpha chain variable domain of TCR clone 375105 (TRAV4, TRAJ9)
CLVCSGTGGFKTIF

SEQ ID NO: 750210 - protein, 14 aa, Homo sapiens
  CDR3 for beta chain variable domain of TCR clone 375105 (TRBV7-9, TRBJ2-4)
CASSLAMGGNSQYF

SEQ ID NO: 750211 - protein, 14 aa, Homo sapiens
  CDR3 for alpha chain variable domain of TCR clone 375106 (TRAV12-2, TRAJ48)
CAVNAFFGNEKLTF

SEQ ID NO: 750212 - protein, 13 aa, Homo sapiens
  CDR3 for beta chain variable domain of TCR clone 375106 (TRBV28, TRBJ2-7)
SAGAQQGLDEQYF

SEQ ID NO: 750213 - protein, 16 aa, Homo sapiens
  CDR3 for alpha chain variable domain of TCR clone 375107 (TRAV30, TRAJ24)
CGTEIVDADSCGNSSL

SEQ ID NO: 750214 - protein, 14 aa, Homo sapiens
  CDR3 for beta chain variable domain of TCR clone 375107 (TRBV20-1, TRBJ2-7)
CSAKTGTGGYEQYF

SEQ ID NO: 750215 - protein, 11 aa, Homo sapiens
  CDR3 for alpha chain variable domain of TCR clone 375108 (TRAV12-1, TRAJ8)
CVVTGFQKLVF

SEQ ID NO: 750216 - protein, 17 aa, Homo sapiens
  CDR3 for beta chain variable domain of TCR clone 375108 (TRBV11-3, TRBJ2-1)
CASSLYPPGVEYNEQFF

SEQ ID NO: 750217 - protein, 14 aa, Homo sapiens
  CDR3 for alpha chain variable domain of TCR clone 375109 (TRAV12-2, TRAJ44)
CAVNPAGTASKLTF

SEQ ID NO: 750218 - protein, 15 aa, Homo sapiens
  CDR3 for beta chain variable domain of TCR clone 375109 (TRBV11-2, TRBJ2-3)
CASSPGGGATDTQYF

SEQ ID NO: 750219 - protein, 15 aa, Homo sapiens
  CDR3 for alpha chain variable domain of TCR clone 375110 (TRAV21, TRAJ53)
CATLNSGGSNYKLTF

SEQ ID NO: 750220 - protein, 14 aa, Homo sapiens
  CDR3 for beta chain variable domain of TCR clone 375110 (TRBV13, TRBJ1-1)
CASTVITVNTEAFF

SEQ ID NO: 750221 - protein, 14 aa, Homo sapiens
  CDR3 for alpha chain variable domain of TCR clone 375111 (TRAV12-2, TRAJ53)
CAVKGGGSNYKLTF

SEQ ID NO: 750222 - protein, 14 aa, Homo sapiens
  CDR3 for beta chain variable domain of TCR clone 375111 (TRBV7-7, TRBJ2-2)
SATRQDSDTGELFF

SEQ ID NO: 750223 - protein, 14 aa, Homo sapiens
  CDR3 for alpha chain variable domain of TCR clone 375112 (TRAV27, TRAJ44)
CAASFTGTASKLTF

SEQ ID NO: 750224 - protein, 16 aa, Homo sapiens
  CDR3 for beta chain variable domain of TCR clone 375112 (TRBV20-1, TRBJ2-1)
CSANPRLAGTYNEQFF

SEQ ID NO: 750225 - protein, 12 aa, Homo sapiens
  CDR3 for alpha chain variable domain of TCR clone 375113 (TRAV21, TRAJ23)
CAVPNQGGKLIL

SEQ ID NO: 750226 - protein, 15 aa, Homo sapiens
  CDR3 for beta chain variable domain of TCR clone 375113 (TRBV27, TRBJ2-1)
CASSFGAGTGPEQFF

SEQ ID NO: 750227 - protein, 15 aa, Homo sapiens
  CDR3 for alpha chain variable domain of TCR clone 375114 (TRAV12-3, TRAJ6)
CAMSATTGGSYIPTF

SEQ ID NO: 750228 - protein, 15 aa, Homo sapiens
  CDR3 for beta chain variable domain of TCR clone 375114 (TRBV19, TRBJ2-1)
CASSIGLAGWDEQFF

SEQ ID NO: 750229 - protein, 16 aa, Homo sapiens
  CDR3 for alpha chain variable domain of TCR clone 375115 (TRAV29/DV5, TRAJ36)
CAASAGVEIGANNLFF

SEQ ID NO: 750230 - protein, 15 aa, Homo sapiens
  CDR3 for beta chain variable domain of TCR clone 375115 (TRBV6-3, TRBJ2-7)
CASSSPGTVFYEQYF

SEQ ID NO: 750231 - protein, 17 aa, Homo sapiens
  CDR3 for alpha chain variable domain of TCR clone 375116 (TRAV3, TRAJ6)
CVVRDGPRAGGSYIPTF

SEQ ID NO: 750232 - protein, 14 aa, Homo sapiens
  CDR3 for beta chain variable domain of TCR clone 375116 (TRBV11-2, TRBJ2-3)
CASSRLARTDTKYF

SEQ ID NO: 750233 - protein, 17 aa, Homo sapiens
  CDR3 for alpha chain variable domain of TCR clone 375117 (TRAV3, TRAJ38)
CAVRDCLNAGNNRKLIW

SEQ ID NO: 750234 - protein, 17 aa, Homo sapiens
  CDR3 for beta chain variable domain of TCR clone 375117 (TRBV7-8, TRBJ2-6)
CASSAGTGGAGANVLTF

SEQ ID NO: 750235 - protein, 14 aa, Homo sapiens
  CDR3 for alpha chain variable domain of TCR clone 375118 (TRAV3, TRAJ35)
CAVRDMGFGNVLHC

SEQ ID NO: 750236 - protein, 14 aa, Homo sapiens
  CDR3 for beta chain variable domain of TCR clone 375118 (TRBV20-1, TRBJ2-3)
CSARGGTSTDTQYF

SEQ ID NO: 750237 - protein, 14 aa, Homo sapiens
  CDR3 for alpha chain variable domain of TCR clone 375119 (TRAV13-1, TRAJ40)
CAASMTSGTYKYIF

SEQ ID NO: 750238 - protein, 11 aa, Homo sapiens
  CDR3 for beta chain variable domain of TCR clone 375119 (TRBV20-1, TRBJ2-5)
CSADRAETQYF

SEQ ID NO: 750239 - protein, 15 aa, Homo sapiens
  CDR3 for alpha chain variable domain of TCR clone 375120 (TRAV8-3, TRAJ45)
CASSYSGGGADGLTF

SEQ ID NO: 750240 - protein, 14 aa, Homo sapiens
  CDR3 for beta chain variable domain of TCR clone 375120 (TRBV19, TRBJ2-1)
CASGKSTQYNEQFF

SEQ ID NO: 750241 - protein, 12 aa, Homo sapiens
  CDR3 for alpha chain variable domain of TCR clone 375121 (TRAV12-1, TRAJ6)
CVVSERSYIPTF

SEQ ID NO: 750242 - protein, 12 aa, Homo sapiens
  CDR3 for beta chain variable domain of TCR clone 375121 (TRBV11-2, TRBJ2-2)
CASSLPTGELFF

SEQ ID NO: 750243 - protein, 13 aa, Homo sapiens
  CDR3 for alpha chain variable domain of TCR clone 375122 (TRAV12-1, TRAJ21)
CVVTLYNFNKLYF

SEQ ID NO: 750244 - protein, 20 aa, Homo sapiens
  CDR3 for beta chain variable domain of TCR clone 375122 (TRBV7-8, TRBJ2-1)
CASSLAHRLAGVRSYNEQFF

SEQ ID NO: 750245 - protein, 14 aa, Homo sapiens
  CDR3 for alpha chain variable domain of TCR clone 375123 (TRAV12-2, TRAJ24)
CAVTPADSWGKLQF

SEQ ID NO: 750246 - protein, 16 aa, Homo sapiens
  CDR3 for beta chain variable domain of TCR clone 375123 (TRBV19, TRBJ2-2)
CASRSPGTGATGGLFF

SEQ ID NO: 750247 - protein, 19 aa, Homo sapiens
  CDR3 for alpha chain variable domain of TCR clone 375124 (TRAV2, TRAJ20)
ILQVREADAAVYRDCKLSF

SEQ ID NO: 750248 - protein, 14 aa, Homo sapiens
  CDR3 for beta chain variable domain of TCR clone 375124 (TRBV7-3, TRBJ2-1)
CASSLAGGTNEQFF

SEQ ID NO: 750249 - protein, 12 aa, Homo sapiens
  CDR3 for alpha chain variable domain of TCR clone 375125 (TRAV8-4, TRAJ43)
CAVRVNDNDMRF

SEQ ID NO: 750250 - protein, 14 aa, Homo sapiens
  CDR3 for beta chain variable domain of TCR clone 375125 (TRBV11-2, TRBJ1-2)
CASSLGTANYGYTF

SEQ ID NO: 750251 - protein, 14 aa, Homo sapiens
  CDR3 for alpha chain variable domain of TCR clone 375126 (TRAV17, TRAJ35)
CATDRPGFGNVLHC

SEQ ID NO: 750252 - protein, 19 aa, Homo sapiens
  CDR3 for beta chain variable domain of TCR clone 375126 (TRBV11-3, TRBJ2-2)
CASSTRPGVKTTNTGELFF

SEQ ID NO: 750253 - protein, 14 aa, Homo sapiens
  CDR3 for alpha chain variable domain of TCR clone 375127 (TRAV26-1, TRAJ45)
GIEGTGGGADGLTF

SEQ ID NO: 750254 - protein, 13 aa, Homo sapiens
  CDR3 for beta chain variable domain of TCR clone 375127 (TRBV7-6, TRBJ1-2)
CASSLVADYGYTF

SEQ ID NO: 750255 - protein, 14 aa, Homo sapiens
  CDR3 for alpha chain variable domain of TCR clone 375128 (TRAV1-2, TRAJ16)
CAVNRFSDGQKLLF

SEQ ID NO: 750256 - protein, 15 aa, Homo sapiens
  CDR3 for beta chain variable domain of TCR clone 375128 (TRBV4-1, TRBJ1-1)
CASSQPTGRGTEAFF

SEQ ID NO: 750257 - protein, 14 aa, Homo sapiens
  CDR3 for alpha chain variable domain of TCR clone 375129 (TRAV20, TRAJ40)
CAVQAVPGTYKYIF

SEQ ID NO: 750258 - protein, 13 aa, Homo sapiens
  CDR3 for beta chain variable domain of TCR clone 375129 (TRBV7-9, TRBJ1-2)
CASSLKQNYGYTF

SEQ ID NO: 750259 - protein, 13 aa, Homo sapiens
  CDR3 for alpha chain variable domain of TCR clone 375130 (TRAV3, TRAJ27)
CAVRPLGAGKSTF

SEQ ID NO: 750260 - protein, 15 aa, Homo sapiens
  CDR3 for beta chain variable domain of TCR clone 375130 (TRBV20-1, TRBJ2-7)
CSARDRGSGMDEQYF

SEQ ID NO: 750261 - protein, 10 aa, Homo sapiens
  CDR3 for alpha chain variable domain of TCR clone 375131 (TRAV26-1, TRAJ22)
CIVSLNFFWF

SEQ ID NO: 750262 - protein, 15 aa, Homo sapiens
  CDR3 for beta chain variable domain of TCR clone 375131 (TRBV4-2, TRBJ1-2)
CASSQRTRGRDGYTF

SEQ ID NO: 750263 - protein, 13 aa, Homo sapiens
  CDR3 for alpha chain variable domain of TCR clone 375132 (TRAV21, TRAJ27)
CAARPGNAGKSTF

SEQ ID NO: 750264 - protein, 13 aa, Homo sapiens
  CDR3 for beta chain variable domain of TCR clone 375132 (TRBV13, TRBJ2-1)
CASILGGRGEKFF

SEQ ID NO: 750265 - protein, 15 aa, Homo sapiens
  CDR3 for alpha chain variable domain of TCR clone 375133 (TRAV13-1, TRAJ10)
CVATIPTGGGNKLTF

SEQ ID NO: 750266 - protein, 15 aa, Homo sapiens
  CDR3 for beta chain variable domain of TCR clone 375133 (TRBV2, TRBJ2-7)
CASTLLGSGATEQYF

SEQ ID NO: 750267 - protein, 15 aa, Homo sapiens
  CDR3 for alpha chain variable domain of TCR clone 375134 (TRAV29/DV5, TRAJ40)
CAASAQGSGTYKYIL

SEQ ID NO: 750268 - protein, 15 aa, Homo sapiens
  CDR3 for beta chain variable domain of TCR clone 375134 (TRBV7-2, TRBJ2-3)
CASSLAGAFIDTQYF

SEQ ID NO: 750269 - protein, 13 aa, Homo sapiens
  CDR3 for alpha chain variable domain of TCR clone 375135 (TRAV3, TRAJ41)
CAVSSNSGYALNF

SEQ ID NO: 750270 - protein, 12 aa, Homo sapiens
  CDR3 for beta chain variable domain of TCR clone 375135 (TRBV2, TRBJ2-1)
CASRPGTREQFF

SEQ ID NO: 750271 - protein, 12 aa, Homo sapiens
  CDR3 for alpha chain variable domain of TCR clone 375136 (TRAV21, TRAJ11)
CAATSGYSTLTF

SEQ ID NO: 750272 - protein, 14 aa, Homo sapiens
  CDR3 for beta chain variable domain of TCR clone 375136 (TRBV20-1, TRBJ2-1)
CSAPELAGVGEQFF

SEQ ID NO: 750273 - protein, 15 aa, Homo sapiens
  CDR3 for alpha chain variable domain of TCR clone 375137 (TRAV8-3, TRAJ41)
CAVGSNSNSGYALNF

SEQ ID NO: 750274 - protein, 17 aa, Homo sapiens
  CDR3 for beta chain variable domain of TCR clone 375137 (TRBV25-1, TRBJ2-1)
CAGSAYGQGRGVYEQFF

SEQ ID NO: 750275 - protein, 19 aa, Homo sapiens
  CDR3 for alpha chain variable domain of TCR clone 375138 (TRAV26-1, TRAJ52)
CNVKAHRNAGGTSYGKLTF

SEQ ID NO: 750276 - protein, 15 aa, Homo sapiens
  CDR3 for beta chain variable domain of TCR clone 375138 (TRBV29-1, TRBJ2-1)
CSGRDRKSSYNEQFF

SEQ ID NO: 750277 - protein, 12 aa, Homo sapiens
  CDR3 for alpha chain variable domain of TCR clone 375139 (TRAV12-1, TRAJ40)
CVVYSGTYKYIF

SEQ ID NO: 750278 - protein, 13 aa, Homo sapiens
  CDR3 for beta chain variable domain of TCR clone 375139 (TRBV2, TRBJ2-5)
CASGTPYQETQYF

SEQ ID NO: 750279 - protein, 17 aa, Homo sapiens
  CDR3 for alpha chain variable domain of TCR clone 375140 (TRAV13-1, TRAJ52)
CAAGRNAGGTSYGKLTF

SEQ ID NO: 750280 - protein, 17 aa, Homo sapiens
  CDR3 for beta chain variable domain of TCR clone 375140 (TRBV7-2, TRBJ1-1)
CASNLKGESSFLWTRHQ

SEQ ID NO: 750281 - protein, 14 aa, Homo sapiens
  CDR3 for alpha chain variable domain of TCR clone 375141 (TRAV12-2, TRAJ17)
CALLFKAEGNKLTF

SEQ ID NO: 750282 - protein, 17 aa, Homo sapiens
  CDR3 for beta chain variable domain of TCR clone 375141 (TRBV20-1, TRBJ2-2)
CSASGSGQGGLTGELFF

SEQ ID NO: 750283 - protein, 11 aa, Homo sapiens
  CDR3 for alpha chain variable domain of TCR clone 375142 (TRAV35, TRAJ30)
CAGPGADKIIF

SEQ ID NO: 750284 - protein, 18 aa, Homo sapiens
  CDR3 for beta chain variable domain of TCR clone 375142 (TRBV7-6, TRBJ2-1)
CASSPRTSGMSSYNEQFF

SEQ ID NO: 750285 - protein, 12 aa, Homo sapiens
  CDR3 for alpha chain variable domain of TCR clone 375143 (TRAV1-1, TRAJ15)
CAVGQAGTALIF

SEQ ID NO: 750286 - protein, 14 aa, Homo sapiens
  CDR3 for beta chain variable domain of TCR clone 375143 (TRBV7-8, TRBJ2-3)
CASSLEAGTDTQYF

SEQ ID NO: 750287 - protein, 15 aa, Homo sapiens
  CDR3 for alpha chain variable domain of TCR clone 375144 (TRAV38-1, TRAJ37)
CAFFFGSGNTGKLIF

SEQ ID NO: 750288 - protein, 12 aa, Homo sapiens
  CDR3 for beta chain variable domain of TCR clone 375144 (TRBV7-9, TRBJ2-7)
CASSLEGYEQYF

SEQ ID NO: 750289 - protein, 14 aa, Homo sapiens
  CDR3 for alpha chain variable domain of TCR clone 375145 (TRAV12-3, TRAJ10)
SHLPLAGGGNKLTF

SEQ ID NO: 750290 - protein, 16 aa, Homo sapiens
  CDR3 for beta chain variable domain of TCR clone 375145 (TRBV19, TRBJ1-1)
CASRFGGPVTGTEAFF

SEQ ID NO: 750291 - protein, 14 aa, Homo sapiens
  CDR3 for alpha chain variable domain of TCR clone 375146 (TRAV12-1, TRAJ44)
CGHLPTGTASKLTF

SEQ ID NO: 750292 - protein, 13 aa, Homo sapiens
  CDR3 for beta chain variable domain of TCR clone 375146 (TRBV6-5, TRBJ2-5)
CASSPQGGETQYF

SEQ ID NO: 750293 - protein, 17 aa, Homo sapiens
  CDR3 for alpha chain variable domain of TCR clone 375147 (TRAV13-1, TRAJ52)
SAASSGAGGTSYGKLTF

SEQ ID NO: 750294 - protein, 14 aa, Homo sapiens
  CDR3 for beta chain variable domain of TCR clone 375147 (TRBV12-4, TRBJ2-3)
CASTIAGWGDTQYF

SEQ ID NO: 750295 - protein, 14 aa, Homo sapiens
  CDR3 for alpha chain variable domain of TCR clone 375148 (TRAV12-3, TRAJ12)
CAMSRMDSSYKLIF

SEQ ID NO: 750296 - protein, 14 aa, Homo sapiens
  CDR3 for beta chain variable domain of TCR clone 375148 (TRBV20-1, TRBJ1-4)
CGARSGQSNEKLFF

SEQ ID NO: 750297 - protein, 15 aa, Homo sapiens
  CDR3 for alpha chain variable domain of TCR clone 375149 (TRAV12-2, TRAJ38)
CAVNKEAGNNRKLIW

SEQ ID NO: 750298 - protein, 16 aa, Homo sapiens
  CDR3 for beta chain variable domain of TCR clone 375149 (TRBV2, TRBJ2-1)
CASSVGGSLSYNEQFF

SEQ ID NO: 750299 - protein, 14 aa, Homo sapiens
  CDR3 for alpha chain variable domain of TCR clone 375150 (TRAV1-2, TRAJ16)
CAVNRFSDGQKLLF

SEQ ID NO: 750300 - protein, 14 aa, Homo sapiens
  CDR3 for beta chain variable domain of TCR clone 375150 (TRBV12-4, TRBJ1-1)
CASRPGQGRTEAFF

SEQ ID NO: 750301 - protein, 16 aa, Homo sapiens
  CDR3 for alpha chain variable domain of TCR clone 375151 (TRAV16, TRAJ4)
CALSRMFSGGNNKLIF

SEQ ID NO: 750302 - protein, 17 aa, Homo sapiens
  CDR3 for beta chain variable domain of TCR clone 375151 (TRBV13, TRBJ2-3)
CASSLSRVAGGRNTQYF

SEQ ID NO: 750303 - protein, 11 aa, Homo sapiens
  CDR3 for alpha chain variable domain of TCR clone 375152 (TRAV12-2, TRAJ49)
CALQGGHQFYF

SEQ ID NO: 750304 - protein, 13 aa, Homo sapiens
  CDR3 for beta chain variable domain of TCR clone 375152 (TRBV4-1, TRBJ1-1)
CASSQLGTGEAFF

SEQ ID NO: 750305 - protein, 14 aa, Homo sapiens
  CDR3 for alpha chain variable domain of TCR clone 375153 (TRAV12-1, TRAJ7)
CVVTHPHGNNRLAF

SEQ ID NO: 750306 - protein, 14 aa, Homo sapiens
  CDR3 for beta chain variable domain of TCR clone 375153 (TRBV28, TRBJ2-7)
CASSLRARGNEQYF

SEQ ID NO: 750307 - protein, 14 aa, Homo sapiens
  CDR3 for alpha chain variable domain of TCR clone 375154 (TRAV12-1, TRAJ22)
CVVNVGGSARQLTF

SEQ ID NO: 750308 - protein, 13 aa, Homo sapiens
  CDR3 for beta chain variable domain of TCR clone 375154 (TRBV20-1, TRBJ1-2)
CSASPEFNYGYTF

SEQ ID NO: 750309 - protein, 12 aa, Homo sapiens
  CDR3 for alpha chain variable domain of TCR clone 375155 (TRAV21, TRAJ33)
CAKMDSNYQLIC

SEQ ID NO: 750310 - protein, 17 aa, Homo sapiens
  CDR3 for beta chain variable domain of TCR clone 375155 (TRBV20-1, TRBJ2-2)
CSASGSGQGGLTGELFF

SEQ ID NO: 750311 - protein, 18 aa, Homo sapiens
  CDR3 for alpha chain variable domain of TCR clone 375156 (TRAV13-1, TRAJ52)
CAAKNPNAGGTSYGKLTF

SEQ ID NO: 750312 - protein, 13 aa, Homo sapiens
  CDR3 for beta chain variable domain of TCR clone 375156 (TRBV27, TRBJ2-7)
CASSLTTGYEQYF

SEQ ID NO: 750313 - protein, 12 aa, Homo sapiens
  CDR3 for alpha chain variable domain of TCR clone 375157 (TRAV1-1, TRAJ39)
CAVPVVGNMLTF

SEQ ID NO: 750314 - protein, 18 aa, Homo sapiens
  CDR3 for beta chain variable domain of TCR clone 375157 (TRBV4-2, TRBJ1-2)
CASSQDKVGHTVNYGYTF

SEQ ID NO: 750315 - protein, 12 aa, Homo sapiens
  CDR3 for alpha chain variable domain of TCR clone 375158 (TRAV21, TRAJ33)
CAKMDSNYQLIW

SEQ ID NO: 750316 - protein, 14 aa, Homo sapiens
  CDR3 for beta chain variable domain of TCR clone 375158 (TRBV2, TRBJ2-1)
CASRTGSSYNEQFF

SEQ ID NO: 750317 - protein, 16 aa, Homo sapiens
  CDR3 for alpha chain variable domain of TCR clone 375159 (TRAV17, TRAJ28)
CATDEYSGAGSYQLPF

SEQ ID NO: 750318 - protein, 13 aa, Homo sapiens
  CDR3 for beta chain variable domain of TCR clone 375159 (TRBV7-9, TRBJ1-2)
CASRTGPNYGYTF

SEQ ID NO: 750319 - protein, 14 aa, Homo sapiens
  CDR3 for alpha chain variable domain of TCR clone 375160 (TRAV3, TRAJ17)
CAVRDAAAGNKLTF

SEQ ID NO: 750320 - protein, 13 aa, Homo sapiens
  CDR3 for beta chain variable domain of TCR clone 375160 (TRBV7-9, TRBJ2-1)
RASSLDVGNEQFF

SEQ ID NO: 750321 - protein, 14 aa, Homo sapiens
  CDR3 for alpha chain variable domain of TCR clone 375161 (TRAV12-2, TRAJ13)
CAVKKTGGYQKVTF

SEQ ID NO: 750322 - protein, 15 aa, Homo sapiens
  CDR3 for beta chain variable domain of TCR clone 375161 (TRBV6-3, TRBJ2-7)
CASSSPVTVLYEQYF

SEQ ID NO: 750323 - protein, 13 aa, Homo sapiens
  CDR3 for alpha chain variable domain of TCR clone 375162 (TRAV21, TRAJ15)
CAVANQAGTALLF

SEQ ID NO: 750324 - protein, 15 aa, Homo sapiens
  CDR3 for beta chain variable domain of TCR clone 375162 (TRBV27, TRBJ2-7)
CASSLGSSVSPEQYF

SEQ ID NO: 750325 - protein, 17 aa, Homo sapiens
  CDR3 for alpha chain variable domain of TCR clone 375163 (TRAV26-1, TRAJ53)
CIVRVDDRGGSNYKLTF

SEQ ID NO: 750326 - protein, 17 aa, Homo sapiens
  CDR3 for beta chain variable domain of TCR clone 375163 (TRBV20-1, TRBJ2-7)
CSARVQPRTSTSSTSGR

SEQ ID NO: 750327 - protein, 13 aa, Homo sapiens
  CDR3 for alpha chain variable domain of TCR clone 375164 (TRAV38-1, TRAJ42)
CARWGGSQGNLIF

SEQ ID NO: 750328 - protein, 10 aa, Homo sapiens
  CDR3 for beta chain variable domain of TCR clone 375164 (TRBV2, TRBJ2-5)
CASSAATQFF

SEQ ID NO: 750329 - protein, 11 aa, Homo sapiens
  CDR3 for alpha chain variable domain of TCR clone 375165 (TRAV12-2, TRAJ39)
CAVNNMLTFGR

SEQ ID NO: 750330 - protein, 16 aa, Homo sapiens
  CDR3 for beta chain variable domain of TCR clone 375165 (TRBV5-3, TRBJ2-2)
CARSFGTGTNTGELFF

SEQ ID NO: 750331 - protein, 14 aa, Homo sapiens
  CDR3 for alpha chain variable domain of TCR clone 375166 (TRAV8-3, TRAJ4)
CAMGAAGGYNKLIF

SEQ ID NO: 750332 - protein, 13 aa, Homo sapiens
  CDR3 for beta chain variable domain of TCR clone 375166 (TRBV7-9, TRBJ1-2)
CASSLKQNYGYTF

SEQ ID NO: 750333 - protein, 12 aa, Homo sapiens
  CDR3 for alpha chain variable domain of TCR clone 375167 (TRAV1-2, TRAJ26)
CAVRYSGQNFVF

SEQ ID NO: 750334 - protein, 14 aa, Homo sapiens
  CDR3 for beta chain variable domain of TCR clone 375167 (TRBV11-1, TRBJ2-7)
CASSFRQGSYEQYF

SEQ ID NO: 750335 - protein, 13 aa, Homo sapiens
  CDR3 for alpha chain variable domain of TCR clone 375168 (TRAV12-3, TRAJ29)
CAMTLSGNTPLVF

SEQ ID NO: 750336 - protein, 15 aa, Homo sapiens
  CDR3 for beta chain variable domain of TCR clone 375168 (TRBV5-1, TRBJ2-6)
CASSLDPSGANVMTF

SEQ ID NO: 750337 - protein, 16 aa, Homo sapiens
  CDR3 for alpha chain variable domain of TCR clone 375169 (TRAV30, TRAJ24)
CGTEFVDADSWGKFQF

SEQ ID NO: 750338 - protein, 14 aa, Homo sapiens
  CDR3 for beta chain variable domain of TCR clone 375169 (TRBV12-5, TRBJ2-5)
CASGARTHQETQYF

SEQ ID NO: 750339 - protein, 15 aa, Homo sapiens
  CDR3 for alpha chain variable domain of TCR clone 375170 (TRAV13-1, TRAJ17)
CAASIERAAGNKLTF

SEQ ID NO: 750340 - protein, 14 aa, Homo sapiens
  CDR3 for beta chain variable domain of TCR clone 375170 (TRBV19, TRBJ2-2)
CTSSGQGIAGELFF

SEQ ID NO: 750341 - protein, 13 aa, Homo sapiens
  CDR3 for alpha chain variable domain of TCR clone 375171 (TRAV36/DV7, TRAJ37)
CAAPFRNTGKLIF

SEQ ID NO: 750342 - protein, 14 aa, Homo sapiens
  CDR3 for beta chain variable domain of TCR clone 375171 (TRBV7-2, TRBJ2-7)
CASSPKTSFYEQYF

SEQ ID NO: 750343 - protein, 16 aa, Homo sapiens
  CDR3 for alpha chain variable domain of TCR clone 375172 (TRAV20, TRAJ26)
CAVQHRRDNYGQNFVF

SEQ ID NO: 750344 - protein, 16 aa, Homo sapiens
  CDR3 for beta chain variable domain of TCR clone 375172 (TRBV2, TRBJ2-1)
CASSVGGSLSYNEQFF

SEQ ID NO: 750345 - protein, 17 aa, Homo sapiens
  CDR3 for alpha chain variable domain of TCR clone 375173 (TRAV27, TRAJ42)
CAERVIYYGGSQGDLIF

SEQ ID NO: 750346 - protein, 14 aa, Homo sapiens
  CDR3 for beta chain variable domain of TCR clone 375173 (TRBV20-1, TRBJ2-1)
CSAQIGVSANEQFF

SEQ ID NO: 750347 - protein, 13 aa, Homo sapiens
  CDR3 for alpha chain variable domain of TCR clone 375174 (TRAV8-3, TRAJ20)
CAVGLPNDYKPSF

SEQ ID NO: 750348 - protein, 14 aa, Homo sapiens
  CDR3 for beta chain variable domain of TCR clone 375174 (TRBV12-5, TRBJ2-5)
CASGSRTHQETQYF

SEQ ID NO: 750349 - protein, 16 aa, Homo sapiens
  CDR3 for alpha chain variable domain of TCR clone 375175 (TRAV30, TRAJ24)
FGTEIVDADSWGKFQF

SEQ ID NO: 750350 - protein, 13 aa, Homo sapiens
  CDR3 for beta chain variable domain of TCR clone 375175 (TRBV7-9, TRBJ2-7)
CASSFAGAYEQYF

SEQ ID NO: 750351 - protein, 14 aa, Homo sapiens
  CDR3 for alpha chain variable domain of TCR clone 375176 (TRAV12-2, TRAJ13)
CAVKKTGGYQKVTF

SEQ ID NO: 750352 - protein, 16 aa, Homo sapiens
  CDR3 for beta chain variable domain of TCR clone 375176 (TRBV9, TRBJ2-3)
CASSGTSGKHTDTQYF

SEQ ID NO: 750353 - protein, 15 aa, Homo sapiens
  CDR3 for alpha chain variable domain of TCR clone 375177 (TRAV27, TRAJ38)
CAGRFNAGNNRKLIW

SEQ ID NO: 750354 - protein, 13 aa, Homo sapiens
  CDR3 for beta chain variable domain of TCR clone 375177 (TRBV4-1, TRBJ2-3)
CASSQPPTDTQYF

SEQ ID NO: 750355 - protein, 17 aa, Homo sapiens
  CDR3 for alpha chain variable domain of TCR clone 375178 (TRAV36/DV7, TRAJ52)
CAVAQRAGGTSYGKLTF

SEQ ID NO: 750356 - protein, 12 aa, Homo sapiens
  CDR3 for beta chain variable domain of TCR clone 375178 (TRBV7-8, TRBJ2-7)
CASSRGDREQYF

SEQ ID NO: 750357 - protein, 15 aa, Homo sapiens
  CDR3 for alpha chain variable domain of TCR clone 375179 (TRAV19, TRAJ8)
CALSGPNTGFQKLVF

SEQ ID NO: 750358 - protein, 14 aa, Homo sapiens
  CDR3 for beta chain variable domain of TCR clone 375179 (TRBV11-2, TRBJ2-7)
CASSLGAGDYEQYF

SEQ ID NO: 750359 - protein, 16 aa, Homo sapiens
  CDR3 for alpha chain variable domain of TCR clone 375180 (TRAV16, TRAJ57)
CAPYLITKGGSEKLVF

SEQ ID NO: 750360 - protein, 17 aa, Homo sapiens
  CDR3 for beta chain variable domain of TCR clone 375180 (TRBV24-1, TRBJ2-4)
CATSDAEARGVGNIQYF

SEQ ID NO: 750361 - protein, 16 aa, Homo sapiens
  CDR3 for alpha chain variable domain of TCR clone 375181 (TRAV38-1, TRAJ56)
CAFMKRQTGANSKLTF

SEQ ID NO: 750362 - protein, 15 aa, Homo sapiens
  CDR3 for beta chain variable domain of TCR clone 375181 (TRBV19, TRBJ1-1)
CASTSGQIQNTEAFF

SEQ ID NO: 750363 - protein, 15 aa, Homo sapiens
  CDR3 for alpha chain variable domain of TCR clone 375182 (TRAV29/DV5, TRAJ42)
CAAKTDGGSQGNPIL

SEQ ID NO: 750364 - protein, 16 aa, Homo sapiens
  CDR3 for beta chain variable domain of TCR clone 375182 (TRBV7-9, TRBJ2-1)
CASSLVSGPSYNEQFF

SEQ ID NO: 750365 - protein, 13 aa, Homo sapiens
  CDR3 for alpha chain variable domain of TCR clone 375183 (TRAV8-6, TRAJ21)
CAVSPSSLNKFYF

SEQ ID NO: 750366 - protein, 15 aa, Homo sapiens
  CDR3 for beta chain variable domain of TCR clone 375183 (TRBV7-3, TRBJ2-1)
CASSLSSGSFDEQFF

SEQ ID NO: 750367 - protein, 15 aa, Homo sapiens
  CDR3 for alpha chain variable domain of TCR clone 375184 (TRAV3, TRAJ22)
CAVRDRGGSARQLTF

SEQ ID NO: 750368 - protein, 15 aa, Homo sapiens
  CDR3 for beta chain variable domain of TCR clone 375184 (TRBV18, TRBJ2-5)
CASSPDPGLQETQYF

SEQ ID NO: 750369 - protein, 11 aa, Homo sapiens
  CDR3 for alpha chain variable domain of TCR clone 375185 (TRAV35, TRAJ30)
CAGPGDDKIIF

SEQ ID NO: 750370 - protein, 13 aa, Homo sapiens
  CDR3 for beta chain variable domain of TCR clone 375185 (TRBV19, TRBJ1-2)
CASSQGQVYGYTF

SEQ ID NO: 750371 - protein, 13 aa, Homo sapiens
  CDR3 for alpha chain variable domain of TCR clone 375186 (TRAV12-1, TRAJ39)
CVARSGAGNMLTF

SEQ ID NO: 750372 - protein, 16 aa, Homo sapiens
  CDR3 for beta chain variable domain of TCR clone 375186 (TRBV20-1, TRBJ2-1)
CSGESRTGTVRNEQFF

SEQ ID NO: 750373 - protein, 15 aa, Homo sapiens
  CDR3 for alpha chain variable domain of TCR clone 375187 (TRAV25, TRAJ52)
CAGTSGGTSYGKLTF

SEQ ID NO: 750374 - protein, 13 aa, Homo sapiens
  CDR3 for beta chain variable domain of TCR clone 375187 (TRBV7-3, TRBJ2-1)
CASSLDSYNEQFF

SEQ ID NO: 750375 - protein, 10 aa, Homo sapiens
  CDR3 for alpha chain variable domain of TCR clone 375188 (TRAV12-3, TRAJ49)
CAMNDDQFYF

SEQ ID NO: 750376 - protein, 11 aa, Homo sapiens
  CDR3 for beta chain variable domain of TCR clone 375188 (TRBV7-9, TRBJ2-5)
CASSLSATQYF

SEQ ID NO: 750377 - protein, 12 aa, Homo sapiens
  CDR3 for alpha chain variable domain of TCR clone 375189 (TRAV1-1, TRAJ39)
CAVPVVGHMLTF

SEQ ID NO: 750378 - protein, 15 aa, Homo sapiens
  CDR3 for beta chain variable domain of TCR clone 375189 (TRBV19, TRBJ1-6)
CASSTQGAVGSPLHF

SEQ ID NO: 750379 - protein, 12 aa, Homo sapiens
  CDR3 for alpha chain variable domain of TCR clone 375190 (TRAV13-1, TRAJ43)
SVQQYNNNDMRF

SEQ ID NO: 750380 - protein, 15 aa, Homo sapiens
  CDR3 for beta chain variable domain of TCR clone 375190 (TRBV12-4, TRBJ2-5)
CASSTGSSRQGTQYF

SEQ ID NO: 750381 - protein, 13 aa, Homo sapiens
  CDR3 for alpha chain variable domain of TCR clone 375191 (TRAV13-1, TRAJ37)
CAAVSGNTGKLIF

SEQ ID NO: 750382 - protein, 13 aa, Homo sapiens
  CDR3 for beta chain variable domain of TCR clone 375191 (TRBV7-9, TRBJ1-2)
CAGSLKQNYGYTF

SEQ ID NO: 750383 - protein, 10 aa, Homo sapiens
  CDR3 for alpha chain variable domain of TCR clone 375192 (TRAV38-2/DV8, TRAJ40)
CASGNYKYIF

SEQ ID NO: 750384 - protein, 14 aa, Homo sapiens
  CDR3 for beta chain variable domain of TCR clone 375192 (TRBV7-9, TRBJ2-1)
CASSPRDSLYEQFL

SEQ ID NO: 750385 - protein, 15 aa, Homo sapiens
  CDR3 for alpha chain variable domain of TCR clone 375193 (TRAV23/DV6, TRAJ9)
CSKHRGNTGGFKTIF

SEQ ID NO: 750386 - protein, 12 aa, Homo sapiens
  CDR3 for beta chain variable domain of TCR clone 375193 (TRBV11-2, TRBJ2-2)
CASSLGGGELFF

SEQ ID NO: 750387 - protein, 12 aa, Homo sapiens
  CDR3 for alpha chain variable domain of TCR clone 375194 (TRAV12-1, TRAJ34)
CVVTFNTDKLIF

SEQ ID NO: 750388 - protein, 13 aa, Homo sapiens
  CDR3 for beta chain variable domain of TCR clone 375194 (TRBV7-7, TRBJ2-2)
CASSLTSAGELFF

SEQ ID NO: 750389 - protein, 15 aa, Homo sapiens
  CDR3 for alpha chain variable domain of TCR clone 375195 (TRAV2, TRAJ11)
CAVGGRNSGYSTLTF

SEQ ID NO: 750390 - protein, 12 aa, Homo sapiens
  CDR3 for beta chain variable domain of TCR clone 375195 (TRBV28, TRBJ2-7)
CASRFSSYEQYF

SEQ ID NO: 750391 - protein, 14 aa, Homo sapiens
  CDR3 for alpha chain variable domain of TCR clone 375196 (TRAV13-1, TRAJ40)
CAARSTSGTYKYIF

SEQ ID NO: 750392 - protein, 15 aa, Homo sapiens
  CDR3 for beta chain variable domain of TCR clone 375196 (TRBV18, TRBJ1-5)
CASSETGGNNQHQHF

SEQ ID NO: 750393 - protein, 15 aa, Homo sapiens
  CDR3 for alpha chain variable domain of TCR clone 375197 (TRAV13-1, TRAJ48)
CAATPANFGNEKLTF

SEQ ID NO: 750394 - protein, 14 aa, Homo sapiens
  CDR3 for beta chain variable domain of TCR clone 375197 (TRBV20-1, TRBJ2-3)
CSAGGRRGTDTQYF

SEQ ID NO: 750395 - protein, 14 aa, Homo sapiens
  CDR3 for alpha chain variable domain of TCR clone 375198 (TRAV2, TRAJ37)
CAVDFTSNTGKLIF

SEQ ID NO: 750396 - protein, 12 aa, Homo sapiens
  CDR3 for beta chain variable domain of TCR clone 375198 (TRBV5-5, TRBJ2-5)
CASSYFGETQYF

SEQ ID NO: 750397 - protein, 11 aa, Homo sapiens
  CDR3 for alpha chain variable domain of TCR clone 375199 (TRAV21, TRAJ48)
CAVDGNEKLTF

SEQ ID NO: 750398 - protein, 16 aa, Homo sapiens
  CDR3 for beta chain variable domain of TCR clone 375199 (TRBV12-4, TRBJ1-5)
CASISGPRGSNQPQHF

SEQ ID NO: 750399 - protein, 17 aa, Homo sapiens
  CDR3 for alpha chain variable domain of TCR clone 375200 (TRAV3, TRAJ6)
CAVRNGPRAGGSYIPTF

SEQ ID NO: 750400 - protein, 14 aa, Homo sapiens
  CDR3 for beta chain variable domain of TCR clone 375200 (TRBV7-2, TRBJ2-7)
CASSPKTSFDEQYF

SEQ ID NO: 750401 - protein, 14 aa, Homo sapiens
  CDR3 for alpha chain variable domain of TCR clone 375201 (TRAV3, TRAJ22)
CAVRDYCSARQLTF

SEQ ID NO: 750402 - protein, 13 aa, Homo sapiens
  CDR3 for beta chain variable domain of TCR clone 375201 (TRBV11-2, TRBJ2-5)
CASGHGAKETQYF

SEQ ID NO: 750403 - protein, 15 aa, Homo sapiens
  CDR3 for alpha chain variable domain of TCR clone 375202 (TRAV3, TRAJ13)
CAVRDIAGGYPKVTF

SEQ ID NO: 750404 - protein, 13 aa, Homo sapiens
  CDR3 for beta chain variable domain of TCR clone 375202 (TRBV2, TRBJ2-2)
CASSKKNTGELFF

SEQ ID NO: 750405 - protein, 13 aa, Homo sapiens
  CDR3 for alpha chain variable domain of TCR clone 375203 (TRAV21, TRAJ20)
CAVGLRVDYKLSF

SEQ ID NO: 750406 - protein, 14 aa, Homo sapiens
  CDR3 for beta chain variable domain of TCR clone 375203 (TRBV5-1, TRBJ2-3)
CASSLFGPTDTQYF

SEQ ID NO: 750407 - protein, 14 aa, Homo sapiens
  CDR3 for alpha chain variable domain of TCR clone 375204 (TRAV17, TRAJ37)
CATDGSSNTGKLIF

SEQ ID NO: 750408 - protein, 13 aa, Homo sapiens
  CDR3 for beta chain variable domain of TCR clone 375204 (TRBV19, TRBJ1-5)
CASSIGGEQPQHF

SEQ ID NO: 750409 - protein, 14 aa, Homo sapiens
  CDR3 for alpha chain variable domain of TCR clone 375205 (TRAV20, TRAJ10)
CAVRVEGGGNELTF

SEQ ID NO: 750410 - protein, 18 aa, Homo sapiens
  CDR3 for beta chain variable domain of TCR clone 375205 (TRBV24-1, TRBJ2-1)
CATSDLMFLGRGVHEQFF

SEQ ID NO: 750411 - protein, 16 aa, Homo sapiens
  CDR3 for alpha chain variable domain of TCR clone 375206 (TRAV30, TRAJ57)
CGTGWAPQGGSEKLVF

SEQ ID NO: 750412 - protein, 14 aa, Homo sapiens
  CDR3 for beta chain variable domain of TCR clone 375206 (TRBV18, TRBJ1-1)
CASAPGFQGVEAFF

SEQ ID NO: 750413 - protein, 14 aa, Homo sapiens
  CDR3 for alpha chain variable domain of TCR clone 375207 (TRAV14/DV4, TRAJ49)
CAFNRYLTGNQFYF

SEQ ID NO: 750414 - protein, 15 aa, Homo sapiens
  CDR3 for beta chain variable domain of TCR clone 375207 (TRBV7-8, TRBJ1-5)
CVSSLALGGQQPQHF

SEQ ID NO: 750415 - protein, 13 aa, Homo sapiens
  CDR3 for alpha chain variable domain of TCR clone 375208 (TRAV20, TRAJ37)
CAGCSSNTGKLIF

SEQ ID NO: 750416 - protein, 14 aa, Homo sapiens
  CDR3 for beta chain variable domain of TCR clone 375208 (TRBV11-2, TRBJ2-3)
CASSLGGGANTQYF

SEQ ID NO: 750417 - protein, 11 aa, Homo sapiens
  CDR3 for alpha chain variable domain of TCR clone 375209 (TRAV1-2, TRAJ20)
CAVSNDYKLSF

SEQ ID NO: 750418 - protein, 16 aa, Homo sapiens
  CDR3 for beta chain variable domain of TCR clone 375209 (TRBV29-1, TRBJ2-6)
CSVEDITYSAANVLTF

SEQ ID NO: 750419 - protein, 11 aa, Homo sapiens
  CDR3 for alpha chain variable domain of TCR clone 375210 (TRAV2, TRAJ33)
CAVDSNYQLIW

SEQ ID NO: 750420 - protein, 16 aa, Homo sapiens
  CDR3 for beta chain variable domain of TCR clone 375210 (TRBV12-5, TRBJ2-5)
CASGPRTSGNQETQNF

SEQ ID NO: 750421 - protein, 13 aa, Homo sapiens
  CDR3 for alpha chain variable domain of TCR clone 375211 (TRAV12-2, TRAJ48)
CAAPNFGNEKLTF

SEQ ID NO: 750422 - protein, 13 aa, Homo sapiens
  CDR3 for beta chain variable domain of TCR clone 375211 (TRBV5-1, TRBJ1-1)
CASSADWDTEAFF

SEQ ID NO: 750423 - protein, 13 aa, Homo sapiens
  CDR3 for alpha chain variable domain of TCR clone 375212 (TRAV1-2, TRAJ11)
CAVRDSRYSTLTF

SEQ ID NO: 750424 - protein, 16 aa, Homo sapiens
  CDR3 for beta chain variable domain of TCR clone 375212 (TRBV5-1, TRBJ2-7)
CASSWGTGGRAWEQYF

SEQ ID NO: 750425 - protein, 14 aa, Homo sapiens
  CDR3 for alpha chain variable domain of TCR clone 375213 (TRAV1-1, TRAJ33)
CAVRPEDSNYQLIW

SEQ ID NO: 750426 - protein, 16 aa, Homo sapiens
  CDR3 for beta chain variable domain of TCR clone 375213 (TRBV19, TRBJ2-6)
CASSMSGLSGANDLTF

SEQ ID NO: 750427 - protein, 15 aa, Homo sapiens
  CDR3 for alpha chain variable domain of TCR clone 375214 (TRAV8-2, TRAJ15)
CVVTMGNEAGTALIF

SEQ ID NO: 750428 - protein, 12 aa, Homo sapiens
  CDR3 for beta chain variable domain of TCR clone 375214 (TRBV6-1, TRBJ2-7)
CASSDYSYEQYF

SEQ ID NO: 750429 - protein, 15 aa, Homo sapiens
  CDR3 for alpha chain variable domain of TCR clone 375215 (TRAV3, TRAJ5)
CAVRDLDTGRGALNF

SEQ ID NO: 750430 - protein, 13 aa, Homo sapiens
  CDR3 for beta chain variable domain of TCR clone 375215 (TRBV7-3, TRBJ1-1)
CASSQDWGAEAFF

SEQ ID NO: 750431 - protein, 13 aa, Homo sapiens
  CDR3 for alpha chain variable domain of TCR clone 375216 (TRAV1-1, TRAJ7)
CAVRDHGNNRLAF

SEQ ID NO: 750432 - protein, 20 aa, Homo sapiens
  CDR3 for beta chain variable domain of TCR clone 375216 (TRBV28, TRBJ2-3)
CASSLRVRSTSGRSTDTQYF

SEQ ID NO: 750433 - protein, 14 aa, Homo sapiens
  CDR3 for alpha chain variable domain of TCR clone 375217 (TRAV1-2, TRAJ8)
FAVREDTGFQKLVF

SEQ ID NO: 750434 - protein, 15 aa, Homo sapiens
  CDR3 for beta chain variable domain of TCR clone 375217 (TRBV6-3, TRBJ2-7)
CASSSPGTVFYKQYF

SEQ ID NO: 750435 - protein, 11 aa, Homo sapiens
  CDR3 for alpha chain variable domain of TCR clone 375218 (TRAV2, TRAJ13)
CDSGGYQKVTF

SEQ ID NO: 750436 - protein, 16 aa, Homo sapiens
  CDR3 for beta chain variable domain of TCR clone 375218 (TRBV19, TRBJ2-1)
CASSKAGPSSYNEQFF

SEQ ID NO: 750437 - protein, 12 aa, Homo sapiens
  CDR3 for alpha chain variable domain of TCR clone 375219 (TRAV8-3, TRAJ20)
CAVGANDYKLSF

SEQ ID NO: 750438 - protein, 15 aa, Homo sapiens
  CDR3 for beta chain variable domain of TCR clone 375219 (TRBV11-2, TRBJ2-1)
CASRLGTSGLNEQFF

SEQ ID NO: 750439 - protein, 11 aa, Homo sapiens
  CDR3 for alpha chain variable domain of TCR clone 375220 (TRAV12-3, TRAJ26)
CAMSHGQNFVF

SEQ ID NO: 750440 - protein, 13 aa, Homo sapiens
  CDR3 for beta chain variable domain of TCR clone 375220 (TRBV29-1, TRBJ2-1)
CSVEGGRVNEQFF

SEQ ID NO: 750441 - protein, 14 aa, Homo sapiens
  CDR3 for alpha chain variable domain of TCR clone 375221 (TRAV35, TRAJ33)
CWPRGRDSNYQLIW

SEQ ID NO: 750442 - protein, 11 aa, Homo sapiens
  CDR3 for beta chain variable domain of TCR clone 375221 (TRBV10-3, TRBJ2-7)
CAISGRLEQYF

SEQ ID NO: 750443 - protein, 14 aa, Homo sapiens
  CDR3 for alpha chain variable domain of TCR clone 375222 (TRAV38-1, TRAJ45)
CAYYSGGGADGLTF

SEQ ID NO: 750444 - protein, 13 aa, Homo sapiens
  CDR3 for beta chain variable domain of TCR clone 375222 (TRBV25-1, TRBJ1-6)
CASHPRGDSPLHF

SEQ ID NO: 750445 - protein, 18 aa, Homo sapiens
  CDR3 for alpha chain variable domain of TCR clone 375223 (TRAV9-2, TRAJ52)
CALSRHNAGGTSYGKLTF

SEQ ID NO: 750446 - protein, 13 aa, Homo sapiens
  CDR3 for beta chain variable domain of TCR clone 375223 (TRBV7-9, TRBJ1-2)
CASSLKQNYGHTF

SEQ ID NO: 750447 - protein, 12 aa, Homo sapiens
  CDR3 for alpha chain variable domain of TCR clone 375224 (TRAV6, TRAJ3)
CALYSSASNIIF

SEQ ID NO: 750448 - protein, 12 aa, Homo sapiens
  CDR3 for beta chain variable domain of TCR clone 375224 (TRBV7-2, TRBJ2-3)
CASSLIGETQYF

SEQ ID NO: 750449 - protein, 16 aa, Homo sapiens
  CDR3 for alpha chain variable domain of TCR clone 375225 (TRAV23/DV6, TRAJ9)
CAASIGGNTGGLKTIF

SEQ ID NO: 750450 - protein, 13 aa, Homo sapiens
  CDR3 for beta chain variable domain of TCR clone 375225 (TRBV27, TRBJ2-3)
CASSSLPGDTQYF

SEQ ID NO: 750451 - protein, 13 aa, Homo sapiens
  CDR3 for alpha chain variable domain of TCR clone 375226 (TRAV12-1, TRAJ29)
WVVNGPGNTPLVF

SEQ ID NO: 750452 - protein, 13 aa, Homo sapiens
  CDR3 for beta chain variable domain of TCR clone 375226 (TRBV7-2, TRBJ2-5)
CASSRGGLETQYF

SEQ ID NO: 750453 - protein, 12 aa, Homo sapiens
  CDR3 for alpha chain variable domain of TCR clone 375227 (TRAV8-6, TRAJ43)
CAVSHNNNGMRF

SEQ ID NO: 750454 - protein, 13 aa, Homo sapiens
  CDR3 for beta chain variable domain of TCR clone 375227 (TRBV7-3, TRBJ1-1)
CASSQDGGAEAFF

SEQ ID NO: 750455 - protein, 15 aa, Homo sapiens
  CDR3 for alpha chain variable domain of TCR clone 375228 (TRAV21, TRAJ52)
CAVRGGGTSYGKLTF

SEQ ID NO: 750456 - protein, 13 aa, Homo sapiens
  CDR3 for beta chain variable domain of TCR clone 375228 (TRBV6-5, TRBJ2-5)
CATVPSPQETQYF

SEQ ID NO: 750457 - protein, 13 aa, Homo sapiens
  CDR3 for alpha chain variable domain of TCR clone 375229 (TRAV12-1, TRAJ6)
CVVFPGGSYIPTF

SEQ ID NO: 750458 - protein, 14 aa, Homo sapiens
  CDR3 for beta chain variable domain of TCR clone 375229 (TRBV5-1, TRBJ1-1)
CASSLVTGVTEAFF

SEQ ID NO: 750459 - protein, 10 aa, Homo sapiens
  CDR3 for alpha chain variable domain of TCR clone 375230 (TRAV8-4, TRAJ43)
CAVSAADMRF

SEQ ID NO: 750460 - protein, 15 aa, Homo sapiens
  CDR3 for beta chain variable domain of TCR clone 375230 (TRBV5-1, TRBJ2-3)
CASSVTSGSTDTKYF

SEQ ID NO: 750461 - protein, 17 aa, Homo sapiens
  CDR3 for alpha chain variable domain of TCR clone 375231 (TRAV17, TRAJ7)
CATLGRLSFGKGNQVVV

SEQ ID NO: 750462 - protein, 13 aa, Homo sapiens
  CDR3 for beta chain variable domain of TCR clone 375231 (TRBV12-4, TRBJ2-7)
CASSLERVREQYF

SEQ ID NO: 750463 - protein, 12 aa, Homo sapiens
  CDR3 for alpha chain variable domain of TCR clone 375232 (TRAV2, TRAJ3)
CAVRSSASKIIF

SEQ ID NO: 750464 - protein, 14 aa, Homo sapiens
  CDR3 for beta chain variable domain of TCR clone 375232 (TRBV6-1, TRBJ1-3)
CASVQGGGGNTIYF

SEQ ID NO: 750465 - protein, 15 aa, Homo sapiens
  CDR3 for alpha chain variable domain of TCR clone 375233 (TRAV8-3, TRAJ20)
CAVEAKGSNDYKLSF

SEQ ID NO: 750466 - protein, 12 aa, Homo sapiens
  CDR3 for beta chain variable domain of TCR clone 375233 (TRBV19, TRBJ2-3)
CATTSSTDTQYF

SEQ ID NO: 750467 - protein, 13 aa, Homo sapiens
  CDR3 for alpha chain variable domain of TCR clone 375234 (TRAV3, TRAJ27)
CAVRTLGAGTSTF

SEQ ID NO: 750468 - protein, 13 aa, Homo sapiens
  CDR3 for beta chain variable domain of TCR clone 375234 (TRBV7-9, TRBJ2-3)
CASSPGSTDTQYF

SEQ ID NO: 750469 - protein, 12 aa, Homo sapiens
  CDR3 for alpha chain variable domain of TCR clone 375235 (TRAV27, TRAJ9)
CAGESGCFKTIF

SEQ ID NO: 750470 - protein, 18 aa, Homo sapiens
  CDR3 for beta chain variable domain of TCR clone 375235 (TRBV10-2, TRBJ2-2)
CISAPAVHRQADAGELFF

SEQ ID NO: 750471 - protein, 17 aa, Homo sapiens
  CDR3 for alpha chain variable domain of TCR clone 375236 (TRAV4, TRAJ18)
CLVVAAGRGSTLGRLYV

SEQ ID NO: 750472 - protein, 17 aa, Homo sapiens
  CDR3 for beta chain variable domain of TCR clone 375236 (TRBV28, TRBJ2-2)
CASSLATGMGDAGELFF

SEQ ID NO: 750473 - protein, 14 aa, Homo sapiens
  CDR3 for alpha chain variable domain of TCR clone 375237 (TRAV21, TRAJ45)
CAVSSGGGADGLTF

SEQ ID NO: 750474 - protein, 13 aa, Homo sapiens
  CDR3 for beta chain variable domain of TCR clone 375237 (TRBV12-4, TRBJ1-1)
CASSPGTGFEAFF

SEQ ID NO: 750475 - protein, 15 aa, Homo sapiens
  CDR3 for alpha chain variable domain of TCR clone 375238 (TRAV8-3, TRAJ40)
CAAPSLGSGTYKYNF

SEQ ID NO: 750476 - protein, 16 aa, Homo sapiens
  CDR3 for beta chain variable domain of TCR clone 375238 (TRBV7-3, TRBJ2-3)
CASSLSGYRPEDTQYF

SEQ ID NO: 750477 - protein, 14 aa, Homo sapiens
  CDR3 for alpha chain variable domain of TCR clone 375239 (TRAV12-2, TRAJ13)
CAVKKTGGYQKVTF

SEQ ID NO: 750478 - protein, 13 aa, Homo sapiens
  CDR3 for beta chain variable domain of TCR clone 375239 (TRBV20-1, TRBJ1-1)
CSARLGQGTEAFV

SEQ ID NO: 750479 - protein, 14 aa, Homo sapiens
  CDR3 for alpha chain variable domain of TCR clone 375240 (TRAV2, TRAJ9)
CAVEDRCGGFKTIF

SEQ ID NO: 750480 - protein, 15 aa, Homo sapiens
  CDR3 for beta chain variable domain of TCR clone 375240 (TRBV6-6, TRBJ2-7)
CASSYSYGGSYEQYF

SEQ ID NO: 750481 - protein, 15 aa, Homo sapiens
  CDR3 for alpha chain variable domain of TCR clone 375241 (TRAV27, TRAJ38)
CAARRNAGNNRKLIW

SEQ ID NO: 750482 - protein, 14 aa, Homo sapiens
  CDR3 for beta chain variable domain of TCR clone 375241 (TRBV4-1, TRBJ2-7)
CASSPVAGGDEQYF

SEQ ID NO: 750483 - protein, 14 aa, Homo sapiens
  CDR3 for alpha chain variable domain of TCR clone 375242 (TRAV12-1, TRAJ45)
CVVNVGGGADVLTF

SEQ ID NO: 750484 - protein, 14 aa, Homo sapiens
  CDR3 for beta chain variable domain of TCR clone 375242 (TRBV29-1, TRBJ2-3)
CSVEPGTRTDTQYF

SEQ ID NO: 750485 - protein, 18 aa, Homo sapiens
  CDR3 for alpha chain variable domain of TCR clone 375243 (TRAV21, TRAJ52)
CAVRPSPAGGTSYGKLIF

SEQ ID NO: 750486 - protein, 13 aa, Homo sapiens
  CDR3 for beta chain variable domain of TCR clone 375243 (TRBV7-3, TRBJ1-1)
CASSQDWGAEAFF

SEQ ID NO: 750487 - protein, 14 aa, Homo sapiens
  CDR3 for alpha chain variable domain of TCR clone 375244 (TRAV26-1, TRAJ45)
CIEVTGGGADGLTF

SEQ ID NO: 750488 - protein, 19 aa, Homo sapiens
  CDR3 for beta chain variable domain of TCR clone 375244 (TRBV19, TRBJ2-2)
CASTRPGLAGGRVTGELVF

SEQ ID NO: 750489 - protein, 14 aa, Homo sapiens
  CDR3 for alpha chain variable domain of TCR clone 375245 (TRAV1-2, TRAJ8)
CAVREDTGFQKLVF

SEQ ID NO: 750490 - protein, 12 aa, Homo sapiens
  CDR3 for beta chain variable domain of TCR clone 375245 (TRBV11-2, TRBJ2-2)
CASSLGGGELFL

SEQ ID NO: 750491 - protein, 15 aa, Homo sapiens
  CDR3 for alpha chain variable domain of TCR clone 375246 (TRAV13-2, TRAJ28)
CAENNAGAGRYQLTF

SEQ ID NO: 750492 - protein, 13 aa, Homo sapiens
  CDR3 for beta chain variable domain of TCR clone 375246 (TRBV25-1, TRBJ1-2)
CASSENMGRGYTF

SEQ ID NO: 750493 - protein, 12 aa, Homo sapiens
  CDR3 for alpha chain variable domain of TCR clone 375247 (TRAV35, TRAJ31)
CAAASNNARLMF

SEQ ID NO: 750494 - protein, 17 aa, Homo sapiens
  CDR3 for beta chain variable domain of TCR clone 375247 (TRBV28, TRBJ2-5)
CASSRQGGLAGAETQYF

SEQ ID NO: 750495 - protein, 12 aa, Homo sapiens
  CDR3 for alpha chain variable domain of TCR clone 375248 (TRAV12-3, TRAJ17)
CAMTLTGNKLTF

SEQ ID NO: 750496 - protein, 14 aa, Homo sapiens
  CDR3 for beta chain variable domain of TCR clone 375248 (TRBV5-6, TRBJ2-3)
CASSPGLEIDTQYF

SEQ ID NO: 750497 - protein, 12 aa, Homo sapiens
  CDR3 for alpha chain variable domain of TCR clone 375249 (TRAV3, TRAJ31)
CAVRDGNDRLMF

SEQ ID NO: 750498 - protein, 18 aa, Homo sapiens
  CDR3 for beta chain variable domain of TCR clone 375249 (TRBV7-2, TRBJ2-3)
CASSLKREGSGITDTQYF

SEQ ID NO: 750499 - protein, 14 aa, Homo sapiens
  CDR3 for alpha chain variable domain of TCR clone 375250 (TRAV8-1, TRAJ5)
CAVRTDTGRRALTF

SEQ ID NO: 750500 - protein, 13 aa, Homo sapiens
  CDR3 for beta chain variable domain of TCR clone 375250 (TRBV5-1, TRBJ2-1)
CASSLGSYNEQFF

SEQ ID NO: 750501 - protein, 14 aa, Homo sapiens
  CDR3 for alpha chain variable domain of TCR clone 375251 (TRAV13-2, TRAJ17)
CAENSKAAGNKLTF

SEQ ID NO: 750502 - protein, 14 aa, Homo sapiens
  CDR3 for beta chain variable domain of TCR clone 375251 (TRBV7-2, TRBJ2-7)
CASSLPPGQGPQYF

SEQ ID NO: 750503 - protein, 14 aa, Homo sapiens
  CDR3 for alpha chain variable domain of TCR clone 375252 (TRAV1-2, TRAJ16)
CAVNRFSDGQNLLF

SEQ ID NO: 750504 - protein, 17 aa, Homo sapiens
  CDR3 for beta chain variable domain of TCR clone 375252 (TRBV11-2, TRBJ2-1)
CASSLYPPGVEYNEQFF

SEQ ID NO: 750505 - protein, 17 aa, Homo sapiens
  CDR3 for alpha chain variable domain of TCR clone 375253 (TRAV3, TRAJ42)
CAVKDRDYVGSQGNLIF

SEQ ID NO: 750506 - protein, 14 aa, Homo sapiens
  CDR3 for beta chain variable domain of TCR clone 375253 (TRBV7-2, TRBJ2-5)
CASSPRGSSETQYF

SEQ ID NO: 750507 - protein, 17 aa, Homo sapiens
  CDR3 for alpha chain variable domain of TCR clone 375254 (TRAV23/DV6, TRAJ57)
CAASSTLPQGGSEKLVF

SEQ ID NO: 750508 - protein, 14 aa, Homo sapiens
  CDR3 for beta chain variable domain of TCR clone 375254 (TRBV25-1, TRBJ1-1)
CASTHLGGNSEAFF

SEQ ID NO: 750509 - protein, 13 aa, Homo sapiens
  CDR3 for alpha chain variable domain of TCR clone 375255 (TRAV21, TRAJ20)
CAVGLRVDYKLSF

SEQ ID NO: 750510 - protein, 16 aa, Homo sapiens
  CDR3 for beta chain variable domain of TCR clone 375255 (TRBV6-1, TRBJ2-5)
CASSETLDRGAETRYF

SEQ ID NO: 750511 - protein, 16 aa, Homo sapiens
  CDR3 for alpha chain variable domain of TCR clone 375256 (TRAV12-1, TRAJ43)
CVVNPHRFGAGTRLTV

SEQ ID NO: 750512 - protein, 15 aa, Homo sapiens
  CDR3 for beta chain variable domain of TCR clone 375256 (TRBV27, TRBJ2-2)
CQQFDRGRGHRGAVF

SEQ ID NO: 750513 - protein, 16 aa, Homo sapiens
  CDR3 for alpha chain variable domain of TCR clone 375257 (TRAV3, TRAJ21)
CAVRDIERGNFNKFYF

SEQ ID NO: 750514 - protein, 17 aa, Homo sapiens
  CDR3 for beta chain variable domain of TCR clone 375257 (TRBV27, TRBJ2-7)
CASSLTTVRAVLRAGHQ

SEQ ID NO: 750515 - protein, 14 aa, Homo sapiens
  CDR3 for alpha chain variable domain of TCR clone 375258 (TRAV17, TRAJ34)
CATVPTDNTDKLIF

SEQ ID NO: 750516 - protein, 18 aa, Homo sapiens
  CDR3 for beta chain variable domain of TCR clone 375258 (TRBV23-1, TRBJ2-1)
TVSLRQRSEKWLKNEQFF

SEQ ID NO: 750517 - protein, 12 aa, Homo sapiens
  CDR3 for alpha chain variable domain of TCR clone 375259 (TRAV8-1, TRAJ39)
CAVANNAGNMLP

SEQ ID NO: 750518 - protein, 15 aa, Homo sapiens
  CDR3 for beta chain variable domain of TCR clone 375259 (TRBV7-2, TRBJ2-1)
CASSLNRGAYNEQFF

SEQ ID NO: 750519 - protein, 17 aa, Homo sapiens
  CDR3 for alpha chain variable domain of TCR clone 375260 (TRAV13-1, TRAJ23)
CAASKRFHRLRKAYLRT

SEQ ID NO: 750520 - protein, 16 aa, Homo sapiens
  CDR3 for beta chain variable domain of TCR clone 375260 (TRBV7-9, TRBJ2-1)
CASSSPQGTTRNEQFF

SEQ ID NO: 750521 - protein, 14 aa, Homo sapiens
  CDR3 for alpha chain variable domain of TCR clone 375261 (TRAV12-1, TRAJ13)
CVVIDSWGYQKVTF

SEQ ID NO: 750522 - protein, 13 aa, Homo sapiens
  CDR3 for beta chain variable domain of TCR clone 375261 (TRBV15, TRBJ1-6)
CATSGGLNSPLHF

SEQ ID NO: 750523 - protein, 15 aa, Homo sapiens
  CDR3 for alpha chain variable domain of TCR clone 375262 (TRAV23/DV6, TRAJ13)
CAAWPGGGGYQQVTF

SEQ ID NO: 750524 - protein, 14 aa, Homo sapiens
  CDR3 for beta chain variable domain of TCR clone 375262 (TRBV6-1, TRBJ2-1)
CASAGGAIKNEQFF

SEQ ID NO: 750525 - protein, 15 aa, Homo sapiens
  CDR3 for alpha chain variable domain of TCR clone 375263 (TRAV4, TRAJ32)
CLVGEDGGATNKLIF

SEQ ID NO: 750526 - protein, 12 aa, Homo sapiens
  CDR3 for beta chain variable domain of TCR clone 375263 (TRBV11-3, TRBJ2-2)
CASSLGGGELFF

SEQ ID NO: 750527 - protein, 18 aa, Homo sapiens
  CDR3 for alpha chain variable domain of TCR clone 375264 (TRAV26-1, TRAJ22)
CIVRVSFWFCKATDLWIW

SEQ ID NO: 750528 - protein, 15 aa, Homo sapiens
  CDR3 for beta chain variable domain of TCR clone 375264 (TRBV10-2, TRBJ2-6)
CASSEQGTGANVLTF

SEQ ID NO: 750529 - protein, 12 aa, Homo sapiens
  CDR3 for alpha chain variable domain of TCR clone 375265 (TRAV12-3, TRAJ43)
CAISSNNNDMRF

SEQ ID NO: 750530 - protein, 13 aa, Homo sapiens
  CDR3 for beta chain variable domain of TCR clone 375265 (TRBV12-4, TRBJ2-1)
CASSFHSGSEQFF

SEQ ID NO: 750531 - protein, 18 aa, Homo sapiens
  CDR3 for alpha chain variable domain of TCR clone 375266 (TRAV21, TRAJ52)
CAVRPSQEGGTSYGKLTF

SEQ ID NO: 750532 - protein, 17 aa, Homo sapiens
  CDR3 for beta chain variable domain of TCR clone 375266 (TRBV13, TRBJ2-3)
CASSLSRVAGGRNTQYF

SEQ ID NO: 750533 - protein, 12 aa, Homo sapiens
  CDR3 for alpha chain variable domain of TCR clone 375267 (TRAV8-1, TRAJ31)
CAVINNNARLMF

SEQ ID NO: 750534 - protein, 15 aa, Homo sapiens
  CDR3 for beta chain variable domain of TCR clone 375267 (TRBV20-1, TRBJ2-2)
CSARGGQGNTGQPFF

SEQ ID NO: 750535 - protein, 14 aa, Homo sapiens
  CDR3 for alpha chain variable domain of TCR clone 375268 (TRAV17, TRAJ22)
CATVLSGSARQLTF

SEQ ID NO: 750536 - protein, 13 aa, Homo sapiens
  CDR3 for beta chain variable domain of TCR clone 375268 (TRBV15, TRBJ1-6)
CATSGGLNSPLYF

SEQ ID NO: 750537 - protein, 17 aa, Homo sapiens
  CDR3 for alpha chain variable domain of TCR clone 375269 (TRAV8-1, TRAJ42)
CAVKWGNYGGSEGNLIF

SEQ ID NO: 750538 - protein, 15 aa, Homo sapiens
  CDR3 for beta chain variable domain of TCR clone 375269 (TRBV9, TRBJ1-6)
CASSVAGTGDSPLHF

SEQ ID NO: 750539 - protein, 14 aa, Homo sapiens
  CDR3 for alpha chain variable domain of TCR clone 375270 (TRAV16, TRAJ17)
CALSGRAAGNKLTF

SEQ ID NO: 750540 - protein, 15 aa, Homo sapiens
  CDR3 for beta chain variable domain of TCR clone 375270 (TRBV5-1, TRBJ2-1)
CASSQAGYWWNEQFF

SEQ ID NO: 750541 - protein, 12 aa, Homo sapiens
  CDR3 for alpha chain variable domain of TCR clone 375271 (TRAV22, TRAJ29)
CCGGSGNTPLVF

SEQ ID NO: 750542 - protein, 13 aa, Homo sapiens
  CDR3 for beta chain variable domain of TCR clone 375271 (TRBV4-2, TRBJ1-1)
CASSQAGNTEDFF

SEQ ID NO: 750543 - protein, 10 aa, Homo sapiens
  CDR3 for alpha chain variable domain of TCR clone 375272 (TRAV1-2, TRAJ20)
CACNDYKLSI

SEQ ID NO: 750544 - protein, 14 aa, Homo sapiens
  CDR3 for beta chain variable domain of TCR clone 375272 (TRBV20-1, TRBJ1-1)
CSAQTRIGGTEAFF

SEQ ID NO: 750545 - protein, 13 aa, Homo sapiens
  CDR3 for alpha chain variable domain of TCR clone 375273 (TRAV13-1, TRAJ21)
CAASIYNFNEFYF

SEQ ID NO: 750546 - protein, 14 aa, Homo sapiens
  CDR3 for beta chain variable domain of TCR clone 375273 (TRBV20-1, TRBJ2-1)
CSALDRGTYNEQFF

SEQ ID NO: 750547 - protein, 13 aa, Homo sapiens
  CDR3 for alpha chain variable domain of TCR clone 375274 (TRAV24, TRAJ37)
CACSPGNTGKLIF

SEQ ID NO: 750548 - protein, 15 aa, Homo sapiens
  CDR3 for beta chain variable domain of TCR clone 375274 (TRBV7-6, TRBJ2-5)
CASSKPTGPQETQYF

SEQ ID NO: 750549 - protein, 13 aa, Homo sapiens
  CDR3 for alpha chain variable domain of TCR clone 375275 (TRAV35, TRAJ32)
CAGVGGATNKLIF

SEQ ID NO: 750550 - protein, 17 aa, Homo sapiens
  CDR3 for beta chain variable domain of TCR clone 375275 (TRBV4-1, TRBJ2-7)
CASSQPTSGSRGYEQYF

SEQ ID NO: 750551 - protein, 14 aa, Homo sapiens
  CDR3 for alpha chain variable domain of TCR clone 375276 (TRAV26-1, TRAJ34)
CIVRVAYNPDKLIF

SEQ ID NO: 750552 - protein, 14 aa, Homo sapiens
  CDR3 for beta chain variable domain of TCR clone 375276 (TRBV12-5, TRBJ2-5)
CASGSRTHQETQYF

SEQ ID NO: 750553 - protein, 12 aa, Homo sapiens
  CDR3 for alpha chain variable domain of TCR clone 375277 (TRAV36/DV7, TRAJ54)
CAVVRVAQKLVF

SEQ ID NO: 750554 - protein, 14 aa, Homo sapiens
  CDR3 for beta chain variable domain of TCR clone 375277 (TRBV7-3, TRBJ1-1)
CASSLKGGNTEAVF

SEQ ID NO: 750555 - protein, 11 aa, Homo sapiens
  CDR3 for alpha chain variable domain of TCR clone 375278 (TRAV3, TRAJ21)
CAVGDFNKFYF

SEQ ID NO: 750556 - protein, 16 aa, Homo sapiens
  CDR3 for beta chain variable domain of TCR clone 375278 (TRBV19, TRBJ2-1)
CASSKAGPSSYNEQLF

SEQ ID NO: 750557 - protein, 13 aa, Homo sapiens
  CDR3 for alpha chain variable domain of TCR clone 375279 (TRAV21, TRAJ37)
CAVSSGNAGKLIF

SEQ ID NO: 750558 - protein, 15 aa, Homo sapiens
  CDR3 for beta chain variable domain of TCR clone 375279 (TRBV19, TRBJ2-1)
CASSIQATSYNEQFF

SEQ ID NO: 750559 - protein, 12 aa, Homo sapiens
  CDR3 for alpha chain variable domain of TCR clone 375280 (TRAV16, TRAJ27)
CALNHKCRQINL

SEQ ID NO: 750560 - protein, 14 aa, Homo sapiens
  CDR3 for beta chain variable domain of TCR clone 375280 (TRBV11-2, TRBJ1-5)
CASSLDRGRQPQHF

SEQ ID NO: 750561 - protein, 12 aa, Homo sapiens
  CDR3 for alpha chain variable domain of TCR clone 375281 (TRAV8-4, TRAJ43)
CAVSVNNNDMRF

SEQ ID NO: 750562 - protein, 14 aa, Homo sapiens
  CDR3 for beta chain variable domain of TCR clone 375281 (TRBV11-2, TRBJ1-2)
CASSLGTGNYGYTF

SEQ ID NO: 750563 - protein, 16 aa, Homo sapiens
  CDR3 for alpha chain variable domain of TCR clone 375282 (TRAV26-1, TRAJ45)
CIVEKYSGGGADGLTF

SEQ ID NO: 750564 - protein, 15 aa, Homo sapiens
  CDR3 for beta chain variable domain of TCR clone 375282 (TRBV15, TRBJ2-7)
CHRQRPIQQAYEQYF

SEQ ID NO: 750565 - protein, 15 aa, Homo sapiens
  CDR3 for alpha chain variable domain of TCR clone 375283 (TRAV8-3, TRAJ27)
CAVGPSKTNAGKSTF

SEQ ID NO: 750566 - protein, 18 aa, Homo sapiens
  CDR3 for beta chain variable domain of TCR clone 375283 (TRBV7-9, TRBJ2-1)
CASSLAVSGTSGRNEQFF

SEQ ID NO: 750567 - protein, 15 aa, Homo sapiens
  CDR3 for alpha chain variable domain of TCR clone 375284 (TRAV3, TRAJ15)
CAVMPANQAGTALIF

SEQ ID NO: 750568 - protein, 14 aa, Homo sapiens
  CDR3 for beta chain variable domain of TCR clone 375284 (TRBV4-1, TRBJ2-2)
CASSQAVNTGELFF

SEQ ID NO: 750569 - protein, 15 aa, Homo sapiens
  CDR3 for alpha chain variable domain of TCR clone 375285 (TRAV2, TRAJ9)
CAVEDRGTGGFKTIF

SEQ ID NO: 750570 - protein, 14 aa, Homo sapiens
  CDR3 for beta chain variable domain of TCR clone 375285 (TRBV20-1, TRBJ2-2)
CSARSGSNTGELFF

SEQ ID NO: 750571 - protein, 16 aa, Homo sapiens
  CDR3 for alpha chain variable domain of TCR clone 375286 (TRAV4, TRAJ18)
CCVLLIGGSTLGRLYF

SEQ ID NO: 750572 - protein, 14 aa, Homo sapiens
  CDR3 for beta chain variable domain of TCR clone 375286 (TRBV25-1, TRBJ1-1)
CASTHLGGNTEAFF

SEQ ID NO: 750573 - protein, 15 aa, Homo sapiens
  CDR3 for alpha chain variable domain of TCR clone 375287 (TRAV17, TRAJ16)
CATALRFSDGQKLLF

SEQ ID NO: 750574 - protein, 12 aa, Homo sapiens
  CDR3 for beta chain variable domain of TCR clone 375287 (TRBV2, TRBJ2-7)
CAGSDPDYEQYF

SEQ ID NO: 750575 - protein, 15 aa, Homo sapiens
  CDR3 for alpha chain variable domain of TCR clone 375288 (TRAV17, TRAJ57)
CATGPSQGGSEKLVV

SEQ ID NO: 750576 - protein, 12 aa, Homo sapiens
  CDR3 for beta chain variable domain of TCR clone 375288 (TRBV7-9, TRBJ1-1)
CASSLVRGEAFF

SEQ ID NO: 750577 - protein, 14 aa, Homo sapiens
  CDR3 for alpha chain variable domain of TCR clone 375289 (TRAV12-2, TRAJ45)
CALPERVGADGLTF

SEQ ID NO: 750578 - protein, 14 aa, Homo sapiens
  CDR3 for beta chain variable domain of TCR clone 375289 (TRBV18, TRBJ1-5)
CASSPGNSNQPQHF

SEQ ID NO: 750579 - protein, 12 aa, Homo sapiens
  CDR3 for alpha chain variable domain of TCR clone 375290 (TRAV20, TRAJ56)
CAVTGATIKLTF

SEQ ID NO: 750580 - protein, 14 aa, Homo sapiens
  CDR3 for beta chain variable domain of TCR clone 375290 (TRBV20-1, TRBJ2-5)
CSALVPGYQETQYF

SEQ ID NO: 750581 - protein, 14 aa, Homo sapiens
  CDR3 for alpha chain variable domain of TCR clone 375291 (TRAV27, TRAJ23)
CAVAFDNQGGKLIF

SEQ ID NO: 750582 - protein, 15 aa, Homo sapiens
  CDR3 for beta chain variable domain of TCR clone 375291 (TRBV7-3, TRBJ2-7)
CASSLTGQGKYEQYF

SEQ ID NO: 750583 - protein, 15 aa, Homo sapiens
  CDR3 for alpha chain variable domain of TCR clone 375292 (TRAV16, TRAJ53)
CALLNSGGSNYKLTF

SEQ ID NO: 750584 - protein, 14 aa, Homo sapiens
  CDR3 for beta chain variable domain of TCR clone 375292 (TRBV25-1, TRBJ1-1)
CASIHLGGNTEAFF

SEQ ID NO: 750585 - protein, 17 aa, Homo sapiens
  CDR3 for alpha chain variable domain of TCR clone 375293 (TRAV3, TRAJ6)
CAVRDGPRAGGSSIPTF

SEQ ID NO: 750586 - protein, 14 aa, Homo sapiens
  CDR3 for beta chain variable domain of TCR clone 375293 (TRBV7-2, TRBJ2-7)
CASSPKASFYEQYF

SEQ ID NO: 750587 - protein, 14 aa, Homo sapiens
  CDR3 for alpha chain variable domain of TCR clone 375294 (TRAV2, TRAJ37)
CAVDFTSNTGKLIF

SEQ ID NO: 750588 - protein, 14 aa, Homo sapiens
  CDR3 for beta chain variable domain of TCR clone 375294 (TRBV6-6, TRBJ2-7)
CASSLTQVVYEQYF

SEQ ID NO: 750589 - protein, 14 aa, Homo sapiens
  CDR3 for alpha chain variable domain of TCR clone 375295 (TRAV17, TRAJ6)
CATNPAGGSYIPTF

SEQ ID NO: 750590 - protein, 12 aa, Homo sapiens
  CDR3 for beta chain variable domain of TCR clone 375295 (TRBV3-1, TRBJ2-7)
CASSQDRDEQYF

SEQ ID NO: 750591 - protein, 14 aa, Homo sapiens
  CDR3 for alpha chain variable domain of TCR clone 375296 (TRAV29/DV5, TRAJ45)
CAASFRGGADGLTF

SEQ ID NO: 750592 - protein, 14 aa, Homo sapiens
  CDR3 for beta chain variable domain of TCR clone 375296 (TRBV7-2, TRBJ1-1)
CASSFLTGTTEAFF

SEQ ID NO: 750593 - protein, 14 aa, Homo sapiens
  CDR3 for alpha chain variable domain of TCR clone 375297 (TRAV38-1, TRAJ39)
CAFAYNNSGNMLTF

SEQ ID NO: 750594 - protein, 15 aa, Homo sapiens
  CDR3 for beta chain variable domain of TCR clone 375297 (TRBV19, TRBJ2-6)
CASSIGPSGANVLTF

SEQ ID NO: 750595 - protein, 21 aa, Homo sapiens
  CDR3 for alpha chain variable domain of TCR clone 375298 (TRAV1-1, TRAJ9)
CAAKILEASKLYLEQEKDYLL

SEQ ID NO: 750596 - protein, 14 aa, Homo sapiens
  CDR3 for beta chain variable domain of TCR clone 375298 (TRBV20-1, TRBJ2-1)
CSAQIGGSANEQFF

SEQ ID NO: 750597 - protein, 12 aa, Homo sapiens
  CDR3 for alpha chain variable domain of TCR clone 375299 (TRAV1-2, TRAJ29)
CAVPSGNTPIVF

SEQ ID NO: 750598 - protein, 13 aa, Homo sapiens
  CDR3 for beta chain variable domain of TCR clone 375299 (TRBV12-4, TRBJ2-7)
CASSPTETYEQYF

SEQ ID NO: 750599 - protein, 15 aa, Homo sapiens
  CDR3 for alpha chain variable domain of TCR clone 375300 (TRAV8-3, TRAJ40)
CAVVPVTSGTYKYIF

SEQ ID NO: 750600 - protein, 12 aa, Homo sapiens
  CDR3 for beta chain variable domain of TCR clone 375300 (TRBV6-5, TRBJ2-7)
CATSPGAYEQYF

SEQ ID NO: 750601 - protein, 16 aa, Homo sapiens
  CDR3 for alpha chain variable domain of TCR clone 375301 (TRAV1-2, TRAJ35)
CAVRPLRRGFGNVLHC

SEQ ID NO: 750602 - protein, 16 aa, Homo sapiens
  CDR3 for beta chain variable domain of TCR clone 375301 (TRBV6-5, TRBJ2-1)
CASSETLAGHYNEQFF

SEQ ID NO: 750603 - protein, 14 aa, Homo sapiens
  CDR3 for alpha chain variable domain of TCR clone 375302 (TRAV35, TRAJ33)
CAGSSQDSNYQLIW

SEQ ID NO: 750604 - protein, 14 aa, Homo sapiens
  CDR3 for beta chain variable domain of TCR clone 375302 (TRBV20-1, TRBJ2-1)
CSAQIRGSANEQFF

SEQ ID NO: 750605 - protein, 10 aa, Homo sapiens
  CDR3 for alpha chain variable domain of TCR clone 375303 (TRAV12-3, TRAJ49)
CAMNDDQFYF

SEQ ID NO: 750606 - protein, 15 aa, Homo sapiens
  CDR3 for beta chain variable domain of TCR clone 375303 (TRBV4-1, TRBJ1-1)
CASSQAPGGTAEAFF

SEQ ID NO: 750607 - protein, 13 aa, Homo sapiens
  CDR3 for alpha chain variable domain of TCR clone 375304 (TRAV12-3, TRAJ13)
CAMSAGGYQKVTF

SEQ ID NO: 750608 - protein, 16 aa, Homo sapiens
  CDR3 for beta chain variable domain of TCR clone 375304 (TRBV20-1, TRBJ1-1)
CSARALTQGMNTEAFF

SEQ ID NO: 750609 - protein, 14 aa, Homo sapiens
  CDR3 for alpha chain variable domain of TCR clone 375305 (TRAV8-3, TRAJ36)
CAVGPNTGANNLFF

SEQ ID NO: 750610 - protein, 15 aa, Homo sapiens
  CDR3 for beta chain variable domain of TCR clone 375305 (TRBV4-1, TRBJ2-1)
CASSQDPGNYNEQFF

SEQ ID NO: 750611 - protein, 15 aa, Homo sapiens
  CDR3 for alpha chain variable domain of TCR clone 375306 (TRAV3, TRAJ32)
CAVSSYGGATNKLIF

SEQ ID NO: 750612 - protein, 13 aa, Homo sapiens
  CDR3 for beta chain variable domain of TCR clone 375306 (TRBV20-1, TRBJ2-7)
CSARPSTNYEQNF

SEQ ID NO: 750613 - protein, 13 aa, Homo sapiens
  CDR3 for alpha chain variable domain of TCR clone 375307 (TRAV12-1, TRAJ17)
CVVNRAAGNKLTF

SEQ ID NO: 750614 - protein, 16 aa, Homo sapiens
  CDR3 for beta chain variable domain of TCR clone 375307 (TRBV11-2, TRBJ2-2)
CASSLRTGNLIGELFF

SEQ ID NO: 750615 - protein, 11 aa, Homo sapiens
  CDR3 for alpha chain variable domain of TCR clone 375308 (TRAV8-3, TRAJ15)
CAVGPGTALIF

SEQ ID NO: 750616 - protein, 18 aa, Homo sapiens
  CDR3 for beta chain variable domain of TCR clone 375308 (TRBV18, TRBJ2-3)
CASSYTRGAAGGTDTQYF

SEQ ID NO: 750617 - protein, 16 aa, Homo sapiens
  CDR3 for alpha chain variable domain of TCR clone 375309 (TRAV3, TRAJ10)
CAVRDMGAGGGNKLTF

SEQ ID NO: 750618 - protein, 14 aa, Homo sapiens
  CDR3 for beta chain variable domain of TCR clone 375309 (TRBV7-8, TRBJ1-2)
CASSPDSLSYGYTF

SEQ ID NO: 750619 - protein, 14 aa, Homo sapiens
  CDR3 for alpha chain variable domain of TCR clone 375310 (TRAV12-3, TRAJ10)
SHLPLTGGGNKLTF

SEQ ID NO: 750620 - protein, 15 aa, Homo sapiens
  CDR3 for beta chain variable domain of TCR clone 375310 (TRBV19, TRBJ2-7)
CASSIRQGARYEQYF

SEQ ID NO: 750621 - protein, 16 aa, Homo sapiens
  CDR3 for alpha chain variable domain of TCR clone 375311 (TRAV3, TRAJ10)
CAVRDMRAGGGNKITF

SEQ ID NO: 750622 - protein, 14 aa, Homo sapiens
  CDR3 for beta chain variable domain of TCR clone 375311 (TRBV25-1, TRBJ1-1)
CASTHLGGNTEAFI

SEQ ID NO: 750623 - protein, 14 aa, Homo sapiens
  CDR3 for alpha chain variable domain of TCR clone 375312 (TRAV27, TRAJ15)
CAGFDNQAGTALIF

SEQ ID NO: 750624 - protein, 11 aa, Homo sapiens
  CDR3 for beta chain variable domain of TCR clone 375312 (TRBV29-1, TRBJ1-1)
YSVEVGTRTFF

SEQ ID NO: 750625 - protein, 17 aa, Homo sapiens
  CDR3 for alpha chain variable domain of TCR clone 375313 (TRAV9-2, TRAJ45)
CALSGYYSGGGADGLTF

SEQ ID NO: 750626 - protein, 14 aa, Homo sapiens
  CDR3 for beta chain variable domain of TCR clone 375313 (TRBV19, TRBJ2-1)
CASPTFVLSGVQFF

SEQ ID NO: 750627 - protein, 16 aa, Homo sapiens
  CDR3 for alpha chain variable domain of TCR clone 375314 (TRAV30, TRAJ24)
CGTEIVDADSWGKHQF

SEQ ID NO: 750628 - protein, 18 aa, Homo sapiens
  CDR3 for beta chain variable domain of TCR clone 375314 (TRBV20-1, TRBJ2-6)
CSAETTPTHGSGANVLTF

SEQ ID NO: 750629 - protein, 10 aa, Homo sapiens
  CDR3 for alpha chain variable domain of TCR clone 375315 (TRAV26-1, TRAJ40)
CIAGTYKYIF

SEQ ID NO: 750630 - protein, 15 aa, Homo sapiens
  CDR3 for beta chain variable domain of TCR clone 375315 (TRBV19, TRBJ2-1)
CASSSPAVPLDEQFF

SEQ ID NO: 750631 - protein, 14 aa, Homo sapiens
  CDR3 for alpha chain variable domain of TCR clone 375316 (TRAV1-2, TRAJ16)
CAVNRFSDGQKLLF

SEQ ID NO: 750632 - protein, 15 aa, Homo sapiens
  CDR3 for beta chain variable domain of TCR clone 375316 (TRBV15, TRBJ2-2)
CATSRGLADTGELFF

SEQ ID NO: 750633 - protein, 14 aa, Homo sapiens
  CDR3 for alpha chain variable domain of TCR clone 375317 (TRAV12-1, TRAJ4)
CGEQRSGGYNKPIF

SEQ ID NO: 750634 - protein, 16 aa, Homo sapiens
  CDR3 for beta chain variable domain of TCR clone 375317 (TRBV11-3, TRBJ2-5)
CASSSVVAGSTETQYF

SEQ ID NO: 750635 - protein, 18 aa, Homo sapiens
  CDR3 for alpha chain variable domain of TCR clone 375318 (TRAV21, TRAJ52)
CAVRPSPAGGTSYGKLTF

SEQ ID NO: 750636 - protein, 15 aa, Homo sapiens
  CDR3 for beta chain variable domain of TCR clone 375318 (TRBV20-1, TRBJ2-7)
CSARDRVPGMDEQYF

SEQ ID NO: 750637 - protein, 14 aa, Homo sapiens
  CDR3 for alpha chain variable domain of TCR clone 375319 (TRAV16, TRAJ33)
CALSAMDSKYQLIW

SEQ ID NO: 750638 - protein, 12 aa, Homo sapiens
  CDR3 for beta chain variable domain of TCR clone 375319 (TRBV5-1, TRBJ1-2)
CASSQDTYGYTF

SEQ ID NO: 750639 - protein, 13 aa, Homo sapiens
  CDR3 for alpha chain variable domain of TCR clone 375320 (TRAV2, TRAJ15)
CAVASQAGTAQIF

SEQ ID NO: 750640 - protein, 14 aa, Homo sapiens
  CDR3 for beta chain variable domain of TCR clone 375320 (TRBV20-1, TRBJ2-7)
CSAKRGRSSYEQYF

SEQ ID NO: 750641 - protein, 12 aa, Homo sapiens
  CDR3 for alpha chain variable domain of TCR clone 375321 (TRAV12-3, TRAJ34)
CAMGFNTDKLIF

SEQ ID NO: 750642 - protein, 14 aa, Homo sapiens
  CDR3 for beta chain variable domain of TCR clone 375321 (TRBV5-7, TRBJ1-5)
CASSRTGGGQPQHF

SEQ ID NO: 750643 - protein, 14 aa, Homo sapiens
  CDR3 for alpha chain variable domain of TCR clone 375322 (TRAV14/DV4, TRAJ15)
CAMRRDQAGTALIF

SEQ ID NO: 750644 - protein, 13 aa, Homo sapiens
  CDR3 for beta chain variable domain of TCR clone 375322 (TRBV7-9, TRBJ1-2)
CASSLKQNYGYTF

SEQ ID NO: 750645 - protein, 14 aa, Homo sapiens
  CDR3 for alpha chain variable domain of TCR clone 375323 (TRAV26-1, TRAJ38)
CIADNAGNNRKLLW

SEQ ID NO: 750646 - protein, 13 aa, Homo sapiens
  CDR3 for beta chain variable domain of TCR clone 375323 (TRBV15, TRBJ1-6)
CATSGGLNSPLHF

SEQ ID NO: 750647 - protein, 13 aa, Homo sapiens
  CDR3 for alpha chain variable domain of TCR clone 375324 (TRAV21, TRAJ26)
CAVIGNYGQNFVF

SEQ ID NO: 750648 - protein, 16 aa, Homo sapiens
  CDR3 for beta chain variable domain of TCR clone 375324 (TRBV6-3, TRBJ2-2)
CASSCSGTDNTGELFF

SEQ ID NO: 750649 - protein, 13 aa, Homo sapiens
  CDR3 for alpha chain variable domain of TCR clone 375325 (TRAV13-1, TRAJ6)
CAASKGGSYIPTF

SEQ ID NO: 750650 - protein, 14 aa, Homo sapiens
  CDR3 for beta chain variable domain of TCR clone 375325 (TRBV7-2, TRBJ2-1)
CASSLVVGYNEQFF

SEQ ID NO: 750651 - protein, 16 aa, Homo sapiens
  CDR3 for alpha chain variable domain of TCR clone 375326 (TRAV16, TRAJ4)
CALSSMFSGGYNKLIF

SEQ ID NO: 750652 - protein, 14 aa, Homo sapiens
  CDR3 for beta chain variable domain of TCR clone 375326 (TRBV4-1, TRBJ2-2)
CASSQAVNTGELFF

SEQ ID NO: 750653 - protein, 18 aa, Homo sapiens
  CDR3 for alpha chain variable domain of TCR clone 375327 (TRAV12-3, TRAJ10)
SPVIQPPTSDGRRNKLTF

SEQ ID NO: 750654 - protein, 16 aa, Homo sapiens
  CDR3 for beta chain variable domain of TCR clone 375327 (TRBV19, TRBJ2-1)
CASSKAGPSSYNEQFF

SEQ ID NO: 750655 - protein, 14 aa, Homo sapiens
  CDR3 for alpha chain variable domain of TCR clone 375328 (TRAV12-2, TRAJ6)
CASKWGGGSYRPTF

SEQ ID NO: 750656 - protein, 13 aa, Homo sapiens
  CDR3 for beta chain variable domain of TCR clone 375328 (TRBV2, TRBJ1-1)
CASSEGGNTEAFF

SEQ ID NO: 750657 - protein, 18 aa, Homo sapiens
  CDR3 for alpha chain variable domain of TCR clone 375329 (TRAV21, TRAJ52)
CAVRPSPAGGTSYGKLTF

SEQ ID NO: 750658 - protein, 13 aa, Homo sapiens
  CDR3 for beta chain variable domain of TCR clone 375329 (TRBV6-1, TRBJ2-1)
CASSPDRNNEQFF

SEQ ID NO: 750659 - protein, 12 aa, Homo sapiens
  CDR3 for alpha chain variable domain of TCR clone 375330 (TRAV2, TRAJ9)
CAVGAGGFKTIF

SEQ ID NO: 750660 - protein, 16 aa, Homo sapiens
  CDR3 for beta chain variable domain of TCR clone 375330 (TRBV13, TRBJ2-2)
CANSPRTGEHTGELSF

SEQ ID NO: 750661 - protein, 12 aa, Homo sapiens
  CDR3 for alpha chain variable domain of TCR clone 375331 (TRAV3, TRAJ20)
CAVRDPDYKLTF

SEQ ID NO: 750662 - protein, 13 aa, Homo sapiens
  CDR3 for beta chain variable domain of TCR clone 375331 (TRBV18, TRBJ1-1)
CASSPETKPEAFF

SEQ ID NO: 750663 - protein, 13 aa, Homo sapiens
  CDR3 for alpha chain variable domain of TCR clone 375332 (TRAV25, TRAJ26)
CAGMDNYGQNFVF

SEQ ID NO: 750664 - protein, 15 aa, Homo sapiens
  CDR3 for beta chain variable domain of TCR clone 375332 (TRBV10-3, TRBJ2-1)
CAIRNGTSGHNEQFF

SEQ ID NO: 750665 - protein, 16 aa, Homo sapiens
  CDR3 for alpha chain variable domain of TCR clone 375333 (TRAV30, TRAJ24)
CGTEIVDADSWGTFQF

SEQ ID NO: 750666 - protein, 19 aa, Homo sapiens
  CDR3 for beta chain variable domain of TCR clone 375333 (TRBV25-1, TRBJ2-2)
CAILVYRVDRGRKTGELFF

SEQ ID NO: 750667 - protein, 12 aa, Homo sapiens
  CDR3 for alpha chain variable domain of TCR clone 375334 (TRAV3, TRAJ34)
CAVLGNTDRLIF

SEQ ID NO: 750668 - protein, 13 aa, Homo sapiens
  CDR3 for beta chain variable domain of TCR clone 375334 (TRBV19, TRBJ2-1)
CASSIGTGNEQFF

SEQ ID NO: 750669 - protein, 13 aa, Homo sapiens
  CDR3 for alpha chain variable domain of TCR clone 375335 (TRAV26-2, TRAJ47)
CIRLMEYGNKLVF

SEQ ID NO: 750670 - protein, 17 aa, Homo sapiens
  CDR3 for beta chain variable domain of TCR clone 375335 (TRBV11-3, TRBJ2-5)
CASSLPGVRGGKETQYF

SEQ ID NO: 750671 - protein, 15 aa, Homo sapiens
  CDR3 for alpha chain variable domain of TCR clone 375336 (TRAV19, TRAJ53)
CALSSSGGSNYKMTF

SEQ ID NO: 750672 - protein, 15 aa, Homo sapiens
  CDR3 for beta chain variable domain of TCR clone 375336 (TRBV9, TRBJ2-1)
CASSLAGSSYNEQFF

SEQ ID NO: 750673 - protein, 10 aa, Homo sapiens
  CDR3 for alpha chain variable domain of TCR clone 375337 (TRAV1-2, TRAJ23)
CAAWAGKRIF

SEQ ID NO: 750674 - protein, 14 aa, Homo sapiens
  CDR3 for beta chain variable domain of TCR clone 375337 (TRBV20-1, TRBJ2-7)
CSAKTGTGGYEQCF

SEQ ID NO: 750675 - protein, 10 aa, Homo sapiens
  CDR3 for alpha chain variable domain of TCR clone 375338 (TRAV12-3, TRAJ18)
CAMSAEAQPW

SEQ ID NO: 750676 - protein, 13 aa, Homo sapiens
  CDR3 for beta chain variable domain of TCR clone 375338 (TRBV20-1, TRBJ1-6)
CSAPLGVGSPLHF

SEQ ID NO: 750677 - protein, 11 aa, Homo sapiens
  CDR3 for alpha chain variable domain of TCR clone 375339 (TRAV2, TRAJ33)
CAVDSNYQLIW

SEQ ID NO: 750678 - protein, 16 aa, Homo sapiens
  CDR3 for beta chain variable domain of TCR clone 375339 (TRBV7-2, TRBJ2-7)
CASSLGLAGGAYEQYF

SEQ ID NO: 750679 - protein, 13 aa, Homo sapiens
  CDR3 for alpha chain variable domain of TCR clone 375340 (TRAV27, TRAJ29)
CAGAHSGNTPLVF

SEQ ID NO: 750680 - protein, 14 aa, Homo sapiens
  CDR3 for beta chain variable domain of TCR clone 375340 (TRBV7-9, TRBJ2-7)
CASSNGQGAGEQYF

SEQ ID NO: 750681 - protein, 10 aa, Homo sapiens
  CDR3 for alpha chain variable domain of TCR clone 375341 (TRAV5, TRAJ34)
CAEDTDKLIF

SEQ ID NO: 750682 - protein, 16 aa, Homo sapiens
  CDR3 for beta chain variable domain of TCR clone 375341 (TRBV7-7, TRBJ2-3)
CASSPGTSGSTDTQYF

SEQ ID NO: 750683 - protein, 14 aa, Homo sapiens
  CDR3 for alpha chain variable domain of TCR clone 375342 (TRAV12-3, TRAJ10)
SHLPLTGGGNKLTF

SEQ ID NO: 750684 - protein, 13 aa, Homo sapiens
  CDR3 for beta chain variable domain of TCR clone 375342 (TRBV11-3, TRBJ1-1)
CASSLGGNTEAFF

SEQ ID NO: 750685 - protein, 13 aa, Homo sapiens
  CDR3 for alpha chain variable domain of TCR clone 375343 (TRAV13-1, TRAJ5)
CAAEHTGRRALTF

SEQ ID NO: 750686 - protein, 12 aa, Homo sapiens
  CDR3 for beta chain variable domain of TCR clone 375343 (TRBV14, TRBJ2-7)
CASSSLKGEQYF

SEQ ID NO: 750687 - protein, 15 aa, Homo sapiens
  CDR3 for alpha chain variable domain of TCR clone 375344 (TRAV23/DV6, TRAJ9)
CAASIGEILEASKIF

SEQ ID NO: 750688 - protein, 14 aa, Homo sapiens
  CDR3 for beta chain variable domain of TCR clone 375344 (TRBV9, TRBJ2-7)
CASSVGVGSYEQYF

SEQ ID NO: 750689 - protein, 12 aa, Homo sapiens
  CDR3 for alpha chain variable domain of TCR clone 375345 (TRAV8-4, TRAJ43)
CAVSVNNNDMRF

SEQ ID NO: 750690 - protein, 13 aa, Homo sapiens
  CDR3 for beta chain variable domain of TCR clone 375345 (TRBV7-9, TRBJ1-2)
CVSSLKQNYGYTF

SEQ ID NO: 750691 - protein, 12 aa, Homo sapiens
  CDR3 for alpha chain variable domain of TCR clone 375346 (TRAV23/DV6, TRAJ30)
CAASKGDDKIIF

SEQ ID NO: 750692 - protein, 13 aa, Homo sapiens
  CDR3 for beta chain variable domain of TCR clone 375346 (TRBV19, TRBJ1-2)
CASSVPGQHGYTF

SEQ ID NO: 750693 - protein, 15 aa, Homo sapiens
  CDR3 for alpha chain variable domain of TCR clone 375347 (TRAV3, TRAJ22)
CAVRDRSGSARQLTF

SEQ ID NO: 750694 - protein, 13 aa, Homo sapiens
  CDR3 for beta chain variable domain of TCR clone 375347 (TRBV12-4, TRBJ1-2)
CASSLRQGKGYTF

SEQ ID NO: 750695 - protein, 22 aa, Homo sapiens
  CDR3 for alpha chain variable domain of TCR clone 375348 (TRAV3, TRAJ38)
CAVRDCLNAGNNHIQNPDPAVY

SEQ ID NO: 750696 - protein, 18 aa, Homo sapiens
  CDR3 for beta chain variable domain of TCR clone 375348 (TRBV11-2, TRBJ2-3)
CASSLGGASRGAPNTQYF

SEQ ID NO: 750697 - protein, 17 aa, Homo sapiens
  CDR3 for alpha chain variable domain of TCR clone 375349 (TRAV3, TRAJ42)
CAVRDRDYGGSQGNLIF

SEQ ID NO: 750698 - protein, 15 aa, Homo sapiens
  CDR3 for beta chain variable domain of TCR clone 375349 (TRBV5-1, TRBJ2-1)
CASSLVGTVKNEQFF

SEQ ID NO: 750699 - protein, 13 aa, Homo sapiens
  CDR3 for alpha chain variable domain of TCR clone 375350 (TRAV19, TRAJ57)
CALLQGGSEKLGF

SEQ ID NO: 750700 - protein, 10 aa, Homo sapiens
  CDR3 for beta chain variable domain of TCR clone 375350 (TRBV20-1, TRBJ2-5)
CSARFETQYF

SEQ ID NO: 750701 - protein, 17 aa, Homo sapiens
  CDR3 for alpha chain variable domain of TCR clone 375351 (TRAV8-6, TRAJ8)
CAVKEGIENTGFQQLVF

SEQ ID NO: 750702 - protein, 12 aa, Homo sapiens
  CDR3 for beta chain variable domain of TCR clone 375351 (TRBV19, TRBJ1-4)
CASKDWPGGLFF

SEQ ID NO: 750703 - protein, 17 aa, Homo sapiens
  CDR3 for alpha chain variable domain of TCR clone 375352 (TRAV26-2, TRAJ42)
CILRDVGYGGSQGNLIF

SEQ ID NO: 750704 - protein, 16 aa, Homo sapiens
  CDR3 for beta chain variable domain of TCR clone 375352 (TRBV12-4, TRBJ2-7)
CASSLIGGTGTYEPYF

SEQ ID NO: 750705 - protein, 13 aa, Homo sapiens
  CDR3 for alpha chain variable domain of TCR clone 375353 (TRAV8-3, TRAJ48)
CAVVPFGNEKLTF

SEQ ID NO: 750706 - protein, 15 aa, Homo sapiens
  CDR3 for beta chain variable domain of TCR clone 375353 (TRBV11-2, TRBJ2-1)
CASSSPSSRYNEQFF

SEQ ID NO: 750707 - protein, 13 aa, Homo sapiens
  CDR3 for alpha chain variable domain of TCR clone 375354 (TRAV8-6, TRAJ49)
CAVITNTGNQFYF

SEQ ID NO: 750708 - protein, 14 aa, Homo sapiens
  CDR3 for beta chain variable domain of TCR clone 375354 (TRBV19, TRBJ2-1)
YASPTFVLSGEQFF

SEQ ID NO: 750709 - protein, 14 aa, Homo sapiens
  CDR3 for alpha chain variable domain of TCR clone 375355 (TRAV23/DV6, TRAJ4)
CAALSSGGYNKLIF

SEQ ID NO: 750710 - protein, 17 aa, Homo sapiens
  CDR3 for beta chain variable domain of TCR clone 375355 (TRBV13, TRBJ2-3)
CASSLSRVAGGRNTQYF

SEQ ID NO: 750711 - protein, 14 aa, Homo sapiens
  CDR3 for alpha chain variable domain of TCR clone 375356 (TRAV17, TRAJ6)
CATDSSGGSYIPTF

SEQ ID NO: 750712 - protein, 19 aa, Homo sapiens
  CDR3 for beta chain variable domain of TCR clone 375356 (TRBV4-3, TRBJ2-7)
CASSQEFIGWQVTPYEQYF

SEQ ID NO: 750713 - protein, 13 aa, Homo sapiens
  CDR3 for alpha chain variable domain of TCR clone 375357 (TRAV26-1, TRAJ34)
CIVRPWITDKLIF

SEQ ID NO: 750714 - protein, 12 aa, Homo sapiens
  CDR3 for beta chain variable domain of TCR clone 375357 (TRBV28, TRBJ2-6)
CAIQAGANVLTF

SEQ ID NO: 750715 - protein, 14 aa, Homo sapiens
  CDR3 for alpha chain variable domain of TCR clone 375358 (TRAV8-6, TRAJ5)
CAVSGKAGRRELTF

SEQ ID NO: 750716 - protein, 13 aa, Homo sapiens
  CDR3 for beta chain variable domain of TCR clone 375358 (TRBV12-4, TRBJ2-5)
CASSPTGQETQYF

SEQ ID NO: 750717 - protein, 14 aa, Homo sapiens
  CDR3 for alpha chain variable domain of TCR clone 375359 (TRAV17, TRAJ57)
CATDPQVGSEKLVF

SEQ ID NO: 750718 - protein, 13 aa, Homo sapiens
  CDR3 for beta chain variable domain of TCR clone 375359 (TRBV19, TRBJ2-7)
CASSPRQSYEQYF

SEQ ID NO: 750719 - protein, 12 aa, Homo sapiens
  CDR3 for alpha chain variable domain of TCR clone 375360 (TRAV3, TRAJ43)
CAVRDPNNDMRF

SEQ ID NO: 750720 - protein, 13 aa, Homo sapiens
  CDR3 for beta chain variable domain of TCR clone 375360 (TRBV25-1, TRBJ2-6)
CASRGPGANVLTF

SEQ ID NO: 750721 - protein, 16 aa, Homo sapiens
  CDR3 for alpha chain variable domain of TCR clone 375361 (TRAV8-3, TRAJ8)
CAVPRDGNTGFQKLVF

SEQ ID NO: 750722 - protein, 14 aa, Homo sapiens
  CDR3 for beta chain variable domain of TCR clone 375361 (TRBV4-1, TRBJ2-2)
CASSQALNTGELFF

SEQ ID NO: 750723 - protein, 14 aa, Homo sapiens
  CDR3 for alpha chain variable domain of TCR clone 375362 (TRAV29/DV5, TRAJ36)
CAARRKTGANNLFF

SEQ ID NO: 750724 - protein, 15 aa, Homo sapiens
  CDR3 for beta chain variable domain of TCR clone 375362 (TRBV13, TRBJ2-1)
CASSLLSGLNNEQFF

SEQ ID NO: 750725 - protein, 14 aa, Homo sapiens
  CDR3 for alpha chain variable domain of TCR clone 375363 (TRAV12-2, TRAJ24)
CAVTPADSWGKLEF

SEQ ID NO: 750726 - protein, 16 aa, Homo sapiens
  CDR3 for beta chain variable domain of TCR clone 375363 (TRBV6-4, TRBJ2-3)
APSEGGRAWGTDTQYF

SEQ ID NO: 750727 - protein, 14 aa, Homo sapiens
  CDR3 for alpha chain variable domain of TCR clone 375364 (TRAV1-2, TRAJ16)
CAVNRFSDGQKLLF

SEQ ID NO: 750728 - protein, 15 aa, Homo sapiens
  CDR3 for beta chain variable domain of TCR clone 375364 (TRBV20-1, TRBJ1-2)
CSAAGEGARIYGYTF

SEQ ID NO: 750729 - protein, 10 aa, Homo sapiens
  CDR3 for alpha chain variable domain of TCR clone 375365 (TRAV12-3, TRAJ49)
CAMNADQFYF

SEQ ID NO: 750730 - protein, 15 aa, Homo sapiens
  CDR3 for beta chain variable domain of TCR clone 375365 (TRBV9, TRBJ1-6)
CASSVAGTGDSPLHF

SEQ ID NO: 750731 - protein, 14 aa, Homo sapiens
  CDR3 for alpha chain variable domain of TCR clone 375366 (TRAV12-2, TRAJ13)
CAVKKTGGYQKVTF

SEQ ID NO: 750732 - protein, 12 aa, Homo sapiens
  CDR3 for beta chain variable domain of TCR clone 375366 (TRBV25-1, TRBJ2-5)
CASSQAWETQYF

SEQ ID NO: 750733 - protein, 13 aa, Homo sapiens
  CDR3 for alpha chain variable domain of TCR clone 375367 (TRAV2, TRAJ40)
CAVVTSETDKYIF

SEQ ID NO: 750734 - protein, 14 aa, Homo sapiens
  CDR3 for beta chain variable domain of TCR clone 375367 (TRBV19, TRBJ2-1)
CASPTFVLSGEQFF

SEQ ID NO: 750735 - protein, 12 aa, Homo sapiens
  CDR3 for alpha chain variable domain of TCR clone 375368 (TRAV30, TRAJ43)
CGTEERGNDMRF

SEQ ID NO: 750736 - protein, 15 aa, Homo sapiens
  CDR3 for beta chain variable domain of TCR clone 375368 (TRBV19, TRBJ1-1)
CASSIGGGRNTEAFC

SEQ ID NO: 750737 - protein, 12 aa, Homo sapiens
  CDR3 for alpha chain variable domain of TCR clone 375369 (TRAV12-3, TRAJ17)
FAMTLTGNKLTF

SEQ ID NO: 750738 - protein, 13 aa, Homo sapiens
  CDR3 for beta chain variable domain of TCR clone 375369 (TRBV12-4, TRBJ1-2)
CASSLRQGKGYTF

SEQ ID NO: 750739 - protein, 17 aa, Homo sapiens
  CDR3 for alpha chain variable domain of TCR clone 375370 (TRAV3, TRAJ6)
CAVRDGPRAGGSYILTF

SEQ ID NO: 750740 - protein, 14 aa, Homo sapiens
  CDR3 for beta chain variable domain of TCR clone 375370 (TRBV7-2, TRBJ2-7)
CASSPKASSYEQYF

SEQ ID NO: 750741 - protein, 17 aa, Homo sapiens
  CDR3 for alpha chain variable domain of TCR clone 375371 (TRAV3, TRAJ6)
CAVRDGPRAVGSYIPTF

SEQ ID NO: 750742 - protein, 14 aa, Homo sapiens
  CDR3 for beta chain variable domain of TCR clone 375371 (TRBV7-2, TRBJ2-7)
CASSPKTSFSEQYF

SEQ ID NO: 750743 - protein, 20 aa, Homo sapiens
  CDR3 for alpha chain variable domain of TCR clone 375372 (TRAV26-1, TRAJ42)
CCVLLHRQTYYGGSQRNLIF

SEQ ID NO: 750744 - protein, 16 aa, Homo sapiens
  CDR3 for beta chain variable domain of TCR clone 375372 (TRBV7-3, TRBJ2-2)
CASSLKRGTLSGELLF

SEQ ID NO: 750745 - protein, 16 aa, Homo sapiens
  CDR3 for alpha chain variable domain of TCR clone 375373 (TRAV17, TRAJ28)
CATASGSGAGSYQLTF

SEQ ID NO: 750746 - protein, 11 aa, Homo sapiens
  CDR3 for beta chain variable domain of TCR clone 375373 (TRBV7-9, TRBJ2-5)
CASSLGETQYF

SEQ ID NO: 750747 - protein, 13 aa, Homo sapiens
  CDR3 for alpha chain variable domain of TCR clone 375374 (TRAV8-3, TRAJ28)
CAVGAVGSYQLTF

SEQ ID NO: 750748 - protein, 13 aa, Homo sapiens
  CDR3 for beta chain variable domain of TCR clone 375374 (TRBV4-3, TRBJ2-1)
CASSQKLERQQFF

SEQ ID NO: 750749 - protein, 11 aa, Homo sapiens
  CDR3 for alpha chain variable domain of TCR clone 375375 (TRAV1-1, TRAJ23)
CAVRQGGKLIF

SEQ ID NO: 750750 - protein, 16 aa, Homo sapiens
  CDR3 for beta chain variable domain of TCR clone 375375 (TRBV19, TRBJ1-5)
CASSIDRGGPRQPQHF

SEQ ID NO: 750751 - protein, 16 aa, Homo sapiens
  CDR3 for alpha chain variable domain of TCR clone 375376 (TRAV13-1, TRAJ52)
CAAIMRGGTSYGKLTF

SEQ ID NO: 750752 - protein, 15 aa, Homo sapiens
  CDR3 for beta chain variable domain of TCR clone 375376 (TRBV6-6, TRBJ2-7)
CASSYSYGGSYEQYF

SEQ ID NO: 750753 - protein, 12 aa, Homo sapiens
  CDR3 for alpha chain variable domain of TCR clone 375377 (TRAV26-1, TRAJ13)
CIVSRGYQKVTF

SEQ ID NO: 750754 - protein, 16 aa, Homo sapiens
  CDR3 for beta chain variable domain of TCR clone 375377 (TRBV29-1, TRBJ2-7)
CSVEVVGTSGSYEQYF

SEQ ID NO: 750755 - protein, 17 aa, Homo sapiens
  CDR3 for alpha chain variable domain of TCR clone 375378 (TRAV3, TRAJ38)
CAVRDCLNAGNNRKLFW

SEQ ID NO: 750756 - protein, 12 aa, Homo sapiens
  CDR3 for beta chain variable domain of TCR clone 375378 (TRBV7-8, TRBJ2-7)
CASSLGDREQYF

SEQ ID NO: 750757 - protein, 16 aa, Homo sapiens
  CDR3 for alpha chain variable domain of TCR clone 375379 (TRAV30, TRAJ44)
CGTEDKRSGTASKLTF

SEQ ID NO: 750758 - protein, 16 aa, Homo sapiens
  CDR3 for beta chain variable domain of TCR clone 375379 (TRBV10-2, TRBJ2-7)
CASSESPGSSGFEQYF

SEQ ID NO: 750759 - protein, 12 aa, Homo sapiens
  CDR3 for alpha chain variable domain of TCR clone 375380 (TRAV13-1, TRAJ42)
SVLRGSQGNLIF

SEQ ID NO: 750760 - protein, 13 aa, Homo sapiens
  CDR3 for beta chain variable domain of TCR clone 375380 (TRBV2, TRBJ1-4)
CASSELGVEKLFS

SEQ ID NO: 750761 - protein, 14 aa, Homo sapiens
  CDR3 for alpha chain variable domain of TCR clone 375381 (TRAV1-2, TRAJ16)
CAVNRFSDGQKLLS

SEQ ID NO: 750762 - protein, 13 aa, Homo sapiens
  CDR3 for beta chain variable domain of TCR clone 375381 (TRBV10-3, TRBJ1-2)
CAISERDSYGYTF

SEQ ID NO: 750763 - protein, 15 aa, Homo sapiens
  CDR3 for alpha chain variable domain of TCR clone 375382 (TRAV38-1, TRAJ37)
CAFIFGSGNTGKLIF

SEQ ID NO: 750764 - protein, 12 aa, Homo sapiens
  CDR3 for beta chain variable domain of TCR clone 375382 (TRBV7-9, TRBJ2-7)
CASTLEGYEQYF

SEQ ID NO: 750765 - protein, 13 aa, Homo sapiens
  CDR3 for alpha chain variable domain of TCR clone 375383 (TRAV12-1, TRAJ6)
CVVYPGGSYIPTF

SEQ ID NO: 750766 - protein, 13 aa, Homo sapiens
  CDR3 for beta chain variable domain of TCR clone 375383 (TRBV20-1, TRBJ1-3)
SSAGAYSGNTIYF

SEQ ID NO: 750767 - protein, 14 aa, Homo sapiens
  CDR3 for alpha chain variable domain of TCR clone 375384 (TRAV4, TRAJ26)
CLVGHHNYGQNFVF

SEQ ID NO: 750768 - protein, 14 aa, Homo sapiens
  CDR3 for beta chain variable domain of TCR clone 375384 (TRBV7-9, TRBJ2-7)
CASSLSAATYEQYF

SEQ ID NO: 750769 - protein, 14 aa, Homo sapiens
  CDR3 for alpha chain variable domain of TCR clone 375385 (TRAV13-1, TRAJ35)
CAASKGGFGNVLHC

SEQ ID NO: 750770 - protein, 13 aa, Homo sapiens
  CDR3 for beta chain variable domain of TCR clone 375385 (TRBV7-3, TRBJ1-1)
CASRQDWGAEAFF

SEQ ID NO: 750771 - protein, 19 aa, Homo sapiens
  CDR3 for alpha chain variable domain of TCR clone 375386 (TRAV38-1, TRAJ53)
CAFMKHGLESGGSNYKLTF

SEQ ID NO: 750772 - protein, 13 aa, Homo sapiens
  CDR3 for beta chain variable domain of TCR clone 375386 (TRBV19, TRBJ2-7)
CASSQRQSYEQYF

SEQ ID NO: 750773 - protein, 16 aa, Homo sapiens
  CDR3 for alpha chain variable domain of TCR clone 375387 (TRAV12-1, TRAJ43)
CVVNPHRFGAGTRLTV

SEQ ID NO: 750774 - protein, 15 aa, Homo sapiens
  CDR3 for beta chain variable domain of TCR clone 375387 (TRBV27, TRBJ2-2)
CQQFDRGGDTGELFF

SEQ ID NO: 750775 - protein, 14 aa, Homo sapiens
  CDR3 for alpha chain variable domain of TCR clone 375388 (TRAV20, TRAJ18)
CAVGEAQPWGGYTL

SEQ ID NO: 750776 - protein, 14 aa, Homo sapiens
  CDR3 for beta chain variable domain of TCR clone 375388 (TRBV28, TRBJ2-4)
CASTQVTGVNIQYF

SEQ ID NO: 750777 - protein, 13 aa, Homo sapiens
  CDR3 for alpha chain variable domain of TCR clone 375389 (TRAV12-3, TRAJ7)
CAMSASGNNRLAF

SEQ ID NO: 750778 - protein, 14 aa, Homo sapiens
  CDR3 for beta chain variable domain of TCR clone 375389 (TRBV28, TRBJ2-5)
CASSSGTAQETQYF

SEQ ID NO: 750779 - protein, 13 aa, Homo sapiens
  CDR3 for alpha chain variable domain of TCR clone 375390 (TRAV26-2, TRAJ43)
CILRAVNNNDMRF

SEQ ID NO: 750780 - protein, 15 aa, Homo sapiens
  CDR3 for beta chain variable domain of TCR clone 375390 (TRBV28, TRBJ2-3)
CASSPDRQGANTRYF

SEQ ID NO: 750781 - protein, 11 aa, Homo sapiens
  CDR3 for alpha chain variable domain of TCR clone 375391 (TRAV17, TRAJ31)
CATSNNASLMF

SEQ ID NO: 750782 - protein, 16 aa, Homo sapiens
  CDR3 for beta chain variable domain of TCR clone 375391 (TRBV7-8, TRBJ2-4)
CASSAERTLAKYIQYF

SEQ ID NO: 750783 - protein, 15 aa, Homo sapiens
  CDR3 for alpha chain variable domain of TCR clone 375392 (TRAV26-1, TRAJ56)
CIVRVSTGANSKLTF

SEQ ID NO: 750784 - protein, 15 aa, Homo sapiens
  CDR3 for beta chain variable domain of TCR clone 375392 (TRBV27, TRBJ2-7)
CASSPQREGQREQYF

SEQ ID NO: 750785 - protein, 16 aa, Homo sapiens
  CDR3 for alpha chain variable domain of TCR clone 375393 (TRAV17, TRAJ53)
CATDALSGGSNYKMTF

SEQ ID NO: 750786 - protein, 12 aa, Homo sapiens
  CDR3 for beta chain variable domain of TCR clone 375393 (TRBV5-1, TRBJ2-7)
CASSFRGYEQYF

SEQ ID NO: 750787 - protein, 15 aa, Homo sapiens
  CDR3 for alpha chain variable domain of TCR clone 375394 (TRAV27, TRAJ50)
CAGAGRGTSYDKVIF

SEQ ID NO: 750788 - protein, 14 aa, Homo sapiens
  CDR3 for beta chain variable domain of TCR clone 375394 (TRBV7-2, TRBJ1-1)
CASSFYDLNTEAFF

SEQ ID NO: 750789 - protein, 14 aa, Homo sapiens
  CDR3 for alpha chain variable domain of TCR clone 375395 (TRAV2, TRAJ3)
CAVDRYSSASKIIF

SEQ ID NO: 750790 - protein, 13 aa, Homo sapiens
  CDR3 for beta chain variable domain of TCR clone 375395 (TRBV28, TRBJ2-7)
CAGAQQGLDEQYF

SEQ ID NO: 750791 - protein, 14 aa, Homo sapiens
  CDR3 for alpha chain variable domain of TCR clone 375396 (TRAV14/DV4, TRAJ50)
CAMRELPTDDKVIF

SEQ ID NO: 750792 - protein, 13 aa, Homo sapiens
  CDR3 for beta chain variable domain of TCR clone 375396 (TRBV11-3, TRBJ1-1)
CATEEGLNTEAFF

SEQ ID NO: 750793 - protein, 12 aa, Homo sapiens
  CDR3 for alpha chain variable domain of TCR clone 375397 (TRAV13-1, TRAJ21)
CAAKEGFNKFYF

SEQ ID NO: 750794 - protein, 15 aa, Homo sapiens
  CDR3 for beta chain variable domain of TCR clone 375397 (TRBV9, TRBJ2-1)
CASSLAGSSYNEQFF

SEQ ID NO: 750795 - protein, 14 aa, Homo sapiens
  CDR3 for alpha chain variable domain of TCR clone 375398 (TRAV8-4, TRAJ13)
CAVTLSGGYQKVTF

SEQ ID NO: 750796 - protein, 18 aa, Homo sapiens
  CDR3 for beta chain variable domain of TCR clone 375398 (TRBV20-1, TRBJ2-3)
CSASGLAGGPGTTDTQYF

SEQ ID NO: 750797 - protein, 13 aa, Homo sapiens
  CDR3 for alpha chain variable domain of TCR clone 375399 (TRAV12-1, TRAJ40)
CVVPTSGTYKYIF

SEQ ID NO: 750798 - protein, 16 aa, Homo sapiens
  CDR3 for beta chain variable domain of TCR clone 375399 (TRBV7-9, TRBJ1-2)
CAISLGFSSGEDGYTF

SEQ ID NO: 750799 - protein, 15 aa, Homo sapiens
  CDR3 for alpha chain variable domain of TCR clone 375400 (TRAV27, TRAJ50)
CAGVGRGTSYDKVIF

SEQ ID NO: 750800 - protein, 14 aa, Homo sapiens
  CDR3 for beta chain variable domain of TCR clone 375400 (TRBV7-2, TRBJ1-1)
CASSVHDLSTEAFF

SEQ ID NO: 750801 - protein, 14 aa, Homo sapiens
  CDR3 for alpha chain variable domain of TCR clone 375401 (TRAV14/DV4, TRAJ26)
CAMREGTYGQNFVF

SEQ ID NO: 750802 - protein, 11 aa, Homo sapiens
  CDR3 for beta chain variable domain of TCR clone 375401 (TRBV19, TRBJ1-1)
CASSIGSEAFF

SEQ ID NO: 750803 - protein, 12 aa, Homo sapiens
  CDR3 for alpha chain variable domain of TCR clone 375402 (TRAV12-2, TRAJ16)
CAVNLDGQKLLF

SEQ ID NO: 750804 - protein, 12 aa, Homo sapiens
  CDR3 for beta chain variable domain of TCR clone 375402 (TRBV5-7, TRBJ2-7)
CDSSVQGGEQYF

SEQ ID NO: 750805 - protein, 13 aa, Homo sapiens
  CDR3 for alpha chain variable domain of TCR clone 375403 (TRAV3, TRAJ4)
CAVRDGGYNKLIF

SEQ ID NO: 750806 - protein, 15 aa, Homo sapiens
  CDR3 for beta chain variable domain of TCR clone 375403 (TRBV5-1, TRBJ2-1)
CASSPPRAPSNEQFF

SEQ ID NO: 750807 - protein, 14 aa, Homo sapiens
  CDR3 for alpha chain variable domain of TCR clone 375404 (TRAV2, TRAJ9)
CAVEDRRGGFKTIV

SEQ ID NO: 750808 - protein, 15 aa, Homo sapiens
  CDR3 for beta chain variable domain of TCR clone 375404 (TRBV11-3, TRBJ2-3)
CASSAGTVVTNTQYF

SEQ ID NO: 750809 - protein, 11 aa, Homo sapiens
  CDR3 for alpha chain variable domain of TCR clone 375405 (TRAV12-3, TRAJ27)
CAMANAGKSTF

SEQ ID NO: 750810 - protein, 12 aa, Homo sapiens
  CDR3 for beta chain variable domain of TCR clone 375405 (TRBV11-2, TRBJ2-1)
CASSPGKNEQFF

SEQ ID NO: 750811 - protein, 13 aa, Homo sapiens
  CDR3 for alpha chain variable domain of TCR clone 375406 (TRAV4, TRAJ9)
CLVAEGGGFKTIF

SEQ ID NO: 750812 - protein, 17 aa, Homo sapiens
  CDR3 for beta chain variable domain of TCR clone 375406 (TRBV27, TRBJ2-1)
WASSPMKGQGSYNEQFF

SEQ ID NO: 750813 - protein, 13 aa, Homo sapiens
  CDR3 for alpha chain variable domain of TCR clone 375407 (TRAV21, TRAJ27)
CAARPGNAGKSTF

SEQ ID NO: 750814 - protein, 18 aa, Homo sapiens
  CDR3 for beta chain variable domain of TCR clone 375407 (TRBV4-3, TRBJ2-7)
CISGPAAKLAGGTYEQYF

SEQ ID NO: 750815 - protein, 14 aa, Homo sapiens
  CDR3 for alpha chain variable domain of TCR clone 375408 (TRAV9-2, TRAJ39)
CALYIYNAVNMLTF

SEQ ID NO: 750816 - protein, 14 aa, Homo sapiens
  CDR3 for beta chain variable domain of TCR clone 375408 (TRBV4-2, TRBJ2-7)
CASSQDGRKGEQYF

SEQ ID NO: 750817 - protein, 17 aa, Homo sapiens
  CDR3 for alpha chain variable domain of TCR clone 375409 (TRAV3, TRAJ6)
CAVRDGPRAGGSYIPTF

SEQ ID NO: 750818 - protein, 17 aa, Homo sapiens
  CDR3 for beta chain variable domain of TCR clone 375409 (TRBV20-1, TRBJ1-5)
CSASLSPGQGGNQPQHC

SEQ ID NO: 750819 - protein, 13 aa, Homo sapiens
  CDR3 for alpha chain variable domain of TCR clone 375410 (TRAV30, TRAJ24)
CGTVTDSWGKLQF

SEQ ID NO: 750820 - protein, 15 aa, Homo sapiens
  CDR3 for beta chain variable domain of TCR clone 375410 (TRBV7-3, TRBJ2-2)
CQQLKAGTLSGELFF

SEQ ID NO: 750821 - protein, 17 aa, Homo sapiens
  CDR3 for alpha chain variable domain of TCR clone 375411 (TRAV3, TRAJ6)
CAVRDGPSAGGSYILTF

SEQ ID NO: 750822 - protein, 14 aa, Homo sapiens
  CDR3 for beta chain variable domain of TCR clone 375411 (TRBV7-2, TRBJ2-7)
CASSPKTSFYEQYF

SEQ ID NO: 750823 - protein, 14 aa, Homo sapiens
  CDR3 for alpha chain variable domain of TCR clone 375412 (TRAV38-1, TRAJ40)
CALRPTSGTYKYIF

SEQ ID NO: 750824 - protein, 10 aa, Homo sapiens
  CDR3 for beta chain variable domain of TCR clone 375412 (TRBV28, TRBJ1-2)
CASSSDRAVF

SEQ ID NO: 750825 - protein, 14 aa, Homo sapiens
  CDR3 for alpha chain variable domain of TCR clone 375413 (TRAV12-2, TRAJ13)
CAVKKTGGCQKVTF

SEQ ID NO: 750826 - protein, 15 aa, Homo sapiens
  CDR3 for beta chain variable domain of TCR clone 375413 (TRBV11-2, TRBJ2-2)
CASSSDRVNAGELFF

SEQ ID NO: 750827 - protein, 15 aa, Homo sapiens
  CDR3 for alpha chain variable domain of TCR clone 375414 (TRAV12-2, TRAJ53)
CAVNGGGGSNYKLTF

SEQ ID NO: 750828 - protein, 14 aa, Homo sapiens
  CDR3 for beta chain variable domain of TCR clone 375414 (TRBV7-3, TRBJ2-7)
CASRSQGAAYEQYF

SEQ ID NO: 750829 - protein, 14 aa, Homo sapiens
  CDR3 for alpha chain variable domain of TCR clone 375415 (TRAV8-3, TRAJ4)
CAAGAAGGYNKLIF

SEQ ID NO: 750830 - protein, 17 aa, Homo sapiens
  CDR3 for beta chain variable domain of TCR clone 375415 (TRBV13, TRBJ2-3)
CASSLSRVAGGRNTQYF

SEQ ID NO: 750831 - protein, 13 aa, Homo sapiens
  CDR3 for alpha chain variable domain of TCR clone 375416 (TRAV2, TRAJ24)
CDLQLTAGGNSSL

SEQ ID NO: 750832 - protein, 13 aa, Homo sapiens
  CDR3 for beta chain variable domain of TCR clone 375416 (TRBV7-9, TRBJ1-2)
CASSLKQNYGYAF

SEQ ID NO: 750833 - protein, 15 aa, Homo sapiens
  CDR3 for alpha chain variable domain of TCR clone 375417 (TRAV21, TRAJ52)
CAVRGGGISYGKLTF

SEQ ID NO: 750834 - protein, 15 aa, Homo sapiens
  CDR3 for beta chain variable domain of TCR clone 375417 (TRBV18, TRBJ1-5)
CASSPSDRSNQPQHF

SEQ ID NO: 750835 - protein, 11 aa, Homo sapiens
  CDR3 for alpha chain variable domain of TCR clone 375418 (TRAV21, TRAJ11)
CAVNGYSTLTF

SEQ ID NO: 750836 - protein, 16 aa, Homo sapiens
  CDR3 for beta chain variable domain of TCR clone 375418 (TRBV19, TRBJ2-1)
CASSTAGPSSYNEQFF

SEQ ID NO: 750837 - protein, 14 aa, Homo sapiens
  CDR3 for alpha chain variable domain of TCR clone 375419 (TRAV20, TRAJ42)
CAVQAGGSQGNLIF

SEQ ID NO: 750838 - protein, 17 aa, Homo sapiens
  CDR3 for beta chain variable domain of TCR clone 375419 (TRBV11-2, TRBJ2-3)
CQQLRGGLAGAPNTQYF

SEQ ID NO: 750839 - protein, 23 aa, Homo sapiens
  CDR3 for alpha chain variable domain of TCR clone 375420 (TRAV8-6, )
CAVSYAGNNHIQNPDPAVYQLRD

SEQ ID NO: 750840 - protein, 15 aa, Homo sapiens
  CDR3 for beta chain variable domain of TCR clone 375420 (TRBV12-4, TRBJ2-1)
CASSLLATGNNEQFF

SEQ ID NO: 750841 - protein, 14 aa, Homo sapiens
  CDR3 for alpha chain variable domain of TCR clone 375421 (TRAV26-1, TRAJ39)
CIVRGSRAGNMLTF

SEQ ID NO: 750842 - protein, 14 aa, Homo sapiens
  CDR3 for beta chain variable domain of TCR clone 375421 (TRBV7-2, TRBJ2-7)
CASSPKTSFYEQYF

SEQ ID NO: 750843 - protein, 16 aa, Homo sapiens
  CDR3 for alpha chain variable domain of TCR clone 375422 (TRAV30, TRAJ24)
CGTEIVDADSWWKFQF

SEQ ID NO: 750844 - protein, 14 aa, Homo sapiens
  CDR3 for beta chain variable domain of TCR clone 375422 (TRBV12-5, TRBJ2-5)
CASGSRTHKETQYF

SEQ ID NO: 750845 - protein, 13 aa, Homo sapiens
  CDR3 for alpha chain variable domain of TCR clone 375423 (TRAV12-3, TRAJ9)
CAMRNTGGFKTIF

SEQ ID NO: 750846 - protein, 16 aa, Homo sapiens
  CDR3 for beta chain variable domain of TCR clone 375423 (TRBV19, TRBJ2-1)
CASSKAGPSSYNEQFF

SEQ ID NO: 750847 - protein, 16 aa, Homo sapiens
  CDR3 for alpha chain variable domain of TCR clone 375424 (TRAV4, TRAJ22)
CLVGDLYSGSARQLTF

SEQ ID NO: 750848 - protein, 16 aa, Homo sapiens
  CDR3 for beta chain variable domain of TCR clone 375424 (TRBV11-2, TRBJ2-1)
CASARGSYSHHNEQFF

SEQ ID NO: 750849 - protein, 12 aa, Homo sapiens
  CDR3 for alpha chain variable domain of TCR clone 375425 (TRAV16, TRAJ26)
CALRSYGQNFVF

SEQ ID NO: 750850 - protein, 13 aa, Homo sapiens
  CDR3 for beta chain variable domain of TCR clone 375425 (TRBV11-3, TRBJ2-3)
CASSHDTKDTQYF

SEQ ID NO: 750851 - protein, 16 aa, Homo sapiens
  CDR3 for alpha chain variable domain of TCR clone 375426 (TRAV3, TRAJ37)
CAVRGKGSGNTGKLIF

SEQ ID NO: 750852 - protein, 14 aa, Homo sapiens
  CDR3 for beta chain variable domain of TCR clone 375426 (TRBV7-2, TRBJ2-7)
CASSPKTSFDEQYF

SEQ ID NO: 750853 - protein, 12 aa, Homo sapiens
  CDR3 for alpha chain variable domain of TCR clone 375427 (TRAV13-1, TRAJ21)
CAAKEGFNKFYF

SEQ ID NO: 750854 - protein, 17 aa, Homo sapiens
  CDR3 for beta chain variable domain of TCR clone 375427 (TRBV20-1, TRBJ2-1)
CSASSSRLAGSYNEQFF

SEQ ID NO: 750855 - protein, 12 aa, Homo sapiens
  CDR3 for alpha chain variable domain of TCR clone 375428 (TRAV12-2, TRAJ43)
CAANVNNNDMRF

SEQ ID NO: 750856 - protein, 14 aa, Homo sapiens
  CDR3 for beta chain variable domain of TCR clone 375428 (TRBV12-5, TRBJ2-5)
CASGSRTHQETQYF

SEQ ID NO: 750857 - protein, 14 aa, Homo sapiens
  CDR3 for alpha chain variable domain of TCR clone 375429 (TRAV13-1, TRAJ35)
CAASKGGFGNVLHC

SEQ ID NO: 750858 - protein, 14 aa, Homo sapiens
  CDR3 for beta chain variable domain of TCR clone 375429 (TRBV13, TRBJ2-5)
CASSLERVVETQYF

SEQ ID NO: 750859 - protein, 14 aa, Homo sapiens
  CDR3 for alpha chain variable domain of TCR clone 375430 (TRAV13-1, TRAJ20)
CAARPGSNDYKLSF

SEQ ID NO: 750860 - protein, 13 aa, Homo sapiens
  CDR3 for beta chain variable domain of TCR clone 375430 (TRBV10-2, TRBJ2-7)
CASGASGGYEQYF

SEQ ID NO: 750861 - protein, 16 aa, Homo sapiens
  CDR3 for alpha chain variable domain of TCR clone 375431 (TRAV30, TRAJ24)
CGTEIVDAESWGKFQL

SEQ ID NO: 750862 - protein, 14 aa, Homo sapiens
  CDR3 for beta chain variable domain of TCR clone 375431 (TRBV12-5, TRBJ2-5)
CASGSRTHQETQYF

SEQ ID NO: 750863 - protein, 15 aa, Homo sapiens
  CDR3 for alpha chain variable domain of TCR clone 375432 (TRAV26-2, TRAJ26)
CILRAFDNYGQNFVF

SEQ ID NO: 750864 - protein, 14 aa, Homo sapiens
  CDR3 for beta chain variable domain of TCR clone 375432 (TRBV29-1, TRBJ2-5)
CSFWTPYAGETQYF

SEQ ID NO: 750865 - protein, 16 aa, Homo sapiens
  CDR3 for alpha chain variable domain of TCR clone 375433 (TRAV14/DV4, TRAJ20)
CAMREGRSRDDYKLSF

SEQ ID NO: 750866 - protein, 16 aa, Homo sapiens
  CDR3 for beta chain variable domain of TCR clone 375433 (TRBV19, TRBJ2-1)
CASSKAGPSSYNEQFF

SEQ ID NO: 750867 - protein, 14 aa, Homo sapiens
  CDR3 for alpha chain variable domain of TCR clone 375434 (TRAV1-2, TRAJ16)
FAVNRFSDGQKLLF

SEQ ID NO: 750868 - protein, 14 aa, Homo sapiens
  CDR3 for beta chain variable domain of TCR clone 375434 (TRBV20-1, TRBJ1-5)
CSAPGTGVGQPQHF

SEQ ID NO: 750869 - protein, 14 aa, Homo sapiens
  CDR3 for alpha chain variable domain of TCR clone 375435 (TRAV4, TRAJ6)
CPVGEAGGSYIPTF

SEQ ID NO: 750870 - protein, 16 aa, Homo sapiens
  CDR3 for beta chain variable domain of TCR clone 375435 (TRBV7-6, TRBJ2-1)
CASSLNEGPSYNEQFF

SEQ ID NO: 750871 - protein, 14 aa, Homo sapiens
  CDR3 for alpha chain variable domain of TCR clone 375436 (TRAV1-2, TRAJ16)
CAVNRFSDGQKLLF

SEQ ID NO: 750872 - protein, 16 aa, Homo sapiens
  CDR3 for beta chain variable domain of TCR clone 375436 (TRBV27, TRBJ2-2)
CTSSFRGLVRTGELFF

SEQ ID NO: 750873 - protein, 14 aa, Homo sapiens
  CDR3 for alpha chain variable domain of TCR clone 375437 (TRAV27, TRAJ22)
CAGVVPGSARQLPF

SEQ ID NO: 750874 - protein, 15 aa, Homo sapiens
  CDR3 for beta chain variable domain of TCR clone 375437 (TRBV11-3, TRBJ2-3)
CASLKDGREGDTQYF

SEQ ID NO: 750875 - protein, 15 aa, Homo sapiens
  CDR3 for alpha chain variable domain of TCR clone 375438 (TRAV4, TRAJ42)
CLVGGYGGSQGNLIV

SEQ ID NO: 750876 - protein, 16 aa, Homo sapiens
  CDR3 for beta chain variable domain of TCR clone 375438 (TRBV27, TRBJ1-1)
CASSTRTGGVGTEAFF

SEQ ID NO: 750877 - protein, 13 aa, Homo sapiens
  CDR3 for alpha chain variable domain of TCR clone 375439 (TRAV12-1, TRAJ9)
CVVLNTGGSKTIF

SEQ ID NO: 750878 - protein, 13 aa, Homo sapiens
  CDR3 for beta chain variable domain of TCR clone 375439 (TRBV19, TRBJ1-2)
CASSVPGQDGYTF

SEQ ID NO: 750879 - protein, 15 aa, Homo sapiens
  CDR3 for alpha chain variable domain of TCR clone 375440 (TRAV12-1, TRAJ9)
CVVSFGDTGDFKTIF

SEQ ID NO: 750880 - protein, 13 aa, Homo sapiens
  CDR3 for beta chain variable domain of TCR clone 375440 (TRBV2, TRBJ1-4)
CASSERAGEKLFF

SEQ ID NO: 750881 - protein, 13 aa, Homo sapiens
  CDR3 for alpha chain variable domain of TCR clone 375441 (TRAV21, TRAJ57)
CAVTQGGSEKLLF

SEQ ID NO: 750882 - protein, 12 aa, Homo sapiens
  CDR3 for beta chain variable domain of TCR clone 375441 (TRBV7-2, TRBJ2-5)
CASSQYQETQYF

SEQ ID NO: 750883 - protein, 14 aa, Homo sapiens
  CDR3 for alpha chain variable domain of TCR clone 375442 (TRAV12-2, TRAJ24)
CAVTPADSWGKLRF

SEQ ID NO: 750884 - protein, 12 aa, Homo sapiens
  CDR3 for beta chain variable domain of TCR clone 375442 (TRBV3-1, TRBJ2-1)
CASSKGSSGQFF

SEQ ID NO: 750885 - protein, 15 aa, Homo sapiens
  CDR3 for alpha chain variable domain of TCR clone 375443 (TRAV8-4, TRAJ36)
CAVRKSRTGANNLFF

SEQ ID NO: 750886 - protein, 17 aa, Homo sapiens
  CDR3 for beta chain variable domain of TCR clone 375443 (TRBV3-1, TRBJ2-2)
CASSQDSQGPNTGELFF

SEQ ID NO: 750887 - protein, 15 aa, Homo sapiens
  CDR3 for alpha chain variable domain of TCR clone 375444 (TRAV8-3, TRAJ23)
CAVGAVYNQGGKLIF

SEQ ID NO: 750888 - protein, 14 aa, Homo sapiens
  CDR3 for beta chain variable domain of TCR clone 375444 (TRBV18, TRBJ1-2)
CASSPPGQAYGYTF

SEQ ID NO: 750889 - protein, 14 aa, Homo sapiens
  CDR3 for alpha chain variable domain of TCR clone 375445 (TRAV8-3, TRAJ27)
CAGGGNTNAGKSTF

SEQ ID NO: 750890 - protein, 15 aa, Homo sapiens
  CDR3 for beta chain variable domain of TCR clone 375445 (TRBV11-3, TRBJ2-5)
CASSLRGRVQETQYF

SEQ ID NO: 750891 - protein, 14 aa, Homo sapiens
  CDR3 for alpha chain variable domain of TCR clone 375446 (TRAV16, TRAJ57)
CALSGQGGSEKLVF

SEQ ID NO: 750892 - protein, 13 aa, Homo sapiens
  CDR3 for beta chain variable domain of TCR clone 375446 (TRBV5-4, TRBJ2-1)
CASSLQGPRERFF

SEQ ID NO: 750893 - protein, 14 aa, Homo sapiens
  CDR3 for alpha chain variable domain of TCR clone 375447 (TRAV13-1, TRAJ3)
CAASKSSSGSKIIF

SEQ ID NO: 750894 - protein, 13 aa, Homo sapiens
  CDR3 for beta chain variable domain of TCR clone 375447 (TRBV25-1, TRBJ2-5)
CASSESGRETQYF

SEQ ID NO: 750895 - protein, 14 aa, Homo sapiens
  CDR3 for alpha chain variable domain of TCR clone 375448 (TRAV12-2, TRAJ17)
CAVLFKAAGNKLTF

SEQ ID NO: 750896 - protein, 11 aa, Homo sapiens
  CDR3 for beta chain variable domain of TCR clone 375448 (TRBV29-1, TRBJ2-5)
RSEDRTGTQYF

SEQ ID NO: 750897 - protein, 14 aa, Homo sapiens
  CDR3 for alpha chain variable domain of TCR clone 375449 (TRAV12-2, TRAJ17)
FAVLFKAAGNKLTF

SEQ ID NO: 750898 - protein, 15 aa, Homo sapiens
  CDR3 for beta chain variable domain of TCR clone 375449 (TRBV20-1, TRBJ2-7)
CSARDRVSGMDEQYF

SEQ ID NO: 750899 - protein, 14 aa, Homo sapiens
  CDR3 for alpha chain variable domain of TCR clone 375450 (TRAV30, TRAJ26)
CGTEMVSYGQNFFF

SEQ ID NO: 750900 - protein, 13 aa, Homo sapiens
  CDR3 for beta chain variable domain of TCR clone 375450 (TRBV10-3, TRBJ2-7)
CASKLAVNYEQYF

SEQ ID NO: 750901 - protein, 14 aa, Homo sapiens
  CDR3 for alpha chain variable domain of TCR clone 375451 (TRAV3, TRAJ26)
CAVRDYNYGQNFVF

SEQ ID NO: 750902 - protein, 16 aa, Homo sapiens
  CDR3 for beta chain variable domain of TCR clone 375451 (TRBV20-1, TRBJ2-5)
SAVLTPPGRGGETQYF

SEQ ID NO: 750903 - protein, 15 aa, Homo sapiens
  CDR3 for alpha chain variable domain of TCR clone 375452 (TRAV3, TRAJ5)
CAVRDRKTGRRALTF

SEQ ID NO: 750904 - protein, 15 aa, Homo sapiens
  CDR3 for beta chain variable domain of TCR clone 375452 (TRBV7-8, TRBJ2-1)
CASSLADSLSNAPFF

SEQ ID NO: 750905 - protein, 12 aa, Homo sapiens
  CDR3 for alpha chain variable domain of TCR clone 375453 (TRAV27, TRAJ34)
CAEPYNTDKLIF

SEQ ID NO: 750906 - protein, 12 aa, Homo sapiens
  CDR3 for beta chain variable domain of TCR clone 375453 (TRBV14, TRBJ2-5)
CASSQLKETQYF

SEQ ID NO: 750907 - protein, 14 aa, Homo sapiens
  CDR3 for alpha chain variable domain of TCR clone 375454 (TRAV12-1, TRAJ22)
CVVTTSGSARQLTF

SEQ ID NO: 750908 - protein, 13 aa, Homo sapiens
  CDR3 for beta chain variable domain of TCR clone 375454 (TRBV7-9, TRBJ2-3)
CASSPGSTDTQYF

SEQ ID NO: 750909 - protein, 13 aa, Homo sapiens
  CDR3 for alpha chain variable domain of TCR clone 375455 (TRAV17, TRAJ5)
CAPMDTGRSALTF

SEQ ID NO: 750910 - protein, 12 aa, Homo sapiens
  CDR3 for beta chain variable domain of TCR clone 375455 (TRBV7-8, TRBJ2-7)
CASSLGDREQYF

SEQ ID NO: 750911 - protein, 12 aa, Homo sapiens
  CDR3 for alpha chain variable domain of TCR clone 375456 (TRAV12-2, TRAJ41)
CAMSYSGYALNF

SEQ ID NO: 750912 - protein, 13 aa, Homo sapiens
  CDR3 for beta chain variable domain of TCR clone 375456 (TRBV7-3, TRBJ2-1)
CASSLDSYNEQFF

SEQ ID NO: 750913 - protein, 13 aa, Homo sapiens
  CDR3 for alpha chain variable domain of TCR clone 375457 (TRAV3, TRAJ20)
CCAAFCNDYQLSF

SEQ ID NO: 750914 - protein, 15 aa, Homo sapiens
  CDR3 for beta chain variable domain of TCR clone 375457 (TRBV19, TRBJ2-6)
CASVRRDSGANVLTF

SEQ ID NO: 750915 - protein, 15 aa, Homo sapiens
  CDR3 for alpha chain variable domain of TCR clone 375458 (TRAV12-2, TRAJ10)
CREQGTHGGGNKLTF

SEQ ID NO: 750916 - protein, 12 aa, Homo sapiens
  CDR3 for beta chain variable domain of TCR clone 375458 (TRBV28, TRBJ2-7)
CASSFSSYEQYF

SEQ ID NO: 750917 - protein, 14 aa, Homo sapiens
  CDR3 for alpha chain variable domain of TCR clone 375459 (TRAV13-2, TRAJ32)
CAENYGGATNKLIF

SEQ ID NO: 750918 - protein, 15 aa, Homo sapiens
  CDR3 for beta chain variable domain of TCR clone 375459 (TRBV4-1, TRBJ2-7)
CASSQEWGPSYEQYF

SEQ ID NO: 750919 - protein, 14 aa, Homo sapiens
  CDR3 for alpha chain variable domain of TCR clone 375460 (TRAV2, TRAJ37)
CAVDFTSNTGKLIF

SEQ ID NO: 750920 - protein, 14 aa, Homo sapiens
  CDR3 for beta chain variable domain of TCR clone 375460 (TRBV5-1, TRBJ1-2)
CASNIGTGDYGYTF

SEQ ID NO: 750921 - protein, 10 aa, Homo sapiens
  CDR3 for alpha chain variable domain of TCR clone 375461 (TRAV17, TRAJ23)
CATGPSQSVT

SEQ ID NO: 750922 - protein, 16 aa, Homo sapiens
  CDR3 for beta chain variable domain of TCR clone 375461 (TRBV20-1, TRBJ1-4)
CSAPGQGLLTNEKLFF

SEQ ID NO: 750923 - protein, 15 aa, Homo sapiens
  CDR3 for alpha chain variable domain of TCR clone 375462 (TRAV8-3, TRAJ11)
CAVGLLNSGHSTLTF

SEQ ID NO: 750924 - protein, 16 aa, Homo sapiens
  CDR3 for beta chain variable domain of TCR clone 375462 (TRBV7-9, TRBJ1-2)
CASSLGFSSGEDGDTF

SEQ ID NO: 750925 - protein, 12 aa, Homo sapiens
  CDR3 for alpha chain variable domain of TCR clone 375463 (TRAV2, TRAJ33)
CAFMDSNYRLIW

SEQ ID NO: 750926 - protein, 16 aa, Homo sapiens
  CDR3 for beta chain variable domain of TCR clone 375463 (TRBV2, TRBJ2-7)
CASSEPWTGPSYEQYF

SEQ ID NO: 750927 - protein, 10 aa, Homo sapiens
  CDR3 for alpha chain variable domain of TCR clone 375464 (TRAV23/DV6, TRAJ57)
CAASSTLSQR

SEQ ID NO: 750928 - protein, 14 aa, Homo sapiens
  CDR3 for beta chain variable domain of TCR clone 375464 (TRBV25-1, TRBJ1-1)
CASTHLGGNTKAFF

SEQ ID NO: 750929 - protein, 13 aa, Homo sapiens
  CDR3 for alpha chain variable domain of TCR clone 375465 (TRAV13-1, TRAJ40)
CAAISPGTYKYIF

SEQ ID NO: 750930 - protein, 12 aa, Homo sapiens
  CDR3 for beta chain variable domain of TCR clone 375465 (TRBV3-1, TRBJ2-1)
CASRGLGNEQFF

SEQ ID NO: 750931 - protein, 12 aa, Homo sapiens
  CDR3 for alpha chain variable domain of TCR clone 375466 (TRAV8-3, TRAJ20)
CAVGANDYKLSF

SEQ ID NO: 750932 - protein, 15 aa, Homo sapiens
  CDR3 for beta chain variable domain of TCR clone 375466 (TRBV28, TRBJ2-2)
CASRLQGVGTGELFF

SEQ ID NO: 750933 - protein, 14 aa, Homo sapiens
  CDR3 for alpha chain variable domain of TCR clone 375467 (TRAV17, TRAJ45)
CATASGGGADGLTF

SEQ ID NO: 750934 - protein, 17 aa, Homo sapiens
  CDR3 for beta chain variable domain of TCR clone 375467 (TRBV13, TRBJ2-5)
CASSLSRVAGGRNTQYF

SEQ ID NO: 750935 - protein, 16 aa, Homo sapiens
  CDR3 for alpha chain variable domain of TCR clone 375468 (TRAV3, TRAJ37)
CAVRGKGSGNTGKLIF

SEQ ID NO: 750936 - protein, 13 aa, Homo sapiens
  CDR3 for beta chain variable domain of TCR clone 375468 (TRBV6-1, TRBJ2-1)
CAGAGTGLHEQFF

SEQ ID NO: 750937 - protein, 15 aa, Homo sapiens
  CDR3 for alpha chain variable domain of TCR clone 375469 (TRAV8-3, TRAJ45)
CAASYSGGGADGLTF

SEQ ID NO: 750938 - protein, 14 aa, Homo sapiens
  CDR3 for beta chain variable domain of TCR clone 375469 (TRBV7-3, TRBJ2-1)
CASSLAGGTNEQFF

SEQ ID NO: 750939 - protein, 13 aa, Homo sapiens
  CDR3 for alpha chain variable domain of TCR clone 375470 (TRAV29/DV5, TRAJ31)
CAASRNNNARLMF

SEQ ID NO: 750940 - protein, 15 aa, Homo sapiens
  CDR3 for beta chain variable domain of TCR clone 375470 (TRBV2, TRBJ1-2)
CASSEIGGANYGYTF

SEQ ID NO: 750941 - protein, 13 aa, Homo sapiens
  CDR3 for alpha chain variable domain of TCR clone 375471 (TRAV21, TRAJ47)
CAVSGLYGNKLVF

SEQ ID NO: 750942 - protein, 17 aa, Homo sapiens
  CDR3 for beta chain variable domain of TCR clone 375471 (TRBV15, TRBJ2-3)
CATSGTTSEEVTDTQYF

SEQ ID NO: 750943 - protein, 14 aa, Homo sapiens
  CDR3 for alpha chain variable domain of TCR clone 375472 (TRAV8-4, TRAJ43)
CAVSYPRNNNDMRF

SEQ ID NO: 750944 - protein, 15 aa, Homo sapiens
  CDR3 for beta chain variable domain of TCR clone 375472 (TRBV4-2, TRBJ1-2)
CASSQRTGGRDGYTF

SEQ ID NO: 750945 - protein, 15 aa, Homo sapiens
  CDR3 for alpha chain variable domain of TCR clone 375473 (TRAV12-1, TRAJ22)
CVVRISSGSARQLPF

SEQ ID NO: 750946 - protein, 13 aa, Homo sapiens
  CDR3 for beta chain variable domain of TCR clone 375473 (TRBV6-3, TRBJ1-1)
CASSYSRTDSAFF

SEQ ID NO: 750947 - protein, 14 aa, Homo sapiens
  CDR3 for alpha chain variable domain of TCR clone 375474 (TRAV25, TRAJ12)
CAGCDMDSSDKLIF

SEQ ID NO: 750948 - protein, 16 aa, Homo sapiens
  CDR3 for beta chain variable domain of TCR clone 375474 (TRBV7-9, TRBJ2-3)
CASSPWREVGTDTQYF

SEQ ID NO: 750949 - protein, 14 aa, Homo sapiens
  CDR3 for alpha chain variable domain of TCR clone 375475 (TRAV3, TRAJ5)
CAVRPRHGQESTYF

SEQ ID NO: 750950 - protein, 13 aa, Homo sapiens
  CDR3 for beta chain variable domain of TCR clone 375475 (TRBV12-4, TRBJ2-7)
CASSPTETYEQYF

SEQ ID NO: 750951 - protein, 12 aa, Homo sapiens
  CDR3 for alpha chain variable domain of TCR clone 375476 (TRAV23/DV6, TRAJ39)
VPFNNAGNMLTF

SEQ ID NO: 750952 - protein, 17 aa, Homo sapiens
  CDR3 for beta chain variable domain of TCR clone 375476 (TRBV20-1, TRBJ2-1)
CSAPPRLAGTRYNEQFF

SEQ ID NO: 750953 - protein, 16 aa, Homo sapiens
  CDR3 for alpha chain variable domain of TCR clone 375477 (TRAV23/DV6, TRAJ9)
CAASIGGNTGGFKTIF

SEQ ID NO: 750954 - protein, 15 aa, Homo sapiens
  CDR3 for beta chain variable domain of TCR clone 375477 (TRBV7-9, TRBJ1-5)
CASSQGHQPNQPQHF

SEQ ID NO: 750955 - protein, 15 aa, Homo sapiens
  CDR3 for alpha chain variable domain of TCR clone 375478 (TRAV12-1, TRAJ44)
CVADIPTGTASKLTF

SEQ ID NO: 750956 - protein, 13 aa, Homo sapiens
  CDR3 for beta chain variable domain of TCR clone 375478 (TRBV6-5, TRBJ2-5)
CASSPQGGETQYF

SEQ ID NO: 750957 - protein, 17 aa, Homo sapiens
  CDR3 for alpha chain variable domain of TCR clone 375479 (TRAV3, TRAJ12)
CAVRDGGRMESSYKLIF

SEQ ID NO: 750958 - protein, 13 aa, Homo sapiens
  CDR3 for beta chain variable domain of TCR clone 375479 (TRBV20-1, TRBJ1-1)
CSAPLGGGTEAFF

SEQ ID NO: 750959 - protein, 14 aa, Homo sapiens
  CDR3 for alpha chain variable domain of TCR clone 375480 (TRAV23/DV6, TRAJ40)
CAASLTSGTYKYIF

SEQ ID NO: 750960 - protein, 13 aa, Homo sapiens
  CDR3 for beta chain variable domain of TCR clone 375480 (TRBV12-4, TRBJ1-2)
CASSLRQGKGYTF

SEQ ID NO: 750961 - protein, 14 aa, Homo sapiens
  CDR3 for alpha chain variable domain of TCR clone 375481 (TRAV17, TRAJ57)
CATDPQGGSEKLVF

SEQ ID NO: 750962 - protein, 14 aa, Homo sapiens
  CDR3 for beta chain variable domain of TCR clone 375481 (TRBV11-2, TRBJ2-3)
CASSLGVGANTQYF

SEQ ID NO: 750963 - protein, 15 aa, Homo sapiens
  CDR3 for alpha chain variable domain of TCR clone 375482 (TRAV13-1, TRAJ52)
CAAISPRTSYGKLTF

SEQ ID NO: 750964 - protein, 16 aa, Homo sapiens
  CDR3 for beta chain variable domain of TCR clone 375482 (TRBV7-3, TRBJ2-2)
CASSLKRGTLSGELFF

SEQ ID NO: 750965 - protein, 16 aa, Homo sapiens
  CDR3 for alpha chain variable domain of TCR clone 375483 (TRAV3, TRAJ37)
CAVRPHGAGNTGKLIF

SEQ ID NO: 750966 - protein, 13 aa, Homo sapiens
  CDR3 for beta chain variable domain of TCR clone 375483 (TRBV2, TRBJ1-5)
CASGTGGYQPQHF

SEQ ID NO: 750967 - protein, 14 aa, Homo sapiens
  CDR3 for alpha chain variable domain of TCR clone 375484 (TRAV9-2, TRAJ39)
CALYTYNAGNMLTF

SEQ ID NO: 750968 - protein, 17 aa, Homo sapiens
  CDR3 for beta chain variable domain of TCR clone 375484 (TRBV20-1, TRBJ2-2)
CSASGSAQGGLTGELFF

SEQ ID NO: 750969 - protein, 14 aa, Homo sapiens
  CDR3 for alpha chain variable domain of TCR clone 375485 (TRAV20, TRAJ21)
CAAGGIYNFNKFYF

SEQ ID NO: 750970 - protein, 12 aa, Homo sapiens
  CDR3 for beta chain variable domain of TCR clone 375485 (TRBV12-4, TRBJ2-1)
FASSLVRVEQFF

SEQ ID NO: 750971 - protein, 13 aa, Homo sapiens
  CDR3 for alpha chain variable domain of TCR clone 375486 (TRAV8-2, TRAJ49)
CVVTPNTGNQFYF

SEQ ID NO: 750972 - protein, 14 aa, Homo sapiens
  CDR3 for beta chain variable domain of TCR clone 375486 (TRBV12-5, TRBJ2-5)
CASGSRTHQETQYF

SEQ ID NO: 750973 - protein, 13 aa, Homo sapiens
  CDR3 for alpha chain variable domain of TCR clone 375487 (TRAV13-1, TRAJ6)
CATSKGGSYIPTF

SEQ ID NO: 750974 - protein, 14 aa, Homo sapiens
  CDR3 for beta chain variable domain of TCR clone 375487 (TRBV7-2, TRBJ2-1)
CASSLGVGYNEQFF

SEQ ID NO: 750975 - protein, 18 aa, Homo sapiens
  CDR3 for alpha chain variable domain of TCR clone 375488 (TRAV13-1, TRAJ28)
CAASPVHILWGWELPTHF

SEQ ID NO: 750976 - protein, 13 aa, Homo sapiens
  CDR3 for beta chain variable domain of TCR clone 375488 (TRBV15, TRBJ2-7)
CATSTTGHYEQYF

SEQ ID NO: 750977 - protein, 23 aa, Homo sapiens
  CDR3 for alpha chain variable domain of TCR clone 375489 (TRAV26-1, TRAJ38)
CIADNAGNNHIQTPDPAVYQLRD

SEQ ID NO: 750978 - protein, 12 aa, Homo sapiens
  CDR3 for beta chain variable domain of TCR clone 375489 (TRBV11-2, TRBJ2-2)
CASSLGGGELFF

SEQ ID NO: 750979 - protein, 15 aa, Homo sapiens
  CDR3 for alpha chain variable domain of TCR clone 375490 (TRAV35, TRAJ40)
CAGQLGTSGTYKYIL

SEQ ID NO: 750980 - protein, 14 aa, Homo sapiens
  CDR3 for beta chain variable domain of TCR clone 375490 (TRBV7-3, TRBJ1-1)
CASSLGTGGTEAFF

SEQ ID NO: 750981 - protein, 13 aa, Homo sapiens
  CDR3 for alpha chain variable domain of TCR clone 375491 (TRAV3, TRAJ31)
CAVREGNNARLMF

SEQ ID NO: 750982 - protein, 14 aa, Homo sapiens
  CDR3 for beta chain variable domain of TCR clone 375491 (TRBV13, TRBJ2-5)
CASSLERVGETHYF

SEQ ID NO: 750983 - protein, 11 aa, Homo sapiens
  CDR3 for alpha chain variable domain of TCR clone 375492 (TRAV23/DV6, TRAJ9)
CFHTGGFKTIF

SEQ ID NO: 750984 - protein, 20 aa, Homo sapiens
  CDR3 for beta chain variable domain of TCR clone 375492 (TRBV7-8, TRBJ2-2)
CASSHLFPGPTIHIAGELFF

SEQ ID NO: 750985 - protein, 12 aa, Homo sapiens
  CDR3 for alpha chain variable domain of TCR clone 375493 (TRAV21, TRAJ33)
CAVQDINHQLIW

SEQ ID NO: 750986 - protein, 14 aa, Homo sapiens
  CDR3 for beta chain variable domain of TCR clone 375493 (TRBV28, TRBJ2-1)
CASSPGEGGNEQFF

SEQ ID NO: 750987 - protein, 16 aa, Homo sapiens
  CDR3 for alpha chain variable domain of TCR clone 375494 (TRAV3, TRAJ37)
CAVRVRGSGNPGKIIF

SEQ ID NO: 750988 - protein, 11 aa, Homo sapiens
  CDR3 for beta chain variable domain of TCR clone 375494 (TRBV11-2, TRBJ2-2)
CASGLPGELFF

SEQ ID NO: 750989 - protein, 13 aa, Homo sapiens
  CDR3 for alpha chain variable domain of TCR clone 375495 (TRAV2, TRAJ15)
CAVASQAGTALIF

SEQ ID NO: 750990 - protein, 14 aa, Homo sapiens
  CDR3 for beta chain variable domain of TCR clone 375495 (TRBV25-1, TRBJ1-1)
CASPHLGGNTEAFF

SEQ ID NO: 750991 - protein, 14 aa, Homo sapiens
  CDR3 for alpha chain variable domain of TCR clone 375496 (TRAV30, TRAJ33)
CGTVAPRSNYQLIW

SEQ ID NO: 750992 - protein, 18 aa, Homo sapiens
  CDR3 for beta chain variable domain of TCR clone 375496 (TRBV20-1, TRBJ2-6)
CSAETTPTHGSGANVLTF

SEQ ID NO: 750993 - protein, 15 aa, Homo sapiens
  CDR3 for alpha chain variable domain of TCR clone 375497 (TRAV3, TRAJ5)
CAVRDRKTGRRAFIF

SEQ ID NO: 750994 - protein, 15 aa, Homo sapiens
  CDR3 for beta chain variable domain of TCR clone 375497 (TRBV7-8, TRBJ2-1)
CASSLADSLYNEQFF

SEQ ID NO: 750995 - protein, 15 aa, Homo sapiens
  CDR3 for alpha chain variable domain of TCR clone 375498 (TRAV14/DV4, TRAJ17)
CAMREVKAAGNKLTF

SEQ ID NO: 750996 - protein, 13 aa, Homo sapiens
  CDR3 for beta chain variable domain of TCR clone 375498 (TRBV4-2, TRBJ1-1)
CASSQAGNTEAFF

SEQ ID NO: 750997 - protein, 12 aa, Homo sapiens
  CDR3 for alpha chain variable domain of TCR clone 375499 (TRAV27, TRAJ41)
CAGRNSGYALNF

SEQ ID NO: 750998 - protein, 13 aa, Homo sapiens
  CDR3 for beta chain variable domain of TCR clone 375499 (TRBV12-4, TRBJ1-1)
CASSPGTGLEAFF

SEQ ID NO: 750999 - protein, 15 aa, Homo sapiens
  CDR3 for alpha chain variable domain of TCR clone 375500 (TRAV20, TRAJ4)
CAVQVFSGGYNKLIF

SEQ ID NO: 751000 - protein, 16 aa, Homo sapiens
  CDR3 for beta chain variable domain of TCR clone 375500 (TRBV7-3, TRBJ2-3)
ELSSLSGYRPEDTQYF

SEQ ID NO: 751001 - protein, 18 aa, Homo sapiens
  CDR3 for alpha chain variable domain of TCR clone 375501 (TRAV26-2, TRAJ45)
CILRVDKYSGGGAAGLTF

SEQ ID NO: 751002 - protein, 17 aa, Homo sapiens
  CDR3 for beta chain variable domain of TCR clone 375501 (TRBV25-1, TRBJ2-1)
CASSAYGQGRGVYEQFF

SEQ ID NO: 751003 - protein, 11 aa, Homo sapiens
  CDR3 for alpha chain variable domain of TCR clone 375502 (TRAV26-2, TRAJ8)
CILTGFQNLVF

SEQ ID NO: 751004 - protein, 19 aa, Homo sapiens
  CDR3 for beta chain variable domain of TCR clone 375502 (TRBV20-1, TRBJ2-1)
CSARGETSGNSPRIDEQFF

SEQ ID NO: 751005 - protein, 13 aa, Homo sapiens
  CDR3 for alpha chain variable domain of TCR clone 375503 (TRAV12-3, TRAJ31)
CAMSANNNARLMF

SEQ ID NO: 751006 - protein, 11 aa, Homo sapiens
  CDR3 for beta chain variable domain of TCR clone 375503 (TRBV7-9, TRBJ2-3)
CASSPTDTQYF

SEQ ID NO: 751007 - protein, 14 aa, Homo sapiens
  CDR3 for alpha chain variable domain of TCR clone 375504 (TRAV29/DV5, TRAJ36)
CAARRKTGANNLFF

SEQ ID NO: 751008 - protein, 14 aa, Homo sapiens
  CDR3 for beta chain variable domain of TCR clone 375504 (TRBV19, TRBJ2-2)
CASSTLHRSGELFF

SEQ ID NO: 751009 - protein, 14 aa, Homo sapiens
  CDR3 for alpha chain variable domain of TCR clone 375505 (TRAV12-2, TRAJ40)
CAVKIPSGTSNYIF

SEQ ID NO: 751010 - protein, 14 aa, Homo sapiens
  CDR3 for beta chain variable domain of TCR clone 375505 (TRBV20-1, TRBJ1-1)
CSAQTRIGGTEAFF

SEQ ID NO: 751011 - protein, 15 aa, Homo sapiens
  CDR3 for alpha chain variable domain of TCR clone 375506 (TRAV2, TRAJ9)
CGVEDRGTGGFKTIF

SEQ ID NO: 751012 - protein, 16 aa, Homo sapiens
  CDR3 for beta chain variable domain of TCR clone 375506 (TRBV24-1, TRBJ2-3)
CATSDPGTGATDTQYF

SEQ ID NO: 751013 - protein, 17 aa, Homo sapiens
  CDR3 for alpha chain variable domain of TCR clone 375507 (TRAV3, TRAJ6)
CAVRDGPRAGGSYIPTF

SEQ ID NO: 751014 - protein, 16 aa, Homo sapiens
  CDR3 for beta chain variable domain of TCR clone 375507 (TRBV11-1, TRBJ2-2)
CASSAEGLKNTGELFF

SEQ ID NO: 751015 - protein, 15 aa, Homo sapiens
  CDR3 for alpha chain variable domain of TCR clone 375508 (TRAV26-1, TRAJ29)
CIVSAEGSGNTPLGF

SEQ ID NO: 751016 - protein, 14 aa, Homo sapiens
  CDR3 for beta chain variable domain of TCR clone 375508 (TRBV18, TRBJ2-5)
CASSPGVSQETQYF

SEQ ID NO: 751017 - protein, 12 aa, Homo sapiens
  CDR3 for alpha chain variable domain of TCR clone 375509 (TRAV8-3, TRAJ20)
CAVGANDYKLSF

SEQ ID NO: 751018 - protein, 15 aa, Homo sapiens
  CDR3 for beta chain variable domain of TCR clone 375509 (TRBV11-3, TRBJ2-1)
CASSLGTSGLNEQFF

SEQ ID NO: 751019 - protein, 10 aa, Homo sapiens
  CDR3 for alpha chain variable domain of TCR clone 375510 (TRAV8-4, TRAJ43)
CAVSADDMRF

SEQ ID NO: 751020 - protein, 11 aa, Homo sapiens
  CDR3 for beta chain variable domain of TCR clone 375510 (TRBV12-4, TRBJ2-3)
CASTARDTQYF

SEQ ID NO: 751021 - protein, 14 aa, Homo sapiens
  CDR3 for alpha chain variable domain of TCR clone 375511 (TRAV8-4, TRAJ49)
CAVKRGLPVTSSIL

SEQ ID NO: 751022 - protein, 15 aa, Homo sapiens
  CDR3 for beta chain variable domain of TCR clone 375511 (TRBV12-4, TRBJ2-5)
CASSPPTGLQETQYF

SEQ ID NO: 751023 - protein, 14 aa, Homo sapiens
  CDR3 for alpha chain variable domain of TCR clone 375512 (TRAV20, TRAJ22)
CAVALGGSARQLTF

SEQ ID NO: 751024 - protein, 19 aa, Homo sapiens
  CDR3 for beta chain variable domain of TCR clone 375512 (TRBV7-3, TRBJ2-7)
CASSLTGVAGGWPSYEQYF

SEQ ID NO: 751025 - protein, 14 aa, Homo sapiens
  CDR3 for alpha chain variable domain of TCR clone 375513 (TRAV12-3, TRAJ10)
SHLPLTEGGNKLTF

SEQ ID NO: 751026 - protein, 15 aa, Homo sapiens
  CDR3 for beta chain variable domain of TCR clone 375513 (TRBV11-2, TRBJ1-3)
CASSLDGTVGNTIYF

SEQ ID NO: 751027 - protein, 15 aa, Homo sapiens
  CDR3 for alpha chain variable domain of TCR clone 375514 (TRAV13-1, TRAJ17)
CAASIERAAGNKLTL

SEQ ID NO: 751028 - protein, 17 aa, Homo sapiens
  CDR3 for beta chain variable domain of TCR clone 375514 (TRBV13, TRBJ2-3)
CASSLSRVAGGRNTQYF

SEQ ID NO: 751029 - protein, 13 aa, Homo sapiens
  CDR3 for alpha chain variable domain of TCR clone 375515 (TRAV21, TRAJ15)
CASPNQAGTALIF

SEQ ID NO: 751030 - protein, 16 aa, Homo sapiens
  CDR3 for beta chain variable domain of TCR clone 375515 (TRBV5-4, TRBJ2-3)
CASQQPGAGGADTQYF

SEQ ID NO: 751031 - protein, 13 aa, Homo sapiens
  CDR3 for alpha chain variable domain of TCR clone 375516 (TRAV35, TRAJ33)
WAGQLYGVYQLIW

SEQ ID NO: 751032 - protein, 14 aa, Homo sapiens
  CDR3 for beta chain variable domain of TCR clone 375516 (TRBV7-2, TRBJ1-1)
CASSLGGAGTEAFF

SEQ ID NO: 751033 - protein, 14 aa, Homo sapiens
  CDR3 for alpha chain variable domain of TCR clone 375517 (TRAV17, TRAJ35)
CATDRPGFGNVLHY

SEQ ID NO: 751034 - protein, 15 aa, Homo sapiens
  CDR3 for beta chain variable domain of TCR clone 375517 (TRBV28, TRBJ2-5)
CASSSGRVIQETQYF

SEQ ID NO: 751035 - protein, 11 aa, Homo sapiens
  CDR3 for alpha chain variable domain of TCR clone 375518 (TRAV21, TRAJ34)
CAPLDTDKLIF

SEQ ID NO: 751036 - protein, 16 aa, Homo sapiens
  CDR3 for beta chain variable domain of TCR clone 375518 (TRBV5-1, TRBJ2-3)
CSSSLAGDRGTDTQYF

SEQ ID NO: 751037 - protein, 13 aa, Homo sapiens
  CDR3 for alpha chain variable domain of TCR clone 375519 (TRAV12-1, TRAJ49)
CVVNTNTGNQFYF

SEQ ID NO: 751038 - protein, 18 aa, Homo sapiens
  CDR3 for beta chain variable domain of TCR clone 375519 (TRBV7-9, TRBJ2-7)
CASSLTTSGSRTWYEQYF

SEQ ID NO: 751039 - protein, 14 aa, Homo sapiens
  CDR3 for alpha chain variable domain of TCR clone 375520 (TRAV35, TRAJ33)
CAGSSQDSNYQLIW

SEQ ID NO: 751040 - protein, 15 aa, Homo sapiens
  CDR3 for beta chain variable domain of TCR clone 375520 (TRBV29-1, TRBJ2-7)
CSVEVFDRGSYEQYF

SEQ ID NO: 751041 - protein, 14 aa, Homo sapiens
  CDR3 for alpha chain variable domain of TCR clone 375521 (TRAV3, TRAJ6)
CAVRDWGGSYIPTF

SEQ ID NO: 751042 - protein, 15 aa, Homo sapiens
  CDR3 for beta chain variable domain of TCR clone 375521 (TRBV28, TRBJ2-1)
CASSIIAGGRSEQFF

SEQ ID NO: 751043 - protein, 16 aa, Homo sapiens
  CDR3 for alpha chain variable domain of TCR clone 375522 (TRAV17, TRAJ22)
CATGPISSGSARQLTF

SEQ ID NO: 751044 - protein, 16 aa, Homo sapiens
  CDR3 for beta chain variable domain of TCR clone 375522 (TRBV11-3, TRBJ2-5)
CASISVVAGSTETQYF

SEQ ID NO: 751045 - protein, 10 aa, Homo sapiens
  CDR3 for alpha chain variable domain of TCR clone 375523 (TRAV39, TRAJ49)
CAVAGNQFYF

SEQ ID NO: 751046 - protein, 13 aa, Homo sapiens
  CDR3 for beta chain variable domain of TCR clone 375523 (TRBV7-8, TRBJ2-7)
CQSPRDRVYEQYF

SEQ ID NO: 751047 - protein, 13 aa, Homo sapiens
  CDR3 for alpha chain variable domain of TCR clone 375524 (TRAV8-3, TRAJ34)
CAVGARVLGKLIF

SEQ ID NO: 751048 - protein, 13 aa, Homo sapiens
  CDR3 for beta chain variable domain of TCR clone 375524 (TRBV30, TRBJ1-6)
CAWSPQENSPLHF

SEQ ID NO: 751049 - protein, 15 aa, Homo sapiens
  CDR3 for alpha chain variable domain of TCR clone 375525 (TRAV13-1, TRAJ18)
CAASPTGSTLGRLYF

SEQ ID NO: 751050 - protein, 13 aa, Homo sapiens
  CDR3 for beta chain variable domain of TCR clone 375525 (TRBV4-1, TRBJ2-2)
CASSQENTGELFF

SEQ ID NO: 751051 - protein, 11 aa, Homo sapiens
  CDR3 for alpha chain variable domain of TCR clone 375526 (TRAV12-1, TRAJ43)
CVEYDNNDMRF

SEQ ID NO: 751052 - protein, 15 aa, Homo sapiens
  CDR3 for beta chain variable domain of TCR clone 375526 (TRBV18, TRBJ2-5)
CASSPRASEAEPQYF

SEQ ID NO: 751053 - protein, 12 aa, Homo sapiens
  CDR3 for alpha chain variable domain of TCR clone 375527 (TRAV25, TRAJ5)
CAGGGGRRALTF

SEQ ID NO: 751054 - protein, 11 aa, Homo sapiens
  CDR3 for beta chain variable domain of TCR clone 375527 (TRBV2, TRBJ1-2)
CASSPGNGYTF

SEQ ID NO: 751055 - protein, 13 aa, Homo sapiens
  CDR3 for alpha chain variable domain of TCR clone 375528 (TRAV13-1, TRAJ23)
CAASSYQGGKLIF

SEQ ID NO: 751056 - protein, 16 aa, Homo sapiens
  CDR3 for beta chain variable domain of TCR clone 375528 (TRBV20-1, TRBJ2-1)
CSATPRLAGTYNEQFF

SEQ ID NO: 751057 - protein, 13 aa, Homo sapiens
  CDR3 for alpha chain variable domain of TCR clone 375529 (TRAV1-2, TRAJ33)
CAVSEDSNYQLIW

SEQ ID NO: 751058 - protein, 15 aa, Homo sapiens
  CDR3 for beta chain variable domain of TCR clone 375529 (TRBV20-1, TRBJ2-7)
CSARDRVSGMDEQYF

SEQ ID NO: 751059 - protein, 13 aa, Homo sapiens
  CDR3 for alpha chain variable domain of TCR clone 375530 (TRAV12-2, TRAJ10)
CAVPTGGGNKLTF

SEQ ID NO: 751060 - protein, 12 aa, Homo sapiens
  CDR3 for beta chain variable domain of TCR clone 375530 (TRBV7-9, TRBJ2-7)
CASSIKREEQYF

SEQ ID NO: 751061 - protein, 13 aa, Homo sapiens
  CDR3 for alpha chain variable domain of TCR clone 375531 (TRAV12-2, TRAJ49)
CAVKPNTGNQFYF

SEQ ID NO: 751062 - protein, 12 aa, Homo sapiens
  CDR3 for beta chain variable domain of TCR clone 375531 (TRBV11-2, TRBJ2-2)
CASSLGGGELFF

SEQ ID NO: 751063 - protein, 15 aa, Homo sapiens
  CDR3 for alpha chain variable domain of TCR clone 375532 (TRAV8-6, TRAJ42)
CAVRGRKPRRSHLWK

SEQ ID NO: 751064 - protein, 13 aa, Homo sapiens
  CDR3 for beta chain variable domain of TCR clone 375532 (TRBV7-3, TRBJ1-1)
CASSQDWGAEAFF

SEQ ID NO: 751065 - protein, 13 aa, Homo sapiens
  CDR3 for alpha chain variable domain of TCR clone 375533 (TRAV12-3, TRAJ9)
CAMRNTGGFKTIF

SEQ ID NO: 751066 - protein, 15 aa, Homo sapiens
  CDR3 for beta chain variable domain of TCR clone 375533 (TRBV6-5, TRBJ2-1)
CASSYDAGAGNEQFF

SEQ ID NO: 751067 - protein, 17 aa, Homo sapiens
  CDR3 for alpha chain variable domain of TCR clone 375534 (TRAV12-3, TRAJ6)
CAMSARGGAGGSYIPTF

SEQ ID NO: 751068 - protein, 12 aa, Homo sapiens
  CDR3 for beta chain variable domain of TCR clone 375534 (TRBV12-4, TRBJ2-3)
CAISTLPDTQYF

SEQ ID NO: 751069 - protein, 13 aa, Homo sapiens
  CDR3 for alpha chain variable domain of TCR clone 375535 (TRAV12-3, TRAJ56)
CAFATGANSKLTF

SEQ ID NO: 751070 - protein, 12 aa, Homo sapiens
  CDR3 for beta chain variable domain of TCR clone 375535 (TRBV10-2, TRBJ2-3)
CASSPESDTQYF

SEQ ID NO: 751071 - protein, 13 aa, Homo sapiens
  CDR3 for alpha chain variable domain of TCR clone 375536 (TRAV3, TRAJ30)
CAVRDIPDDKIIF

SEQ ID NO: 751072 - protein, 14 aa, Homo sapiens
  CDR3 for beta chain variable domain of TCR clone 375536 (TRBV7-3, TRBJ1-1)
CASSLKGGNTEAFF

SEQ ID NO: 751073 - protein, 18 aa, Homo sapiens
  CDR3 for alpha chain variable domain of TCR clone 375537 (TRAV13-1, TRAJ52)
CAAKNPNAGGTSYGKLKF

SEQ ID NO: 751074 - protein, 15 aa, Homo sapiens
  CDR3 for beta chain variable domain of TCR clone 375537 (TRBV5-1, TRBJ2-1)
CASSPPRAPYNEQFF

SEQ ID NO: 751075 - protein, 10 aa, Homo sapiens
  CDR3 for alpha chain variable domain of TCR clone 375538 (TRAV23/DV6, TRAJ31)
CARGGARLMF

SEQ ID NO: 751076 - protein, 15 aa, Homo sapiens
  CDR3 for beta chain variable domain of TCR clone 375538 (TRBV7-9, TRBJ1-6)
CASSSPGRGNSPLHF

SEQ ID NO: 751077 - protein, 14 aa, Homo sapiens
  CDR3 for alpha chain variable domain of TCR clone 375539 (TRAV8-4, TRAJ15)
CAVILNQAGTALIF

SEQ ID NO: 751078 - protein, 16 aa, Homo sapiens
  CDR3 for beta chain variable domain of TCR clone 375539 (TRBV4-2, TRBJ2-3)
CASSQELAGDTDTQYF

SEQ ID NO: 751079 - protein, 11 aa, Homo sapiens
  CDR3 for alpha chain variable domain of TCR clone 375540 (TRAV12-2, TRAJ49)
CAVNTGNQFYF

SEQ ID NO: 751080 - protein, 15 aa, Homo sapiens
  CDR3 for beta chain variable domain of TCR clone 375540 (TRBV7-9, TRBJ1-4)
CASSRTGGFNEKLFF

SEQ ID NO: 751081 - protein, 11 aa, Homo sapiens
  CDR3 for alpha chain variable domain of TCR clone 375541 (TRAV13-1, TRAJ30)
CAASRDDKIIF

SEQ ID NO: 751082 - protein, 15 aa, Homo sapiens
  CDR3 for beta chain variable domain of TCR clone 375541 (TRBV18, TRBJ1-1)
CASSPSSWVNTEAFC

SEQ ID NO: 751083 - protein, 15 aa, Homo sapiens
  CDR3 for alpha chain variable domain of TCR clone 375542 (TRAV12-3, TRAJ6)
CAMSATTGGSYIPTF

SEQ ID NO: 751084 - protein, 16 aa, Homo sapiens
  CDR3 for beta chain variable domain of TCR clone 375542 (TRBV5-1, TRBJ2-2)
CASSLWDSTNTGELFF

SEQ ID NO: 751085 - protein, 17 aa, Homo sapiens
  CDR3 for alpha chain variable domain of TCR clone 375543 (TRAV2, TRAJ36)
CAVEDRGNWGKQPLLRD

SEQ ID NO: 751086 - protein, 14 aa, Homo sapiens
  CDR3 for beta chain variable domain of TCR clone 375543 (TRBV7-9, TRBJ2-5)
CASSLDTAQETQYF

SEQ ID NO: 751087 - protein, 14 aa, Homo sapiens
  CDR3 for alpha chain variable domain of TCR clone 375544 (TRAV8-4, TRAJ45)
CASGGGGVADGLTF

SEQ ID NO: 751088 - protein, 20 aa, Homo sapiens
  CDR3 for beta chain variable domain of TCR clone 375544 (TRBV4-3, TRBJ2-3)
CASSPRVEMRASGRPDTQYF

SEQ ID NO: 751089 - protein, 15 aa, Homo sapiens
  CDR3 for alpha chain variable domain of TCR clone 375545 (TRAV8-6, TRAJ37)
CAVIFSSGNTGKLIF

SEQ ID NO: 751090 - protein, 15 aa, Homo sapiens
  CDR3 for beta chain variable domain of TCR clone 375545 (TRBV25-1, TRBJ2-4)
CARSETESAKNIQYF

SEQ ID NO: 751091 - protein, 13 aa, Homo sapiens
  CDR3 for alpha chain variable domain of TCR clone 375546 (TRAV36/DV7, TRAJ54)
CAVDIQEAQKLVF

SEQ ID NO: 751092 - protein, 14 aa, Homo sapiens
  CDR3 for beta chain variable domain of TCR clone 375546 (TRBV19, TRBJ2-7)
CASNFRDTFTGMYF

SEQ ID NO: 751093 - protein, 14 aa, Homo sapiens
  CDR3 for alpha chain variable domain of TCR clone 375547 (TRAV12-2, TRAJ13)
CAVAGSGGYQKVTF

SEQ ID NO: 751094 - protein, 12 aa, Homo sapiens
  CDR3 for beta chain variable domain of TCR clone 375547 (TRBV11-3, TRBJ1-1)
CASSHRQGEAFF

SEQ ID NO: 751095 - protein, 11 aa, Homo sapiens
  CDR3 for alpha chain variable domain of TCR clone 375548 (TRAV8-2, TRAJ26)
CVVTLLLGAEF

SEQ ID NO: 751096 - protein, 15 aa, Homo sapiens
  CDR3 for beta chain variable domain of TCR clone 375548 (TRBV11-2, TRBJ2-2)
CASSSDRVNAGELFF

SEQ ID NO: 751097 - protein, 14 aa, Homo sapiens
  CDR3 for alpha chain variable domain of TCR clone 375549 (TRAV12-2, TRAJ41)
CAVNRANSGYALNF

SEQ ID NO: 751098 - protein, 13 aa, Homo sapiens
  CDR3 for beta chain variable domain of TCR clone 375549 (TRBV7-9, TRBJ1-2)
CASSLKLNYGYTF

SEQ ID NO: 751099 - protein, 11 aa, Homo sapiens
  CDR3 for alpha chain variable domain of TCR clone 375550 (TRAV2, TRAJ13)
CASGGYQKVTF

SEQ ID NO: 751100 - protein, 13 aa, Homo sapiens
  CDR3 for beta chain variable domain of TCR clone 375550 (TRBV12-4, TRBJ1-2)
CASSLRQRKGYTF

SEQ ID NO: 751101 - protein, 14 aa, Homo sapiens
  CDR3 for alpha chain variable domain of TCR clone 375551 (TRAV1-2, TRAJ16)
CAVNRFPDGQKLLF

SEQ ID NO: 751102 - protein, 15 aa, Homo sapiens
  CDR3 for beta chain variable domain of TCR clone 375551 (TRBV4-1, TRBJ2-5)
CASSQWDLYQETQYF

SEQ ID NO: 751103 - protein, 12 aa, Homo sapiens
  CDR3 for alpha chain variable domain of TCR clone 375552 (TRAV12-3, TRAJ17)
CAMTLTGNKLTF

SEQ ID NO: 751104 - protein, 13 aa, Homo sapiens
  CDR3 for beta chain variable domain of TCR clone 375552 (TRBV6-1, TRBJ2-1)
CASSETGVSEQFF

SEQ ID NO: 751105 - protein, 13 aa, Homo sapiens
  CDR3 for alpha chain variable domain of TCR clone 375553 (TRAV12-3, TRAJ13)
CAMGTGGYQKVTV

SEQ ID NO: 751106 - protein, 14 aa, Homo sapiens
  CDR3 for beta chain variable domain of TCR clone 375553 (TRBV7-2, TRBJ2-5)
CASSTGGELKTQYF

SEQ ID NO: 751107 - protein, 14 aa, Homo sapiens
  CDR3 for alpha chain variable domain of TCR clone 375554 (TRAV1-2, TRAJ16)
CAVNRFSDGQKLLF

SEQ ID NO: 751108 - protein, 19 aa, Homo sapiens
  CDR3 for beta chain variable domain of TCR clone 375554 (TRBV6-3, TRBJ1-2)
CASSYSNGRTGPPNYGYTF

SEQ ID NO: 751109 - protein, 15 aa, Homo sapiens
  CDR3 for alpha chain variable domain of TCR clone 375555 (TRAV8-4, TRAJ37)
CAVTYGSSNTGKLIF

SEQ ID NO: 751110 - protein, 13 aa, Homo sapiens
  CDR3 for beta chain variable domain of TCR clone 375555 (TRBV12-4, TRBJ2-5)
RASSLGGSRTQYF

SEQ ID NO: 751111 - protein, 17 aa, Homo sapiens
  CDR3 for alpha chain variable domain of TCR clone 375556 (TRAV20, TRAJ42)
CAVQAWGYGGSQGNLIF

SEQ ID NO: 751112 - protein, 16 aa, Homo sapiens
  CDR3 for beta chain variable domain of TCR clone 375556 (TRBV29-1, TRBJ2-5)
YSVEGLAGDYQETQYF

SEQ ID NO: 751113 - protein, 13 aa, Homo sapiens
  CDR3 for alpha chain variable domain of TCR clone 375557 (TRAV1-2, TRAJ9)
CAVLNTGGFKTIF

SEQ ID NO: 751114 - protein, 15 aa, Homo sapiens
  CDR3 for beta chain variable domain of TCR clone 375557 (TRBV7-2, TRBJ1-5)
CASSSNWGAGQTQHF

SEQ ID NO: 751115 - protein, 15 aa, Homo sapiens
  CDR3 for alpha chain variable domain of TCR clone 375558 (TRAV8-6, TRAJ11)
CAVNFMNSGYSTLTF

SEQ ID NO: 751116 - protein, 20 aa, Homo sapiens
  CDR3 for beta chain variable domain of TCR clone 375558 (TRBV3-1, TRBJ2-5)
CISVPAAIGGGTSGQETQYF

SEQ ID NO: 751117 - protein, 15 aa, Homo sapiens
  CDR3 for alpha chain variable domain of TCR clone 375559 (TRAV17, TRAJ57)
CATGPSQGGSEKLVS

SEQ ID NO: 751118 - protein, 14 aa, Homo sapiens
  CDR3 for beta chain variable domain of TCR clone 375559 (TRBV11-2, TRBJ1-2)
CASSLYRGNYGYTF

SEQ ID NO: 751119 - protein, 16 aa, Homo sapiens
  CDR3 for alpha chain variable domain of TCR clone 375560 (TRAV12-1, TRAJ42)
CVVTPYYGGSQGNHIF

SEQ ID NO: 751120 - protein, 15 aa, Homo sapiens
  CDR3 for beta chain variable domain of TCR clone 375560 (TRBV4-3, TRBJ2-7)
CASSQGGRGIYEQYF

SEQ ID NO: 751121 - protein, 14 aa, Homo sapiens
  CDR3 for alpha chain variable domain of TCR clone 375561 (TRAV2, TRAJ9)
CAVEDRSGGFKTIF

SEQ ID NO: 751122 - protein, 12 aa, Homo sapiens
  CDR3 for beta chain variable domain of TCR clone 375561 (TRBV12-4, TRBJ2-4)
CASSSCGNIQYF

SEQ ID NO: 751123 - protein, 14 aa, Homo sapiens
  CDR3 for alpha chain variable domain of TCR clone 375562 (TRAV8-3, TRAJ30)
CAVGDMNRDDKNIF

SEQ ID NO: 751124 - protein, 17 aa, Homo sapiens
  CDR3 for beta chain variable domain of TCR clone 375562 (TRBV19, TRBJ2-2)
CASSRNPGGFGTGELFF

SEQ ID NO: 751125 - protein, 11 aa, Homo sapiens
  CDR3 for alpha chain variable domain of TCR clone 375563 (TRAV8-6, TRAJ4)
CAVSEKMVFGA

SEQ ID NO: 751126 - protein, 14 aa, Homo sapiens
  CDR3 for beta chain variable domain of TCR clone 375563 (TRBV20-1, TRBJ1-1)
CSAQTRIGGTEAFF

SEQ ID NO: 751127 - protein, 14 aa, Homo sapiens
  CDR3 for alpha chain variable domain of TCR clone 375564 (TRAV2, TRAJ22)
CAVEDSGSARQLTF

SEQ ID NO: 751128 - protein, 15 aa, Homo sapiens
  CDR3 for beta chain variable domain of TCR clone 375564 (TRBV28, TRBJ1-2)
CASSLPVGHGDGYTV

SEQ ID NO: 751129 - protein, 13 aa, Homo sapiens
  CDR3 for alpha chain variable domain of TCR clone 375565 (TRAV6, TRAJ20)
CALAVSNDYKLSF

SEQ ID NO: 751130 - protein, 14 aa, Homo sapiens
  CDR3 for beta chain variable domain of TCR clone 375565 (TRBV7-9, TRBJ2-5)
CASSPRPSGETQYF

SEQ ID NO: 751131 - protein, 17 aa, Homo sapiens
  CDR3 for alpha chain variable domain of TCR clone 375566 (TRAV4, TRAJ13)
CIVGVQGSSGGYQKVTF

SEQ ID NO: 751132 - protein, 18 aa, Homo sapiens
  CDR3 for beta chain variable domain of TCR clone 375566 (TRBV15, TRBJ2-3)
CATSRDGARSWDSDTQYF

SEQ ID NO: 751133 - protein, 14 aa, Homo sapiens
  CDR3 for alpha chain variable domain of TCR clone 375567 (TRAV1-1, TRAJ23)
CAVSIYNQGGKHIF

SEQ ID NO: 751134 - protein, 12 aa, Homo sapiens
  CDR3 for beta chain variable domain of TCR clone 375567 (TRBV11-2, TRBJ2-2)
CASSLGGGELFF

SEQ ID NO: 751135 - protein, 14 aa, Homo sapiens
  CDR3 for alpha chain variable domain of TCR clone 375568 (TRAV13-1, TRAJ35)
CAASKGGFENVLHC

SEQ ID NO: 751136 - protein, 13 aa, Homo sapiens
  CDR3 for beta chain variable domain of TCR clone 375568 (TRBV7-3, TRBJ1-1)
CASSHDWGAEAFF

SEQ ID NO: 751137 - protein, 15 aa, Homo sapiens
  CDR3 for alpha chain variable domain of TCR clone 375569 (TRAV2, TRAJ37)
CAVEEGSSNTGKLIF

SEQ ID NO: 751138 - protein, 13 aa, Homo sapiens
  CDR3 for beta chain variable domain of TCR clone 375569 (TRBV20-1, TRBJ1-6)
CSTFREGNSPLHF

SEQ ID NO: 751139 - protein, 13 aa, Homo sapiens
  CDR3 for alpha chain variable domain of TCR clone 375570 (TRAV30, TRAJ29)
CGTEDSGNTPLVF

SEQ ID NO: 751140 - protein, 14 aa, Homo sapiens
  CDR3 for beta chain variable domain of TCR clone 375570 (TRBV6-1, TRBJ1-3)
CASVQGGGGNTIYF

SEQ ID NO: 751141 - protein, 12 aa, Homo sapiens
  CDR3 for alpha chain variable domain of TCR clone 375571 (TRAV12-2, TRAJ10)
WGVTGGGNKLTF

SEQ ID NO: 751142 - protein, 16 aa, Homo sapiens
  CDR3 for beta chain variable domain of TCR clone 375571 (TRBV11-2, TRBJ2-1)
CASSPRLAGVYNEQFF

SEQ ID NO: 751143 - protein, 15 aa, Homo sapiens
  CDR3 for alpha chain variable domain of TCR clone 375572 (TRAV21, TRAJ53)
CATLNSGGSNYKLTF

SEQ ID NO: 751144 - protein, 14 aa, Homo sapiens
  CDR3 for beta chain variable domain of TCR clone 375572 (TRBV20-1, TRBJ2-1)
CSAQIGGSANKQFF

SEQ ID NO: 751145 - protein, 14 aa, Homo sapiens
  CDR3 for alpha chain variable domain of TCR clone 375573 (TRAV12-1, TRAJ17)
CVVNYKAAGNKLTF

SEQ ID NO: 751146 - protein, 17 aa, Homo sapiens
  CDR3 for beta chain variable domain of TCR clone 375573 (TRBV20-1, TRBJ2-1)
RSASSSGLAGSYNEQFF

SEQ ID NO: 751147 - protein, 14 aa, Homo sapiens
  CDR3 for alpha chain variable domain of TCR clone 375574 (TRAV26-1, TRAJ39)
CIVRGSRAGNMLTF

SEQ ID NO: 751148 - protein, 15 aa, Homo sapiens
  CDR3 for beta chain variable domain of TCR clone 375574 (TRBV5-1, TRBJ2-1)
CASSPPRAPYNEQFF

SEQ ID NO: 751149 - protein, 13 aa, Homo sapiens
  CDR3 for alpha chain variable domain of TCR clone 375575 (TRAV35, TRAJ48)
CAGYEFGNEKLTF

SEQ ID NO: 751150 - protein, 13 aa, Homo sapiens
  CDR3 for beta chain variable domain of TCR clone 375575 (TRBV7-2, TRBJ1-6)
CASSLVGSSPLHF

SEQ ID NO: 751151 - protein, 12 aa, Homo sapiens
  CDR3 for alpha chain variable domain of TCR clone 375576 (TRAV1-2, TRAJ24)
CAVGGSWGKFQF

SEQ ID NO: 751152 - protein, 17 aa, Homo sapiens
  CDR3 for beta chain variable domain of TCR clone 375576 (TRBV7-3, TRBJ2-5)
CASSLGSGRSGSETQYF

SEQ ID NO: 751153 - protein, 14 aa, Homo sapiens
  CDR3 for alpha chain variable domain of TCR clone 375577 (TRAV16, TRAJ33)
FALSAMDSNYQLIW

SEQ ID NO: 751154 - protein, 17 aa, Homo sapiens
  CDR3 for beta chain variable domain of TCR clone 375577 (TRBV7-3, TRBJ2-3)
CASSPRGQGYGTDTQYF

SEQ ID NO: 751155 - protein, 14 aa, Homo sapiens
  CDR3 for alpha chain variable domain of TCR clone 375578 (TRAV12-2, TRAJ9)
CAVNALEGGCKTIF

SEQ ID NO: 751156 - protein, 16 aa, Homo sapiens
  CDR3 for beta chain variable domain of TCR clone 375578 (TRBV7-2, TRBJ2-5)
CASSPFPTGGEETQYF

SEQ ID NO: 751157 - protein, 14 aa, Homo sapiens
  CDR3 for alpha chain variable domain of TCR clone 375579 (TRAV12-2, TRAJ17)
CAVLFRAAGNKLTF

SEQ ID NO: 751158 - protein, 15 aa, Homo sapiens
  CDR3 for beta chain variable domain of TCR clone 375579 (TRBV27, TRBJ2-1)
CASSNGGGSSNEQFF

SEQ ID NO: 751159 - protein, 15 aa, Homo sapiens
  CDR3 for alpha chain variable domain of TCR clone 375580 (TRAV3, TRAJ42)
CAVRGGTGSQGYLIF

SEQ ID NO: 751160 - protein, 14 aa, Homo sapiens
  CDR3 for beta chain variable domain of TCR clone 375580 (TRBV19, TRBJ1-2)
CASSSLFARDVYTF

SEQ ID NO: 751161 - protein, 16 aa, Homo sapiens
  CDR3 for alpha chain variable domain of TCR clone 375581 (TRAV12-3, TRAJ53)
CAMSPGSGGSNYKLTV

SEQ ID NO: 751162 - protein, 13 aa, Homo sapiens
  CDR3 for beta chain variable domain of TCR clone 375581 (TRBV7-3, TRBJ1-1)
CASSQDWGAEAFF

SEQ ID NO: 751163 - protein, 16 aa, Homo sapiens
  CDR3 for alpha chain variable domain of TCR clone 375582 (TRAV3, TRAJ37)
CAVRGNGSGNTGKLIF

SEQ ID NO: 751164 - protein, 21 aa, Homo sapiens
  CDR3 for beta chain variable domain of TCR clone 375582 (TRBV15, TRBJ2-1)
AWGTQPCTCVPPAEVDTARFF

SEQ ID NO: 751165 - protein, 11 aa, Homo sapiens
  CDR3 for alpha chain variable domain of TCR clone 375583 (TRAV2, TRAJ13)
CASGGYQKVTF

SEQ ID NO: 751166 - protein, 13 aa, Homo sapiens
  CDR3 for beta chain variable domain of TCR clone 375583 (TRBV7-8, TRBJ2-3)
CASSLRGPDTQYF

SEQ ID NO: 751167 - protein, 13 aa, Homo sapiens
  CDR3 for alpha chain variable domain of TCR clone 375584 (TRAV12-2, TRAJ4)
CAVRSGGYNKLIF

SEQ ID NO: 751168 - protein, 15 aa, Homo sapiens
  CDR3 for beta chain variable domain of TCR clone 375584 (TRBV10-3, TRBJ2-1)
CAISDVQDRADEQFF

SEQ ID NO: 751169 - protein, 13 aa, Homo sapiens
  CDR3 for alpha chain variable domain of TCR clone 375585 (TRAV9-2, TRAJ31)
CALTSVEDARLMF

SEQ ID NO: 751170 - protein, 12 aa, Homo sapiens
  CDR3 for beta chain variable domain of TCR clone 375585 (TRBV29-1, TRBJ2-7)
CSVGPSGDEQYF

SEQ ID NO: 751171 - protein, 14 aa, Homo sapiens
  CDR3 for alpha chain variable domain of TCR clone 375586 (TRAV35, TRAJ38)
CAGSNAGNNRQLIW

SEQ ID NO: 751172 - protein, 12 aa, Homo sapiens
  CDR3 for beta chain variable domain of TCR clone 375586 (TRBV19, TRBJ2-7)
CASTDRGYEQYF

SEQ ID NO: 751173 - protein, 12 aa, Homo sapiens
  CDR3 for alpha chain variable domain of TCR clone 375587 (TRAV12-1, TRAJ31)
CVSWNNNARLMF

SEQ ID NO: 751174 - protein, 15 aa, Homo sapiens
  CDR3 for beta chain variable domain of TCR clone 375587 (TRBV7-2, TRBJ1-5)
CAGSLDRGQDQPQHF

SEQ ID NO: 751175 - protein, 12 aa, Homo sapiens
  CDR3 for alpha chain variable domain of TCR clone 375588 (TRAV17, TRAJ16)
CATVLPGQKLLF

SEQ ID NO: 751176 - protein, 15 aa, Homo sapiens
  CDR3 for beta chain variable domain of TCR clone 375588 (TRBV6-3, TRBJ2-2)
CASSFLATLTGELFC

SEQ ID NO: 751177 - protein, 15 aa, Homo sapiens
  CDR3 for alpha chain variable domain of TCR clone 375589 (TRAV12-3, TRAJ6)
CAMSATTGGSYVPTF

SEQ ID NO: 751178 - protein, 16 aa, Homo sapiens
  CDR3 for beta chain variable domain of TCR clone 375589 (TRBV20-1, TRBJ1-2)
CSASMGQGVANYGYTV

SEQ ID NO: 751179 - protein, 14 aa, Homo sapiens
  CDR3 for alpha chain variable domain of TCR clone 375590 (TRAV12-2, TRAJ45)
CAVDKGGGADGLTF

SEQ ID NO: 751180 - protein, 15 aa, Homo sapiens
  CDR3 for beta chain variable domain of TCR clone 375590 (TRBV9, TRBJ1-6)
CASSVAGTGDSPLHF

SEQ ID NO: 751181 - protein, 15 aa, Homo sapiens
  CDR3 for alpha chain variable domain of TCR clone 375591 (TRAV14/DV4, TRAJ26)
CAMREGQNYGQNFVF

SEQ ID NO: 751182 - protein, 13 aa, Homo sapiens
  CDR3 for beta chain variable domain of TCR clone 375591 (TRBV24-1, TRBJ2-2)
CATSDWSTGELFL

SEQ ID NO: 751183 - protein, 14 aa, Homo sapiens
  CDR3 for alpha chain variable domain of TCR clone 375592 (TRAV12-1, TRAJ12)
CVVTRMDRSYKLIF

SEQ ID NO: 751184 - protein, 15 aa, Homo sapiens
  CDR3 for beta chain variable domain of TCR clone 375592 (TRBV20-1, TRBJ2-7)
CSARDRVSGMDEQYF

SEQ ID NO: 751185 - protein, 14 aa, Homo sapiens
  CDR3 for alpha chain variable domain of TCR clone 375593 (TRAV20, TRAJ36)
CAVQAGTGANNLFF

SEQ ID NO: 751186 - protein, 11 aa, Homo sapiens
  CDR3 for beta chain variable domain of TCR clone 375593 (TRBV27, TRBJ2-7)
CASSLGYEQYF

SEQ ID NO: 751187 - protein, 15 aa, Homo sapiens
  CDR3 for alpha chain variable domain of TCR clone 375594 (TRAV8-4, TRAJ11)
CAVIRALSGYSTLTF

SEQ ID NO: 751188 - protein, 13 aa, Homo sapiens
  CDR3 for beta chain variable domain of TCR clone 375594 (TRBV10-3, TRBJ2-7)
CASKLAVNYEQYF

SEQ ID NO: 751189 - protein, 12 aa, Homo sapiens
  CDR3 for alpha chain variable domain of TCR clone 375595 (TRAV25, TRAJ32)
CAVGGATNKLIF

SEQ ID NO: 751190 - protein, 14 aa, Homo sapiens
  CDR3 for beta chain variable domain of TCR clone 375595 (TRBV7-6, TRBJ1-1)
CASSYSGQFTEAFF

SEQ ID NO: 751191 - protein, 14 aa, Homo sapiens
  CDR3 for alpha chain variable domain of TCR clone 375596 (TRAV1-2, TRAJ16)
RAVNRFSDGQKLLF

SEQ ID NO: 751192 - protein, 15 aa, Homo sapiens
  CDR3 for beta chain variable domain of TCR clone 375596 (TRBV11-2, TRBJ2-1)
CASSSPSTRYNEQFF

SEQ ID NO: 751193 - protein, 14 aa, Homo sapiens
  CDR3 for alpha chain variable domain of TCR clone 375597 (TRAV38-1, TRAJ45)
CAYYSGGGADGLTF

SEQ ID NO: 751194 - protein, 14 aa, Homo sapiens
  CDR3 for beta chain variable domain of TCR clone 375597 (TRBV20-1, TRBJ1-3)
CSASPTGAGNTIYF

SEQ ID NO: 751195 - protein, 13 aa, Homo sapiens
  CDR3 for alpha chain variable domain of TCR clone 375598 (TRAV8-3, TRAJ29)
CAVEPSGNTPLVF

SEQ ID NO: 751196 - protein, 15 aa, Homo sapiens
  CDR3 for beta chain variable domain of TCR clone 375598 (TRBV19, TRBJ1-1)
CASTSGQIQNTEAFF

SEQ ID NO: 751197 - protein, 16 aa, Homo sapiens
  CDR3 for alpha chain variable domain of TCR clone 375599 (TRAV30, TRAJ24)
CGTEIVDADSWGKFQF

SEQ ID NO: 751198 - protein, 15 aa, Homo sapiens
  CDR3 for beta chain variable domain of TCR clone 375599 (TRBV20-1, TRBJ2-7)
CSARDRVSVMDEQYF

SEQ ID NO: 751199 - protein, 13 aa, Homo sapiens
  CDR3 for alpha chain variable domain of TCR clone 375600 (TRAV8-4, TRAJ48)
CAVSLFGNEKLTF

SEQ ID NO: 751200 - protein, 15 aa, Homo sapiens
  CDR3 for beta chain variable domain of TCR clone 375600 (TRBV20-1, TRBJ2-7)
CSARKGLAESYEQYF

SEQ ID NO: 751201 - protein, 13 aa, Homo sapiens
  CDR3 for alpha chain variable domain of TCR clone 375601 (TRAV21, TRAJ10)
CAVPTGGGNKLTF

SEQ ID NO: 751202 - protein, 15 aa, Homo sapiens
  CDR3 for beta chain variable domain of TCR clone 375601 (TRBV5-1, TRBJ2-3)
CASSVTSGSTDTQYF

SEQ ID NO: 751203 - protein, 16 aa, Homo sapiens
  CDR3 for alpha chain variable domain of TCR clone 375602 (TRAV14/DV4, TRAJ54)
CAMREGRIQGAQKLEF

SEQ ID NO: 751204 - protein, 18 aa, Homo sapiens
  CDR3 for beta chain variable domain of TCR clone 375602 (TRBV18, TRBJ1-3)
CASSPRGGAGPSGNTIYF

SEQ ID NO: 751205 - protein, 17 aa, Homo sapiens
  CDR3 for alpha chain variable domain of TCR clone 375603 (TRAV13-1, TRAJ31)
CAPRDRLMFGDGTQLVV

SEQ ID NO: 751206 - protein, 15 aa, Homo sapiens
  CDR3 for beta chain variable domain of TCR clone 375603 (TRBV7-9, TRBJ1-2)
CASSLDREPNYGYTF

SEQ ID NO: 751207 - protein, 15 aa, Homo sapiens
  CDR3 for alpha chain variable domain of TCR clone 375604 (TRAV2, TRAJ29)
CAVDLARSGNTPLVF

SEQ ID NO: 751208 - protein, 13 aa, Homo sapiens
  CDR3 for beta chain variable domain of TCR clone 375604 (TRBV10-3, TRBJ2-7)
CASKLAVNYEQYF

SEQ ID NO: 751209 - protein, 14 aa, Homo sapiens
  CDR3 for alpha chain variable domain of TCR clone 375605 (TRAV17, TRAJ34)
CATDSLEGTDKLIF

SEQ ID NO: 751210 - protein, 16 aa, Homo sapiens
  CDR3 for beta chain variable domain of TCR clone 375605 (TRBV15, TRBJ2-3)
CATSRDLGIVTDTQYF

SEQ ID NO: 751211 - protein, 18 aa, Homo sapiens
  CDR3 for alpha chain variable domain of TCR clone 375606 (TRAV1-2, TRAJ16)
CYNVLDGLEEKDGQKLLF

SEQ ID NO: 751212 - protein, 15 aa, Homo sapiens
  CDR3 for beta chain variable domain of TCR clone 375606 (TRBV9, TRBJ1-6)
CASSVAGTGDSPLHF

SEQ ID NO: 751213 - protein, 13 aa, Homo sapiens
  CDR3 for alpha chain variable domain of TCR clone 375607 (TRAV2, TRAJ35)
CAPRVGFGNVLHC

SEQ ID NO: 751214 - protein, 15 aa, Homo sapiens
  CDR3 for beta chain variable domain of TCR clone 375607 (TRBV6-3, TRBJ2-7)
CTSSSPGTVFYEQYF

SEQ ID NO: 751215 - protein, 14 aa, Homo sapiens
  CDR3 for alpha chain variable domain of TCR clone 375608 (TRAV27, TRAJ23)
CAGAFDNQGGKLIF

SEQ ID NO: 751216 - protein, 14 aa, Homo sapiens
  CDR3 for beta chain variable domain of TCR clone 375608 (TRBV7-2, TRBJ2-5)
CASSPRGSSETQYF

SEQ ID NO: 751217 - protein, 13 aa, Homo sapiens
  CDR3 for alpha chain variable domain of TCR clone 375609 (TRAV8-3, TRAJ44)
CAVVPGTASKLTF

SEQ ID NO: 751218 - protein, 15 aa, Homo sapiens
  CDR3 for beta chain variable domain of TCR clone 375609 (TRBV10-3, TRBJ2-7)
CASSSPGTVFYEQYF

SEQ ID NO: 751219 - protein, 16 aa, Homo sapiens
  CDR3 for alpha chain variable domain of TCR clone 375610 (TRAV12-3, TRAJ53)
CAMSPGSGGRNYKLKF

SEQ ID NO: 751220 - protein, 16 aa, Homo sapiens
  CDR3 for beta chain variable domain of TCR clone 375610 (TRBV7-9, TRBJ1-2)
CASSLGFSSGEDGYTF

SEQ ID NO: 751221 - protein, 17 aa, Homo sapiens
  CDR3 for alpha chain variable domain of TCR clone 375611 (TRAV3, TRAJ42)
CAVRDRDYGGSQGNLIF

SEQ ID NO: 751222 - protein, 15 aa, Homo sapiens
  CDR3 for beta chain variable domain of TCR clone 375611 (TRBV6-6, TRBJ2-7)
CASSYWYGGSYKQYF

SEQ ID NO: 751223 - protein, 13 aa, Homo sapiens
  CDR3 for alpha chain variable domain of TCR clone 375612 (TRAV20, TRAJ40)
CAVPFSGTYKYIF

SEQ ID NO: 751224 - protein, 13 aa, Homo sapiens
  CDR3 for beta chain variable domain of TCR clone 375612 (TRBV15, TRBJ2-5)
CATSQIGEETQSF

SEQ ID NO: 751225 - protein, 13 aa, Homo sapiens
  CDR3 for alpha chain variable domain of TCR clone 375613 (TRAV1-2, TRAJ9)
CPALNTGGFKTIF

SEQ ID NO: 751226 - protein, 13 aa, Homo sapiens
  CDR3 for beta chain variable domain of TCR clone 375613 (TRBV4-1, TRBJ2-1)
CASSQAGGDEQFF

SEQ ID NO: 751227 - protein, 13 aa, Homo sapiens
  CDR3 for alpha chain variable domain of TCR clone 375614 (TRAV2, TRAJ40)
CAVVPSGTYKYIF

SEQ ID NO: 751228 - protein, 14 aa, Homo sapiens
  CDR3 for beta chain variable domain of TCR clone 375614 (TRBV7-2, TRBJ2-7)
CASSPKTSFYEQYF

SEQ ID NO: 751229 - protein, 14 aa, Homo sapiens
  CDR3 for alpha chain variable domain of TCR clone 375615 (TRAV26-1, TRAJ21)
CIVRDGHNFNKFYF

SEQ ID NO: 751230 - protein, 15 aa, Homo sapiens
  CDR3 for beta chain variable domain of TCR clone 375615 (TRBV4-3, TRBJ2-1)
CASSQGLAGSNEQFF

SEQ ID NO: 751231 - protein, 21 aa, Homo sapiens
  CDR3 for alpha chain variable domain of TCR clone 375616 (TRAV17, TRAJ7)
TASRAADTASYFYATLGRLAF

SEQ ID NO: 751232 - protein, 13 aa, Homo sapiens
  CDR3 for beta chain variable domain of TCR clone 375616 (TRBV12-4, TRBJ2-7)
CASSLERVREQYF

SEQ ID NO: 751233 - protein, 14 aa, Homo sapiens
  CDR3 for alpha chain variable domain of TCR clone 375617 (TRAV17, TRAJ22)
CATVLSGSARQLTL

SEQ ID NO: 751234 - protein, 14 aa, Homo sapiens
  CDR3 for beta chain variable domain of TCR clone 375617 (TRBV12-4, TRBJ2-5)
CASSFGDRGETQYF

SEQ ID NO: 751235 - protein, 16 aa, Homo sapiens
  CDR3 for alpha chain variable domain of TCR clone 375618 (TRAV14/DV4, TRAJ54)
CAMREGRSQGAQKLVF

SEQ ID NO: 751236 - protein, 18 aa, Homo sapiens
  CDR3 for beta chain variable domain of TCR clone 375618 (TRBV18, TRBJ1-3)
CASSPRGGAGASGNTMYF

SEQ ID NO: 751237 - protein, 14 aa, Homo sapiens
  CDR3 for alpha chain variable domain of TCR clone 375619 (TRAV17, TRAJ31)
CATVLRNNIARLMF

SEQ ID NO: 751238 - protein, 14 aa, Homo sapiens
  CDR3 for beta chain variable domain of TCR clone 375619 (TRBV12-4, TRBJ2-5)
CASSLWQKQGTQYF

SEQ ID NO: 751239 - protein, 14 aa, Homo sapiens
  CDR3 for alpha chain variable domain of TCR clone 375620 (TRAV12-2, TRAJ12)
CAVINRDSSYKLIF

SEQ ID NO: 751240 - protein, 14 aa, Homo sapiens
  CDR3 for beta chain variable domain of TCR clone 375620 (TRBV7-8, TRBJ2-3)
CASSLEAGTDTQYF

SEQ ID NO: 751241 - protein, 14 aa, Homo sapiens
  CDR3 for alpha chain variable domain of TCR clone 375621 (TRAV29/DV5, TRAJ36)
CAARRKTGANNLFF

SEQ ID NO: 751242 - protein, 12 aa, Homo sapiens
  CDR3 for beta chain variable domain of TCR clone 375621 (TRBV12-4, TRBJ1-1)
CASSLAGLEAFF

SEQ ID NO: 751243 - protein, 13 aa, Homo sapiens
  CDR3 for alpha chain variable domain of TCR clone 375622 (TRAV8-6, TRAJ21)
CAVSPSPLNKFYF

SEQ ID NO: 751244 - protein, 14 aa, Homo sapiens
  CDR3 for beta chain variable domain of TCR clone 375622 (TRBV7-9, TRBJ2-5)
CASSLDTAQETQYL

SEQ ID NO: 751245 - protein, 15 aa, Homo sapiens
  CDR3 for alpha chain variable domain of TCR clone 375623 (TRAV25, TRAJ52)
CAETSGGTSYGKLTF

SEQ ID NO: 751246 - protein, 16 aa, Homo sapiens
  CDR3 for beta chain variable domain of TCR clone 375623 (TRBV15, TRBJ1-2)
CATSRGPRTGGGGYTF

SEQ ID NO: 751247 - protein, 10 aa, Homo sapiens
  CDR3 for alpha chain variable domain of TCR clone 375624 (TRAV1-2, TRAJ31)
CVSEDARRMF

SEQ ID NO: 751248 - protein, 14 aa, Homo sapiens
  CDR3 for beta chain variable domain of TCR clone 375624 (TRBV19, TRBJ2-1)
CASPTFVLSGEQFF

SEQ ID NO: 751249 - protein, 14 aa, Homo sapiens
  CDR3 for alpha chain variable domain of TCR clone 375625 (TRAV27, TRAJ22)
CAGLPSGSARQLTF

SEQ ID NO: 751250 - protein, 17 aa, Homo sapiens
  CDR3 for beta chain variable domain of TCR clone 375625 (TRBV15, TRBJ1-4)
CATSRYGTGDPNEKLFF

SEQ ID NO: 751251 - protein, 13 aa, Homo sapiens
  CDR3 for alpha chain variable domain of TCR clone 375626 (TRAV8-3, TRAJ40)
CAVGAQYLRNLQI

SEQ ID NO: 751252 - protein, 15 aa, Homo sapiens
  CDR3 for beta chain variable domain of TCR clone 375626 (TRBV6-3, TRBJ2-7)
CASSSPGTVFYEQYF

SEQ ID NO: 751253 - protein, 14 aa, Homo sapiens
  CDR3 for alpha chain variable domain of TCR clone 375627 (TRAV8-1, TRAJ5)
CAVRTDTGRRALTF

SEQ ID NO: 751254 - protein, 17 aa, Homo sapiens
  CDR3 for beta chain variable domain of TCR clone 375627 (TRBV11-2, TRBJ2-1)
CASSLYPPGVEYNEQFF

SEQ ID NO: 751255 - protein, 12 aa, Homo sapiens
  CDR3 for alpha chain variable domain of TCR clone 375628 (TRAV2, TRAJ40)
CCVTSGTYKYIF

SEQ ID NO: 751256 - protein, 14 aa, Homo sapiens
  CDR3 for beta chain variable domain of TCR clone 375628 (TRBV19, TRBJ2-1)
CASPTFVLSGEQLF

SEQ ID NO: 751257 - protein, 14 aa, Homo sapiens
  CDR3 for alpha chain variable domain of TCR clone 375629 (TRAV35, TRAJ13)
CAGSPSGGYQKVTF

SEQ ID NO: 751258 - protein, 13 aa, Homo sapiens
  CDR3 for beta chain variable domain of TCR clone 375629 (TRBV7-9, TRBJ2-3)
CASSPGSTDTQYF

SEQ ID NO: 751259 - protein, 11 aa, Homo sapiens
  CDR3 for alpha chain variable domain of TCR clone 375630 (TRAV3, TRAJ17)
CAEAAGNKLTF

SEQ ID NO: 751260 - protein, 12 aa, Homo sapiens
  CDR3 for beta chain variable domain of TCR clone 375630 (TRBV11-2, TRBJ2-2)
CASSLGGGELFF

SEQ ID NO: 751261 - protein, 13 aa, Homo sapiens
  CDR3 for alpha chain variable domain of TCR clone 375631 (TRAV12-2, TRAJ47)
CAVFMEYGNKLVF

SEQ ID NO: 751262 - protein, 14 aa, Homo sapiens
  CDR3 for beta chain variable domain of TCR clone 375631 (TRBV4-1, TRBJ1-5)
CASSEGPTNQPQHF

SEQ ID NO: 751263 - protein, 11 aa, Homo sapiens
  CDR3 for alpha chain variable domain of TCR clone 375632 (TRAV1-1, TRAJ23)
CAVRQGGKLIF

SEQ ID NO: 751264 - protein, 15 aa, Homo sapiens
  CDR3 for beta chain variable domain of TCR clone 375632 (TRBV11-2, TRBJ1-2)
CASSLEGVQRNGYTF

SEQ ID NO: 751265 - protein, 14 aa, Homo sapiens
  CDR3 for alpha chain variable domain of TCR clone 375633 (TRAV13-2, TRAJ29)
CAENIEPGNTPLFF

SEQ ID NO: 751266 - protein, 14 aa, Homo sapiens
  CDR3 for beta chain variable domain of TCR clone 375633 (TRBV19, TRBJ2-2)
CATTGHANTGELFL

SEQ ID NO: 751267 - protein, 17 aa, Homo sapiens
  CDR3 for alpha chain variable domain of TCR clone 375634 (TRAV3, TRAJ6)
SAVRDGPRAGGSYIPTF

SEQ ID NO: 751268 - protein, 20 aa, Homo sapiens
  CDR3 for beta chain variable domain of TCR clone 375634 (TRBV28, TRBJ2-1)
CASTPIGRSPGLAGGNEQFF

SEQ ID NO: 751269 - protein, 13 aa, Homo sapiens
  CDR3 for alpha chain variable domain of TCR clone 375635 (TRAV17, TRAJ5)
CAPMDTGRRALTF

SEQ ID NO: 751270 - protein, 13 aa, Homo sapiens
  CDR3 for beta chain variable domain of TCR clone 375635 (TRBV7-9, TRBJ1-2)
CASSLKHNYGYTF

SEQ ID NO: 751271 - protein, 14 aa, Homo sapiens
  CDR3 for alpha chain variable domain of TCR clone 375636 (TRAV35, TRAJ47)
CAGLLMEYGNKLVF

SEQ ID NO: 751272 - protein, 13 aa, Homo sapiens
  CDR3 for beta chain variable domain of TCR clone 375636 (TRBV10-2, TRBJ1-5)
CASGGQCNQPQHF

SEQ ID NO: 751273 - protein, 14 aa, Homo sapiens
  CDR3 for alpha chain variable domain of TCR clone 375637 (TRAV16, TRAJ15)
CALSINQAGTALIF

SEQ ID NO: 751274 - protein, 11 aa, Homo sapiens
  CDR3 for beta chain variable domain of TCR clone 375637 (TRBV11-2, TRBJ2-2)
CASSLPGELFF

SEQ ID NO: 751275 - protein, 14 aa, Homo sapiens
  CDR3 for alpha chain variable domain of TCR clone 375638 (TRAV1-2, TRAJ16)
CAVNRFSDGQKLLF

SEQ ID NO: 751276 - protein, 16 aa, Homo sapiens
  CDR3 for beta chain variable domain of TCR clone 375638 (TRBV27, TRBJ2-2)
CPSSFRGLVRTGELFF

SEQ ID NO: 751277 - protein, 16 aa, Homo sapiens
  CDR3 for alpha chain variable domain of TCR clone 375639 (TRAV30, TRAJ24)
CGTEIVDADSWGKFQF

SEQ ID NO: 751278 - protein, 15 aa, Homo sapiens
  CDR3 for beta chain variable domain of TCR clone 375639 (TRBV2, TRBJ2-2)
CASSEQGLDTGELFF

SEQ ID NO: 751279 - protein, 14 aa, Homo sapiens
  CDR3 for alpha chain variable domain of TCR clone 375640 (TRAV9-2, TRAJ48)
CALSSNFGNEKLTF

SEQ ID NO: 751280 - protein, 15 aa, Homo sapiens
  CDR3 for beta chain variable domain of TCR clone 375640 (TRBV11-2, TRBJ2-2)
CASSSDRVNAGELFF

SEQ ID NO: 751281 - protein, 11 aa, Homo sapiens
  CDR3 for alpha chain variable domain of TCR clone 375641 (TRAV1-2, TRAJ20)
CAVANDYKLSF

SEQ ID NO: 751282 - protein, 16 aa, Homo sapiens
  CDR3 for beta chain variable domain of TCR clone 375641 (TRBV4-3, TRBJ1-6)
CASSQDPGVYNSPLHC

SEQ ID NO: 751283 - protein, 16 aa, Homo sapiens
  CDR3 for alpha chain variable domain of TCR clone 375642 (TRAV12-1, TRAJ43)
CVVNPHRFGAGTRLTG

SEQ ID NO: 751284 - protein, 13 aa, Homo sapiens
  CDR3 for beta chain variable domain of TCR clone 375642 (TRBV12-4, TRBJ1-2)
CASSSGPNYGYTF

SEQ ID NO: 751285 - protein, 14 aa, Homo sapiens
  CDR3 for alpha chain variable domain of TCR clone 375643 (TRAV8-1, TRAJ34)
CAVNPSYNTDKLIL

SEQ ID NO: 751286 - protein, 16 aa, Homo sapiens
  CDR3 for beta chain variable domain of TCR clone 375643 (TRBV7-2, TRBJ2-6)
CASSLAGRSGANVLTF

SEQ ID NO: 751287 - protein, 11 aa, Homo sapiens
  CDR3 for alpha chain variable domain of TCR clone 375644 (TRAV1-2, TRAJ40)
CAVPGTYRYIF

SEQ ID NO: 751288 - protein, 16 aa, Homo sapiens
  CDR3 for beta chain variable domain of TCR clone 375644 (TRBV29-1, TRBJ2-7)
CSVEVVGTSGSYEQYF

SEQ ID NO: 751289 - protein, 13 aa, Homo sapiens
  CDR3 for alpha chain variable domain of TCR clone 375645 (TRAV27, TRAJ8)
CAGGPTGLQKLVF

SEQ ID NO: 751290 - protein, 15 aa, Homo sapiens
  CDR3 for beta chain variable domain of TCR clone 375645 (TRBV5-1, TRBJ2-1)
CASRPPRAPYNEQFF

SEQ ID NO: 751291 - protein, 18 aa, Homo sapiens
  CDR3 for alpha chain variable domain of TCR clone 375646 (TRAV8-4, TRAJ52)
CAVTRANAGGTSYGKLTF

SEQ ID NO: 751292 - protein, 15 aa, Homo sapiens
  CDR3 for beta chain variable domain of TCR clone 375646 (TRBV7-3, TRBJ2-1)
CASSPTGGGEVEQFF

SEQ ID NO: 751293 - protein, 14 aa, Homo sapiens
  CDR3 for alpha chain variable domain of TCR clone 375647 (TRAV27, TRAJ53)
RAINSGGSNYKLTF

SEQ ID NO: 751294 - protein, 14 aa, Homo sapiens
  CDR3 for beta chain variable domain of TCR clone 375647 (TRBV7-3, TRBJ2-1)
CASSLAGGTNEQFF

SEQ ID NO: 751295 - protein, 16 aa, Homo sapiens
  CDR3 for alpha chain variable domain of TCR clone 375648 (TRAV17, TRAJ53)
CATDAVSGGSNYKLTF

SEQ ID NO: 751296 - protein, 12 aa, Homo sapiens
  CDR3 for beta chain variable domain of TCR clone 375648 (TRBV5-1, TRBJ2-7)
CASSFRGYEQYF

SEQ ID NO: 751297 - protein, 12 aa, Homo sapiens
  CDR3 for alpha chain variable domain of TCR clone 375649 (TRAV8-3, TRAJ47)
CAVGVGGNKLVF

SEQ ID NO: 751298 - protein, 14 aa, Homo sapiens
  CDR3 for beta chain variable domain of TCR clone 375649 (TRBV6-1, TRBJ1-3)
CASVQGGGGNTIYF

SEQ ID NO: 751299 - protein, 12 aa, Homo sapiens
  CDR3 for alpha chain variable domain of TCR clone 375650 (TRAV12-3, TRAJ17)
CAMTLTGNKLTF

SEQ ID NO: 751300 - protein, 17 aa, Homo sapiens
  CDR3 for beta chain variable domain of TCR clone 375650 (TRBV11-2, TRBJ2-1)
CASSLYPPGVEYNEKFL

SEQ ID NO: 751301 - protein, 14 aa, Homo sapiens
  CDR3 for alpha chain variable domain of TCR clone 375651 (TRAV12-2, TRAJ5)
CAVKGDTGRRALTF

SEQ ID NO: 751302 - protein, 16 aa, Homo sapiens
  CDR3 for beta chain variable domain of TCR clone 375651 (TRBV10-3, TRBJ2-1)
CAISGVGDGGGGEQFF

SEQ ID NO: 751303 - protein, 14 aa, Homo sapiens
  CDR3 for alpha chain variable domain of TCR clone 375652 (TRAV8-3, TRAJ4)
CAVGAAGGYNKLIF

SEQ ID NO: 751304 - protein, 15 aa, Homo sapiens
  CDR3 for beta chain variable domain of TCR clone 375652 (TRBV11-3, TRBJ2-3)
CDSLKDGREGDTQYF

SEQ ID NO: 751305 - protein, 14 aa, Homo sapiens
  CDR3 for alpha chain variable domain of TCR clone 375653 (TRAV3, TRAJ17)
CAVRDAAAGNKLTF

SEQ ID NO: 751306 - protein, 14 aa, Homo sapiens
  CDR3 for beta chain variable domain of TCR clone 375653 (TRBV25-1, TRBJ1-1)
CASTHLGGNTEAFF

SEQ ID NO: 751307 - protein, 12 aa, Homo sapiens
  CDR3 for alpha chain variable domain of TCR clone 375654 (TRAV29/DV5, TRAJ34)
CAASGNTNKPIF

SEQ ID NO: 751308 - protein, 16 aa, Homo sapiens
  CDR3 for beta chain variable domain of TCR clone 375654 (TRBV12-4, TRBJ1-5)
CASRQPVEGSNQPQHF

SEQ ID NO: 751309 - protein, 14 aa, Homo sapiens
  CDR3 for alpha chain variable domain of TCR clone 375655 (TRAV4, TRAJ9)
CLVGSGTGGFKTIF

SEQ ID NO: 751310 - protein, 15 aa, Homo sapiens
  CDR3 for beta chain variable domain of TCR clone 375655 (TRBV7-2, TRBJ2-1)
CASSSGLAGGNEQFF

SEQ ID NO: 751311 - protein, 12 aa, Homo sapiens
  CDR3 for alpha chain variable domain of TCR clone 375656 (TRAV8-3, TRAJ26)
CAGDNYRQNFVF

SEQ ID NO: 751312 - protein, 13 aa, Homo sapiens
  CDR3 for beta chain variable domain of TCR clone 375656 (TRBV7-2, TRBJ2-7)
CASSSPSGSEQYF

SEQ ID NO: 751313 - protein, 12 aa, Homo sapiens
  CDR3 for alpha chain variable domain of TCR clone 375657 (TRAV1-1, TRAJ8)
CAGGTGFQKLVF

SEQ ID NO: 751314 - protein, 16 aa, Homo sapiens
  CDR3 for beta chain variable domain of TCR clone 375657 (TRBV12-5, TRBJ2-5)
CASGPRTSGNQETHYF

SEQ ID NO: 751315 - protein, 13 aa, Homo sapiens
  CDR3 for alpha chain variable domain of TCR clone 375658 (TRAV17, TRAJ26)
CATVDNYGQNFVF

SEQ ID NO: 751316 - protein, 15 aa, Homo sapiens
  CDR3 for beta chain variable domain of TCR clone 375658 (TRBV2, TRBJ2-7)
CASSEGLARSYEQYF

SEQ ID NO: 751317 - protein, 14 aa, Homo sapiens
  CDR3 for alpha chain variable domain of TCR clone 375659 (TRAV12-3, TRAJ12)
CAMSRMDSSYNLIF

SEQ ID NO: 751318 - protein, 14 aa, Homo sapiens
  CDR3 for beta chain variable domain of TCR clone 375659 (TRBV20-1, TRBJ1-4)
CSARSGQSNEKLFF

SEQ ID NO: 751319 - protein, 12 aa, Homo sapiens
  CDR3 for alpha chain variable domain of TCR clone 375660 (TRAV12-3, TRAJ17)
CAMTLTGNKLTF

SEQ ID NO: 751320 - protein, 14 aa, Homo sapiens
  CDR3 for beta chain variable domain of TCR clone 375660 (TRBV4-1, TRBJ1-1)
CASSRSGQSFEAFF

SEQ ID NO: 751321 - protein, 14 aa, Homo sapiens
  CDR3 for alpha chain variable domain of TCR clone 375661 (TRAV1-2, TRAJ16)
CAVNRFSDGQKLLF

SEQ ID NO: 751322 - protein, 16 aa, Homo sapiens
  CDR3 for beta chain variable domain of TCR clone 375661 (TRBV27, TRBJ2-2)
CASSFRGLVRTGEPFF

SEQ ID NO: 751323 - protein, 14 aa, Homo sapiens
  CDR3 for alpha chain variable domain of TCR clone 375662 (TRAV17, TRAJ57)
CATGPSQGGSKAGL

SEQ ID NO: 751324 - protein, 14 aa, Homo sapiens
  CDR3 for beta chain variable domain of TCR clone 375662 (TRBV12-5, TRBJ2-5)
CASGSRTHQETQYF

SEQ ID NO: 751325 - protein, 15 aa, Homo sapiens
  CDR3 for alpha chain variable domain of TCR clone 375663 (TRAV12-3, TRAJ6)
CAMSATTGGSYIPTF

SEQ ID NO: 751326 - protein, 14 aa, Homo sapiens
  CDR3 for beta chain variable domain of TCR clone 375663 (TRBV20-1, TRBJ2-5)
CSARDGSAGETQYF

SEQ ID NO: 751327 - protein, 13 aa, Homo sapiens
  CDR3 for alpha chain variable domain of TCR clone 375664 (TRAV12-1, TRAJ37)
CVVNAGNTGKLIF

SEQ ID NO: 751328 - protein, 16 aa, Homo sapiens
  CDR3 for beta chain variable domain of TCR clone 375664 (TRBV11-2, TRBJ2-2)
CASSLRTGNLIGELFF

SEQ ID NO: 751329 - protein, 14 aa, Homo sapiens
  CDR3 for alpha chain variable domain of TCR clone 375665 (TRAV38-1, TRAJ40)
CALRPTLGTYKYIF

SEQ ID NO: 751330 - protein, 17 aa, Homo sapiens
  CDR3 for beta chain variable domain of TCR clone 375665 (TRBV11-2, TRBJ2-3)
CQQLRGGLAGAPNTQYF

SEQ ID NO: 751331 - protein, 16 aa, Homo sapiens
  CDR3 for alpha chain variable domain of TCR clone 375666 (TRAV12-1, TRAJ52)
CVVPPAGGTSYAKLTF

SEQ ID NO: 751332 - protein, 13 aa, Homo sapiens
  CDR3 for beta chain variable domain of TCR clone 375666 (TRBV9, TRBJ2-1)
CASSPSGGSEQFF

SEQ ID NO: 751333 - protein, 13 aa, Homo sapiens
  CDR3 for alpha chain variable domain of TCR clone 375667 (TRAV25, TRAJ10)
CAGRTGGGNKLTF

SEQ ID NO: 751334 - protein, 14 aa, Homo sapiens
  CDR3 for beta chain variable domain of TCR clone 375667 (TRBV19, TRBJ2-1)
CASPTFVLSGEQFF

SEQ ID NO: 751335 - protein, 15 aa, Homo sapiens
  CDR3 for alpha chain variable domain of TCR clone 375668 (TRAV8-2, TRAJ40)
CVVLGTTSGSYKYIF

SEQ ID NO: 751336 - protein, 16 aa, Homo sapiens
  CDR3 for beta chain variable domain of TCR clone 375668 (TRBV7-3, TRBJ2-1)
CASSLEGYRSYNEQFF

SEQ ID NO: 751337 - protein, 16 aa, Homo sapiens
  CDR3 for alpha chain variable domain of TCR clone 375669 (TRAV12-3, TRAJ53)
CAMSPGSGGSNYKLTF

SEQ ID NO: 751338 - protein, 15 aa, Homo sapiens
  CDR3 for beta chain variable domain of TCR clone 375669 (TRBV4-3, TRBJ2-7)
CPSSQGGRGIYEQYF

SEQ ID NO: 751339 - protein, 17 aa, Homo sapiens
  CDR3 for alpha chain variable domain of TCR clone 375670 (TRAV3, TRAJ28)
CAVREAYSGAGSYQLTF

SEQ ID NO: 751340 - protein, 16 aa, Homo sapiens
  CDR3 for beta chain variable domain of TCR clone 375670 (TRBV7-3, TRBJ2-2)
CASSLKRGTLSGELFF

SEQ ID NO: 751341 - protein, 13 aa, Homo sapiens
  CDR3 for alpha chain variable domain of TCR clone 375671 (TRAV13-1, TRAJ21)
CAASKGNFNKFYF

SEQ ID NO: 751342 - protein, 16 aa, Homo sapiens
  CDR3 for beta chain variable domain of TCR clone 375671 (TRBV5-4, TRBJ2-3)
CASSWGTGGGTDTQYF

SEQ ID NO: 751343 - protein, 14 aa, Homo sapiens
  CDR3 for alpha chain variable domain of TCR clone 375672 (TRAV2, TRAJ9)
CAVEDRSGGFKTIF

SEQ ID NO: 751344 - protein, 15 aa, Homo sapiens
  CDR3 for beta chain variable domain of TCR clone 375672 (TRBV6-6, TRBJ2-7)
CASIYSYGGSYEQYF

SEQ ID NO: 751345 - protein, 11 aa, Homo sapiens
  CDR3 for alpha chain variable domain of TCR clone 375673 (TRAV2, TRAJ13)
CASGGYQNVTF

SEQ ID NO: 751346 - protein, 12 aa, Homo sapiens
  CDR3 for beta chain variable domain of TCR clone 375673 (TRBV11-2, TRBJ2-2)
CASSLGGGELFF

SEQ ID NO: 751347 - protein, 10 aa, Homo sapiens
  CDR3 for alpha chain variable domain of TCR clone 375674 (TRAV1-2, TRAJ20)
CALNDYKLSF

SEQ ID NO: 751348 - protein, 16 aa, Homo sapiens
  CDR3 for beta chain variable domain of TCR clone 375674 (TRBV20-1, TRBJ1-1)
CSARALTQGMNTDDFF

SEQ ID NO: 751349 - protein, 12 aa, Homo sapiens
  CDR3 for alpha chain variable domain of TCR clone 375675 (TRAV12-3, TRAJ21)
CAMFNNFNKFTL

SEQ ID NO: 751350 - protein, 16 aa, Homo sapiens
  CDR3 for beta chain variable domain of TCR clone 375675 (TRBV7-9, TRBJ1-2)
CASSLAPLRAAYGYTF

SEQ ID NO: 751351 - protein, 16 aa, Homo sapiens
  CDR3 for alpha chain variable domain of TCR clone 375676 (TRAV16, TRAJ57)
CAPYLITQGGSEKLVF

SEQ ID NO: 751352 - protein, 16 aa, Homo sapiens
  CDR3 for beta chain variable domain of TCR clone 375676 (TRBV29-1, TRBJ2-7)
CSVEDAEDGTAYEQYF

SEQ ID NO: 751353 - protein, 15 aa, Homo sapiens
  CDR3 for alpha chain variable domain of TCR clone 375677 (TRAV36/DV7, TRAJ53)
WEGENSGGSNYKLTF

SEQ ID NO: 751354 - protein, 15 aa, Homo sapiens
  CDR3 for beta chain variable domain of TCR clone 375677 (TRBV11-3, TRBJ2-3)
CASLKDGREGDTQYF

SEQ ID NO: 751355 - protein, 14 aa, Homo sapiens
  CDR3 for alpha chain variable domain of TCR clone 375678 (TRAV12-2, TRAJ53)
CAVKGGGSNYKLTF

SEQ ID NO: 751356 - protein, 14 aa, Homo sapiens
  CDR3 for beta chain variable domain of TCR clone 375678 (TRBV7-7, TRBJ2-2)
CATRQDSDTGERFF

SEQ ID NO: 751357 - protein, 14 aa, Homo sapiens
  CDR3 for alpha chain variable domain of TCR clone 375679 (TRAV8-1, TRAJ5)
CAVSMDTGRRALTF

SEQ ID NO: 751358 - protein, 14 aa, Homo sapiens
  CDR3 for beta chain variable domain of TCR clone 375679 (TRBV19, TRBJ2-1)
CASPTFVLSGEQFF

SEQ ID NO: 751359 - protein, 13 aa, Homo sapiens
  CDR3 for alpha chain variable domain of TCR clone 375680 (TRAV25, TRAJ26)
CAGMDNYGQNLVF

SEQ ID NO: 751360 - protein, 15 aa, Homo sapiens
  CDR3 for beta chain variable domain of TCR clone 375680 (TRBV10-3, TRBJ2-1)
CAIRNGTSGHDEQFF

SEQ ID NO: 751361 - protein, 15 aa, Homo sapiens
  CDR3 for alpha chain variable domain of TCR clone 375681 (TRAV3, TRAJ22)
CAVRDRGGSARQLTF

SEQ ID NO: 751362 - protein, 13 aa, Homo sapiens
  CDR3 for beta chain variable domain of TCR clone 375681 (TRBV24-1, TRBJ2-1)
CATSAGPYNEQFF

SEQ ID NO: 751363 - protein, 14 aa, Homo sapiens
  CDR3 for alpha chain variable domain of TCR clone 375682 (TRAV17, TRAJ45)
CATASGGGADGLTF

SEQ ID NO: 751364 - protein, 15 aa, Homo sapiens
  CDR3 for beta chain variable domain of TCR clone 375682 (TRBV11-2, TRBJ2-1)
CARSRNRGLMYEQFF

SEQ ID NO: 751365 - protein, 15 aa, Homo sapiens
  CDR3 for alpha chain variable domain of TCR clone 375683 (TRAV3, TRAJ13)
CSVRVYSGGYQKVTF

SEQ ID NO: 751366 - protein, 14 aa, Homo sapiens
  CDR3 for beta chain variable domain of TCR clone 375683 (TRBV6-1, TRBJ1-3)
CASVQGGGGNTIYF

SEQ ID NO: 751367 - protein, 14 aa, Homo sapiens
  CDR3 for alpha chain variable domain of TCR clone 375684 (TRAV3, TRAJ33)
CSVRDMDSNYQLIW

SEQ ID NO: 751368 - protein, 19 aa, Homo sapiens
  CDR3 for beta chain variable domain of TCR clone 375684 (TRBV7-3, TRBJ1-2)
CASSFPQGNDGELWLHLRF

SEQ ID NO: 751369 - protein, 12 aa, Homo sapiens
  CDR3 for alpha chain variable domain of TCR clone 375685 (TRAV4, TRAJ6)
CLAPGGSYIPTF

SEQ ID NO: 751370 - protein, 16 aa, Homo sapiens
  CDR3 for beta chain variable domain of TCR clone 375685 (TRBV20-1, TRBJ1-2)
CSASMGQGVANYGYTF

SEQ ID NO: 751371 - protein, 16 aa, Homo sapiens
  CDR3 for alpha chain variable domain of TCR clone 375686 (TRAV26-1, TRAJ23)
CIVRPRFYNQGGKLIF

SEQ ID NO: 751372 - protein, 13 aa, Homo sapiens
  CDR3 for beta chain variable domain of TCR clone 375686 (TRBV20-1, TRBJ1-1)
CSARGGGNTEAFF

SEQ ID NO: 751373 - protein, 12 aa, Homo sapiens
  CDR3 for alpha chain variable domain of TCR clone 375687 (TRAV8-3, TRAJ20)
CAVGAEDYKLSF

SEQ ID NO: 751374 - protein, 16 aa, Homo sapiens
  CDR3 for beta chain variable domain of TCR clone 375687 (TRBV19, TRBJ2-2)
CASRSPGTGATGELFF

SEQ ID NO: 751375 - protein, 13 aa, Homo sapiens
  CDR3 for alpha chain variable domain of TCR clone 375688 (TRAV4, TRAJ9)
CLVGGGSQGNLIF

SEQ ID NO: 751376 - protein, 15 aa, Homo sapiens
  CDR3 for beta chain variable domain of TCR clone 375688 (TRBV28, TRBJ2-5)
CASSPGQGSIETQYF

SEQ ID NO: 751377 - protein, 13 aa, Homo sapiens
  CDR3 for alpha chain variable domain of TCR clone 375689 (TRAV35, TRAJ48)
CAGHVFGNEKLTF

SEQ ID NO: 751378 - protein, 13 aa, Homo sapiens
  CDR3 for beta chain variable domain of TCR clone 375689 (TRBV7-2, TRBJ1-6)
CASSLVGSTPLHF

SEQ ID NO: 751379 - protein, 12 aa, Homo sapiens
  CDR3 for alpha chain variable domain of TCR clone 375690 (TRAV12-2, TRAJ42)
CAVGGSQGNLIF

SEQ ID NO: 751380 - protein, 16 aa, Homo sapiens
  CDR3 for beta chain variable domain of TCR clone 375690 (TRBV7-3, TRBJ2-2)
CASSSKRGTLSGELFF

SEQ ID NO: 751381 - protein, 14 aa, Homo sapiens
  CDR3 for alpha chain variable domain of TCR clone 375691 (TRAV16, TRAJ8)
WALLLNTGFQKLLF

SEQ ID NO: 751382 - protein, 15 aa, Homo sapiens
  CDR3 for beta chain variable domain of TCR clone 375691 (TRBV7-7, TRBJ2-2)
CATSKLAKNTGELFF

SEQ ID NO: 751383 - protein, 13 aa, Homo sapiens
  CDR3 for alpha chain variable domain of TCR clone 375692 (TRAV1-1, TRAJ21)
CAVRLYNFNKFYF

SEQ ID NO: 751384 - protein, 15 aa, Homo sapiens
  CDR3 for beta chain variable domain of TCR clone 375692 (TRBV20-1, TRBJ2-1)
CSASSAGSSYNEQFF

SEQ ID NO: 751385 - protein, 12 aa, Homo sapiens
  CDR3 for alpha chain variable domain of TCR clone 375693 (TRAV26-1, TRAJ36)
FIVRVRADNLFF

SEQ ID NO: 751386 - protein, 14 aa, Homo sapiens
  CDR3 for beta chain variable domain of TCR clone 375693 (TRBV14, TRBJ2-3)
CASSRKLAADTQYF

SEQ ID NO: 751387 - protein, 16 aa, Homo sapiens
  CDR3 for alpha chain variable domain of TCR clone 375694 (TRAV13-2, TRAJ53)
CADLANSGGSNYKLTF

SEQ ID NO: 751388 - protein, 20 aa, Homo sapiens
  CDR3 for beta chain variable domain of TCR clone 375694 (TRBV28, TRBJ2-1)
CASTPIGRSPGLAGGNEQFF

SEQ ID NO: 751389 - protein, 14 aa, Homo sapiens
  CDR3 for alpha chain variable domain of TCR clone 375695 (TRAV20, TRAJ39)
CAVQAGNAGNMLTF

SEQ ID NO: 751390 - protein, 13 aa, Homo sapiens
  CDR3 for beta chain variable domain of TCR clone 375695 (TRBV6-4, TRBJ1-5)
CASSADLNQPQHF

SEQ ID NO: 751391 - protein, 13 aa, Homo sapiens
  CDR3 for alpha chain variable domain of TCR clone 375696 (TRAV12-2, TRAJ6)
CAVNVSRKLHTYI

SEQ ID NO: 751392 - protein, 15 aa, Homo sapiens
  CDR3 for beta chain variable domain of TCR clone 375696 (TRBV11-3, TRBJ2-3)
CASLKDGREGDTQYF

SEQ ID NO: 751393 - protein, 14 aa, Homo sapiens
  CDR3 for alpha chain variable domain of TCR clone 375697 (TRAV9-2, TRAJ39)
CALYIYNAGNMLTF

SEQ ID NO: 751394 - protein, 15 aa, Homo sapiens
  CDR3 for beta chain variable domain of TCR clone 375697 (TRBV28, TRBJ1-3)
CASSTGWASGNTIYF

SEQ ID NO: 751395 - protein, 16 aa, Homo sapiens
  CDR3 for alpha chain variable domain of TCR clone 375698 (TRAV16, TRAJ4)
CALSRMFSGGYNKLIF

SEQ ID NO: 751396 - protein, 21 aa, Homo sapiens
  CDR3 for beta chain variable domain of TCR clone 375698 (TRBV7-2, TRBJ2-7)
RRTRPCISVPAVGGGSYEQYF

SEQ ID NO: 751397 - protein, 15 aa, Homo sapiens
  CDR3 for alpha chain variable domain of TCR clone 375699 (TRAV3, TRAJ20)
CAVRDIKLSDYKLSF

SEQ ID NO: 751398 - protein, 17 aa, Homo sapiens
  CDR3 for beta chain variable domain of TCR clone 375699 (TRBV15, TRBJ1-4)
CATSRYGTGDPNEKLFF

SEQ ID NO: 751399 - protein, 15 aa, Homo sapiens
  CDR3 for alpha chain variable domain of TCR clone 375700 (TRAV14/DV4, TRAJ12)
CAMREERDSSYKLIF

SEQ ID NO: 751400 - protein, 14 aa, Homo sapiens
  CDR3 for beta chain variable domain of TCR clone 375700 (TRBV20-1, TRBJ1-3)
CSASPTGAGNTIYF

SEQ ID NO: 751401 - protein, 16 aa, Homo sapiens
  CDR3 for alpha chain variable domain of TCR clone 375701 (TRAV12-3, TRAJ53)
CAMSPRSGGSNYKLTF

SEQ ID NO: 751402 - protein, 14 aa, Homo sapiens
  CDR3 for beta chain variable domain of TCR clone 375701 (TRBV7-2, TRBJ2-7)
CASRSQGAAYEQYF

SEQ ID NO: 751403 - protein, 18 aa, Homo sapiens
  CDR3 for alpha chain variable domain of TCR clone 375702 (TRAV26-2, TRAJ45)
CILRLWGYSGGGADGLTF

SEQ ID NO: 751404 - protein, 17 aa, Homo sapiens
  CDR3 for beta chain variable domain of TCR clone 375702 (TRBV28, TRBJ2-3)
CSSSPTPAGGRVDTQYF

SEQ ID NO: 751405 - protein, 14 aa, Homo sapiens
  CDR3 for alpha chain variable domain of TCR clone 375703 (TRAV12-3, TRAJ21)
CAMEGHKGFNKFYF

SEQ ID NO: 751406 - protein, 16 aa, Homo sapiens
  CDR3 for beta chain variable domain of TCR clone 375703 (TRBV19, TRBJ2-1)
CASSKAGPSSYNEQFF

SEQ ID NO: 751407 - protein, 12 aa, Homo sapiens
  CDR3 for alpha chain variable domain of TCR clone 375704 (TRAV23/DV6, TRAJ58)
CAARLLRGETSG

SEQ ID NO: 751408 - protein, 16 aa, Homo sapiens
  CDR3 for beta chain variable domain of TCR clone 375704 (TRBV19, TRBJ2-2)
CASRSPGTGATGELFF

SEQ ID NO: 751409 - protein, 13 aa, Homo sapiens
  CDR3 for alpha chain variable domain of TCR clone 375705 (TRAV12-2, TRAJ10)
CAVPTGGGNNLTF

SEQ ID NO: 751410 - protein, 14 aa, Homo sapiens
  CDR3 for beta chain variable domain of TCR clone 375705 (TRBV15, TRBJ2-1)
CATSGVEDYNEQFF

SEQ ID NO: 751411 - protein, 15 aa, Homo sapiens
  CDR3 for alpha chain variable domain of TCR clone 375706 (TRAV39, TRAJ32)
CAVDMEGGATNKLTF

SEQ ID NO: 751412 - protein, 17 aa, Homo sapiens
  CDR3 for beta chain variable domain of TCR clone 375706 (TRBV7-2, TRBJ1-4)
CASSFKAGPTTNEKLFF

SEQ ID NO: 751413 - protein, 13 aa, Homo sapiens
  CDR3 for alpha chain variable domain of TCR clone 375707 (TRAV20, TRAJ21)
CAVEGYNFNKFYF

SEQ ID NO: 751414 - protein, 14 aa, Homo sapiens
  CDR3 for beta chain variable domain of TCR clone 375707 (TRBV9, TRBJ2-3)
CASSVGLSTDTQYF

SEQ ID NO: 751415 - protein, 15 aa, Homo sapiens
  CDR3 for alpha chain variable domain of TCR clone 375708 (TRAV3, TRAJ20)
CAVRDIKLSDYKLSF

SEQ ID NO: 751416 - protein, 17 aa, Homo sapiens
  CDR3 for beta chain variable domain of TCR clone 375708 (TRBV7-9, TRBJ1-6)
CASSSPGRGNSPSTLGT

SEQ ID NO: 751417 - protein, 14 aa, Homo sapiens
  CDR3 for alpha chain variable domain of TCR clone 375709 (TRAV13-1, TRAJ44)
CAAKATGTASKLAF

SEQ ID NO: 751418 - protein, 17 aa, Homo sapiens
  CDR3 for beta chain variable domain of TCR clone 375709 (TRBV7-3, TRBJ2-3)
CPSSLMKRMRGADTQYF

SEQ ID NO: 751419 - protein, 18 aa, Homo sapiens
  CDR3 for alpha chain variable domain of TCR clone 375710 (TRAV26-1, TRAJ23)
CIVRVGLEVWNQGGRLIF

SEQ ID NO: 751420 - protein, 16 aa, Homo sapiens
  CDR3 for beta chain variable domain of TCR clone 375710 (TRBV12-4, TRBJ2-5)
CASSFFVGGRQETQYF

SEQ ID NO: 751421 - protein, 13 aa, Homo sapiens
  CDR3 for alpha chain variable domain of TCR clone 375711 (TRAV3, TRAJ21)
CAVGEPDFNKFYF

SEQ ID NO: 751422 - protein, 13 aa, Homo sapiens
  CDR3 for beta chain variable domain of TCR clone 375711 (TRBV9, TRBJ2-1)
CASSPSGGSEQFF

SEQ ID NO: 751423 - protein, 15 aa, Homo sapiens
  CDR3 for alpha chain variable domain of TCR clone 375712 (TRAV29/DV5, TRAJ47)
CAARPTMEYGNKLGF

SEQ ID NO: 751424 - protein, 13 aa, Homo sapiens
  CDR3 for beta chain variable domain of TCR clone 375712 (TRBV20-1, TRBJ1-1)
CSARAGGNTEAFF

SEQ ID NO: 751425 - protein, 16 aa, Homo sapiens
  CDR3 for alpha chain variable domain of TCR clone 375713 (TRAV4, TRAJ9)
CLVGDPNRPGGFKTIF

SEQ ID NO: 751426 - protein, 16 aa, Homo sapiens
  CDR3 for beta chain variable domain of TCR clone 375713 (TRBV28, TRBJ1-4)
CASSPPYRGRSVKLFF

SEQ ID NO: 751427 - protein, 13 aa, Homo sapiens
  CDR3 for alpha chain variable domain of TCR clone 375714 (TRAV13-1, TRAJ10)
CAALEGGGNKITF

SEQ ID NO: 751428 - protein, 17 aa, Homo sapiens
  CDR3 for beta chain variable domain of TCR clone 375714 (TRBV7-3, TRBJ2-2)
CASSLSGTSGGTGELFF

SEQ ID NO: 751429 - protein, 12 aa, Homo sapiens
  CDR3 for alpha chain variable domain of TCR clone 375715 (TRAV3, TRAJ20)
CAVRDGDYKLSF

SEQ ID NO: 751430 - protein, 13 aa, Homo sapiens
  CDR3 for beta chain variable domain of TCR clone 375715 (TRBV9, TRBJ2-1)
CASSVGWGGEQFF

SEQ ID NO: 751431 - protein, 12 aa, Homo sapiens
  CDR3 for alpha chain variable domain of TCR clone 375716 (TRAV8-3, TRAJ20)
CAVGANDYKLSF

SEQ ID NO: 751432 - protein, 16 aa, Homo sapiens
  CDR3 for beta chain variable domain of TCR clone 375716 (TRBV6-6, TRBJ2-1)
CASSWGGQGPYNEQFF

SEQ ID NO: 751433 - protein, 16 aa, Homo sapiens
  CDR3 for alpha chain variable domain of TCR clone 375717 (TRAV21, TRAJ45)
CAVEAPRGDQEEVLTD

SEQ ID NO: 751434 - protein, 17 aa, Homo sapiens
  CDR3 for beta chain variable domain of TCR clone 375717 (TRBV4-1, TRBJ2-7)
CISTLGVSRGDRHEQYF

SEQ ID NO: 751435 - protein, 13 aa, Homo sapiens
  CDR3 for alpha chain variable domain of TCR clone 375718 (TRAV17, TRAJ22)
CAHHSGSARQLTF

SEQ ID NO: 751436 - protein, 16 aa, Homo sapiens
  CDR3 for beta chain variable domain of TCR clone 375718 (TRBV4-1, TRBJ1-2)
CASSQDSGQVLYGYTF

SEQ ID NO: 751437 - protein, 12 aa, Homo sapiens
  CDR3 for alpha chain variable domain of TCR clone 375719 (TRAV3, TRAJ4)
CAASGGYNKLIF

SEQ ID NO: 751438 - protein, 17 aa, Homo sapiens
  CDR3 for beta chain variable domain of TCR clone 375719 (TRBV6-5, TRBJ2-6)
CASSSATSGPGANVLTF

SEQ ID NO: 751439 - protein, 16 aa, Homo sapiens
  CDR3 for alpha chain variable domain of TCR clone 375720 (TRAV30, TRAJ24)
CGTEIVDADSLWKFQF

SEQ ID NO: 751440 - protein, 14 aa, Homo sapiens
  CDR3 for beta chain variable domain of TCR clone 375720 (TRBV12-5, TRBJ2-5)
CASGSRTHQETQYF

SEQ ID NO: 751441 - protein, 17 aa, Homo sapiens
  CDR3 for alpha chain variable domain of TCR clone 375721 (TRAV13-2, TRAJ42)
CAEKGKNYGGSQGNLIF

SEQ ID NO: 751442 - protein, 16 aa, Homo sapiens
  CDR3 for beta chain variable domain of TCR clone 375721 (TRBV7-9, TRBJ2-1)
CASSLGTGWDYNEQFF

SEQ ID NO: 751443 - protein, 17 aa, Homo sapiens
  CDR3 for alpha chain variable domain of TCR clone 375722 (TRAV13-1, TRAJ52)
CAAGRNAGGTSYGKLTF

SEQ ID NO: 751444 - protein, 17 aa, Homo sapiens
  CDR3 for beta chain variable domain of TCR clone 375722 (TRBV7-3, TRBJ2-3)
CASSLMKRMRGADTQYF

SEQ ID NO: 751445 - protein, 15 aa, Homo sapiens
  CDR3 for alpha chain variable domain of TCR clone 375723 (TRAV3, TRAJ24)
CAGGMTTDSWGKFQF

SEQ ID NO: 751446 - protein, 15 aa, Homo sapiens
  CDR3 for beta chain variable domain of TCR clone 375723 (TRBV7-6, TRBJ2-3)
CASSPIIYSTDTQYF

SEQ ID NO: 751447 - protein, 15 aa, Homo sapiens
  CDR3 for alpha chain variable domain of TCR clone 375724 (TRAV21, TRAJ53)
CATLNSGGSNYKLTF

SEQ ID NO: 751448 - protein, 15 aa, Homo sapiens
  CDR3 for beta chain variable domain of TCR clone 375724 (TRBV9, TRBJ2-1)
CQQRRWRGKLDEQFF

SEQ ID NO: 751449 - protein, 16 aa, Homo sapiens
  CDR3 for alpha chain variable domain of TCR clone 375725 (TRAV26-1, TRAJ56)
CIVRARERGANSKLTF

SEQ ID NO: 751450 - protein, 12 aa, Homo sapiens
  CDR3 for beta chain variable domain of TCR clone 375725 (TRBV29-1, TRBJ2-3)
CSVTGGADTQYF

SEQ ID NO: 751451 - protein, 10 aa, Homo sapiens
  CDR3 for alpha chain variable domain of TCR clone 375726 (TRAV36/DV7, TRAJ48)
CAVANEKLTF

SEQ ID NO: 751452 - protein, 16 aa, Homo sapiens
  CDR3 for beta chain variable domain of TCR clone 375726 (TRBV15, TRBJ2-3)
CATRLSGGRAPDTQYF

SEQ ID NO: 751453 - protein, 15 aa, Homo sapiens
  CDR3 for alpha chain variable domain of TCR clone 375727 (TRAV39, TRAJ57)
CAVDPIQGGSEKLVF

SEQ ID NO: 751454 - protein, 14 aa, Homo sapiens
  CDR3 for beta chain variable domain of TCR clone 375727 (TRBV18, TRBJ2-7)
CASSPRGGAYEQYF

SEQ ID NO: 751455 - protein, 13 aa, Homo sapiens
  CDR3 for alpha chain variable domain of TCR clone 375728 (TRAV1-2, TRAJ9)
CAALNTGGFKTIF

SEQ ID NO: 751456 - protein, 14 aa, Homo sapiens
  CDR3 for beta chain variable domain of TCR clone 375728 (TRBV9, TRBJ2-3)
CASSVGLSTDTQYF

SEQ ID NO: 751457 - protein, 12 aa, Homo sapiens
  CDR3 for alpha chain variable domain of TCR clone 375729 (TRAV8-3, TRAJ26)
CACDNYGQNFVF

SEQ ID NO: 751458 - protein, 12 aa, Homo sapiens
  CDR3 for beta chain variable domain of TCR clone 375729 (TRBV11-2, TRBJ2-2)
CASSLGGGELFF

SEQ ID NO: 751459 - protein, 14 aa, Homo sapiens
  CDR3 for alpha chain variable domain of TCR clone 375730 (TRAV8-1, TRAJ24)
CAVNAADSWGKLQF

SEQ ID NO: 751460 - protein, 16 aa, Homo sapiens
  CDR3 for beta chain variable domain of TCR clone 375730 (TRBV4-3, TRBJ2-1)
CASSPTLDRGVNEQFF

SEQ ID NO: 751461 - protein, 13 aa, Homo sapiens
  CDR3 for alpha chain variable domain of TCR clone 375731 (TRAV27, TRAJ49)
CSPRPYTGNQFYF

SEQ ID NO: 751462 - protein, 16 aa, Homo sapiens
  CDR3 for beta chain variable domain of TCR clone 375731 (TRBV4-1, TRBJ1-2)
CASSQDSGQVLYGYTF

SEQ ID NO: 751463 - protein, 14 aa, Homo sapiens
  CDR3 for alpha chain variable domain of TCR clone 375732 (TRAV12-1, TRAJ17)
CVVNYNAAGNRLTF

SEQ ID NO: 751464 - protein, 14 aa, Homo sapiens
  CDR3 for beta chain variable domain of TCR clone 375732 (TRBV7-8, TRBJ2-3)
CASSLEAGTDTQYF

SEQ ID NO: 751465 - protein, 13 aa, Homo sapiens
  CDR3 for alpha chain variable domain of TCR clone 375733 (TRAV35, TRAJ32)
CAGVGGATNKLIF

SEQ ID NO: 751466 - protein, 15 aa, Homo sapiens
  CDR3 for beta chain variable domain of TCR clone 375733 (TRBV20-1, TRBJ1-1)
CSASRGVAGNTEAFF

SEQ ID NO: 751467 - protein, 11 aa, Homo sapiens
  CDR3 for alpha chain variable domain of TCR clone 375734 (TRAV21, TRAJ37)
CCEGNTGKLIF

SEQ ID NO: 751468 - protein, 14 aa, Homo sapiens
  CDR3 for beta chain variable domain of TCR clone 375734 (TRBV19, TRBJ2-1)
CASEVTGARNEQFF

SEQ ID NO: 751469 - protein, 11 aa, Homo sapiens
  CDR3 for alpha chain variable domain of TCR clone 375735 (TRAV12-1, TRAJ30)
CVVNGQDKIIF

SEQ ID NO: 751470 - protein, 15 aa, Homo sapiens
  CDR3 for beta chain variable domain of TCR clone 375735 (TRBV27, TRBJ2-2)
CTSVPANSSPWSCFF

SEQ ID NO: 751471 - protein, 15 aa, Homo sapiens
  CDR3 for alpha chain variable domain of TCR clone 375736 (TRAV3, TRAJ5)
CAVIDLDTGSRALTF

SEQ ID NO: 751472 - protein, 13 aa, Homo sapiens
  CDR3 for beta chain variable domain of TCR clone 375736 (TRBV12-4, TRBJ2-7)
CASSPTETYEQYF

SEQ ID NO: 751473 - protein, 12 aa, Homo sapiens
  CDR3 for alpha chain variable domain of TCR clone 375737 (TRAV13-1, TRAJ53)
AASVGSNYKLTF

SEQ ID NO: 751474 - protein, 13 aa, Homo sapiens
  CDR3 for beta chain variable domain of TCR clone 375737 (TRBV7-2, TRBJ2-2)
CASSSVRAGELFF

SEQ ID NO: 751475 - protein, 14 aa, Homo sapiens
  CDR3 for alpha chain variable domain of TCR clone 375738 (TRAV35, TRAJ22)
CAGLGPGSARQLTF

SEQ ID NO: 751476 - protein, 15 aa, Homo sapiens
  CDR3 for beta chain variable domain of TCR clone 375738 (TRBV12-4, TRBJ2-5)
CASSPPTGRQETQYF

SEQ ID NO: 751477 - protein, 13 aa, Homo sapiens
  CDR3 for alpha chain variable domain of TCR clone 375739 (TRAV12-2, TRAJ9)
CAVKWAGGFKTIF

SEQ ID NO: 751478 - protein, 13 aa, Homo sapiens
  CDR3 for beta chain variable domain of TCR clone 375739 (TRBV7-3, TRBJ2-5)
CASSFRGGETQYF

SEQ ID NO: 751479 - protein, 12 aa, Homo sapiens
  CDR3 for alpha chain variable domain of TCR clone 375740 (TRAV13-2, TRAJ39)
CAENNAGNMLTF

SEQ ID NO: 751480 - protein, 13 aa, Homo sapiens
  CDR3 for beta chain variable domain of TCR clone 375740 (TRBV19, TRBJ1-1)
CASSSSNGGEAFF

SEQ ID NO: 751481 - protein, 16 aa, Homo sapiens
  CDR3 for alpha chain variable domain of TCR clone 375741 (TRAV30, TRAJ24)
CGTEIVDADSWGKFQF

SEQ ID NO: 751482 - protein, 15 aa, Homo sapiens
  CDR3 for beta chain variable domain of TCR clone 375741 (TRBV29-1, TRBJ2-1)
CSVPTGLALYNEQFF

SEQ ID NO: 751483 - protein, 11 aa, Homo sapiens
  CDR3 for alpha chain variable domain of TCR clone 375742 (TRAV21, TRAJ9)
CAVPVGFKTIF

SEQ ID NO: 751484 - protein, 12 aa, Homo sapiens
  CDR3 for beta chain variable domain of TCR clone 375742 (TRBV20-1, TRBJ2-3)
CSARVGTDTQYF

SEQ ID NO: 751485 - protein, 13 aa, Homo sapiens
  CDR3 for alpha chain variable domain of TCR clone 375743 (TRAV2, TRAJ10)
CAVETGGGNKLTF

SEQ ID NO: 751486 - protein, 14 aa, Homo sapiens
  CDR3 for beta chain variable domain of TCR clone 375743 (TRBV20-1, TRBJ2-3)
CSAGGRRGTDTQYL

SEQ ID NO: 751487 - protein, 12 aa, Homo sapiens
  CDR3 for alpha chain variable domain of TCR clone 375744 (TRAV13-1, TRAJ15)
CAASQAGTALFF

SEQ ID NO: 751488 - protein, 18 aa, Homo sapiens
  CDR3 for beta chain variable domain of TCR clone 375744 (TRBV7-9, TRBJ2-3)
CASSLPINGQISTDTQYF

SEQ ID NO: 751489 - protein, 15 aa, Homo sapiens
  CDR3 for alpha chain variable domain of TCR clone 375745 (TRAV25, TRAJ52)
CAGRPGGTSYGKLTF

SEQ ID NO: 751490 - protein, 17 aa, Homo sapiens
  CDR3 for beta chain variable domain of TCR clone 375745 (TRBV7-8, TRBJ2-6)
CASSAGTGGAGVNVLTV

SEQ ID NO: 751491 - protein, 15 aa, Homo sapiens
  CDR3 for alpha chain variable domain of TCR clone 375746 (TRAV3, TRAJ5)
CAVRDLDTGRRALTF

SEQ ID NO: 751492 - protein, 15 aa, Homo sapiens
  CDR3 for beta chain variable domain of TCR clone 375746 (TRBV28, TRBJ2-5)
CASSPPWSYQETKYF

SEQ ID NO: 751493 - protein, 16 aa, Homo sapiens
  CDR3 for alpha chain variable domain of TCR clone 375747 (TRAV12-1, TRAJ48)
CVVNMRDNFRNEKLTF

SEQ ID NO: 751494 - protein, 16 aa, Homo sapiens
  CDR3 for beta chain variable domain of TCR clone 375747 (TRBV7-6, TRBJ2-1)
CASSSVVAGTYNEQFF

SEQ ID NO: 751495 - protein, 12 aa, Homo sapiens
  CDR3 for alpha chain variable domain of TCR clone 375748 (TRAV2, TRAJ31)
CAVEDNNARLMF

SEQ ID NO: 751496 - protein, 14 aa, Homo sapiens
  CDR3 for beta chain variable domain of TCR clone 375748 (TRBV2, TRBJ2-1)
CASRTGSSYNEQFF

SEQ ID NO: 751497 - protein, 15 aa, Homo sapiens
  CDR3 for alpha chain variable domain of TCR clone 375749 (TRAV14/DV4, TRAJ12)
CAMREERDSSYKLIF

SEQ ID NO: 751498 - protein, 13 aa, Homo sapiens
  CDR3 for beta chain variable domain of TCR clone 375749 (TRBV7-7, TRBJ2-5)
CASSRSGQETQYF

SEQ ID NO: 751499 - protein, 15 aa, Homo sapiens
  CDR3 for alpha chain variable domain of TCR clone 375750 (TRAV2, TRAJ15)
CAVEDREQAGTALIF

SEQ ID NO: 751500 - protein, 15 aa, Homo sapiens
  CDR3 for beta chain variable domain of TCR clone 375750 (TRBV3-1, TRBJ1-2)
CASSHPGTPGYGYSF

SEQ ID NO: 751501 - protein, 20 aa, Homo sapiens
  CDR3 for alpha chain variable domain of TCR clone 375751 (TRAV27, TRAJ45)
CAGAQEEVLTDSPLAKGLIY

SEQ ID NO: 751502 - protein, 11 aa, Homo sapiens
  CDR3 for beta chain variable domain of TCR clone 375751 (TRBV19, TRBJ1-1)
CASSIGSEAFF

SEQ ID NO: 751503 - protein, 13 aa, Homo sapiens
  CDR3 for alpha chain variable domain of TCR clone 375752 (TRAV35, TRAJ44)
CAGLSGTASKLTF

SEQ ID NO: 751504 - protein, 16 aa, Homo sapiens
  CDR3 for beta chain variable domain of TCR clone 375752 (TRBV19, TRBJ2-1)
CASSKAGPSSYNEQFF

SEQ ID NO: 751505 - protein, 17 aa, Homo sapiens
  CDR3 for alpha chain variable domain of TCR clone 375753 (TRAV3, TRAJ6)
CAVRDGPRAGGSYRPTF

SEQ ID NO: 751506 - protein, 13 aa, Homo sapiens
  CDR3 for beta chain variable domain of TCR clone 375753 (TRBV19, TRBJ1-1)
CASSITGESEAFF

SEQ ID NO: 751507 - protein, 14 aa, Homo sapiens
  CDR3 for alpha chain variable domain of TCR clone 375754 (TRAV26-1, TRAJ38)
CIADNAGNKRKPIW

SEQ ID NO: 751508 - protein, 13 aa, Homo sapiens
  CDR3 for beta chain variable domain of TCR clone 375754 (TRBV20-1, TRBJ1-1)
CSARGGGNTEAFF

SEQ ID NO: 751509 - protein, 15 aa, Homo sapiens
  CDR3 for alpha chain variable domain of TCR clone 375755 (TRAV26-1, TRAJ23)
CIVRVLNNQGGKLIF

SEQ ID NO: 751510 - protein, 15 aa, Homo sapiens
  CDR3 for beta chain variable domain of TCR clone 375755 (TRBV7-2, TRBJ2-1)
CASTHGTGIYNEQFF

SEQ ID NO: 751511 - protein, 16 aa, Homo sapiens
  CDR3 for alpha chain variable domain of TCR clone 375756 (TRAV17, TRAJ35)
CATAEGGIGFGNVLHC

SEQ ID NO: 751512 - protein, 13 aa, Homo sapiens
  CDR3 for beta chain variable domain of TCR clone 375756 (TRBV12-5, TRBJ2-3)
CASGDRQSDTQYF

SEQ ID NO: 751513 - protein, 13 aa, Homo sapiens
  CDR3 for alpha chain variable domain of TCR clone 375757 (TRAV13-1, TRAJ21)
CAASIYNFNKFYL

SEQ ID NO: 751514 - protein, 15 aa, Homo sapiens
  CDR3 for beta chain variable domain of TCR clone 375757 (TRBV7-8, TRBJ1-5)
CASSLAGQPNQPQHF

SEQ ID NO: 751515 - protein, 14 aa, Homo sapiens
  CDR3 for alpha chain variable domain of TCR clone 375758 (TRAV12-3, TRAJ10)
SHLPLTGGGNKLTF

SEQ ID NO: 751516 - protein, 14 aa, Homo sapiens
  CDR3 for beta chain variable domain of TCR clone 375758 (TRBV7-6, TRBJ2-3)
CASSLGTVTDTQYV

SEQ ID NO: 751517 - protein, 13 aa, Homo sapiens
  CDR3 for alpha chain variable domain of TCR clone 375759 (TRAV17, TRAJ9)
CATAYTGGFNTIF

SEQ ID NO: 751518 - protein, 16 aa, Homo sapiens
  CDR3 for beta chain variable domain of TCR clone 375759 (TRBV7-7, TRBJ2-1)
CASSLASGTSYNEQFF

SEQ ID NO: 751519 - protein, 15 aa, Homo sapiens
  CDR3 for alpha chain variable domain of TCR clone 375760 (TRAV8-3, TRAJ45)
CALSYSGGGADGLTF

SEQ ID NO: 751520 - protein, 12 aa, Homo sapiens
  CDR3 for beta chain variable domain of TCR clone 375760 (TRBV29-1, TRBJ2-3)
CSVTGGADTQYF

SEQ ID NO: 751521 - protein, 17 aa, Homo sapiens
  CDR3 for alpha chain variable domain of TCR clone 375761 (TRAV12-2, TRAJ52)
CAVNKGAGGTSYGKLTF

SEQ ID NO: 751522 - protein, 14 aa, Homo sapiens
  CDR3 for beta chain variable domain of TCR clone 375761 (TRBV7-2, TRBJ2-7)
CASSPKTSFYEQYF

SEQ ID NO: 751523 - protein, 13 aa, Homo sapiens
  CDR3 for alpha chain variable domain of TCR clone 375762 (TRAV27, TRAJ6)
CAGGTRGSYVPTF

SEQ ID NO: 751524 - protein, 13 aa, Homo sapiens
  CDR3 for beta chain variable domain of TCR clone 375762 (TRBV4-1, TRBJ2-2)
CASSQENTGELFF

SEQ ID NO: 751525 - protein, 14 aa, Homo sapiens
  CDR3 for alpha chain variable domain of TCR clone 375763 (TRAV1-1, TRAJ27)
CAVIYNTNAGTSTF

SEQ ID NO: 751526 - protein, 14 aa, Homo sapiens
  CDR3 for beta chain variable domain of TCR clone 375763 (TRBV25-1, TRBJ1-1)
CASTHLGGNTEAFF

SEQ ID NO: 751527 - protein, 14 aa, Homo sapiens
  CDR3 for alpha chain variable domain of TCR clone 375764 (TRAV12-2, TRAJ11)
CAVEGGSGYSTLTF

SEQ ID NO: 751528 - protein, 14 aa, Homo sapiens
  CDR3 for beta chain variable domain of TCR clone 375764 (TRBV7-2, TRBJ1-5)
CASSWVGENQPQHF

SEQ ID NO: 751529 - protein, 14 aa, Homo sapiens
  CDR3 for alpha chain variable domain of TCR clone 375765 (TRAV36/DV7, TRAJ57)
CAVGFPGGSEKLVF

SEQ ID NO: 751530 - protein, 15 aa, Homo sapiens
  CDR3 for beta chain variable domain of TCR clone 375765 (TRBV7-2, TRBJ2-1)
CASSFQADEYNEQFF

SEQ ID NO: 751531 - protein, 14 aa, Homo sapiens
  CDR3 for alpha chain variable domain of TCR clone 375766 (TRAV1-2, TRAJ16)
CAVNRFSDGKKLLF

SEQ ID NO: 751532 - protein, 14 aa, Homo sapiens
  CDR3 for beta chain variable domain of TCR clone 375766 (TRBV7-3, TRBJ2-1)
CASSLAGGTNEQFF

SEQ ID NO: 751533 - protein, 11 aa, Homo sapiens
  CDR3 for alpha chain variable domain of TCR clone 375767 (TRAV35, TRAJ34)
CWARNTDKLIF

SEQ ID NO: 751534 - protein, 15 aa, Homo sapiens
  CDR3 for beta chain variable domain of TCR clone 375767 (TRBV28, TRBJ2-1)
CASSIIAGGRSEQFF

SEQ ID NO: 751535 - protein, 15 aa, Homo sapiens
  CDR3 for alpha chain variable domain of TCR clone 375768 (TRAV26-1, TRAJ42)
CIVRVKGGSQGNLIF

SEQ ID NO: 751536 - protein, 14 aa, Homo sapiens
  CDR3 for beta chain variable domain of TCR clone 375768 (TRBV12-5, TRBJ2-5)
CASGSRTHQETQYF

SEQ ID NO: 751537 - protein, 15 aa, Homo sapiens
  CDR3 for alpha chain variable domain of TCR clone 375769 (TRAV4, TRAJ36)
CLVGDRQTGANNLFF

SEQ ID NO: 751538 - protein, 13 aa, Homo sapiens
  CDR3 for beta chain variable domain of TCR clone 375769 (TRBV10-2, TRBJ2-7)
CASGASGGYEQYF

SEQ ID NO: 751539 - protein, 14 aa, Homo sapiens
  CDR3 for alpha chain variable domain of TCR clone 375770 (TRAV12-2, TRAJ17)
CAVLFKAAGNKLTF

SEQ ID NO: 751540 - protein, 13 aa, Homo sapiens
  CDR3 for beta chain variable domain of TCR clone 375770 (TRBV12-4, TRBJ2-7)
CASSPTETYEQYF

SEQ ID NO: 751541 - protein, 14 aa, Homo sapiens
  CDR3 for alpha chain variable domain of TCR clone 375771 (TRAV30, TRAJ26)
CGTEIVSYGQNFVF

SEQ ID NO: 751542 - protein, 14 aa, Homo sapiens
  CDR3 for beta chain variable domain of TCR clone 375771 (TRBV4-2, TRBJ2-1)
CASGLDRAYNEQFF

SEQ ID NO: 751543 - protein, 14 aa, Homo sapiens
  CDR3 for alpha chain variable domain of TCR clone 375772 (TRAV20, TRAJ40)
CAVQAVPGTYKYIF

SEQ ID NO: 751544 - protein, 17 aa, Homo sapiens
  CDR3 for beta chain variable domain of TCR clone 375772 (TRBV13, TRBJ2-3)
CASSLSRVAGGRNTQYF

SEQ ID NO: 751545 - protein, 15 aa, Homo sapiens
  CDR3 for alpha chain variable domain of TCR clone 375773 (TRAV21, TRAJ22)
CAVRLFFWFCKATDL

SEQ ID NO: 751546 - protein, 16 aa, Homo sapiens
  CDR3 for beta chain variable domain of TCR clone 375773 (TRBV13, TRBJ2-2)
CASSPRTGEHTGELFF

SEQ ID NO: 751547 - protein, 15 aa, Homo sapiens
  CDR3 for alpha chain variable domain of TCR clone 375774 (TRAV21, TRAJ24)
CAARFSTDSWGKLQF

SEQ ID NO: 751548 - protein, 14 aa, Homo sapiens
  CDR3 for beta chain variable domain of TCR clone 375774 (TRBV12-5, TRBJ2-5)
CASGSRTHQETQYF

SEQ ID NO: 751549 - protein, 14 aa, Homo sapiens
  CDR3 for alpha chain variable domain of TCR clone 375775 (TRAV12-2, TRAJ45)
CALPERGGADGLTF

SEQ ID NO: 751550 - protein, 14 aa, Homo sapiens
  CDR3 for beta chain variable domain of TCR clone 375775 (TRBV18, TRBJ1-5)
CASPPGNINQPQHF

SEQ ID NO: 751551 - protein, 15 aa, Homo sapiens
  CDR3 for alpha chain variable domain of TCR clone 375776 (TRAV3, TRAJ5)
CAVRDLDTGRRGLTF

SEQ ID NO: 751552 - protein, 13 aa, Homo sapiens
  CDR3 for beta chain variable domain of TCR clone 375776 (TRBV20-1, TRBJ2-5)
CSARDSKQATQYF

SEQ ID NO: 751553 - protein, 17 aa, Homo sapiens
  CDR3 for alpha chain variable domain of TCR clone 375777 (TRAV3, TRAJ6)
CAVRDGPRAGGSYIPTF

SEQ ID NO: 751554 - protein, 13 aa, Homo sapiens
  CDR3 for beta chain variable domain of TCR clone 375777 (TRBV11-3, TRBJ1-1)
CASTGSLNTEAFF

SEQ ID NO: 751555 - protein, 13 aa, Homo sapiens
  CDR3 for alpha chain variable domain of TCR clone 375778 (TRAV29/DV5, TRAJ31)
CAASRNNNARLTF

SEQ ID NO: 751556 - protein, 15 aa, Homo sapiens
  CDR3 for beta chain variable domain of TCR clone 375778 (TRBV20-1, TRBJ2-7)
CSARDRVSGMDEQYF

SEQ ID NO: 751557 - protein, 15 aa, Homo sapiens
  CDR3 for alpha chain variable domain of TCR clone 375779 (TRAV3, TRAJ5)
CAVRDGKTGRRTLTF

SEQ ID NO: 751558 - protein, 15 aa, Homo sapiens
  CDR3 for beta chain variable domain of TCR clone 375779 (TRBV7-8, TRBJ2-1)
CASSLADSLYNEQFF

SEQ ID NO: 751559 - protein, 12 aa, Homo sapiens
  CDR3 for alpha chain variable domain of TCR clone 375780 (TRAV12-3, TRAJ17)
CAMTLTGNKLTF

SEQ ID NO: 751560 - protein, 16 aa, Homo sapiens
  CDR3 for beta chain variable domain of TCR clone 375780 (TRBV19, TRBJ2-1)
CASSKAGQSSYNEQFF

SEQ ID NO: 751561 - protein, 14 aa, Homo sapiens
  CDR3 for alpha chain variable domain of TCR clone 375781 (TRAV26-1, TRAJ21)
CIVRVGHNFNKFYF

SEQ ID NO: 751562 - protein, 15 aa, Homo sapiens
  CDR3 for beta chain variable domain of TCR clone 375781 (TRBV6-3, TRBJ2-7)
CASSSPGTVFYEQYF

SEQ ID NO: 751563 - protein, 13 aa, Homo sapiens
  CDR3 for alpha chain variable domain of TCR clone 375782 (TRAV12-2, TRAJ39)
CAVNNNAGNMLTF

SEQ ID NO: 751564 - protein, 22 aa, Homo sapiens
  CDR3 for beta chain variable domain of TCR clone 375782 (TRBV7-3, TRBJ2-1)
GGTQACISGPAARRGGGNEQFF

SEQ ID NO: 751565 - protein, 15 aa, Homo sapiens
  CDR3 for alpha chain variable domain of TCR clone 375783 (TRAV21, TRAJ57)
CAVIITQGGAEKLGF

SEQ ID NO: 751566 - protein, 14 aa, Homo sapiens
  CDR3 for beta chain variable domain of TCR clone 375783 (TRBV5-1, TRBJ2-2)
CASSLIWIPGELFF

SEQ ID NO: 751567 - protein, 13 aa, Homo sapiens
  CDR3 for alpha chain variable domain of TCR clone 375784 (TRAV27, TRAJ45)
CRSSGGGADGLTF

SEQ ID NO: 751568 - protein, 15 aa, Homo sapiens
  CDR3 for beta chain variable domain of TCR clone 375784 (TRBV10-3, TRBJ2-1)
CATNGGPGQGDEQFF

SEQ ID NO: 751569 - protein, 15 aa, Homo sapiens
  CDR3 for alpha chain variable domain of TCR clone 375785 (TRAV38-1, TRAJ45)
CAFMKGGGGSDGLTF

SEQ ID NO: 751570 - protein, 13 aa, Homo sapiens
  CDR3 for beta chain variable domain of TCR clone 375785 (TRBV7-9, TRBJ1-2)
CASSLKQNYGYTF

SEQ ID NO: 751571 - protein, 15 aa, Homo sapiens
  CDR3 for alpha chain variable domain of TCR clone 375786 (TRAV8-2, TRAJ16)
CVVRDGFSDGQKLLF

SEQ ID NO: 751572 - protein, 14 aa, Homo sapiens
  CDR3 for beta chain variable domain of TCR clone 375786 (TRBV7-3, TRBJ1-1)
CASSLGTGYTEAVF

SEQ ID NO: 751573 - protein, 16 aa, Homo sapiens
  CDR3 for alpha chain variable domain of TCR clone 375787 (TRAV8-3, TRAJ8)
CAVPRDGNTGFQKLVF

SEQ ID NO: 751574 - protein, 12 aa, Homo sapiens
  CDR3 for beta chain variable domain of TCR clone 375787 (TRBV7-3, TRBJ2-1)
CASSFINNEQFF

SEQ ID NO: 751575 - protein, 12 aa, Homo sapiens
  CDR3 for alpha chain variable domain of TCR clone 375788 (TRAV1-2, TRAJ24)
CAVGGSWGKFQF

SEQ ID NO: 751576 - protein, 14 aa, Homo sapiens
  CDR3 for beta chain variable domain of TCR clone 375788 (TRBV7-2, TRBJ1-2)
CASSQTGSTYGYSF

SEQ ID NO: 751577 - protein, 14 aa, Homo sapiens
  CDR3 for alpha chain variable domain of TCR clone 375789 (TRAV1-2, TRAJ8)
CAVRVDTGFQKLVF

SEQ ID NO: 751578 - protein, 15 aa, Homo sapiens
  CDR3 for beta chain variable domain of TCR clone 375789 (TRBV12-4, TRBJ2-5)
CASSPPTGLQETQYF

SEQ ID NO: 751579 - protein, 12 aa, Homo sapiens
  CDR3 for alpha chain variable domain of TCR clone 375790 (TRAV35, TRAJ39)
LAPNNACNMLTF

SEQ ID NO: 751580 - protein, 16 aa, Homo sapiens
  CDR3 for beta chain variable domain of TCR clone 375790 (TRBV2, TRBJ2-3)
CASSTSVEGVTDTQYF

SEQ ID NO: 751581 - protein, 15 aa, Homo sapiens
  CDR3 for alpha chain variable domain of TCR clone 375791 (TRAV29/DV5, TRAJ29)
CAASERSSGNTPLVF

SEQ ID NO: 751582 - protein, 16 aa, Homo sapiens
  CDR3 for beta chain variable domain of TCR clone 375791 (TRBV19, TRBJ2-2)
CASRSPGTGATGELFF

SEQ ID NO: 751583 - protein, 14 aa, Homo sapiens
  CDR3 for alpha chain variable domain of TCR clone 375792 (TRAV26-1, TRAJ34)
CIVRVAYDTDKLIF

SEQ ID NO: 751584 - protein, 15 aa, Homo sapiens
  CDR3 for beta chain variable domain of TCR clone 375792 (TRBV20-1, TRBJ2-7)
CSARVPAAYFYGQYF

SEQ ID NO: 751585 - protein, 14 aa, Homo sapiens
  CDR3 for alpha chain variable domain of TCR clone 375793 (TRAV12-3, TRAJ10)
CAMSGTGGGNKLTF

SEQ ID NO: 751586 - protein, 13 aa, Homo sapiens
  CDR3 for beta chain variable domain of TCR clone 375793 (TRBV10-3, TRBJ2-7)
CASKLAVNYEQYF

SEQ ID NO: 751587 - protein, 14 aa, Homo sapiens
  CDR3 for alpha chain variable domain of TCR clone 375794 (TRAV1-2, TRAJ8)
CAVREDTGFQKLVF

SEQ ID NO: 751588 - protein, 17 aa, Homo sapiens
  CDR3 for beta chain variable domain of TCR clone 375794 (TRBV5-5, TRBJ1-2)
CASSLGSLDGQSEGYTF

SEQ ID NO: 751589 - protein, 16 aa, Homo sapiens
  CDR3 for alpha chain variable domain of TCR clone 375795 (TRAV12-2, TRAJ40)
CAVIRGGTSGTYKYIF

SEQ ID NO: 751590 - protein, 14 aa, Homo sapiens
  CDR3 for beta chain variable domain of TCR clone 375795 (TRBV18, TRBJ2-7)
CASSPRGGAYEQYF

SEQ ID NO: 751591 - protein, 14 aa, Homo sapiens
  CDR3 for alpha chain variable domain of TCR clone 375796 (TRAV8-3, TRAJ39)
CAVGAWGAGNILTF

SEQ ID NO: 751592 - protein, 16 aa, Homo sapiens
  CDR3 for beta chain variable domain of TCR clone 375796 (TRBV7-2, TRBJ1-3)
CASSSGRVLSGNTMYF

SEQ ID NO: 751593 - protein, 14 aa, Homo sapiens
  CDR3 for alpha chain variable domain of TCR clone 375797 (TRAV12-1, TRAJ12)
CVVNGRDSSYQLIF

SEQ ID NO: 751594 - protein, 13 aa, Homo sapiens
  CDR3 for beta chain variable domain of TCR clone 375797 (TRBV28, TRBJ2-2)
CASIRESTGELFF

SEQ ID NO: 751595 - protein, 15 aa, Homo sapiens
  CDR3 for alpha chain variable domain of TCR clone 375798 (TRAV19, TRAJ23)
CALSEVGTREESLSS

SEQ ID NO: 751596 - protein, 13 aa, Homo sapiens
  CDR3 for beta chain variable domain of TCR clone 375798 (TRBV7-9, TRBJ1-2)
CASSLKQNYGYTF

SEQ ID NO: 751597 - protein, 15 aa, Homo sapiens
  CDR3 for alpha chain variable domain of TCR clone 375799 (TRAV26-1, TRAJ37)
CIVRVADGNTGKLIF

SEQ ID NO: 751598 - protein, 14 aa, Homo sapiens
  CDR3 for beta chain variable domain of TCR clone 375799 (TRBV10-3, TRBJ2-2)
CATFGHLNTGELFF

SEQ ID NO: 751599 - protein, 12 aa, Homo sapiens
  CDR3 for alpha chain variable domain of TCR clone 375800 (TRAV29/DV5, TRAJ15)
CASNQAGTALIF

SEQ ID NO: 751600 - protein, 14 aa, Homo sapiens
  CDR3 for beta chain variable domain of TCR clone 375800 (TRBV25-1, TRBJ1-1)
CASTHLGGNTEAFF

SEQ ID NO: 751601 - protein, 12 aa, Homo sapiens
  CDR3 for alpha chain variable domain of TCR clone 375801 (TRAV25, TRAJ29)
CAGHSGNTPIVF

SEQ ID NO: 751602 - protein, 14 aa, Homo sapiens
  CDR3 for beta chain variable domain of TCR clone 375801 (TRBV6-1, TRBJ2-7)
CASTRTGDYYEQYF

SEQ ID NO: 751603 - protein, 16 aa, Homo sapiens
  CDR3 for alpha chain variable domain of TCR clone 375802 (TRAV9-2, TRAJ42)
CALNLHYGGSQGNLIF

SEQ ID NO: 751604 - protein, 15 aa, Homo sapiens
  CDR3 for beta chain variable domain of TCR clone 375802 (TRBV6-5, TRBJ1-5)
CASSLTALGNQPQHF

SEQ ID NO: 751605 - protein, 16 aa, Homo sapiens
  CDR3 for alpha chain variable domain of TCR clone 375803 (TRAV30, TRAJ24)
CGTEIVDADSWGKFPF

SEQ ID NO: 751606 - protein, 13 aa, Homo sapiens
  CDR3 for beta chain variable domain of TCR clone 375803 (TRBV4-2, TRBJ1-1)
CASSQAGNTEAFF

SEQ ID NO: 751607 - protein, 14 aa, Homo sapiens
  CDR3 for alpha chain variable domain of TCR clone 375804 (TRAV12-2, TRAJ44)
CAVTPAGTASKLPF

SEQ ID NO: 751608 - protein, 15 aa, Homo sapiens
  CDR3 for beta chain variable domain of TCR clone 375804 (TRBV20-1, TRBJ2-7)
CSARDRVSGMDEQYF

SEQ ID NO: 751609 - protein, 16 aa, Homo sapiens
  CDR3 for alpha chain variable domain of TCR clone 375805 (TRAV30, TRAJ24)
CGTELVDADSWGKFQF

SEQ ID NO: 751610 - protein, 14 aa, Homo sapiens
  CDR3 for beta chain variable domain of TCR clone 375805 (TRBV12-5, TRBJ2-5)
CPSGSRTHQETQYF

SEQ ID NO: 751611 - protein, 15 aa, Homo sapiens
  CDR3 for alpha chain variable domain of TCR clone 375806 (TRAV12-1, TRAJ43)
CVVNRGRCNNNDMRF

SEQ ID NO: 751612 - protein, 16 aa, Homo sapiens
  CDR3 for beta chain variable domain of TCR clone 375806 (TRBV19, TRBJ2-3)
CASSFYTTGIGDTQYF

SEQ ID NO: 751613 - protein, 12 aa, Homo sapiens
  CDR3 for alpha chain variable domain of TCR clone 375807 (TRAV35, TRAJ43)
CAGAYNNNDMRF

SEQ ID NO: 751614 - protein, 14 aa, Homo sapiens
  CDR3 for beta chain variable domain of TCR clone 375807 (TRBV2, TRBJ2-2)
CASSWQGATGDLFF

SEQ ID NO: 751615 - protein, 16 aa, Homo sapiens
  CDR3 for alpha chain variable domain of TCR clone 375808 (TRAV12-2, TRAJ18)
CAVTTDRGSTLGRLYF

SEQ ID NO: 751616 - protein, 15 aa, Homo sapiens
  CDR3 for beta chain variable domain of TCR clone 375808 (TRBV7-2, TRBJ2-1)
CASSLASGRVNEQFF

SEQ ID NO: 751617 - protein, 13 aa, Homo sapiens
  CDR3 for alpha chain variable domain of TCR clone 375809 (TRAV17, TRAJ5)
CAPMDTGRRALSF

SEQ ID NO: 751618 - protein, 15 aa, Homo sapiens
  CDR3 for beta chain variable domain of TCR clone 375809 (TRBV6-6, TRBJ2-5)
CASSPGGGLEETQYF

SEQ ID NO: 751619 - protein, 12 aa, Homo sapiens
  CDR3 for alpha chain variable domain of TCR clone 375810 (TRAV13-1, TRAJ21)
CAAKEGFNKFYF

SEQ ID NO: 751620 - protein, 15 aa, Homo sapiens
  CDR3 for beta chain variable domain of TCR clone 375810 (TRBV28, TRBJ2-4)
CAAGSGTLLMGIQYF

SEQ ID NO: 751621 - protein, 12 aa, Homo sapiens
  CDR3 for alpha chain variable domain of TCR clone 375811 (TRAV21, TRAJ23)
CALMLQGGKLIF

SEQ ID NO: 751622 - protein, 14 aa, Homo sapiens
  CDR3 for beta chain variable domain of TCR clone 375811 (TRBV7-9, TRBJ1-4)
CAITEGEANEKLFF

SEQ ID NO: 751623 - protein, 17 aa, Homo sapiens
  CDR3 for alpha chain variable domain of TCR clone 375812 (TRAV13-1, TRAJ52)
CAASSGAGGTSYGKLTF

SEQ ID NO: 751624 - protein, 16 aa, Homo sapiens
  CDR3 for beta chain variable domain of TCR clone 375812 (TRBV11-3, TRBJ2-5)
CASSSVVAGSTETQYF

SEQ ID NO: 751625 - protein, 11 aa, Homo sapiens
  CDR3 for alpha chain variable domain of TCR clone 375813 (TRAV13-1, TRAJ30)
CAASRDDKIIF

SEQ ID NO: 751626 - protein, 16 aa, Homo sapiens
  CDR3 for beta chain variable domain of TCR clone 375813 (TRBV29-1, TRBJ2-7)
CSVEDAEDGTAYEQYF

SEQ ID NO: 751627 - protein, 16 aa, Homo sapiens
  CDR3 for alpha chain variable domain of TCR clone 375814 (TRAV30, TRAJ24)
CGTEIVDADSCGIFQF

SEQ ID NO: 751628 - protein, 14 aa, Homo sapiens
  CDR3 for beta chain variable domain of TCR clone 375814 (TRBV12-5, TRBJ2-5)
CASGSRTHQETQYF

SEQ ID NO: 751629 - protein, 14 aa, Homo sapiens
  CDR3 for alpha chain variable domain of TCR clone 375815 (TRAV35, TRAJ30)
GSYPSVNRDDKIIF

SEQ ID NO: 751630 - protein, 17 aa, Homo sapiens
  CDR3 for beta chain variable domain of TCR clone 375815 (TRBV3-1, TRBJ2-5)
CASSNWGGTSGQETQYF

SEQ ID NO: 751631 - protein, 15 aa, Homo sapiens
  CDR3 for alpha chain variable domain of TCR clone 375816 (TRAV8-3, TRAJ45)
CASSYSGGGADGLTF

SEQ ID NO: 751632 - protein, 15 aa, Homo sapiens
  CDR3 for beta chain variable domain of TCR clone 375816 (TRBV27, TRBJ1-4)
CASSPRHATNETLFF

SEQ ID NO: 751633 - protein, 12 aa, Homo sapiens
  CDR3 for alpha chain variable domain of TCR clone 375817 (TRAV12-3, TRAJ20)
CAMGRGDYKLSF

SEQ ID NO: 751634 - protein, 12 aa, Homo sapiens
  CDR3 for beta chain variable domain of TCR clone 375817 (TRBV6-1, TRBJ2-7)
CASSDYSYEQYF

SEQ ID NO: 751635 - protein, 14 aa, Homo sapiens
  CDR3 for alpha chain variable domain of TCR clone 375818 (TRAV12-1, TRAJ43)
CVVNGRSNNNDMHF

SEQ ID NO: 751636 - protein, 12 aa, Homo sapiens
  CDR3 for beta chain variable domain of TCR clone 375818 (TRBV29-1, TRBJ2-3)
CSVTGGADTQYF

SEQ ID NO: 751637 - protein, 12 aa, Homo sapiens
  CDR3 for alpha chain variable domain of TCR clone 375819 (TRAV4, TRAJ6)
CLAPGGSYIPTF

SEQ ID NO: 751638 - protein, 15 aa, Homo sapiens
  CDR3 for beta chain variable domain of TCR clone 375819 (TRBV28, TRBJ1-5)
CASSRTWGYVQPQHF

SEQ ID NO: 751639 - protein, 16 aa, Homo sapiens
  CDR3 for alpha chain variable domain of TCR clone 375820 (TRAV38-1, TRAJ45)
CISVLTIQEEVDGLTF

SEQ ID NO: 751640 - protein, 20 aa, Homo sapiens
  CDR3 for beta chain variable domain of TCR clone 375820 (TRBV28, TRBJ2-1)
CASTPIGRSPGLAGGNEQFF

SEQ ID NO: 751641 - protein, 15 aa, Homo sapiens
  CDR3 for alpha chain variable domain of TCR clone 375821 (TRAV26-1, TRAJ22)
CIVRASFWFCKVTDL

SEQ ID NO: 751642 - protein, 16 aa, Homo sapiens
  CDR3 for beta chain variable domain of TCR clone 375821 (TRBV24-1, TRBJ2-3)
CATSDPGTGATDTQYF

SEQ ID NO: 751643 - protein, 14 aa, Homo sapiens
  CDR3 for alpha chain variable domain of TCR clone 375822 (TRAV3, TRAJ9)
CAVRLNTGGSKTIF

SEQ ID NO: 751644 - protein, 16 aa, Homo sapiens
  CDR3 for beta chain variable domain of TCR clone 375822 (TRBV7-3, TRBJ2-2)
CASSLKRGTLSGELFF

SEQ ID NO: 751645 - protein, 13 aa, Homo sapiens
  CDR3 for alpha chain variable domain of TCR clone 375823 (TRAV23/DV6, TRAJ12)
CAPRVDSSYKLIF

SEQ ID NO: 751646 - protein, 12 aa, Homo sapiens
  CDR3 for beta chain variable domain of TCR clone 375823 (TRBV7-8, TRBJ2-7)
CASSRGDREQYF

SEQ ID NO: 751647 - protein, 11 aa, Homo sapiens
  CDR3 for alpha chain variable domain of TCR clone 375824 (TRAV12-3, TRAJ27)
CAMANAGKTTF

SEQ ID NO: 751648 - protein, 13 aa, Homo sapiens
  CDR3 for beta chain variable domain of TCR clone 375824 (TRBV20-1, TRBJ1-1)
CSARVGGDTEAFF

SEQ ID NO: 751649 - protein, 15 aa, Homo sapiens
  CDR3 for alpha chain variable domain of TCR clone 375825 (TRAV2, TRAJ9)
CAVEDRGTGGFKTIF

SEQ ID NO: 751650 - protein, 12 aa, Homo sapiens
  CDR3 for beta chain variable domain of TCR clone 375825 (TRBV3-1, TRBJ2-1)
CASSQGSSGQFF

SEQ ID NO: 751651 - protein, 11 aa, Homo sapiens
  CDR3 for alpha chain variable domain of TCR clone 375826 (TRAV12-1, TRAJ43)
CVEYDNNDMRF

SEQ ID NO: 751652 - protein, 14 aa, Homo sapiens
  CDR3 for beta chain variable domain of TCR clone 375826 (TRBV6-1, TRBJ1-3)
CASVQGGGGNTIYF

SEQ ID NO: 751653 - protein, 15 aa, Homo sapiens
  CDR3 for alpha chain variable domain of TCR clone 375827 (TRAV2, TRAJ11)
CAVGGRNSGYSTLSF

SEQ ID NO: 751654 - protein, 12 aa, Homo sapiens
  CDR3 for beta chain variable domain of TCR clone 375827 (TRBV5-4, TRBJ2-7)
CASSLEAYEQYF

SEQ ID NO: 751655 - protein, 14 aa, Homo sapiens
  CDR3 for alpha chain variable domain of TCR clone 375828 (TRAV2, TRAJ29)
CAVTPPSGNTPLVF

SEQ ID NO: 751656 - protein, 13 aa, Homo sapiens
  CDR3 for beta chain variable domain of TCR clone 375828 (TRBV11-2, TRBJ2-1)
CASSLGLAGGGSS

SEQ ID NO: 751657 - protein, 17 aa, Homo sapiens
  CDR3 for alpha chain variable domain of TCR clone 375829 (TRAV3, TRAJ6)
CAVRDGPRAGGRYIPTF

SEQ ID NO: 751658 - protein, 14 aa, Homo sapiens
  CDR3 for beta chain variable domain of TCR clone 375829 (TRBV7-2, TRBJ2-7)
CASRPKTSFYEQYF

SEQ ID NO: 751659 - protein, 16 aa, Homo sapiens
  CDR3 for alpha chain variable domain of TCR clone 375830 (TRAV30, TRAJ24)
CGTEIVGADSWGKFQF

SEQ ID NO: 751660 - protein, 16 aa, Homo sapiens
  CDR3 for beta chain variable domain of TCR clone 375830 (TRBV6-3, TRBJ1-1)
CASTDLGTVPNTEAFF

SEQ ID NO: 751661 - protein, 17 aa, Homo sapiens
  CDR3 for alpha chain variable domain of TCR clone 375831 (TRAV3, TRAJ6)
CAVRDGPRAGGSYIPTF

SEQ ID NO: 751662 - protein, 15 aa, Homo sapiens
  CDR3 for beta chain variable domain of TCR clone 375831 (TRBV7-2, TRBJ2-2)
CASSETGQGTGELFF

SEQ ID NO: 751663 - protein, 16 aa, Homo sapiens
  CDR3 for alpha chain variable domain of TCR clone 375832 (TRAV4, TRAJ42)
CLVGPIYGGSQGNRIF

SEQ ID NO: 751664 - protein, 13 aa, Homo sapiens
  CDR3 for beta chain variable domain of TCR clone 375832 (TRBV11-2, TRBJ2-7)
CASSPLGSYEQYF

SEQ ID NO: 751665 - protein, 14 aa, Homo sapiens
  CDR3 for alpha chain variable domain of TCR clone 375833 (TRAV8-1, TRAJ49)
CASSIANTGNQFSF

SEQ ID NO: 751666 - protein, 13 aa, Homo sapiens
  CDR3 for beta chain variable domain of TCR clone 375833 (TRBV11-2, TRBJ2-5)
CASSFSSQETQYF

SEQ ID NO: 751667 - protein, 13 aa, Homo sapiens
  CDR3 for alpha chain variable domain of TCR clone 375834 (TRAV3, TRAJ41)
CAVSSNSGYALTF

SEQ ID NO: 751668 - protein, 12 aa, Homo sapiens
  CDR3 for beta chain variable domain of TCR clone 375834 (TRBV2, TRBJ2-1)
CASRPGPREQFF

SEQ ID NO: 751669 - protein, 14 aa, Homo sapiens
  CDR3 for alpha chain variable domain of TCR clone 375835 (TRAV36/DV7, TRAJ16)
CAVEADSDGQKLIF

SEQ ID NO: 751670 - protein, 15 aa, Homo sapiens
  CDR3 for beta chain variable domain of TCR clone 375835 (TRBV5-4, TRBJ2-3)
CATKSSGGALDTQYF

SEQ ID NO: 751671 - protein, 11 aa, Homo sapiens
  CDR3 for alpha chain variable domain of TCR clone 375836 (TRAV12-3, TRAJ43)
CAMSVSNDMRF

SEQ ID NO: 751672 - protein, 14 aa, Homo sapiens
  CDR3 for beta chain variable domain of TCR clone 375836 (TRBV6-6, TRBJ2-7)
CASSDSGAGYEQYF

SEQ ID NO: 751673 - protein, 12 aa, Homo sapiens
  CDR3 for alpha chain variable domain of TCR clone 375837 (TRAV1-2, TRAJ17)
CAVRAAGYKLTF

SEQ ID NO: 751674 - protein, 16 aa, Homo sapiens
  CDR3 for beta chain variable domain of TCR clone 375837 (TRBV20-1, TRBJ2-1)
CSAPGLAGSYSDEQFF

SEQ ID NO: 751675 - protein, 11 aa, Homo sapiens
  CDR3 for alpha chain variable domain of TCR clone 375838 (TRAV3, TRAJ21)
CAVGNFNKFYF

SEQ ID NO: 751676 - protein, 14 aa, Homo sapiens
  CDR3 for beta chain variable domain of TCR clone 375838 (TRBV28, TRBJ2-5)
CASSLYRGTETQYF

SEQ ID NO: 751677 - protein, 12 aa, Homo sapiens
  CDR3 for alpha chain variable domain of TCR clone 375839 (TRAV1-2, TRAJ24)
CAVGGSWGKFQF

SEQ ID NO: 751678 - protein, 13 aa, Homo sapiens
  CDR3 for beta chain variable domain of TCR clone 375839 (TRBV12-4, TRBJ1-2)
CASSVRQGKGYTF

SEQ ID NO: 751679 - protein, 14 aa, Homo sapiens
  CDR3 for alpha chain variable domain of TCR clone 375840 (TRAV10, TRAJ48)
CVGVFHFGNEKLTF

SEQ ID NO: 751680 - protein, 15 aa, Homo sapiens
  CDR3 for beta chain variable domain of TCR clone 375840 (TRBV7-9, TRBJ2-1)
CASSLGWGRANEQFF

SEQ ID NO: 751681 - protein, 14 aa, Homo sapiens
  CDR3 for alpha chain variable domain of TCR clone 375841 (TRAV12-2, TRAJ17)
CAVLFKAAGNKLTF

SEQ ID NO: 751682 - protein, 17 aa, Homo sapiens
  CDR3 for beta chain variable domain of TCR clone 375841 (TRBV3-1, TRBJ2-5)
CASSQDTLAGGGETQYF

SEQ ID NO: 751683 - protein, 15 aa, Homo sapiens
  CDR3 for alpha chain variable domain of TCR clone 375842 (TRAV12-2, TRAJ53)
CAVNTGGGSSYKLTF

SEQ ID NO: 751684 - protein, 15 aa, Homo sapiens
  CDR3 for beta chain variable domain of TCR clone 375842 (TRBV5-1, TRBJ2-5)
CASSLGLGEIKTQYF

SEQ ID NO: 751685 - protein, 14 aa, Homo sapiens
  CDR3 for alpha chain variable domain of TCR clone 375843 (TRAV17, TRAJ22)
CATSPSGSGRQLTF

SEQ ID NO: 751686 - protein, 15 aa, Homo sapiens
  CDR3 for beta chain variable domain of TCR clone 375843 (TRBV4-1, TRBJ2-5)
CASSQWDLYQETQYF

SEQ ID NO: 751687 - protein, 16 aa, Homo sapiens
  CDR3 for alpha chain variable domain of TCR clone 375844 (TRAV1-1, TRAJ29)
CAVRSTRNSGNTPLVF

SEQ ID NO: 751688 - protein, 14 aa, Homo sapiens
  CDR3 for beta chain variable domain of TCR clone 375844 (TRBV4-2, TRBJ2-1)
CASGLDRAYNEQFF

SEQ ID NO: 751689 - protein, 17 aa, Homo sapiens
  CDR3 for alpha chain variable domain of TCR clone 375845 (TRAV3, TRAJ38)
CAVRDCLNAGNNRKLIW

SEQ ID NO: 751690 - protein, 15 aa, Homo sapiens
  CDR3 for beta chain variable domain of TCR clone 375845 (TRBV19, TRBJ1-2)
CTSSVGQVLNYGYTF

SEQ ID NO: 751691 - protein, 16 aa, Homo sapiens
  CDR3 for alpha chain variable domain of TCR clone 375846 (TRAV26-1, TRAJ56)
CIVRVAETGANSKLTF

SEQ ID NO: 751692 - protein, 16 aa, Homo sapiens
  CDR3 for beta chain variable domain of TCR clone 375846 (TRBV11-1, TRBJ1-1)
CASSPRGAHMNSEAFF

SEQ ID NO: 751693 - protein, 16 aa, Homo sapiens
  CDR3 for alpha chain variable domain of TCR clone 375847 (TRAV3, TRAJ10)
CAVRDMRAGGGNKLTF

SEQ ID NO: 751694 - protein, 15 aa, Homo sapiens
  CDR3 for beta chain variable domain of TCR clone 375847 (TRBV7-2, TRBJ1-2)
CASSLVSGGDYGYTF

SEQ ID NO: 751695 - protein, 16 aa, Homo sapiens
  CDR3 for alpha chain variable domain of TCR clone 375848 (TRAV12-3, TRAJ53)
CAMSPGSGGSNYKLTF

SEQ ID NO: 751696 - protein, 15 aa, Homo sapiens
  CDR3 for beta chain variable domain of TCR clone 375848 (TRBV10-2, TRBJ2-2)
CASSASTSRCRGAVF

SEQ ID NO: 751697 - protein, 12 aa, Homo sapiens
  CDR3 for alpha chain variable domain of TCR clone 375849 (TRAV1-1, TRAJ8)
CAGGTGFQKLVF

SEQ ID NO: 751698 - protein, 15 aa, Homo sapiens
  CDR3 for beta chain variable domain of TCR clone 375849 (TRBV7-9, TRBJ1-4)
CASSRTGGFNEELFG

SEQ ID NO: 751699 - protein, 16 aa, Homo sapiens
  CDR3 for alpha chain variable domain of TCR clone 375850 (TRAV1-2, TRAJ35)
CAVRDREGFECAALRV

SEQ ID NO: 751700 - protein, 14 aa, Homo sapiens
  CDR3 for beta chain variable domain of TCR clone 375850 (TRBV28, TRBJ1-4)
CASSRTVGNEKLFF

SEQ ID NO: 751701 - protein, 14 aa, Homo sapiens
  CDR3 for alpha chain variable domain of TCR clone 375851 (TRAV17, TRAJ15)
CATTTNQAGTAPIF

SEQ ID NO: 751702 - protein, 16 aa, Homo sapiens
  CDR3 for beta chain variable domain of TCR clone 375851 (TRBV4-1, TRBJ2-7)
CASSRGDILNSYEQYF

SEQ ID NO: 751703 - protein, 12 aa, Homo sapiens
  CDR3 for alpha chain variable domain of TCR clone 375852 (TRAV1-1, TRAJ39)
CAVPVVVNMLTF

SEQ ID NO: 751704 - protein, 15 aa, Homo sapiens
  CDR3 for beta chain variable domain of TCR clone 375852 (TRBV19, TRBJ1-6)
CASSTQGAVGSPLHF

SEQ ID NO: 751705 - protein, 14 aa, Homo sapiens
  CDR3 for alpha chain variable domain of TCR clone 375853 (TRAV1-2, TRAJ33)
CAVRSSSSNYQLIW

SEQ ID NO: 751706 - protein, 14 aa, Homo sapiens
  CDR3 for beta chain variable domain of TCR clone 375853 (TRBV7-2, TRBJ2-1)
CASSPGLAGNEQFF

SEQ ID NO: 751707 - protein, 14 aa, Homo sapiens
  CDR3 for alpha chain variable domain of TCR clone 375854 (TRAV8-3, TRAJ9)
CAVVPNTGGFKTIF

SEQ ID NO: 751708 - protein, 14 aa, Homo sapiens
  CDR3 for beta chain variable domain of TCR clone 375854 (TRBV7-3, TRBJ2-2)
CASSSGGYTGELFF

SEQ ID NO: 751709 - protein, 10 aa, Homo sapiens
  CDR3 for alpha chain variable domain of TCR clone 375855 (TRAV36/DV7, TRAJ48)
CAVGNEKLTF

SEQ ID NO: 751710 - protein, 16 aa, Homo sapiens
  CDR3 for beta chain variable domain of TCR clone 375855 (TRBV29-1, TRBJ2-7)
CSVEVVGTSGSYEQYF

SEQ ID NO: 751711 - protein, 12 aa, Homo sapiens
  CDR3 for alpha chain variable domain of TCR clone 375856 (TRAV12-3, TRAJ17)
CAMTLTGNKPTF

SEQ ID NO: 751712 - protein, 15 aa, Homo sapiens
  CDR3 for beta chain variable domain of TCR clone 375856 (TRBV7-9, TRBJ1-6)
CASSSPGRGNSPLHF

SEQ ID NO: 751713 - protein, 14 aa, Homo sapiens
  CDR3 for alpha chain variable domain of TCR clone 375857 (TRAV1-2, TRAJ16)
CAVNRFSDGQKLLF

SEQ ID NO: 751714 - protein, 16 aa, Homo sapiens
  CDR3 for beta chain variable domain of TCR clone 375857 (TRBV19, TRBJ2-1)
CASSKAGPGSYNEQFF

SEQ ID NO: 751715 - protein, 15 aa, Homo sapiens
  CDR3 for alpha chain variable domain of TCR clone 375858 (TRAV27, TRAJ38)
CAARRNAGNNRKLSW

SEQ ID NO: 751716 - protein, 15 aa, Homo sapiens
  CDR3 for beta chain variable domain of TCR clone 375858 (TRBV27, TRBJ2-1)
CASSNGGGSSNEQFF

SEQ ID NO: 751717 - protein, 16 aa, Homo sapiens
  CDR3 for alpha chain variable domain of TCR clone 375859 (TRAV3, TRAJ21)
CALRAIERGNFNKFYF

SEQ ID NO: 751718 - protein, 13 aa, Homo sapiens
  CDR3 for beta chain variable domain of TCR clone 375859 (TRBV27, TRBJ2-7)
CASSLTTGYEQYF

SEQ ID NO: 751719 - protein, 13 aa, Homo sapiens
  CDR3 for alpha chain variable domain of TCR clone 375860 (TRAV12-2, TRAJ52)
CAVSGTSYGKLTF

SEQ ID NO: 751720 - protein, 17 aa, Homo sapiens
  CDR3 for beta chain variable domain of TCR clone 375860 (TRBV11-2, TRBJ2-1)
CASSLYPPGVEYNDQFF

SEQ ID NO: 751721 - protein, 14 aa, Homo sapiens
  CDR3 for alpha chain variable domain of TCR clone 375861 (TRAV12-2, TRAJ40)
CAVKIPSGTYNYIF

SEQ ID NO: 751722 - protein, 18 aa, Homo sapiens
  CDR3 for beta chain variable domain of TCR clone 375861 (TRBV20-1, TRBJ2-6)
CSAETTPTHGSGANVLTF

SEQ ID NO: 751723 - protein, 12 aa, Homo sapiens
  CDR3 for alpha chain variable domain of TCR clone 375862 (TRAV12-2, TRAJ10)
LGVTGGGNKLTF

SEQ ID NO: 751724 - protein, 15 aa, Homo sapiens
  CDR3 for beta chain variable domain of TCR clone 375862 (TRBV6-3, TRBJ2-7)
CASSSPGTVFYEQYF

SEQ ID NO: 751725 - protein, 16 aa, Homo sapiens
  CDR3 for alpha chain variable domain of TCR clone 375863 (TRAV1-1, TRAJ28)
CAVRDDSGSGSYQLTF

SEQ ID NO: 751726 - protein, 12 aa, Homo sapiens
  CDR3 for beta chain variable domain of TCR clone 375863 (TRBV11-2, TRBJ2-5)
CASSLDTQTQYF

SEQ ID NO: 751727 - protein, 13 aa, Homo sapiens
  CDR3 for alpha chain variable domain of TCR clone 375864 (TRAV8-1, TRAJ30)
CAVIMNRADKIIF

SEQ ID NO: 751728 - protein, 14 aa, Homo sapiens
  CDR3 for beta chain variable domain of TCR clone 375864 (TRBV7-2, TRBJ1-6)
CASSLQGANSPLHF

SEQ ID NO: 751729 - protein, 15 aa, Homo sapiens
  CDR3 for alpha chain variable domain of TCR clone 375865 (TRAV17, TRAJ57)
CATGPSQGGSEKLVF

SEQ ID NO: 751730 - protein, 14 aa, Homo sapiens
  CDR3 for beta chain variable domain of TCR clone 375865 (TRBV7-9, TRBJ2-1)
CASSQGQAEAEQFF

SEQ ID NO: 751731 - protein, 14 aa, Homo sapiens
  CDR3 for alpha chain variable domain of TCR clone 375866 (TRAV13-1, TRAJ35)
CAASKGGFGNVLHC

SEQ ID NO: 751732 - protein, 13 aa, Homo sapiens
  CDR3 for beta chain variable domain of TCR clone 375866 (TRBV7-9, TRBJ1-2)
CASSLKQSYGYTF

SEQ ID NO: 751733 - protein, 13 aa, Homo sapiens
  CDR3 for alpha chain variable domain of TCR clone 375867 (TRAV22, TRAJ29)
SAVGGSGNTPLVF

SEQ ID NO: 751734 - protein, 13 aa, Homo sapiens
  CDR3 for beta chain variable domain of TCR clone 375867 (TRBV19, TRBJ2-7)
CASRKAGGSEQYF

SEQ ID NO: 751735 - protein, 14 aa, Homo sapiens
  CDR3 for alpha chain variable domain of TCR clone 375868 (TRAV13-1, TRAJ40)
CAASMTSGTYKYIF

SEQ ID NO: 751736 - protein, 15 aa, Homo sapiens
  CDR3 for beta chain variable domain of TCR clone 375868 (TRBV7-3, TRBJ2-1)
CASSPTGRGEVEQFF

SEQ ID NO: 751737 - protein, 14 aa, Homo sapiens
  CDR3 for alpha chain variable domain of TCR clone 375869 (TRAV13-1, TRAJ40)
CAASMTSGTYKYIF

SEQ ID NO: 751738 - protein, 14 aa, Homo sapiens
  CDR3 for beta chain variable domain of TCR clone 375869 (TRBV5-4, TRBJ1-1)
CASSLDSRRDEAFF

SEQ ID NO: 751739 - protein, 13 aa, Homo sapiens
  CDR3 for alpha chain variable domain of TCR clone 375870 (TRAV12-1, TRAJ29)
CVVNGPGNTPLVF

SEQ ID NO: 751740 - protein, 14 aa, Homo sapiens
  CDR3 for beta chain variable domain of TCR clone 375870 (TRBV7-9, TRBJ2-5)
CASSLDTAQETQYF

SEQ ID NO: 751741 - protein, 12 aa, Homo sapiens
  CDR3 for alpha chain variable domain of TCR clone 375871 (TRAV17, TRAJ53)
CATEGSNYKLTF

SEQ ID NO: 751742 - protein, 19 aa, Homo sapiens
  CDR3 for beta chain variable domain of TCR clone 375871 (TRBV5-1, TRBJ2-3)
CASSLWTSGGSTTPDTQYF

SEQ ID NO: 751743 - protein, 13 aa, Homo sapiens
  CDR3 for alpha chain variable domain of TCR clone 375872 (TRAV17, TRAJ26)
CTTVDNYGQNFVF

SEQ ID NO: 751744 - protein, 16 aa, Homo sapiens
  CDR3 for beta chain variable domain of TCR clone 375872 (TRBV2, TRBJ2-1)
CASSVGGSLSYNEQFF

SEQ ID NO: 751745 - protein, 17 aa, Homo sapiens
  CDR3 for alpha chain variable domain of TCR clone 375873 (TRAV3, TRAJ6)
CAVRDGPRAGGSYIPTF

SEQ ID NO: 751746 - protein, 13 aa, Homo sapiens
  CDR3 for beta chain variable domain of TCR clone 375873 (TRBV28, TRBJ2-7)
CASTPGLAGEQYF

SEQ ID NO: 751747 - protein, 15 aa, Homo sapiens
  CDR3 for alpha chain variable domain of TCR clone 375874 (TRAV13-1, TRAJ17)
CAASIERASGNKLTF

SEQ ID NO: 751748 - protein, 13 aa, Homo sapiens
  CDR3 for beta chain variable domain of TCR clone 375874 (TRBV7-7, TRBJ2-3)
CASSLSRADTQYF

SEQ ID NO: 751749 - protein, 16 aa, Homo sapiens
  CDR3 for alpha chain variable domain of TCR clone 375875 (TRAV3, TRAJ4)
CAVRAFFSGGYNKLIF

SEQ ID NO: 751750 - protein, 13 aa, Homo sapiens
  CDR3 for beta chain variable domain of TCR clone 375875 (TRBV7-2, TRBJ2-7)
CASSLAAEYEQYF

SEQ ID NO: 751751 - protein, 14 aa, Homo sapiens
  CDR3 for alpha chain variable domain of TCR clone 375876 (TRAV1-2, TRAJ16)
CAVNRFSDGQKLIF

SEQ ID NO: 751752 - protein, 15 aa, Homo sapiens
  CDR3 for beta chain variable domain of TCR clone 375876 (TRBV20-1, TRBJ2-7)
CSARKGLAESYEQYF

SEQ ID NO: 751753 - protein, 12 aa, Homo sapiens
  CDR3 for alpha chain variable domain of TCR clone 375877 (TRAV1-1, TRAJ43)
CAPRVSSHDMRF

SEQ ID NO: 751754 - protein, 14 aa, Homo sapiens
  CDR3 for beta chain variable domain of TCR clone 375877 (TRBV6-1, TRBJ1-3)
CASVQGGGGNTIYF

SEQ ID NO: 751755 - protein, 16 aa, Homo sapiens
  CDR3 for alpha chain variable domain of TCR clone 375878 (TRAV3, TRAJ34)
CAVRARETPTSSSLGL

SEQ ID NO: 751756 - protein, 17 aa, Homo sapiens
  CDR3 for beta chain variable domain of TCR clone 375878 (TRBV20-1, TRBJ2-7)
CSAAPGLARGISYEQYF

SEQ ID NO: 751757 - protein, 15 aa, Homo sapiens
  CDR3 for alpha chain variable domain of TCR clone 375879 (TRAV3, TRAJ22)
RAVRDRGGSARQLTF

SEQ ID NO: 751758 - protein, 16 aa, Homo sapiens
  CDR3 for beta chain variable domain of TCR clone 375879 (TRBV5-4, TRBJ2-3)
CASQQPGAGGSDTQYF

SEQ ID NO: 751759 - protein, 12 aa, Homo sapiens
  CDR3 for alpha chain variable domain of TCR clone 375880 (TRAV4, TRAJ21)
CLVGDNFNKFYF

SEQ ID NO: 751760 - protein, 13 aa, Homo sapiens
  CDR3 for beta chain variable domain of TCR clone 375880 (TRBV19, TRBJ1-2)
CASSVPGQDGYTF

SEQ ID NO: 751761 - protein, 14 aa, Homo sapiens
  CDR3 for alpha chain variable domain of TCR clone 375881 (TRAV12-3, TRAJ10)
SQLPLTGGGNKLTF

SEQ ID NO: 751762 - protein, 16 aa, Homo sapiens
  CDR3 for beta chain variable domain of TCR clone 375881 (TRBV27, TRBJ2-2)
CASSSSGVSNTGELFF

SEQ ID NO: 751763 - protein, 11 aa, Homo sapiens
  CDR3 for alpha chain variable domain of TCR clone 375882 (TRAV2, TRAJ33)
CAVESNYQLIW

SEQ ID NO: 751764 - protein, 14 aa, Homo sapiens
  CDR3 for beta chain variable domain of TCR clone 375882 (TRBV7-3, TRBJ1-1)
CASSLKGGNTEAFF

SEQ ID NO: 751765 - protein, 12 aa, Homo sapiens
  CDR3 for alpha chain variable domain of TCR clone 375883 (TRAV3, TRAJ26)
CAVRDYGQNFVF

SEQ ID NO: 751766 - protein, 15 aa, Homo sapiens
  CDR3 for beta chain variable domain of TCR clone 375883 (TRBV24-1, TRBJ2-1)
CATRASGGQYNEQFF

SEQ ID NO: 751767 - protein, 10 aa, Homo sapiens
  CDR3 for alpha chain variable domain of TCR clone 375884 (TRAV23/DV6, TRAJ57)
CAASSTLSQG

SEQ ID NO: 751768 - protein, 12 aa, Homo sapiens
  CDR3 for beta chain variable domain of TCR clone 375884 (TRBV11-2, TRBJ2-5)
CASSLGQETQYF

SEQ ID NO: 751769 - protein, 12 aa, Homo sapiens
  CDR3 for alpha chain variable domain of TCR clone 375885 (TRAV21, TRAJ33)
CAVQDGNYQLIW

SEQ ID NO: 751770 - protein, 14 aa, Homo sapiens
  CDR3 for beta chain variable domain of TCR clone 375885 (TRBV28, TRBJ2-1)
CASSPGEGGNEQFF

SEQ ID NO: 751771 - protein, 13 aa, Homo sapiens
  CDR3 for alpha chain variable domain of TCR clone 375886 (TRAV27, TRAJ57)
CRSAQGGSEKLVF

SEQ ID NO: 751772 - protein, 11 aa, Homo sapiens
  CDR3 for beta chain variable domain of TCR clone 375886 (TRBV11-2, TRBJ1-1)
CASSINIEAFF

SEQ ID NO: 751773 - protein, 14 aa, Homo sapiens
  CDR3 for alpha chain variable domain of TCR clone 375887 (TRAV12-2, TRAJ13)
CAVKKTGGYQKVTF

SEQ ID NO: 751774 - protein, 13 aa, Homo sapiens
  CDR3 for beta chain variable domain of TCR clone 375887 (TRBV7-2, TRBJ2-4)
CASSREHANIQYF

SEQ ID NO: 751775 - protein, 15 aa, Homo sapiens
  CDR3 for alpha chain variable domain of TCR clone 375888 (TRAV26-1, TRAJ37)
CIVRLGSGNTGKLIF

SEQ ID NO: 751776 - protein, 16 aa, Homo sapiens
  CDR3 for beta chain variable domain of TCR clone 375888 (TRBV3-1, TRBJ2-5)
CASSPGQFNGFGTQYF

SEQ ID NO: 751777 - protein, 14 aa, Homo sapiens
  CDR3 for alpha chain variable domain of TCR clone 375889 (TRAV12-2, TRAJ13)
CAVKKTGGYQKVTF

SEQ ID NO: 751778 - protein, 13 aa, Homo sapiens
  CDR3 for beta chain variable domain of TCR clone 375889 (TRBV28, TRBJ2-7)
CASTAGGVSEQYF

SEQ ID NO: 751779 - protein, 14 aa, Homo sapiens
  CDR3 for alpha chain variable domain of TCR clone 375890 (TRAV27, TRAJ13)
CRSSNSGGYQKVTF

SEQ ID NO: 751780 - protein, 13 aa, Homo sapiens
  CDR3 for beta chain variable domain of TCR clone 375890 (TRBV24-1, TRBJ2-1)
CATSAGPYNEQFF

SEQ ID NO: 751781 - protein, 14 aa, Homo sapiens
  CDR3 for alpha chain variable domain of TCR clone 375891 (TRAV1-2, TRAJ16)
CAVNRFSDGEKLLF

SEQ ID NO: 751782 - protein, 15 aa, Homo sapiens
  CDR3 for beta chain variable domain of TCR clone 375891 (TRBV20-1, TRBJ2-7)
CSARDRVSGMDEQYF

SEQ ID NO: 751783 - protein, 23 aa, Homo sapiens
  CDR3 for alpha chain variable domain of TCR clone 375892 (TRAV12-2, TRAJ22)
CAVGFRVHPGPPIVSGSASQLTF

SEQ ID NO: 751784 - protein, 13 aa, Homo sapiens
  CDR3 for beta chain variable domain of TCR clone 375892 (TRBV12-4, TRBJ1-2)
CASSLDSNYGYTF

SEQ ID NO: 751785 - protein, 15 aa, Homo sapiens
  CDR3 for alpha chain variable domain of TCR clone 375893 (TRAV10, TRAJ39)
CVVSARNNAGNMLTF

SEQ ID NO: 751786 - protein, 19 aa, Homo sapiens
  CDR3 for beta chain variable domain of TCR clone 375893 (TRBV25-1, TRBJ2-2)
CAILVYRVDRGRKTGELFF

SEQ ID NO: 751787 - protein, 14 aa, Homo sapiens
  CDR3 for alpha chain variable domain of TCR clone 375894 (TRAV13-1, TRAJ45)
CAAIGGGGADGLTF

SEQ ID NO: 751788 - protein, 16 aa, Homo sapiens
  CDR3 for beta chain variable domain of TCR clone 375894 (TRBV7-2, TRBJ1-1)
CASSLGAGWANTEAFF

SEQ ID NO: 751789 - protein, 17 aa, Homo sapiens
  CDR3 for alpha chain variable domain of TCR clone 375895 (TRAV23/DV6, TRAJ57)
SAASSTLSQGGSEKLVF

SEQ ID NO: 751790 - protein, 13 aa, Homo sapiens
  CDR3 for beta chain variable domain of TCR clone 375895 (TRBV7-3, TRBJ1-1)
CASSQDWGAEAFF

SEQ ID NO: 751791 - protein, 14 aa, Homo sapiens
  CDR3 for alpha chain variable domain of TCR clone 375896 (TRAV13-1, TRAJ3)
CAASKSSSASKIIF

SEQ ID NO: 751792 - protein, 16 aa, Homo sapiens
  CDR3 for beta chain variable domain of TCR clone 375896 (TRBV15, TRBJ2-3)
CATSRDPGIVTDTQYF

SEQ ID NO: 751793 - protein, 15 aa, Homo sapiens
  CDR3 for alpha chain variable domain of TCR clone 375897 (TRAV2, TRAJ15)
CAVEDRNQAGTAVIF

SEQ ID NO: 751794 - protein, 13 aa, Homo sapiens
  CDR3 for beta chain variable domain of TCR clone 375897 (TRBV10-2, TRBJ2-1)
CASGASGDAKQFF

SEQ ID NO: 751795 - protein, 15 aa, Homo sapiens
  CDR3 for alpha chain variable domain of TCR clone 375898 (TRAV13-1, TRAJ50)
CAAKGSETSYDEVIF

SEQ ID NO: 751796 - protein, 13 aa, Homo sapiens
  CDR3 for beta chain variable domain of TCR clone 375898 (TRBV20-1, TRBJ2-3)
CSARAGGRDTQYF

SEQ ID NO: 751797 - protein, 12 aa, Homo sapiens
  CDR3 for alpha chain variable domain of TCR clone 375899 (TRAV13-1, TRAJ11)
CAGPSGYSTLTF

SEQ ID NO: 751798 - protein, 13 aa, Homo sapiens
  CDR3 for beta chain variable domain of TCR clone 375899 (TRBV12-4, TRBJ1-5)
CSSSPDRAQPQHF

SEQ ID NO: 751799 - protein, 13 aa, Homo sapiens
  CDR3 for alpha chain variable domain of TCR clone 375900 (TRAV1-2, TRAJ31)
CAVRGYNNARLMF

SEQ ID NO: 751800 - protein, 15 aa, Homo sapiens
  CDR3 for beta chain variable domain of TCR clone 375900 (TRBV7-3, TRBJ2-1)
CASSPTGGGEVEQFF

SEQ ID NO: 751801 - protein, 15 aa, Homo sapiens
  CDR3 for alpha chain variable domain of TCR clone 375901 (TRAV17, TRAJ22)
CATAPISGSARQLTF

SEQ ID NO: 751802 - protein, 13 aa, Homo sapiens
  CDR3 for beta chain variable domain of TCR clone 375901 (TRBV6-5, TRBJ1-2)
CASSLDTYYGYTC

SEQ ID NO: 751803 - protein, 14 aa, Homo sapiens
  CDR3 for alpha chain variable domain of TCR clone 375902 (TRAV2, TRAJ9)
CAVEDRSGGFKTIF

SEQ ID NO: 751804 - protein, 15 aa, Homo sapiens
  CDR3 for beta chain variable domain of TCR clone 375902 (TRBV20-1, TRBJ2-7)
CSARDQVSGMDEQYF

SEQ ID NO: 751805 - protein, 14 aa, Homo sapiens
  CDR3 for alpha chain variable domain of TCR clone 375903 (TRAV17, TRAJ6)
CATDASGGSYIPTF

SEQ ID NO: 751806 - protein, 19 aa, Homo sapiens
  CDR3 for beta chain variable domain of TCR clone 375903 (TRBV4-3, TRBJ2-7)
CASSQEFIGGEVTPYEQYF

SEQ ID NO: 751807 - protein, 15 aa, Homo sapiens
  CDR3 for alpha chain variable domain of TCR clone 375904 (TRAV8-4, TRAJ29)
CAVSEDFRGNTPLVF

SEQ ID NO: 751808 - protein, 13 aa, Homo sapiens
  CDR3 for beta chain variable domain of TCR clone 375904 (TRBV28, TRBJ2-7)
CASTPGLAGEQYF

SEQ ID NO: 751809 - protein, 16 aa, Homo sapiens
  CDR3 for alpha chain variable domain of TCR clone 375905 (TRAV12-2, TRAJ32)
CAVNLGQGGATNKLIF

SEQ ID NO: 751810 - protein, 14 aa, Homo sapiens
  CDR3 for beta chain variable domain of TCR clone 375905 (TRBV7-3, TRBJ2-1)
CASSLAGGTNEQFF

SEQ ID NO: 751811 - protein, 22 aa, Homo sapiens
  CDR3 for alpha chain variable domain of TCR clone 375906 (TRAV21, TRAJ39)
AASQPGDSATPKGAKAGNMLTF

SEQ ID NO: 751812 - protein, 15 aa, Homo sapiens
  CDR3 for beta chain variable domain of TCR clone 375906 (TRBV6-1, TRBJ2-3)
CASSERGGITDTQYF

SEQ ID NO: 751813 - protein, 17 aa, Homo sapiens
  CDR3 for alpha chain variable domain of TCR clone 375907 (TRAV26-2, TRAJ42)
CILRDVGYGGSQGNLYF

SEQ ID NO: 751814 - protein, 16 aa, Homo sapiens
  CDR3 for beta chain variable domain of TCR clone 375907 (TRBV12-4, TRBJ2-7)
CASSLIGGTGTYEQYF

SEQ ID NO: 751815 - protein, 11 aa, Homo sapiens
  CDR3 for alpha chain variable domain of TCR clone 375908 (TRAV21, TRAJ34)
CAVTNTDALIF

SEQ ID NO: 751816 - protein, 17 aa, Homo sapiens
  CDR3 for beta chain variable domain of TCR clone 375908 (TRBV20-1, TRBJ2-1)
CSARSPSGGPPTMSSSS

SEQ ID NO: 751817 - protein, 23 aa, Homo sapiens
  CDR3 for alpha chain variable domain of TCR clone 375909 (TRAV2, TRAJ9)
CAVEDRGTEASKLSLEQEQDYLL

SEQ ID NO: 751818 - protein, 16 aa, Homo sapiens
  CDR3 for beta chain variable domain of TCR clone 375909 (TRBV24-1, TRBJ2-3)
CATSDPGTGATDTQYF

SEQ ID NO: 751819 - protein, 14 aa, Homo sapiens
  CDR3 for alpha chain variable domain of TCR clone 375910 (TRAV1-2, TRAJ8)
CAVREDTGFQKLVF

SEQ ID NO: 751820 - protein, 19 aa, Homo sapiens
  CDR3 for beta chain variable domain of TCR clone 375910 (TRBV28, TRBJ2-1)
CDSSFSIRGSGRTRYEQFF

SEQ ID NO: 751821 - protein, 16 aa, Homo sapiens
  CDR3 for alpha chain variable domain of TCR clone 375911 (TRAV12-2, TRAJ40)
CAVIRGGTSGTYKYIF

SEQ ID NO: 751822 - protein, 17 aa, Homo sapiens
  CDR3 for beta chain variable domain of TCR clone 375911 (TRBV4-1, TRBJ1-4)
CASSQEGPRGVEEKLFF

SEQ ID NO: 751823 - protein, 11 aa, Homo sapiens
  CDR3 for alpha chain variable domain of TCR clone 375912 (TRAV4, TRAJ31)
CLVGDNARLMF

SEQ ID NO: 751824 - protein, 15 aa, Homo sapiens
  CDR3 for beta chain variable domain of TCR clone 375912 (TRBV7-2, TRBJ2-5)
CQSSKWLSGQETQYF

SEQ ID NO: 751825 - protein, 16 aa, Homo sapiens
  CDR3 for alpha chain variable domain of TCR clone 375913 (TRAV38-1, TRAJ32)
CAFMKGGGGATNKLIF

SEQ ID NO: 751826 - protein, 15 aa, Homo sapiens
  CDR3 for beta chain variable domain of TCR clone 375913 (TRBV7-2, TRBJ2-3)
CASSLNLRDTDTQYF

SEQ ID NO: 751827 - protein, 15 aa, Homo sapiens
  CDR3 for alpha chain variable domain of TCR clone 375914 (TRAV12-2, TRAJ56)
CAVNPFTGANSKLTF

SEQ ID NO: 751828 - protein, 13 aa, Homo sapiens
  CDR3 for beta chain variable domain of TCR clone 375914 (TRBV20-1, TRBJ1-2)
CSARDRVCGGYTF

SEQ ID NO: 751829 - protein, 16 aa, Homo sapiens
  CDR3 for alpha chain variable domain of TCR clone 375915 (TRAV3, TRAJ21)
CAVRDIERGNFNKFYF

SEQ ID NO: 751830 - protein, 13 aa, Homo sapiens
  CDR3 for beta chain variable domain of TCR clone 375915 (TRBV12-4, TRBJ2-7)
CTSSLTTGYEQYF

SEQ ID NO: 751831 - protein, 12 aa, Homo sapiens
  CDR3 for alpha chain variable domain of TCR clone 375916 (TRAV3, TRAJ20)
CAVRDPDYKPSF

SEQ ID NO: 751832 - protein, 12 aa, Homo sapiens
  CDR3 for beta chain variable domain of TCR clone 375916 (TRBV19, TRBJ2-1)
CASSMQDTEQFF

SEQ ID NO: 751833 - protein, 14 aa, Homo sapiens
  CDR3 for alpha chain variable domain of TCR clone 375917 (TRAV16, TRAJ33)
CALSAMDSNYQLIW

SEQ ID NO: 751834 - protein, 15 aa, Homo sapiens
  CDR3 for beta chain variable domain of TCR clone 375917 (TRBV28, TRBJ2-7)
CASSLEAYPIYQQYF

SEQ ID NO: 751835 - protein, 17 aa, Homo sapiens
  CDR3 for alpha chain variable domain of TCR clone 375918 (TRAV8-6, TRAJ58)
CAVSSWVGETSGSRLTF

SEQ ID NO: 751836 - protein, 12 aa, Homo sapiens
  CDR3 for beta chain variable domain of TCR clone 375918 (TRBV11-2, TRBJ2-5)
CASSPPAETQYF

SEQ ID NO: 751837 - protein, 14 aa, Homo sapiens
  CDR3 for alpha chain variable domain of TCR clone 375919 (TRAV1-2, TRAJ16)
CAVNRFSDGQKLLF

SEQ ID NO: 751838 - protein, 13 aa, Homo sapiens
  CDR3 for beta chain variable domain of TCR clone 375919 (TRBV7-2, TRBJ2-5)
CASSYWTGETQYF

SEQ ID NO: 751839 - protein, 15 aa, Homo sapiens
  CDR3 for alpha chain variable domain of TCR clone 375920 (TRAV23/DV6, )
CAADIQNPDPAVYQL

SEQ ID NO: 751840 - protein, 14 aa, Homo sapiens
  CDR3 for beta chain variable domain of TCR clone 375920 (TRBV5-7, TRBJ1-6)
CASSFAGHTSPLHF

SEQ ID NO: 751841 - protein, 12 aa, Homo sapiens
  CDR3 for alpha chain variable domain of TCR clone 375921 (TRAV8-4, TRAJ43)
CAVSVNNNDMRF

SEQ ID NO: 751842 - protein, 15 aa, Homo sapiens
  CDR3 for beta chain variable domain of TCR clone 375921 (TRBV28, TRBJ2-3)
CAPTFRDWSTDTQYF

SEQ ID NO: 751843 - protein, 14 aa, Homo sapiens
  CDR3 for alpha chain variable domain of TCR clone 375922 (TRAV30, TRAJ26)
CGTEIVSYGQNFVF

SEQ ID NO: 751844 - protein, 14 aa, Homo sapiens
  CDR3 for beta chain variable domain of TCR clone 375922 (TRBV6-6, TRBJ2-3)
CASRLQREADTQYF

SEQ ID NO: 751845 - protein, 13 aa, Homo sapiens
  CDR3 for alpha chain variable domain of TCR clone 375923 (TRAV21, TRAJ20)
CAVGLRVDYKLSF

SEQ ID NO: 751846 - protein, 16 aa, Homo sapiens
  CDR3 for beta chain variable domain of TCR clone 375923 (TRBV13, TRBJ2-2)
CASSPRTGEHTGELFF

SEQ ID NO: 751847 - protein, 15 aa, Homo sapiens
  CDR3 for alpha chain variable domain of TCR clone 375924 (TRAV16, TRAJ12)
CSKWPLRDSSYKLIF

SEQ ID NO: 751848 - protein, 12 aa, Homo sapiens
  CDR3 for beta chain variable domain of TCR clone 375924 (TRBV12-5, TRBJ2-5)
CASGQGVETQFF

SEQ ID NO: 751849 - protein, 20 aa, Homo sapiens
  CDR3 for alpha chain variable domain of TCR clone 375925 (TRAV1-2, TRAJ9)
CAALNTGGFKTILEQEQDYF

SEQ ID NO: 751850 - protein, 12 aa, Homo sapiens
  CDR3 for beta chain variable domain of TCR clone 375925 (TRBV11-3, TRBJ1-1)
CASSHRQGEAFF

SEQ ID NO: 751851 - protein, 12 aa, Homo sapiens
  CDR3 for alpha chain variable domain of TCR clone 375926 (TRAV5, TRAJ20)
CAETYNDYKLSF

SEQ ID NO: 751852 - protein, 13 aa, Homo sapiens
  CDR3 for beta chain variable domain of TCR clone 375926 (TRBV7-3, TRBJ1-1)
CASSQDWGAEAFF

SEQ ID NO: 751853 - protein, 15 aa, Homo sapiens
  CDR3 for alpha chain variable domain of TCR clone 375927 (TRAV8-2, TRAJ40)
CVVLGTTSATYKYIF

SEQ ID NO: 751854 - protein, 16 aa, Homo sapiens
  CDR3 for beta chain variable domain of TCR clone 375927 (TRBV7-3, TRBJ2-1)
CASSLEGYRSYNEQFF

SEQ ID NO: 751855 - protein, 14 aa, Homo sapiens
  CDR3 for alpha chain variable domain of TCR clone 375928 (TRAV12-3, TRAJ29)
CAMSPYSGNTPLVS

SEQ ID NO: 751856 - protein, 12 aa, Homo sapiens
  CDR3 for beta chain variable domain of TCR clone 375928 (TRBV11-2, TRBJ2-2)
CASSLPTGELFF

SEQ ID NO: 751857 - protein, 14 aa, Homo sapiens
  CDR3 for alpha chain variable domain of TCR clone 375929 (TRAV8-4, TRAJ9)
SAVRINTGGFKTIF

SEQ ID NO: 751858 - protein, 15 aa, Homo sapiens
  CDR3 for beta chain variable domain of TCR clone 375929 (TRBV10-2, TRBJ2-6)
CASSEQGTGANVLTF

SEQ ID NO: 751859 - protein, 19 aa, Homo sapiens
  CDR3 for alpha chain variable domain of TCR clone 375930 (TRAV2, TRAJ20)
ILQVREADAAVYRDCKLSF

SEQ ID NO: 751860 - protein, 15 aa, Homo sapiens
  CDR3 for beta chain variable domain of TCR clone 375930 (TRBV20-1, TRBJ2-7)
CSARDRVSGMDEQFF

SEQ ID NO: 751861 - protein, 15 aa, Homo sapiens
  CDR3 for alpha chain variable domain of TCR clone 375931 (TRAV8-4, TRAJ47)
CAVSDPEEYGNKLVF

SEQ ID NO: 751862 - protein, 16 aa, Homo sapiens
  CDR3 for beta chain variable domain of TCR clone 375931 (TRBV7-3, TRBJ2-2)
CASSLKRGTLSGELFF

SEQ ID NO: 751863 - protein, 16 aa, Homo sapiens
  CDR3 for alpha chain variable domain of TCR clone 375932 (TRAV3, TRAJ37)
CAVRPHGSGNTGKLSF

SEQ ID NO: 751864 - protein, 14 aa, Homo sapiens
  CDR3 for beta chain variable domain of TCR clone 375932 (TRBV25-1, TRBJ1-1)
CASTHLGGNTEAFF

SEQ ID NO: 751865 - protein, 17 aa, Homo sapiens
  CDR3 for alpha chain variable domain of TCR clone 375933 (TRAV3, TRAJ12)
CAVRDGGRMDSSYKLIF

SEQ ID NO: 751866 - protein, 14 aa, Homo sapiens
  CDR3 for beta chain variable domain of TCR clone 375933 (TRBV19, TRBJ2-1)
CASSPGLAPNEQFF

SEQ ID NO: 751867 - protein, 18 aa, Homo sapiens
  CDR3 for alpha chain variable domain of TCR clone 375934 (TRAV12-2, )
CAVEDIQNPDPAVYKLRD

SEQ ID NO: 751868 - protein, 18 aa, Homo sapiens
  CDR3 for beta chain variable domain of TCR clone 375934 (TRBV11-2, TRBJ2-3)
CASSLGGASRGAPNTQYF

SEQ ID NO: 751869 - protein, 13 aa, Homo sapiens
  CDR3 for alpha chain variable domain of TCR clone 375935 (TRAV22, TRAJ26)
CAVEHNYGQNFVF

SEQ ID NO: 751870 - protein, 16 aa, Homo sapiens
  CDR3 for beta chain variable domain of TCR clone 375935 (TRBV7-2, TRBJ2-6)
CASSGRRGSGANVLTF

SEQ ID NO: 751871 - protein, 10 aa, Homo sapiens
  CDR3 for alpha chain variable domain of TCR clone 375936 (TRAV25, TRAJ20)
CPVNDYKLSF

SEQ ID NO: 751872 - protein, 13 aa, Homo sapiens
  CDR3 for beta chain variable domain of TCR clone 375936 (TRBV6-3, TRBJ2-7)
CASSFSGGYEQYF

SEQ ID NO: 751873 - protein, 14 aa, Homo sapiens
  CDR3 for alpha chain variable domain of TCR clone 375937 (TRAV8-4, TRAJ9)
FAVTFNTGGFKTIF

SEQ ID NO: 751874 - protein, 15 aa, Homo sapiens
  CDR3 for beta chain variable domain of TCR clone 375937 (TRBV7-9, TRBJ2-2)
CASSPETGAGGELFF

SEQ ID NO: 751875 - protein, 15 aa, Homo sapiens
  CDR3 for alpha chain variable domain of TCR clone 375938 (TRAV2, TRAJ15)
CAVEDRGQAGTALIF

SEQ ID NO: 751876 - protein, 14 aa, Homo sapiens
  CDR3 for beta chain variable domain of TCR clone 375938 (TRBV4-1, TRBJ2-2)
CAGSQAVNTGELFF

SEQ ID NO: 751877 - protein, 12 aa, Homo sapiens
  CDR3 for alpha chain variable domain of TCR clone 375939 (TRAV12-1, TRAJ34)
CVVAGATDKLFF

SEQ ID NO: 751878 - protein, 12 aa, Homo sapiens
  CDR3 for beta chain variable domain of TCR clone 375939 (TRBV7-9, TRBJ1-1)
CASSLVRGEAFF

SEQ ID NO: 751879 - protein, 13 aa, Homo sapiens
  CDR3 for alpha chain variable domain of TCR clone 375940 (TRAV26-2, TRAJ37)
CIRGSSNTGKLIF

SEQ ID NO: 751880 - protein, 17 aa, Homo sapiens
  CDR3 for beta chain variable domain of TCR clone 375940 (TRBV15, TRBJ1-4)
CATSRYGTGDPNEKLFF

SEQ ID NO: 751881 - protein, 10 aa, Homo sapiens
  CDR3 for alpha chain variable domain of TCR clone 375941 (TRAV5, TRAJ30)
IANRDDKIIF

SEQ ID NO: 751882 - protein, 14 aa, Homo sapiens
  CDR3 for beta chain variable domain of TCR clone 375941 (TRBV4-1, TRBJ2-2)
CASSQAVNTGELFF

SEQ ID NO: 751883 - protein, 12 aa, Homo sapiens
  CDR3 for alpha chain variable domain of TCR clone 375942 (TRAV12-1, TRAJ40)
CVVYSGTYKYIF

SEQ ID NO: 751884 - protein, 18 aa, Homo sapiens
  CDR3 for beta chain variable domain of TCR clone 375942 (TRBV11-2, TRBJ2-3)
CASSLGGASRGAPHTQYF

SEQ ID NO: 751885 - protein, 14 aa, Homo sapiens
  CDR3 for alpha chain variable domain of TCR clone 375943 (TRAV13-2, TRAJ22)
CADGTLGSAMQLTF

SEQ ID NO: 751886 - protein, 16 aa, Homo sapiens
  CDR3 for beta chain variable domain of TCR clone 375943 (TRBV19, TRBJ2-1)
CASSSKGTRSYNEQFF

SEQ ID NO: 751887 - protein, 16 aa, Homo sapiens
  CDR3 for alpha chain variable domain of TCR clone 375944 (TRAV20, TRAJ52)
CAVLPEGGTSYGKLTF

SEQ ID NO: 751888 - protein, 12 aa, Homo sapiens
  CDR3 for beta chain variable domain of TCR clone 375944 (TRBV19, TRBJ2-1)
CASSQISNEQFF

SEQ ID NO: 751889 - protein, 14 aa, Homo sapiens
  CDR3 for alpha chain variable domain of TCR clone 375945 (TRAV12-2, TRAJ5)
CAVNRSTGRRALPF

SEQ ID NO: 751890 - protein, 12 aa, Homo sapiens
  CDR3 for beta chain variable domain of TCR clone 375945 (TRBV19, TRBJ1-5)
CASSIAQKPQHF

SEQ ID NO: 751891 - protein, 13 aa, Homo sapiens
  CDR3 for alpha chain variable domain of TCR clone 375946 (TRAV12-2, TRAJ10)
CAVPTGGGNKLTF

SEQ ID NO: 751892 - protein, 15 aa, Homo sapiens
  CDR3 for beta chain variable domain of TCR clone 375946 (TRBV11-3, TRBJ2-7)
CASSPGPASSYEQYF

SEQ ID NO: 751893 - protein, 13 aa, Homo sapiens
  CDR3 for alpha chain variable domain of TCR clone 375947 (TRAV12-2, TRAJ47)
CAVFMEYGNKLVF

SEQ ID NO: 751894 - protein, 14 aa, Homo sapiens
  CDR3 for beta chain variable domain of TCR clone 375947 (TRBV4-1, TRBJ1-5)
CASSQGPTNQPQYF

SEQ ID NO: 751895 - protein, 13 aa, Homo sapiens
  CDR3 for alpha chain variable domain of TCR clone 375948 (TRAV12-3, TRAJ48)
CAMSLVGNEKLTF

SEQ ID NO: 751896 - protein, 12 aa, Homo sapiens
  CDR3 for beta chain variable domain of TCR clone 375948 (TRBV11-2, TRBJ1-5)
CASSLESEPQHF

SEQ ID NO: 751897 - protein, 15 aa, Homo sapiens
  CDR3 for alpha chain variable domain of TCR clone 375949 (TRAV8-6, TRAJ44)
CAARLIYRHCQLTHL

SEQ ID NO: 751898 - protein, 13 aa, Homo sapiens
  CDR3 for beta chain variable domain of TCR clone 375949 (TRBV27, TRBJ2-7)
CASSFSQGYEQYF

SEQ ID NO: 751899 - protein, 15 aa, Homo sapiens
  CDR3 for alpha chain variable domain of TCR clone 375950 (TRAV12-2, TRAJ42)
CAVNSHGGSQGNPIL

SEQ ID NO: 751900 - protein, 13 aa, Homo sapiens
  CDR3 for beta chain variable domain of TCR clone 375950 (TRBV27, TRBJ1-1)
CASGVSANTEAFF

SEQ ID NO: 751901 - protein, 14 aa, Homo sapiens
  CDR3 for alpha chain variable domain of TCR clone 375951 (TRAV1-2, TRAJ8)
CAVREDTGFQKLVF

SEQ ID NO: 751902 - protein, 13 aa, Homo sapiens
  CDR3 for beta chain variable domain of TCR clone 375951 (TRBV15, TRBJ1-6)
CATSGGLNSPLHC

SEQ ID NO: 751903 - protein, 13 aa, Homo sapiens
  CDR3 for alpha chain variable domain of TCR clone 375952 (TRAV8-3, TRAJ30)
CAVGGWRGDKIIF

SEQ ID NO: 751904 - protein, 14 aa, Homo sapiens
  CDR3 for beta chain variable domain of TCR clone 375952 (TRBV20-1, TRBJ1-1)
CSAPPADMNTEAFF

SEQ ID NO: 751905 - protein, 15 aa, Homo sapiens
  CDR3 for alpha chain variable domain of TCR clone 375953 (TRAV8-6, TRAJ10)
CAVSDQAGGGNKLTF

SEQ ID NO: 751906 - protein, 15 aa, Homo sapiens
  CDR3 for beta chain variable domain of TCR clone 375953 (TRBV7-2, TRBJ2-2)
CASRRPGQNTGELFF

SEQ ID NO: 751907 - protein, 11 aa, Homo sapiens
  CDR3 for alpha chain variable domain of TCR clone 375954 (TRAV12-3, TRAJ27)
CAMANAGKTTF

SEQ ID NO: 751908 - protein, 13 aa, Homo sapiens
  CDR3 for beta chain variable domain of TCR clone 375954 (TRBV20-1, TRBJ1-1)
CSARVGGNTEAVF

SEQ ID NO: 751909 - protein, 15 aa, Homo sapiens
  CDR3 for alpha chain variable domain of TCR clone 375955 (TRAV12-2, TRAJ43)
CAFDMRFGAGTRLTV

SEQ ID NO: 751910 - protein, 18 aa, Homo sapiens
  CDR3 for beta chain variable domain of TCR clone 375955 (TRBV20-1, TRBJ2-3)
CSASGLAGGPGTTDTQDF

SEQ ID NO: 751911 - protein, 11 aa, Homo sapiens
  CDR3 for alpha chain variable domain of TCR clone 375956 (TRAV4, TRAJ23)
CLVAPGGKIIF

SEQ ID NO: 751912 - protein, 15 aa, Homo sapiens
  CDR3 for beta chain variable domain of TCR clone 375956 (TRBV7-2, TRBJ2-1)
CASSFQADEYNEQFF

SEQ ID NO: 751913 - protein, 14 aa, Homo sapiens
  CDR3 for alpha chain variable domain of TCR clone 375957 (TRAV2, TRAJ17)
CAVVGKAAGNKLTF

SEQ ID NO: 751914 - protein, 13 aa, Homo sapiens
  CDR3 for beta chain variable domain of TCR clone 375957 (TRBV7-2, TRBJ2-7)
CASSAGLSYEQSF

SEQ ID NO: 751915 - protein, 21 aa, Homo sapiens
  CDR3 for alpha chain variable domain of TCR clone 375958 (TRAV12-3, TRAJ18)
CAMSAEAQPWGGYTLEEELSW

SEQ ID NO: 751916 - protein, 16 aa, Homo sapiens
  CDR3 for beta chain variable domain of TCR clone 375958 (TRBV13, TRBJ2-2)
CASSPRTGEHTGELFF

SEQ ID NO: 751917 - protein, 15 aa, Homo sapiens
  CDR3 for alpha chain variable domain of TCR clone 375959 (TRAV25, TRAJ52)
CAGTSGGTSYGKLTF

SEQ ID NO: 751918 - protein, 16 aa, Homo sapiens
  CDR3 for beta chain variable domain of TCR clone 375959 (TRBV2, TRBJ2-3)
CASSTSVEGVTDTQYF

SEQ ID NO: 751919 - protein, 14 aa, Homo sapiens
  CDR3 for alpha chain variable domain of TCR clone 375960 (TRAV2, TRAJ9)
CAVADRSGGFKTIF

SEQ ID NO: 751920 - protein, 13 aa, Homo sapiens
  CDR3 for beta chain variable domain of TCR clone 375960 (TRBV12-4, TRBJ1-5)
CASSPDRAQPQHF

SEQ ID NO: 751921 - protein, 16 aa, Homo sapiens
  CDR3 for alpha chain variable domain of TCR clone 375961 (TRAV23/DV6, TRAJ57)
AASSTLSQGGSEKLVF

SEQ ID NO: 751922 - protein, 14 aa, Homo sapiens
  CDR3 for beta chain variable domain of TCR clone 375961 (TRBV25-1, TRBJ1-1)
CASTHLGGNTEVFF

SEQ ID NO: 751923 - protein, 13 aa, Homo sapiens
  CDR3 for alpha chain variable domain of TCR clone 375962 (TRAV2, TRAJ40)
CAVVTSGTYKYIF

SEQ ID NO: 751924 - protein, 14 aa, Homo sapiens
  CDR3 for beta chain variable domain of TCR clone 375962 (TRBV20-1, TRBJ2-5)
CSATGLAVQETQYF

SEQ ID NO: 751925 - protein, 11 aa, Homo sapiens
  CDR3 for alpha chain variable domain of TCR clone 375963 (TRAV17, TRAJ49)
CATDAGNQFYF

SEQ ID NO: 751926 - protein, 16 aa, Homo sapiens
  CDR3 for beta chain variable domain of TCR clone 375963 (TRBV7-9, TRBJ1-2)
CASSLGFSSGEDGYTF

SEQ ID NO: 751927 - protein, 12 aa, Homo sapiens
  CDR3 for alpha chain variable domain of TCR clone 375964 (TRAV12-1, TRAJ31)
CVSWNNNARLMF

SEQ ID NO: 751928 - protein, 15 aa, Homo sapiens
  CDR3 for beta chain variable domain of TCR clone 375964 (TRBV7-2, TRBJ1-5)
CASSLGRGQDQPQHF

SEQ ID NO: 751929 - protein, 13 aa, Homo sapiens
  CDR3 for alpha chain variable domain of TCR clone 375965 (TRAV36/DV7, TRAJ37)
CAVFSSNTGKLIF

SEQ ID NO: 751930 - protein, 15 aa, Homo sapiens
  CDR3 for beta chain variable domain of TCR clone 375965 (TRBV12-4, TRBJ2-5)
CRQFFVRGRQEDQYF

SEQ ID NO: 751931 - protein, 10 aa, Homo sapiens
  CDR3 for alpha chain variable domain of TCR clone 375966 (TRAV12-3, TRAJ18)
CAMSAEAQPC

SEQ ID NO: 751932 - protein, 13 aa, Homo sapiens
  CDR3 for beta chain variable domain of TCR clone 375966 (TRBV15, TRBJ1-6)
CATSGGLNSPLHF

SEQ ID NO: 751933 - protein, 11 aa, Homo sapiens
  CDR3 for alpha chain variable domain of TCR clone 375967 (TRAV1-1, TRAJ22)
CLGGLGKATDL

SEQ ID NO: 751934 - protein, 14 aa, Homo sapiens
  CDR3 for beta chain variable domain of TCR clone 375967 (TRBV27, TRBJ2-7)
CASSLAGLSYEQYF

SEQ ID NO: 751935 - protein, 15 aa, Homo sapiens
  CDR3 for alpha chain variable domain of TCR clone 375968 (TRAV8-4, TRAJ42)
CAVSDDRGSQGNLIF

SEQ ID NO: 751936 - protein, 17 aa, Homo sapiens
  CDR3 for beta chain variable domain of TCR clone 375968 (TRBV11-2, TRBJ2-1)
CASSSYPPGVEYNEQFF

SEQ ID NO: 751937 - protein, 17 aa, Homo sapiens
  CDR3 for alpha chain variable domain of TCR clone 375969 (TRAV16, TRAJ58)
CITVLSNGETSGSRLTF

SEQ ID NO: 751938 - protein, 17 aa, Homo sapiens
  CDR3 for beta chain variable domain of TCR clone 375969 (TRBV18, TRBJ2-1)
CASSKGLSGWADNEQFF

SEQ ID NO: 751939 - protein, 16 aa, Homo sapiens
  CDR3 for alpha chain variable domain of TCR clone 375970 (TRAV16, TRAJ4)
CALSRMFSGGYNKLIF

SEQ ID NO: 751940 - protein, 14 aa, Homo sapiens
  CDR3 for beta chain variable domain of TCR clone 375970 (TRBV12-4, TRBJ2-2)
CASNQGANTGELFF

SEQ ID NO: 751941 - protein, 15 aa, Homo sapiens
  CDR3 for alpha chain variable domain of TCR clone 375971 (TRAV25, TRAJ52)
CAGTSGGTSYGKLTF

SEQ ID NO: 751942 - protein, 16 aa, Homo sapiens
  CDR3 for beta chain variable domain of TCR clone 375971 (TRBV15, TRBJ1-2)
CATSGGPRTGGGGYTF

SEQ ID NO: 751943 - protein, 12 aa, Homo sapiens
  CDR3 for alpha chain variable domain of TCR clone 375972 (TRAV12-3, TRAJ17)
CAMTLTGNKLTF

SEQ ID NO: 751944 - protein, 13 aa, Homo sapiens
  CDR3 for beta chain variable domain of TCR clone 375972 (TRBV25-1, TRBJ2-6)
CASRGPGANGLTF

SEQ ID NO: 751945 - protein, 14 aa, Homo sapiens
  CDR3 for alpha chain variable domain of TCR clone 375973 (TRAV12-3, TRAJ58)
CTMSTETSGSRLTF

SEQ ID NO: 751946 - protein, 13 aa, Homo sapiens
  CDR3 for beta chain variable domain of TCR clone 375973 (TRBV27, TRBJ2-3)
CASSWGRTDTQYF

SEQ ID NO: 751947 - protein, 14 aa, Homo sapiens
  CDR3 for alpha chain variable domain of TCR clone 375974 (TRAV27, TRAJ40)
CAGSLLRGTYKYIF

SEQ ID NO: 751948 - protein, 15 aa, Homo sapiens
  CDR3 for beta chain variable domain of TCR clone 375974 (TRBV6-3, TRBJ1-4)
CASSSPGQENEKLFF

SEQ ID NO: 751949 - protein, 15 aa, Homo sapiens
  CDR3 for alpha chain variable domain of TCR clone 375975 (TRAV2, TRAJ9)
CAVEDRGTGGFKTIF

SEQ ID NO: 751950 - protein, 14 aa, Homo sapiens
  CDR3 for beta chain variable domain of TCR clone 375975 (TRBV11-1, TRBJ2-7)
CASTFAVPSYEQYF

SEQ ID NO: 751951 - protein, 14 aa, Homo sapiens
  CDR3 for alpha chain variable domain of TCR clone 375976 (TRAV12-3, TRAJ57)
CAMSAWGGPEKLVF

SEQ ID NO: 751952 - protein, 14 aa, Homo sapiens
  CDR3 for beta chain variable domain of TCR clone 375976 (TRBV7-8, TRBJ2-7)
CASSPRDRVYEQYF

SEQ ID NO: 751953 - protein, 13 aa, Homo sapiens
  CDR3 for alpha chain variable domain of TCR clone 375977 (TRAV26-1, TRAJ29)
CIVRRSGNTPLVF

SEQ ID NO: 751954 - protein, 13 aa, Homo sapiens
  CDR3 for beta chain variable domain of TCR clone 375977 (TRBV28, TRBJ2-7)
CASTPGLAGEQYF

SEQ ID NO: 751955 - protein, 17 aa, Homo sapiens
  CDR3 for alpha chain variable domain of TCR clone 375978 (TRAV3, TRAJ6)
CAVSRRPDTGGSYIPTF

SEQ ID NO: 751956 - protein, 18 aa, Homo sapiens
  CDR3 for beta chain variable domain of TCR clone 375978 (TRBV7-2, TRBJ2-3)
CASSLETSRGRKADTQYF

SEQ ID NO: 751957 - protein, 14 aa, Homo sapiens
  CDR3 for alpha chain variable domain of TCR clone 375979 (TRAV8-6, TRAJ5)
CAVSVDTGRRGLTF

SEQ ID NO: 751958 - protein, 11 aa, Homo sapiens
  CDR3 for beta chain variable domain of TCR clone 375979 (TRBV7-3, TRBJ2-5)
CASSLSETQYF

SEQ ID NO: 751959 - protein, 13 aa, Homo sapiens
  CDR3 for alpha chain variable domain of TCR clone 375980 (TRAV3, TRAJ27)
CAVRPLGSGKSTF

SEQ ID NO: 751960 - protein, 14 aa, Homo sapiens
  CDR3 for beta chain variable domain of TCR clone 375980 (TRBV25-1, TRBJ1-1)
CASTHLGGNTEAFF

SEQ ID NO: 751961 - protein, 13 aa, Homo sapiens
  CDR3 for alpha chain variable domain of TCR clone 375981 (TRAV30, TRAJ24)
CGTVTDSWGKLQF

SEQ ID NO: 751962 - protein, 15 aa, Homo sapiens
  CDR3 for beta chain variable domain of TCR clone 375981 (TRBV12-4, TRBJ2-5)
CASSLGGQGRETQYF

SEQ ID NO: 751963 - protein, 13 aa, Homo sapiens
  CDR3 for alpha chain variable domain of TCR clone 375982 (TRAV13-1, TRAJ52)
CAAGGTSYGKLTF

SEQ ID NO: 751964 - protein, 13 aa, Homo sapiens
  CDR3 for beta chain variable domain of TCR clone 375982 (TRBV20-1, TRBJ1-1)
CSAPLGGGTEAVF

SEQ ID NO: 751965 - protein, 13 aa, Homo sapiens
  CDR3 for alpha chain variable domain of TCR clone 375983 (TRAV12-2, TRAJ37)
CAGGSGNTGKLIF

SEQ ID NO: 751966 - protein, 11 aa, Homo sapiens
  CDR3 for beta chain variable domain of TCR clone 375983 (TRBV12-4, TRBJ2-3)
CASTATDTQYF

SEQ ID NO: 751967 - protein, 14 aa, Homo sapiens
  CDR3 for alpha chain variable domain of TCR clone 375984 (TRAV13-2, TRAJ11)
CAETGNSGYSTLTF

SEQ ID NO: 751968 - protein, 13 aa, Homo sapiens
  CDR3 for beta chain variable domain of TCR clone 375984 (TRBV4-2, TRBJ1-1)
CASSQAGNTEAFF

SEQ ID NO: 751969 - protein, 11 aa, Homo sapiens
  CDR3 for alpha chain variable domain of TCR clone 375985 (TRAV29/DV5, TRAJ47)
CAATYGNKLVF

SEQ ID NO: 751970 - protein, 15 aa, Homo sapiens
  CDR3 for beta chain variable domain of TCR clone 375985 (TRBV7-8, TRBJ2-7)
CASSLGTGNPYEQYL

SEQ ID NO: 751971 - protein, 16 aa, Homo sapiens
  CDR3 for alpha chain variable domain of TCR clone 375986 (TRAV30, TRAJ24)
CVTEIVDADSWGKFQF

SEQ ID NO: 751972 - protein, 16 aa, Homo sapiens
  CDR3 for beta chain variable domain of TCR clone 375986 (TRBV20-1, TRBJ1-4)
CSAPGQGLLTNEKLFF

SEQ ID NO: 751973 - protein, 14 aa, Homo sapiens
  CDR3 for alpha chain variable domain of TCR clone 375987 (TRAV13-1, TRAJ35)
CAASKGGFGNVLHC

SEQ ID NO: 751974 - protein, 15 aa, Homo sapiens
  CDR3 for beta chain variable domain of TCR clone 375987 (TRBV9, TRBJ1-6)
CASSVAGTGDSTLHF

SEQ ID NO: 751975 - protein, 10 aa, Homo sapiens
  CDR3 for alpha chain variable domain of TCR clone 375988 (TRAV30, TRAJ48)
CGIGNEKLTF

SEQ ID NO: 751976 - protein, 14 aa, Homo sapiens
  CDR3 for beta chain variable domain of TCR clone 375988 (TRBV7-6, TRBJ2-3)
CASSLGTVTDTQYS

SEQ ID NO: 751977 - protein, 14 aa, Homo sapiens
  CDR3 for alpha chain variable domain of TCR clone 375989 (TRAV2, TRAJ9)
CAVEDRSGGFKTIF

SEQ ID NO: 751978 - protein, 14 aa, Homo sapiens
  CDR3 for beta chain variable domain of TCR clone 375989 (TRBV25-1, TRBJ1-2)
CASSEATGPYGYTF

SEQ ID NO: 751979 - protein, 14 aa, Homo sapiens
  CDR3 for alpha chain variable domain of TCR clone 375990 (TRAV12-2, TRAJ17)
CAALFKAAGNKLTF

SEQ ID NO: 751980 - protein, 15 aa, Homo sapiens
  CDR3 for beta chain variable domain of TCR clone 375990 (TRBV18, TRBJ2-3)
CASSPLARETDTQYF

SEQ ID NO: 751981 - protein, 16 aa, Homo sapiens
  CDR3 for alpha chain variable domain of TCR clone 375991 (TRAV30, TRAJ24)
CGSEIVDADSWGKFQF

SEQ ID NO: 751982 - protein, 15 aa, Homo sapiens
  CDR3 for beta chain variable domain of TCR clone 375991 (TRBV27, TRBJ2-1)
CASGNGGGSSNEQFF

SEQ ID NO: 751983 - protein, 12 aa, Homo sapiens
  CDR3 for alpha chain variable domain of TCR clone 375992 (TRAV27, TRAJ35)
CAGADFGNVPHC

SEQ ID NO: 751984 - protein, 15 aa, Homo sapiens
  CDR3 for beta chain variable domain of TCR clone 375992 (TRBV19, TRBJ2-1)
CASSISSGGYNEQFF

SEQ ID NO: 751985 - protein, 12 aa, Homo sapiens
  CDR3 for alpha chain variable domain of TCR clone 375993 (TRAV12-2, TRAJ45)
CAVTGGADGLTF

SEQ ID NO: 751986 - protein, 16 aa, Homo sapiens
  CDR3 for beta chain variable domain of TCR clone 375993 (TRBV29-1, TRBJ2-7)
CSVEDAEDGTAYEQYF

SEQ ID NO: 751987 - protein, 18 aa, Homo sapiens
  CDR3 for alpha chain variable domain of TCR clone 375994 (TRAV36/DV7, )
CALTDIQNLDPAVYQLRD

SEQ ID NO: 751988 - protein, 12 aa, Homo sapiens
  CDR3 for beta chain variable domain of TCR clone 375994 (TRBV2, TRBJ2-1)
CAYGPPGNEQFF

SEQ ID NO: 751989 - protein, 15 aa, Homo sapiens
  CDR3 for alpha chain variable domain of TCR clone 375995 (TRAV2, TRAJ9)
CAVEDRGTGGFKTIF

SEQ ID NO: 751990 - protein, 14 aa, Homo sapiens
  CDR3 for beta chain variable domain of TCR clone 375995 (TRBV28, TRBJ2-1)
CASSSVPSYNEQFF

SEQ ID NO: 751991 - protein, 15 aa, Homo sapiens
  CDR3 for alpha chain variable domain of TCR clone 375996 (TRAV8-3, TRAJ45)
CASSYSGGGAAGLTF

SEQ ID NO: 751992 - protein, 12 aa, Homo sapiens
  CDR3 for beta chain variable domain of TCR clone 375996 (TRBV12-4, TRBJ2-7)
CASSLGGYEQYL

SEQ ID NO: 751993 - protein, 11 aa, Homo sapiens
  CDR3 for alpha chain variable domain of TCR clone 375997 (TRAV8-3, TRAJ37)
PLPSNTGQLIF

SEQ ID NO: 751994 - protein, 14 aa, Homo sapiens
  CDR3 for beta chain variable domain of TCR clone 375997 (TRBV10-1, TRBJ2-5)
CASSESQGAKTQYF

SEQ ID NO: 751995 - protein, 17 aa, Homo sapiens
  CDR3 for alpha chain variable domain of TCR clone 375998 (TRAV3, TRAJ6)
CAVRDGPRAGGSYIPTF

SEQ ID NO: 751996 - protein, 14 aa, Homo sapiens
  CDR3 for beta chain variable domain of TCR clone 375998 (TRBV7-2, TRBJ2-7)
CASSPKPSFYEQYY

SEQ ID NO: 751997 - protein, 16 aa, Homo sapiens
  CDR3 for alpha chain variable domain of TCR clone 375999 (TRAV30, TRAJ24)
CGTEIVDADSWGKFQF

SEQ ID NO: 751998 - protein, 14 aa, Homo sapiens
  CDR3 for beta chain variable domain of TCR clone 375999 (TRBV12-5, TRBJ2-5)
CVSGSRTHQEKQYF

SEQ ID NO: 751999 - protein, 14 aa, Homo sapiens
  CDR3 for alpha chain variable domain of TCR clone 376000 (TRAV13-1, TRAJ35)
CAASKGGFGNVLHF

SEQ ID NO: 752000 - protein, 15 aa, Homo sapiens
  CDR3 for beta chain variable domain of TCR clone 376000 (TRBV28, TRBJ2-1)
CASGGLAEVDNEQFF

SEQ ID NO: 752001 - protein, 13 aa, Homo sapiens
  CDR3 for alpha chain variable domain of TCR clone 376001 (TRAV21, TRAJ27)
CVARPGHAGKSNF

SEQ ID NO: 752002 - protein, 14 aa, Homo sapiens
  CDR3 for beta chain variable domain of TCR clone 376001 (TRBV7-6, TRBJ2-3)
CASSLGTVTDTQYF

SEQ ID NO: 752003 - protein, 12 aa, Homo sapiens
  CDR3 for alpha chain variable domain of TCR clone 376002 (TRAV12-1, TRAJ40)
CVVYSGTYKYIF

SEQ ID NO: 752004 - protein, 16 aa, Homo sapiens
  CDR3 for beta chain variable domain of TCR clone 376002 (TRBV11-2, TRBJ2-5)
CASSGQGYSPQETQYF

SEQ ID NO: 752005 - protein, 13 aa, Homo sapiens
  CDR3 for alpha chain variable domain of TCR clone 376003 (TRAV17, TRAJ29)
CATDAFRKHTSCL

SEQ ID NO: 752006 - protein, 13 aa, Homo sapiens
  CDR3 for beta chain variable domain of TCR clone 376003 (TRBV5-7, TRBJ2-6)
CASTSSGANVLTL

SEQ ID NO: 752007 - protein, 11 aa, Homo sapiens
  CDR3 for alpha chain variable domain of TCR clone 376004 (TRAV23/DV6, TRAJ58)
CAARLLRGETS

SEQ ID NO: 752008 - protein, 13 aa, Homo sapiens
  CDR3 for beta chain variable domain of TCR clone 376004 (TRBV3-1, TRBJ1-1)
CASSPGVITEAFF

SEQ ID NO: 752009 - protein, 15 aa, Homo sapiens
  CDR3 for alpha chain variable domain of TCR clone 376005 (TRAV13-1, TRAJ5)
CAASPRGHGQESTYF

SEQ ID NO: 752010 - protein, 15 aa, Homo sapiens
  CDR3 for beta chain variable domain of TCR clone 376005 (TRBV11-2, TRBJ2-2)
CASSLDTGNTGELFF

SEQ ID NO: 752011 - protein, 17 aa, Homo sapiens
  CDR3 for alpha chain variable domain of TCR clone 376006 (TRAV36/DV7, TRAJ52)
CAVAQRAGGTSYGKLTF

SEQ ID NO: 752012 - protein, 14 aa, Homo sapiens
  CDR3 for beta chain variable domain of TCR clone 376006 (TRBV5-4, TRBJ1-1)
CASSLDSRRDEAFF

SEQ ID NO: 752013 - protein, 17 aa, Homo sapiens
  CDR3 for alpha chain variable domain of TCR clone 376007 (TRAV8-6, TRAJ58)
CAVSSWVGETSGSRWTF

SEQ ID NO: 752014 - protein, 17 aa, Homo sapiens
  CDR3 for beta chain variable domain of TCR clone 376007 (TRBV15, TRBJ1-4)
CATSRYGTGDPNEKLFF

SEQ ID NO: 752015 - protein, 14 aa, Homo sapiens
  CDR3 for alpha chain variable domain of TCR clone 376008 (TRAV12-2, TRAJ52)
CAVPGGTSYGKLTF

SEQ ID NO: 752016 - protein, 15 aa, Homo sapiens
  CDR3 for beta chain variable domain of TCR clone 376008 (TRBV28, TRBJ2-1)
CASSIIAGGRSEQFF

SEQ ID NO: 752017 - protein, 11 aa, Homo sapiens
  CDR3 for alpha chain variable domain of TCR clone 376009 (TRAV12-2, TRAJ29)
CVVTLRSPLVF

SEQ ID NO: 752018 - protein, 16 aa, Homo sapiens
  CDR3 for beta chain variable domain of TCR clone 376009 (TRBV19, TRBJ1-5)
CASSIDRGGPRQPQHF

SEQ ID NO: 752019 - protein, 16 aa, Homo sapiens
  CDR3 for alpha chain variable domain of TCR clone 376010 (TRAV3, TRAJ37)
CAVRPHGSGNTGKLIF

SEQ ID NO: 752020 - protein, 16 aa, Homo sapiens
  CDR3 for beta chain variable domain of TCR clone 376010 (TRBV20-1, TRBJ1-4)
CSALGQGLLTNEKLFF

SEQ ID NO: 752021 - protein, 11 aa, Homo sapiens
  CDR3 for alpha chain variable domain of TCR clone 376011 (TRAV12-1, TRAJ8)
CVVTGFQKLVF

SEQ ID NO: 752022 - protein, 14 aa, Homo sapiens
  CDR3 for beta chain variable domain of TCR clone 376011 (TRBV19, TRBJ2-1)
CASGKSTQYNEQVF

SEQ ID NO: 752023 - protein, 16 aa, Homo sapiens
  CDR3 for alpha chain variable domain of TCR clone 376012 (TRAV8-4, TRAJ5)
CAVSPLADTGRGALTF

SEQ ID NO: 752024 - protein, 14 aa, Homo sapiens
  CDR3 for beta chain variable domain of TCR clone 376012 (TRBV19, TRBJ1-6)
CASSTDGWNSPLHF

SEQ ID NO: 752025 - protein, 13 aa, Homo sapiens
  CDR3 for alpha chain variable domain of TCR clone 376013 (TRAV12-2, TRAJ10)
FAVPTGGGNKLTF

SEQ ID NO: 752026 - protein, 11 aa, Homo sapiens
  CDR3 for beta chain variable domain of TCR clone 376013 (TRBV6-1, TRBJ2-1)
CASISSNEQFF

SEQ ID NO: 752027 - protein, 13 aa, Homo sapiens
  CDR3 for alpha chain variable domain of TCR clone 376014 (TRAV1-1, TRAJ13)
CAVNTGDYQKVTF

SEQ ID NO: 752028 - protein, 12 aa, Homo sapiens
  CDR3 for beta chain variable domain of TCR clone 376014 (TRBV28, TRBJ2-1)
CASSVQINEQFF

SEQ ID NO: 752029 - protein, 14 aa, Homo sapiens
  CDR3 for alpha chain variable domain of TCR clone 376015 (TRAV1-2, TRAJ16)
CAVNRFSDGQKLLF

SEQ ID NO: 752030 - protein, 16 aa, Homo sapiens
  CDR3 for beta chain variable domain of TCR clone 376015 (TRBV20-1, TRBJ1-2)
CSASMGQGVAIYGYTF

SEQ ID NO: 752031 - protein, 14 aa, Homo sapiens
  CDR3 for alpha chain variable domain of TCR clone 376016 (TRAV1-2, TRAJ8)
CAVREDTGFQKLVF

SEQ ID NO: 752032 - protein, 12 aa, Homo sapiens
  CDR3 for beta chain variable domain of TCR clone 376016 (TRBV14, TRBJ2-5)
CAISQLKETQYV

SEQ ID NO: 752033 - protein, 14 aa, Homo sapiens
  CDR3 for alpha chain variable domain of TCR clone 376017 (TRAV29/DV5, TRAJ36)
CAARRKAGANNLFF

SEQ ID NO: 752034 - protein, 15 aa, Homo sapiens
  CDR3 for beta chain variable domain of TCR clone 376017 (TRBV2, TRBJ2-1)
CASSELAGGYNEQFF

SEQ ID NO: 752035 - protein, 16 aa, Homo sapiens
  CDR3 for alpha chain variable domain of TCR clone 376018 (TRAV2, TRAJ10)
CCVGSTVTGGGNKLTF

SEQ ID NO: 752036 - protein, 16 aa, Homo sapiens
  CDR3 for beta chain variable domain of TCR clone 376018 (TRBV18, TRBJ1-5)
CASSPSTGNSNQPQHF

SEQ ID NO: 752037 - protein, 14 aa, Homo sapiens
  CDR3 for alpha chain variable domain of TCR clone 376019 (TRAV2, TRAJ37)
CAVDFTRNTGKLIF

SEQ ID NO: 752038 - protein, 12 aa, Homo sapiens
  CDR3 for beta chain variable domain of TCR clone 376019 (TRBV29-1, TRBJ2-3)
CSVTGGADTQYF

SEQ ID NO: 752039 - protein, 16 aa, Homo sapiens
  CDR3 for alpha chain variable domain of TCR clone 376020 (TRAV3, TRAJ37)
CAVRGKGSGNTGKLIF

SEQ ID NO: 752040 - protein, 12 aa, Homo sapiens
  CDR3 for beta chain variable domain of TCR clone 376020 (TRBV6-5, TRBJ2-7)
CASSDRQNEQYF

SEQ ID NO: 752041 - protein, 14 aa, Homo sapiens
  CDR3 for alpha chain variable domain of TCR clone 376021 (TRAV2, TRAJ37)
CAVDFTSNTGKLIF

SEQ ID NO: 752042 - protein, 13 aa, Homo sapiens
  CDR3 for beta chain variable domain of TCR clone 376021 (TRBV7-9, TRBJ2-5)
CASLSPGQETQYF

SEQ ID NO: 752043 - protein, 12 aa, Homo sapiens
  CDR3 for alpha chain variable domain of TCR clone 376022 (TRAV12-3, TRAJ41)
CAMSYSGYALNF

SEQ ID NO: 752044 - protein, 18 aa, Homo sapiens
  CDR3 for beta chain variable domain of TCR clone 376022 (TRBV7-3, TRBJ2-3)
CASSLGGASRGAPNTQYF

SEQ ID NO: 752045 - protein, 12 aa, Homo sapiens
  CDR3 for alpha chain variable domain of TCR clone 376023 (TRAV13-1, TRAJ20)
CAASMGDYKLSF

SEQ ID NO: 752046 - protein, 14 aa, Homo sapiens
  CDR3 for beta chain variable domain of TCR clone 376023 (TRBV20-1, TRBJ2-5)
FSASDSGSGETQYF

SEQ ID NO: 752047 - protein, 16 aa, Homo sapiens
  CDR3 for alpha chain variable domain of TCR clone 376024 (TRAV12-2, TRAJ10)
CAVNRVLTGGGNQLTF

SEQ ID NO: 752048 - protein, 12 aa, Homo sapiens
  CDR3 for beta chain variable domain of TCR clone 376024 (TRBV28, TRBJ2-7)
CASSFSSYEQYF

SEQ ID NO: 752049 - protein, 13 aa, Homo sapiens
  CDR3 for alpha chain variable domain of TCR clone 376025 (TRAV29/DV5, TRAJ31)
CAASRNNNSRLMF

SEQ ID NO: 752050 - protein, 14 aa, Homo sapiens
  CDR3 for beta chain variable domain of TCR clone 376025 (TRBV7-2, TRBJ2-7)
CASSPKTSFYEQYF

SEQ ID NO: 752051 - protein, 11 aa, Homo sapiens
  CDR3 for alpha chain variable domain of TCR clone 376026 (TRAV12-2, TRAJ23)
CARGRGGKLIF

SEQ ID NO: 752052 - protein, 13 aa, Homo sapiens
  CDR3 for beta chain variable domain of TCR clone 376026 (TRBV2, TRBJ2-5)
CASSALRGETQYF

SEQ ID NO: 752053 - protein, 14 aa, Homo sapiens
  CDR3 for alpha chain variable domain of TCR clone 376027 (TRAV2, TRAJ37)
CAVYFTSNTGKLIF

SEQ ID NO: 752054 - protein, 14 aa, Homo sapiens
  CDR3 for beta chain variable domain of TCR clone 376027 (TRBV12-4, TRBJ1-1)
CASSLGTGGTEAFF

SEQ ID NO: 752055 - protein, 15 aa, Homo sapiens
  CDR3 for alpha chain variable domain of TCR clone 376028 (TRAV13-1, TRAJ32)
CAASIYGGATNKLIF

SEQ ID NO: 752056 - protein, 13 aa, Homo sapiens
  CDR3 for beta chain variable domain of TCR clone 376028 (TRBV7-6, TRBJ1-2)
CASSLVADYGYTF

SEQ ID NO: 752057 - protein, 15 aa, Homo sapiens
  CDR3 for alpha chain variable domain of TCR clone 376029 (TRAV8-3, TRAJ45)
CASSYSGGGADVLTF

SEQ ID NO: 752058 - protein, 12 aa, Homo sapiens
  CDR3 for beta chain variable domain of TCR clone 376029 (TRBV12-4, TRBJ2-7)
CASSLGGYEQYF

SEQ ID NO: 752059 - protein, 17 aa, Homo sapiens
  CDR3 for alpha chain variable domain of TCR clone 376030 (TRAV3, TRAJ6)
CAVRDGTRAGGSYIPTF

SEQ ID NO: 752060 - protein, 15 aa, Homo sapiens
  CDR3 for beta chain variable domain of TCR clone 376030 (TRBV9, TRBJ1-6)
CASSVAGTGDSPLHF

SEQ ID NO: 752061 - protein, 17 aa, Homo sapiens
  CDR3 for alpha chain variable domain of TCR clone 376031 (TRAV17, TRAJ28)
CATDPRRGGGGSYQLTF

SEQ ID NO: 752062 - protein, 16 aa, Homo sapiens
  CDR3 for beta chain variable domain of TCR clone 376031 (TRBV25-1, TRBJ1-1)
CASSGDRDRGRIEAFF

SEQ ID NO: 752063 - protein, 12 aa, Homo sapiens
  CDR3 for alpha chain variable domain of TCR clone 376032 (TRAV13-1, TRAJ21)
CAAKEGFNKFYF

SEQ ID NO: 752064 - protein, 14 aa, Homo sapiens
  CDR3 for beta chain variable domain of TCR clone 376032 (TRBV5-1, TRBJ2-3)
CASSLERDLGPQYF

SEQ ID NO: 752065 - protein, 14 aa, Homo sapiens
  CDR3 for alpha chain variable domain of TCR clone 376033 (TRAV12-1, TRAJ38)
CGELKAGNNRKLIW

SEQ ID NO: 752066 - protein, 14 aa, Homo sapiens
  CDR3 for beta chain variable domain of TCR clone 376033 (TRBV5-1, TRBJ2-1)
CASSRGESLYEQFF

SEQ ID NO: 752067 - protein, 13 aa, Homo sapiens
  CDR3 for alpha chain variable domain of TCR clone 376034 (TRAV8-6, TRAJ49)
CAGITNTGNQFYF

SEQ ID NO: 752068 - protein, 13 aa, Homo sapiens
  CDR3 for beta chain variable domain of TCR clone 376034 (TRBV4-1, TRBJ2-4)
CASSQVGIDIQYF

SEQ ID NO: 752069 - protein, 14 aa, Homo sapiens
  CDR3 for alpha chain variable domain of TCR clone 376035 (TRAV8-6, TRAJ13)
CAGGSSGGYQKVTF

SEQ ID NO: 752070 - protein, 14 aa, Homo sapiens
  CDR3 for beta chain variable domain of TCR clone 376035 (TRBV25-1, TRBJ1-1)
CASTHLGGNTEAFF

SEQ ID NO: 752071 - protein, 15 aa, Homo sapiens
  CDR3 for alpha chain variable domain of TCR clone 376036 (TRAV3, TRAJ5)
CAVRDLDAGRRALTF

SEQ ID NO: 752072 - protein, 15 aa, Homo sapiens
  CDR3 for beta chain variable domain of TCR clone 376036 (TRBV28, TRBJ2-5)
CASSPPWSYQETQYF

SEQ ID NO: 752073 - protein, 12 aa, Homo sapiens
  CDR3 for alpha chain variable domain of TCR clone 376037 (TRAV13-1, TRAJ42)
AVLRGSQGNLIF

SEQ ID NO: 752074 - protein, 13 aa, Homo sapiens
  CDR3 for beta chain variable domain of TCR clone 376037 (TRBV2, TRBJ1-4)
CASSELGVEKLFF

SEQ ID NO: 752075 - protein, 18 aa, Homo sapiens
  CDR3 for alpha chain variable domain of TCR clone 376038 (TRAV13-1, TRAJ52)
CAAKNPNAGGTRYGKMTF

SEQ ID NO: 752076 - protein, 15 aa, Homo sapiens
  CDR3 for beta chain variable domain of TCR clone 376038 (TRBV6-1, TRBJ2-3)
CASSERGGITDTQYF

SEQ ID NO: 752077 - protein, 12 aa, Homo sapiens
  CDR3 for alpha chain variable domain of TCR clone 376039 (TRAV13-1, TRAJ27)
CAAHTNAGKSTF

SEQ ID NO: 752078 - protein, 18 aa, Homo sapiens
  CDR3 for beta chain variable domain of TCR clone 376039 (TRBV11-2, TRBJ2-3)
CASSLGGASRGAPNTQYF

SEQ ID NO: 752079 - protein, 14 aa, Homo sapiens
  CDR3 for alpha chain variable domain of TCR clone 376040 (TRAV8-3, TRAJ22)
CAVVVSGSARQLTF

SEQ ID NO: 752080 - protein, 12 aa, Homo sapiens
  CDR3 for beta chain variable domain of TCR clone 376040 (TRBV4-2, TRBJ2-5)
CQQQGGWQTQYF

SEQ ID NO: 752081 - protein, 12 aa, Homo sapiens
  CDR3 for alpha chain variable domain of TCR clone 376041 (TRAV9-2, TRAJ36)
CALKKGANNLSF

SEQ ID NO: 752082 - protein, 13 aa, Homo sapiens
  CDR3 for beta chain variable domain of TCR clone 376041 (TRBV27, TRBJ1-1)
CASSLSIGAEAFF

SEQ ID NO: 752083 - protein, 16 aa, Homo sapiens
  CDR3 for alpha chain variable domain of TCR clone 376042 (TRAV30, TRAJ57)
CGTGWAPQGGSEKLVF

SEQ ID NO: 752084 - protein, 14 aa, Homo sapiens
  CDR3 for beta chain variable domain of TCR clone 376042 (TRBV18, TRBJ1-1)
CASSPGFQGVEAFL

SEQ ID NO: 752085 - protein, 13 aa, Homo sapiens
  CDR3 for alpha chain variable domain of TCR clone 376043 (TRAV21, TRAJ27)
CAALNTNAGKSTF

SEQ ID NO: 752086 - protein, 14 aa, Homo sapiens
  CDR3 for beta chain variable domain of TCR clone 376043 (TRBV27, TRBJ1-1)
CASGLLSGLSEAFC

SEQ ID NO: 752087 - protein, 11 aa, Homo sapiens
  CDR3 for alpha chain variable domain of TCR clone 376044 (TRAV12-3, TRAJ43)
CAMSVSNDMRF

SEQ ID NO: 752088 - protein, 13 aa, Homo sapiens
  CDR3 for beta chain variable domain of TCR clone 376044 (TRBV12-4, TRBJ1-5)
CASSPDRAQPQHF

SEQ ID NO: 752089 - protein, 15 aa, Homo sapiens
  CDR3 for alpha chain variable domain of TCR clone 376045 (TRAV27, TRAJ38)
CAARRNAGNNRKLIW

SEQ ID NO: 752090 - protein, 13 aa, Homo sapiens
  CDR3 for beta chain variable domain of TCR clone 376045 (TRBV25-1, TRBJ1-2)
CASSGAGASGYTF

SEQ ID NO: 752091 - protein, 13 aa, Homo sapiens
  CDR3 for alpha chain variable domain of TCR clone 376046 (TRAV12-2, TRAJ50)
CAVIVTSYDKVIF

SEQ ID NO: 752092 - protein, 16 aa, Homo sapiens
  CDR3 for beta chain variable domain of TCR clone 376046 (TRBV13, TRBJ2-2)
CASSPRTGEHTGELFF

SEQ ID NO: 752093 - protein, 19 aa, Homo sapiens
  CDR3 for alpha chain variable domain of TCR clone 376047 (TRAV1-2, TRAJ26)
CLLPLCCERPYNYGQNFVF

SEQ ID NO: 752094 - protein, 12 aa, Homo sapiens
  CDR3 for beta chain variable domain of TCR clone 376047 (TRBV7-9, TRBJ2-7)
CATRTDAYEQYF

SEQ ID NO: 752095 - protein, 12 aa, Homo sapiens
  CDR3 for alpha chain variable domain of TCR clone 376048 (TRAV12-3, TRAJ17)
CAMTLTGNKLTF

SEQ ID NO: 752096 - protein, 14 aa, Homo sapiens
  CDR3 for beta chain variable domain of TCR clone 376048 (TRBV27, TRBJ2-2)
CASSLGAATGELFF

SEQ ID NO: 752097 - protein, 15 aa, Homo sapiens
  CDR3 for alpha chain variable domain of TCR clone 376049 (TRAV38-1, TRAJ28)
CAFIRSGAGSYQLTF

SEQ ID NO: 752098 - protein, 16 aa, Homo sapiens
  CDR3 for beta chain variable domain of TCR clone 376049 (TRBV7-3, TRBJ2-2)
CASSLKRGTLSGELFF

SEQ ID NO: 752099 - protein, 14 aa, Homo sapiens
  CDR3 for alpha chain variable domain of TCR clone 376050 (TRAV26-1, TRAJ38)
CIADNAGNNRKRIW

SEQ ID NO: 752100 - protein, 15 aa, Homo sapiens
  CDR3 for beta chain variable domain of TCR clone 376050 (TRBV27, TRBJ2-7)
CASSTAGTGSYEQYF

SEQ ID NO: 752101 - protein, 13 aa, Homo sapiens
  CDR3 for alpha chain variable domain of TCR clone 376051 (TRAV3, TRAJ27)
CAVRPPGAGKSTF

SEQ ID NO: 752102 - protein, 12 aa, Homo sapiens
  CDR3 for beta chain variable domain of TCR clone 376051 (TRBV7-9, TRBJ2-7)
CATRTDAYEQYF

SEQ ID NO: 752103 - protein, 12 aa, Homo sapiens
  CDR3 for alpha chain variable domain of TCR clone 376052 (TRAV17, TRAJ4)
CATDGGYNKLIS

SEQ ID NO: 752104 - protein, 13 aa, Homo sapiens
  CDR3 for beta chain variable domain of TCR clone 376052 (TRBV29-1, TRBJ2-2)
CSTTGVNTGELFF

SEQ ID NO: 752105 - protein, 13 aa, Homo sapiens
  CDR3 for alpha chain variable domain of TCR clone 376053 (TRAV26-1, TRAJ34)
CIVRVGNTDKLIF

SEQ ID NO: 752106 - protein, 15 aa, Homo sapiens
  CDR3 for beta chain variable domain of TCR clone 376053 (TRBV7-3, TRBJ1-2)
CASSPQGVAPGGYTF

SEQ ID NO: 752107 - protein, 14 aa, Homo sapiens
  CDR3 for alpha chain variable domain of TCR clone 376054 (TRAV1-2, TRAJ8)
CAVREDTGFQQLVF

SEQ ID NO: 752108 - protein, 15 aa, Homo sapiens
  CDR3 for beta chain variable domain of TCR clone 376054 (TRBV7-9, TRBJ1-6)
CASSSPGRGNSPLHF

SEQ ID NO: 752109 - protein, 16 aa, Homo sapiens
  CDR3 for alpha chain variable domain of TCR clone 376055 (TRAV12-3, TRAJ53)
CAMSPGSGGSNDKLTF

SEQ ID NO: 752110 - protein, 12 aa, Homo sapiens
  CDR3 for beta chain variable domain of TCR clone 376055 (TRBV7-8, TRBJ2-7)
CASSLGDREQYF

SEQ ID NO: 752111 - protein, 15 aa, Homo sapiens
  CDR3 for alpha chain variable domain of TCR clone 376056 (TRAV12-3, TRAJ11)
CAMSEENSGYSTPTF

SEQ ID NO: 752112 - protein, 16 aa, Homo sapiens
  CDR3 for beta chain variable domain of TCR clone 376056 (TRBV7-9, TRBJ2-5)
CASRLEIGTRKETQYF

SEQ ID NO: 752113 - protein, 15 aa, Homo sapiens
  CDR3 for alpha chain variable domain of TCR clone 376057 (TRAV8-4, TRAJ47)
CAVGDPAEYGNKLVF

SEQ ID NO: 752114 - protein, 15 aa, Homo sapiens
  CDR3 for beta chain variable domain of TCR clone 376057 (TRBV11-2, TRBJ2-1)
CASSLGPDSYNEQFF

SEQ ID NO: 752115 - protein, 15 aa, Homo sapiens
  CDR3 for alpha chain variable domain of TCR clone 376058 (TRAV21, TRAJ53)
CATLNSGGSNYKLTF

SEQ ID NO: 752116 - protein, 16 aa, Homo sapiens
  CDR3 for beta chain variable domain of TCR clone 376058 (TRBV2, TRBJ2-5)
CASSVTQGVGEETQYF

SEQ ID NO: 752117 - protein, 15 aa, Homo sapiens
  CDR3 for alpha chain variable domain of TCR clone 376059 (TRAV12-1, TRAJ44)
CVVFVNTGPASKLTF

SEQ ID NO: 752118 - protein, 17 aa, Homo sapiens
  CDR3 for beta chain variable domain of TCR clone 376059 (TRBV7-8, TRBJ2-6)
CASSAGTGGAGANVLTL

SEQ ID NO: 752119 - protein, 11 aa, Homo sapiens
  CDR3 for alpha chain variable domain of TCR clone 376060 (TRAV17, TRAJ9)
CATTGGIKTIF

SEQ ID NO: 752120 - protein, 14 aa, Homo sapiens
  CDR3 for beta chain variable domain of TCR clone 376060 (TRBV7-9, TRBJ2-2)
RASSGLADTGELFF

SEQ ID NO: 752121 - protein, 16 aa, Homo sapiens
  CDR3 for alpha chain variable domain of TCR clone 376061 (TRAV35, TRAJ28)
CAGQWYSGAGSYQLTF

SEQ ID NO: 752122 - protein, 13 aa, Homo sapiens
  CDR3 for beta chain variable domain of TCR clone 376061 (TRBV19, TRBJ1-2)
CASSQGQVYGYTF

SEQ ID NO: 752123 - protein, 15 aa, Homo sapiens
  CDR3 for alpha chain variable domain of TCR clone 376062 (TRAV1-2, TRAJ26)
CAVRDLITMVRILSL

SEQ ID NO: 752124 - protein, 16 aa, Homo sapiens
  CDR3 for beta chain variable domain of TCR clone 376062 (TRBV6-3, TRBJ2-2)
CASSSPDRGDTGELFF

SEQ ID NO: 752125 - protein, 12 aa, Homo sapiens
  CDR3 for alpha chain variable domain of TCR clone 376063 (TRAV13-1, TRAJ11)
CAGTSGYSTLTF

SEQ ID NO: 752126 - protein, 13 aa, Homo sapiens
  CDR3 for beta chain variable domain of TCR clone 376063 (TRBV12-4, TRBJ2-1)
CASSLSPSNEQFF

SEQ ID NO: 752127 - protein, 14 aa, Homo sapiens
  CDR3 for alpha chain variable domain of TCR clone 376064 (TRAV2, TRAJ37)
CAVDFTSTTGKLIF

SEQ ID NO: 752128 - protein, 15 aa, Homo sapiens
  CDR3 for beta chain variable domain of TCR clone 376064 (TRBV20-1, TRBJ1-1)
CSASRGVTGNTEAFF

SEQ ID NO: 752129 - protein, 14 aa, Homo sapiens
  CDR3 for alpha chain variable domain of TCR clone 376065 (TRAV23/DV6, TRAJ6)
CAPSRSGGSYIPTF

SEQ ID NO: 752130 - protein, 17 aa, Homo sapiens
  CDR3 for beta chain variable domain of TCR clone 376065 (TRBV20-1, TRBJ2-1)
CSASASGLAGSYNEQFF

SEQ ID NO: 752131 - protein, 13 aa, Homo sapiens
  CDR3 for alpha chain variable domain of TCR clone 376066 (TRAV17, TRAJ9)
CATDYTGGFKTTF

SEQ ID NO: 752132 - protein, 13 aa, Homo sapiens
  CDR3 for beta chain variable domain of TCR clone 376066 (TRBV12-5, TRBJ2-3)
CASQNRGTDTQYF

SEQ ID NO: 752133 - protein, 13 aa, Homo sapiens
  CDR3 for alpha chain variable domain of TCR clone 376067 (TRAV1-2, TRAJ9)
CAALNTGGFKTIF

SEQ ID NO: 752134 - protein, 13 aa, Homo sapiens
  CDR3 for beta chain variable domain of TCR clone 376067 (TRBV19, TRBJ1-2)
CASTVPEHHTYTF

SEQ ID NO: 752135 - protein, 15 aa, Homo sapiens
  CDR3 for alpha chain variable domain of TCR clone 376068 (TRAV13-1, TRAJ52)
CAASSPSTSYGKLTF

SEQ ID NO: 752136 - protein, 15 aa, Homo sapiens
  CDR3 for beta chain variable domain of TCR clone 376068 (TRBV12-4, TRBJ2-5)
CASSPPTGLQETQYF

SEQ ID NO: 752137 - protein, 15 aa, Homo sapiens
  CDR3 for alpha chain variable domain of TCR clone 376069 (TRAV17, TRAJ22)
CATVAPSGSARQLTF

SEQ ID NO: 752138 - protein, 16 aa, Homo sapiens
  CDR3 for beta chain variable domain of TCR clone 376069 (TRBV10-3, TRBJ2-7)
WAISADFADRPYEQYF

SEQ ID NO: 752139 - protein, 14 aa, Homo sapiens
  CDR3 for alpha chain variable domain of TCR clone 376070 (TRAV13-2, TRAJ9)
CAENSFTGGFKTIF

SEQ ID NO: 752140 - protein, 15 aa, Homo sapiens
  CDR3 for beta chain variable domain of TCR clone 376070 (TRBV19, TRBJ2-1)
CASSILGEGRNEQFF

SEQ ID NO: 752141 - protein, 10 aa, Homo sapiens
  CDR3 for alpha chain variable domain of TCR clone 376071 (TRAV13-1, TRAJ30)
CAARDDKIIF

SEQ ID NO: 752142 - protein, 14 aa, Homo sapiens
  CDR3 for beta chain variable domain of TCR clone 376071 (TRBV2, TRBJ2-1)
CASRTGSSYNEQFF

SEQ ID NO: 752143 - protein, 14 aa, Homo sapiens
  CDR3 for alpha chain variable domain of TCR clone 376072 (TRAV16, TRAJ33)
CALSAMDSNYQLIW

SEQ ID NO: 752144 - protein, 15 aa, Homo sapiens
  CDR3 for beta chain variable domain of TCR clone 376072 (TRBV7-2, TRBJ2-2)
CASRRPGQNTGELFF

SEQ ID NO: 752145 - protein, 20 aa, Homo sapiens
  CDR3 for alpha chain variable domain of TCR clone 376073 (TRAV25, TRAJ21)
TATQTTDVGTYPLSFNKFYF

SEQ ID NO: 752146 - protein, 13 aa, Homo sapiens
  CDR3 for beta chain variable domain of TCR clone 376073 (TRBV7-9, TRBJ1-2)
CASSLKQNYGYTF

SEQ ID NO: 752147 - protein, 14 aa, Homo sapiens
  CDR3 for alpha chain variable domain of TCR clone 376074 (TRAV4, TRAJ17)
CLVGDMAAGNKLTL

SEQ ID NO: 752148 - protein, 13 aa, Homo sapiens
  CDR3 for beta chain variable domain of TCR clone 376074 (TRBV18, TRBJ2-7)
CASQSGGGYEQYF

SEQ ID NO: 752149 - protein, 10 aa, Homo sapiens
  CDR3 for alpha chain variable domain of TCR clone 376075 (TRAV30, TRAJ48)
CGIGNEKLTF

SEQ ID NO: 752150 - protein, 15 aa, Homo sapiens
  CDR3 for beta chain variable domain of TCR clone 376075 (TRBV28, TRBJ2-1)
CASRKTGTAYNEQFS

SEQ ID NO: 752151 - protein, 14 aa, Homo sapiens
  CDR3 for alpha chain variable domain of TCR clone 376076 (TRAV1-2, TRAJ8)
CAVREDTGFQKIVF

SEQ ID NO: 752152 - protein, 15 aa, Homo sapiens
  CDR3 for beta chain variable domain of TCR clone 376076 (TRBV5-5, TRBJ1-5)
CASSSTPGSNQPQHF

SEQ ID NO: 752153 - protein, 15 aa, Homo sapiens
  CDR3 for alpha chain variable domain of TCR clone 376077 (TRAV29/DV5, TRAJ31)
CRVLLCSKRNPRLMF

SEQ ID NO: 752154 - protein, 14 aa, Homo sapiens
  CDR3 for beta chain variable domain of TCR clone 376077 (TRBV7-8, TRBJ2-7)
CASSVGQGAYEQYF

SEQ ID NO: 752155 - protein, 12 aa, Homo sapiens
  CDR3 for alpha chain variable domain of TCR clone 376078 (TRAV12-3, TRAJ17)
CAMTLTANKLTF

SEQ ID NO: 752156 - protein, 16 aa, Homo sapiens
  CDR3 for beta chain variable domain of TCR clone 376078 (TRBV12-4, TRBJ2-5)
CASSFFVRGRQETQYF

SEQ ID NO: 752157 - protein, 14 aa, Homo sapiens
  CDR3 for alpha chain variable domain of TCR clone 376079 (TRAV3, TRAJ21)
CAVESQANFNKFYF

SEQ ID NO: 752158 - protein, 12 aa, Homo sapiens
  CDR3 for beta chain variable domain of TCR clone 376079 (TRBV6-3, TRBJ2-7)
CASNLTPYEQYF

SEQ ID NO: 752159 - protein, 15 aa, Homo sapiens
  CDR3 for alpha chain variable domain of TCR clone 376080 (TRAV8-4, TRAJ37)
CSVTYGSSNPGKLTF

SEQ ID NO: 752160 - protein, 13 aa, Homo sapiens
  CDR3 for beta chain variable domain of TCR clone 376080 (TRBV12-4, TRBJ2-5)
CASSLGGSRTQYF

SEQ ID NO: 752161 - protein, 15 aa, Homo sapiens
  CDR3 for alpha chain variable domain of TCR clone 376081 (TRAV2, TRAJ9)
CAVEDRGTGGFKTIF

SEQ ID NO: 752162 - protein, 13 aa, Homo sapiens
  CDR3 for beta chain variable domain of TCR clone 376081 (TRBV6-1, TRBJ1-1)
CAISRQGNTEAFF

SEQ ID NO: 752163 - protein, 16 aa, Homo sapiens
  CDR3 for alpha chain variable domain of TCR clone 376082 (TRAV3, TRAJ37)
CAVRPHGSGNPGKLIF

SEQ ID NO: 752164 - protein, 12 aa, Homo sapiens
  CDR3 for beta chain variable domain of TCR clone 376082 (TRBV14, TRBJ2-7)
CASSLYKDEQYF

SEQ ID NO: 752165 - protein, 15 aa, Homo sapiens
  CDR3 for alpha chain variable domain of TCR clone 376083 (TRAV2, TRAJ38)
CAVEDRIGNNRKLIW

SEQ ID NO: 752166 - protein, 13 aa, Homo sapiens
  CDR3 for beta chain variable domain of TCR clone 376083 (TRBV12-4, TRBJ1-5)
CASSPDRAQPQHF

SEQ ID NO: 752167 - protein, 16 aa, Homo sapiens
  CDR3 for alpha chain variable domain of TCR clone 376084 (TRAV16, TRAJ21)
CACGWATTSTNFTLDL

SEQ ID NO: 752168 - protein, 15 aa, Homo sapiens
  CDR3 for beta chain variable domain of TCR clone 376084 (TRBV19, TRBJ2-1)
CASSIHATSYNEQFF

SEQ ID NO: 752169 - protein, 15 aa, Homo sapiens
  CDR3 for alpha chain variable domain of TCR clone 376085 (TRAV21, TRAJ53)
CATLNSGGSNYKLTF

SEQ ID NO: 752170 - protein, 12 aa, Homo sapiens
  CDR3 for beta chain variable domain of TCR clone 376085 (TRBV2, TRBJ2-7)
CASSDPDYEQYF

SEQ ID NO: 752171 - protein, 16 aa, Homo sapiens
  CDR3 for alpha chain variable domain of TCR clone 376086 (TRAV23/DV6, TRAJ21)
CAASSWGGTTSTNFTL

SEQ ID NO: 752172 - protein, 11 aa, Homo sapiens
  CDR3 for beta chain variable domain of TCR clone 376086 (TRBV7-8, TRBJ2-7)
CASSLSLEQYF

SEQ ID NO: 752173 - protein, 16 aa, Homo sapiens
  CDR3 for alpha chain variable domain of TCR clone 376087 (TRAV21, TRAJ52)
CAVSDAGGTSYGKLTF

SEQ ID NO: 752174 - protein, 13 aa, Homo sapiens
  CDR3 for beta chain variable domain of TCR clone 376087 (TRBV7-3, TRBJ2-5)
CASSCRGSQAQYF

SEQ ID NO: 752175 - protein, 16 aa, Homo sapiens
  CDR3 for alpha chain variable domain of TCR clone 376088 (TRAV26-1, TRAJ28)
CIVRPYSGAGSYQLTF

SEQ ID NO: 752176 - protein, 18 aa, Homo sapiens
  CDR3 for beta chain variable domain of TCR clone 376088 (TRBV20-1, TRBJ2-2)
CSARDLTSGSMDTGELFV

SEQ ID NO: 752177 - protein, 13 aa, Homo sapiens
  CDR3 for alpha chain variable domain of TCR clone 376089 (TRAV26-1, TRAJ48)
CIVRVVGDEKLTF

SEQ ID NO: 752178 - protein, 15 aa, Homo sapiens
  CDR3 for beta chain variable domain of TCR clone 376089 (TRBV2, TRBJ2-2)
CASSRETVGTGELFF

SEQ ID NO: 752179 - protein, 13 aa, Homo sapiens
  CDR3 for alpha chain variable domain of TCR clone 376090 (TRAV26-1, TRAJ48)
CIVRVVGEEKLTF

SEQ ID NO: 752180 - protein, 19 aa, Homo sapiens
  CDR3 for beta chain variable domain of TCR clone 376090 (TRBV11-3, TRBJ2-2)
CASSTRPWAKTTNTGELFF

SEQ ID NO: 752181 - protein, 17 aa, Homo sapiens
  CDR3 for alpha chain variable domain of TCR clone 376091 (TRAV3, TRAJ42)
CAVRDRDYGGSQGTLIF

SEQ ID NO: 752182 - protein, 13 aa, Homo sapiens
  CDR3 for beta chain variable domain of TCR clone 376091 (TRBV7-9, TRBJ1-2)
CASSLKQNYGYTF

SEQ ID NO: 752183 - protein, 21 aa, Homo sapiens
  CDR3 for alpha chain variable domain of TCR clone 376092 (TRAV30, TRAJ43)
GLPAQLLRNPLPIIELNDMRF

SEQ ID NO: 752184 - protein, 14 aa, Homo sapiens
  CDR3 for beta chain variable domain of TCR clone 376092 (TRBV27, TRBJ2-1)
CASRHLGGCKEQFF

SEQ ID NO: 752185 - protein, 14 aa, Homo sapiens
  CDR3 for alpha chain variable domain of TCR clone 376093 (TRAV30, TRAJ33)
CGTVAPRSNYPLIW

SEQ ID NO: 752186 - protein, 14 aa, Homo sapiens
  CDR3 for beta chain variable domain of TCR clone 376093 (TRBV19, TRBJ2-1)
CASPTFVLSSEQFF

SEQ ID NO: 752187 - protein, 14 aa, Homo sapiens
  CDR3 for alpha chain variable domain of TCR clone 376094 (TRAV9-2, TRAJ39)
CALNIYNAGNMLTF

SEQ ID NO: 752188 - protein, 19 aa, Homo sapiens
  CDR3 for beta chain variable domain of TCR clone 376094 (TRBV28, TRBJ2-7)
CASSYSGTSRLGWVYEQYF

SEQ ID NO: 752189 - protein, 10 aa, Homo sapiens
  CDR3 for alpha chain variable domain of TCR clone 376095 (TRAV12-3, TRAJ34)
CAMSADKRIF

SEQ ID NO: 752190 - protein, 15 aa, Homo sapiens
  CDR3 for beta chain variable domain of TCR clone 376095 (TRBV27, TRBJ2-1)
CASSNGGGSSNEQFF

SEQ ID NO: 752191 - protein, 14 aa, Homo sapiens
  CDR3 for alpha chain variable domain of TCR clone 376096 (TRAV1-2, TRAJ16)
CAVNRFSAVQKLLF

SEQ ID NO: 752192 - protein, 12 aa, Homo sapiens
  CDR3 for beta chain variable domain of TCR clone 376096 (TRBV28, TRBJ2-6)
CAIQAGANVLTF

SEQ ID NO: 752193 - protein, 13 aa, Homo sapiens
  CDR3 for alpha chain variable domain of TCR clone 376097 (TRAV8-3, TRAJ40)
CAVVVSGTYKYIF

SEQ ID NO: 752194 - protein, 15 aa, Homo sapiens
  CDR3 for beta chain variable domain of TCR clone 376097 (TRBV7-2, TRBJ2-1)
CASRKTGSSYNEHFF

SEQ ID NO: 752195 - protein, 15 aa, Homo sapiens
  CDR3 for alpha chain variable domain of TCR clone 376098 (TRAV27, TRAJ38)
CAARRNAGNNRKLIW

SEQ ID NO: 752196 - protein, 13 aa, Homo sapiens
  CDR3 for beta chain variable domain of TCR clone 376098 (TRBV7-3, TRBJ2-1)
CASSLDSYNEEFF

SEQ ID NO: 752197 - protein, 14 aa, Homo sapiens
  CDR3 for alpha chain variable domain of TCR clone 376099 (TRAV1-2, TRAJ8)
CAVREDTGFQKLVF

SEQ ID NO: 752198 - protein, 16 aa, Homo sapiens
  CDR3 for beta chain variable domain of TCR clone 376099 (TRBV12-5, TRBJ2-5)
CASGPRTSGNQESQYF

SEQ ID NO: 752199 - protein, 13 aa, Homo sapiens
  CDR3 for alpha chain variable domain of TCR clone 376100 (TRAV17, TRAJ4)
CATKSGCYNKLIF

SEQ ID NO: 752200 - protein, 14 aa, Homo sapiens
  CDR3 for beta chain variable domain of TCR clone 376100 (TRBV20-1, TRBJ1-5)
CSGRDDRGNQPQHF

SEQ ID NO: 752201 - protein, 12 aa, Homo sapiens
  CDR3 for alpha chain variable domain of TCR clone 376101 (TRAV38-2/DV8, TRAJ47)
CVLMEYGNKPVF

SEQ ID NO: 752202 - protein, 14 aa, Homo sapiens
  CDR3 for beta chain variable domain of TCR clone 376101 (TRBV20-1, TRBJ1-5)
CSATDRGSNQTQHF

SEQ ID NO: 752203 - protein, 13 aa, Homo sapiens
  CDR3 for alpha chain variable domain of TCR clone 376102 (TRAV3, TRAJ20)
CAVRDPPRYKLSF

SEQ ID NO: 752204 - protein, 16 aa, Homo sapiens
  CDR3 for beta chain variable domain of TCR clone 376102 (TRBV20-1, TRBJ2-7)
CSARAPGLALSYEQYF

SEQ ID NO: 752205 - protein, 15 aa, Homo sapiens
  CDR3 for alpha chain variable domain of TCR clone 376103 (TRAV3, TRAJ20)
CAVRDIKLSDYKLSF

SEQ ID NO: 752206 - protein, 15 aa, Homo sapiens
  CDR3 for beta chain variable domain of TCR clone 376103 (TRBV7-9, TRBJ1-6)
CASSPPGHGNSPLHF

SEQ ID NO: 752207 - protein, 13 aa, Homo sapiens
  CDR3 for alpha chain variable domain of TCR clone 376104 (TRAV27, TRAJ45)
CRSSGGGADGLTF

SEQ ID NO: 752208 - protein, 15 aa, Homo sapiens
  CDR3 for beta chain variable domain of TCR clone 376104 (TRBV11-2, TRBJ1-5)
CASSQGHQPNQPQHF

SEQ ID NO: 752209 - protein, 14 aa, Homo sapiens
  CDR3 for alpha chain variable domain of TCR clone 376105 (TRAV17, TRAJ34)
CATDSLEGTDKLIF

SEQ ID NO: 752210 - protein, 13 aa, Homo sapiens
  CDR3 for beta chain variable domain of TCR clone 376105 (TRBV11-2, TRBJ2-7)
CASSGTRTYEQYF

SEQ ID NO: 752211 - protein, 14 aa, Homo sapiens
  CDR3 for alpha chain variable domain of TCR clone 376106 (TRAV12-2, TRAJ24)
CAVTPADSWGKLQF

SEQ ID NO: 752212 - protein, 15 aa, Homo sapiens
  CDR3 for beta chain variable domain of TCR clone 376106 (TRBV5-1, TRBJ2-1)
CASKGLAGVYNEQFF

SEQ ID NO: 752213 - protein, 14 aa, Homo sapiens
  CDR3 for alpha chain variable domain of TCR clone 376107 (TRAV2, TRAJ9)
CAVEDRSGGFKTIF

SEQ ID NO: 752214 - protein, 13 aa, Homo sapiens
  CDR3 for beta chain variable domain of TCR clone 376107 (TRBV6-5, TRBJ2-5)
CASSPQGGETQYF

SEQ ID NO: 752215 - protein, 14 aa, Homo sapiens
  CDR3 for alpha chain variable domain of TCR clone 376108 (TRAV35, TRAJ42)
CAGRYGGSQGNLIF

SEQ ID NO: 752216 - protein, 15 aa, Homo sapiens
  CDR3 for beta chain variable domain of TCR clone 376108 (TRBV27, TRBJ2-1)
CASSNGGGSSNEQFF

SEQ ID NO: 752217 - protein, 23 aa, Homo sapiens
  CDR3 for alpha chain variable domain of TCR clone 376109 (TRAV36/DV7, TRAJ50)
CAVEPENLLRQDIQNPDPAVYQL

SEQ ID NO: 752218 - protein, 13 aa, Homo sapiens
  CDR3 for beta chain variable domain of TCR clone 376109 (TRBV9, TRBJ2-7)
CASSVAEYYEQYF

SEQ ID NO: 752219 - protein, 12 aa, Homo sapiens
  CDR3 for alpha chain variable domain of TCR clone 376110 (TRAV12-3, TRAJ17)
CAMTLTGNKLTF

SEQ ID NO: 752220 - protein, 16 aa, Homo sapiens
  CDR3 for beta chain variable domain of TCR clone 376110 (TRBV4-2, TRBJ1-5)
CASSQGQGASNQPQHF

SEQ ID NO: 752221 - protein, 15 aa, Homo sapiens
  CDR3 for alpha chain variable domain of TCR clone 376111 (TRAV14/DV4, TRAJ10)
CAMRELTGGGNKLTF

SEQ ID NO: 752222 - protein, 18 aa, Homo sapiens
  CDR3 for beta chain variable domain of TCR clone 376111 (TRBV7-9, TRBJ2-7)
WASSLTTSGSRTWYEQYF

SEQ ID NO: 752223 - protein, 14 aa, Homo sapiens
  CDR3 for alpha chain variable domain of TCR clone 376112 (TRAV35, TRAJ40)
CAGSTTSGTYKYIF

SEQ ID NO: 752224 - protein, 14 aa, Homo sapiens
  CDR3 for beta chain variable domain of TCR clone 376112 (TRBV25-1, TRBJ1-1)
CASTHLGGNTEAFF

SEQ ID NO: 752225 - protein, 14 aa, Homo sapiens
  CDR3 for alpha chain variable domain of TCR clone 376113 (TRAV21, TRAJ52)
CGRAGGTSYGKLTF

SEQ ID NO: 752226 - protein, 15 aa, Homo sapiens
  CDR3 for beta chain variable domain of TCR clone 376113 (TRBV5-1, TRBJ2-3)
CASSVTSGSTDTQYF

SEQ ID NO: 752227 - protein, 13 aa, Homo sapiens
  CDR3 for alpha chain variable domain of TCR clone 376114 (TRAV2, TRAJ15)
CAVASQAGTALIF

SEQ ID NO: 752228 - protein, 16 aa, Homo sapiens
  CDR3 for beta chain variable domain of TCR clone 376114 (TRBV18, TRBJ1-5)
CASSPYRVEGNQSQHF

SEQ ID NO: 752229 - protein, 15 aa, Homo sapiens
  CDR3 for alpha chain variable domain of TCR clone 376115 (TRAV12-3, TRAJ11)
CAMSEENSGYSTLTF

SEQ ID NO: 752230 - protein, 20 aa, Homo sapiens
  CDR3 for beta chain variable domain of TCR clone 376115 (TRBV7-8, TRBJ2-2)
CASSHLFPGPTSHITGELFF

SEQ ID NO: 752231 - protein, 14 aa, Homo sapiens
  CDR3 for alpha chain variable domain of TCR clone 376116 (TRAV1-2, TRAJ16)
CAVNRFSDGQKLLF

SEQ ID NO: 752232 - protein, 14 aa, Homo sapiens
  CDR3 for beta chain variable domain of TCR clone 376116 (TRBV7-3, TRBJ2-1)
CASSLGTSANEQFF

SEQ ID NO: 752233 - protein, 14 aa, Homo sapiens
  CDR3 for alpha chain variable domain of TCR clone 376117 (TRAV12-1, TRAJ3)
CVVILYSSASKIIF

SEQ ID NO: 752234 - protein, 14 aa, Homo sapiens
  CDR3 for beta chain variable domain of TCR clone 376117 (TRBV19, TRBJ2-1)
CASPTFVLSGEQFF

SEQ ID NO: 752235 - protein, 13 aa, Homo sapiens
  CDR3 for alpha chain variable domain of TCR clone 376118 (TRAV8-6, TRAJ49)
CAVITNTGNQFYF

SEQ ID NO: 752236 - protein, 11 aa, Homo sapiens
  CDR3 for beta chain variable domain of TCR clone 376118 (TRBV12-4, TRBJ2-3)
CASTATDTQYF

SEQ ID NO: 752237 - protein, 12 aa, Homo sapiens
  CDR3 for alpha chain variable domain of TCR clone 376119 (TRAV12-3, TRAJ17)
CAMTLTGNKLTF

SEQ ID NO: 752238 - protein, 15 aa, Homo sapiens
  CDR3 for beta chain variable domain of TCR clone 376119 (TRBV28, TRBJ2-5)
CASSFRQGALETQYF

SEQ ID NO: 752239 - protein, 13 aa, Homo sapiens
  CDR3 for alpha chain variable domain of TCR clone 376120 (TRAV8-3, TRAJ28)
CAVGAVGSYQPTF

SEQ ID NO: 752240 - protein, 18 aa, Homo sapiens
  CDR3 for beta chain variable domain of TCR clone 376120 (TRBV13, TRBJ2-4)
CAIIDQKRSVLRRRDPAL

SEQ ID NO: 752241 - protein, 13 aa, Homo sapiens
  CDR3 for alpha chain variable domain of TCR clone 376121 (TRAV17, TRAJ9)
CATDYTGGFKTIF

SEQ ID NO: 752242 - protein, 15 aa, Homo sapiens
  CDR3 for beta chain variable domain of TCR clone 376121 (TRBV27, TRBJ1-6)
CASSFDRGLGSPPHF

SEQ ID NO: 752243 - protein, 12 aa, Homo sapiens
  CDR3 for alpha chain variable domain of TCR clone 376122 (TRAV1-2, TRAJ24)
CAVGGSWGKFQF

SEQ ID NO: 752244 - protein, 15 aa, Homo sapiens
  CDR3 for beta chain variable domain of TCR clone 376122 (TRBV11-3, TRBJ2-3)
CASLKDGREGDTQYF

SEQ ID NO: 752245 - protein, 11 aa, Homo sapiens
  CDR3 for alpha chain variable domain of TCR clone 376123 (TRAV13-2, TRAJ43)
CAERGNNDMRF

SEQ ID NO: 752246 - protein, 15 aa, Homo sapiens
  CDR3 for beta chain variable domain of TCR clone 376123 (TRBV19, TRBJ1-1)
CASTSGQIQNTEAFF

SEQ ID NO: 752247 - protein, 14 aa, Homo sapiens
  CDR3 for alpha chain variable domain of TCR clone 376124 (TRAV12-2, TRAJ9)
CAVSFGTGGFKTIF

SEQ ID NO: 752248 - protein, 14 aa, Homo sapiens
  CDR3 for beta chain variable domain of TCR clone 376124 (TRBV5-1, TRBJ2-3)
CASSFPGNTDTQYF

SEQ ID NO: 752249 - protein, 15 aa, Homo sapiens
  CDR3 for alpha chain variable domain of TCR clone 376125 (TRAV13-1, TRAJ17)
CAASIERAAGNKLTL

SEQ ID NO: 752250 - protein, 17 aa, Homo sapiens
  CDR3 for beta chain variable domain of TCR clone 376125 (TRBV28, TRBJ2-5)
CASSRQGGLAGAETQYF

SEQ ID NO: 752251 - protein, 13 aa, Homo sapiens
  CDR3 for alpha chain variable domain of TCR clone 376126 (TRAV2, TRAJ40)
CALVTSGTYKYIF

SEQ ID NO: 752252 - protein, 15 aa, Homo sapiens
  CDR3 for beta chain variable domain of TCR clone 376126 (TRBV9, TRBJ1-6)
CASSVAGTGDSPLHF

SEQ ID NO: 752253 - protein, 15 aa, Homo sapiens
  CDR3 for alpha chain variable domain of TCR clone 376127 (TRAV3, TRAJ29)
CAVRDINSGNTPLVF

SEQ ID NO: 752254 - protein, 16 aa, Homo sapiens
  CDR3 for beta chain variable domain of TCR clone 376127 (TRBV4-1, TRBJ2-5)
CASSQTFYGDQETQYV

SEQ ID NO: 752255 - protein, 14 aa, Homo sapiens
  CDR3 for alpha chain variable domain of TCR clone 376128 (TRAV9-2, TRAJ39)
CALYFFNAGNMLTF

SEQ ID NO: 752256 - protein, 15 aa, Homo sapiens
  CDR3 for beta chain variable domain of TCR clone 376128 (TRBV28, TRBJ1-3)
CASSMGWASGNTLYF

SEQ ID NO: 752257 - protein, 13 aa, Homo sapiens
  CDR3 for alpha chain variable domain of TCR clone 376129 (TRAV21, TRAJ57)
CAVTQGGSEKLVF

SEQ ID NO: 752258 - protein, 15 aa, Homo sapiens
  CDR3 for beta chain variable domain of TCR clone 376129 (TRBV4-1, TRBJ1-2)
CASSQGQGAAYGYTF

SEQ ID NO: 752259 - protein, 15 aa, Homo sapiens
  CDR3 for alpha chain variable domain of TCR clone 376130 (TRAV3, TRAJ20)
CAVRDIKLSDYKLSF

SEQ ID NO: 752260 - protein, 16 aa, Homo sapiens
  CDR3 for beta chain variable domain of TCR clone 376130 (TRBV2, TRBJ2-5)
CASSARGLGGRETQYF

SEQ ID NO: 752261 - protein, 16 aa, Homo sapiens
  CDR3 for alpha chain variable domain of TCR clone 376131 (TRAV3, TRAJ37)
CAVRPHGSGNTGKLIF

SEQ ID NO: 752262 - protein, 16 aa, Homo sapiens
  CDR3 for beta chain variable domain of TCR clone 376131 (TRBV20-1, TRBJ1-4)
CSAPGQGVLTNEKLFF

SEQ ID NO: 752263 - protein, 18 aa, Homo sapiens
  CDR3 for alpha chain variable domain of TCR clone 376132 (TRAV26-1, TRAJ27)
CIVRPSFNYNTSAGKSTF

SEQ ID NO: 752264 - protein, 14 aa, Homo sapiens
  CDR3 for beta chain variable domain of TCR clone 376132 (TRBV10-3, TRBJ1-6)
CAISVDGDESPLHF

SEQ ID NO: 752265 - protein, 16 aa, Homo sapiens
  CDR3 for alpha chain variable domain of TCR clone 376133 (TRAV17, TRAJ9)
CATGEWGGTGGCKTIF

SEQ ID NO: 752266 - protein, 12 aa, Homo sapiens
  CDR3 for beta chain variable domain of TCR clone 376133 (TRBV11-2, TRBJ2-1)
CASSPGNNEQFF

SEQ ID NO: 752267 - protein, 13 aa, Homo sapiens
  CDR3 for alpha chain variable domain of TCR clone 376134 (TRAV30, TRAJ24)
CGTVTDSWGKLQF

SEQ ID NO: 752268 - protein, 15 aa, Homo sapiens
  CDR3 for beta chain variable domain of TCR clone 376134 (TRBV4-1, TRBJ2-1)
CASSQDPGKYNEQFF

SEQ ID NO: 752269 - protein, 14 aa, Homo sapiens
  CDR3 for alpha chain variable domain of TCR clone 376135 (TRAV1-2, TRAJ8)
CAVREDTGFQRLVF

SEQ ID NO: 752270 - protein, 11 aa, Homo sapiens
  CDR3 for beta chain variable domain of TCR clone 376135 (TRBV19, TRBJ1-1)
CASSIGSEAFF

SEQ ID NO: 752271 - protein, 10 aa, Homo sapiens
  CDR3 for alpha chain variable domain of TCR clone 376136 (TRAV12-3, TRAJ49)
CAMNDDQFYF

SEQ ID NO: 752272 - protein, 16 aa, Homo sapiens
  CDR3 for beta chain variable domain of TCR clone 376136 (TRBV20-1, TRBJ1-4)
CSDPGQGLLTNEKLFF

SEQ ID NO: 752273 - protein, 13 aa, Homo sapiens
  CDR3 for alpha chain variable domain of TCR clone 376137 (TRAV2, TRAJ16)
CAMEFGDGQKLLF

SEQ ID NO: 752274 - protein, 14 aa, Homo sapiens
  CDR3 for beta chain variable domain of TCR clone 376137 (TRBV6-3, TRBJ2-5)
CASSYSLREKTQYF

SEQ ID NO: 752275 - protein, 16 aa, Homo sapiens
  CDR3 for alpha chain variable domain of TCR clone 376138 (TRAV12-3, TRAJ53)
CAMSPGSGGSNYKLTF

SEQ ID NO: 752276 - protein, 16 aa, Homo sapiens
  CDR3 for beta chain variable domain of TCR clone 376138 (TRBV19, TRBJ2-1)
CASSRAGPSSYNEQFF

SEQ ID NO: 752277 - protein, 13 aa, Homo sapiens
  CDR3 for alpha chain variable domain of TCR clone 376139 (TRAV13-2, TRAJ22)
CLGWIRSARQLTF

SEQ ID NO: 752278 - protein, 15 aa, Homo sapiens
  CDR3 for beta chain variable domain of TCR clone 376139 (TRBV7-2, TRBJ2-3)
CASSSTGLETDTQYF

SEQ ID NO: 752279 - protein, 16 aa, Homo sapiens
  CDR3 for alpha chain variable domain of TCR clone 376140 (TRAV26-1, TRAJ36)
CIVRVPDQTGANNLFF

SEQ ID NO: 752280 - protein, 16 aa, Homo sapiens
  CDR3 for beta chain variable domain of TCR clone 376140 (TRBV7-3, TRBJ2-2)
CASSLKRGTLSGELFF

SEQ ID NO: 752281 - protein, 13 aa, Homo sapiens
  CDR3 for alpha chain variable domain of TCR clone 376141 (TRAV8-6, TRAJ9)
CAVSDTGGFKTIF

SEQ ID NO: 752282 - protein, 15 aa, Homo sapiens
  CDR3 for beta chain variable domain of TCR clone 376141 (TRBV28, TRBJ2-1)
CASSIIAGGRSEQFF

SEQ ID NO: 752283 - protein, 17 aa, Homo sapiens
  CDR3 for alpha chain variable domain of TCR clone 376142 (TRAV12-2, TRAJ42)
CAVNILNYGGSQGNIIF

SEQ ID NO: 752284 - protein, 13 aa, Homo sapiens
  CDR3 for beta chain variable domain of TCR clone 376142 (TRBV3-1, TRBJ1-5)
CASSQDLDQPQHF

SEQ ID NO: 752285 - protein, 15 aa, Homo sapiens
  CDR3 for alpha chain variable domain of TCR clone 376143 (TRAV12-2, TRAJ5)
CAVNGKDTGRRALTF

SEQ ID NO: 752286 - protein, 14 aa, Homo sapiens
  CDR3 for beta chain variable domain of TCR clone 376143 (TRBV18, TRBJ2-3)
CASSRDRGTDTQYF

SEQ ID NO: 752287 - protein, 17 aa, Homo sapiens
  CDR3 for alpha chain variable domain of TCR clone 376144 (TRAV3, TRAJ6)
CAVRDGPRPGGSYIPTF

SEQ ID NO: 752288 - protein, 15 aa, Homo sapiens
  CDR3 for beta chain variable domain of TCR clone 376144 (TRBV20-1, TRBJ1-1)
CSASWDRFLNTEAFF

SEQ ID NO: 752289 - protein, 16 aa, Homo sapiens
  CDR3 for alpha chain variable domain of TCR clone 376145 (TRAV30, TRAJ24)
FGTEIVDADSWGKFQF

SEQ ID NO: 752290 - protein, 15 aa, Homo sapiens
  CDR3 for beta chain variable domain of TCR clone 376145 (TRBV12-4, TRBJ2-7)
CASSQRTSGNYEQYF

SEQ ID NO: 752291 - protein, 14 aa, Homo sapiens
  CDR3 for alpha chain variable domain of TCR clone 376146 (TRAV35, TRAJ22)
CAGLRPGSARQLTF

SEQ ID NO: 752292 - protein, 15 aa, Homo sapiens
  CDR3 for beta chain variable domain of TCR clone 376146 (TRBV11-3, TRBJ2-7)
CASSPGPASSYEQYF

SEQ ID NO: 752293 - protein, 19 aa, Homo sapiens
  CDR3 for alpha chain variable domain of TCR clone 376147 (TRAV16, )
CALSGDIQNPDLAVYQLRD

SEQ ID NO: 752294 - protein, 16 aa, Homo sapiens
  CDR3 for beta chain variable domain of TCR clone 376147 (TRBV12-5, TRBJ2-5)
CASGPRTSGNQETQYF

SEQ ID NO: 752295 - protein, 10 aa, Homo sapiens
  CDR3 for alpha chain variable domain of TCR clone 376148 (TRAV12-3, TRAJ49)
CAMNDDQFYF

SEQ ID NO: 752296 - protein, 17 aa, Homo sapiens
  CDR3 for beta chain variable domain of TCR clone 376148 (TRBV28, TRBJ2-5)
CASSRQGGLAGAETQYF

SEQ ID NO: 752297 - protein, 12 aa, Homo sapiens
  CDR3 for alpha chain variable domain of TCR clone 376149 (TRAV29/DV5, TRAJ26)
CAAIPSGQNFVL

SEQ ID NO: 752298 - protein, 15 aa, Homo sapiens
  CDR3 for beta chain variable domain of TCR clone 376149 (TRBV19, TRBJ1-5)
CASSDSGHRNQAQHF

SEQ ID NO: 752299 - protein, 15 aa, Homo sapiens
  CDR3 for alpha chain variable domain of TCR clone 376150 (TRAV23/DV6, TRAJ15)
CAALPAGRNCSDLWE

SEQ ID NO: 752300 - protein, 12 aa, Homo sapiens
  CDR3 for beta chain variable domain of TCR clone 376150 (TRBV5-1, TRBJ2-3)
CASSLAADTQYF

SEQ ID NO: 752301 - protein, 15 aa, Homo sapiens
  CDR3 for alpha chain variable domain of TCR clone 376151 (TRAV36/DV7, TRAJ53)
WEGENSGGSNYKLTF

SEQ ID NO: 752302 - protein, 17 aa, Homo sapiens
  CDR3 for beta chain variable domain of TCR clone 376151 (TRBV7-3, TRBJ2-3)
CASSLMKRMRGADTQYF

SEQ ID NO: 752303 - protein, 13 aa, Homo sapiens
  CDR3 for alpha chain variable domain of TCR clone 376152 (TRAV12-2, TRAJ31)
CAVKADNNARLMF

SEQ ID NO: 752304 - protein, 15 aa, Homo sapiens
  CDR3 for beta chain variable domain of TCR clone 376152 (TRBV11-2, TRBJ2-1)
CASSLAPRAHNEQFF

SEQ ID NO: 752305 - protein, 12 aa, Homo sapiens
  CDR3 for alpha chain variable domain of TCR clone 376153 (TRAV16, TRAJ26)
CALRSYGQNFFF

SEQ ID NO: 752306 - protein, 14 aa, Homo sapiens
  CDR3 for beta chain variable domain of TCR clone 376153 (TRBV10-3, TRBJ2-1)
CAISSDLAYNEQFS

SEQ ID NO: 752307 - protein, 17 aa, Homo sapiens
  CDR3 for alpha chain variable domain of TCR clone 376154 (TRAV13-1, TRAJ31)
CAPRDRLMFGDGTQLVV

SEQ ID NO: 752308 - protein, 12 aa, Homo sapiens
  CDR3 for beta chain variable domain of TCR clone 376154 (TRBV7-9, TRBJ2-7)
CASSLEGYVQYF

SEQ ID NO: 752309 - protein, 17 aa, Homo sapiens
  CDR3 for alpha chain variable domain of TCR clone 376155 (TRAV8-3, TRAJ42)
CAVGKGNYGGSQGNLIF

SEQ ID NO: 752310 - protein, 16 aa, Homo sapiens
  CDR3 for beta chain variable domain of TCR clone 376155 (TRBV7-3, TRBJ2-1)
CASSLEGYRSYNEQFF

SEQ ID NO: 752311 - protein, 14 aa, Homo sapiens
  CDR3 for alpha chain variable domain of TCR clone 376156 (TRAV13-2, TRAJ15)
CAENPNQPGTALIF

SEQ ID NO: 752312 - protein, 16 aa, Homo sapiens
  CDR3 for beta chain variable domain of TCR clone 376156 (TRBV12-4, TRBJ1-2)
CASSPTATGKTRGYTF

SEQ ID NO: 752313 - protein, 16 aa, Homo sapiens
  CDR3 for alpha chain variable domain of TCR clone 376157 (TRAV23/DV6, TRAJ9)
CAASIGGNTGGFKTIF

SEQ ID NO: 752314 - protein, 18 aa, Homo sapiens
  CDR3 for beta chain variable domain of TCR clone 376157 (TRBV4-1, TRBJ1-5)
CASSQDPRGQGLNQPQHF

SEQ ID NO: 752315 - protein, 13 aa, Homo sapiens
  CDR3 for alpha chain variable domain of TCR clone 376158 (TRAV23/DV6, TRAJ58)
CAASEIGGSRLTF

SEQ ID NO: 752316 - protein, 16 aa, Homo sapiens
  CDR3 for beta chain variable domain of TCR clone 376158 (TRBV12-5, TRBJ2-5)
CASGPRTSGNQETQYF

SEQ ID NO: 752317 - protein, 16 aa, Homo sapiens
  CDR3 for alpha chain variable domain of TCR clone 376159 (TRAV17, TRAJ35)
CATAEGGIGFGNVLHC

SEQ ID NO: 752318 - protein, 18 aa, Homo sapiens
  CDR3 for beta chain variable domain of TCR clone 376159 (TRBV6-5, TRBJ2-7)
CASSSDPTSGFTSSTSGR

SEQ ID NO: 752319 - protein, 17 aa, Homo sapiens
  CDR3 for alpha chain variable domain of TCR clone 376160 (TRAV8-4, TRAJ53)
CAVRGRRSEGRNYKLTF

SEQ ID NO: 752320 - protein, 14 aa, Homo sapiens
  CDR3 for beta chain variable domain of TCR clone 376160 (TRBV7-3, TRBJ2-1)
CASSALAGGPEQFF

SEQ ID NO: 752321 - protein, 13 aa, Homo sapiens
  CDR3 for alpha chain variable domain of TCR clone 376161 (TRAV12-1, TRAJ26)
CVVRRNYGQTFVF

SEQ ID NO: 752322 - protein, 14 aa, Homo sapiens
  CDR3 for beta chain variable domain of TCR clone 376161 (TRBV4-2, TRBJ2-1)
CASGLDRAYNEHFF

SEQ ID NO: 752323 - protein, 16 aa, Homo sapiens
  CDR3 for alpha chain variable domain of TCR clone 376162 (TRAV1-2, TRAJ10)
CAVRGVLTGGGNKLTF

SEQ ID NO: 752324 - protein, 14 aa, Homo sapiens
  CDR3 for beta chain variable domain of TCR clone 376162 (TRBV28, TRBJ2-2)
CASRIRSGTGELFF

SEQ ID NO: 752325 - protein, 16 aa, Homo sapiens
  CDR3 for alpha chain variable domain of TCR clone 376163 (TRAV13-1, TRAJ22)
CAAKGGRSGSARQLTF

SEQ ID NO: 752326 - protein, 15 aa, Homo sapiens
  CDR3 for beta chain variable domain of TCR clone 376163 (TRBV9, TRBJ1-6)
CASSVAGTGDSPLDF

SEQ ID NO: 752327 - protein, 14 aa, Homo sapiens
  CDR3 for alpha chain variable domain of TCR clone 376164 (TRAV1-2, TRAJ16)
CAVNWFSDGQKLLF

SEQ ID NO: 752328 - protein, 18 aa, Homo sapiens
  CDR3 for beta chain variable domain of TCR clone 376164 (TRBV7-2, TRBJ2-7)
CASSLSGRGLAGGYEQYF

SEQ ID NO: 752329 - protein, 12 aa, Homo sapiens
  CDR3 for alpha chain variable domain of TCR clone 376165 (TRAV12-3, TRAJ17)
CAMTLTGNKLTF

SEQ ID NO: 752330 - protein, 13 aa, Homo sapiens
  CDR3 for beta chain variable domain of TCR clone 376165 (TRBV7-9, TRBJ2-7)
CASSLQGSYEQYF

SEQ ID NO: 752331 - protein, 16 aa, Homo sapiens
  CDR3 for alpha chain variable domain of TCR clone 376166 (TRAV12-2, TRAJ48)
CAVNPTSNFGNETLTF

SEQ ID NO: 752332 - protein, 12 aa, Homo sapiens
  CDR3 for beta chain variable domain of TCR clone 376166 (TRBV9, TRBJ2-3)
CASSLRAGTQYF

SEQ ID NO: 752333 - protein, 11 aa, Homo sapiens
  CDR3 for alpha chain variable domain of TCR clone 376167 (TRAV2, TRAJ13)
CASGGYQTVTF

SEQ ID NO: 752334 - protein, 15 aa, Homo sapiens
  CDR3 for beta chain variable domain of TCR clone 376167 (TRBV5-4, TRBJ2-7)
CASSRFGTGSYEQYF

SEQ ID NO: 752335 - protein, 13 aa, Homo sapiens
  CDR3 for alpha chain variable domain of TCR clone 376168 (TRAV35, TRAJ21)
CAGQLSNFNKFYF

SEQ ID NO: 752336 - protein, 16 aa, Homo sapiens
  CDR3 for beta chain variable domain of TCR clone 376168 (TRBV7-3, TRBJ2-2)
CASSLKRGTLSGELFF

SEQ ID NO: 752337 - protein, 16 aa, Homo sapiens
  CDR3 for alpha chain variable domain of TCR clone 376169 (TRAV30, TRAJ24)
CGTENVDADSWGKFQF

SEQ ID NO: 752338 - protein, 13 aa, Homo sapiens
  CDR3 for beta chain variable domain of TCR clone 376169 (TRBV7-2, TRBJ1-4)
CASSLAGLEKLFF

SEQ ID NO: 752339 - protein, 15 aa, Homo sapiens
  CDR3 for alpha chain variable domain of TCR clone 376170 (TRAV26-1, TRAJ40)
CIVRVTTSGTYKYIF

SEQ ID NO: 752340 - protein, 14 aa, Homo sapiens
  CDR3 for beta chain variable domain of TCR clone 376170 (TRBV7-9, TRBJ1-4)
CVSSTDREKLFLAV

SEQ ID NO: 752341 - protein, 12 aa, Homo sapiens
  CDR3 for alpha chain variable domain of TCR clone 376171 (TRAV9-2, TRAJ24)
FAQTDSWGKLQF

SEQ ID NO: 752342 - protein, 13 aa, Homo sapiens
  CDR3 for beta chain variable domain of TCR clone 376171 (TRBV12-4, TRBJ2-1)
CASSFQGYNEQFF

SEQ ID NO: 752343 - protein, 12 aa, Homo sapiens
  CDR3 for alpha chain variable domain of TCR clone 376172 (TRAV8-4, TRAJ43)
CAVSVNNNDMRF

SEQ ID NO: 752344 - protein, 14 aa, Homo sapiens
  CDR3 for beta chain variable domain of TCR clone 376172 (TRBV11-2, TRBJ1-2)
CDSSLGTANYGYTF

SEQ ID NO: 752345 - protein, 18 aa, Homo sapiens
  CDR3 for alpha chain variable domain of TCR clone 376173 (TRAV12-3, TRAJ52)
CAMSVGGAGGTSYGKLTF

SEQ ID NO: 752346 - protein, 16 aa, Homo sapiens
  CDR3 for beta chain variable domain of TCR clone 376173 (TRBV4-1, TRBJ1-5)
CASSQGGHTTNQPQHF

SEQ ID NO: 752347 - protein, 17 aa, Homo sapiens
  CDR3 for alpha chain variable domain of TCR clone 376174 (TRAV13-1, TRAJ28)
CAASPPFSGAGSYQLTF

SEQ ID NO: 752348 - protein, 15 aa, Homo sapiens
  CDR3 for beta chain variable domain of TCR clone 376174 (TRBV6-3, TRBJ2-2)
CASSFLATLTGELFF

SEQ ID NO: 752349 - protein, 16 aa, Homo sapiens
  CDR3 for alpha chain variable domain of TCR clone 376175 (TRAV3, TRAJ10)
CAVRDMRAGGGNKLTF

SEQ ID NO: 752350 - protein, 19 aa, Homo sapiens
  CDR3 for beta chain variable domain of TCR clone 376175 (TRBV6-3, TRBJ1-2)
CASSYSKGQTGPPNYGYTF

SEQ ID NO: 752351 - protein, 16 aa, Homo sapiens
  CDR3 for alpha chain variable domain of TCR clone 376176 (TRAV30, TRAJ24)
CGTEIVDADSWGKFQV

SEQ ID NO: 752352 - protein, 15 aa, Homo sapiens
  CDR3 for beta chain variable domain of TCR clone 376176 (TRBV11-2, TRBJ2-2)
CASSSDRVNAGELFF

SEQ ID NO: 752353 - protein, 17 aa, Homo sapiens
  CDR3 for alpha chain variable domain of TCR clone 376177 (TRAV3, TRAJ12)
CAVRDGGRMDSSYKLIF

SEQ ID NO: 752354 - protein, 14 aa, Homo sapiens
  CDR3 for beta chain variable domain of TCR clone 376177 (TRBV7-9, TRBJ1-2)
CTSSRQGANYGYTF

SEQ ID NO: 752355 - protein, 14 aa, Homo sapiens
  CDR3 for alpha chain variable domain of TCR clone 376178 (TRAV1-2, TRAJ8)
CAVREDTGFQKLVF

SEQ ID NO: 752356 - protein, 12 aa, Homo sapiens
  CDR3 for beta chain variable domain of TCR clone 376178 (TRBV14, TRBJ2-7)
CASSTLKGEQYF

SEQ ID NO: 752357 - protein, 23 aa, Homo sapiens
  CDR3 for alpha chain variable domain of TCR clone 376179 (TRAV26-1, )
CIADNAGNNDIQNPDPAVYQLRD

SEQ ID NO: 752358 - protein, 15 aa, Homo sapiens
  CDR3 for beta chain variable domain of TCR clone 376179 (TRBV27, TRBJ2-1)
CASSNGGGSSNEQFF

SEQ ID NO: 752359 - protein, 14 aa, Homo sapiens
  CDR3 for alpha chain variable domain of TCR clone 376180 (TRAV1-2, TRAJ8)
CAVREDTGFQKLVF

SEQ ID NO: 752360 - protein, 16 aa, Homo sapiens
  CDR3 for beta chain variable domain of TCR clone 376180 (TRBV2, TRBJ1-6)
CASSETGEIYNSPLHF

SEQ ID NO: 752361 - protein, 12 aa, Homo sapiens
  CDR3 for alpha chain variable domain of TCR clone 376181 (TRAV21, TRAJ29)
CAVTSGNTPLVF

SEQ ID NO: 752362 - protein, 15 aa, Homo sapiens
  CDR3 for beta chain variable domain of TCR clone 376181 (TRBV13, TRBJ1-5)
CASSFGQGGVQPQHF

SEQ ID NO: 752363 - protein, 13 aa, Homo sapiens
  CDR3 for alpha chain variable domain of TCR clone 376182 (TRAV27, TRAJ56)
CAGKPGANSKLTF

SEQ ID NO: 752364 - protein, 14 aa, Homo sapiens
  CDR3 for beta chain variable domain of TCR clone 376182 (TRBV7-2, TRBJ2-7)
CASSPKTSLYEQYF

SEQ ID NO: 752365 - protein, 12 aa, Homo sapiens
  CDR3 for alpha chain variable domain of TCR clone 376183 (TRAV14/DV4, TRAJ9)
CAMNPGGFKTII

SEQ ID NO: 752366 - protein, 16 aa, Homo sapiens
  CDR3 for beta chain variable domain of TCR clone 376183 (TRBV28, TRBJ2-5)
CASSFSPAGGWETQYF

SEQ ID NO: 752367 - protein, 14 aa, Homo sapiens
  CDR3 for alpha chain variable domain of TCR clone 376184 (TRAV1-2, TRAJ16)
CAANRFSDGQKLLF

SEQ ID NO: 752368 - protein, 20 aa, Homo sapiens
  CDR3 for beta chain variable domain of TCR clone 376184 (TRBV7-8, TRBJ2-2)
CASSHLFPGPTIHITGELFF

SEQ ID NO: 752369 - protein, 12 aa, Homo sapiens
  CDR3 for alpha chain variable domain of TCR clone 376185 (TRAV16, TRAJ10)
CSRTGGGNKLTF

SEQ ID NO: 752370 - protein, 17 aa, Homo sapiens
  CDR3 for beta chain variable domain of TCR clone 376185 (TRBV3-1, TRBJ2-2)
CASSFELGQRNTGELFL

SEQ ID NO: 752371 - protein, 13 aa, Homo sapiens
  CDR3 for alpha chain variable domain of TCR clone 376186 (TRAV21, TRAJ27)
CAARPGNSGNSTS

SEQ ID NO: 752372 - protein, 14 aa, Homo sapiens
  CDR3 for beta chain variable domain of TCR clone 376186 (TRBV7-6, TRBJ2-3)
CASSLGTVTDTQYF

SEQ ID NO: 752373 - protein, 15 aa, Homo sapiens
  CDR3 for alpha chain variable domain of TCR clone 376187 (TRAV23/DV6, TRAJ30)
CAPSSQESRDDKIIF

SEQ ID NO: 752374 - protein, 12 aa, Homo sapiens
  CDR3 for beta chain variable domain of TCR clone 376187 (TRBV19, TRBJ1-1)
CASGTGWTEAFF

SEQ ID NO: 752375 - protein, 15 aa, Homo sapiens
  CDR3 for alpha chain variable domain of TCR clone 376188 (TRAV8-6, TRAJ11)
CAVNFMNSGYSTLTF

SEQ ID NO: 752376 - protein, 14 aa, Homo sapiens
  CDR3 for beta chain variable domain of TCR clone 376188 (TRBV11-2, TRBJ2-3)
CASSLYAGRDTQYF

SEQ ID NO: 752377 - protein, 22 aa, Homo sapiens
  CDR3 for alpha chain variable domain of TCR clone 376189 (TRAV26-1, TRAJ23)
CCVLLHRQSRPEVWNQGGKLIF

SEQ ID NO: 752378 - protein, 16 aa, Homo sapiens
  CDR3 for beta chain variable domain of TCR clone 376189 (TRBV12-4, TRBJ2-5)
CASSFFVRGRQETQYF

SEQ ID NO: 752379 - protein, 17 aa, Homo sapiens
  CDR3 for alpha chain variable domain of TCR clone 376190 (TRAV19, TRAJ58)
CALWGLRVGTSGSRLTF

SEQ ID NO: 752380 - protein, 15 aa, Homo sapiens
  CDR3 for beta chain variable domain of TCR clone 376190 (TRBV5-1, TRBJ2-5)
CASSFKGGDQETQYF

SEQ ID NO: 752381 - protein, 14 aa, Homo sapiens
  CDR3 for alpha chain variable domain of TCR clone 376191 (TRAV1-2, TRAJ16)
CAVNRFSDGQKLLF

SEQ ID NO: 752382 - protein, 15 aa, Homo sapiens
  CDR3 for beta chain variable domain of TCR clone 376191 (TRBV2, TRBJ2-5)
CATRSGGSLGETQYF

SEQ ID NO: 752383 - protein, 15 aa, Homo sapiens
  CDR3 for alpha chain variable domain of TCR clone 376192 (TRAV34, TRAJ38)
CGADFTPGNNRKLIW

SEQ ID NO: 752384 - protein, 14 aa, Homo sapiens
  CDR3 for beta chain variable domain of TCR clone 376192 (TRBV19, TRBJ2-5)
CASSIEHSQETQYF

SEQ ID NO: 752385 - protein, 15 aa, Homo sapiens
  CDR3 for alpha chain variable domain of TCR clone 376193 (TRAV12-1, TRAJ44)
CVADLPTGTASKLTF

SEQ ID NO: 752386 - protein, 15 aa, Homo sapiens
  CDR3 for beta chain variable domain of TCR clone 376193 (TRBV6-3, TRBJ2-7)
CASSSPWTVFYEQYF

SEQ ID NO: 752387 - protein, 15 aa, Homo sapiens
  CDR3 for alpha chain variable domain of TCR clone 376194 (TRAV27, TRAJ38)
CAARRNAGKNCKLIW

SEQ ID NO: 752388 - protein, 13 aa, Homo sapiens
  CDR3 for beta chain variable domain of TCR clone 376194 (TRBV12-5, TRBJ2-3)
CASGDRQSDTQYF

SEQ ID NO: 752389 - protein, 12 aa, Homo sapiens
  CDR3 for alpha chain variable domain of TCR clone 376195 (TRAV8-6, TRAJ49)
CAVSEPGNQFYF

SEQ ID NO: 752390 - protein, 13 aa, Homo sapiens
  CDR3 for beta chain variable domain of TCR clone 376195 (TRBV19, TRBJ2-2)
CASSIWSTGELFF

SEQ ID NO: 752391 - protein, 14 aa, Homo sapiens
  CDR3 for alpha chain variable domain of TCR clone 376196 (TRAV38-1, TRAJ57)
CAFMNTGGSEKLVF

SEQ ID NO: 752392 - protein, 12 aa, Homo sapiens
  CDR3 for beta chain variable domain of TCR clone 376196 (TRBV20-1, TRBJ1-5)
CSTSQGNQPHHF

SEQ ID NO: 752393 - protein, 16 aa, Homo sapiens
  CDR3 for alpha chain variable domain of TCR clone 376197 (TRAV8-6, TRAJ28)
CAVNAGSGAGSYQLTF

SEQ ID NO: 752394 - protein, 13 aa, Homo sapiens
  CDR3 for beta chain variable domain of TCR clone 376197 (TRBV12-5, TRBJ2-3)
CASGDRQSDTQYF

SEQ ID NO: 752395 - protein, 13 aa, Homo sapiens
  CDR3 for alpha chain variable domain of TCR clone 376198 (TRAV29/DV5, TRAJ31)
CAASRNNNARLMF

SEQ ID NO: 752396 - protein, 15 aa, Homo sapiens
  CDR3 for beta chain variable domain of TCR clone 376198 (TRBV20-1, TRBJ1-4)
CSARREWGVNEKLFF

SEQ ID NO: 752397 - protein, 10 aa, Homo sapiens
  CDR3 for alpha chain variable domain of TCR clone 376199 (TRAV23/DV6, TRAJ57)
CAASSTLSQG

SEQ ID NO: 752398 - protein, 14 aa, Homo sapiens
  CDR3 for beta chain variable domain of TCR clone 376199 (TRBV7-8, TRBJ2-1)
CASSAQGTYNEQFF

SEQ ID NO: 752399 - protein, 11 aa, Homo sapiens
  CDR3 for alpha chain variable domain of TCR clone 376200 (TRAV12-3, TRAJ27)
CAMAIAGKSTF

SEQ ID NO: 752400 - protein, 15 aa, Homo sapiens
  CDR3 for beta chain variable domain of TCR clone 376200 (TRBV27, TRBJ2-5)
CASSLYPRGGETQYF

SEQ ID NO: 752401 - protein, 14 aa, Homo sapiens
  CDR3 for alpha chain variable domain of TCR clone 376201 (TRAV8-3, TRAJ39)
CAVGANNAGNMLTF

SEQ ID NO: 752402 - protein, 16 aa, Homo sapiens
  CDR3 for beta chain variable domain of TCR clone 376201 (TRBV27, TRBJ2-2)
CASSSSGVSNTGELFF

SEQ ID NO: 752403 - protein, 14 aa, Homo sapiens
  CDR3 for alpha chain variable domain of TCR clone 376202 (TRAV13-1, TRAJ9)
YAASALTGGFKTIF

SEQ ID NO: 752404 - protein, 16 aa, Homo sapiens
  CDR3 for beta chain variable domain of TCR clone 376202 (TRBV7-8, TRBJ2-4)
CASSAERTLAKNIQYF

SEQ ID NO: 752405 - protein, 14 aa, Homo sapiens
  CDR3 for alpha chain variable domain of TCR clone 376203 (TRAV12-2, TRAJ44)
CAVNSAGTASKLTF

SEQ ID NO: 752406 - protein, 13 aa, Homo sapiens
  CDR3 for beta chain variable domain of TCR clone 376203 (TRBV20-1, TRBJ1-6)
CSAPLGGGSPLHF

SEQ ID NO: 752407 - protein, 16 aa, Homo sapiens
  CDR3 for alpha chain variable domain of TCR clone 376204 (TRAV30, TRAJ24)
CGTEIVDADSWRKFQF

SEQ ID NO: 752408 - protein, 13 aa, Homo sapiens
  CDR3 for beta chain variable domain of TCR clone 376204 (TRBV10-3, TRBJ2-7)
CASKLAVNYEQYF

SEQ ID NO: 752409 - protein, 13 aa, Homo sapiens
  CDR3 for alpha chain variable domain of TCR clone 376205 (TRAV36/DV7, TRAJ40)
CAFTTSGTYKYIF

SEQ ID NO: 752410 - protein, 17 aa, Homo sapiens
  CDR3 for beta chain variable domain of TCR clone 376205 (TRBV13, TRBJ2-3)
CASSLSRVAGGRNTQYF

SEQ ID NO: 752411 - protein, 16 aa, Homo sapiens
  CDR3 for alpha chain variable domain of TCR clone 376206 (TRAV30, TRAJ24)
CGTEIVGADSWGKFQF

SEQ ID NO: 752412 - protein, 13 aa, Homo sapiens
  CDR3 for beta chain variable domain of TCR clone 376206 (TRBV11-2, TRBJ2-5)
CASSSTGEETQYF

SEQ ID NO: 752413 - protein, 14 aa, Homo sapiens
  CDR3 for alpha chain variable domain of TCR clone 376207 (TRAV12-1, TRAJ3)
CGATRYSSASKIIF

SEQ ID NO: 752414 - protein, 16 aa, Homo sapiens
  CDR3 for beta chain variable domain of TCR clone 376207 (TRBV4-3, TRBJ2-2)
CARSHLQGSGTGELFF

SEQ ID NO: 752415 - protein, 12 aa, Homo sapiens
  CDR3 for alpha chain variable domain of TCR clone 376208 (TRAV21, TRAJ11)
CAATSGYSTLTF

SEQ ID NO: 752416 - protein, 14 aa, Homo sapiens
  CDR3 for beta chain variable domain of TCR clone 376208 (TRBV20-1, TRBJ2-7)
CSAPELAGVVEQYF

SEQ ID NO: 752417 - protein, 14 aa, Homo sapiens
  CDR3 for alpha chain variable domain of TCR clone 376209 (TRAV12-3, TRAJ42)
CAMNYGGSQGNLLF

SEQ ID NO: 752418 - protein, 15 aa, Homo sapiens
  CDR3 for beta chain variable domain of TCR clone 376209 (TRBV20-1, TRBJ2-7)
CSARDRVSGMDEQYF

SEQ ID NO: 752419 - protein, 12 aa, Homo sapiens
  CDR3 for alpha chain variable domain of TCR clone 376210 (TRAV12-3, TRAJ17)
CAMTLTGNKLTF

SEQ ID NO: 752420 - protein, 13 aa, Homo sapiens
  CDR3 for beta chain variable domain of TCR clone 376210 (TRBV7-9, TRBJ1-2)
CASSVKQSYGYTF

SEQ ID NO: 752421 - protein, 12 aa, Homo sapiens
  CDR3 for alpha chain variable domain of TCR clone 376211 (TRAV23/DV6, TRAJ30)
CAASKGDDKIIF

SEQ ID NO: 752422 - protein, 18 aa, Homo sapiens
  CDR3 for beta chain variable domain of TCR clone 376211 (TRBV10-3, TRBJ2-3)
CAISESRVGPMRGHTQYF

SEQ ID NO: 752423 - protein, 11 aa, Homo sapiens
  CDR3 for alpha chain variable domain of TCR clone 376212 (TRAV1-2, TRAJ20)
CAVANDYKLSF

SEQ ID NO: 752424 - protein, 18 aa, Homo sapiens
  CDR3 for beta chain variable domain of TCR clone 376212 (TRBV20-1, TRBJ2-6)
CSAETTPTHGSGANVLTI

SEQ ID NO: 752425 - protein, 10 aa, Homo sapiens
  CDR3 for alpha chain variable domain of TCR clone 376213 (TRAV25, TRAJ17)
CQAAGNKLTF

SEQ ID NO: 752426 - protein, 14 aa, Homo sapiens
  CDR3 for beta chain variable domain of TCR clone 376213 (TRBV12-5, TRBJ2-5)
CASGSRTHQETQYF

SEQ ID NO: 752427 - protein, 12 aa, Homo sapiens
  CDR3 for alpha chain variable domain of TCR clone 376214 (TRAV23/DV6, TRAJ27)
CAASKSAGKSTF

SEQ ID NO: 752428 - protein, 14 aa, Homo sapiens
  CDR3 for beta chain variable domain of TCR clone 376214 (TRBV28, TRBJ2-7)
CASTRQGEPYEQYF

SEQ ID NO: 752429 - protein, 14 aa, Homo sapiens
  CDR3 for alpha chain variable domain of TCR clone 376215 (TRAV27, TRAJ22)
CAGLPSGSARQLTF

SEQ ID NO: 752430 - protein, 14 aa, Homo sapiens
  CDR3 for beta chain variable domain of TCR clone 376215 (TRBV6-6, TRBJ1-4)
CASRTDREYEKLFF

SEQ ID NO: 752431 - protein, 13 aa, Homo sapiens
  CDR3 for alpha chain variable domain of TCR clone 376216 (TRAV24, TRAJ42)
CAFSTGSQGNLIF

SEQ ID NO: 752432 - protein, 16 aa, Homo sapiens
  CDR3 for beta chain variable domain of TCR clone 376216 (TRBV5-5, TRBJ2-2)
CASSGRREGATGELFF

SEQ ID NO: 752433 - protein, 14 aa, Homo sapiens
  CDR3 for alpha chain variable domain of TCR clone 376217 (TRAV1-2, TRAJ16)
CAVNRISDGQKLPF

SEQ ID NO: 752434 - protein, 13 aa, Homo sapiens
  CDR3 for beta chain variable domain of TCR clone 376217 (TRBV4-1, TRBJ2-1)
CASSQAGGDEQFF

SEQ ID NO: 752435 - protein, 10 aa, Homo sapiens
  CDR3 for alpha chain variable domain of TCR clone 376218 (TRAV22, TRAJ58)
CAASGSRLTF

SEQ ID NO: 752436 - protein, 13 aa, Homo sapiens
  CDR3 for beta chain variable domain of TCR clone 376218 (TRBV19, TRBJ2-7)
CASRKAGGSEQYF

SEQ ID NO: 752437 - protein, 17 aa, Homo sapiens
  CDR3 for alpha chain variable domain of TCR clone 376219 (TRAV8-6, TRAJ58)
CAVSSWVGETSGSRLTF

SEQ ID NO: 752438 - protein, 15 aa, Homo sapiens
  CDR3 for beta chain variable domain of TCR clone 376219 (TRBV5-8, TRBJ2-7)
CASSYTGTGPREQYF

SEQ ID NO: 752439 - protein, 16 aa, Homo sapiens
  CDR3 for alpha chain variable domain of TCR clone 376220 (TRAV3, TRAJ10)
CAVRDMRAGGGNKLTF

SEQ ID NO: 752440 - protein, 14 aa, Homo sapiens
  CDR3 for beta chain variable domain of TCR clone 376220 (TRBV28, TRBJ2-2)
CASTRRSGDGELFF

SEQ ID NO: 752441 - protein, 13 aa, Homo sapiens
  CDR3 for alpha chain variable domain of TCR clone 376221 (TRAV1-1, TRAJ28)
CVTSGAGSYQLTF

SEQ ID NO: 752442 - protein, 17 aa, Homo sapiens
  CDR3 for beta chain variable domain of TCR clone 376221 (TRBV18, TRBJ2-2)
CASSQRPSGQGPGELFF

SEQ ID NO: 752443 - protein, 18 aa, Homo sapiens
  CDR3 for alpha chain variable domain of TCR clone 376222 (TRAV21, TRAJ52)
CAVRPSPAGATSYGKLTF

SEQ ID NO: 752444 - protein, 17 aa, Homo sapiens
  CDR3 for beta chain variable domain of TCR clone 376222 (TRBV25-1, TRBJ2-1)
CASSAYGQGRGVYEQFF

SEQ ID NO: 752445 - protein, 16 aa, Homo sapiens
  CDR3 for alpha chain variable domain of TCR clone 376223 (TRAV27, TRAJ13)
CVGAKSDSGGYQKVTF

SEQ ID NO: 752446 - protein, 15 aa, Homo sapiens
  CDR3 for beta chain variable domain of TCR clone 376223 (TRBV29-1, TRBJ2-1)
CSVGRHALFYNEQFF

SEQ ID NO: 752447 - protein, 18 aa, Homo sapiens
  CDR3 for alpha chain variable domain of TCR clone 376224 (TRAV26-1, TRAJ38)
CCVLLHRRYAGNNRKLIW

SEQ ID NO: 752448 - protein, 13 aa, Homo sapiens
  CDR3 for beta chain variable domain of TCR clone 376224 (TRBV20-1, TRBJ1-1)
CSARGGGNTEAFF

SEQ ID NO: 752449 - protein, 16 aa, Homo sapiens
  CDR3 for alpha chain variable domain of TCR clone 376225 (TRAV16, TRAJ52)
CALSAAGGTSYGKLTF

SEQ ID NO: 752450 - protein, 13 aa, Homo sapiens
  CDR3 for beta chain variable domain of TCR clone 376225 (TRBV7-3, TRBJ1-2)
CASSLKRGYGYTF

SEQ ID NO: 752451 - protein, 15 aa, Homo sapiens
  CDR3 for alpha chain variable domain of TCR clone 376226 (TRAV26-1, TRAJ22)
CIVRVSFWFCKATDL

SEQ ID NO: 752452 - protein, 16 aa, Homo sapiens
  CDR3 for beta chain variable domain of TCR clone 376226 (TRBV5-1, TRBJ1-1)
CASSSVGGFGLTGAFF

SEQ ID NO: 752453 - protein, 14 aa, Homo sapiens
  CDR3 for alpha chain variable domain of TCR clone 376227 (TRAV12-3, TRAJ10)
SHLPLTGGGNKLTF

SEQ ID NO: 752454 - protein, 13 aa, Homo sapiens
  CDR3 for beta chain variable domain of TCR clone 376227 (TRBV2, TRBJ1-6)
CVDSGSYNSPLHF

SEQ ID NO: 752455 - protein, 12 aa, Homo sapiens
  CDR3 for alpha chain variable domain of TCR clone 376228 (TRAV8-6, TRAJ43)
CAVSQNNNDMRL

SEQ ID NO: 752456 - protein, 14 aa, Homo sapiens
  CDR3 for beta chain variable domain of TCR clone 376228 (TRBV10-3, TRBJ1-1)
CAISDGSGVTEAFF

SEQ ID NO: 752457 - protein, 12 aa, Homo sapiens
  CDR3 for alpha chain variable domain of TCR clone 376229 (TRAV21, TRAJ49)
CAVNDGGNQFYF

SEQ ID NO: 752458 - protein, 15 aa, Homo sapiens
  CDR3 for beta chain variable domain of TCR clone 376229 (TRBV7-3, TRBJ2-1)
CASSQTGGGEVEQFF

SEQ ID NO: 752459 - protein, 16 aa, Homo sapiens
  CDR3 for alpha chain variable domain of TCR clone 376230 (TRAV30, TRAJ24)
CGTEMVDADSRGKFQF

SEQ ID NO: 752460 - protein, 14 aa, Homo sapiens
  CDR3 for beta chain variable domain of TCR clone 376230 (TRBV27, TRBJ2-7)
CASSRTGRTGEQYF

SEQ ID NO: 752461 - protein, 14 aa, Homo sapiens
  CDR3 for alpha chain variable domain of TCR clone 376231 (TRAV8-4, TRAJ37)
CAVSESSNTGKLVF

SEQ ID NO: 752462 - protein, 12 aa, Homo sapiens
  CDR3 for beta chain variable domain of TCR clone 376231 (TRBV19, TRBJ2-1)
CASSRQGAEQFF

SEQ ID NO: 752463 - protein, 10 aa, Homo sapiens
  CDR3 for alpha chain variable domain of TCR clone 376232 (TRAV21, TRAJ34)
CAADTDKLIF

SEQ ID NO: 752464 - protein, 16 aa, Homo sapiens
  CDR3 for beta chain variable domain of TCR clone 376232 (TRBV6-5, TRBJ2-2)
CASSHVSRAQPGELVF

SEQ ID NO: 752465 - protein, 14 aa, Homo sapiens
  CDR3 for alpha chain variable domain of TCR clone 376233 (TRAV21, TRAJ45)
CAVSSGGGADGLTF

SEQ ID NO: 752466 - protein, 17 aa, Homo sapiens
  CDR3 for beta chain variable domain of TCR clone 376233 (TRBV7-2, TRBJ2-2)
CASSPRGAGEGTGELFF

SEQ ID NO: 752467 - protein, 15 aa, Homo sapiens
  CDR3 for alpha chain variable domain of TCR clone 376234 (TRAV8-3, TRAJ27)
RAVGPSKTNAGKSTF

SEQ ID NO: 752468 - protein, 12 aa, Homo sapiens
  CDR3 for beta chain variable domain of TCR clone 376234 (TRBV11-2, TRBJ2-2)
CASSLGGGELFF

SEQ ID NO: 752469 - protein, 11 aa, Homo sapiens
  CDR3 for alpha chain variable domain of TCR clone 376235 (TRAV2, TRAJ33)
CAVDSNYQLIW

SEQ ID NO: 752470 - protein, 14 aa, Homo sapiens
  CDR3 for beta chain variable domain of TCR clone 376235 (TRBV7-9, TRBJ2-5)
CASSLVGGEETQYF

SEQ ID NO: 752471 - protein, 15 aa, Homo sapiens
  CDR3 for alpha chain variable domain of TCR clone 376236 (TRAV4, TRAJ10)
CLVVREGGGGNKLTF

SEQ ID NO: 752472 - protein, 14 aa, Homo sapiens
  CDR3 for beta chain variable domain of TCR clone 376236 (TRBV7-3, TRBJ1-1)
CASSLKGGNTEAFF

SEQ ID NO: 752473 - protein, 13 aa, Homo sapiens
  CDR3 for alpha chain variable domain of TCR clone 376237 (TRAV12-3, TRAJ33)
YAMSVNSNYQLIW

SEQ ID NO: 752474 - protein, 16 aa, Homo sapiens
  CDR3 for beta chain variable domain of TCR clone 376237 (TRBV7-3, TRBJ2-3)
CARSLSGYRPEDTQYF

SEQ ID NO: 752475 - protein, 11 aa, Homo sapiens
  CDR3 for alpha chain variable domain of TCR clone 376238 (TRAV12-1, TRAJ43)
CVEYDNNVMRF

SEQ ID NO: 752476 - protein, 17 aa, Homo sapiens
  CDR3 for beta chain variable domain of TCR clone 376238 (TRBV20-1, TRBJ2-1)
CSARDPLAGVWDNEQFF

SEQ ID NO: 752477 - protein, 15 aa, Homo sapiens
  CDR3 for alpha chain variable domain of TCR clone 376239 (TRAV26-1, TRAJ23)
CIVRVAGYQGGKLIF

SEQ ID NO: 752478 - protein, 18 aa, Homo sapiens
  CDR3 for beta chain variable domain of TCR clone 376239 (TRBV28, TRBJ2-1)
CASSSTSGRANAYNGQFF

SEQ ID NO: 752479 - protein, 13 aa, Homo sapiens
  CDR3 for alpha chain variable domain of TCR clone 376240 (TRAV27, TRAJ29)
CAGAHSGNTPLVF

SEQ ID NO: 752480 - protein, 15 aa, Homo sapiens
  CDR3 for beta chain variable domain of TCR clone 376240 (TRBV15, TRGJ1)
CATSRDMVSYEKLFF

SEQ ID NO: 752481 - protein, 14 aa, Homo sapiens
  CDR3 for alpha chain variable domain of TCR clone 376241 (TRAV2, TRAJ3)
CAVRPYSSASKIIF

SEQ ID NO: 752482 - protein, 17 aa, Homo sapiens
  CDR3 for beta chain variable domain of TCR clone 376241 (TRBV7-6, TRBJ2-5)
CASSSPQAGDPSETQCF

SEQ ID NO: 752483 - protein, 13 aa, Homo sapiens
  CDR3 for alpha chain variable domain of TCR clone 376242 (TRAV27, TRAJ41)
CAGEGNSGYALNF

SEQ ID NO: 752484 - protein, 14 aa, Homo sapiens
  CDR3 for beta chain variable domain of TCR clone 376242 (TRBV2, TRBJ2-1)
CASRTGSSYNEQFF

SEQ ID NO: 752485 - protein, 13 aa, Homo sapiens
  CDR3 for alpha chain variable domain of TCR clone 376243 (TRAV36/DV7, TRAJ7)
CAGTRYGNNRLAF

SEQ ID NO: 752486 - protein, 14 aa, Homo sapiens
  CDR3 for beta chain variable domain of TCR clone 376243 (TRBV19, TRBJ2-1)
FASPTFVLSGEQFF

SEQ ID NO: 752487 - protein, 17 aa, Homo sapiens
  CDR3 for alpha chain variable domain of TCR clone 376244 (TRAV8-1, TRAJ43)
CAVTNDMRFGAGTRLTV

SEQ ID NO: 752488 - protein, 17 aa, Homo sapiens
  CDR3 for beta chain variable domain of TCR clone 376244 (TRBV5-4, TRBJ2-1)
CASSSASGRGPYNEQFF

SEQ ID NO: 752489 - protein, 15 aa, Homo sapiens
  CDR3 for alpha chain variable domain of TCR clone 376245 (TRAV12-2, TRAJ53)
CAVNGGGGSNYNLTF

SEQ ID NO: 752490 - protein, 14 aa, Homo sapiens
  CDR3 for beta chain variable domain of TCR clone 376245 (TRBV12-5, TRBJ2-5)
CASGSRTHQETQYF

SEQ ID NO: 752491 - protein, 12 aa, Homo sapiens
  CDR3 for alpha chain variable domain of TCR clone 376246 (TRAV12-2, TRAJ4)
GWPEGGYNKLIF

SEQ ID NO: 752492 - protein, 13 aa, Homo sapiens
  CDR3 for beta chain variable domain of TCR clone 376246 (TRBV12-4, TRBJ1-2)
CASSLRQGKGDTF

SEQ ID NO: 752493 - protein, 15 aa, Homo sapiens
  CDR3 for alpha chain variable domain of TCR clone 376247 (TRAV8-3, TRAJ11)
CAVGLLNSGYSTLTF

SEQ ID NO: 752494 - protein, 13 aa, Homo sapiens
  CDR3 for beta chain variable domain of TCR clone 376247 (TRBV19, TRBJ2-7)
CASSPRQSYEQYF

SEQ ID NO: 752495 - protein, 14 aa, Homo sapiens
  CDR3 for alpha chain variable domain of TCR clone 376248 (TRAV12-3, TRAJ37)
CVSEGSSNTGKLIF

SEQ ID NO: 752496 - protein, 14 aa, Homo sapiens
  CDR3 for beta chain variable domain of TCR clone 376248 (TRBV20-1, TRBJ1-1)
CSTQTRIGGTEAFF

SEQ ID NO: 752497 - protein, 16 aa, Homo sapiens
  CDR3 for alpha chain variable domain of TCR clone 376249 (TRAV38-1, TRAJ45)
CAFMKGSGGGADGLTF

SEQ ID NO: 752498 - protein, 15 aa, Homo sapiens
  CDR3 for beta chain variable domain of TCR clone 376249 (TRBV7-2, TRBJ2-3)
CASSSTGLDTDTQYF

SEQ ID NO: 752499 - protein, 13 aa, Homo sapiens
  CDR3 for alpha chain variable domain of TCR clone 376250 (TRAV8-1, TRAJ28)
CAVSGAGSYQLTF

SEQ ID NO: 752500 - protein, 13 aa, Homo sapiens
  CDR3 for beta chain variable domain of TCR clone 376250 (TRBV20-1, TRBJ1-1)
RSARGGGNTEAFF

SEQ ID NO: 752501 - protein, 15 aa, Homo sapiens
  CDR3 for alpha chain variable domain of TCR clone 376251 (TRAV8-3, TRAJ37)
CAVGAPSSNTAKLIF

SEQ ID NO: 752502 - protein, 15 aa, Homo sapiens
  CDR3 for beta chain variable domain of TCR clone 376251 (TRBV11-2, TRBJ1-2)
CASSQMRGLNYGYTF

SEQ ID NO: 752503 - protein, 17 aa, Homo sapiens
  CDR3 for alpha chain variable domain of TCR clone 376252 (TRAV13-1, TRAJ28)
CAASPPYSGAGSYQLTF

SEQ ID NO: 752504 - protein, 17 aa, Homo sapiens
  CDR3 for beta chain variable domain of TCR clone 376252 (TRBV7-3, TRBJ2-5)
CASSLGSGRSGSETQYF

SEQ ID NO: 752505 - protein, 14 aa, Homo sapiens
  CDR3 for alpha chain variable domain of TCR clone 376253 (TRAV12-2, TRAJ40)
CAVKIPSGTYNYIF

SEQ ID NO: 752506 - protein, 14 aa, Homo sapiens
  CDR3 for beta chain variable domain of TCR clone 376253 (TRBV20-1, TRBJ1-1)
CSAQTRVGGTEAFF

SEQ ID NO: 752507 - protein, 17 aa, Homo sapiens
  CDR3 for alpha chain variable domain of TCR clone 376254 (TRAV12-1, TRAJ13)
CVVNKRGEFWGLPESYL

SEQ ID NO: 752508 - protein, 14 aa, Homo sapiens
  CDR3 for beta chain variable domain of TCR clone 376254 (TRBV7-2, TRBJ2-7)
CASRSQGAAYEQYF

SEQ ID NO: 752509 - protein, 14 aa, Homo sapiens
  CDR3 for alpha chain variable domain of TCR clone 376255 (TRAV9-2, TRAJ39)
CALYIYNAGNMLTF

SEQ ID NO: 752510 - protein, 14 aa, Homo sapiens
  CDR3 for beta chain variable domain of TCR clone 376255 (TRBV19, TRBJ2-1)
CASSMGSGAAEQFF

SEQ ID NO: 752511 - protein, 14 aa, Homo sapiens
  CDR3 for alpha chain variable domain of TCR clone 376256 (TRAV17, TRAJ11)
CATDTSRGYSTLTF

SEQ ID NO: 752512 - protein, 13 aa, Homo sapiens
  CDR3 for beta chain variable domain of TCR clone 376256 (TRBV4-2, TRBJ1-1)
CASSQAGNTEAFF

SEQ ID NO: 752513 - protein, 17 aa, Homo sapiens
  CDR3 for alpha chain variable domain of TCR clone 376257 (TRAV8-2, TRAJ17)
CVVSDRRFKAAGNKLTF

SEQ ID NO: 752514 - protein, 15 aa, Homo sapiens
  CDR3 for beta chain variable domain of TCR clone 376257 (TRBV4-1, TRBJ1-4)
CASSDTGGTNEKLFF

SEQ ID NO: 752515 - protein, 15 aa, Homo sapiens
  CDR3 for alpha chain variable domain of TCR clone 376258 (TRAV3, TRAJ45)
CSVRTPWGGADGLTF

SEQ ID NO: 752516 - protein, 16 aa, Homo sapiens
  CDR3 for beta chain variable domain of TCR clone 376258 (TRBV6-1, TRBJ2-2)
CASSFGQGANTGELFF

SEQ ID NO: 752517 - protein, 14 aa, Homo sapiens
  CDR3 for alpha chain variable domain of TCR clone 376259 (TRAV17, TRAJ57)
CATDPQGGSEKLVF

SEQ ID NO: 752518 - protein, 14 aa, Homo sapiens
  CDR3 for beta chain variable domain of TCR clone 376259 (TRBV18, TRBJ2-7)
CASSPRGGAYEQYL

SEQ ID NO: 752519 - protein, 14 aa, Homo sapiens
  CDR3 for alpha chain variable domain of TCR clone 376260 (TRAV30, TRAJ45)
CGTSTGGGADGLTF

SEQ ID NO: 752520 - protein, 15 aa, Homo sapiens
  CDR3 for beta chain variable domain of TCR clone 376260 (TRBV11-2, TRBJ2-5)
CASSLGAGGVETQYF

SEQ ID NO: 752521 - protein, 14 aa, Homo sapiens
  CDR3 for alpha chain variable domain of TCR clone 376261 (TRAV13-2, TRAJ43)
CAEIPTYNNNDMRF

SEQ ID NO: 752522 - protein, 14 aa, Homo sapiens
  CDR3 for beta chain variable domain of TCR clone 376261 (TRBV12-5, TRBJ2-5)
CASGSRTHQETQYF

SEQ ID NO: 752523 - protein, 15 aa, Homo sapiens
  CDR3 for alpha chain variable domain of TCR clone 376262 (TRAV21, TRAJ53)
CATLNSGGSNYKLTF

SEQ ID NO: 752524 - protein, 17 aa, Homo sapiens
  CDR3 for beta chain variable domain of TCR clone 376262 (TRBV7-6, TRBJ2-5)
CASSSPQAGDPSETQYF

SEQ ID NO: 752525 - protein, 16 aa, Homo sapiens
  CDR3 for alpha chain variable domain of TCR clone 376263 (TRAV3, TRAJ18)
CAVRDGRGSTLGRLYF

SEQ ID NO: 752526 - protein, 15 aa, Homo sapiens
  CDR3 for beta chain variable domain of TCR clone 376263 (TRBV6-5, TRBJ2-1)
CASSYDAGAGNEQFF

SEQ ID NO: 752527 - protein, 21 aa, Homo sapiens
  CDR3 for alpha chain variable domain of TCR clone 376264 (TRAV21, TRAJ22)
CAVRLFFWFCKSTDLWIWDTF

SEQ ID NO: 752528 - protein, 14 aa, Homo sapiens
  CDR3 for beta chain variable domain of TCR clone 376264 (TRBV19, TRBJ1-5)
CASRAPDSFLSQHL

SEQ ID NO: 752529 - protein, 15 aa, Homo sapiens
  CDR3 for alpha chain variable domain of TCR clone 376265 (TRAV26-1, TRAJ29)
CIVRVEGSGNTPLVF

SEQ ID NO: 752530 - protein, 16 aa, Homo sapiens
  CDR3 for beta chain variable domain of TCR clone 376265 (TRBV12-4, TRBJ2-2)
CASSFWIVGNTGELFF

SEQ ID NO: 752531 - protein, 17 aa, Homo sapiens
  CDR3 for alpha chain variable domain of TCR clone 376266 (TRAV38-2/DV8, TRAJ38)
CAYRSARGAGNNRKLIW

SEQ ID NO: 752532 - protein, 13 aa, Homo sapiens
  CDR3 for beta chain variable domain of TCR clone 376266 (TRBV7-9, TRBJ1-2)
CASSLKQNYGYTF

SEQ ID NO: 752533 - protein, 13 aa, Homo sapiens
  CDR3 for alpha chain variable domain of TCR clone 376267 (TRAV13-2, TRAJ48)
CAEMDFGNEKLTF

SEQ ID NO: 752534 - protein, 15 aa, Homo sapiens
  CDR3 for beta chain variable domain of TCR clone 376267 (TRBV2, TRBJ2-1)
CASSGLAGSYNEQFF

SEQ ID NO: 752535 - protein, 14 aa, Homo sapiens
  CDR3 for alpha chain variable domain of TCR clone 376268 (TRAV2, TRAJ9)
CAVVDRSGGFKTIF

SEQ ID NO: 752536 - protein, 15 aa, Homo sapiens
  CDR3 for beta chain variable domain of TCR clone 376268 (TRBV19, TRBJ2-1)
CASSHRDRGPNEQFF

SEQ ID NO: 752537 - protein, 17 aa, Homo sapiens
  CDR3 for alpha chain variable domain of TCR clone 376269 (TRAV13-1, TRAJ52)
CAASSGAGGTSYGKLTF

SEQ ID NO: 752538 - protein, 12 aa, Homo sapiens
  CDR3 for beta chain variable domain of TCR clone 376269 (TRBV11-2, TRBJ2-2)
CARSLGGGELFF

SEQ ID NO: 752539 - protein, 17 aa, Homo sapiens
  CDR3 for alpha chain variable domain of TCR clone 376270 (TRAV3, TRAJ6)
CAVRDGPRAGGSYIHTF

SEQ ID NO: 752540 - protein, 17 aa, Homo sapiens
  CDR3 for beta chain variable domain of TCR clone 376270 (TRBV25-1, TRBJ2-1)
CASSAYGQGRGVYEQFF

SEQ ID NO: 752541 - protein, 18 aa, Homo sapiens
  CDR3 for alpha chain variable domain of TCR clone 376271 (TRAV21, TRAJ52)
CAVRPSPAGGTSYGKLTF

SEQ ID NO: 752542 - protein, 14 aa, Homo sapiens
  CDR3 for beta chain variable domain of TCR clone 376271 (TRBV2, TRBJ2-5)
CASSEVLAQETQYF

SEQ ID NO: 752543 - protein, 11 aa, Homo sapiens
  CDR3 for alpha chain variable domain of TCR clone 376272 (TRAV1-2, TRAJ40)
CAVPGTYKYIF

SEQ ID NO: 752544 - protein, 14 aa, Homo sapiens
  CDR3 for beta chain variable domain of TCR clone 376272 (TRBV7-9, TRBJ2-7)
CQQLALAEAYEQYF

SEQ ID NO: 752545 - protein, 13 aa, Homo sapiens
  CDR3 for alpha chain variable domain of TCR clone 376273 (TRAV1-1, TRAJ9)
CAAKNTGGFKAIF

SEQ ID NO: 752546 - protein, 13 aa, Homo sapiens
  CDR3 for beta chain variable domain of TCR clone 376273 (TRBV7-9, TRBJ1-2)
CASSLKQNYGYTF

SEQ ID NO: 752547 - protein, 15 aa, Homo sapiens
  CDR3 for alpha chain variable domain of TCR clone 376274 (TRAV27, TRAJ20)
CAGSSVRSNDYKLSF

SEQ ID NO: 752548 - protein, 15 aa, Homo sapiens
  CDR3 for beta chain variable domain of TCR clone 376274 (TRBV6-1, TRBJ2-6)
CASSSRPSGANVLTF

SEQ ID NO: 752549 - protein, 12 aa, Homo sapiens
  CDR3 for alpha chain variable domain of TCR clone 376275 (TRAV8-3, TRAJ20)
CAVDFNDYRLSF

SEQ ID NO: 752550 - protein, 13 aa, Homo sapiens
  CDR3 for beta chain variable domain of TCR clone 376275 (TRBV5-7, TRBJ2-3)
CASSVGRTDTQYF

SEQ ID NO: 752551 - protein, 15 aa, Homo sapiens
  CDR3 for alpha chain variable domain of TCR clone 376276 (TRAV3, TRAJ47)
CAVRDIGEHGNKLVF

SEQ ID NO: 752552 - protein, 14 aa, Homo sapiens
  CDR3 for beta chain variable domain of TCR clone 376276 (TRBV13, TRBJ2-5)
CASSLERVGGTQYF

SEQ ID NO: 752553 - protein, 13 aa, Homo sapiens
  CDR3 for alpha chain variable domain of TCR clone 376277 (TRAV27, TRAJ49)
CGPRPYTGNQFYF

SEQ ID NO: 752554 - protein, 16 aa, Homo sapiens
  CDR3 for beta chain variable domain of TCR clone 376277 (TRBV4-1, TRBJ1-2)
CASSQDAGQVLYGYTF

SEQ ID NO: 752555 - protein, 16 aa, Homo sapiens
  CDR3 for alpha chain variable domain of TCR clone 376278 (TRAV21, TRAJ52)
CAVTNAGGTSYGKLTF

SEQ ID NO: 752556 - protein, 14 aa, Homo sapiens
  CDR3 for beta chain variable domain of TCR clone 376278 (TRBV10-3, TRBJ2-1)
CAISDRGGVTEQFF

SEQ ID NO: 752557 - protein, 14 aa, Homo sapiens
  CDR3 for alpha chain variable domain of TCR clone 376279 (TRAV9-2, TRAJ36)
CALPWRTGANNLFF

SEQ ID NO: 752558 - protein, 12 aa, Homo sapiens
  CDR3 for beta chain variable domain of TCR clone 376279 (TRBV12-5, TRBJ2-5)
CASGQGVETQYF

SEQ ID NO: 752559 - protein, 12 aa, Homo sapiens
  CDR3 for alpha chain variable domain of TCR clone 376280 (TRAV8-3, TRAJ27)
CAVGAEAGKSTF

SEQ ID NO: 752560 - protein, 14 aa, Homo sapiens
  CDR3 for beta chain variable domain of TCR clone 376280 (TRBV2, TRBJ2-1)
CASRLIVGHDERFF

SEQ ID NO: 752561 - protein, 14 aa, Homo sapiens
  CDR3 for alpha chain variable domain of TCR clone 376281 (TRAV17, TRAJ45)
CATASGGVADGLTF

SEQ ID NO: 752562 - protein, 15 aa, Homo sapiens
  CDR3 for beta chain variable domain of TCR clone 376281 (TRBV11-2, TRBJ2-1)
CASSRNRGLMYEQFF

SEQ ID NO: 752563 - protein, 14 aa, Homo sapiens
  CDR3 for alpha chain variable domain of TCR clone 376282 (TRAV12-1, TRAJ17)
CMVNYKAAGNKLTF

SEQ ID NO: 752564 - protein, 17 aa, Homo sapiens
  CDR3 for beta chain variable domain of TCR clone 376282 (TRBV11-2, TRBJ2-1)
CASSLYPPGVEYNEQFF

SEQ ID NO: 752565 - protein, 14 aa, Homo sapiens
  CDR3 for alpha chain variable domain of TCR clone 376283 (TRAV26-1, TRAJ34)
CIVRVAYNTDKLIF

SEQ ID NO: 752566 - protein, 17 aa, Homo sapiens
  CDR3 for beta chain variable domain of TCR clone 376283 (TRBV7-8, TRBJ2-6)
CASSAGTGGAGANVLTF

SEQ ID NO: 752567 - protein, 19 aa, Homo sapiens
  CDR3 for alpha chain variable domain of TCR clone 376284 (TRAV16, )
CALSGDIQNPNPAVYQLRD

SEQ ID NO: 752568 - protein, 16 aa, Homo sapiens
  CDR3 for beta chain variable domain of TCR clone 376284 (TRBV12-5, TRBJ2-5)
CASGPRTSGNQETQYF

SEQ ID NO: 752569 - protein, 13 aa, Homo sapiens
  CDR3 for alpha chain variable domain of TCR clone 376285 (TRAV9-2, TRAJ53)
CALSGGSNYKLTF

SEQ ID NO: 752570 - protein, 17 aa, Homo sapiens
  CDR3 for beta chain variable domain of TCR clone 376285 (TRBV11-2, TRBJ2-1)
CASSLYPPAVEYNEQFF

SEQ ID NO: 752571 - protein, 15 aa, Homo sapiens
  CDR3 for alpha chain variable domain of TCR clone 376286 (TRAV2, TRAJ9)
CAVEDRGTGGFKTIF

SEQ ID NO: 752572 - protein, 14 aa, Homo sapiens
  CDR3 for beta chain variable domain of TCR clone 376286 (TRBV7-9, TRBJ2-2)
CASSGLADTGELFF

SEQ ID NO: 752573 - protein, 11 aa, Homo sapiens
  CDR3 for alpha chain variable domain of TCR clone 376287 (TRAV35, TRAJ30)
CAPGGDDKIIF

SEQ ID NO: 752574 - protein, 15 aa, Homo sapiens
  CDR3 for beta chain variable domain of TCR clone 376287 (TRBV9, TRBJ1-6)
CASSVAGTGDSPLYF

SEQ ID NO: 752575 - protein, 13 aa, Homo sapiens
  CDR3 for alpha chain variable domain of TCR clone 376288 (TRAV1-2, TRAJ9)
CAVLNTGGFKTIF

SEQ ID NO: 752576 - protein, 17 aa, Homo sapiens
  CDR3 for beta chain variable domain of TCR clone 376288 (TRBV13, TRBJ2-3)
CASSLSRLAGGRNTQYF

SEQ ID NO: 752577 - protein, 13 aa, Homo sapiens
  CDR3 for alpha chain variable domain of TCR clone 376289 (TRAV8-3, TRAJ43)
CAVGPDNNNDLRF

SEQ ID NO: 752578 - protein, 14 aa, Homo sapiens
  CDR3 for beta chain variable domain of TCR clone 376289 (TRBV19, TRBJ2-1)
CASPTFVLSGEQFF

SEQ ID NO: 752579 - protein, 13 aa, Homo sapiens
  CDR3 for alpha chain variable domain of TCR clone 376290 (TRAV12-3, TRAJ44)
RARTTGTASKLTF

SEQ ID NO: 752580 - protein, 15 aa, Homo sapiens
  CDR3 for beta chain variable domain of TCR clone 376290 (TRBV29-1, TRBJ1-2)
CSGLDVRGANYGYTF

SEQ ID NO: 752581 - protein, 12 aa, Homo sapiens
  CDR3 for alpha chain variable domain of TCR clone 376291 (TRAV21, TRAJ33)
CAKMDSNYQLIW

SEQ ID NO: 752582 - protein, 12 aa, Homo sapiens
  CDR3 for beta chain variable domain of TCR clone 376291 (TRBV11-2, TRBJ2-5)
CASSSVGETQYF

SEQ ID NO: 752583 - protein, 13 aa, Homo sapiens
  CDR3 for alpha chain variable domain of TCR clone 376292 (TRAV16, TRAJ33)
ALSAMDSNYQLIW

SEQ ID NO: 752584 - protein, 14 aa, Homo sapiens
  CDR3 for beta chain variable domain of TCR clone 376292 (TRBV4-2, TRBJ2-1)
CASGLDRAYNEQFF

SEQ ID NO: 752585 - protein, 14 aa, Homo sapiens
  CDR3 for alpha chain variable domain of TCR clone 376293 (TRAV29/DV5, TRAJ32)
CAAAYGGATNKLIF

SEQ ID NO: 752586 - protein, 15 aa, Homo sapiens
  CDR3 for beta chain variable domain of TCR clone 376293 (TRBV27, TRBJ2-7)
CASSTAGTGSYEQCF

SEQ ID NO: 752587 - protein, 14 aa, Homo sapiens
  CDR3 for alpha chain variable domain of TCR clone 376294 (TRAV1-2, TRAJ16)
CAVNRFSDGQKLLF

SEQ ID NO: 752588 - protein, 16 aa, Homo sapiens
  CDR3 for beta chain variable domain of TCR clone 376294 (TRBV12-5, TRBJ2-5)
GASGPRTSGNQETQYF

SEQ ID NO: 752589 - protein, 15 aa, Homo sapiens
  CDR3 for alpha chain variable domain of TCR clone 376295 (TRAV17, TRAJ16)
CVTALRFSDAQKLLF

SEQ ID NO: 752590 - protein, 15 aa, Homo sapiens
  CDR3 for beta chain variable domain of TCR clone 376295 (TRBV20-1, TRBJ1-1)
CSASRGVTGNTEAFF

SEQ ID NO: 752591 - protein, 12 aa, Homo sapiens
  CDR3 for alpha chain variable domain of TCR clone 376296 (TRAV12-3, TRAJ17)
CATTLTGNKLTF

SEQ ID NO: 752592 - protein, 17 aa, Homo sapiens
  CDR3 for beta chain variable domain of TCR clone 376296 (TRBV18, TRBJ2-1)
CASSKGLSGGADNEQFF

SEQ ID NO: 752593 - protein, 15 aa, Homo sapiens
  CDR3 for alpha chain variable domain of TCR clone 376297 (TRAV25, TRAJ52)
CAVRPGGTSYGKLTF

SEQ ID NO: 752594 - protein, 17 aa, Homo sapiens
  CDR3 for beta chain variable domain of TCR clone 376297 (TRBV7-8, TRBJ2-6)
CASSAGTGGAGANDLIF

SEQ ID NO: 752595 - protein, 12 aa, Homo sapiens
  CDR3 for alpha chain variable domain of TCR clone 376298 (TRAV21, TRAJ13)
PGPSGGYQTVTF

SEQ ID NO: 752596 - protein, 13 aa, Homo sapiens
  CDR3 for beta chain variable domain of TCR clone 376298 (TRBV7-9, TRBJ1-2)
CASSLKQNYGYTF

SEQ ID NO: 752597 - protein, 15 aa, Homo sapiens
  CDR3 for alpha chain variable domain of TCR clone 376299 (TRAV12-2, TRAJ43)
CAFDMRFGAGTRLTV

SEQ ID NO: 752598 - protein, 14 aa, Homo sapiens
  CDR3 for beta chain variable domain of TCR clone 376299 (TRBV19, TRBJ2-7)
CASSIFAGTYEQYF

SEQ ID NO: 752599 - protein, 16 aa, Homo sapiens
  CDR3 for alpha chain variable domain of TCR clone 376300 (TRAV3, TRAJ10)
CAVSDRRAGGGNKLTF

SEQ ID NO: 752600 - protein, 14 aa, Homo sapiens
  CDR3 for beta chain variable domain of TCR clone 376300 (TRBV25-1, TRBJ1-1)
CASTHLGGNTEAFF

SEQ ID NO: 752601 - protein, 14 aa, Homo sapiens
  CDR3 for alpha chain variable domain of TCR clone 376301 (TRAV26-1, TRAJ39)
CIVFTNNAGNMLTF

SEQ ID NO: 752602 - protein, 16 aa, Homo sapiens
  CDR3 for beta chain variable domain of TCR clone 376301 (TRBV24-1, TRBJ2-3)
CATSDPGTGATDTQYF

SEQ ID NO: 752603 - protein, 14 aa, Homo sapiens
  CDR3 for alpha chain variable domain of TCR clone 376302 (TRAV13-2, TRAJ43)
CAEIPTYNNNDMRF

SEQ ID NO: 752604 - protein, 15 aa, Homo sapiens
  CDR3 for beta chain variable domain of TCR clone 376302 (TRBV7-9, TRBJ2-2)
CASGPLDTIPGELFF

SEQ ID NO: 752605 - protein, 11 aa, Homo sapiens
  CDR3 for alpha chain variable domain of TCR clone 376303 (TRAV3, TRAJ21)
CAVGNFNKFYF

SEQ ID NO: 752606 - protein, 15 aa, Homo sapiens
  CDR3 for beta chain variable domain of TCR clone 376303 (TRBV2, TRBJ2-7)
CASTLLGSGATEQYF

SEQ ID NO: 752607 - protein, 13 aa, Homo sapiens
  CDR3 for alpha chain variable domain of TCR clone 376304 (TRAV13-1, TRAJ47)
CAATLTGGNKLVF

SEQ ID NO: 752608 - protein, 13 aa, Homo sapiens
  CDR3 for beta chain variable domain of TCR clone 376304 (TRBV11-2, TRBJ1-6)
CASSLAGTSPLHF

SEQ ID NO: 752609 - protein, 14 aa, Homo sapiens
  CDR3 for alpha chain variable domain of TCR clone 376305 (TRAV22, TRAJ6)
CAEVGPGGSYIPTF

SEQ ID NO: 752610 - protein, 11 aa, Homo sapiens
  CDR3 for beta chain variable domain of TCR clone 376305 (TRBV20-1, TRBJ2-1)
CSLSSGSEQFF

SEQ ID NO: 752611 - protein, 13 aa, Homo sapiens
  CDR3 for alpha chain variable domain of TCR clone 376306 (TRAV13-1, TRAJ33)
CAASRAGNYQLIW

SEQ ID NO: 752612 - protein, 15 aa, Homo sapiens
  CDR3 for beta chain variable domain of TCR clone 376306 (TRBV2, TRBJ2-7)
DDSAMYFCASSEQYF

SEQ ID NO: 752613 - protein, 14 aa, Homo sapiens
  CDR3 for alpha chain variable domain of TCR clone 376307 (TRAV38-2/DV8, TRAJ23)
CAYRSLNQGGKLIF

SEQ ID NO: 752614 - protein, 13 aa, Homo sapiens
  CDR3 for beta chain variable domain of TCR clone 376307 (TRBV24-1, TRBJ2-1)
CATSAGPYNEQFF

SEQ ID NO: 752615 - protein, 10 aa, Homo sapiens
  CDR3 for alpha chain variable domain of TCR clone 376308 (TRAV12-2, TRAJ27)
CGANAGKSTF

SEQ ID NO: 752616 - protein, 13 aa, Homo sapiens
  CDR3 for beta chain variable domain of TCR clone 376308 (TRBV7-6, TRBJ1-2)
CASSLVADYGYTF

SEQ ID NO: 752617 - protein, 12 aa, Homo sapiens
  CDR3 for alpha chain variable domain of TCR clone 376309 (TRAV12-3, TRAJ17)
CAMTLTGNKLTF

SEQ ID NO: 752618 - protein, 15 aa, Homo sapiens
  CDR3 for beta chain variable domain of TCR clone 376309 (TRBV20-1, TRBJ2-7)
CSARDRVAGLDEQYF

SEQ ID NO: 752619 - protein, 18 aa, Homo sapiens
  CDR3 for alpha chain variable domain of TCR clone 376310 (TRAV12-3, TRAJ52)
CAMSVGGAGGTSHGKLTF

SEQ ID NO: 752620 - protein, 16 aa, Homo sapiens
  CDR3 for beta chain variable domain of TCR clone 376310 (TRBV7-9, TRBJ1-2)
CASSISLDRGGYGYTF

SEQ ID NO: 752621 - protein, 13 aa, Homo sapiens
  CDR3 for alpha chain variable domain of TCR clone 376311 (TRAV12-1, TRAJ11)
CVVNRAGYSTLTF

SEQ ID NO: 752622 - protein, 17 aa, Homo sapiens
  CDR3 for beta chain variable domain of TCR clone 376311 (TRBV7-3, TRBJ2-3)
CASSLMKRMRGADTQYF

SEQ ID NO: 752623 - protein, 12 aa, Homo sapiens
  CDR3 for alpha chain variable domain of TCR clone 376312 (TRAV12-3, TRAJ20)
CAMVRGDYKLSF

SEQ ID NO: 752624 - protein, 17 aa, Homo sapiens
  CDR3 for beta chain variable domain of TCR clone 376312 (TRBV7-3, TRBJ2-5)
CASSLGSGRSGSETQYF

SEQ ID NO: 752625 - protein, 11 aa, Homo sapiens
  CDR3 for alpha chain variable domain of TCR clone 376313 (TRAV12-1, TRAJ30)
CVVNGQDKIIF

SEQ ID NO: 752626 - protein, 12 aa, Homo sapiens
  CDR3 for beta chain variable domain of TCR clone 376313 (TRBV27, TRBJ2-2)
CASKLFTGEVFF

SEQ ID NO: 752627 - protein, 12 aa, Homo sapiens
  CDR3 for alpha chain variable domain of TCR clone 376314 (TRAV12-3, TRAJ17)
CAMTLTGNKRTF

SEQ ID NO: 752628 - protein, 15 aa, Homo sapiens
  CDR3 for beta chain variable domain of TCR clone 376314 (TRBV10-2, TRBJ2-6)
CASSEQGTGANVLTF

SEQ ID NO: 752629 - protein, 14 aa, Homo sapiens
  CDR3 for alpha chain variable domain of TCR clone 376315 (TRAV17, TRAJ56)
CATVPAGANSKLTF

SEQ ID NO: 752630 - protein, 15 aa, Homo sapiens
  CDR3 for beta chain variable domain of TCR clone 376315 (TRBV4-3, TRBJ1-1)
CASSQELGRGTEAFF

SEQ ID NO: 752631 - protein, 14 aa, Homo sapiens
  CDR3 for alpha chain variable domain of TCR clone 376316 (TRAV8-6, TRAJ34)
CAVRDQGNTDKLIF

SEQ ID NO: 752632 - protein, 15 aa, Homo sapiens
  CDR3 for beta chain variable domain of TCR clone 376316 (TRBV27, TRBJ2-1)
CASSNGGGSSNEQFF

SEQ ID NO: 752633 - protein, 15 aa, Homo sapiens
  CDR3 for alpha chain variable domain of TCR clone 376317 (TRAV3, TRAJ47)
CAVRDIGEYGNKLVF

SEQ ID NO: 752634 - protein, 13 aa, Homo sapiens
  CDR3 for beta chain variable domain of TCR clone 376317 (TRBV7-6, TRBJ2-3)
CASSLRSDNTQYF

SEQ ID NO: 752635 - protein, 11 aa, Homo sapiens
  CDR3 for alpha chain variable domain of TCR clone 376318 (TRAV12-2, TRAJ33)
CAVTSNYQLIW

SEQ ID NO: 752636 - protein, 14 aa, Homo sapiens
  CDR3 for beta chain variable domain of TCR clone 376318 (TRBV28, TRBJ2-2)
CASRSGSGTGELFF

SEQ ID NO: 752637 - protein, 14 aa, Homo sapiens
  CDR3 for alpha chain variable domain of TCR clone 376319 (TRAV2, TRAJ37)
CAVEDQGNTGKLIF

SEQ ID NO: 752638 - protein, 15 aa, Homo sapiens
  CDR3 for beta chain variable domain of TCR clone 376319 (TRBV11-2, TRBJ1-3)
CASSLDGTVGNTIYF

SEQ ID NO: 752639 - protein, 14 aa, Homo sapiens
  CDR3 for alpha chain variable domain of TCR clone 376320 (TRAV1-2, TRAJ16)
CAVNRFSDGQKLLF

SEQ ID NO: 752640 - protein, 17 aa, Homo sapiens
  CDR3 for beta chain variable domain of TCR clone 376320 (TRBV19, TRBJ1-5)
CASRGGAVAISPSILVM

SEQ ID NO: 752641 - protein, 12 aa, Homo sapiens
  CDR3 for alpha chain variable domain of TCR clone 376321 (TRAV1-1, TRAJ9)
CAVDTGGFKTIF

SEQ ID NO: 752642 - protein, 13 aa, Homo sapiens
  CDR3 for beta chain variable domain of TCR clone 376321 (TRBV19, TRBJ1-2)
CASSVPGQDGYTF

SEQ ID NO: 752643 - protein, 14 aa, Homo sapiens
  CDR3 for alpha chain variable domain of TCR clone 376322 (TRAV17, TRAJ45)
CATATGGGADGLTF

SEQ ID NO: 752644 - protein, 13 aa, Homo sapiens
  CDR3 for beta chain variable domain of TCR clone 376322 (TRBV15, TRBJ2-7)
CATSTTGHYEQYF

SEQ ID NO: 752645 - protein, 13 aa, Homo sapiens
  CDR3 for alpha chain variable domain of TCR clone 376323 (TRAV22, TRAJ29)
CAVGGSGNTPLVF

SEQ ID NO: 752646 - protein, 15 aa, Homo sapiens
  CDR3 for beta chain variable domain of TCR clone 376323 (TRBV14, TRBJ2-1)
CASSQVFRPYNEQFF

SEQ ID NO: 752647 - protein, 12 aa, Homo sapiens
  CDR3 for alpha chain variable domain of TCR clone 376324 (TRAV8-3, TRAJ20)
CAVDFNDYKLSF

SEQ ID NO: 752648 - protein, 17 aa, Homo sapiens
  CDR3 for beta chain variable domain of TCR clone 376324 (TRBV7-8, TRBJ2-6)
CASSAGTGGAGSNVLTF

SEQ ID NO: 752649 - protein, 15 aa, Homo sapiens
  CDR3 for alpha chain variable domain of TCR clone 376325 (TRAV2, TRAJ24)
CAVEVLTDSWVKFQF

SEQ ID NO: 752650 - protein, 14 aa, Homo sapiens
  CDR3 for beta chain variable domain of TCR clone 376325 (TRBV19, TRBJ2-1)
CASSMGSGRRSSSS

SEQ ID NO: 752651 - protein, 14 aa, Homo sapiens
  CDR3 for alpha chain variable domain of TCR clone 376326 (TRAV1-2, TRAJ16)
CAVNRFSDGQKLLF

SEQ ID NO: 752652 - protein, 13 aa, Homo sapiens
  CDR3 for beta chain variable domain of TCR clone 376326 (TRBV7-9, TRBJ1-2)
CASSLKQNYGYNF

SEQ ID NO: 752653 - protein, 12 aa, Homo sapiens
  CDR3 for alpha chain variable domain of TCR clone 376327 (TRAV38-2/DV8, TRAJ48)
CALLSGNEKLTF

SEQ ID NO: 752654 - protein, 14 aa, Homo sapiens
  CDR3 for beta chain variable domain of TCR clone 376327 (TRBV19, TRBJ1-5)
CASGTEVYNQPQHF

SEQ ID NO: 752655 - protein, 13 aa, Homo sapiens
  CDR3 for alpha chain variable domain of TCR clone 376328 (TRAV13-2, TRAJ53)
CAENMGSNYKLTF

SEQ ID NO: 752656 - protein, 14 aa, Homo sapiens
  CDR3 for beta chain variable domain of TCR clone 376328 (TRBV7-6, TRBJ2-3)
CASSLGTVTDTQYF

SEQ ID NO: 752657 - protein, 16 aa, Homo sapiens
  CDR3 for alpha chain variable domain of TCR clone 376329 (TRAV12-3, TRAJ53)
CAMSPGSGGSNYKLTF

SEQ ID NO: 752658 - protein, 16 aa, Homo sapiens
  CDR3 for beta chain variable domain of TCR clone 376329 (TRBV4-2, TRBJ1-1)
CASSQAGCGMNTEAFF

SEQ ID NO: 752659 - protein, 15 aa, Homo sapiens
  CDR3 for alpha chain variable domain of TCR clone 376330 (TRAV12-2, TRAJ53)
CAVNGGGGSNYKLTS

SEQ ID NO: 752660 - protein, 12 aa, Homo sapiens
  CDR3 for beta chain variable domain of TCR clone 376330 (TRBV11-2, TRBJ2-2)
CASSLPTGELFF

SEQ ID NO: 752661 - protein, 15 aa, Homo sapiens
  CDR3 for alpha chain variable domain of TCR clone 376331 (TRAV2, TRAJ11)
CAVGGRNSGYSTLTL

SEQ ID NO: 752662 - protein, 12 aa, Homo sapiens
  CDR3 for beta chain variable domain of TCR clone 376331 (TRBV5-4, TRBJ2-7)
CASSLEAYEQYF

SEQ ID NO: 752663 - protein, 13 aa, Homo sapiens
  CDR3 for alpha chain variable domain of TCR clone 376332 (TRAV20, TRAJ21)
CAVEGYNFNKFYF

SEQ ID NO: 752664 - protein, 16 aa, Homo sapiens
  CDR3 for beta chain variable domain of TCR clone 376332 (TRBV28, TRBJ2-2)
CASSLEGGSNTGELFF

SEQ ID NO: 752665 - protein, 12 aa, Homo sapiens
  CDR3 for alpha chain variable domain of TCR clone 376333 (TRAV2, TRAJ36)
CAELTGANNLFF

SEQ ID NO: 752666 - protein, 14 aa, Homo sapiens
  CDR3 for beta chain variable domain of TCR clone 376333 (TRBV18, TRBJ2-7)
CASSPRGGAYEQYV

SEQ ID NO: 752667 - protein, 12 aa, Homo sapiens
  CDR3 for alpha chain variable domain of TCR clone 376334 (TRAV12-3, TRAJ20)
CAMVRGDYKLSF

SEQ ID NO: 752668 - protein, 14 aa, Homo sapiens
  CDR3 for beta chain variable domain of TCR clone 376334 (TRBV5-7, TRBJ1-5)
CASSGQGVDQPQHF

SEQ ID NO: 752669 - protein, 13 aa, Homo sapiens
  CDR3 for alpha chain variable domain of TCR clone 376335 (TRAV1-2, TRAJ31)
CAVRPNNNARPMF

SEQ ID NO: 752670 - protein, 14 aa, Homo sapiens
  CDR3 for beta chain variable domain of TCR clone 376335 (TRBV25-1, TRBJ1-1)
CASTHLGGNTEAFF

SEQ ID NO: 752671 - protein, 13 aa, Homo sapiens
  CDR3 for alpha chain variable domain of TCR clone 376336 (TRAV3, TRAJ21)
CAVRDPDFNKFYF

SEQ ID NO: 752672 - protein, 16 aa, Homo sapiens
  CDR3 for beta chain variable domain of TCR clone 376336 (TRBV7-3, TRBJ2-1)
CASSLVSGSSNNEQFF

SEQ ID NO: 752673 - protein, 13 aa, Homo sapiens
  CDR3 for alpha chain variable domain of TCR clone 376337 (TRAV8-3, TRAJ10)
WAILTGGGNKLTF

SEQ ID NO: 752674 - protein, 10 aa, Homo sapiens
  CDR3 for beta chain variable domain of TCR clone 376337 (TRBV20-1, TRBJ2-5)
CRARFETQYF

SEQ ID NO: 752675 - protein, 16 aa, Homo sapiens
  CDR3 for alpha chain variable domain of TCR clone 376338 (TRAV12-3, TRAJ45)
CAMGWGSGGGADGLTF

SEQ ID NO: 752676 - protein, 18 aa, Homo sapiens
  CDR3 for beta chain variable domain of TCR clone 376338 (TRBV12-4, TRBJ2-2)
CASSLVAGARGRTGELFF

SEQ ID NO: 752677 - protein, 18 aa, Homo sapiens
  CDR3 for alpha chain variable domain of TCR clone 376339 (TRAV17, TRAJ45)
CATSLDLYSGGGADGLTF

SEQ ID NO: 752678 - protein, 14 aa, Homo sapiens
  CDR3 for beta chain variable domain of TCR clone 376339 (TRBV11-2, TRBJ2-1)
CQQKNRGLIYEQFF

SEQ ID NO: 752679 - protein, 14 aa, Homo sapiens
  CDR3 for alpha chain variable domain of TCR clone 376340 (TRAV38-2/DV8, TRAJ23)
CAYRSQNQGGKLIF

SEQ ID NO: 752680 - protein, 14 aa, Homo sapiens
  CDR3 for beta chain variable domain of TCR clone 376340 (TRBV12-4, TRBJ1-4)
CASRMTGRSEKLFF

SEQ ID NO: 752681 - protein, 14 aa, Homo sapiens
  CDR3 for alpha chain variable domain of TCR clone 376341 (TRAV12-2, TRAJ11)
CAVHRASGYSTLTF

SEQ ID NO: 752682 - protein, 10 aa, Homo sapiens
  CDR3 for beta chain variable domain of TCR clone 376341 (TRBV20-1, TRBJ2-5)
CSARFETQYF

SEQ ID NO: 752683 - protein, 18 aa, Homo sapiens
  CDR3 for alpha chain variable domain of TCR clone 376342 (TRAV16, TRAJ45)
CAQASYPSSGGGADGLTF

SEQ ID NO: 752684 - protein, 14 aa, Homo sapiens
  CDR3 for beta chain variable domain of TCR clone 376342 (TRBV7-6, TRBJ2-3)
CASSLGTVTDTQYF

SEQ ID NO: 752685 - protein, 11 aa, Homo sapiens
  CDR3 for alpha chain variable domain of TCR clone 376343 (TRAV35, TRAJ30)
CAGPGDDKIIF

SEQ ID NO: 752686 - protein, 13 aa, Homo sapiens
  CDR3 for beta chain variable domain of TCR clone 376343 (TRBV11-2, TRBJ2-5)
CASSSTGEETQYF

SEQ ID NO: 752687 - protein, 14 aa, Homo sapiens
  CDR3 for alpha chain variable domain of TCR clone 376344 (TRAV4, TRAJ17)
CLVGDMAAGNKLTF

SEQ ID NO: 752688 - protein, 14 aa, Homo sapiens
  CDR3 for beta chain variable domain of TCR clone 376344 (TRBV7-6, TRBJ2-3)
CASSLGTVTETQYF

SEQ ID NO: 752689 - protein, 13 aa, Homo sapiens
  CDR3 for alpha chain variable domain of TCR clone 376345 (TRAV8-3, TRAJ36)
CAVGATGANNLCF

SEQ ID NO: 752690 - protein, 15 aa, Homo sapiens
  CDR3 for beta chain variable domain of TCR clone 376345 (TRBV7-2, TRBJ1-2)
CASSPRAGWNYGDTF

SEQ ID NO: 752691 - protein, 13 aa, Homo sapiens
  CDR3 for alpha chain variable domain of TCR clone 376346 (TRAV17, TRAJ40)
CDGALGGTYKYIF

SEQ ID NO: 752692 - protein, 16 aa, Homo sapiens
  CDR3 for beta chain variable domain of TCR clone 376346 (TRBV11-2, TRBJ1-2)
CASSLDTGGADYGYTF

SEQ ID NO: 752693 - protein, 14 aa, Homo sapiens
  CDR3 for alpha chain variable domain of TCR clone 376347 (TRAV29/DV5, TRAJ30)
CAARLMNRTDKIII

SEQ ID NO: 752694 - protein, 17 aa, Homo sapiens
  CDR3 for beta chain variable domain of TCR clone 376347 (TRBV12-4, TRBJ2-3)
CASSGPGLAGGADTQYF

SEQ ID NO: 752695 - protein, 16 aa, Homo sapiens
  CDR3 for alpha chain variable domain of TCR clone 376348 (TRAV26-1, TRAJ37)
CIVRGDGSRNTGKLIF

SEQ ID NO: 752696 - protein, 13 aa, Homo sapiens
  CDR3 for beta chain variable domain of TCR clone 376348 (TRBV19, TRBJ1-2)
CASSVPGQDGYTF

SEQ ID NO: 752697 - protein, 17 aa, Homo sapiens
  CDR3 for alpha chain variable domain of TCR clone 376349 (TRAV26-1, TRAJ10)
CIVSFRGLTGGGNKLTF

SEQ ID NO: 752698 - protein, 15 aa, Homo sapiens
  CDR3 for beta chain variable domain of TCR clone 376349 (TRBV11-2, TRBJ2-5)
CASSPRSGGLETQYF

SEQ ID NO: 752699 - protein, 14 aa, Homo sapiens
  CDR3 for alpha chain variable domain of TCR clone 376350 (TRAV13-2, TRAJ17)
CAENSKAAGNKLTF

SEQ ID NO: 752700 - protein, 14 aa, Homo sapiens
  CDR3 for beta chain variable domain of TCR clone 376350 (TRBV7-6, TRBJ2-1)
CASSLGGGADEQFF

SEQ ID NO: 752701 - protein, 14 aa, Homo sapiens
  CDR3 for alpha chain variable domain of TCR clone 376351 (TRAV9-2, TRAJ39)
CALYIYNAGNMPTF

SEQ ID NO: 752702 - protein, 15 aa, Homo sapiens
  CDR3 for beta chain variable domain of TCR clone 376351 (TRBV27, TRBJ2-1)
CASSNGGGSSNEQFF

SEQ ID NO: 752703 - protein, 16 aa, Homo sapiens
  CDR3 for alpha chain variable domain of TCR clone 376352 (TRAV26-1, TRAJ32)
CIVRTNYGGATNKLIF

SEQ ID NO: 752704 - protein, 14 aa, Homo sapiens
  CDR3 for beta chain variable domain of TCR clone 376352 (TRBV6-1, TRBJ1-3)
CASVQGGGGNTVYF

SEQ ID NO: 752705 - protein, 15 aa, Homo sapiens
  CDR3 for alpha chain variable domain of TCR clone 376353 (TRAV8-4, TRAJ40)
CAVSYDTSGTYKYIF

SEQ ID NO: 752706 - protein, 15 aa, Homo sapiens
  CDR3 for beta chain variable domain of TCR clone 376353 (TRBV20-1, TRBJ2-7)
CSARDRVSGMDEQYF

SEQ ID NO: 752707 - protein, 15 aa, Homo sapiens
  CDR3 for alpha chain variable domain of TCR clone 376354 (TRAV27, TRAJ38)
CAARRNAGNNRKLIW

SEQ ID NO: 752708 - protein, 14 aa, Homo sapiens
  CDR3 for beta chain variable domain of TCR clone 376354 (TRBV15, TRBJ2-5)
CATSIGGLGETQYF

SEQ ID NO: 752709 - protein, 13 aa, Homo sapiens
  CDR3 for alpha chain variable domain of TCR clone 376355 (TRAV26-1, TRAJ36)
CIVVGTGGNNLFF

SEQ ID NO: 752710 - protein, 13 aa, Homo sapiens
  CDR3 for beta chain variable domain of TCR clone 376355 (TRBV6-5, TRBJ2-6)
CASSTSGPLRLDF

SEQ ID NO: 752711 - protein, 14 aa, Homo sapiens
  CDR3 for alpha chain variable domain of TCR clone 376356 (TRAV12-1, TRAJ17)
CVVNYKAAGNKLTF

SEQ ID NO: 752712 - protein, 15 aa, Homo sapiens
  CDR3 for beta chain variable domain of TCR clone 376356 (TRBV7-3, TRBJ2-2)
CASSLEVLPTGELFF

SEQ ID NO: 752713 - protein, 14 aa, Homo sapiens
  CDR3 for alpha chain variable domain of TCR clone 376357 (TRAV13-1, TRAJ35)
CAASKGGFGNVLHC

SEQ ID NO: 752714 - protein, 14 aa, Homo sapiens
  CDR3 for beta chain variable domain of TCR clone 376357 (TRBV7-8, TRBJ2-3)
CASSFPDGQGTQYF

SEQ ID NO: 752715 - protein, 13 aa, Homo sapiens
  CDR3 for alpha chain variable domain of TCR clone 376358 (TRAV1-1, TRAJ9)
CAAKNTGGFKTFF

SEQ ID NO: 752716 - protein, 15 aa, Homo sapiens
  CDR3 for beta chain variable domain of TCR clone 376358 (TRBV5-1, TRBJ2-1)
CASTGSGRTYNEQFF

SEQ ID NO: 752717 - protein, 17 aa, Homo sapiens
  CDR3 for alpha chain variable domain of TCR clone 376359 (TRAV13-1, TRAJ28)
CAASPPYSGAGSYHPTF

SEQ ID NO: 752718 - protein, 12 aa, Homo sapiens
  CDR3 for beta chain variable domain of TCR clone 376359 (TRBV11-2, TRBJ2-2)
CASSLPTGELFF

SEQ ID NO: 752719 - protein, 12 aa, Homo sapiens
  CDR3 for alpha chain variable domain of TCR clone 376360 (TRAV38-1, TRAJ20)
CAFIWNDYKLSF

SEQ ID NO: 752720 - protein, 11 aa, Homo sapiens
  CDR3 for beta chain variable domain of TCR clone 376360 (TRBV29-1, TRBJ2-5)
CRGDRTGTQYF

SEQ ID NO: 752721 - protein, 13 aa, Homo sapiens
  CDR3 for alpha chain variable domain of TCR clone 376361 (TRAV2, TRAJ40)
CAVVTSGTHKYIF

SEQ ID NO: 752722 - protein, 13 aa, Homo sapiens
  CDR3 for beta chain variable domain of TCR clone 376361 (TRBV7-9, TRBJ2-5)
CASLPSGRETQYF

SEQ ID NO: 752723 - protein, 11 aa, Homo sapiens
  CDR3 for alpha chain variable domain of TCR clone 376362 (TRAV12-2, TRAJ23)
CARGRGGKLIF

SEQ ID NO: 752724 - protein, 15 aa, Homo sapiens
  CDR3 for beta chain variable domain of TCR clone 376362 (TRBV20-1, TRBJ1-1)
CSASRGVTGNTEAFF

SEQ ID NO: 752725 - protein, 12 aa, Homo sapiens
  CDR3 for alpha chain variable domain of TCR clone 376363 (TRAV8-3, TRAJ20)
CAVGANDYKLSF

SEQ ID NO: 752726 - protein, 15 aa, Homo sapiens
  CDR3 for beta chain variable domain of TCR clone 376363 (TRBV28, TRBJ2-1)
CASSIIAGGRSEQFF

SEQ ID NO: 752727 - protein, 13 aa, Homo sapiens
  CDR3 for alpha chain variable domain of TCR clone 376364 (TRAV1-2, TRAJ9)
CAALNTGGFKTIF

SEQ ID NO: 752728 - protein, 15 aa, Homo sapiens
  CDR3 for beta chain variable domain of TCR clone 376364 (TRBV7-9, TRBJ2-7)
CASSLALAEAYEQYF

SEQ ID NO: 752729 - protein, 13 aa, Homo sapiens
  CDR3 for alpha chain variable domain of TCR clone 376365 (TRAV12-3, TRAJ47)
CAMKKEYGNKLVF

SEQ ID NO: 752730 - protein, 17 aa, Homo sapiens
  CDR3 for beta chain variable domain of TCR clone 376365 (TRBV11-2, TRBJ2-1)
CASSLYPPGVEYNEQFS

SEQ ID NO: 752731 - protein, 11 aa, Homo sapiens
  CDR3 for alpha chain variable domain of TCR clone 376366 (TRAV12-2, TRAJ29)
CAVTLRSPLVF

SEQ ID NO: 752732 - protein, 15 aa, Homo sapiens
  CDR3 for beta chain variable domain of TCR clone 376366 (TRBV4-1, TRBJ2-5)
CASSHWDLYQETQYF

SEQ ID NO: 752733 - protein, 14 aa, Homo sapiens
  CDR3 for alpha chain variable domain of TCR clone 376367 (TRAV12-3, TRAJ10)
SHLPLTGGGNKLTF

SEQ ID NO: 752734 - protein, 13 aa, Homo sapiens
  CDR3 for beta chain variable domain of TCR clone 376367 (TRBV2, TRBJ2-7)
CASSVGGSGEQYF

SEQ ID NO: 752735 - protein, 14 aa, Homo sapiens
  CDR3 for alpha chain variable domain of TCR clone 376368 (TRAV2, TRAJ37)
CAVDFTSNTGTLIF

SEQ ID NO: 752736 - protein, 15 aa, Homo sapiens
  CDR3 for beta chain variable domain of TCR clone 376368 (TRBV20-1, TRBJ1-1)
CSASRGVTGYTEAFF

SEQ ID NO: 752737 - protein, 14 aa, Homo sapiens
  CDR3 for alpha chain variable domain of TCR clone 376369 (TRAV35, TRAJ22)
CAGLRPGSARQLSF

SEQ ID NO: 752738 - protein, 14 aa, Homo sapiens
  CDR3 for beta chain variable domain of TCR clone 376369 (TRBV4-1, TRBJ2-7)
CASSPVAGGDEQYF

SEQ ID NO: 752739 - protein, 17 aa, Homo sapiens
  CDR3 for alpha chain variable domain of TCR clone 376370 (TRAV4, TRAJ42)
CLVGVLNYGGSQGNLIF

SEQ ID NO: 752740 - protein, 12 aa, Homo sapiens
  CDR3 for beta chain variable domain of TCR clone 376370 (TRBV20-1, TRBJ2-1)
CSAQYTYSGQFF

SEQ ID NO: 752741 - protein, 13 aa, Homo sapiens
  CDR3 for alpha chain variable domain of TCR clone 376371 (TRAV35, TRAJ48)
CAGHEFGNEKLTF

SEQ ID NO: 752742 - protein, 14 aa, Homo sapiens
  CDR3 for beta chain variable domain of TCR clone 376371 (TRBV19, TRBJ2-1)
CASPTFVLGGEQFF

SEQ ID NO: 752743 - protein, 11 aa, Homo sapiens
  CDR3 for alpha chain variable domain of TCR clone 376372 (TRAV12-2, TRAJ39)
CPVNSMLTFGG

SEQ ID NO: 752744 - protein, 16 aa, Homo sapiens
  CDR3 for beta chain variable domain of TCR clone 376372 (TRBV5-3, TRBJ2-2)
CARSFGTGTNTGELFF

SEQ ID NO: 752745 - protein, 12 aa, Homo sapiens
  CDR3 for alpha chain variable domain of TCR clone 376373 (TRAV35, TRAJ31)
CAAASNNARLMF

SEQ ID NO: 752746 - protein, 15 aa, Homo sapiens
  CDR3 for beta chain variable domain of TCR clone 376373 (TRBV4-2, TRBJ2-1)
CASSQDVGLAGEQFF

SEQ ID NO: 752747 - protein, 13 aa, Homo sapiens
  CDR3 for alpha chain variable domain of TCR clone 376374 (TRAV13-1, TRAJ10)
CAATAGGANKLTF

SEQ ID NO: 752748 - protein, 12 aa, Homo sapiens
  CDR3 for beta chain variable domain of TCR clone 376374 (TRBV7-3, TRBJ2-1)
CASSFQSGPQFF

SEQ ID NO: 752749 - protein, 15 aa, Homo sapiens
  CDR3 for alpha chain variable domain of TCR clone 376375 (TRAV21, TRAJ53)
YATLNSGGSNYKLTF

SEQ ID NO: 752750 - protein, 15 aa, Homo sapiens
  CDR3 for beta chain variable domain of TCR clone 376375 (TRBV9, TRBJ1-6)
CASSVAGTGDSPLHF

SEQ ID NO: 752751 - protein, 13 aa, Homo sapiens
  CDR3 for alpha chain variable domain of TCR clone 376376 (TRAV3, TRAJ21)
CAVREPDFNKFYF

SEQ ID NO: 752752 - protein, 16 aa, Homo sapiens
  CDR3 for beta chain variable domain of TCR clone 376376 (TRBV7-9, TRBJ1-2)
CASSLGFSSGEDGYTF

SEQ ID NO: 752753 - protein, 14 aa, Homo sapiens
  CDR3 for alpha chain variable domain of TCR clone 376377 (TRAV17, TRAJ32)
CATDPGGATDKLIF

SEQ ID NO: 752754 - protein, 14 aa, Homo sapiens
  CDR3 for beta chain variable domain of TCR clone 376377 (TRBV2, TRBJ1-5)
CASSENRGGQPQHF

SEQ ID NO: 752755 - protein, 12 aa, Homo sapiens
  CDR3 for alpha chain variable domain of TCR clone 376378 (TRAV17, TRAJ39)
CATGAAGNMLTF

SEQ ID NO: 752756 - protein, 16 aa, Homo sapiens
  CDR3 for beta chain variable domain of TCR clone 376378 (TRBV7-2, TRBJ2-3)
CASSLVALYSTDTQYF

SEQ ID NO: 752757 - protein, 14 aa, Homo sapiens
  CDR3 for alpha chain variable domain of TCR clone 376379 (TRAV23/DV6, TRAJ37)
CAASTTGNTGKLIF

SEQ ID NO: 752758 - protein, 14 aa, Homo sapiens
  CDR3 for beta chain variable domain of TCR clone 376379 (TRBV12-4, TRBJ1-1)
CASSLGTGGTEAFF

SEQ ID NO: 752759 - protein, 14 aa, Homo sapiens
  CDR3 for alpha chain variable domain of TCR clone 376380 (TRAV25, TRAJ18)
CAGRQRLNPGEAIL

SEQ ID NO: 752760 - protein, 14 aa, Homo sapiens
  CDR3 for beta chain variable domain of TCR clone 376380 (TRBV7-2, TRBJ2-5)
CASSPRGSSETQYF

SEQ ID NO: 752761 - protein, 14 aa, Homo sapiens
  CDR3 for alpha chain variable domain of TCR clone 376381 (TRAV9-2, TRAJ39)
CALYIYTPGNMLTF

SEQ ID NO: 752762 - protein, 15 aa, Homo sapiens
  CDR3 for beta chain variable domain of TCR clone 376381 (TRBV27, TRBJ1-5)
CASSLGTGFDQPQHF

SEQ ID NO: 752763 - protein, 15 aa, Homo sapiens
  CDR3 for alpha chain variable domain of TCR clone 376382 (TRAV8-3, TRAJ6)
WAVGPLGGGSDIPTF

SEQ ID NO: 752764 - protein, 14 aa, Homo sapiens
  CDR3 for beta chain variable domain of TCR clone 376382 (TRBV19, TRBJ2-2)
CASSTGQGAGELFF

SEQ ID NO: 752765 - protein, 16 aa, Homo sapiens
  CDR3 for alpha chain variable domain of TCR clone 376383 (TRAV12-2, TRAJ37)
CAVKEQGSSNTGKLIF

SEQ ID NO: 752766 - protein, 12 aa, Homo sapiens
  CDR3 for beta chain variable domain of TCR clone 376383 (TRBV10-1, TRBJ1-5)
CASSDSNQPQHF

SEQ ID NO: 752767 - protein, 13 aa, Homo sapiens
  CDR3 for alpha chain variable domain of TCR clone 376384 (TRAV26-1, TRAJ54)
CIVRVKGAQKLVF

SEQ ID NO: 752768 - protein, 13 aa, Homo sapiens
  CDR3 for beta chain variable domain of TCR clone 376384 (TRBV7-3, TRBJ1-1)
CASSQDWGAEAFF

SEQ ID NO: 752769 - protein, 11 aa, Homo sapiens
  CDR3 for alpha chain variable domain of TCR clone 376385 (TRAV3, TRAJ21)
CAVGNFNKFYL

SEQ ID NO: 752770 - protein, 13 aa, Homo sapiens
  CDR3 for beta chain variable domain of TCR clone 376385 (TRBV7-9, TRBJ1-2)
CASSLKQNYGYAF

SEQ ID NO: 752771 - protein, 17 aa, Homo sapiens
  CDR3 for alpha chain variable domain of TCR clone 376386 (TRAV20, TRAJ4)
CAVQLVLFSGGYNKLIF

SEQ ID NO: 752772 - protein, 14 aa, Homo sapiens
  CDR3 for beta chain variable domain of TCR clone 376386 (TRBV20-1, TRBJ2-7)
CSAKRGRSSYEQYF

SEQ ID NO: 752773 - protein, 13 aa, Homo sapiens
  CDR3 for alpha chain variable domain of TCR clone 376387 (TRAV39, TRAJ49)
CAVDRNTGNQFYF

SEQ ID NO: 752774 - protein, 14 aa, Homo sapiens
  CDR3 for beta chain variable domain of TCR clone 376387 (TRBV4-1, TRBJ1-1)
CASSRLGQSFEAFF

SEQ ID NO: 752775 - protein, 14 aa, Homo sapiens
  CDR3 for alpha chain variable domain of TCR clone 376388 (TRAV12-3, TRAJ9)
CAMSPNTGGFKTIF

SEQ ID NO: 752776 - protein, 16 aa, Homo sapiens
  CDR3 for beta chain variable domain of TCR clone 376388 (TRBV28, TRBJ2-7)
CASSSGTSGRGYEQYF

SEQ ID NO: 752777 - protein, 13 aa, Homo sapiens
  CDR3 for alpha chain variable domain of TCR clone 376389 (TRAV27, TRAJ41)
CAGEGNSGYALHF

SEQ ID NO: 752778 - protein, 14 aa, Homo sapiens
  CDR3 for beta chain variable domain of TCR clone 376389 (TRBV25-1, TRBJ1-1)
CASTHLGGNTEAFF

SEQ ID NO: 752779 - protein, 12 aa, Homo sapiens
  CDR3 for alpha chain variable domain of TCR clone 376390 (TRAV21, TRAJ15)
CCRNQAGTALIF

SEQ ID NO: 752780 - protein, 16 aa, Homo sapiens
  CDR3 for beta chain variable domain of TCR clone 376390 (TRBV20-1, TRBJ2-5)
CSPGGTSGGYMETQYF

SEQ ID NO: 752781 - protein, 11 aa, Homo sapiens
  CDR3 for alpha chain variable domain of TCR clone 376391 (TRAV12-3, TRAJ43)
CAMSASNDIRF

SEQ ID NO: 752782 - protein, 18 aa, Homo sapiens
  CDR3 for beta chain variable domain of TCR clone 376391 (TRBV20-1, TRBJ2-3)
CSASGLAGGPGTTDTQYF

SEQ ID NO: 752783 - protein, 14 aa, Homo sapiens
  CDR3 for alpha chain variable domain of TCR clone 376392 (TRAV12-2, TRAJ53)
CAVKGGGSNYKLTF

SEQ ID NO: 752784 - protein, 13 aa, Homo sapiens
  CDR3 for beta chain variable domain of TCR clone 376392 (TRBV7-7, TRBJ2-2)
CPRQDSDTGELFF

SEQ ID NO: 752785 - protein, 13 aa, Homo sapiens
  CDR3 for alpha chain variable domain of TCR clone 376393 (TRAV21, TRAJ27)
CAARPGTAGKSTF

SEQ ID NO: 752786 - protein, 15 aa, Homo sapiens
  CDR3 for beta chain variable domain of TCR clone 376393 (TRBV12-4, TRBJ2-5)
CASSPPTGLQETQYF

SEQ ID NO: 752787 - protein, 14 aa, Homo sapiens
  CDR3 for alpha chain variable domain of TCR clone 376394 (TRAV12-1, TRAJ30)
CVVNIGGRDNKIIF

SEQ ID NO: 752788 - protein, 13 aa, Homo sapiens
  CDR3 for beta chain variable domain of TCR clone 376394 (TRBV12-5, TRBJ2-1)
CASGLGRGNEQFF

SEQ ID NO: 752789 - protein, 17 aa, Homo sapiens
  CDR3 for alpha chain variable domain of TCR clone 376395 (TRAV8-6, TRAJ58)
CAVSSWVGETSGSRLTF

SEQ ID NO: 752790 - protein, 17 aa, Homo sapiens
  CDR3 for beta chain variable domain of TCR clone 376395 (TRBV11-2, TRBJ2-1)
CASGLYPPGVEYNEQFF

SEQ ID NO: 752791 - protein, 12 aa, Homo sapiens
  CDR3 for alpha chain variable domain of TCR clone 376396 (TRAV12-3, TRAJ17)
CAMTLTGDKLTF

SEQ ID NO: 752792 - protein, 16 aa, Homo sapiens
  CDR3 for beta chain variable domain of TCR clone 376396 (TRBV4-1, TRBJ1-2)
CASSQDAGQVLYGYTF

SEQ ID NO: 752793 - protein, 13 aa, Homo sapiens
  CDR3 for alpha chain variable domain of TCR clone 376397 (TRAV12-2, TRAJ24)
CAVSTDSWRKLQF

SEQ ID NO: 752794 - protein, 15 aa, Homo sapiens
  CDR3 for beta chain variable domain of TCR clone 376397 (TRBV7-2, TRBJ2-2)
CASSPTGANTGELFF

SEQ ID NO: 752795 - protein, 13 aa, Homo sapiens
  CDR3 for alpha chain variable domain of TCR clone 376398 (TRAV12-1, TRAJ34)
CVVTGYNTDKLIF

SEQ ID NO: 752796 - protein, 15 aa, Homo sapiens
  CDR3 for beta chain variable domain of TCR clone 376398 (TRBV7-2, TRBJ2-1)
CASSSRTSREDEQFF

SEQ ID NO: 752797 - protein, 11 aa, Homo sapiens
  CDR3 for alpha chain variable domain of TCR clone 376399 (TRAV20, TRAJ34)
CAVLGTDKLIF

SEQ ID NO: 752798 - protein, 15 aa, Homo sapiens
  CDR3 for beta chain variable domain of TCR clone 376399 (TRBV6-3, TRBJ2-7)
CASSSPGTVFYEQYF

SEQ ID NO: 752799 - protein, 14 aa, Homo sapiens
  CDR3 for alpha chain variable domain of TCR clone 376400 (TRAV26-2, TRAJ27)
CILREISDAGKSTF

SEQ ID NO: 752800 - protein, 15 aa, Homo sapiens
  CDR3 for beta chain variable domain of TCR clone 376400 (TRBV10-3, TRBJ2-7)
CATREQGLRSYEQYF

SEQ ID NO: 752801 - protein, 14 aa, Homo sapiens
  CDR3 for alpha chain variable domain of TCR clone 376401 (TRAV12-3, TRAJ10)
SHLPLTGGGNKLTF

SEQ ID NO: 752802 - protein, 15 aa, Homo sapiens
  CDR3 for beta chain variable domain of TCR clone 376401 (TRBV5-1, TRBJ2-2)
CASSTFNINTGELFF

SEQ ID NO: 752803 - protein, 15 aa, Homo sapiens
  CDR3 for alpha chain variable domain of TCR clone 376402 (TRAV26-1, TRAJ29)
CIVRVEGSGNTPLVF

SEQ ID NO: 752804 - protein, 16 aa, Homo sapiens
  CDR3 for beta chain variable domain of TCR clone 376402 (TRBV7-6, TRBJ2-3)
CASSARTSRGTDTQYF

SEQ ID NO: 752805 - protein, 15 aa, Homo sapiens
  CDR3 for alpha chain variable domain of TCR clone 376403 (TRAV26-1, TRAJ22)
CIVRVSFWFCKATYL

SEQ ID NO: 752806 - protein, 16 aa, Homo sapiens
  CDR3 for beta chain variable domain of TCR clone 376403 (TRBV24-1, TRBJ2-3)
CATSDPGTGATDTQYF

SEQ ID NO: 752807 - protein, 13 aa, Homo sapiens
  CDR3 for alpha chain variable domain of TCR clone 376404 (TRAV23/DV6, TRAJ34)
CAAIENNTDKLIF

SEQ ID NO: 752808 - protein, 16 aa, Homo sapiens
  CDR3 for beta chain variable domain of TCR clone 376404 (TRBV7-3, TRBJ2-2)
CASSLKRGTLSGELFF

SEQ ID NO: 752809 - protein, 11 aa, Homo sapiens
  CDR3 for alpha chain variable domain of TCR clone 376405 (TRAV2, TRAJ13)
CASGGYQKVTF

SEQ ID NO: 752810 - protein, 15 aa, Homo sapiens
  CDR3 for beta chain variable domain of TCR clone 376405 (TRBV10-2, TRBJ2-5)
CASKPEDRRQETQYF

SEQ ID NO: 752811 - protein, 10 aa, Homo sapiens
  CDR3 for alpha chain variable domain of TCR clone 376406 (TRAV36/DV7, TRAJ48)
CAVGNEKLTF

SEQ ID NO: 752812 - protein, 12 aa, Homo sapiens
  CDR3 for beta chain variable domain of TCR clone 376406 (TRBV20-1, TRBJ2-5)
CSAGGAGETRYF

SEQ ID NO: 752813 - protein, 13 aa, Homo sapiens
  CDR3 for alpha chain variable domain of TCR clone 376407 (TRAV12-3, TRAJ54)
CAMKVQGAQKLVF

SEQ ID NO: 752814 - protein, 15 aa, Homo sapiens
  CDR3 for beta chain variable domain of TCR clone 376407 (TRBV28, TRBJ2-7)
CASSPTGTGSYEQYV

SEQ ID NO: 752815 - protein, 12 aa, Homo sapiens
  CDR3 for alpha chain variable domain of TCR clone 376408 (TRAV3, TRAJ43)
SAVRDPNNDMRF

SEQ ID NO: 752816 - protein, 13 aa, Homo sapiens
  CDR3 for beta chain variable domain of TCR clone 376408 (TRBV19, TRBJ1-2)
CASSVPGQDGYTF

SEQ ID NO: 752817 - protein, 13 aa, Homo sapiens
  CDR3 for alpha chain variable domain of TCR clone 376409 (TRAV21, TRAJ27)
CAARPGNSGKSTF

SEQ ID NO: 752818 - protein, 20 aa, Homo sapiens
  CDR3 for beta chain variable domain of TCR clone 376409 (TRBV4-2, TRBJ2-7)
CASSQASGGNLRAVLRAGHQ

SEQ ID NO: 752819 - protein, 15 aa, Homo sapiens
  CDR3 for alpha chain variable domain of TCR clone 376410 (TRAV12-3, TRAJ48)
CAMNAKHFGNEKLTF

SEQ ID NO: 752820 - protein, 14 aa, Homo sapiens
  CDR3 for beta chain variable domain of TCR clone 376410 (TRBV2, TRBJ1-6)
CASSESRNNSPLHF

SEQ ID NO: 752821 - protein, 13 aa, Homo sapiens
  CDR3 for alpha chain variable domain of TCR clone 376411 (TRAV29/DV5, TRAJ31)
CAASRNNNAGLMF

SEQ ID NO: 752822 - protein, 14 aa, Homo sapiens
  CDR3 for beta chain variable domain of TCR clone 376411 (TRBV25-1, TRBJ1-1)
CASTHLGGNTEAFF

SEQ ID NO: 752823 - protein, 13 aa, Homo sapiens
  CDR3 for alpha chain variable domain of TCR clone 376412 (TRAV13-1, TRAJ40)
CAAISPGTYKYIF

SEQ ID NO: 752824 - protein, 12 aa, Homo sapiens
  CDR3 for beta chain variable domain of TCR clone 376412 (TRBV3-1, TRBJ2-1)
CASGGLGNEQSF

SEQ ID NO: 752825 - protein, 14 aa, Homo sapiens
  CDR3 for alpha chain variable domain of TCR clone 376413 (TRAV29/DV5, TRAJ36)
CAARRKTGANNLFF

SEQ ID NO: 752826 - protein, 14 aa, Homo sapiens
  CDR3 for beta chain variable domain of TCR clone 376413 (TRBV7-2, TRBJ2-7)
CASSPNTSFYAQYF

SEQ ID NO: 752827 - protein, 13 aa, Homo sapiens
  CDR3 for alpha chain variable domain of TCR clone 376414 (TRAV8-3, TRAJ36)
CAVGATGANNLFF

SEQ ID NO: 752828 - protein, 20 aa, Homo sapiens
  CDR3 for beta chain variable domain of TCR clone 376414 (TRBV7-8, TRBJ2-1)
CASSLAHRLAGVRSYNEQFF

SEQ ID NO: 752829 - protein, 13 aa, Homo sapiens
  CDR3 for alpha chain variable domain of TCR clone 376415 (TRAV30, TRAJ34)
CGTVGSNTDKLIF

SEQ ID NO: 752830 - protein, 16 aa, Homo sapiens
  CDR3 for beta chain variable domain of TCR clone 376415 (TRBV7-9, TRBJ1-2)
CASSLGFSSGEDGYTF

SEQ ID NO: 752831 - protein, 14 aa, Homo sapiens
  CDR3 for alpha chain variable domain of TCR clone 376416 (TRAV16, TRAJ42)
CALLAGVSQGNLIF

SEQ ID NO: 752832 - protein, 15 aa, Homo sapiens
  CDR3 for beta chain variable domain of TCR clone 376416 (TRBV2, TRBJ2-7)
CASSEGLARSYEQYF

SEQ ID NO: 752833 - protein, 14 aa, Homo sapiens
  CDR3 for alpha chain variable domain of TCR clone 376417 (TRAV13-1, TRAJ45)
HSLYSGGGADGLTF

SEQ ID NO: 752834 - protein, 16 aa, Homo sapiens
  CDR3 for beta chain variable domain of TCR clone 376417 (TRBV12-5, TRBJ2-5)
CASGPRTSGNQETQYF

SEQ ID NO: 752835 - protein, 16 aa, Homo sapiens
  CDR3 for alpha chain variable domain of TCR clone 376418 (TRAV1-1, TRAJ29)
CAVRSTRNSGNIPLVF

SEQ ID NO: 752836 - protein, 16 aa, Homo sapiens
  CDR3 for beta chain variable domain of TCR clone 376418 (TRBV27, TRBJ1-1)
CASSSRGRTGYTEAFF

SEQ ID NO: 752837 - protein, 15 aa, Homo sapiens
  CDR3 for alpha chain variable domain of TCR clone 376419 (TRAV3, TRAJ3)
CAVRDGHSSAYKIIF

SEQ ID NO: 752838 - protein, 17 aa, Homo sapiens
  CDR3 for beta chain variable domain of TCR clone 376419 (TRBV25-1, TRBJ2-7)
CASSDARVVFSAYEQYF

SEQ ID NO: 752839 - protein, 13 aa, Homo sapiens
  CDR3 for alpha chain variable domain of TCR clone 376420 (TRAV3, TRAJ41)
CAVSSNSGYALNF

SEQ ID NO: 752840 - protein, 14 aa, Homo sapiens
  CDR3 for beta chain variable domain of TCR clone 376420 (TRBV27, TRBJ2-2)
CASRPGVNTGELFF

SEQ ID NO: 752841 - protein, 15 aa, Homo sapiens
  CDR3 for alpha chain variable domain of TCR clone 376421 (TRAV26-2, TRAJ45)
CILRLWGYSGEVLTD

SEQ ID NO: 752842 - protein, 17 aa, Homo sapiens
  CDR3 for beta chain variable domain of TCR clone 376421 (TRBV28, TRBJ2-3)
CASSPTPAGGRVDTQYF

SEQ ID NO: 752843 - protein, 14 aa, Homo sapiens
  CDR3 for alpha chain variable domain of TCR clone 376422 (TRAV34, TRAJ18)
CGPDRGSTLGRLYF

SEQ ID NO: 752844 - protein, 15 aa, Homo sapiens
  CDR3 for beta chain variable domain of TCR clone 376422 (TRBV4-1, TRBJ1-4)
CASSDTGGTNEKLFF

SEQ ID NO: 752845 - protein, 11 aa, Homo sapiens
  CDR3 for alpha chain variable domain of TCR clone 376423 (TRAV35, TRAJ30)
CAPGGGDKIIF

SEQ ID NO: 752846 - protein, 16 aa, Homo sapiens
  CDR3 for beta chain variable domain of TCR clone 376423 (TRBV7-6, TRBJ2-1)
CIAVPAAWGGADEQFF

SEQ ID NO: 752847 - protein, 13 aa, Homo sapiens
  CDR3 for alpha chain variable domain of TCR clone 376424 (TRAV8-3, TRAJ36)
CAVGATGANNLFF

SEQ ID NO: 752848 - protein, 16 aa, Homo sapiens
  CDR3 for beta chain variable domain of TCR clone 376424 (TRBV5-1, TRBJ2-7)
CASSWGTGGRAWEQYF

SEQ ID NO: 752849 - protein, 21 aa, Homo sapiens
  CDR3 for alpha chain variable domain of TCR clone 376425 (TRAV1-2, TRAJ37)
CLLPLCCERFHGSGNTGKLIF

SEQ ID NO: 752850 - protein, 14 aa, Homo sapiens
  CDR3 for beta chain variable domain of TCR clone 376425 (TRBV2, TRBJ2-5)
CASSDVLAQETQYF

SEQ ID NO: 752851 - protein, 13 aa, Homo sapiens
  CDR3 for alpha chain variable domain of TCR clone 376426 (TRAV13-2, TRAJ53)
CAENMGSNYKLTF

SEQ ID NO: 752852 - protein, 14 aa, Homo sapiens
  CDR3 for beta chain variable domain of TCR clone 376426 (TRBV27, TRBJ1-5)
CASSLDPRNQPQHF

SEQ ID NO: 752853 - protein, 15 aa, Homo sapiens
  CDR3 for alpha chain variable domain of TCR clone 376427 (TRAV17, TRAJ35)
CATAFVIGFGNVLHC

SEQ ID NO: 752854 - protein, 17 aa, Homo sapiens
  CDR3 for beta chain variable domain of TCR clone 376427 (TRBV13, TRBJ2-3)
CASSLSRVAGGRNTQYF

SEQ ID NO: 752855 - protein, 16 aa, Homo sapiens
  CDR3 for alpha chain variable domain of TCR clone 376428 (TRAV2, TRAJ4)
CAVEDRFSGGYNKLIF

SEQ ID NO: 752856 - protein, 12 aa, Homo sapiens
  CDR3 for beta chain variable domain of TCR clone 376428 (TRBV11-2, TRBJ2-1)
CTSSPGNNEQFF

SEQ ID NO: 752857 - protein, 12 aa, Homo sapiens
  CDR3 for alpha chain variable domain of TCR clone 376429 (TRAV12-3, TRAJ17)
CAMTLTGNKLTF

SEQ ID NO: 752858 - protein, 15 aa, Homo sapiens
  CDR3 for beta chain variable domain of TCR clone 376429 (TRBV20-1, TRBJ2-7)
GGARDRVSGMDEQYF

SEQ ID NO: 752859 - protein, 12 aa, Homo sapiens
  CDR3 for alpha chain variable domain of TCR clone 376430 (TRAV25, TRAJ11)
CAGASGYSTLTF

SEQ ID NO: 752860 - protein, 12 aa, Homo sapiens
  CDR3 for beta chain variable domain of TCR clone 376430 (TRBV12-4, TRBJ2-7)
CASSLGGYEQYF

SEQ ID NO: 752861 - protein, 12 aa, Homo sapiens
  CDR3 for alpha chain variable domain of TCR clone 376431 (TRAV17, TRAJ4)
CATRGGYNKLIF

SEQ ID NO: 752862 - protein, 14 aa, Homo sapiens
  CDR3 for beta chain variable domain of TCR clone 376431 (TRBV19, TRBJ2-7)
CASSIFAGTYEQYF

SEQ ID NO: 752863 - protein, 15 aa, Homo sapiens
  CDR3 for alpha chain variable domain of TCR clone 376432 (TRAV6, TRAJ5)
CALDGMDTGRRALTF

SEQ ID NO: 752864 - protein, 17 aa, Homo sapiens
  CDR3 for beta chain variable domain of TCR clone 376432 (TRBV20-1, TRBJ2-1)
CSAPPRLAGTRYNEQFF

SEQ ID NO: 752865 - protein, 12 aa, Homo sapiens
  CDR3 for alpha chain variable domain of TCR clone 376433 (TRAV12-3, TRAJ17)
CAMTLTGNKLTF

SEQ ID NO: 752866 - protein, 15 aa, Homo sapiens
  CDR3 for beta chain variable domain of TCR clone 376433 (TRBV20-1, TRBJ2-7)
CSARDRVSGMYERYF

SEQ ID NO: 752867 - protein, 13 aa, Homo sapiens
  CDR3 for alpha chain variable domain of TCR clone 376434 (TRAV21, TRAJ24)
GLMTTDSWGKLQF

SEQ ID NO: 752868 - protein, 12 aa, Homo sapiens
  CDR3 for beta chain variable domain of TCR clone 376434 (TRBV11-2, TRBJ2-7)
CASSPPAEEQYF

SEQ ID NO: 752869 - protein, 15 aa, Homo sapiens
  CDR3 for alpha chain variable domain of TCR clone 376435 (TRAV3, TRAJ22)
CAVRDRGGYARQLTF

SEQ ID NO: 752870 - protein, 14 aa, Homo sapiens
  CDR3 for beta chain variable domain of TCR clone 376435 (TRBV19, TRBJ2-1)
CASSRLASINEQFF

SEQ ID NO: 752871 - protein, 13 aa, Homo sapiens
  CDR3 for alpha chain variable domain of TCR clone 376436 (TRAV3, TRAJ21)
CAVREPDFNKFYF

SEQ ID NO: 752872 - protein, 16 aa, Homo sapiens
  CDR3 for beta chain variable domain of TCR clone 376436 (TRBV13, TRBJ2-2)
CASSPRTGEHTGELFF

SEQ ID NO: 752873 - protein, 17 aa, Homo sapiens
  CDR3 for alpha chain variable domain of TCR clone 376437 (TRAV29/DV5, TRAJ10)
CSVLLGRATGGGNKLTF

SEQ ID NO: 752874 - protein, 15 aa, Homo sapiens
  CDR3 for beta chain variable domain of TCR clone 376437 (TRBV20-1, TRBJ2-1)
CSAVIGTGTYNEQFF

SEQ ID NO: 752875 - protein, 16 aa, Homo sapiens
  CDR3 for alpha chain variable domain of TCR clone 376438 (TRAV30, TRAJ24)
CGTEILDADSWGKFQF

SEQ ID NO: 752876 - protein, 13 aa, Homo sapiens
  CDR3 for beta chain variable domain of TCR clone 376438 (TRBV18, TRBJ1-2)
CASSASATEGYTF

SEQ ID NO: 752877 - protein, 15 aa, Homo sapiens
  CDR3 for alpha chain variable domain of TCR clone 376439 (TRAV27, TRAJ38)
CAGRFNAGNNRKLIL

SEQ ID NO: 752878 - protein, 13 aa, Homo sapiens
  CDR3 for beta chain variable domain of TCR clone 376439 (TRBV20-1, TRBJ1-1)
CSARVGGNTEAFF

SEQ ID NO: 752879 - protein, 13 aa, Homo sapiens
  CDR3 for alpha chain variable domain of TCR clone 376440 (TRAV12-2, TRAJ47)
CAVFMEYGNKLVF

SEQ ID NO: 752880 - protein, 20 aa, Homo sapiens
  CDR3 for beta chain variable domain of TCR clone 376440 (TRBV7-8, TRBJ2-1)
CASSLAHRLAGVRSYNEQFF

SEQ ID NO: 752881 - protein, 13 aa, Homo sapiens
  CDR3 for alpha chain variable domain of TCR clone 376441 (TRAV26-1, TRAJ48)
CIVRVVGDEKLTF

SEQ ID NO: 752882 - protein, 19 aa, Homo sapiens
  CDR3 for beta chain variable domain of TCR clone 376441 (TRBV11-3, TRBJ2-2)
CASSTRPGANTTNTGELFF

SEQ ID NO: 752883 - protein, 11 aa, Homo sapiens
  CDR3 for alpha chain variable domain of TCR clone 376442 (TRAV13-2, TRAJ31)
CAANMDARLMF

SEQ ID NO: 752884 - protein, 15 aa, Homo sapiens
  CDR3 for beta chain variable domain of TCR clone 376442 (TRBV7-8, TRBJ1-2)
CASSLGRDGGLGYTF

SEQ ID NO: 752885 - protein, 11 aa, Homo sapiens
  CDR3 for alpha chain variable domain of TCR clone 376443 (TRAV2, TRAJ33)
CAVEGNYQLIW

SEQ ID NO: 752886 - protein, 12 aa, Homo sapiens
  CDR3 for beta chain variable domain of TCR clone 376443 (TRBV11-2, TRBJ2-2)
CASSLGGGELFF

SEQ ID NO: 752887 - protein, 13 aa, Homo sapiens
  CDR3 for alpha chain variable domain of TCR clone 376444 (TRAV9-2, TRAJ10)
CALATGGGNKLTF

SEQ ID NO: 752888 - protein, 15 aa, Homo sapiens
  CDR3 for beta chain variable domain of TCR clone 376444 (TRBV6-3, TRBJ2-7)
CASSSPGTVFYEQYF

SEQ ID NO: 752889 - protein, 13 aa, Homo sapiens
  CDR3 for alpha chain variable domain of TCR clone 376445 (TRAV2, TRAJ40)
CAVVTSGPDKYIF

SEQ ID NO: 752890 - protein, 15 aa, Homo sapiens
  CDR3 for beta chain variable domain of TCR clone 376445 (TRBV11-3, TRBJ2-3)
CASLKDGREGDTQYF

SEQ ID NO: 752891 - protein, 16 aa, Homo sapiens
  CDR3 for alpha chain variable domain of TCR clone 376446 (TRAV17, TRAJ28)
CATASVSGAGSYQLTF

SEQ ID NO: 752892 - protein, 17 aa, Homo sapiens
  CDR3 for beta chain variable domain of TCR clone 376446 (TRBV20-1, TRBJ2-1)
CSASSSGLAGSYNEQFF

SEQ ID NO: 752893 - protein, 12 aa, Homo sapiens
  CDR3 for alpha chain variable domain of TCR clone 376447 (TRAV17, TRAJ12)
CATLRSSYKLIF

SEQ ID NO: 752894 - protein, 15 aa, Homo sapiens
  CDR3 for beta chain variable domain of TCR clone 376447 (TRBV19, TRBJ2-2)
CDSSPRTGWTGELFF

SEQ ID NO: 752895 - protein, 12 aa, Homo sapiens
  CDR3 for alpha chain variable domain of TCR clone 376448 (TRAV1-1, TRAJ8)
CAGGTGFQKLVF

SEQ ID NO: 752896 - protein, 15 aa, Homo sapiens
  CDR3 for beta chain variable domain of TCR clone 376448 (TRBV7-9, TRBJ1-4)
YASSRTGGFNEKLFF

SEQ ID NO: 752897 - protein, 13 aa, Homo sapiens
  CDR3 for alpha chain variable domain of TCR clone 376449 (TRAV3, TRAJ36)
CAVSLGGANNLFF

SEQ ID NO: 752898 - protein, 12 aa, Homo sapiens
  CDR3 for beta chain variable domain of TCR clone 376449 (TRBV19, TRBJ2-1)
CASSRQGAEQFF

SEQ ID NO: 752899 - protein, 14 aa, Homo sapiens
  CDR3 for alpha chain variable domain of TCR clone 376450 (TRAV12-3, TRAJ22)
CAMSLFGSARQLTF

SEQ ID NO: 752900 - protein, 17 aa, Homo sapiens
  CDR3 for beta chain variable domain of TCR clone 376450 (TRBV13, TRBJ2-3)
CASSLSRVAGGRNTQYF

SEQ ID NO: 752901 - protein, 14 aa, Homo sapiens
  CDR3 for alpha chain variable domain of TCR clone 376451 (TRAV13-1, TRAJ35)
CAASKGGFGNVLHC

SEQ ID NO: 752902 - protein, 15 aa, Homo sapiens
  CDR3 for beta chain variable domain of TCR clone 376451 (TRBV28, TRBJ2-1)
CDSSGLAEVDNEQFF

SEQ ID NO: 752903 - protein, 13 aa, Homo sapiens
  CDR3 for alpha chain variable domain of TCR clone 376452 (TRAV8-3, TRAJ37)
SAVTSSNTVKLIF

SEQ ID NO: 752904 - protein, 12 aa, Homo sapiens
  CDR3 for beta chain variable domain of TCR clone 376452 (TRBV11-2, TRBJ2-1)
CASSPGNNEQFF

SEQ ID NO: 752905 - protein, 12 aa, Homo sapiens
  CDR3 for alpha chain variable domain of TCR clone 376453 (TRAV16, TRAJ10)
CSRTGGGNKRTF

SEQ ID NO: 752906 - protein, 14 aa, Homo sapiens
  CDR3 for beta chain variable domain of TCR clone 376453 (TRBV7-2, TRBJ1-2)
CASSQTGSTYGYTF

SEQ ID NO: 752907 - protein, 14 aa, Homo sapiens
  CDR3 for alpha chain variable domain of TCR clone 376454 (TRAV8-4, TRAJ39)
CAVSEGNAGNMLTF

SEQ ID NO: 752908 - protein, 13 aa, Homo sapiens
  CDR3 for beta chain variable domain of TCR clone 376454 (TRBV29-1, TRBJ2-7)
CSVKRGGNYEQYF

SEQ ID NO: 752909 - protein, 14 aa, Homo sapiens
  CDR3 for alpha chain variable domain of TCR clone 376455 (TRAV35, TRAJ13)
CAGRSPGGYQKVTL

SEQ ID NO: 752910 - protein, 14 aa, Homo sapiens
  CDR3 for beta chain variable domain of TCR clone 376455 (TRBV19, TRBJ2-2)
CASSMVGLSGELFF

SEQ ID NO: 752911 - protein, 14 aa, Homo sapiens
  CDR3 for alpha chain variable domain of TCR clone 376456 (TRAV2, TRAJ29)
CAVTPPSGNTPLVF

SEQ ID NO: 752912 - protein, 16 aa, Homo sapiens
  CDR3 for beta chain variable domain of TCR clone 376456 (TRBV18, TRBJ1-3)
CASSLGILNGENTIYF

SEQ ID NO: 752913 - protein, 16 aa, Homo sapiens
  CDR3 for alpha chain variable domain of TCR clone 376457 (TRAV12-3, TRAJ53)
CAMSPGSGGSNYKLTF

SEQ ID NO: 752914 - protein, 15 aa, Homo sapiens
  CDR3 for beta chain variable domain of TCR clone 376457 (TRBV6-1, TRBJ2-7)
CASSESMGDFYEQYF

SEQ ID NO: 752915 - protein, 16 aa, Homo sapiens
  CDR3 for alpha chain variable domain of TCR clone 376458 (TRAV30, TRAJ24)
CGTGIVDADSLGKFQF

SEQ ID NO: 752916 - protein, 14 aa, Homo sapiens
  CDR3 for beta chain variable domain of TCR clone 376458 (TRBV12-5, TRBJ2-5)
CASGSRTHQETQYF

SEQ ID NO: 752917 - protein, 13 aa, Homo sapiens
  CDR3 for alpha chain variable domain of TCR clone 376459 (TRAV2, TRAJ15)
CAVASQAGTALIL

SEQ ID NO: 752918 - protein, 15 aa, Homo sapiens
  CDR3 for beta chain variable domain of TCR clone 376459 (TRBV28, TRBJ1-4)
CASSVSGSGLEKLFF

SEQ ID NO: 752919 - protein, 14 aa, Homo sapiens
  CDR3 for alpha chain variable domain of TCR clone 376460 (TRAV3, TRAJ21)
CAVESQANFNKLYF

SEQ ID NO: 752920 - protein, 12 aa, Homo sapiens
  CDR3 for beta chain variable domain of TCR clone 376460 (TRBV6-3, TRBJ2-7)
CASGLTPYEQYF

SEQ ID NO: 752921 - protein, 11 aa, Homo sapiens
  CDR3 for alpha chain variable domain of TCR clone 376461 (TRAV12-3, TRAJ40)
CNELRNLKYIF

SEQ ID NO: 752922 - protein, 19 aa, Homo sapiens
  CDR3 for beta chain variable domain of TCR clone 376461 (TRBV7-8, TRBJ2-2)
CQQPFISRADYPYHRELFF

SEQ ID NO: 752923 - protein, 12 aa, Homo sapiens
  CDR3 for alpha chain variable domain of TCR clone 376462 (TRAV21, TRAJ31)
CAVWGNNARLMF

SEQ ID NO: 752924 - protein, 13 aa, Homo sapiens
  CDR3 for beta chain variable domain of TCR clone 376462 (TRBV24-1, TRBJ2-2)
CATSDWSTGELFF

SEQ ID NO: 752925 - protein, 14 aa, Homo sapiens
  CDR3 for alpha chain variable domain of TCR clone 376463 (TRAV38-2/DV8, TRAJ30)
CAYMDGLGGDKIIF

SEQ ID NO: 752926 - protein, 13 aa, Homo sapiens
  CDR3 for beta chain variable domain of TCR clone 376463 (TRBV7-9, TRBJ1-2)
CASSLKQNYGYIF

SEQ ID NO: 752927 - protein, 14 aa, Homo sapiens
  CDR3 for alpha chain variable domain of TCR clone 376464 (TRAV8-3, TRAJ40)
CAVALTSGTYKYIF

SEQ ID NO: 752928 - protein, 16 aa, Homo sapiens
  CDR3 for beta chain variable domain of TCR clone 376464 (TRBV20-1, TRBJ1-4)
CSARPYGGELNEKLFF

SEQ ID NO: 752929 - protein, 16 aa, Homo sapiens
  CDR3 for alpha chain variable domain of TCR clone 376465 (TRAV16, TRAJ52)
CALSAAGGTSYGKLTF

SEQ ID NO: 752930 - protein, 14 aa, Homo sapiens
  CDR3 for beta chain variable domain of TCR clone 376465 (TRBV11-2, TRBJ2-5)
CASRPLAGRETQYF

SEQ ID NO: 752931 - protein, 11 aa, Homo sapiens
  CDR3 for alpha chain variable domain of TCR clone 376466 (TRAV3, TRAJ21)
CALGNFNKFYF

SEQ ID NO: 752932 - protein, 15 aa, Homo sapiens
  CDR3 for beta chain variable domain of TCR clone 376466 (TRBV29-1, TRBJ2-1)
CSVEGGPASYNEQFF

SEQ ID NO: 752933 - protein, 13 aa, Homo sapiens
  CDR3 for alpha chain variable domain of TCR clone 376467 (TRAV2, TRAJ21)
CAVEDLNFNKFYF

SEQ ID NO: 752934 - protein, 14 aa, Homo sapiens
  CDR3 for beta chain variable domain of TCR clone 376467 (TRBV28, TRBJ2-5)
CQQSGQGSIETQYF

SEQ ID NO: 752935 - protein, 14 aa, Homo sapiens
  CDR3 for alpha chain variable domain of TCR clone 376468 (TRAV8-3, TRAJ9)
CAVVYNTGGFKTIF

SEQ ID NO: 752936 - protein, 13 aa, Homo sapiens
  CDR3 for beta chain variable domain of TCR clone 376468 (TRBV7-2, TRBJ2-2)
CASSLAVTGELFF

SEQ ID NO: 752937 - protein, 12 aa, Homo sapiens
  CDR3 for alpha chain variable domain of TCR clone 376469 (TRAV12-3, TRAJ17)
CAMTLTGSKLTF

SEQ ID NO: 752938 - protein, 12 aa, Homo sapiens
  CDR3 for beta chain variable domain of TCR clone 376469 (TRBV7-9, TRBJ2-7)
CASSIKREEQYF

SEQ ID NO: 752939 - protein, 18 aa, Homo sapiens
  CDR3 for alpha chain variable domain of TCR clone 376470 (TRAV16, TRAJ52)
CALSGVDAGGTSYGKLTF

SEQ ID NO: 752940 - protein, 14 aa, Homo sapiens
  CDR3 for beta chain variable domain of TCR clone 376470 (TRBV7-3, TRBJ1-1)
CASSLKGGNTEAFF

SEQ ID NO: 752941 - protein, 14 aa, Homo sapiens
  CDR3 for alpha chain variable domain of TCR clone 376471 (TRAV1-2, TRAJ15)
CAVRDRQAGTALLF

SEQ ID NO: 752942 - protein, 14 aa, Homo sapiens
  CDR3 for beta chain variable domain of TCR clone 376471 (TRBV4-1, TRBJ2-2)
CASSQAVNTGELFF

SEQ ID NO: 752943 - protein, 13 aa, Homo sapiens
  CDR3 for alpha chain variable domain of TCR clone 376472 (TRAV13-1, TRAJ39)
CAASIVMPATCSP

SEQ ID NO: 752944 - protein, 16 aa, Homo sapiens
  CDR3 for beta chain variable domain of TCR clone 376472 (TRBV20-1, TRBJ1-4)
CSAPGQGLLTNEKLFF

SEQ ID NO: 752945 - protein, 14 aa, Homo sapiens
  CDR3 for alpha chain variable domain of TCR clone 376473 (TRAV1-2, TRAJ8)
CAVREDTGFQKLVF

SEQ ID NO: 752946 - protein, 15 aa, Homo sapiens
  CDR3 for beta chain variable domain of TCR clone 376473 (TRBV7-3, TRBJ2-2)
CASIETGQGTGELFF

SEQ ID NO: 752947 - protein, 14 aa, Homo sapiens
  CDR3 for alpha chain variable domain of TCR clone 376474 (TRAV23/DV6, TRAJ37)
CAASPSSNTGKLIF

SEQ ID NO: 752948 - protein, 14 aa, Homo sapiens
  CDR3 for beta chain variable domain of TCR clone 376474 (TRBV24-1, TRBJ1-1)
CATSIPRGDTEAFF

SEQ ID NO: 752949 - protein, 12 aa, Homo sapiens
  CDR3 for alpha chain variable domain of TCR clone 376475 (TRAV13-2, TRAJ8)
CAPWLGFQKLVF

SEQ ID NO: 752950 - protein, 15 aa, Homo sapiens
  CDR3 for beta chain variable domain of TCR clone 376475 (TRBV12-4, TRBJ1-2)
CASSPITGGGYGYTF

SEQ ID NO: 752951 - protein, 14 aa, Homo sapiens
  CDR3 for alpha chain variable domain of TCR clone 376476 (TRAV3, TRAJ8)
CAVSLNTGFQKLVF

SEQ ID NO: 752952 - protein, 19 aa, Homo sapiens
  CDR3 for beta chain variable domain of TCR clone 376476 (TRBV25-1, TRBJ2-2)
CAILVYRVDRGRKTGELFF

SEQ ID NO: 752953 - protein, 13 aa, Homo sapiens
  CDR3 for alpha chain variable domain of TCR clone 376477 (TRAV16, TRAJ37)
CALRGSNTGKLIF

SEQ ID NO: 752954 - protein, 14 aa, Homo sapiens
  CDR3 for beta chain variable domain of TCR clone 376477 (TRBV7-8, TRBJ2-3)
CASSLEAGTDTQYF

SEQ ID NO: 752955 - protein, 14 aa, Homo sapiens
  CDR3 for alpha chain variable domain of TCR clone 376478 (TRAV12-3, TRAJ10)
SHLPLTGGGNKLTF

SEQ ID NO: 752956 - protein, 15 aa, Homo sapiens
  CDR3 for beta chain variable domain of TCR clone 376478 (TRBV11-2, TRBJ2-7)
CASSLSQGSSYEQYF

SEQ ID NO: 752957 - protein, 14 aa, Homo sapiens
  CDR3 for alpha chain variable domain of TCR clone 376479 (TRAV12-2, TRAJ40)
CAVKIPSGTYKYIF

SEQ ID NO: 752958 - protein, 14 aa, Homo sapiens
  CDR3 for beta chain variable domain of TCR clone 376479 (TRBV11-2, TRBJ1-5)
CASSLDGGRQPQHF

SEQ ID NO: 752959 - protein, 12 aa, Homo sapiens
  CDR3 for alpha chain variable domain of TCR clone 376480 (TRAV21, TRAJ31)
CAVWGNNARLMF

SEQ ID NO: 752960 - protein, 11 aa, Homo sapiens
  CDR3 for beta chain variable domain of TCR clone 376480 (TRBV11-2, TRBJ2-2)
CASSLPGELFF

SEQ ID NO: 752961 - protein, 12 aa, Homo sapiens
  CDR3 for alpha chain variable domain of TCR clone 376481 (TRAV12-3, TRAJ17)
CAMTLTCNKLTF

SEQ ID NO: 752962 - protein, 15 aa, Homo sapiens
  CDR3 for beta chain variable domain of TCR clone 376481 (TRBV20-1, TRBJ2-7)
CSARDRVSGMDEQYL

SEQ ID NO: 752963 - protein, 13 aa, Homo sapiens
  CDR3 for alpha chain variable domain of TCR clone 376482 (TRAV17, TRAJ26)
CATVDNYGQNFVF

SEQ ID NO: 752964 - protein, 15 aa, Homo sapiens
  CDR3 for beta chain variable domain of TCR clone 376482 (TRBV7-9, TRBJ1-6)
CASSSPGRGNSPLHF

SEQ ID NO: 752965 - protein, 14 aa, Homo sapiens
  CDR3 for alpha chain variable domain of TCR clone 376483 (TRAV1-2, TRAJ16)
CAVNRFSDGQKLLF

SEQ ID NO: 752966 - protein, 11 aa, Homo sapiens
  CDR3 for beta chain variable domain of TCR clone 376483 (TRBV12-4, TRBJ2-3)
WPSTATDTQYF

SEQ ID NO: 752967 - protein, 12 aa, Homo sapiens
  CDR3 for alpha chain variable domain of TCR clone 376484 (TRAV21, TRAJ3)
CCFYSSASKIIL

SEQ ID NO: 752968 - protein, 16 aa, Homo sapiens
  CDR3 for beta chain variable domain of TCR clone 376484 (TRBV19, TRBJ2-1)
CASSNAGPSSYNEQFF

SEQ ID NO: 752969 - protein, 13 aa, Homo sapiens
  CDR3 for alpha chain variable domain of TCR clone 376485 (TRAV12-1, TRAJ26)
SATYLYYGQNFVF

SEQ ID NO: 752970 - protein, 13 aa, Homo sapiens
  CDR3 for beta chain variable domain of TCR clone 376485 (TRBV7-9, TRBJ2-1)
CASSLSGNNEQFF

SEQ ID NO: 752971 - protein, 14 aa, Homo sapiens
  CDR3 for alpha chain variable domain of TCR clone 376486 (TRAV13-1, TRAJ44)
CAAKATGTASKLTI

SEQ ID NO: 752972 - protein, 17 aa, Homo sapiens
  CDR3 for beta chain variable domain of TCR clone 376486 (TRBV7-3, TRBJ2-3)
RASSLMKRMRGADTQYF

SEQ ID NO: 752973 - protein, 16 aa, Homo sapiens
  CDR3 for alpha chain variable domain of TCR clone 376487 (TRAV3, TRAJ37)
CAVRGKGSGNTGKLIC

SEQ ID NO: 752974 - protein, 14 aa, Homo sapiens
  CDR3 for beta chain variable domain of TCR clone 376487 (TRBV7-7, TRBJ2-2)
CASSRDRSTGELFF

SEQ ID NO: 752975 - protein, 15 aa, Homo sapiens
  CDR3 for alpha chain variable domain of TCR clone 376488 (TRAV3, TRAJ3)
CAVRDGHSSASKIIF

SEQ ID NO: 752976 - protein, 16 aa, Homo sapiens
  CDR3 for beta chain variable domain of TCR clone 376488 (TRBV28, TRBJ1-4)
CASSFGTFDENCFLAV

SEQ ID NO: 752977 - protein, 14 aa, Homo sapiens
  CDR3 for alpha chain variable domain of TCR clone 376489 (TRAV38-1, TRAJ45)
CASHSGGGADGLTL

SEQ ID NO: 752978 - protein, 13 aa, Homo sapiens
  CDR3 for beta chain variable domain of TCR clone 376489 (TRBV10-3, TRBJ1-2)
CAISEWDSYGYTF

SEQ ID NO: 752979 - protein, 11 aa, Homo sapiens
  CDR3 for alpha chain variable domain of TCR clone 376490 (TRAV17, TRAJ31)
CATDRPARLMF

SEQ ID NO: 752980 - protein, 14 aa, Homo sapiens
  CDR3 for beta chain variable domain of TCR clone 376490 (TRBV4-1, TRBJ2-2)
CASSQAVNTGELFF

SEQ ID NO: 752981 - protein, 14 aa, Homo sapiens
  CDR3 for alpha chain variable domain of TCR clone 376491 (TRAV36/DV7, TRAJ44)
CCGANTGTASKLTF

SEQ ID NO: 752982 - protein, 17 aa, Homo sapiens
  CDR3 for beta chain variable domain of TCR clone 376491 (TRBV13, TRBJ2-3)
CASSLSRVAGGRNTQYF

SEQ ID NO: 752983 - protein, 15 aa, Homo sapiens
  CDR3 for alpha chain variable domain of TCR clone 376492 (TRAV12-2, TRAJ43)
CAFDMRFGAGTRLTV

SEQ ID NO: 752984 - protein, 16 aa, Homo sapiens
  CDR3 for beta chain variable domain of TCR clone 376492 (TRBV15, TRBJ2-5)
CATSRYLEAAQETQYF

SEQ ID NO: 752985 - protein, 17 aa, Homo sapiens
  CDR3 for alpha chain variable domain of TCR clone 376493 (TRAV38-2/DV8, TRAJ57)
CAYRSVLTQGGSEKLVF

SEQ ID NO: 752986 - protein, 15 aa, Homo sapiens
  CDR3 for beta chain variable domain of TCR clone 376493 (TRBV5-1, TRBJ1-1)
CASSLTGRGNTEAFF

SEQ ID NO: 752987 - protein, 19 aa, Homo sapiens
  CDR3 for alpha chain variable domain of TCR clone 376494 (TRAV26-1, TRAJ28)
CIVRVAHAYSGAGSYQLTF

SEQ ID NO: 752988 - protein, 17 aa, Homo sapiens
  CDR3 for beta chain variable domain of TCR clone 376494 (TRBV4-1, TRBJ1-4)
CASSQEGPRVVEEKLFF

SEQ ID NO: 752989 - protein, 16 aa, Homo sapiens
  CDR3 for alpha chain variable domain of TCR clone 376495 (TRAV12-2, TRAJ32)
CAVNLGQGGATNKLIF

SEQ ID NO: 752990 - protein, 15 aa, Homo sapiens
  CDR3 for beta chain variable domain of TCR clone 376495 (TRBV28, TRBJ2-5)
CASSPPWSYQETQYF

SEQ ID NO: 752991 - protein, 15 aa, Homo sapiens
  CDR3 for alpha chain variable domain of TCR clone 376496 (TRAV12-1, TRAJ45)
CVVLSGGGGADVLTF

SEQ ID NO: 752992 - protein, 14 aa, Homo sapiens
  CDR3 for beta chain variable domain of TCR clone 376496 (TRBV11-2, TRBJ2-5)
CASSRTGGIETQYF

SEQ ID NO: 752993 - protein, 13 aa, Homo sapiens
  CDR3 for alpha chain variable domain of TCR clone 376497 (TRAV12-1, TRAJ11)
CVVTRGGYRTLTF

SEQ ID NO: 752994 - protein, 13 aa, Homo sapiens
  CDR3 for beta chain variable domain of TCR clone 376497 (TRBV20-1, TRBJ1-2)
CSARDQGAYGYAF

SEQ ID NO: 752995 - protein, 17 aa, Homo sapiens
  CDR3 for alpha chain variable domain of TCR clone 376498 (TRAV3, TRAJ42)
CAVRDRDYGGSQGNLIF

SEQ ID NO: 752996 - protein, 17 aa, Homo sapiens
  CDR3 for beta chain variable domain of TCR clone 376498 (TRBV7-9, TRBJ2-3)
CVSSPTVAGDLTDTQYF

SEQ ID NO: 752997 - protein, 14 aa, Homo sapiens
  CDR3 for alpha chain variable domain of TCR clone 376499 (TRAV12-2, TRAJ24)
CAVTPADSWGKLQF

SEQ ID NO: 752998 - protein, 13 aa, Homo sapiens
  CDR3 for beta chain variable domain of TCR clone 376499 (TRBV19, TRBJ1-2)
CASSPGTGVGYTF

SEQ ID NO: 752999 - protein, 17 aa, Homo sapiens
  CDR3 for alpha chain variable domain of TCR clone 376500 (TRAV8-6, TRAJ22)
CAVNLYPSSGSARQLTF

SEQ ID NO: 753000 - protein, 16 aa, Homo sapiens
  CDR3 for beta chain variable domain of TCR clone 376500 (TRBV19, TRBJ2-7)
CASSPAGSGSLNEQYF

SEQ ID NO: 753001 - protein, 18 aa, Homo sapiens
  CDR3 for alpha chain variable domain of TCR clone 376501 (TRAV13-1, TRAJ52)
CAASKRSAGGTSYGKLTF

SEQ ID NO: 753002 - protein, 16 aa, Homo sapiens
  CDR3 for beta chain variable domain of TCR clone 376501 (TRBV20-1, TRBJ2-1)
CSARDLKQGMNNEQFF

SEQ ID NO: 753003 - protein, 12 aa, Homo sapiens
  CDR3 for alpha chain variable domain of TCR clone 376502 (TRAV2, TRAJ3)
CAVRSRASKIIF

SEQ ID NO: 753004 - protein, 15 aa, Homo sapiens
  CDR3 for beta chain variable domain of TCR clone 376502 (TRBV15, TRBJ2-5)
CATSRDGGPQETQYF

SEQ ID NO: 753005 - protein, 14 aa, Homo sapiens
  CDR3 for alpha chain variable domain of TCR clone 376503 (TRAV30, TRAJ26)
CGTEIVSYGQNFVF

SEQ ID NO: 753006 - protein, 13 aa, Homo sapiens
  CDR3 for beta chain variable domain of TCR clone 376503 (TRBV19, TRBJ1-3)
CASRLSLGNAIYF

SEQ ID NO: 753007 - protein, 13 aa, Homo sapiens
  CDR3 for alpha chain variable domain of TCR clone 376504 (TRAV21, TRAJ20)
CAVGLRVDYKLSF

SEQ ID NO: 753008 - protein, 14 aa, Homo sapiens
  CDR3 for beta chain variable domain of TCR clone 376504 (TRBV27, TRBJ2-2)
CASRPGVNTGELFF

SEQ ID NO: 753009 - protein, 12 aa, Homo sapiens
  CDR3 for alpha chain variable domain of TCR clone 376505 (TRAV21, TRAJ11)
CAVRRGNSTLTF

SEQ ID NO: 753010 - protein, 15 aa, Homo sapiens
  CDR3 for beta chain variable domain of TCR clone 376505 (TRBV6-1, TRBJ2-7)
CASSEPIAATTEQYF

SEQ ID NO: 753011 - protein, 15 aa, Homo sapiens
  CDR3 for alpha chain variable domain of TCR clone 376506 (TRAV13-1, TRAJ17)
CAASIHGGFRQQANF

SEQ ID NO: 753012 - protein, 14 aa, Homo sapiens
  CDR3 for beta chain variable domain of TCR clone 376506 (TRBV20-1, TRBJ2-4)
CSARDRGQGGIQYF

SEQ ID NO: 753013 - protein, 10 aa, Homo sapiens
  CDR3 for alpha chain variable domain of TCR clone 376507 (TRAV12-2, TRAJ10)
CAAWTGVETH

SEQ ID NO: 753014 - protein, 14 aa, Homo sapiens
  CDR3 for beta chain variable domain of TCR clone 376507 (TRBV13, TRBJ2-7)
CASSLKGASYEQYF

SEQ ID NO: 753015 - protein, 13 aa, Homo sapiens
  CDR3 for alpha chain variable domain of TCR clone 376508 (TRAV8-3, TRAJ36)
CAVGAAGANNLFF

SEQ ID NO: 753016 - protein, 15 aa, Homo sapiens
  CDR3 for beta chain variable domain of TCR clone 376508 (TRBV7-2, TRBJ1-2)
CASSPRARWNYGYAF

SEQ ID NO: 753017 - protein, 14 aa, Homo sapiens
  CDR3 for alpha chain variable domain of TCR clone 376509 (TRAV1-2, TRAJ16)
CAVNRFSDGQKLLF

SEQ ID NO: 753018 - protein, 13 aa, Homo sapiens
  CDR3 for beta chain variable domain of TCR clone 376509 (TRBV3-1, TRBJ2-5)
CASSPVLSETQYF

SEQ ID NO: 753019 - protein, 15 aa, Homo sapiens
  CDR3 for alpha chain variable domain of TCR clone 376510 (TRAV8-3, TRAJ34)
CAVAPHGGNTDKLIF

SEQ ID NO: 753020 - protein, 13 aa, Homo sapiens
  CDR3 for beta chain variable domain of TCR clone 376510 (TRBV20-1, TRBJ1-1)
CSAPPGGHTEAFF

SEQ ID NO: 753021 - protein, 13 aa, Homo sapiens
  CDR3 for alpha chain variable domain of TCR clone 376511 (TRAV27, TRAJ3)
ASLRGSSASKIIF

SEQ ID NO: 753022 - protein, 14 aa, Homo sapiens
  CDR3 for beta chain variable domain of TCR clone 376511 (TRBV7-6, TRBJ2-3)
CASSLGTVTDTQYF

SEQ ID NO: 753023 - protein, 15 aa, Homo sapiens
  CDR3 for alpha chain variable domain of TCR clone 376512 (TRAV36/DV7, TRAJ53)
CAVEGSGGSNYKLTF

SEQ ID NO: 753024 - protein, 16 aa, Homo sapiens
  CDR3 for beta chain variable domain of TCR clone 376512 (TRBV27, TRBJ2-2)
CASSLSGFWVTGEVFF

SEQ ID NO: 753025 - protein, 16 aa, Homo sapiens
  CDR3 for alpha chain variable domain of TCR clone 376513 (TRAV8-3, TRAJ13)
CAVVLMNSGGYQKVTF

SEQ ID NO: 753026 - protein, 15 aa, Homo sapiens
  CDR3 for beta chain variable domain of TCR clone 376513 (TRBV5-4, TRBJ2-5)
CASSFAGGAKETQYF

SEQ ID NO: 753027 - protein, 15 aa, Homo sapiens
  CDR3 for alpha chain variable domain of TCR clone 376514 (TRAV38-1, TRAJ57)
CAFMDSRGGSETLVF

SEQ ID NO: 753028 - protein, 16 aa, Homo sapiens
  CDR3 for beta chain variable domain of TCR clone 376514 (TRBV10-3, TRBJ2-1)
CAIRGGGRGDYNEQFF

SEQ ID NO: 753029 - protein, 19 aa, Homo sapiens
  CDR3 for alpha chain variable domain of TCR clone 376515 (TRAV2, TRAJ32)
TTVPSTPPSQGGATNKLIF

SEQ ID NO: 753030 - protein, 12 aa, Homo sapiens
  CDR3 for beta chain variable domain of TCR clone 376515 (TRBV20-1, TRBJ2-7)
CSAITPTKEQYF

SEQ ID NO: 753031 - protein, 15 aa, Homo sapiens
  CDR3 for alpha chain variable domain of TCR clone 376516 (TRAV12-3, TRAJ6)
CAMSATTGGSYIPTF

SEQ ID NO: 753032 - protein, 19 aa, Homo sapiens
  CDR3 for beta chain variable domain of TCR clone 376516 (TRBV25-1, TRBJ2-2)
CAILVYRVDRGRKTGGLVF

SEQ ID NO: 753033 - protein, 14 aa, Homo sapiens
  CDR3 for alpha chain variable domain of TCR clone 376517 (TRAV13-1, TRAJ35)
CAASKGGFGNVLHF

SEQ ID NO: 753034 - protein, 13 aa, Homo sapiens
  CDR3 for beta chain variable domain of TCR clone 376517 (TRBV7-3, TRBJ1-1)
FASSQDWGAEAFF

SEQ ID NO: 753035 - protein, 15 aa, Homo sapiens
  CDR3 for alpha chain variable domain of TCR clone 376518 (TRAV12-2, )
CAVASLATTISRTLP

SEQ ID NO: 753036 - protein, 16 aa, Homo sapiens
  CDR3 for beta chain variable domain of TCR clone 376518 (TRBV5-1, TRBJ2-2)
CASSSRTGGRTGELVF

SEQ ID NO: 753037 - protein, 14 aa, Homo sapiens
  CDR3 for alpha chain variable domain of TCR clone 376519 (TRAV12-2, TRAJ53)
CAVKGGGSNYKLTF

SEQ ID NO: 753038 - protein, 17 aa, Homo sapiens
  CDR3 for beta chain variable domain of TCR clone 376519 (TRBV4-1, TRBJ2-7)
CASSPFLTSGGVVEQYF

SEQ ID NO: 753039 - protein, 14 aa, Homo sapiens
  CDR3 for alpha chain variable domain of TCR clone 376520 (TRAV12-3, TRAJ10)
SHLPLTGGGNKLTF

SEQ ID NO: 753040 - protein, 11 aa, Homo sapiens
  CDR3 for beta chain variable domain of TCR clone 376520 (TRBV6-1, TRBJ2-1)
CDSISSNEQFF

SEQ ID NO: 753041 - protein, 15 aa, Homo sapiens
  CDR3 for alpha chain variable domain of TCR clone 376521 (TRAV35, TRAJ40)
CAGQLWDSGTYKYIF

SEQ ID NO: 753042 - protein, 12 aa, Homo sapiens
  CDR3 for beta chain variable domain of TCR clone 376521 (TRBV7-8, TRBJ2-7)
CASSLGGYEQYF

SEQ ID NO: 753043 - protein, 13 aa, Homo sapiens
  CDR3 for alpha chain variable domain of TCR clone 376522 (TRAV27, TRAJ29)
CAAAHSGNTPLVF

SEQ ID NO: 753044 - protein, 14 aa, Homo sapiens
  CDR3 for beta chain variable domain of TCR clone 376522 (TRBV7-9, TRBJ2-7)
CASSIGQGAGEQYF

SEQ ID NO: 753045 - protein, 16 aa, Homo sapiens
  CDR3 for alpha chain variable domain of TCR clone 376523 (TRAV3, TRAJ37)
CAVRLHGSGNTGKLIF

SEQ ID NO: 753046 - protein, 16 aa, Homo sapiens
  CDR3 for beta chain variable domain of TCR clone 376523 (TRBV9, TRBJ1-2)
CASSVEEKVSPYGYAF

SEQ ID NO: 753047 - protein, 13 aa, Homo sapiens
  CDR3 for alpha chain variable domain of TCR clone 376524 (TRAV12-3, TRAJ7)
CAMTPYGNNRLAF

SEQ ID NO: 753048 - protein, 16 aa, Homo sapiens
  CDR3 for beta chain variable domain of TCR clone 376524 (TRBV7-3, TRBJ2-2)
CASSLKRGTLSGELFF

SEQ ID NO: 753049 - protein, 17 aa, Homo sapiens
  CDR3 for alpha chain variable domain of TCR clone 376525 (TRAV3, TRAJ6)
CAVRDGPRAGGSYIPTF

SEQ ID NO: 753050 - protein, 11 aa, Homo sapiens
  CDR3 for beta chain variable domain of TCR clone 376525 (TRBV20-1, TRBJ2-7)
CSARLSYEQYF

SEQ ID NO: 753051 - protein, 12 aa, Homo sapiens
  CDR3 for alpha chain variable domain of TCR clone 376526 (TRAV21, TRAJ33)
CAKMDSNYQLIW

SEQ ID NO: 753052 - protein, 13 aa, Homo sapiens
  CDR3 for beta chain variable domain of TCR clone 376526 (TRBV2, TRBJ2-2)
CASRAWRTGELFF

SEQ ID NO: 753053 - protein, 12 aa, Homo sapiens
  CDR3 for alpha chain variable domain of TCR clone 376527 (TRAV8-3, TRAJ26)
CAGDNYGHNFFF

SEQ ID NO: 753054 - protein, 14 aa, Homo sapiens
  CDR3 for beta chain variable domain of TCR clone 376527 (TRBV18, TRBJ2-7)
CASSPRGGAYEQYF

SEQ ID NO: 753055 - protein, 13 aa, Homo sapiens
  CDR3 for alpha chain variable domain of TCR clone 376528 (TRAV29/DV5, TRAJ52)
CAAGFRGAGGPSY

SEQ ID NO: 753056 - protein, 16 aa, Homo sapiens
  CDR3 for beta chain variable domain of TCR clone 376528 (TRBV7-3, TRBJ2-2)
CASSLKRGTLSGELFF

SEQ ID NO: 753057 - protein, 13 aa, Homo sapiens
  CDR3 for alpha chain variable domain of TCR clone 376529 (TRAV13-1, TRAJ43)
CAASLPNNNDMRF

SEQ ID NO: 753058 - protein, 14 aa, Homo sapiens
  CDR3 for beta chain variable domain of TCR clone 376529 (TRBV5-1, TRBJ2-5)
CASSLAGKQETQYF

SEQ ID NO: 753059 - protein, 10 aa, Homo sapiens
  CDR3 for alpha chain variable domain of TCR clone 376530 (TRAV12-3, TRAJ49)
CVMNDDQFYF

SEQ ID NO: 753060 - protein, 13 aa, Homo sapiens
  CDR3 for beta chain variable domain of TCR clone 376530 (TRBV12-4, TRBJ1-1)
CASSPGSGFEAFF

SEQ ID NO: 753061 - protein, 14 aa, Homo sapiens
  CDR3 for alpha chain variable domain of TCR clone 376531 (TRAV1-2, TRAJ16)
CAVNRFSDGQKLLF

SEQ ID NO: 753062 - protein, 16 aa, Homo sapiens
  CDR3 for beta chain variable domain of TCR clone 376531 (TRBV11-2, TRBJ1-2)
CVSSLDTGGADYGYTF

SEQ ID NO: 753063 - protein, 16 aa, Homo sapiens
  CDR3 for alpha chain variable domain of TCR clone 376532 (TRAV14/DV4, TRAJ53)
CAMREGGGGSNYKLTF

SEQ ID NO: 753064 - protein, 12 aa, Homo sapiens
  CDR3 for beta chain variable domain of TCR clone 376532 (TRBV5-1, TRBJ1-2)
CASSQDTYGYTF

SEQ ID NO: 753065 - protein, 18 aa, Homo sapiens
  CDR3 for alpha chain variable domain of TCR clone 376533 (TRAV21, TRAJ52)
CAVRPSPAGGTSYGKLTF

SEQ ID NO: 753066 - protein, 15 aa, Homo sapiens
  CDR3 for beta chain variable domain of TCR clone 376533 (TRBV6-1, TRBJ2-7)
CASSESMGDFYEQYF

SEQ ID NO: 753067 - protein, 12 aa, Homo sapiens
  CDR3 for alpha chain variable domain of TCR clone 376534 (TRAV12-3, TRAJ17)
CAMTLTGNKLTF

SEQ ID NO: 753068 - protein, 17 aa, Homo sapiens
  CDR3 for beta chain variable domain of TCR clone 376534 (TRBV6-5, TRBJ2-3)
CASSPRIAGPRTDTQYF

SEQ ID NO: 753069 - protein, 13 aa, Homo sapiens
  CDR3 for alpha chain variable domain of TCR clone 376535 (TRAV12-1, TRAJ26)
SATYLYCGQNFVF

SEQ ID NO: 753070 - protein, 15 aa, Homo sapiens
  CDR3 for beta chain variable domain of TCR clone 376535 (TRBV5-1, TRBJ2-6)
CASSLDPSGANVLTF

SEQ ID NO: 753071 - protein, 15 aa, Homo sapiens
  CDR3 for alpha chain variable domain of TCR clone 376536 (TRAV25, TRAJ52)
CAGRPGGTSYGKLTF

SEQ ID NO: 753072 - protein, 12 aa, Homo sapiens
  CDR3 for beta chain variable domain of TCR clone 376536 (TRBV7-8, TRBJ2-1)
CASSLGHNEQFF

SEQ ID NO: 753073 - protein, 12 aa, Homo sapiens
  CDR3 for alpha chain variable domain of TCR clone 376537 (TRAV3, TRAJ31)
CAVRDGNARLMF

SEQ ID NO: 753074 - protein, 18 aa, Homo sapiens
  CDR3 for beta chain variable domain of TCR clone 376537 (TRBV7-2, TRBJ2-3)
CASSLEREGSGITDTQYF

SEQ ID NO: 753075 - protein, 14 aa, Homo sapiens
  CDR3 for alpha chain variable domain of TCR clone 376538 (TRAV12-2, TRAJ44)
CAVNKAGTASKLTF

SEQ ID NO: 753076 - protein, 16 aa, Homo sapiens
  CDR3 for beta chain variable domain of TCR clone 376538 (TRBV6-1, TRBJ1-3)
CASSEGGVTSGNTMYF

SEQ ID NO: 753077 - protein, 16 aa, Homo sapiens
  CDR3 for alpha chain variable domain of TCR clone 376539 (TRAV29/DV5, TRAJ39)
CAASLLFNNAGNMLTF

SEQ ID NO: 753078 - protein, 15 aa, Homo sapiens
  CDR3 for beta chain variable domain of TCR clone 376539 (TRBV7-2, TRBJ2-1)
CASSFRESSYNEQFF

SEQ ID NO: 753079 - protein, 14 aa, Homo sapiens
  CDR3 for alpha chain variable domain of TCR clone 376540 (TRAV23/DV6, TRAJ22)
CAASVSGSARQLTF

SEQ ID NO: 753080 - protein, 17 aa, Homo sapiens
  CDR3 for beta chain variable domain of TCR clone 376540 (TRBV15, TRBJ1-5)
CATSRAPPGTRNQPQHF

SEQ ID NO: 753081 - protein, 13 aa, Homo sapiens
  CDR3 for alpha chain variable domain of TCR clone 376541 (TRAV36/DV7, TRAJ7)
CAGTRYGSNRLAF

SEQ ID NO: 753082 - protein, 14 aa, Homo sapiens
  CDR3 for beta chain variable domain of TCR clone 376541 (TRBV19, TRBJ2-1)
CASPTFVLSGEQFF

SEQ ID NO: 753083 - protein, 14 aa, Homo sapiens
  CDR3 for alpha chain variable domain of TCR clone 376542 (TRAV13-1, TRAJ44)
CAAKATGTASKLTF

SEQ ID NO: 753084 - protein, 13 aa, Homo sapiens
  CDR3 for beta chain variable domain of TCR clone 376542 (TRBV19, TRBJ1-5)
CASSIEPVQPQHF

SEQ ID NO: 753085 - protein, 15 aa, Homo sapiens
  CDR3 for alpha chain variable domain of TCR clone 376543 (TRAV21, TRAJ24)
CAARSSTDSWGKVQF

SEQ ID NO: 753086 - protein, 13 aa, Homo sapiens
  CDR3 for beta chain variable domain of TCR clone 376543 (TRBV11-2, TRBJ2-5)
CASSSTGEETQYF

SEQ ID NO: 753087 - protein, 12 aa, Homo sapiens
  CDR3 for alpha chain variable domain of TCR clone 376544 (TRAV13-2, TRAJ23)
CAERHRGGKLIF

SEQ ID NO: 753088 - protein, 16 aa, Homo sapiens
  CDR3 for beta chain variable domain of TCR clone 376544 (TRBV20-1, TRBJ1-4)
CSAPGQGLLTNEKVFF

SEQ ID NO: 753089 - protein, 18 aa, Homo sapiens
  CDR3 for alpha chain variable domain of TCR clone 376545 (TRAV21, TRAJ52)
CAVRPSPAGGTSYGKLTF

SEQ ID NO: 753090 - protein, 17 aa, Homo sapiens
  CDR3 for beta chain variable domain of TCR clone 376545 (TRBV7-3, TRBJ2-2)
CASSLSGTSGGTGELFF

SEQ ID NO: 753091 - protein, 14 aa, Homo sapiens
  CDR3 for alpha chain variable domain of TCR clone 376546 (TRAV17, TRAJ57)
CATDPQGGSEKLVF

SEQ ID NO: 753092 - protein, 16 aa, Homo sapiens
  CDR3 for beta chain variable domain of TCR clone 376546 (TRBV20-1, TRBJ1-4)
CSAPGQGLLTNEKLVF

SEQ ID NO: 753093 - protein, 18 aa, Homo sapiens
  CDR3 for alpha chain variable domain of TCR clone 376547 (TRAV12-3, TRAJ52)
CAMSVGGTGGTSYGKLTF

SEQ ID NO: 753094 - protein, 17 aa, Homo sapiens
  CDR3 for beta chain variable domain of TCR clone 376547 (TRBV13, TRBJ2-3)
CASSLSRVAGGRNTQYF

SEQ ID NO: 753095 - protein, 14 aa, Homo sapiens
  CDR3 for alpha chain variable domain of TCR clone 376548 (TRAV1-2, TRAJ16)
CAVNRFSDGQKLLF

SEQ ID NO: 753096 - protein, 10 aa, Homo sapiens
  CDR3 for beta chain variable domain of TCR clone 376548 (TRBV20-1, TRBJ1-4)
PQGANQKLFF

SEQ ID NO: 753097 - protein, 15 aa, Homo sapiens
  CDR3 for alpha chain variable domain of TCR clone 376549 (TRAV21, TRAJ52)
RAVRGGGTSYGKLTF

SEQ ID NO: 753098 - protein, 13 aa, Homo sapiens
  CDR3 for beta chain variable domain of TCR clone 376549 (TRBV6-5, TRBJ2-5)
CATAPSPQETQYF

SEQ ID NO: 753099 - protein, 15 aa, Homo sapiens
  CDR3 for alpha chain variable domain of TCR clone 376550 (TRAV17, TRAJ35)
CATAFVIGFGNVLHC

SEQ ID NO: 753100 - protein, 15 aa, Homo sapiens
  CDR3 for beta chain variable domain of TCR clone 376550 (TRBV7-9, TRBJ2-7)
CASSLALAEAHEQYF

SEQ ID NO: 753101 - protein, 18 aa, Homo sapiens
  CDR3 for alpha chain variable domain of TCR clone 376551 (TRAV26-1, TRAJ23)
CIVRVGLEVWNQGGKLIF

SEQ ID NO: 753102 - protein, 16 aa, Homo sapiens
  CDR3 for beta chain variable domain of TCR clone 376551 (TRBV4-1, TRBJ2-3)
CASSQSTSGAEDTQYF

SEQ ID NO: 753103 - protein, 14 aa, Homo sapiens
  CDR3 for alpha chain variable domain of TCR clone 376552 (TRAV1-1, TRAJ28)
CAAPSGAGSYQLTF

SEQ ID NO: 753104 - protein, 15 aa, Homo sapiens
  CDR3 for beta chain variable domain of TCR clone 376552 (TRBV7-2, TRBJ1-2)
CASSLVSGGDYGDIF

SEQ ID NO: 753105 - protein, 11 aa, Homo sapiens
  CDR3 for alpha chain variable domain of TCR clone 376553 (TRAV3, TRAJ21)
CAVGNFNKFYF

SEQ ID NO: 753106 - protein, 14 aa, Homo sapiens
  CDR3 for beta chain variable domain of TCR clone 376553 (TRBV7-9, TRBJ2-1)
CTSSSMVGFGEQFF

SEQ ID NO: 753107 - protein, 14 aa, Homo sapiens
  CDR3 for alpha chain variable domain of TCR clone 376554 (TRAV1-2, TRAJ8)
CAVREDTGFQKLVF

SEQ ID NO: 753108 - protein, 13 aa, Homo sapiens
  CDR3 for beta chain variable domain of TCR clone 376554 (TRBV12-4, TRBJ2-7)
CASSLERVREQYF

SEQ ID NO: 753109 - protein, 14 aa, Homo sapiens
  CDR3 for alpha chain variable domain of TCR clone 376555 (TRAV1-1, TRAJ27)
CAVIYNTNAGKSTL

SEQ ID NO: 753110 - protein, 14 aa, Homo sapiens
  CDR3 for beta chain variable domain of TCR clone 376555 (TRBV7-2, TRBJ2-3)
CASSQTGSSYTQYF

SEQ ID NO: 753111 - protein, 15 aa, Homo sapiens
  CDR3 for alpha chain variable domain of TCR clone 376556 (TRAV12-1, TRAJ44)
CVVDTPQGTASRLTF

SEQ ID NO: 753112 - protein, 14 aa, Homo sapiens
  CDR3 for beta chain variable domain of TCR clone 376556 (TRBV7-9, TRBJ2-1)
CASSPRDSLYEQFF

SEQ ID NO: 753113 - protein, 15 aa, Homo sapiens
  CDR3 for alpha chain variable domain of TCR clone 376557 (TRAV3, TRAJ8)
CAVRDNETGFQKLVF

SEQ ID NO: 753114 - protein, 13 aa, Homo sapiens
  CDR3 for beta chain variable domain of TCR clone 376557 (TRBV7-3, TRBJ1-1)
CASSQDWGAEAFF

SEQ ID NO: 753115 - protein, 15 aa, Homo sapiens
  CDR3 for alpha chain variable domain of TCR clone 376558 (TRAV26-1, TRAJ23)
CIVRVAGYQGGKLNF

SEQ ID NO: 753116 - protein, 18 aa, Homo sapiens
  CDR3 for beta chain variable domain of TCR clone 376558 (TRBV28, TRBJ2-1)
CASSSTSGRANSYNEQFF

SEQ ID NO: 753117 - protein, 15 aa, Homo sapiens
  CDR3 for alpha chain variable domain of TCR clone 376559 (TRAV3, TRAJ22)
CAVRDRGGSARQLTF

SEQ ID NO: 753118 - protein, 17 aa, Homo sapiens
  CDR3 for beta chain variable domain of TCR clone 376559 (TRBV4-2, TRBJ1-1)
CAITQCGGGSGNTEAFF

SEQ ID NO: 753119 - protein, 13 aa, Homo sapiens
  CDR3 for alpha chain variable domain of TCR clone 376560 (TRAV30, TRAJ34)
CGTVGYNTYKLIF

SEQ ID NO: 753120 - protein, 16 aa, Homo sapiens
  CDR3 for beta chain variable domain of TCR clone 376560 (TRBV11-2, TRBJ2-7)
CASSLDAGTGVYEQYF

SEQ ID NO: 753121 - protein, 16 aa, Homo sapiens
  CDR3 for alpha chain variable domain of TCR clone 376561 (TRAV30, TRAJ24)
CGTEIVDADSWGKFQF

SEQ ID NO: 753122 - protein, 14 aa, Homo sapiens
  CDR3 for beta chain variable domain of TCR clone 376561 (TRBV7-8, TRBJ2-3)
CASSLEAGTGTQYF

SEQ ID NO: 753123 - protein, 15 aa, Homo sapiens
  CDR3 for alpha chain variable domain of TCR clone 376562 (TRAV14/DV4, TRAJ26)
CAMREGQNYGQNFVF

SEQ ID NO: 753124 - protein, 12 aa, Homo sapiens
  CDR3 for beta chain variable domain of TCR clone 376562 (TRBV14, TRBJ1-1)
CASSQLKGLAFF

SEQ ID NO: 753125 - protein, 12 aa, Homo sapiens
  CDR3 for alpha chain variable domain of TCR clone 376563 (TRAV12-3, TRAJ17)
CAMTLTGNKLTF

SEQ ID NO: 753126 - protein, 15 aa, Homo sapiens
  CDR3 for beta chain variable domain of TCR clone 376563 (TRBV29-1, TRBJ2-6)
CSFTGGRSGANALTF

SEQ ID NO: 753127 - protein, 16 aa, Homo sapiens
  CDR3 for alpha chain variable domain of TCR clone 376564 (TRAV3, TRAJ37)
CAVRPHGSGNTGKLIF

SEQ ID NO: 753128 - protein, 10 aa, Homo sapiens
  CDR3 for beta chain variable domain of TCR clone 376564 (TRBV6-4, TRBJ2-1)
CASWMFTQFF

SEQ ID NO: 753129 - protein, 15 aa, Homo sapiens
  CDR3 for alpha chain variable domain of TCR clone 376565 (TRAV4, TRAJ28)
CLPSYSGAGSYQLTF

SEQ ID NO: 753130 - protein, 16 aa, Homo sapiens
  CDR3 for beta chain variable domain of TCR clone 376565 (TRBV5-7, TRBJ2-1)
CASSGGLAGTYNEQCF

SEQ ID NO: 753131 - protein, 17 aa, Homo sapiens
  CDR3 for alpha chain variable domain of TCR clone 376566 (TRAV3, TRAJ12)
CAVRDGGRMGSSYKLIF

SEQ ID NO: 753132 - protein, 16 aa, Homo sapiens
  CDR3 for beta chain variable domain of TCR clone 376566 (TRBV12-5, TRBJ2-5)
CASGPRTSGNQETHYF

SEQ ID NO: 753133 - protein, 11 aa, Homo sapiens
  CDR3 for alpha chain variable domain of TCR clone 376567 (TRAV1-2, TRAJ20)
CAVANDYKLSF

SEQ ID NO: 753134 - protein, 14 aa, Homo sapiens
  CDR3 for beta chain variable domain of TCR clone 376567 (TRBV14, TRBJ2-3)
CASSRKLAADTQYF

SEQ ID NO: 753135 - protein, 12 aa, Homo sapiens
  CDR3 for alpha chain variable domain of TCR clone 376568 (TRAV1-1, TRAJ39)
CAVPVVGNMLSF

SEQ ID NO: 753136 - protein, 15 aa, Homo sapiens
  CDR3 for beta chain variable domain of TCR clone 376568 (TRBV19, TRBJ1-6)
CASSTQGAVGSPLHF

SEQ ID NO: 753137 - protein, 15 aa, Homo sapiens
  CDR3 for alpha chain variable domain of TCR clone 376569 (TRAV13-1, TRAJ44)
CAASRGGGTASKLTF

SEQ ID NO: 753138 - protein, 13 aa, Homo sapiens
  CDR3 for beta chain variable domain of TCR clone 376569 (TRBV14, TRBJ1-2)
CASSQDRRRGYTF

SEQ ID NO: 753139 - protein, 16 aa, Homo sapiens
  CDR3 for alpha chain variable domain of TCR clone 376570 (TRAV3, TRAJ37)
CAVRGKGSGNTGKLTF

SEQ ID NO: 753140 - protein, 13 aa, Homo sapiens
  CDR3 for beta chain variable domain of TCR clone 376570 (TRBV7-2, TRBJ2-4)
CASSREHANIQYF

SEQ ID NO: 753141 - protein, 14 aa, Homo sapiens
  CDR3 for alpha chain variable domain of TCR clone 376571 (TRAV1-2, TRAJ16)
CAVNRFSDGQKLLL

SEQ ID NO: 753142 - protein, 16 aa, Homo sapiens
  CDR3 for beta chain variable domain of TCR clone 376571 (TRBV7-3, TRBJ2-2)
CASSLKRGTLSGELFF

SEQ ID NO: 753143 - protein, 15 aa, Homo sapiens
  CDR3 for alpha chain variable domain of TCR clone 376572 (TRAV1-1, TRAJ36)
CAGHLNWGKQPLLWD

SEQ ID NO: 753144 - protein, 15 aa, Homo sapiens
  CDR3 for beta chain variable domain of TCR clone 376572 (TRBV20-1, TRBJ2-7)
CSARDRVSGMDEQYF

SEQ ID NO: 753145 - protein, 11 aa, Homo sapiens
  CDR3 for alpha chain variable domain of TCR clone 376573 (TRAV21, TRAJ34)
CAHYNTDKLIF

SEQ ID NO: 753146 - protein, 15 aa, Homo sapiens
  CDR3 for beta chain variable domain of TCR clone 376573 (TRBV7-3, TRBJ2-2)
CASSETGQGTGELFF

SEQ ID NO: 753147 - protein, 14 aa, Homo sapiens
  CDR3 for alpha chain variable domain of TCR clone 376574 (TRAV2, TRAJ9)
CAVEDRSGGCKTIF

SEQ ID NO: 753148 - protein, 17 aa, Homo sapiens
  CDR3 for beta chain variable domain of TCR clone 376574 (TRBV7-8, TRBJ2-6)
CASSAGTGGAGANVLTF

SEQ ID NO: 753149 - protein, 14 aa, Homo sapiens
  CDR3 for alpha chain variable domain of TCR clone 376575 (TRAV1-2, TRAJ8)
CAVREDTGFQKLVF

SEQ ID NO: 753150 - protein, 16 aa, Homo sapiens
  CDR3 for beta chain variable domain of TCR clone 376575 (TRBV7-2, TRBJ2-7)
CASSLDPGGGSGEQYF

SEQ ID NO: 753151 - protein, 10 aa, Homo sapiens
  CDR3 for alpha chain variable domain of TCR clone 376576 (TRAV23/DV6, TRAJ9)
CASKYWRLQN

SEQ ID NO: 753152 - protein, 14 aa, Homo sapiens
  CDR3 for beta chain variable domain of TCR clone 376576 (TRBV6-1, TRBJ2-7)
CASTRTGEYYEQYF

SEQ ID NO: 753153 - protein, 13 aa, Homo sapiens
  CDR3 for alpha chain variable domain of TCR clone 376577 (TRAV17, TRAJ5)
CAPMDTGRRALTF

SEQ ID NO: 753154 - protein, 17 aa, Homo sapiens
  CDR3 for beta chain variable domain of TCR clone 376577 (TRBV7-8, TRBJ2-6)
CASSAGTGGAGANVLTF

SEQ ID NO: 753155 - protein, 17 aa, Homo sapiens
  CDR3 for alpha chain variable domain of TCR clone 376578 (TRAV38-1, TRAJ28)
CSFMKPTSGAGSYQLTF

SEQ ID NO: 753156 - protein, 15 aa, Homo sapiens
  CDR3 for beta chain variable domain of TCR clone 376578 (TRBV6-3, TRBJ2-7)
CASSSPGTVFYEQYF

SEQ ID NO: 753157 - protein, 11 aa, Homo sapiens
  CDR3 for alpha chain variable domain of TCR clone 376579 (TRAV12-1, TRAJ8)
CVVTGFQKLVF

SEQ ID NO: 753158 - protein, 17 aa, Homo sapiens
  CDR3 for beta chain variable domain of TCR clone 376579 (TRBV11-3, TRBJ2-1)
CASSLSPPGVEYNEQFF

SEQ ID NO: 753159 - protein, 13 aa, Homo sapiens
  CDR3 for alpha chain variable domain of TCR clone 376580 (TRAV20, TRAJ37)
CAGCSSNTGKLIF

SEQ ID NO: 753160 - protein, 14 aa, Homo sapiens
  CDR3 for beta chain variable domain of TCR clone 376580 (TRBV20-1, TRBJ2-5)
CSTSDGRAGETQYF

SEQ ID NO: 753161 - protein, 12 aa, Homo sapiens
  CDR3 for alpha chain variable domain of TCR clone 376581 (TRAV16, TRAJ8)
CVPLGGFQKLVF

SEQ ID NO: 753162 - protein, 15 aa, Homo sapiens
  CDR3 for beta chain variable domain of TCR clone 376581 (TRBV6-1, TRBJ1-5)
CASIPDRLGNQPQHF

SEQ ID NO: 753163 - protein, 14 aa, Homo sapiens
  CDR3 for alpha chain variable domain of TCR clone 376582 (TRAV26-1, TRAJ34)
CIVRVAYNTDTLIF

SEQ ID NO: 753164 - protein, 15 aa, Homo sapiens
  CDR3 for beta chain variable domain of TCR clone 376582 (TRBV20-1, TRBJ2-7)
CSARVPAAYCYEQYF

SEQ ID NO: 753165 - protein, 17 aa, Homo sapiens
  CDR3 for alpha chain variable domain of TCR clone 376583 (TRAV26-1, TRAJ53)
CIVRVDDMGGSNYKLTF

SEQ ID NO: 753166 - protein, 15 aa, Homo sapiens
  CDR3 for beta chain variable domain of TCR clone 376583 (TRBV20-1, TRBJ2-7)
CSARVPAAYFYEQYF

SEQ ID NO: 753167 - protein, 12 aa, Homo sapiens
  CDR3 for alpha chain variable domain of TCR clone 376584 (TRAV9-2, TRAJ9)
CAMNTGGFKTIF

SEQ ID NO: 753168 - protein, 17 aa, Homo sapiens
  CDR3 for beta chain variable domain of TCR clone 376584 (TRBV28, TRBJ2-5)
CASSRQGGLAGAETQDF

SEQ ID NO: 753169 - protein, 16 aa, Homo sapiens
  CDR3 for alpha chain variable domain of TCR clone 376585 (TRAV12-3, TRAJ53)
CAMSPGSRGSNYKLTF

SEQ ID NO: 753170 - protein, 16 aa, Homo sapiens
  CDR3 for beta chain variable domain of TCR clone 376585 (TRBV4-2, TRBJ1-1)
CASSQAGFGMNTEAFF

SEQ ID NO: 753171 - protein, 10 aa, Homo sapiens
  CDR3 for alpha chain variable domain of TCR clone 376586 (TRAV30, TRAJ48)
CGIGNEKLTF

SEQ ID NO: 753172 - protein, 16 aa, Homo sapiens
  CDR3 for beta chain variable domain of TCR clone 376586 (TRBV20-1, TRBJ1-4)
CSATGQGLLTNEKLFF

SEQ ID NO: 753173 - protein, 12 aa, Homo sapiens
  CDR3 for alpha chain variable domain of TCR clone 376587 (TRAV13-1, TRAJ21)
CAAFFNFNKFYF

SEQ ID NO: 753174 - protein, 13 aa, Homo sapiens
  CDR3 for beta chain variable domain of TCR clone 376587 (TRBV20-1, TRBJ1-1)
CSARGGGNTEAFF

SEQ ID NO: 753175 - protein, 13 aa, Homo sapiens
  CDR3 for alpha chain variable domain of TCR clone 376588 (TRAV13-2, TRAJ40)
CAEFTSGTYKYIF

SEQ ID NO: 753176 - protein, 14 aa, Homo sapiens
  CDR3 for beta chain variable domain of TCR clone 376588 (TRBV10-2, TRBJ1-5)
SASSSTGRNQPQHF

SEQ ID NO: 753177 - protein, 14 aa, Homo sapiens
  CDR3 for alpha chain variable domain of TCR clone 376589 (TRAV9-2, TRAJ39)
CALYIYNAGNMLTF

SEQ ID NO: 753178 - protein, 15 aa, Homo sapiens
  CDR3 for beta chain variable domain of TCR clone 376589 (TRBV11-2, TRBJ2-1)
CASSLGPDSYNEQFF

SEQ ID NO: 753179 - protein, 16 aa, Homo sapiens
  CDR3 for alpha chain variable domain of TCR clone 376590 (TRAV3, TRAJ40)
CAVRDRIASGTYKYIL

SEQ ID NO: 753180 - protein, 16 aa, Homo sapiens
  CDR3 for beta chain variable domain of TCR clone 376590 (TRBV2, TRBJ2-1)
CASRSPAGGKYNEQFF

SEQ ID NO: 753181 - protein, 12 aa, Homo sapiens
  CDR3 for alpha chain variable domain of TCR clone 376591 (TRAV3, TRAJ26)
CAVRDYGQNFVF

SEQ ID NO: 753182 - protein, 15 aa, Homo sapiens
  CDR3 for beta chain variable domain of TCR clone 376591 (TRBV9, TRBJ1-6)
CASSVAGTGDSPLHF

SEQ ID NO: 753183 - protein, 12 aa, Homo sapiens
  CDR3 for alpha chain variable domain of TCR clone 376592 (TRAV13-1, TRAJ21)
CAAKEGFNKFYF

SEQ ID NO: 753184 - protein, 17 aa, Homo sapiens
  CDR3 for beta chain variable domain of TCR clone 376592 (TRBV19, TRBJ2-7)
CASSTSFYDSYPYEQYF

SEQ ID NO: 753185 - protein, 14 aa, Homo sapiens
  CDR3 for alpha chain variable domain of TCR clone 376593 (TRAV16, TRAJ37)
CALDISGNTGKLIF

SEQ ID NO: 753186 - protein, 14 aa, Homo sapiens
  CDR3 for beta chain variable domain of TCR clone 376593 (TRBV7-6, TRBJ2-7)
CASSFREGADEQYF

SEQ ID NO: 753187 - protein, 15 aa, Homo sapiens
  CDR3 for alpha chain variable domain of TCR clone 376594 (TRAV8-2, TRAJ40)
CVVLGTASGTYKYIF

SEQ ID NO: 753188 - protein, 16 aa, Homo sapiens
  CDR3 for beta chain variable domain of TCR clone 376594 (TRBV7-3, TRBJ2-1)
CASSLEGYHSYNEQFF

SEQ ID NO: 753189 - protein, 13 aa, Homo sapiens
  CDR3 for alpha chain variable domain of TCR clone 376595 (TRAV12-3, TRAJ13)
CAMRSGGYQKVTF

SEQ ID NO: 753190 - protein, 12 aa, Homo sapiens
  CDR3 for beta chain variable domain of TCR clone 376595 (TRBV2, TRBJ2-1)
CAYGPPGNEQFF

SEQ ID NO: 753191 - protein, 14 aa, Homo sapiens
  CDR3 for alpha chain variable domain of TCR clone 376596 (TRAV4, TRAJ17)
CLVGDPLVGNKLPF

SEQ ID NO: 753192 - protein, 20 aa, Homo sapiens
  CDR3 for beta chain variable domain of TCR clone 376596 (TRBV20-1, TRBJ2-1)
CSARPYSVAGGPSYYNEQFF

SEQ ID NO: 753193 - protein, 12 aa, Homo sapiens
  CDR3 for alpha chain variable domain of TCR clone 376597 (TRAV16, TRAJ12)
CALEDSSYKLIF

SEQ ID NO: 753194 - protein, 16 aa, Homo sapiens
  CDR3 for beta chain variable domain of TCR clone 376597 (TRBV27, TRBJ2-2)
CASSFRGLVRTGELFF

SEQ ID NO: 753195 - protein, 23 aa, Homo sapiens
  CDR3 for alpha chain variable domain of TCR clone 376598 (TRAV26-1, TRAJ38)
CIADNAGNNHIQNPDPAVYQLRD

SEQ ID NO: 753196 - protein, 13 aa, Homo sapiens
  CDR3 for beta chain variable domain of TCR clone 376598 (TRBV20-1, TRBJ1-1)
CSARGGGNTVAFF

SEQ ID NO: 753197 - protein, 10 aa, Homo sapiens
  CDR3 for alpha chain variable domain of TCR clone 376599 (TRAV39, TRAJ49)
WAVAGNQFYF

SEQ ID NO: 753198 - protein, 14 aa, Homo sapiens
  CDR3 for beta chain variable domain of TCR clone 376599 (TRBV7-8, TRBJ2-7)
CASSPRDRVYEQYF

SEQ ID NO: 753199 - protein, 11 aa, Homo sapiens
  CDR3 for alpha chain variable domain of TCR clone 376600 (TRAV12-1, TRAJ21)
CVVNNFNKFYF

SEQ ID NO: 753200 - protein, 12 aa, Homo sapiens
  CDR3 for beta chain variable domain of TCR clone 376600 (TRBV7-8, TRBJ2-7)
CASSLGDREQYF

SEQ ID NO: 753201 - protein, 13 aa, Homo sapiens
  CDR3 for alpha chain variable domain of TCR clone 376601 (TRAV26-1, TRAJ34)
CIVRPWITYKLIF

SEQ ID NO: 753202 - protein, 13 aa, Homo sapiens
  CDR3 for beta chain variable domain of TCR clone 376601 (TRBV5-1, TRBJ2-1)
CASSLGSYNEQFF

SEQ ID NO: 753203 - protein, 15 aa, Homo sapiens
  CDR3 for alpha chain variable domain of TCR clone 376602 (TRAV21, TRAJ40)
CAVRPQTSGTYKYIF

SEQ ID NO: 753204 - protein, 13 aa, Homo sapiens
  CDR3 for beta chain variable domain of TCR clone 376602 (TRBV2, TRBJ1-1)
CARNPTGGFHAFF

SEQ ID NO: 753205 - protein, 13 aa, Homo sapiens
  CDR3 for alpha chain variable domain of TCR clone 376603 (TRAV1-1, TRAJ27)
CAVRKHQCRQINL

SEQ ID NO: 753206 - protein, 12 aa, Homo sapiens
  CDR3 for beta chain variable domain of TCR clone 376603 (TRBV7-9, TRBJ2-7)
CATRTDAYEQYF

SEQ ID NO: 753207 - protein, 12 aa, Homo sapiens
  CDR3 for alpha chain variable domain of TCR clone 376604 (TRAV30, TRAJ43)
CGTEERGNDMRF

SEQ ID NO: 753208 - protein, 15 aa, Homo sapiens
  CDR3 for beta chain variable domain of TCR clone 376604 (TRBV6-1, TRBJ2-7)
CASSEGVGNPYEQYF

SEQ ID NO: 753209 - protein, 14 aa, Homo sapiens
  CDR3 for alpha chain variable domain of TCR clone 376605 (TRAV2, TRAJ9)
CAVEDRSGGFETIF

SEQ ID NO: 753210 - protein, 14 aa, Homo sapiens
  CDR3 for beta chain variable domain of TCR clone 376605 (TRBV4-1, TRBJ2-2)
CASSQAVNTGELFF

SEQ ID NO: 753211 - protein, 14 aa, Homo sapiens
  CDR3 for alpha chain variable domain of TCR clone 376606 (TRAV2, TRAJ9)
CAVEDRSGGFKTIC

SEQ ID NO: 753212 - protein, 15 aa, Homo sapiens
  CDR3 for beta chain variable domain of TCR clone 376606 (TRBV12-4, TRBJ2-5)
CASSLSGAFQETQYF

SEQ ID NO: 753213 - protein, 14 aa, Homo sapiens
  CDR3 for alpha chain variable domain of TCR clone 376607 (TRAV23/DV6, TRAJ4)
CAANLSGGYNKLSF

SEQ ID NO: 753214 - protein, 17 aa, Homo sapiens
  CDR3 for beta chain variable domain of TCR clone 376607 (TRBV4-1, TRBJ1-3)
CASSPQRGIRFGNTIYF

SEQ ID NO: 753215 - protein, 12 aa, Homo sapiens
  CDR3 for alpha chain variable domain of TCR clone 376608 (TRAV8-4, TRAJ43)
CAVSVNNNDMRF

SEQ ID NO: 753216 - protein, 14 aa, Homo sapiens
  CDR3 for beta chain variable domain of TCR clone 376608 (TRBV11-2, TRBJ1-2)
CASSLGTANYRYTF

SEQ ID NO: 753217 - protein, 14 aa, Homo sapiens
  CDR3 for alpha chain variable domain of TCR clone 376609 (TRAV13-1, TRAJ8)
CAASMSTGFQQLVF

SEQ ID NO: 753218 - protein, 13 aa, Homo sapiens
  CDR3 for beta chain variable domain of TCR clone 376609 (TRBV13, TRBJ2-1)
CASTPGSYNEQFF

SEQ ID NO: 753219 - protein, 14 aa, Homo sapiens
  CDR3 for alpha chain variable domain of TCR clone 376610 (TRAV38-1, TRAJ40)
CALRPTSVTYKNIF

SEQ ID NO: 753220 - protein, 14 aa, Homo sapiens
  CDR3 for beta chain variable domain of TCR clone 376610 (TRBV25-1, TRBJ1-1)
CASTHLGGNTEAFF

SEQ ID NO: 753221 - protein, 13 aa, Homo sapiens
  CDR3 for alpha chain variable domain of TCR clone 376611 (TRAV3, TRAJ43)
CAVKARNNNDMRF

SEQ ID NO: 753222 - protein, 16 aa, Homo sapiens
  CDR3 for beta chain variable domain of TCR clone 376611 (TRBV11-2, TRBJ1-1)
CASSLRQGGERSKAFF

SEQ ID NO: 753223 - protein, 12 aa, Homo sapiens
  CDR3 for alpha chain variable domain of TCR clone 376612 (TRAV35, TRAJ30)
CAGQLADDKIIF

SEQ ID NO: 753224 - protein, 17 aa, Homo sapiens
  CDR3 for beta chain variable domain of TCR clone 376612 (TRBV4-2, TRBJ2-5)
CAGSPGRWRNFQETQYF

SEQ ID NO: 753225 - protein, 15 aa, Homo sapiens
  CDR3 for alpha chain variable domain of TCR clone 376613 (TRAV12-2, TRAJ53)
CAVNGGGGSNYKLTF

SEQ ID NO: 753226 - protein, 13 aa, Homo sapiens
  CDR3 for beta chain variable domain of TCR clone 376613 (TRBV3-1, TRBJ1-1)
CASSPGEITEAFF

SEQ ID NO: 753227 - protein, 15 aa, Homo sapiens
  CDR3 for alpha chain variable domain of TCR clone 376614 (TRAV3, TRAJ20)
CAVRDIKLSDYKLSF

SEQ ID NO: 753228 - protein, 15 aa, Homo sapiens
  CDR3 for beta chain variable domain of TCR clone 376614 (TRBV5-5, TRBJ1-5)
CASSSTPGSNQPQHF

SEQ ID NO: 753229 - protein, 14 aa, Homo sapiens
  CDR3 for alpha chain variable domain of TCR clone 376615 (TRAV20, TRAJ29)
CAVKAWVGNTPLVL

SEQ ID NO: 753230 - protein, 15 aa, Homo sapiens
  CDR3 for beta chain variable domain of TCR clone 376615 (TRBV29-1, TRBJ2-7)
CSVEFFDRGSYEQYF

SEQ ID NO: 753231 - protein, 15 aa, Homo sapiens
  CDR3 for alpha chain variable domain of TCR clone 376616 (TRAV30, TRAJ32)
CGTEILGGATNKRIF

SEQ ID NO: 753232 - protein, 17 aa, Homo sapiens
  CDR3 for beta chain variable domain of TCR clone 376616 (TRBV5-4, TRBJ2-1)
CASSSAGGRGPYNEQFF

SEQ ID NO: 753233 - protein, 17 aa, Homo sapiens
  CDR3 for alpha chain variable domain of TCR clone 376617 (TRAV3, TRAJ6)
CAVRDGPRAGGSYIPTF

SEQ ID NO: 753234 - protein, 14 aa, Homo sapiens
  CDR3 for beta chain variable domain of TCR clone 376617 (TRBV7-2, TRBJ2-7)
CASSPKTSGYEQYF

SEQ ID NO: 753235 - protein, 13 aa, Homo sapiens
  CDR3 for alpha chain variable domain of TCR clone 376618 (TRAV16, TRAJ9)
RALRATGGFKTIF

SEQ ID NO: 753236 - protein, 16 aa, Homo sapiens
  CDR3 for beta chain variable domain of TCR clone 376618 (TRBV5-1, TRBJ1-3)
CASSRSGEDSGNTMYF

SEQ ID NO: 753237 - protein, 15 aa, Homo sapiens
  CDR3 for alpha chain variable domain of TCR clone 376619 (TRAV3, TRAJ22)
CAVRDRGGSSRQLTF

SEQ ID NO: 753238 - protein, 16 aa, Homo sapiens
  CDR3 for beta chain variable domain of TCR clone 376619 (TRBV13, TRBJ2-2)
CASSPRTGEHTGELFF

SEQ ID NO: 753239 - protein, 14 aa, Homo sapiens
  CDR3 for alpha chain variable domain of TCR clone 376620 (TRAV9-2, TRAJ36)
CALPWRTGANNLFF

SEQ ID NO: 753240 - protein, 14 aa, Homo sapiens
  CDR3 for beta chain variable domain of TCR clone 376620 (TRBV2, TRBJ1-2)
CASSELQVNYGYTL

SEQ ID NO: 753241 - protein, 12 aa, Homo sapiens
  CDR3 for alpha chain variable domain of TCR clone 376621 (TRAV26-1, TRAJ17)
CAMTLTGNNLTF

SEQ ID NO: 753242 - protein, 15 aa, Homo sapiens
  CDR3 for beta chain variable domain of TCR clone 376621 (TRBV20-1, TRBJ2-7)
CSARDRVSGMDEQYF

SEQ ID NO: 753243 - protein, 14 aa, Homo sapiens
  CDR3 for alpha chain variable domain of TCR clone 376622 (TRAV1-1, TRAJ30)
CAVRSLNRDDKIIF

SEQ ID NO: 753244 - protein, 15 aa, Homo sapiens
  CDR3 for beta chain variable domain of TCR clone 376622 (TRBV27, TRBJ1-4)
CASSAQQYLNEKLFF

SEQ ID NO: 753245 - protein, 16 aa, Homo sapiens
  CDR3 for alpha chain variable domain of TCR clone 376623 (TRAV3, TRAJ3)
CAVRDRAKSSASKIIF

SEQ ID NO: 753246 - protein, 13 aa, Homo sapiens
  CDR3 for beta chain variable domain of TCR clone 376623 (TRBV10-3, TRBJ2-7)
CASNLAVNYEQYF

SEQ ID NO: 753247 - protein, 15 aa, Homo sapiens
  CDR3 for alpha chain variable domain of TCR clone 376624 (TRAV8-3, TRAJ45)
CASSYSGGGADGLTF

SEQ ID NO: 753248 - protein, 21 aa, Homo sapiens
  CDR3 for beta chain variable domain of TCR clone 376624 (TRBV7-9, TRBJ2-1)
CISVPAAPPRGERGPYNEQFF

SEQ ID NO: 753249 - protein, 12 aa, Homo sapiens
  CDR3 for alpha chain variable domain of TCR clone 376625 (TRAV13-1, TRAJ49)
CAASPMGNQFYF

SEQ ID NO: 753250 - protein, 15 aa, Homo sapiens
  CDR3 for beta chain variable domain of TCR clone 376625 (TRBV7-9, TRBJ1-5)
CASSQGHQPNQPQHF

SEQ ID NO: 753251 - protein, 14 aa, Homo sapiens
  CDR3 for alpha chain variable domain of TCR clone 376626 (TRAV17, TRAJ12)
CATDEKDSSYKLIF

SEQ ID NO: 753252 - protein, 15 aa, Homo sapiens
  CDR3 for beta chain variable domain of TCR clone 376626 (TRBV7-9, TRBJ1-5)
CASSQGHQPNQPQHF

SEQ ID NO: 753253 - protein, 14 aa, Homo sapiens
  CDR3 for alpha chain variable domain of TCR clone 376627 (TRAV26-1, TRAJ38)
CIAGNAGNNRKLIW

SEQ ID NO: 753254 - protein, 14 aa, Homo sapiens
  CDR3 for beta chain variable domain of TCR clone 376627 (TRBV11-2, TRBJ2-7)
CASSLGAGAYEQYF

SEQ ID NO: 753255 - protein, 15 aa, Homo sapiens
  CDR3 for alpha chain variable domain of TCR clone 376628 (TRAV22, TRAJ45)
CAAKYSGGGADGLTF

SEQ ID NO: 753256 - protein, 16 aa, Homo sapiens
  CDR3 for beta chain variable domain of TCR clone 376628 (TRBV7-9, TRBJ1-2)
CASSLGFSSGEDGYTF

SEQ ID NO: 753257 - protein, 15 aa, Homo sapiens
  CDR3 for alpha chain variable domain of TCR clone 376629 (TRAV17, TRAJ22)
CATVAPSGSARQLTF

SEQ ID NO: 753258 - protein, 16 aa, Homo sapiens
  CDR3 for beta chain variable domain of TCR clone 376629 (TRBV10-3, TRBJ2-7)
CAISANFADRPYEQYF

SEQ ID NO: 753259 - protein, 10 aa, Homo sapiens
  CDR3 for alpha chain variable domain of TCR clone 376630 (TRAV12-3, TRAJ18)
CAMSAEAQPW

SEQ ID NO: 753260 - protein, 13 aa, Homo sapiens
  CDR3 for beta chain variable domain of TCR clone 376630 (TRBV19, TRBJ2-7)
CASSPRQSYEQYF

SEQ ID NO: 753261 - protein, 16 aa, Homo sapiens
  CDR3 for alpha chain variable domain of TCR clone 376631 (TRAV30, TRAJ24)
CGTEIVDAYSWGKFQF

SEQ ID NO: 753262 - protein, 15 aa, Homo sapiens
  CDR3 for beta chain variable domain of TCR clone 376631 (TRBV20-1, TRBJ2-7)
CSARDRVSGMDEQYF

SEQ ID NO: 753263 - protein, 10 aa, Homo sapiens
  CDR3 for alpha chain variable domain of TCR clone 376632 (TRAV36/DV7, TRAJ31)
CAVGEARLMF

SEQ ID NO: 753264 - protein, 16 aa, Homo sapiens
  CDR3 for beta chain variable domain of TCR clone 376632 (TRBV7-2, TRBJ1-1)
CASSLGAGWTNTEAFF

SEQ ID NO: 753265 - protein, 14 aa, Homo sapiens
  CDR3 for alpha chain variable domain of TCR clone 376633 (TRAV3, TRAJ34)
CAVRDINNTDKLIF

SEQ ID NO: 753266 - protein, 15 aa, Homo sapiens
  CDR3 for beta chain variable domain of TCR clone 376633 (TRBV20-1, TRBJ2-7)
CSARDRVSGIDEQYF

SEQ ID NO: 753267 - protein, 13 aa, Homo sapiens
  CDR3 for alpha chain variable domain of TCR clone 376634 (TRAV12-2, TRAJ10)
CAVPTGGGTKLTF

SEQ ID NO: 753268 - protein, 14 aa, Homo sapiens
  CDR3 for beta chain variable domain of TCR clone 376634 (TRBV15, TRBJ2-1)
CATSGVEDYNEPFF

SEQ ID NO: 753269 - protein, 17 aa, Homo sapiens
  CDR3 for alpha chain variable domain of TCR clone 376635 (TRAV3, TRAJ6)
CAVRDGPRAGGSYIHTL

SEQ ID NO: 753270 - protein, 14 aa, Homo sapiens
  CDR3 for beta chain variable domain of TCR clone 376635 (TRBV7-2, TRBJ2-7)
CASSPKTSFYEQYF

SEQ ID NO: 753271 - protein, 14 aa, Homo sapiens
  CDR3 for alpha chain variable domain of TCR clone 376636 (TRAV3, TRAJ21)
CAVRDAYNFNKFYF

SEQ ID NO: 753272 - protein, 16 aa, Homo sapiens
  CDR3 for beta chain variable domain of TCR clone 376636 (TRBV19, TRBJ2-1)
CASSSKGTRSYNEQFF

SEQ ID NO: 753273 - protein, 12 aa, Homo sapiens
  CDR3 for alpha chain variable domain of TCR clone 376637 (TRAV21, TRAJ33)
CAKMDSNYQLIW

SEQ ID NO: 753274 - protein, 14 aa, Homo sapiens
  CDR3 for beta chain variable domain of TCR clone 376637 (TRBV9, TRBJ2-7)
CASSVGVGSYEQYF

SEQ ID NO: 753275 - protein, 15 aa, Homo sapiens
  CDR3 for alpha chain variable domain of TCR clone 376638 (TRAV25, TRAJ10)
CAGPLLTGGGRKLTF

SEQ ID NO: 753276 - protein, 18 aa, Homo sapiens
  CDR3 for beta chain variable domain of TCR clone 376638 (TRBV6-6, TRBJ1-3)
CASSYSKWDSISGNTIYF

SEQ ID NO: 753277 - protein, 14 aa, Homo sapiens
  CDR3 for alpha chain variable domain of TCR clone 376639 (TRAV12-2, TRAJ6)
CAVKIPSGSYIPTF

SEQ ID NO: 753278 - protein, 14 aa, Homo sapiens
  CDR3 for beta chain variable domain of TCR clone 376639 (TRBV7-2, TRBJ2-7)
CASSPKTSFYEQYF

SEQ ID NO: 753279 - protein, 15 aa, Homo sapiens
  CDR3 for alpha chain variable domain of TCR clone 376640 (TRAV17, TRAJ57)
CATGPSQGGSEKLGF

SEQ ID NO: 753280 - protein, 15 aa, Homo sapiens
  CDR3 for beta chain variable domain of TCR clone 376640 (TRBV7-3, TRBJ2-1)
CASSPTGGGEVEQFF

SEQ ID NO: 753281 - protein, 15 aa, Homo sapiens
  CDR3 for alpha chain variable domain of TCR clone 376641 (TRAV3, TRAJ22)
CAVRDRGGSARQLAF

SEQ ID NO: 753282 - protein, 16 aa, Homo sapiens
  CDR3 for beta chain variable domain of TCR clone 376641 (TRBV11-2, TRBJ2-1)
CASARGSYSHHNEQFF

SEQ ID NO: 753283 - protein, 17 aa, Homo sapiens
  CDR3 for alpha chain variable domain of TCR clone 376642 (TRAV3, TRAJ12)
CAVRDGGRMDSSYKLLF

SEQ ID NO: 753284 - protein, 15 aa, Homo sapiens
  CDR3 for beta chain variable domain of TCR clone 376642 (TRBV20-1, TRBJ2-5)
CSAEGTGGLQETQYF

SEQ ID NO: 753285 - protein, 12 aa, Homo sapiens
  CDR3 for alpha chain variable domain of TCR clone 376643 (TRAV3, TRAJ43)
CAVRDPNNDMRF

SEQ ID NO: 753286 - protein, 15 aa, Homo sapiens
  CDR3 for beta chain variable domain of TCR clone 376643 (TRBV4-3, TRBJ2-7)
CASSQGDRGDYEQYF

SEQ ID NO: 753287 - protein, 15 aa, Homo sapiens
  CDR3 for alpha chain variable domain of TCR clone 376644 (TRAV14/DV4, TRAJ49)
CAMREGMNTGNQFYF

SEQ ID NO: 753288 - protein, 14 aa, Homo sapiens
  CDR3 for beta chain variable domain of TCR clone 376644 (TRBV7-2, TRBJ2-7)
CASSPKTSFYEQYF

SEQ ID NO: 753289 - protein, 14 aa, Homo sapiens
  CDR3 for alpha chain variable domain of TCR clone 376645 (TRAV8-1, TRAJ5)
CAVSMDTGRRALTF

SEQ ID NO: 753290 - protein, 16 aa, Homo sapiens
  CDR3 for beta chain variable domain of TCR clone 376645 (TRBV12-5, TRBJ2-5)
CASGPRTSGNQETQYF

SEQ ID NO: 753291 - protein, 13 aa, Homo sapiens
  CDR3 for alpha chain variable domain of TCR clone 376646 (TRAV12-3, TRAJ46)
CAMKKSSGYKLTF

SEQ ID NO: 753292 - protein, 17 aa, Homo sapiens
  CDR3 for beta chain variable domain of TCR clone 376646 (TRBV3-1, TRBJ2-5)
CASSQGLAGMYQETQYF

SEQ ID NO: 753293 - protein, 11 aa, Homo sapiens
  CDR3 for alpha chain variable domain of TCR clone 376647 (TRAV21, TRAJ33)
CAVLSNYQLIW

SEQ ID NO: 753294 - protein, 15 aa, Homo sapiens
  CDR3 for beta chain variable domain of TCR clone 376647 (TRBV11-2, TRBJ2-7)
CASSLMVRGSYEQYF

SEQ ID NO: 753295 - protein, 10 aa, Homo sapiens
  CDR3 for alpha chain variable domain of TCR clone 376648 (TRAV17, TRAJ43)
CAKDNNDVRF

SEQ ID NO: 753296 - protein, 16 aa, Homo sapiens
  CDR3 for beta chain variable domain of TCR clone 376648 (TRBV7-9, TRBJ2-1)
CASSPVLASGTVEQFF

SEQ ID NO: 753297 - protein, 13 aa, Homo sapiens
  CDR3 for alpha chain variable domain of TCR clone 376649 (TRAV26-2, TRAJ43)
CFLRAVNNNEMRF

SEQ ID NO: 753298 - protein, 15 aa, Homo sapiens
  CDR3 for beta chain variable domain of TCR clone 376649 (TRBV7-2, TRBJ2-1)
CASTHGTGIYNEQFF

SEQ ID NO: 753299 - protein, 11 aa, Homo sapiens
  CDR3 for alpha chain variable domain of TCR clone 376650 (TRAV26-1, TRAJ37)
CIVRGGRKLIF

SEQ ID NO: 753300 - protein, 14 aa, Homo sapiens
  CDR3 for beta chain variable domain of TCR clone 376650 (TRBV9, TRBJ2-4)
CASSPSGTSGFQYF

SEQ ID NO: 753301 - protein, 14 aa, Homo sapiens
  CDR3 for alpha chain variable domain of TCR clone 376651 (TRAV3, TRAJ7)
CAVREEEREQQTRF

SEQ ID NO: 753302 - protein, 12 aa, Homo sapiens
  CDR3 for beta chain variable domain of TCR clone 376651 (TRBV6-3, TRBJ2-7)
CASSRTPYEQYF

SEQ ID NO: 753303 - protein, 14 aa, Homo sapiens
  CDR3 for alpha chain variable domain of TCR clone 376652 (TRAV25, TRAJ6)
CAGRESGGSYIPTF

SEQ ID NO: 753304 - protein, 15 aa, Homo sapiens
  CDR3 for beta chain variable domain of TCR clone 376652 (TRBV7-3, TRBJ2-2)
CASSETGQGTGELFF

SEQ ID NO: 753305 - protein, 15 aa, Homo sapiens
  CDR3 for alpha chain variable domain of TCR clone 376653 (TRAV3, TRAJ30)
CAVRDEYGRDDKIIF

SEQ ID NO: 753306 - protein, 13 aa, Homo sapiens
  CDR3 for beta chain variable domain of TCR clone 376653 (TRBV7-9, TRBJ1-2)
CASSLKQNYGYTF

SEQ ID NO: 753307 - protein, 16 aa, Homo sapiens
  CDR3 for alpha chain variable domain of TCR clone 376654 (TRAV3, TRAJ10)
CAVRDMRAGGGNKLTF

SEQ ID NO: 753308 - protein, 16 aa, Homo sapiens
  CDR3 for beta chain variable domain of TCR clone 376654 (TRBV5-1, TRBJ2-3)
CASSLTSGTSGGTQYF

SEQ ID NO: 753309 - protein, 20 aa, Homo sapiens
  CDR3 for alpha chain variable domain of TCR clone 376655 (TRAV1-2, TRAJ8)
CAVREATGLQKLVLELAPDF

SEQ ID NO: 753310 - protein, 14 aa, Homo sapiens
  CDR3 for beta chain variable domain of TCR clone 376655 (TRBV7-6, TRBJ2-3)
CASSLGTVTDTQYF

SEQ ID NO: 753311 - protein, 11 aa, Homo sapiens
  CDR3 for alpha chain variable domain of TCR clone 376656 (TRAV8-2, TRAJ26)
CVVTPLLGSEF

SEQ ID NO: 753312 - protein, 15 aa, Homo sapiens
  CDR3 for beta chain variable domain of TCR clone 376656 (TRBV11-2, TRBJ2-2)
CASSSDRVNAGELFF

SEQ ID NO: 753313 - protein, 14 aa, Homo sapiens
  CDR3 for alpha chain variable domain of TCR clone 376657 (TRAV1-1, TRAJ28)
CAAPSGAGSYQLTF

SEQ ID NO: 753314 - protein, 17 aa, Homo sapiens
  CDR3 for beta chain variable domain of TCR clone 376657 (TRBV7-2, TRBJ2-6)
CASSAGTGGAGANVLTF

SEQ ID NO: 753315 - protein, 14 aa, Homo sapiens
  CDR3 for alpha chain variable domain of TCR clone 376658 (TRAV1-2, TRAJ6)
CSVSLSGGSYIPPF

SEQ ID NO: 753316 - protein, 15 aa, Homo sapiens
  CDR3 for beta chain variable domain of TCR clone 376658 (TRBV28, TRBJ2-7)
CASSPGGRGLYEQYF

SEQ ID NO: 753317 - protein, 21 aa, Homo sapiens
  CDR3 for alpha chain variable domain of TCR clone 376659 (TRAV16, TRAJ22)
HLKKPFAQEEDSDMYLRQLTF

SEQ ID NO: 753318 - protein, 16 aa, Homo sapiens
  CDR3 for beta chain variable domain of TCR clone 376659 (TRBV12-4, TRBJ2-1)
CASSAVGQGNGDEQFF

SEQ ID NO: 753319 - protein, 13 aa, Homo sapiens
  CDR3 for alpha chain variable domain of TCR clone 376660 (TRAV8-3, TRAJ44)
CAVVPGTASKLTF

SEQ ID NO: 753320 - protein, 14 aa, Homo sapiens
  CDR3 for beta chain variable domain of TCR clone 376660 (TRBV11-2, TRBJ2-3)
CASSRLARTVTQYF

SEQ ID NO: 753321 - protein, 14 aa, Homo sapiens
  CDR3 for alpha chain variable domain of TCR clone 376661 (TRAV25, TRAJ6)
CAGRESGGSYIPTS

SEQ ID NO: 753322 - protein, 13 aa, Homo sapiens
  CDR3 for beta chain variable domain of TCR clone 376661 (TRBV27, TRBJ1-1)
CASSLSIGAEAFF

SEQ ID NO: 753323 - protein, 12 aa, Homo sapiens
  CDR3 for alpha chain variable domain of TCR clone 376662 (TRAV3, TRAJ20)
CAVSDPDYKLSF

SEQ ID NO: 753324 - protein, 14 aa, Homo sapiens
  CDR3 for beta chain variable domain of TCR clone 376662 (TRBV7-2, TRBJ2-7)
CASSPKTSFYEQYF

SEQ ID NO: 753325 - protein, 10 aa, Homo sapiens
  CDR3 for alpha chain variable domain of TCR clone 376663 (TRAV36/DV7, TRAJ49)
CALTDNQFYF

SEQ ID NO: 753326 - protein, 14 aa, Homo sapiens
  CDR3 for beta chain variable domain of TCR clone 376663 (TRBV4-2, TRBJ2-5)
CASSQDRGRETQYF

SEQ ID NO: 753327 - protein, 14 aa, Homo sapiens
  CDR3 for alpha chain variable domain of TCR clone 376664 (TRAV17, TRAJ22)
CATSPSGSARQLTF

SEQ ID NO: 753328 - protein, 16 aa, Homo sapiens
  CDR3 for beta chain variable domain of TCR clone 376664 (TRBV4-2, TRBJ2-3)
CASSQELAGDTDTQYF

SEQ ID NO: 753329 - protein, 12 aa, Homo sapiens
  CDR3 for alpha chain variable domain of TCR clone 376665 (TRAV27, TRAJ9)
CAGESGGFKTIF

SEQ ID NO: 753330 - protein, 15 aa, Homo sapiens
  CDR3 for beta chain variable domain of TCR clone 376665 (TRBV19, TRBJ2-1)
CASSRPGQNYNEQFF

SEQ ID NO: 753331 - protein, 15 aa, Homo sapiens
  CDR3 for alpha chain variable domain of TCR clone 376666 (TRAV8-3, TRAJ32)
CAVGPYGGATNKLIF

SEQ ID NO: 753332 - protein, 14 aa, Homo sapiens
  CDR3 for beta chain variable domain of TCR clone 376666 (TRBV29-1, TRBJ2-2)
CSVIAETNTGELFF

SEQ ID NO: 753333 - protein, 16 aa, Homo sapiens
  CDR3 for alpha chain variable domain of TCR clone 376667 (TRAV3, TRAJ10)
CAVRDMRAGGGNKLTF

SEQ ID NO: 753334 - protein, 20 aa, Homo sapiens
  CDR3 for beta chain variable domain of TCR clone 376667 (TRBV11-2, TRBJ1-6)
CASSLVFATGGSAHPSTLGT

SEQ ID NO: 753335 - protein, 14 aa, Homo sapiens
  CDR3 for alpha chain variable domain of TCR clone 376668 (TRAV2, TRAJ29)
CAVEDRVGNTPLVC

SEQ ID NO: 753336 - protein, 15 aa, Homo sapiens
  CDR3 for beta chain variable domain of TCR clone 376668 (TRBV10-3, TRBJ2-1)
CAIIDVQDRAYEQFF

SEQ ID NO: 753337 - protein, 14 aa, Homo sapiens
  CDR3 for alpha chain variable domain of TCR clone 376669 (TRAV20, TRAJ44)
CAVQDTGTASKPTF

SEQ ID NO: 753338 - protein, 13 aa, Homo sapiens
  CDR3 for beta chain variable domain of TCR clone 376669 (TRBV29-1, TRBJ1-3)
CSAGTGRGNTIYF

SEQ ID NO: 753339 - protein, 15 aa, Homo sapiens
  CDR3 for alpha chain variable domain of TCR clone 376670 (TRAV26-1, TRAJ29)
CIFRVEGSGNTTLVF

SEQ ID NO: 753340 - protein, 15 aa, Homo sapiens
  CDR3 for beta chain variable domain of TCR clone 376670 (TRBV7-9, TRBJ1-5)
CASGQGHQPNQPQHF

SEQ ID NO: 753341 - protein, 16 aa, Homo sapiens
  CDR3 for alpha chain variable domain of TCR clone 376671 (TRAV27, TRAJ53)
CSAPEGSGGSNYKLTV

SEQ ID NO: 753342 - protein, 15 aa, Homo sapiens
  CDR3 for beta chain variable domain of TCR clone 376671 (TRBV20-1, TRBJ1-1)
CSASRGVTGNTEAFF

SEQ ID NO: 753343 - protein, 14 aa, Homo sapiens
  CDR3 for alpha chain variable domain of TCR clone 376672 (TRAV2, TRAJ9)
CAVEDRSGGFKTIF

SEQ ID NO: 753344 - protein, 14 aa, Homo sapiens
  CDR3 for beta chain variable domain of TCR clone 376672 (TRBV20-1, TRBJ2-1)
CSAQIGVSANEQFF

SEQ ID NO: 753345 - protein, 13 aa, Homo sapiens
  CDR3 for alpha chain variable domain of TCR clone 376673 (TRAV27, TRAJ6)
CAGGTRGSYIPTF

SEQ ID NO: 753346 - protein, 12 aa, Homo sapiens
  CDR3 for beta chain variable domain of TCR clone 376673 (TRBV18, TRBJ2-1)
CASSSYEDEQFF

SEQ ID NO: 753347 - protein, 13 aa, Homo sapiens
  CDR3 for alpha chain variable domain of TCR clone 376674 (TRAV30, TRAJ34)
CGTVRYNTDKLIF

SEQ ID NO: 753348 - protein, 16 aa, Homo sapiens
  CDR3 for beta chain variable domain of TCR clone 376674 (TRBV7-9, TRBJ1-2)
CASSLGFSSGEDGYTF

SEQ ID NO: 753349 - protein, 11 aa, Homo sapiens
  CDR3 for alpha chain variable domain of TCR clone 376675 (TRAV35, TRAJ57)
VPQGGSEKLVF

SEQ ID NO: 753350 - protein, 16 aa, Homo sapiens
  CDR3 for beta chain variable domain of TCR clone 376675 (TRBV7-2, TRBJ1-5)
CASSWTGGPGNQPQHF

SEQ ID NO: 753351 - protein, 11 aa, Homo sapiens
  CDR3 for alpha chain variable domain of TCR clone 376676 (TRAV1-1, TRAJ23)
CAVRQGGKLIF

SEQ ID NO: 753352 - protein, 13 aa, Homo sapiens
  CDR3 for beta chain variable domain of TCR clone 376676 (TRBV24-1, TRBJ2-2)
CATTATRTGELFF

SEQ ID NO: 753353 - protein, 16 aa, Homo sapiens
  CDR3 for alpha chain variable domain of TCR clone 376677 (TRAV30, TRAJ24)
CGTESVDADSWGKFQF

SEQ ID NO: 753354 - protein, 15 aa, Homo sapiens
  CDR3 for beta chain variable domain of TCR clone 376677 (TRBV7-9, TRBJ1-4)
CASSARMGGNEKLFF

SEQ ID NO: 753355 - protein, 23 aa, Homo sapiens
  CDR3 for alpha chain variable domain of TCR clone 376678 (TRAV26-1, TRAJ38)
CIADNAGNNHIQNPDPAVYQLRD

SEQ ID NO: 753356 - protein, 13 aa, Homo sapiens
  CDR3 for beta chain variable domain of TCR clone 376678 (TRBV20-1, TRBJ1-1)
CSARGGGNTEAFC

SEQ ID NO: 753357 - protein, 16 aa, Homo sapiens
  CDR3 for alpha chain variable domain of TCR clone 376679 (TRAV12-3, TRAJ50)
CAMRDPMKTSYDKVIF

SEQ ID NO: 753358 - protein, 15 aa, Homo sapiens
  CDR3 for beta chain variable domain of TCR clone 376679 (TRBV20-1, TRBJ2-7)
CSARDRVSGMDEQYF

SEQ ID NO: 753359 - protein, 11 aa, Homo sapiens
  CDR3 for alpha chain variable domain of TCR clone 376680 (TRAV17, TRAJ9)
CATTGGFKTIF

SEQ ID NO: 753360 - protein, 16 aa, Homo sapiens
  CDR3 for beta chain variable domain of TCR clone 376680 (TRBV12-4, TRBJ2-7)
CASSLIGGTGTYEQYF

SEQ ID NO: 753361 - protein, 12 aa, Homo sapiens
  CDR3 for alpha chain variable domain of TCR clone 376681 (TRAV12-2, TRAJ10)
WGVTGGGNKLPF

SEQ ID NO: 753362 - protein, 20 aa, Homo sapiens
  CDR3 for beta chain variable domain of TCR clone 376681 (TRBV19, TRBJ2-1)
CASSISRTVTSTRLNNEQFF

SEQ ID NO: 753363 - protein, 12 aa, Homo sapiens
  CDR3 for alpha chain variable domain of TCR clone 376682 (TRAV35, TRAJ49)
CAGWNTGNQFYF

SEQ ID NO: 753364 - protein, 16 aa, Homo sapiens
  CDR3 for beta chain variable domain of TCR clone 376682 (TRBV19, TRBJ2-1)
CASSKAGPSSYNEQFF

SEQ ID NO: 753365 - protein, 19 aa, Homo sapiens
  CDR3 for alpha chain variable domain of TCR clone 376683 (TRAV3, TRAJ6)
CAVRDRNPSRSGGSYITTF

SEQ ID NO: 753366 - protein, 15 aa, Homo sapiens
  CDR3 for beta chain variable domain of TCR clone 376683 (TRBV18, TRBJ2-7)
CASSPTFMDSYEQYF

SEQ ID NO: 753367 - protein, 17 aa, Homo sapiens
  CDR3 for alpha chain variable domain of TCR clone 376684 (TRAV26-1, TRAJ27)
CIVSTPWFNTNAGKSTF

SEQ ID NO: 753368 - protein, 11 aa, Homo sapiens
  CDR3 for beta chain variable domain of TCR clone 376684 (TRBV7-8, TRBJ2-7)
CASSLSLEQYF

SEQ ID NO: 753369 - protein, 14 aa, Homo sapiens
  CDR3 for alpha chain variable domain of TCR clone 376685 (TRAV13-1, TRAJ3)
CAASKSSSASKIIF

SEQ ID NO: 753370 - protein, 12 aa, Homo sapiens
  CDR3 for beta chain variable domain of TCR clone 376685 (TRBV14, TRBJ2-7)
CASSSLKGEQYF

SEQ ID NO: 753371 - protein, 17 aa, Homo sapiens
  CDR3 for alpha chain variable domain of TCR clone 376686 (TRAV36/DV7, TRAJ52)
CAVAQRAGGTSYGKLTF

SEQ ID NO: 753372 - protein, 15 aa, Homo sapiens
  CDR3 for beta chain variable domain of TCR clone 376686 (TRBV19, TRBJ2-2)
CASSPRTGWTGELFF

SEQ ID NO: 753373 - protein, 14 aa, Homo sapiens
  CDR3 for alpha chain variable domain of TCR clone 376687 (TRAV3, TRAJ40)
CAVRDRRGTYKYIF

SEQ ID NO: 753374 - protein, 15 aa, Homo sapiens
  CDR3 for beta chain variable domain of TCR clone 376687 (TRBV19, TRBJ1-1)
CASTSGQIQNTEAFF

SEQ ID NO: 753375 - protein, 11 aa, Homo sapiens
  CDR3 for alpha chain variable domain of TCR clone 376688 (TRAV35, TRAJ31)
CAESGDARLMF

SEQ ID NO: 753376 - protein, 11 aa, Homo sapiens
  CDR3 for beta chain variable domain of TCR clone 376688 (TRBV24-1, TRBJ2-3)
WATSDLDTQYF

SEQ ID NO: 753377 - protein, 13 aa, Homo sapiens
  CDR3 for alpha chain variable domain of TCR clone 376689 (TRAV12-3, TRAJ40)
CAMSDSGAYKYIF

SEQ ID NO: 753378 - protein, 14 aa, Homo sapiens
  CDR3 for beta chain variable domain of TCR clone 376689 (TRBV7-2, TRBJ1-5)
CASSTQGAGQHQHF

SEQ ID NO: 753379 - protein, 13 aa, Homo sapiens
  CDR3 for alpha chain variable domain of TCR clone 376690 (TRAV1-1, TRAJ9)
CAAKNTGGFKTIF

SEQ ID NO: 753380 - protein, 14 aa, Homo sapiens
  CDR3 for beta chain variable domain of TCR clone 376690 (TRBV20-1, TRBJ2-1)
CSAQIDGSANEQFF

SEQ ID NO: 753381 - protein, 11 aa, Homo sapiens
  CDR3 for alpha chain variable domain of TCR clone 376691 (TRAV1-1, TRAJ30)
CAQNRDDKMIF

SEQ ID NO: 753382 - protein, 14 aa, Homo sapiens
  CDR3 for beta chain variable domain of TCR clone 376691 (TRBV7-8, TRBJ2-7)
CASSPGLADYEQYF

SEQ ID NO: 753383 - protein, 19 aa, Homo sapiens
  CDR3 for alpha chain variable domain of TCR clone 376692 (TRAV38-1, TRAJ43)
CAFMKHNSRRHALCSRDQT

SEQ ID NO: 753384 - protein, 11 aa, Homo sapiens
  CDR3 for beta chain variable domain of TCR clone 376692 (TRBV7-9, TRBJ2-3)
CASSYTDTQYF

SEQ ID NO: 753385 - protein, 14 aa, Homo sapiens
  CDR3 for alpha chain variable domain of TCR clone 376693 (TRAV22, TRAJ6)
CSGVGPGGSYIPTF

SEQ ID NO: 753386 - protein, 11 aa, Homo sapiens
  CDR3 for beta chain variable domain of TCR clone 376693 (TRBV20-1, TRBJ2-1)
CSLSSGSEQFF

SEQ ID NO: 753387 - protein, 13 aa, Homo sapiens
  CDR3 for alpha chain variable domain of TCR clone 376694 (TRAV17, TRAJ9)
CATDYTGGFKTIF

SEQ ID NO: 753388 - protein, 15 aa, Homo sapiens
  CDR3 for beta chain variable domain of TCR clone 376694 (TRBV2, TRBJ2-1)
CASSEARSAYNEQFF

SEQ ID NO: 753389 - protein, 12 aa, Homo sapiens
  CDR3 for alpha chain variable domain of TCR clone 376695 (TRAV2, TRAJ31)
RAVEEGNARLMF

SEQ ID NO: 753390 - protein, 18 aa, Homo sapiens
  CDR3 for beta chain variable domain of TCR clone 376695 (TRBV7-9, TRBJ2-3)
CASSLDRAGLATPDTQYF

SEQ ID NO: 753391 - protein, 20 aa, Homo sapiens
  CDR3 for alpha chain variable domain of TCR clone 376696 (TRAV26-1, TRAJ42)
CCVLLHRQTYYGGSQGNLIF

SEQ ID NO: 753392 - protein, 16 aa, Homo sapiens
  CDR3 for beta chain variable domain of TCR clone 376696 (TRBV2, TRBJ2-1)
CASSVGGSLSYNEQFF

SEQ ID NO: 753393 - protein, 10 aa, Homo sapiens
  CDR3 for alpha chain variable domain of TCR clone 376697 (TRAV23/DV6, TRAJ57)
CAASSTLSQG

SEQ ID NO: 753394 - protein, 14 aa, Homo sapiens
  CDR3 for beta chain variable domain of TCR clone 376697 (TRBV25-1, TRBJ1-1)
RASTHLGGNTKAFF

SEQ ID NO: 753395 - protein, 12 aa, Homo sapiens
  CDR3 for alpha chain variable domain of TCR clone 376698 (TRAV21, TRAJ11)
CASTSGYSTLTF

SEQ ID NO: 753396 - protein, 16 aa, Homo sapiens
  CDR3 for beta chain variable domain of TCR clone 376698 (TRBV28, TRBJ2-2)
CASSLEGGSNTGELFF

SEQ ID NO: 753397 - protein, 11 aa, Homo sapiens
  CDR3 for alpha chain variable domain of TCR clone 376699 (TRAV23/DV6, TRAJ13)
CPAGETGGYQK

SEQ ID NO: 753398 - protein, 13 aa, Homo sapiens
  CDR3 for beta chain variable domain of TCR clone 376699 (TRBV29-1, TRBJ2-1)
CSVEGGRVNEQFF

SEQ ID NO: 753399 - protein, 13 aa, Homo sapiens
  CDR3 for alpha chain variable domain of TCR clone 376700 (TRAV3, TRAJ27)
CAVRPLGAGKSTF

SEQ ID NO: 753400 - protein, 12 aa, Homo sapiens
  CDR3 for beta chain variable domain of TCR clone 376700 (TRBV7-9, TRBJ2-3)
CASSPGSIYAVF

SEQ ID NO: 753401 - protein, 14 aa, Homo sapiens
  CDR3 for alpha chain variable domain of TCR clone 376701 (TRAV12-2, TRAJ6)
CASKWGGGSYIPTF

SEQ ID NO: 753402 - protein, 14 aa, Homo sapiens
  CDR3 for beta chain variable domain of TCR clone 376701 (TRBV19, TRBJ2-3)
CASSAPRGTDTQYF

SEQ ID NO: 753403 - protein, 18 aa, Homo sapiens
  CDR3 for alpha chain variable domain of TCR clone 376702 (TRAV13-1, TRAJ52)
CAAKNPNAGGTSYGKLTF

SEQ ID NO: 753404 - protein, 13 aa, Homo sapiens
  CDR3 for beta chain variable domain of TCR clone 376702 (TRBV11-1, TRBJ2-1)
CASSLEDDTIRFF

SEQ ID NO: 753405 - protein, 14 aa, Homo sapiens
  CDR3 for alpha chain variable domain of TCR clone 376703 (TRAV26-1, TRAJ45)
CIEVTVGGADGPTF

SEQ ID NO: 753406 - protein, 13 aa, Homo sapiens
  CDR3 for beta chain variable domain of TCR clone 376703 (TRBV7-6, TRBJ1-2)
CASSLVADYGYTF

SEQ ID NO: 753407 - protein, 14 aa, Homo sapiens
  CDR3 for alpha chain variable domain of TCR clone 376704 (TRAV30, TRAJ33)
CGTVAPRSNYQLIW

SEQ ID NO: 753408 - protein, 14 aa, Homo sapiens
  CDR3 for beta chain variable domain of TCR clone 376704 (TRBV12-4, TRBJ1-1)
CASTWTGHHTEAVF

SEQ ID NO: 753409 - protein, 16 aa, Homo sapiens
  CDR3 for alpha chain variable domain of TCR clone 376705 (TRAV12-3, TRAJ53)
CAMSPGGGGSNYKLTF

SEQ ID NO: 753410 - protein, 13 aa, Homo sapiens
  CDR3 for beta chain variable domain of TCR clone 376705 (TRBV23-1, TRBJ1-4)
CASRGKFNEKLFF

SEQ ID NO: 753411 - protein, 17 aa, Homo sapiens
  CDR3 for alpha chain variable domain of TCR clone 376706 (TRAV4, TRAJ18)
FLVGERSVGSTLGRLYF

SEQ ID NO: 753412 - protein, 14 aa, Homo sapiens
  CDR3 for beta chain variable domain of TCR clone 376706 (TRBV6-5, TRBJ1-2)
CASSYDGTGGGYTF

SEQ ID NO: 753413 - protein, 14 aa, Homo sapiens
  CDR3 for alpha chain variable domain of TCR clone 376707 (TRAV17, TRAJ57)
CATDPQGGSAQLVF

SEQ ID NO: 753414 - protein, 14 aa, Homo sapiens
  CDR3 for beta chain variable domain of TCR clone 376707 (TRBV5-8, TRBJ2-3)
CASSLGQGTDTQYF

SEQ ID NO: 753415 - protein, 16 aa, Homo sapiens
  CDR3 for alpha chain variable domain of TCR clone 376708 (TRAV12-2, TRAJ43)
CAGDDMRFGAGTRLTV

SEQ ID NO: 753416 - protein, 15 aa, Homo sapiens
  CDR3 for beta chain variable domain of TCR clone 376708 (TRBV5-1, TRBJ2-1)
CASSPPRAPYNEQFF

SEQ ID NO: 753417 - protein, 14 aa, Homo sapiens
  CDR3 for alpha chain variable domain of TCR clone 376709 (TRAV26-1, TRAJ44)
CIVSNTGTASKLTF

SEQ ID NO: 753418 - protein, 11 aa, Homo sapiens
  CDR3 for beta chain variable domain of TCR clone 376709 (TRBV19, TRBJ2-7)
CVSSILGEQYF

SEQ ID NO: 753419 - protein, 14 aa, Homo sapiens
  CDR3 for alpha chain variable domain of TCR clone 376710 (TRAV12-3, TRAJ37)
CVSEGYSNTGKLIF

SEQ ID NO: 753420 - protein, 14 aa, Homo sapiens
  CDR3 for beta chain variable domain of TCR clone 376710 (TRBV20-1, TRBJ1-1)
CSAQTRIGGTEAFF

SEQ ID NO: 753421 - protein, 16 aa, Homo sapiens
  CDR3 for alpha chain variable domain of TCR clone 376711 (TRAV3, TRAJ6)
CAVRDEMGRRKLHTYL

SEQ ID NO: 753422 - protein, 15 aa, Homo sapiens
  CDR3 for beta chain variable domain of TCR clone 376711 (TRBV5-1, TRBJ2-7)
CASSLGDFTTYEQYF

SEQ ID NO: 753423 - protein, 12 aa, Homo sapiens
  CDR3 for alpha chain variable domain of TCR clone 376712 (TRAV20, TRAJ56)
CAVTGANSKLTF

SEQ ID NO: 753424 - protein, 14 aa, Homo sapiens
  CDR3 for beta chain variable domain of TCR clone 376712 (TRBV20-1, TRBJ2-5)
CSAVVPGYQETQYF

SEQ ID NO: 753425 - protein, 12 aa, Homo sapiens
  CDR3 for alpha chain variable domain of TCR clone 376713 (TRAV6, TRAJ41)
CALRNSGYALNF

SEQ ID NO: 753426 - protein, 14 aa, Homo sapiens
  CDR3 for beta chain variable domain of TCR clone 376713 (TRBV19, TRBJ2-7)
CASNFRDTFTGMYF

SEQ ID NO: 753427 - protein, 14 aa, Homo sapiens
  CDR3 for alpha chain variable domain of TCR clone 376714 (TRAV9-2, TRAJ39)
CALYIYNAGNMLTF

SEQ ID NO: 753428 - protein, 15 aa, Homo sapiens
  CDR3 for beta chain variable domain of TCR clone 376714 (TRBV18, TRBJ1-1)
CASSPSSWVNTEAFF

SEQ ID NO: 753429 - protein, 14 aa, Homo sapiens
  CDR3 for alpha chain variable domain of TCR clone 376715 (TRAV1-2, TRAJ8)
CAVREDTGFQKLVF

SEQ ID NO: 753430 - protein, 16 aa, Homo sapiens
  CDR3 for beta chain variable domain of TCR clone 376715 (TRBV7-9, TRBJ2-1)
CASSGVAGGSYNEQFF

SEQ ID NO: 753431 - protein, 13 aa, Homo sapiens
  CDR3 for alpha chain variable domain of TCR clone 376716 (TRAV8-4, TRAJ15)
CAVRDQAGTALIF

SEQ ID NO: 753432 - protein, 15 aa, Homo sapiens
  CDR3 for beta chain variable domain of TCR clone 376716 (TRBV11-1, TRBJ2-7)
CASSLNYGASYEQYF

SEQ ID NO: 753433 - protein, 17 aa, Homo sapiens
  CDR3 for alpha chain variable domain of TCR clone 376717 (TRAV3, TRAJ42)
CAVRERDYGGSQGNLIF

SEQ ID NO: 753434 - protein, 13 aa, Homo sapiens
  CDR3 for beta chain variable domain of TCR clone 376717 (TRBV10-3, TRBJ2-7)
CASKLAVNYEQYF

SEQ ID NO: 753435 - protein, 14 aa, Homo sapiens
  CDR3 for alpha chain variable domain of TCR clone 376718 (TRAV17, TRAJ31)
CATVFRNNNARLML

SEQ ID NO: 753436 - protein, 14 aa, Homo sapiens
  CDR3 for beta chain variable domain of TCR clone 376718 (TRBV12-4, TRBJ2-5)
CASSLWQKQETQYF

SEQ ID NO: 753437 - protein, 16 aa, Homo sapiens
  CDR3 for alpha chain variable domain of TCR clone 376719 (TRAV17, TRAJ28)
CATASVSGAGSYQLTF

SEQ ID NO: 753438 - protein, 16 aa, Homo sapiens
  CDR3 for beta chain variable domain of TCR clone 376719 (TRBV7-9, TRBJ2-3)
RASSLMKRMGSRYAVF

SEQ ID NO: 753439 - protein, 14 aa, Homo sapiens
  CDR3 for alpha chain variable domain of TCR clone 376720 (TRAV12-2, TRAJ13)
CAVKKTGGSQKVTF

SEQ ID NO: 753440 - protein, 14 aa, Homo sapiens
  CDR3 for beta chain variable domain of TCR clone 376720 (TRBV28, TRBJ2-5)
CASSLYRGTETQYF

SEQ ID NO: 753441 - protein, 14 aa, Homo sapiens
  CDR3 for alpha chain variable domain of TCR clone 376721 (TRAV12-2, TRAJ17)
CAVLFKAAGNKLTF

SEQ ID NO: 753442 - protein, 12 aa, Homo sapiens
  CDR3 for beta chain variable domain of TCR clone 376721 (TRBV27, TRBJ2-7)
CASSGGFYEQYF

SEQ ID NO: 753443 - protein, 11 aa, Homo sapiens
  CDR3 for alpha chain variable domain of TCR clone 376722 (TRAV27, TRAJ20)
CAGADDYKLSF

SEQ ID NO: 753444 - protein, 13 aa, Homo sapiens
  CDR3 for beta chain variable domain of TCR clone 376722 (TRBV27, TRBJ1-1)
CASSLSIGAEAFF

SEQ ID NO: 753445 - protein, 15 aa, Homo sapiens
  CDR3 for alpha chain variable domain of TCR clone 376723 (TRAV12-2, TRAJ52)
CAVTSGGTSYGKLTF

SEQ ID NO: 753446 - protein, 15 aa, Homo sapiens
  CDR3 for beta chain variable domain of TCR clone 376723 (TRBV7-2, TRBJ2-1)
CASSPGFIIGNEQFF

SEQ ID NO: 753447 - protein, 15 aa, Homo sapiens
  CDR3 for alpha chain variable domain of TCR clone 376724 (TRAV23/DV6, TRAJ44)
CAASGGTGTASKLTL

SEQ ID NO: 753448 - protein, 15 aa, Homo sapiens
  CDR3 for beta chain variable domain of TCR clone 376724 (TRBV6-3, TRBJ2-7)
CASSSHGTVFYEQYF

SEQ ID NO: 753449 - protein, 12 aa, Homo sapiens
  CDR3 for alpha chain variable domain of TCR clone 376725 (TRAV12-1, TRAJ15)
PPANQAGTALIF

SEQ ID NO: 753450 - protein, 13 aa, Homo sapiens
  CDR3 for beta chain variable domain of TCR clone 376725 (TRBV7-2, TRBJ2-4)
CASSREHANIQYF

SEQ ID NO: 753451 - protein, 17 aa, Homo sapiens
  CDR3 for alpha chain variable domain of TCR clone 376726 (TRAV3, TRAJ6)
CALRDGPRAGGSYIPTF

SEQ ID NO: 753452 - protein, 14 aa, Homo sapiens
  CDR3 for beta chain variable domain of TCR clone 376726 (TRBV7-2, TRBJ2-7)
CASSPKTSFYGQYF

SEQ ID NO: 753453 - protein, 18 aa, Homo sapiens
  CDR3 for alpha chain variable domain of TCR clone 376727 (TRAV13-1, TRAJ52)
CAAQNPNAGGTSYGKLTF

SEQ ID NO: 753454 - protein, 17 aa, Homo sapiens
  CDR3 for beta chain variable domain of TCR clone 376727 (TRBV7-3, TRBJ2-3)
CASSLMKRMRGADTQYF

SEQ ID NO: 753455 - protein, 12 aa, Homo sapiens
  CDR3 for alpha chain variable domain of TCR clone 376728 (TRAV21, TRAJ23)
CAVGLQGGKLIF

SEQ ID NO: 753456 - protein, 13 aa, Homo sapiens
  CDR3 for beta chain variable domain of TCR clone 376728 (TRBV20-1, TRBJ2-7)
CSARTGAGYEQYF

SEQ ID NO: 753457 - protein, 11 aa, Homo sapiens
  CDR3 for alpha chain variable domain of TCR clone 376729 (TRAV12-3, TRAJ27)
CAMANAGKSTC

SEQ ID NO: 753458 - protein, 14 aa, Homo sapiens
  CDR3 for beta chain variable domain of TCR clone 376729 (TRBV12-5, TRBJ2-5)
CASGSRTHQETQYF

SEQ ID NO: 753459 - protein, 12 aa, Homo sapiens
  CDR3 for alpha chain variable domain of TCR clone 376730 (TRAV21, TRAJ49)
CAVTNTGNQFYF

SEQ ID NO: 753460 - protein, 13 aa, Homo sapiens
  CDR3 for beta chain variable domain of TCR clone 376730 (TRBV12-4, TRBJ2-5)
CASSPGTEETQYF

SEQ ID NO: 753461 - protein, 12 aa, Homo sapiens
  CDR3 for alpha chain variable domain of TCR clone 376731 (TRAV12-1, TRAJ16)
CVVFRDGQKLLF

SEQ ID NO: 753462 - protein, 20 aa, Homo sapiens
  CDR3 for beta chain variable domain of TCR clone 376731 (TRBV28, TRBJ2-1)
CASTPIGRSPGLAGGNEQFF

SEQ ID NO: 753463 - protein, 16 aa, Homo sapiens
  CDR3 for alpha chain variable domain of TCR clone 376732 (TRAV3, TRAJ10)
CAVRDMRAGGGNKLTF

SEQ ID NO: 753464 - protein, 16 aa, Homo sapiens
  CDR3 for beta chain variable domain of TCR clone 376732 (TRBV24-1, TRBJ2-3)
CATSAPGTGATDTQYF

SEQ ID NO: 753465 - protein, 21 aa, Homo sapiens
  CDR3 for alpha chain variable domain of TCR clone 376733 (TRAV26-1, TRAJ38)
CIADNAGNNHIQNPDPAEYQL

SEQ ID NO: 753466 - protein, 13 aa, Homo sapiens
  CDR3 for beta chain variable domain of TCR clone 376733 (TRBV20-1, TRBJ1-1)
CSARGGGNTEAFF

SEQ ID NO: 753467 - protein, 11 aa, Homo sapiens
  CDR3 for alpha chain variable domain of TCR clone 376734 (TRAV3, TRAJ21)
CAVGNFNNFYF

SEQ ID NO: 753468 - protein, 16 aa, Homo sapiens
  CDR3 for beta chain variable domain of TCR clone 376734 (TRBV19, TRBJ2-1)
RASSKAGPSSYNEQFF

SEQ ID NO: 753469 - protein, 13 aa, Homo sapiens
  CDR3 for alpha chain variable domain of TCR clone 376735 (TRAV27, TRAJ6)
CAGGTRGSYIPTF

SEQ ID NO: 753470 - protein, 13 aa, Homo sapiens
  CDR3 for beta chain variable domain of TCR clone 376735 (TRBV7-9, TRBJ2-1)
CASSWESYNEQFF

SEQ ID NO: 753471 - protein, 13 aa, Homo sapiens
  CDR3 for alpha chain variable domain of TCR clone 376736 (TRAV21, TRAJ20)
CAVGLRVDYKLSF

SEQ ID NO: 753472 - protein, 14 aa, Homo sapiens
  CDR3 for beta chain variable domain of TCR clone 376736 (TRBV28, TRBJ1-1)
CASSFPRKNTEAFF

SEQ ID NO: 753473 - protein, 14 aa, Homo sapiens
  CDR3 for alpha chain variable domain of TCR clone 376737 (TRAV1-2, TRAJ8)
CAVREDTGSQTLVF

SEQ ID NO: 753474 - protein, 14 aa, Homo sapiens
  CDR3 for beta chain variable domain of TCR clone 376737 (TRBV29-1, TRBJ1-4)
CSVTGTGGNEKLFF

SEQ ID NO: 753475 - protein, 16 aa, Homo sapiens
  CDR3 for alpha chain variable domain of TCR clone 376738 (TRAV12-2, TRAJ52)
CRLANAGGTSYGKLTL

SEQ ID NO: 753476 - protein, 13 aa, Homo sapiens
  CDR3 for beta chain variable domain of TCR clone 376738 (TRBV10-3, TRBJ2-7)
CASKLAVNYEQYF

SEQ ID NO: 753477 - protein, 11 aa, Homo sapiens
  CDR3 for alpha chain variable domain of TCR clone 376739 (TRAV8-1, TRAJ15)
CAVVPGTALIF

SEQ ID NO: 753478 - protein, 18 aa, Homo sapiens
  CDR3 for beta chain variable domain of TCR clone 376739 (TRBV18, TRBJ2-3)
CASSYTSGAAGGTVTQYF

SEQ ID NO: 753479 - protein, 17 aa, Homo sapiens
  CDR3 for alpha chain variable domain of TCR clone 376740 (TRAV3, TRAJ6)
CAVRDGPRAGGSDIPTF

SEQ ID NO: 753480 - protein, 13 aa, Homo sapiens
  CDR3 for beta chain variable domain of TCR clone 376740 (TRBV27, TRBJ2-1)
CARRTLGVGEQFF

SEQ ID NO: 753481 - protein, 13 aa, Homo sapiens
  CDR3 for alpha chain variable domain of TCR clone 376741 (TRAV14/DV4, TRAJ23)
CAMREVKGGKLIF

SEQ ID NO: 753482 - protein, 17 aa, Homo sapiens
  CDR3 for beta chain variable domain of TCR clone 376741 (TRBV5-1, TRBJ2-5)
CASSLLGLAANQETQYF

SEQ ID NO: 753483 - protein, 12 aa, Homo sapiens
  CDR3 for alpha chain variable domain of TCR clone 376742 (TRAV16, TRAJ49)
CALNEGGNQFYF

SEQ ID NO: 753484 - protein, 16 aa, Homo sapiens
  CDR3 for beta chain variable domain of TCR clone 376742 (TRBV12-4, TRBJ2-1)
CASSAVGQGNGDEQFF

SEQ ID NO: 753485 - protein, 15 aa, Homo sapiens
  CDR3 for alpha chain variable domain of TCR clone 376743 (TRAV41, TRAJ45)
CAASYSGGGADGLTF

SEQ ID NO: 753486 - protein, 14 aa, Homo sapiens
  CDR3 for beta chain variable domain of TCR clone 376743 (TRBV12-5, TRBJ2-5)
CASGSRTHQDTQYF

SEQ ID NO: 753487 - protein, 15 aa, Homo sapiens
  CDR3 for alpha chain variable domain of TCR clone 376744 (TRAV26-1, TRAJ23)
CIVRVAGYQGGKRIF

SEQ ID NO: 753488 - protein, 18 aa, Homo sapiens
  CDR3 for beta chain variable domain of TCR clone 376744 (TRBV28, TRBJ2-1)
CASSSTSGRANSYNGQFF

SEQ ID NO: 753489 - protein, 18 aa, Homo sapiens
  CDR3 for alpha chain variable domain of TCR clone 376745 (TRAV12-2, )
CAVEDIQNPDPAVHQLRD

SEQ ID NO: 753490 - protein, 18 aa, Homo sapiens
  CDR3 for beta chain variable domain of TCR clone 376745 (TRBV11-2, TRBJ2-3)
CASSLGGASRGAPNTQYF

SEQ ID NO: 753491 - protein, 12 aa, Homo sapiens
  CDR3 for alpha chain variable domain of TCR clone 376746 (TRAV21, TRAJ11)
CDATSGYSTLTF

SEQ ID NO: 753492 - protein, 15 aa, Homo sapiens
  CDR3 for beta chain variable domain of TCR clone 376746 (TRBV6-1, TRBJ2-3)
CASSERGGITDTQYF

SEQ ID NO: 753493 - protein, 14 aa, Homo sapiens
  CDR3 for alpha chain variable domain of TCR clone 376747 (TRAV8-6, TRAJ52)
CAVIGGTSYGKLTF

SEQ ID NO: 753494 - protein, 13 aa, Homo sapiens
  CDR3 for beta chain variable domain of TCR clone 376747 (TRBV7-3, TRBJ1-1)
CASSQDWGAEAFF

SEQ ID NO: 753495 - protein, 16 aa, Homo sapiens
  CDR3 for alpha chain variable domain of TCR clone 376748 (TRAV35, TRAJ28)
CAGYLYSGAESYQLTF

SEQ ID NO: 753496 - protein, 16 aa, Homo sapiens
  CDR3 for beta chain variable domain of TCR clone 376748 (TRBV5-1, TRBJ2-1)
CASSHGLAGPQNEQFF

SEQ ID NO: 753497 - protein, 11 aa, Homo sapiens
  CDR3 for alpha chain variable domain of TCR clone 376749 (TRAV1-1, TRAJ23)
CAVRQGGKLIF

SEQ ID NO: 753498 - protein, 13 aa, Homo sapiens
  CDR3 for beta chain variable domain of TCR clone 376749 (TRBV7-7, TRBJ2-2)
CASSLTSAGELFF

SEQ ID NO: 753499 - protein, 20 aa, Homo sapiens
  CDR3 for alpha chain variable domain of TCR clone 376750 (TRAV26-1, TRAJ42)
CCVLLHSQTYYGGSQGKLIF

SEQ ID NO: 753500 - protein, 16 aa, Homo sapiens
  CDR3 for beta chain variable domain of TCR clone 376750 (TRBV7-3, TRBJ2-2)
CASSLKRGTLSGELFF

SEQ ID NO: 753501 - protein, 16 aa, Homo sapiens
  CDR3 for alpha chain variable domain of TCR clone 376751 (TRAV20, TRAJ22)
CAVQASSSGSARKLTF

SEQ ID NO: 753502 - protein, 16 aa, Homo sapiens
  CDR3 for beta chain variable domain of TCR clone 376751 (TRBV20-1, TRBJ1-5)
CSASRGTGYSNQPQHF

SEQ ID NO: 753503 - protein, 12 aa, Homo sapiens
  CDR3 for alpha chain variable domain of TCR clone 376752 (TRAV1-1, TRAJ39)
CAVPVVGNKLTF

SEQ ID NO: 753504 - protein, 15 aa, Homo sapiens
  CDR3 for beta chain variable domain of TCR clone 376752 (TRBV19, TRBJ1-6)
CASSTQGAVGSPLHF

SEQ ID NO: 753505 - protein, 12 aa, Homo sapiens
  CDR3 for alpha chain variable domain of TCR clone 376753 (TRAV21, TRAJ23)
CAVPNQGGKPIF

SEQ ID NO: 753506 - protein, 15 aa, Homo sapiens
  CDR3 for beta chain variable domain of TCR clone 376753 (TRBV27, TRBJ2-1)
CASSFGAGTGPEQFF

SEQ ID NO: 753507 - protein, 12 aa, Homo sapiens
  CDR3 for alpha chain variable domain of TCR clone 376754 (TRAV12-3, TRAJ17)
CAMTLTRNKLTF

SEQ ID NO: 753508 - protein, 16 aa, Homo sapiens
  CDR3 for beta chain variable domain of TCR clone 376754 (TRBV11-2, TRBJ2-7)
CASSPTTGGVSYEQYF

SEQ ID NO: 753509 - protein, 14 aa, Homo sapiens
  CDR3 for alpha chain variable domain of TCR clone 376755 (TRAV12-3, TRAJ9)
CAMSPNTGGFKTIF

SEQ ID NO: 753510 - protein, 14 aa, Homo sapiens
  CDR3 for beta chain variable domain of TCR clone 376755 (TRBV7-3, TRBJ2-1)
CASSLAGGTNEQFF

SEQ ID NO: 753511 - protein, 11 aa, Homo sapiens
  CDR3 for alpha chain variable domain of TCR clone 376756 (TRAV21, TRAJ34)
WAVTNTAKLIF

SEQ ID NO: 753512 - protein, 13 aa, Homo sapiens
  CDR3 for beta chain variable domain of TCR clone 376756 (TRBV29-1, TRBJ1-3)
CSVEGGSGNTIYF

SEQ ID NO: 753513 - protein, 13 aa, Homo sapiens
  CDR3 for alpha chain variable domain of TCR clone 376757 (TRAV2, TRAJ40)
CAVVTSGTYKYIF

SEQ ID NO: 753514 - protein, 16 aa, Homo sapiens
  CDR3 for beta chain variable domain of TCR clone 376757 (TRBV2, TRBJ2-1)
CASSVGGALSYNEQFF

SEQ ID NO: 753515 - protein, 17 aa, Homo sapiens
  CDR3 for alpha chain variable domain of TCR clone 376758 (TRAV27, TRAJ26)
CAGARAPLDNYGQNFVF

SEQ ID NO: 753516 - protein, 15 aa, Homo sapiens
  CDR3 for beta chain variable domain of TCR clone 376758 (TRBV6-3, TRBJ2-2)
CASSFLATLTGELFF

SEQ ID NO: 753517 - protein, 15 aa, Homo sapiens
  CDR3 for alpha chain variable domain of TCR clone 376759 (TRAV8-3, TRAJ7)
CAVGSISYGNNRLAF

SEQ ID NO: 753518 - protein, 15 aa, Homo sapiens
  CDR3 for beta chain variable domain of TCR clone 376759 (TRBV4-2, TRBJ1-1)
CASSQEDLPRTEAFF

SEQ ID NO: 753519 - protein, 14 aa, Homo sapiens
  CDR3 for alpha chain variable domain of TCR clone 376760 (TRAV12-2, TRAJ13)
CAVKKTVGYQKVTF

SEQ ID NO: 753520 - protein, 14 aa, Homo sapiens
  CDR3 for beta chain variable domain of TCR clone 376760 (TRBV5-5, TRBJ2-7)
CASSLGQGTYEQYF

SEQ ID NO: 753521 - protein, 14 aa, Homo sapiens
  CDR3 for alpha chain variable domain of TCR clone 376761 (TRAV16, TRAJ26)
YALSSANYGQNFVF

SEQ ID NO: 753522 - protein, 12 aa, Homo sapiens
  CDR3 for beta chain variable domain of TCR clone 376761 (TRBV6-5, TRBJ2-2)
CASRTGTGELFF

SEQ ID NO: 753523 - protein, 14 aa, Homo sapiens
  CDR3 for alpha chain variable domain of TCR clone 376762 (TRAV27, TRAJ44)
CAASFTGTASKLTF

SEQ ID NO: 753524 - protein, 14 aa, Homo sapiens
  CDR3 for beta chain variable domain of TCR clone 376762 (TRBV27, TRBJ2-1)
CAGSIAETYNEQFF

SEQ ID NO: 753525 - protein, 14 aa, Homo sapiens
  CDR3 for alpha chain variable domain of TCR clone 376763 (TRAV13-1, TRAJ8)
SAASEDTGFQKLVF

SEQ ID NO: 753526 - protein, 13 aa, Homo sapiens
  CDR3 for beta chain variable domain of TCR clone 376763 (TRBV19, TRBJ1-5)
CASSTRRDQPQHF

SEQ ID NO: 753527 - protein, 16 aa, Homo sapiens
  CDR3 for alpha chain variable domain of TCR clone 376764 (TRAV12-2, TRAJ40)
CAVIRGGTPRTYKYIF

SEQ ID NO: 753528 - protein, 14 aa, Homo sapiens
  CDR3 for beta chain variable domain of TCR clone 376764 (TRBV20-1, TRBJ2-5)
CSARDGRAGETQYF

SEQ ID NO: 753529 - protein, 19 aa, Homo sapiens
  CDR3 for alpha chain variable domain of TCR clone 376765 (TRAV38-1, TRAJ53)
CAFMKHGLESGGSNYKLTF

SEQ ID NO: 753530 - protein, 15 aa, Homo sapiens
  CDR3 for beta chain variable domain of TCR clone 376765 (TRBV27, TRBJ1-6)
CASSFDRGLGSPLHF

SEQ ID NO: 753531 - protein, 14 aa, Homo sapiens
  CDR3 for alpha chain variable domain of TCR clone 376766 (TRAV21, TRAJ38)
CAVANAGNNRKLIW

SEQ ID NO: 753532 - protein, 16 aa, Homo sapiens
  CDR3 for beta chain variable domain of TCR clone 376766 (TRBV5-4, TRBJ2-1)
CASSLALAGAYNKQFF

SEQ ID NO: 753533 - protein, 16 aa, Homo sapiens
  CDR3 for alpha chain variable domain of TCR clone 376767 (TRAV8-6, TRAJ32)
CAVSDPYGGATNKLIF

SEQ ID NO: 753534 - protein, 18 aa, Homo sapiens
  CDR3 for beta chain variable domain of TCR clone 376767 (TRBV4-2, TRBJ2-6)
CASSQLQGVLTGANDLTF

SEQ ID NO: 753535 - protein, 15 aa, Homo sapiens
  CDR3 for alpha chain variable domain of TCR clone 376768 (TRAV3, TRAJ5)
CAVRDLDTGSVALPF

SEQ ID NO: 753536 - protein, 13 aa, Homo sapiens
  CDR3 for beta chain variable domain of TCR clone 376768 (TRBV12-4, TRBJ2-7)
CASSPTETYEQYF

SEQ ID NO: 753537 - protein, 14 aa, Homo sapiens
  CDR3 for alpha chain variable domain of TCR clone 376769 (TRAV9-2, TRAJ39)
CALYIYNAGNMLTF

SEQ ID NO: 753538 - protein, 14 aa, Homo sapiens
  CDR3 for beta chain variable domain of TCR clone 376769 (TRBV5-5, TRBJ1-4)
CASSPRGYNEKLFF

SEQ ID NO: 753539 - protein, 12 aa, Homo sapiens
  CDR3 for alpha chain variable domain of TCR clone 376770 (TRAV17, TRAJ53)
CAGGGSNYELTF

SEQ ID NO: 753540 - protein, 16 aa, Homo sapiens
  CDR3 for beta chain variable domain of TCR clone 376770 (TRBV11-2, TRBJ2-3)
CASSFQGRGALDTQYF

SEQ ID NO: 753541 - protein, 11 aa, Homo sapiens
  CDR3 for alpha chain variable domain of TCR clone 376771 (TRAV2, TRAJ33)
CAVESNYQLIW

SEQ ID NO: 753542 - protein, 15 aa, Homo sapiens
  CDR3 for beta chain variable domain of TCR clone 376771 (TRBV19, TRBJ1-1)
CASTSGQIQNTETFF

SEQ ID NO: 753543 - protein, 16 aa, Homo sapiens
  CDR3 for alpha chain variable domain of TCR clone 376772 (TRAV23/DV6, TRAJ57)
CAASSTLSLGGSEKLF

SEQ ID NO: 753544 - protein, 14 aa, Homo sapiens
  CDR3 for beta chain variable domain of TCR clone 376772 (TRBV25-1, TRBJ1-1)
CASTHLGGNTEAFF

SEQ ID NO: 753545 - protein, 16 aa, Homo sapiens
  CDR3 for alpha chain variable domain of TCR clone 376773 (TRAV30, TRAJ24)
CGTEIVDADSWGTFQF

SEQ ID NO: 753546 - protein, 15 aa, Homo sapiens
  CDR3 for beta chain variable domain of TCR clone 376773 (TRBV6-3, TRBJ2-7)
CASSSPGTVFYEQYF

SEQ ID NO: 753547 - protein, 13 aa, Homo sapiens
  CDR3 for alpha chain variable domain of TCR clone 376774 (TRAV35, TRAJ32)
CAGVGGATNKLIF

SEQ ID NO: 753548 - protein, 13 aa, Homo sapiens
  CDR3 for beta chain variable domain of TCR clone 376774 (TRBV20-1, TRBJ2-2)
CSASAAGTGELFF

SEQ ID NO: 753549 - protein, 15 aa, Homo sapiens
  CDR3 for alpha chain variable domain of TCR clone 376775 (TRAV14/DV4, TRAJ26)
CAMRGGQNYGQNFVF

SEQ ID NO: 753550 - protein, 13 aa, Homo sapiens
  CDR3 for beta chain variable domain of TCR clone 376775 (TRBV24-1, TRBJ2-2)
CATSDWSTGELFF

SEQ ID NO: 753551 - protein, 14 aa, Homo sapiens
  CDR3 for alpha chain variable domain of TCR clone 376776 (TRAV17, TRAJ49)
CATDARDTGNQFYF

SEQ ID NO: 753552 - protein, 16 aa, Homo sapiens
  CDR3 for beta chain variable domain of TCR clone 376776 (TRBV4-3, TRBJ2-1)
CASSPALNRGVNEQFF

SEQ ID NO: 753553 - protein, 13 aa, Homo sapiens
  CDR3 for alpha chain variable domain of TCR clone 376777 (TRAV12-2, TRAJ12)
CAVNGDSSYKLIF

SEQ ID NO: 753554 - protein, 16 aa, Homo sapiens
  CDR3 for beta chain variable domain of TCR clone 376777 (TRBV7-9, TRBJ1-2)
CASRLGFSSGEDGYTF

SEQ ID NO: 753555 - protein, 15 aa, Homo sapiens
  CDR3 for alpha chain variable domain of TCR clone 376778 (TRAV9-2, TRAJ44)
CALSDGPGTASKLTF

SEQ ID NO: 753556 - protein, 13 aa, Homo sapiens
  CDR3 for beta chain variable domain of TCR clone 376778 (TRBV4-2, TRBJ1-1)
CASSQAGNTEAFF

SEQ ID NO: 753557 - protein, 15 aa, Homo sapiens
  CDR3 for alpha chain variable domain of TCR clone 376779 (TRAV17, TRAJ57)
CATGPSQGGSEKLVF

SEQ ID NO: 753558 - protein, 18 aa, Homo sapiens
  CDR3 for beta chain variable domain of TCR clone 376779 (TRBV7-9, TRBJ2-7)
CASSLTTSGSRTWYEQDF

SEQ ID NO: 753559 - protein, 13 aa, Homo sapiens
  CDR3 for alpha chain variable domain of TCR clone 376780 (TRAV8-4, TRAJ3)
CAVSDSGASKIIF

SEQ ID NO: 753560 - protein, 16 aa, Homo sapiens
  CDR3 for beta chain variable domain of TCR clone 376780 (TRBV7-9, TRBJ2-7)
CASSSHGGQEKYEQYF

SEQ ID NO: 753561 - protein, 16 aa, Homo sapiens
  CDR3 for alpha chain variable domain of TCR clone 376781 (TRAV3, TRAJ37)
CAVRGKGSGNTGKLIF

SEQ ID NO: 753562 - protein, 14 aa, Homo sapiens
  CDR3 for beta chain variable domain of TCR clone 376781 (TRBV7-9, TRBJ1-2)
CASSRQGANYGYTF

SEQ ID NO: 753563 - protein, 14 aa, Homo sapiens
  CDR3 for alpha chain variable domain of TCR clone 376782 (TRAV12-3, TRAJ10)
SHLPLTGGGNKLTF

SEQ ID NO: 753564 - protein, 19 aa, Homo sapiens
  CDR3 for beta chain variable domain of TCR clone 376782 (TRBV25-1, TRBJ2-2)
CAILVSRVDRGRKTGELFF

SEQ ID NO: 753565 - protein, 14 aa, Homo sapiens
  CDR3 for alpha chain variable domain of TCR clone 376783 (TRAV26-1, TRAJ21)
CIVRVAHNFNKFYF

SEQ ID NO: 753566 - protein, 16 aa, Homo sapiens
  CDR3 for beta chain variable domain of TCR clone 376783 (TRBV28, TRBJ1-4)
CASSSRTGAANEKLFF

SEQ ID NO: 753567 - protein, 13 aa, Homo sapiens
  CDR3 for alpha chain variable domain of TCR clone 376784 (TRAV38-1, TRAJ30)
CAFISSGDDKIIF

SEQ ID NO: 753568 - protein, 14 aa, Homo sapiens
  CDR3 for beta chain variable domain of TCR clone 376784 (TRBV6-1, TRBJ1-3)
CASVQGGGGNTIYF

SEQ ID NO: 753569 - protein, 10 aa, Homo sapiens
  CDR3 for alpha chain variable domain of TCR clone 376785 (TRAV13-2, TRAJ34)
CAENTDKLIF

SEQ ID NO: 753570 - protein, 13 aa, Homo sapiens
  CDR3 for beta chain variable domain of TCR clone 376785 (TRBV20-1, TRBJ2-5)
CSARGDYQETQYF

SEQ ID NO: 753571 - protein, 10 aa, Homo sapiens
  CDR3 for alpha chain variable domain of TCR clone 376786 (TRAV21, TRAJ43)
CAVRIGDMRF

SEQ ID NO: 753572 - protein, 14 aa, Homo sapiens
  CDR3 for beta chain variable domain of TCR clone 376786 (TRBV7-2, TRBJ1-2)
CASSQTGSTYGYTF

SEQ ID NO: 753573 - protein, 10 aa, Homo sapiens
  CDR3 for alpha chain variable domain of TCR clone 376787 (TRAV30, TRAJ16)
CGTGGQKLLF

SEQ ID NO: 753574 - protein, 13 aa, Homo sapiens
  CDR3 for beta chain variable domain of TCR clone 376787 (TRBV9, TRBJ2-1)
CASSPSGGNEQFF

SEQ ID NO: 753575 - protein, 13 aa, Homo sapiens
  CDR3 for alpha chain variable domain of TCR clone 376788 (TRAV16, TRAJ58)
CALSIPSGSRLTF

SEQ ID NO: 753576 - protein, 16 aa, Homo sapiens
  CDR3 for beta chain variable domain of TCR clone 376788 (TRBV7-3, TRBJ2-1)
CASSLEGYRSYNEQFF

SEQ ID NO: 753577 - protein, 15 aa, Homo sapiens
  CDR3 for alpha chain variable domain of TCR clone 376789 (TRAV12-3, TRAJ27)
CAMRAYNTNAGKSTF

SEQ ID NO: 753578 - protein, 13 aa, Homo sapiens
  CDR3 for beta chain variable domain of TCR clone 376789 (TRBV12-4, TRBJ2-7)
CASSPTETYEQYF

SEQ ID NO: 753579 - protein, 16 aa, Homo sapiens
  CDR3 for alpha chain variable domain of TCR clone 376790 (TRAV30, TRAJ24)
CGTEIVDADSWGKFQF

SEQ ID NO: 753580 - protein, 16 aa, Homo sapiens
  CDR3 for beta chain variable domain of TCR clone 376790 (TRBV28, TRBJ1-4)
CASSSRTGAANEKLFF

SEQ ID NO: 753581 - protein, 15 aa, Homo sapiens
  CDR3 for alpha chain variable domain of TCR clone 376791 (TRAV1-2, TRAJ28)
CAVQYSGAGSYQLTF

SEQ ID NO: 753582 - protein, 13 aa, Homo sapiens
  CDR3 for beta chain variable domain of TCR clone 376791 (TRBV20-1, TRBJ2-7)
CSATHTSGYEQCF

SEQ ID NO: 753583 - protein, 14 aa, Homo sapiens
  CDR3 for alpha chain variable domain of TCR clone 376792 (TRAV8-4, TRAJ13)
CAVTLSGGYQKVTF

SEQ ID NO: 753584 - protein, 17 aa, Homo sapiens
  CDR3 for beta chain variable domain of TCR clone 376792 (TRBV11-2, TRBJ2-1)
CASSLYPPGVEYNEQFF

SEQ ID NO: 753585 - protein, 10 aa, Homo sapiens
  CDR3 for alpha chain variable domain of TCR clone 376793 (TRAV8-4, TRAJ43)
CAVSLGDMRF

SEQ ID NO: 753586 - protein, 14 aa, Homo sapiens
  CDR3 for beta chain variable domain of TCR clone 376793 (TRBV5-5, TRBJ1-5)
CASSGQGVDQPQHF

SEQ ID NO: 753587 - protein, 16 aa, Homo sapiens
  CDR3 for alpha chain variable domain of TCR clone 376794 (TRAV12-3, TRAJ45)
CAMGWGSVGGADGLTF

SEQ ID NO: 753588 - protein, 15 aa, Homo sapiens
  CDR3 for beta chain variable domain of TCR clone 376794 (TRBV3-1, TRBJ1-2)
CASSHPGTPGYGYTF

SEQ ID NO: 753589 - protein, 14 aa, Homo sapiens
  CDR3 for alpha chain variable domain of TCR clone 376795 (TRAV26-1, TRAJ40)
CIVRVARGPYKYIF

SEQ ID NO: 753590 - protein, 14 aa, Homo sapiens
  CDR3 for beta chain variable domain of TCR clone 376795 (TRBV7-3, TRBJ2-7)
CASSLRADSYEQYF

SEQ ID NO: 753591 - protein, 10 aa, Homo sapiens
  CDR3 for alpha chain variable domain of TCR clone 376796 (TRAV26-1, TRAJ40)
CIAGTYKYIF

SEQ ID NO: 753592 - protein, 15 aa, Homo sapiens
  CDR3 for beta chain variable domain of TCR clone 376796 (TRBV28, TRBJ1-5)
CASSRPRTGNQPQHF

SEQ ID NO: 753593 - protein, 15 aa, Homo sapiens
  CDR3 for alpha chain variable domain of TCR clone 376797 (TRAV35, TRAJ42)
CAGQGYGGSHGNLIF

SEQ ID NO: 753594 - protein, 13 aa, Homo sapiens
  CDR3 for beta chain variable domain of TCR clone 376797 (TRBV7-2, TRBJ1-1)
CASSLVQGAEAFF

SEQ ID NO: 753595 - protein, 16 aa, Homo sapiens
  CDR3 for alpha chain variable domain of TCR clone 376798 (TRAV3, TRAJ37)
CAVRGTGAGNTGKLIF

SEQ ID NO: 753596 - protein, 16 aa, Homo sapiens
  CDR3 for beta chain variable domain of TCR clone 376798 (TRBV12-4, TRBJ1-5)
CASSRPVGGSNQPQHF

SEQ ID NO: 753597 - protein, 13 aa, Homo sapiens
  CDR3 for alpha chain variable domain of TCR clone 376799 (TRAV17, TRAJ5)
CATMDTGSRALTF

SEQ ID NO: 753598 - protein, 15 aa, Homo sapiens
  CDR3 for beta chain variable domain of TCR clone 376799 (TRBV20-1, TRBJ2-5)
CSATRTSGSLETQYF

SEQ ID NO: 753599 - protein, 17 aa, Homo sapiens
  CDR3 for alpha chain variable domain of TCR clone 376800 (TRAV3, TRAJ12)
CAVRDGGGMDSSYKLIF

SEQ ID NO: 753600 - protein, 13 aa, Homo sapiens
  CDR3 for beta chain variable domain of TCR clone 376800 (TRBV20-1, TRBJ2-3)
CSARLAGTDTQYF

SEQ ID NO: 753601 - protein, 16 aa, Homo sapiens
  CDR3 for alpha chain variable domain of TCR clone 376801 (TRAV12-3, TRAJ50)
CAMRGPMKTSYDKVIF

SEQ ID NO: 753602 - protein, 13 aa, Homo sapiens
  CDR3 for beta chain variable domain of TCR clone 376801 (TRBV4-1, TRBJ2-3)
CASSLDFTDTQYF

SEQ ID NO: 753603 - protein, 13 aa, Homo sapiens
  CDR3 for alpha chain variable domain of TCR clone 376802 (TRAV12-2, TRAJ20)
CAVNRFDDYKLSF

SEQ ID NO: 753604 - protein, 15 aa, Homo sapiens
  CDR3 for beta chain variable domain of TCR clone 376802 (TRBV20-1, TRBJ1-6)
CSARAASSYNSPLHF

SEQ ID NO: 753605 - protein, 14 aa, Homo sapiens
  CDR3 for alpha chain variable domain of TCR clone 376803 (TRAV35, TRAJ33)
CWSRGRDSNYQLIW

SEQ ID NO: 753606 - protein, 11 aa, Homo sapiens
  CDR3 for beta chain variable domain of TCR clone 376803 (TRBV10-3, TRBJ2-7)
CAISEGLEQYF

SEQ ID NO: 753607 - protein, 17 aa, Homo sapiens
  CDR3 for alpha chain variable domain of TCR clone 376804 (TRAV12-2, TRAJ42)
CAVNILNYGGSQGNLIF

SEQ ID NO: 753608 - protein, 15 aa, Homo sapiens
  CDR3 for beta chain variable domain of TCR clone 376804 (TRBV4-1, TRBJ1-4)
CASSDTGGTNEKLFF

SEQ ID NO: 753609 - protein, 16 aa, Homo sapiens
  CDR3 for alpha chain variable domain of TCR clone 376805 (TRAV20, TRAJ22)
CTVQASSSGSARQLTF

SEQ ID NO: 753610 - protein, 13 aa, Homo sapiens
  CDR3 for beta chain variable domain of TCR clone 376805 (TRBV7-2, TRBJ2-5)
CASSQTGVETQYF

SEQ ID NO: 753611 - protein, 15 aa, Homo sapiens
  CDR3 for alpha chain variable domain of TCR clone 376806 (TRAV23/DV6, TRAJ37)
CAAGEGSSNTGKLIS

SEQ ID NO: 753612 - protein, 17 aa, Homo sapiens
  CDR3 for beta chain variable domain of TCR clone 376806 (TRBV20-1, TRBJ2-7)
CSATRAGGVAGVEEQYF

SEQ ID NO: 753613 - protein, 13 aa, Homo sapiens
  CDR3 for alpha chain variable domain of TCR clone 376807 (TRAV21, TRAJ20)
CAVGLRVDYKLSF

SEQ ID NO: 753614 - protein, 13 aa, Homo sapiens
  CDR3 for beta chain variable domain of TCR clone 376807 (TRBV18, TRBJ1-1)
CASSPETKPEAFF

SEQ ID NO: 753615 - protein, 15 aa, Homo sapiens
  CDR3 for alpha chain variable domain of TCR clone 376808 (TRAV17, TRAJ57)
CATGPSQGGSEKLVF

SEQ ID NO: 753616 - protein, 15 aa, Homo sapiens
  CDR3 for beta chain variable domain of TCR clone 376808 (TRBV6-3, TRBJ2-7)
CASSAPGTVCYEQYF

SEQ ID NO: 753617 - protein, 16 aa, Homo sapiens
  CDR3 for alpha chain variable domain of TCR clone 376809 (TRAV8-3, TRAJ24)
CAVVRMTIDSWGKLQF

SEQ ID NO: 753618 - protein, 15 aa, Homo sapiens
  CDR3 for beta chain variable domain of TCR clone 376809 (TRBV7-9, TRBJ2-1)
CASTPWEGNYNEQFF

SEQ ID NO: 753619 - protein, 13 aa, Homo sapiens
  CDR3 for alpha chain variable domain of TCR clone 376810 (TRAV8-6, TRAJ34)
CAVSDQGTDKRIF

SEQ ID NO: 753620 - protein, 14 aa, Homo sapiens
  CDR3 for beta chain variable domain of TCR clone 376810 (TRBV12-4, TRBJ1-1)
CASTWTGHDTEAFF

SEQ ID NO: 753621 - protein, 16 aa, Homo sapiens
  CDR3 for alpha chain variable domain of TCR clone 376811 (TRAV26-1, TRAJ46)
CIVRVVKEKQRRQADF

SEQ ID NO: 753622 - protein, 13 aa, Homo sapiens
  CDR3 for beta chain variable domain of TCR clone 376811 (TRBV12-5, TRBJ2-3)
CASGDRQSDTQYF

SEQ ID NO: 753623 - protein, 13 aa, Homo sapiens
  CDR3 for alpha chain variable domain of TCR clone 376812 (TRAV1-2, TRAJ13)
CAVNSWGYQKVTF

SEQ ID NO: 753624 - protein, 14 aa, Homo sapiens
  CDR3 for beta chain variable domain of TCR clone 376812 (TRBV4-1, TRBJ1-5)
CASSPKGDNQPQHF

SEQ ID NO: 753625 - protein, 12 aa, Homo sapiens
  CDR3 for alpha chain variable domain of TCR clone 376813 (TRAV2, TRAJ10)
CASTGGGNKLTF

SEQ ID NO: 753626 - protein, 14 aa, Homo sapiens
  CDR3 for beta chain variable domain of TCR clone 376813 (TRBV7-2, TRBJ2-2)
CASRGQGADGELFF

SEQ ID NO: 753627 - protein, 14 aa, Homo sapiens
  CDR3 for alpha chain variable domain of TCR clone 376814 (TRAV12-2, TRAJ3)
CAVSLYSSASKIIF

SEQ ID NO: 753628 - protein, 15 aa, Homo sapiens
  CDR3 for beta chain variable domain of TCR clone 376814 (TRBV20-1, TRBJ2-7)
CSARDRVSGMDEQYF

SEQ ID NO: 753629 - protein, 16 aa, Homo sapiens
  CDR3 for alpha chain variable domain of TCR clone 376815 (TRAV16, TRAJ4)
CALSRMFSGGYNQLIF

SEQ ID NO: 753630 - protein, 12 aa, Homo sapiens
  CDR3 for beta chain variable domain of TCR clone 376815 (TRBV29-1, TRBJ2-3)
CSVTGGADTQYF

SEQ ID NO: 753631 - protein, 16 aa, Homo sapiens
  CDR3 for alpha chain variable domain of TCR clone 376816 (TRAV12-2, TRAJ28)
CAVNEYSGAGSYQITF

SEQ ID NO: 753632 - protein, 14 aa, Homo sapiens
  CDR3 for beta chain variable domain of TCR clone 376816 (TRBV18, TRBJ2-3)
CASSLGGGSNTQYF

SEQ ID NO: 753633 - protein, 14 aa, Homo sapiens
  CDR3 for alpha chain variable domain of TCR clone 376817 (TRAV38-1, TRAJ29)
CAFITPSGNTPLVF

SEQ ID NO: 753634 - protein, 16 aa, Homo sapiens
  CDR3 for beta chain variable domain of TCR clone 376817 (TRBV7-9, TRBJ2-1)
CASSDVAGGSYNEQFF

SEQ ID NO: 753635 - protein, 15 aa, Homo sapiens
  CDR3 for alpha chain variable domain of TCR clone 376818 (TRAV34, TRAJ38)
CGADFTPGNNRKLIW

SEQ ID NO: 753636 - protein, 14 aa, Homo sapiens
  CDR3 for beta chain variable domain of TCR clone 376818 (TRBV12-5, TRBJ2-5)
CASGSRTHQETQYC

SEQ ID NO: 753637 - protein, 14 aa, Homo sapiens
  CDR3 for alpha chain variable domain of TCR clone 376819 (TRAV17, TRAJ32)
CATDPGGATNKLIF

SEQ ID NO: 753638 - protein, 15 aa, Homo sapiens
  CDR3 for beta chain variable domain of TCR clone 376819 (TRBV27, TRBJ2-7)
CASSTAGTGSYEQYF

SEQ ID NO: 753639 - protein, 12 aa, Homo sapiens
  CDR3 for alpha chain variable domain of TCR clone 376820 (TRAV17, TRAJ30)
CVPVRRDDKIIL

SEQ ID NO: 753640 - protein, 14 aa, Homo sapiens
  CDR3 for beta chain variable domain of TCR clone 376820 (TRBV7-7, TRBJ2-2)
CASSRDRSTGELFF

SEQ ID NO: 753641 - protein, 16 aa, Homo sapiens
  CDR3 for alpha chain variable domain of TCR clone 376821 (TRAV13-1, TRAJ18)
CAASRMRGSTLGRLYF

SEQ ID NO: 753642 - protein, 16 aa, Homo sapiens
  CDR3 for beta chain variable domain of TCR clone 376821 (TRBV27, TRBJ1-1)
CASSSRGWTGYTEAFF

SEQ ID NO: 753643 - protein, 15 aa, Homo sapiens
  CDR3 for alpha chain variable domain of TCR clone 376822 (TRAV8-3, TRAJ27)
CAVGPSKTNAGKSTF

SEQ ID NO: 753644 - protein, 15 aa, Homo sapiens
  CDR3 for beta chain variable domain of TCR clone 376822 (TRBV7-2, TRBJ2-7)
CASSTPGLTRGEQYF

SEQ ID NO: 753645 - protein, 15 aa, Homo sapiens
  CDR3 for alpha chain variable domain of TCR clone 376823 (TRAV17, TRAJ16)
CATALRFSDGQKLLF

SEQ ID NO: 753646 - protein, 14 aa, Homo sapiens
  CDR3 for beta chain variable domain of TCR clone 376823 (TRBV2, TRBJ2-7)
CASSDRTTSSTSGR

SEQ ID NO: 753647 - protein, 13 aa, Homo sapiens
  CDR3 for alpha chain variable domain of TCR clone 376824 (TRAV27, TRAJ6)
CAGGTRGSHIPTF

SEQ ID NO: 753648 - protein, 15 aa, Homo sapiens
  CDR3 for beta chain variable domain of TCR clone 376824 (TRBV5-5, TRBJ2-7)
CASSLAAPLSYEQYF

SEQ ID NO: 753649 - protein, 14 aa, Homo sapiens
  CDR3 for alpha chain variable domain of TCR clone 376825 (TRAV1-2, TRAJ8)
CAVIEDTGFQKLVF

SEQ ID NO: 753650 - protein, 16 aa, Homo sapiens
  CDR3 for beta chain variable domain of TCR clone 376825 (TRBV4-1, TRBJ2-3)
CASSSWSGGARDTQYF

SEQ ID NO: 753651 - protein, 15 aa, Homo sapiens
  CDR3 for alpha chain variable domain of TCR clone 376826 (TRAV35, TRAJ40)
CAGQLGTSGTYKYIF

SEQ ID NO: 753652 - protein, 15 aa, Homo sapiens
  CDR3 for beta chain variable domain of TCR clone 376826 (TRBV7-3, TRBJ2-1)
EDPAHRAGGTNEQFF

SEQ ID NO: 753653 - protein, 13 aa, Homo sapiens
  CDR3 for alpha chain variable domain of TCR clone 376827 (TRAV8-3, TRAJ48)
CAVVPFGNEKLTF

SEQ ID NO: 753654 - protein, 14 aa, Homo sapiens
  CDR3 for beta chain variable domain of TCR clone 376827 (TRBV7-2, TRBJ2-7)
CASSPKTSFYEQYF

SEQ ID NO: 753655 - protein, 13 aa, Homo sapiens
  CDR3 for alpha chain variable domain of TCR clone 376828 (TRAV38-1, TRAJ42)
CARWGGSQGNLIF

SEQ ID NO: 753656 - protein, 12 aa, Homo sapiens
  CDR3 for beta chain variable domain of TCR clone 376828 (TRBV5-5, TRBJ2-5)
CASSYFGETQYF

SEQ ID NO: 753657 - protein, 16 aa, Homo sapiens
  CDR3 for alpha chain variable domain of TCR clone 376829 (TRAV3, TRAJ10)
CAVRDMRAGGGNKLTF

SEQ ID NO: 753658 - protein, 15 aa, Homo sapiens
  CDR3 for beta chain variable domain of TCR clone 376829 (TRBV12-4, TRBJ1-5)
CQQPTGGGSNQPQHF

SEQ ID NO: 753659 - protein, 15 aa, Homo sapiens
  CDR3 for alpha chain variable domain of TCR clone 376830 (TRAV3, TRAJ22)
CAVRDRGGSARQLTF

SEQ ID NO: 753660 - protein, 14 aa, Homo sapiens
  CDR3 for beta chain variable domain of TCR clone 376830 (TRBV15, TRBJ2-7)
CATSRVARGYEQYF

SEQ ID NO: 753661 - protein, 12 aa, Homo sapiens
  CDR3 for alpha chain variable domain of TCR clone 376831 (TRAV20, TRAJ39)
CAVCNAGNMLTF

SEQ ID NO: 753662 - protein, 17 aa, Homo sapiens
  CDR3 for beta chain variable domain of TCR clone 376831 (TRBV4-1, TRBJ2-3)
CASSQGYVSGGTDTQYV

SEQ ID NO: 753663 - protein, 14 aa, Homo sapiens
  CDR3 for alpha chain variable domain of TCR clone 376832 (TRAV23/DV6, )
CAADIQNPDPAVYP

SEQ ID NO: 753664 - protein, 14 aa, Homo sapiens
  CDR3 for beta chain variable domain of TCR clone 376832 (TRBV5-7, TRBJ1-6)
CASSFAGHNSPLHF

SEQ ID NO: 753665 - protein, 15 aa, Homo sapiens
  CDR3 for alpha chain variable domain of TCR clone 376833 (TRAV21, TRAJ24)
CAARSSTDSWGKLQF

SEQ ID NO: 753666 - protein, 15 aa, Homo sapiens
  CDR3 for beta chain variable domain of TCR clone 376833 (TRBV11-2, TRBJ2-1)
CASSSPSTRYNEQFF

SEQ ID NO: 753667 - protein, 13 aa, Homo sapiens
  CDR3 for alpha chain variable domain of TCR clone 376834 (TRAV17, TRAJ39)
CATEDNEGNMLTF

SEQ ID NO: 753668 - protein, 14 aa, Homo sapiens
  CDR3 for beta chain variable domain of TCR clone 376834 (TRBV19, TRBJ1-2)
CASSPTGGAGGYTF

SEQ ID NO: 753669 - protein, 14 aa, Homo sapiens
  CDR3 for alpha chain variable domain of TCR clone 376835 (TRAV12-1, TRAJ40)
CVVNRDSGTYKYIF

SEQ ID NO: 753670 - protein, 15 aa, Homo sapiens
  CDR3 for beta chain variable domain of TCR clone 376835 (TRBV11-3, TRBJ2-1)
CASSPGDREGNEQFF

SEQ ID NO: 753671 - protein, 14 aa, Homo sapiens
  CDR3 for alpha chain variable domain of TCR clone 376836 (TRAV8-4, TRAJ48)
CAVSETFGNEKLTF

SEQ ID NO: 753672 - protein, 14 aa, Homo sapiens
  CDR3 for beta chain variable domain of TCR clone 376836 (TRBV13, TRBJ2-7)
CASSLKEASYEQYF

SEQ ID NO: 753673 - protein, 12 aa, Homo sapiens
  CDR3 for alpha chain variable domain of TCR clone 376837 (TRAV30, TRAJ43)
FGTEERGNDMRF

SEQ ID NO: 753674 - protein, 13 aa, Homo sapiens
  CDR3 for beta chain variable domain of TCR clone 376837 (TRBV27, TRBJ2-7)
CASSVSQGYEQYF

SEQ ID NO: 753675 - protein, 15 aa, Homo sapiens
  CDR3 for alpha chain variable domain of TCR clone 376838 (TRAV2, TRAJ44)
CAVEAYTGTASKLTF

SEQ ID NO: 753676 - protein, 17 aa, Homo sapiens
  CDR3 for beta chain variable domain of TCR clone 376838 (TRBV12-4, TRBJ2-1)
CASSPGLARGRINEQFF

SEQ ID NO: 753677 - protein, 14 aa, Homo sapiens
  CDR3 for alpha chain variable domain of TCR clone 376839 (TRAV12-1, TRAJ17)
CVVNYKAAGNKLTV

SEQ ID NO: 753678 - protein, 15 aa, Homo sapiens
  CDR3 for beta chain variable domain of TCR clone 376839 (TRBV7-2, TRBJ2-1)
CASTHGTGIYNEQFF

SEQ ID NO: 753679 - protein, 14 aa, Homo sapiens
  CDR3 for alpha chain variable domain of TCR clone 376840 (TRAV25, TRAJ35)
CARRMEGFGNVLHC

SEQ ID NO: 753680 - protein, 13 aa, Homo sapiens
  CDR3 for beta chain variable domain of TCR clone 376840 (TRBV7-2, TRBJ1-4)
CASSSAGLEKLFF

SEQ ID NO: 753681 - protein, 13 aa, Homo sapiens
  CDR3 for alpha chain variable domain of TCR clone 376841 (TRAV13-2, TRAJ13)
CAERPGGYQKVTF

SEQ ID NO: 753682 - protein, 15 aa, Homo sapiens
  CDR3 for beta chain variable domain of TCR clone 376841 (TRBV4-1, TRBJ1-6)
CASSSATADSSPLHF

SEQ ID NO: 753683 - protein, 12 aa, Homo sapiens
  CDR3 for alpha chain variable domain of TCR clone 376842 (TRAV35, TRAJ49)
CAGWNTGNQVYF

SEQ ID NO: 753684 - protein, 16 aa, Homo sapiens
  CDR3 for beta chain variable domain of TCR clone 376842 (TRBV5-1, TRBJ2-2)
CASSLWDTTNTGEPFF

SEQ ID NO: 753685 - protein, 14 aa, Homo sapiens
  CDR3 for alpha chain variable domain of TCR clone 376843 (TRAV30, TRAJ26)
CGTEIVSYGQNFVF

SEQ ID NO: 753686 - protein, 13 aa, Homo sapiens
  CDR3 for beta chain variable domain of TCR clone 376843 (TRBV19, TRBJ1-3)
CASRLSLGNTIYC

SEQ ID NO: 753687 - protein, 15 aa, Homo sapiens
  CDR3 for alpha chain variable domain of TCR clone 376844 (TRAV27, TRAJ38)
CAGRFNAGNNRKLIW

SEQ ID NO: 753688 - protein, 15 aa, Homo sapiens
  CDR3 for beta chain variable domain of TCR clone 376844 (TRBV20-1, TRBJ2-7)
CSARDRVSGMDEQYF

SEQ ID NO: 753689 - protein, 14 aa, Homo sapiens
  CDR3 for alpha chain variable domain of TCR clone 376845 (TRAV1-2, TRAJ8)
CAVREDTGLQKLVF

SEQ ID NO: 753690 - protein, 15 aa, Homo sapiens
  CDR3 for beta chain variable domain of TCR clone 376845 (TRBV6-3, TRBJ2-7)
CASSSLGTVFYEQYF

SEQ ID NO: 753691 - protein, 18 aa, Homo sapiens
  CDR3 for alpha chain variable domain of TCR clone 376846 (TRAV12-3, TRAJ52)
CAMSRTNAGGTSYGKLTF

SEQ ID NO: 753692 - protein, 15 aa, Homo sapiens
  CDR3 for beta chain variable domain of TCR clone 376846 (TRBV16, TRBJ1-5)
CASSQSGTADQPQHF

SEQ ID NO: 753693 - protein, 17 aa, Homo sapiens
  CDR3 for alpha chain variable domain of TCR clone 376847 (TRAV8-3, TRAJ42)
CCGAGMTYGGSQGNLIF

SEQ ID NO: 753694 - protein, 11 aa, Homo sapiens
  CDR3 for beta chain variable domain of TCR clone 376847 (TRBV7-2, TRBJ2-3)
CASSSSDTQYF

SEQ ID NO: 753695 - protein, 11 aa, Homo sapiens
  CDR3 for alpha chain variable domain of TCR clone 376848 (TRAV17, TRAJ36)
CAPTGANNPFF

SEQ ID NO: 753696 - protein, 19 aa, Homo sapiens
  CDR3 for beta chain variable domain of TCR clone 376848 (TRBV7-2, TRBJ2-3)
CASSFLSRNWGGGTDTQYF

SEQ ID NO: 753697 - protein, 14 aa, Homo sapiens
  CDR3 for alpha chain variable domain of TCR clone 376849 (TRAV1-2, TRAJ8)
CAVREDTGFQKLVV

SEQ ID NO: 753698 - protein, 16 aa, Homo sapiens
  CDR3 for beta chain variable domain of TCR clone 376849 (TRBV12-4, TRBJ1-5)
CASSRPVGGSNQPQHF

SEQ ID NO: 753699 - protein, 18 aa, Homo sapiens
  CDR3 for alpha chain variable domain of TCR clone 376850 (TRAV16, TRAJ52)
CALSGVDAGGASYGKLTF

SEQ ID NO: 753700 - protein, 15 aa, Homo sapiens
  CDR3 for beta chain variable domain of TCR clone 376850 (TRBV11-3, TRBJ2-3)
CASSAGTVVTNTQYF

SEQ ID NO: 753701 - protein, 15 aa, Homo sapiens
  CDR3 for alpha chain variable domain of TCR clone 376851 (TRAV3, TRAJ20)
GAVRGIKFSDYKLSF

SEQ ID NO: 753702 - protein, 15 aa, Homo sapiens
  CDR3 for beta chain variable domain of TCR clone 376851 (TRBV7-9, TRBJ1-6)
CASSSPGRGNSPLHF

SEQ ID NO: 753703 - protein, 11 aa, Homo sapiens
  CDR3 for alpha chain variable domain of TCR clone 376852 (TRAV12-1, TRAJ33)
CVVNMNYQLIW

SEQ ID NO: 753704 - protein, 11 aa, Homo sapiens
  CDR3 for beta chain variable domain of TCR clone 376852 (TRBV10-1, TRBJ2-3)
CASSDSDTHYF

SEQ ID NO: 753705 - protein, 12 aa, Homo sapiens
  CDR3 for alpha chain variable domain of TCR clone 376853 (TRAV1-1, TRAJ30)
CAVRGRDDKVIF

SEQ ID NO: 753706 - protein, 13 aa, Homo sapiens
  CDR3 for beta chain variable domain of TCR clone 376853 (TRBV11-3, TRBJ2-7)
CASSLDKLYEQYF

SEQ ID NO: 753707 - protein, 16 aa, Homo sapiens
  CDR3 for alpha chain variable domain of TCR clone 376854 (TRAV3, TRAJ10)
CAVRDMRAGGGNKLTF

SEQ ID NO: 753708 - protein, 14 aa, Homo sapiens
  CDR3 for beta chain variable domain of TCR clone 376854 (TRBV7-2, TRBJ1-1)
CASSFLTGTTDAFF

SEQ ID NO: 753709 - protein, 13 aa, Homo sapiens
  CDR3 for alpha chain variable domain of TCR clone 376855 (TRAV8-3, TRAJ40)
CAVDPSGTYKYIL

SEQ ID NO: 753710 - protein, 13 aa, Homo sapiens
  CDR3 for beta chain variable domain of TCR clone 376855 (TRBV6-5, TRBJ2-7)
CASSGGSFYEQYF

SEQ ID NO: 753711 - protein, 14 aa, Homo sapiens
  CDR3 for alpha chain variable domain of TCR clone 376856 (TRAV26-1, TRAJ39)
CIVFTNNAGNMLTF

SEQ ID NO: 753712 - protein, 12 aa, Homo sapiens
  CDR3 for beta chain variable domain of TCR clone 376856 (TRBV29-1, TRBJ2-3)
CSVTGGADTQYF

SEQ ID NO: 753713 - protein, 11 aa, Homo sapiens
  CDR3 for alpha chain variable domain of TCR clone 376857 (TRAV39, TRAJ49)
CAVDIITQFYF

SEQ ID NO: 753714 - protein, 14 aa, Homo sapiens
  CDR3 for beta chain variable domain of TCR clone 376857 (TRBV19, TRBJ2-1)
CASPTFVLSGEQFF

SEQ ID NO: 753715 - protein, 14 aa, Homo sapiens
  CDR3 for alpha chain variable domain of TCR clone 376858 (TRAV12-2, TRAJ40)
CAVKIPSGTYKYIF

SEQ ID NO: 753716 - protein, 14 aa, Homo sapiens
  CDR3 for beta chain variable domain of TCR clone 376858 (TRBV13, TRBJ2-5)
CASYRRLAEETQYF

SEQ ID NO: 753717 - protein, 11 aa, Homo sapiens
  CDR3 for alpha chain variable domain of TCR clone 376859 (TRAV12-3, TRAJ41)
CAMNAREAPNF

SEQ ID NO: 753718 - protein, 16 aa, Homo sapiens
  CDR3 for beta chain variable domain of TCR clone 376859 (TRBV7-8, TRBJ2-3)
CASSTEGQREKDTQYF

SEQ ID NO: 753719 - protein, 11 aa, Homo sapiens
  CDR3 for alpha chain variable domain of TCR clone 376860 (TRAV1-2, TRAJ20)
CAVANDYKPSF

SEQ ID NO: 753720 - protein, 18 aa, Homo sapiens
  CDR3 for beta chain variable domain of TCR clone 376860 (TRBV20-1, TRBJ2-6)
CSAETTPTHGSGADVLTF

SEQ ID NO: 753721 - protein, 14 aa, Homo sapiens
  CDR3 for alpha chain variable domain of TCR clone 376861 (TRAV25, TRAJ44)
CAVFPTGTSSKITF

SEQ ID NO: 753722 - protein, 14 aa, Homo sapiens
  CDR3 for beta chain variable domain of TCR clone 376861 (TRBV19, TRBJ1-1)
CASTGHRLNTEAFF

SEQ ID NO: 753723 - protein, 17 aa, Homo sapiens
  CDR3 for alpha chain variable domain of TCR clone 376862 (TRAV3, TRAJ38)
CAVRDCLNAGNNRKRIW

SEQ ID NO: 753724 - protein, 15 aa, Homo sapiens
  CDR3 for beta chain variable domain of TCR clone 376862 (TRBV27, TRBJ2-1)
CASSNGGGSSNEQFF

SEQ ID NO: 753725 - protein, 12 aa, Homo sapiens
  CDR3 for alpha chain variable domain of TCR clone 376863 (TRAV1-2, TRAJ33)
CAALDSNYQLIW

SEQ ID NO: 753726 - protein, 15 aa, Homo sapiens
  CDR3 for beta chain variable domain of TCR clone 376863 (TRBV7-9, TRBJ2-1)
CASSLGWGRANEQFF

SEQ ID NO: 753727 - protein, 11 aa, Homo sapiens
  CDR3 for alpha chain variable domain of TCR clone 376864 (TRAV21, TRAJ34)
CAHYNTDKLIF

SEQ ID NO: 753728 - protein, 15 aa, Homo sapiens
  CDR3 for beta chain variable domain of TCR clone 376864 (TRBV7-3, TRBJ1-6)
CASSLIRDGNSPLHF

SEQ ID NO: 753729 - protein, 11 aa, Homo sapiens
  CDR3 for alpha chain variable domain of TCR clone 376865 (TRAV13-1, TRAJ30)
CAASRDDKIIF

SEQ ID NO: 753730 - protein, 14 aa, Homo sapiens
  CDR3 for beta chain variable domain of TCR clone 376865 (TRBV18, TRBJ2-5)
CASSPGVSQETQYF

SEQ ID NO: 753731 - protein, 12 aa, Homo sapiens
  CDR3 for alpha chain variable domain of TCR clone 376866 (TRAV12-3, TRAJ21)
CAMFNNFNKFYF

SEQ ID NO: 753732 - protein, 12 aa, Homo sapiens
  CDR3 for beta chain variable domain of TCR clone 376866 (TRBV11-2, TRBJ2-2)
CASSLGGGELFF

SEQ ID NO: 753733 - protein, 16 aa, Homo sapiens
  CDR3 for alpha chain variable domain of TCR clone 376867 (TRAV8-3, TRAJ13)
CAVGAYPSGGYQKVTF

SEQ ID NO: 753734 - protein, 16 aa, Homo sapiens
  CDR3 for beta chain variable domain of TCR clone 376867 (TRBV4-2, TRBJ2-3)
CASSQELAGDTDTQYF

SEQ ID NO: 753735 - protein, 13 aa, Homo sapiens
  CDR3 for alpha chain variable domain of TCR clone 376868 (TRAV27, TRAJ56)
CAGKPGANSKLKF

SEQ ID NO: 753736 - protein, 14 aa, Homo sapiens
  CDR3 for beta chain variable domain of TCR clone 376868 (TRBV25-1, TRBJ1-1)
CASTHLGGNTEAFF

SEQ ID NO: 753737 - protein, 12 aa, Homo sapiens
  CDR3 for alpha chain variable domain of TCR clone 376869 (TRAV13-2, TRAJ8)
CAPWLGFQKLVF

SEQ ID NO: 753738 - protein, 17 aa, Homo sapiens
  CDR3 for beta chain variable domain of TCR clone 376869 (TRBV4-1, TRBJ2-7)
CASSRDPLGVRGGEQYF

SEQ ID NO: 753739 - protein, 12 aa, Homo sapiens
  CDR3 for alpha chain variable domain of TCR clone 376870 (TRAV23/DV6, TRAJ24)
CAANDSWGRLQF

SEQ ID NO: 753740 - protein, 16 aa, Homo sapiens
  CDR3 for beta chain variable domain of TCR clone 376870 (TRBV12-4, TRBJ2-5)
CASSLSTSGGKETQYF

SEQ ID NO: 753741 - protein, 10 aa, Homo sapiens
  CDR3 for alpha chain variable domain of TCR clone 376871 (TRAV2, TRAJ34)
CAVVNDKLIF

SEQ ID NO: 753742 - protein, 12 aa, Homo sapiens
  CDR3 for beta chain variable domain of TCR clone 376871 (TRBV11-2, TRBJ2-1)
CASSPGNNEQFF

SEQ ID NO: 753743 - protein, 14 aa, Homo sapiens
  CDR3 for alpha chain variable domain of TCR clone 376872 (TRAV29/DV5, TRAJ32)
CAAAYGGATNKLIF

SEQ ID NO: 753744 - protein, 11 aa, Homo sapiens
  CDR3 for beta chain variable domain of TCR clone 376872 (TRBV11-2, TRBJ2-2)
CASILPGELFF

SEQ ID NO: 753745 - protein, 11 aa, Homo sapiens
  CDR3 for alpha chain variable domain of TCR clone 376873 (TRAV30, TRAJ23)
CGTEITGKLIF

SEQ ID NO: 753746 - protein, 16 aa, Homo sapiens
  CDR3 for beta chain variable domain of TCR clone 376873 (TRBV7-2, TRBJ2-7)
CASTSQAASGGYEQYF

SEQ ID NO: 753747 - protein, 15 aa, Homo sapiens
  CDR3 for alpha chain variable domain of TCR clone 376874 (TRAV8-3, TRAJ41)
CAVGSNSNSGYAPNF

SEQ ID NO: 753748 - protein, 17 aa, Homo sapiens
  CDR3 for beta chain variable domain of TCR clone 376874 (TRBV25-1, TRBJ2-1)
CASSAYGQGRGAYEQFF

SEQ ID NO: 753749 - protein, 14 aa, Homo sapiens
  CDR3 for alpha chain variable domain of TCR clone 376875 (TRAV13-1, TRAJ35)
CAASKGGVGNVLHC

SEQ ID NO: 753750 - protein, 12 aa, Homo sapiens
  CDR3 for beta chain variable domain of TCR clone 376875 (TRBV7-9, TRBJ2-7)
CASSIKREEQYF

SEQ ID NO: 753751 - protein, 12 aa, Homo sapiens
  CDR3 for alpha chain variable domain of TCR clone 376876 (TRAV13-1, TRAJ23)
CAASKKGGKLIF

SEQ ID NO: 753752 - protein, 12 aa, Homo sapiens
  CDR3 for beta chain variable domain of TCR clone 376876 (TRBV7-9, TRBJ1-5)
CASSPQGQPQHF

SEQ ID NO: 753753 - protein, 15 aa, Homo sapiens
  CDR3 for alpha chain variable domain of TCR clone 376877 (TRAV12-1, TRAJ44)
CVAALPTGTASNLTF

SEQ ID NO: 753754 - protein, 13 aa, Homo sapiens
  CDR3 for beta chain variable domain of TCR clone 376877 (TRBV6-5, TRBJ2-5)
CASSPQGGETQYF

SEQ ID NO: 753755 - protein, 13 aa, Homo sapiens
  CDR3 for alpha chain variable domain of TCR clone 376878 (TRAV16, TRAJ27)
CALRRTNAGKSTF

SEQ ID NO: 753756 - protein, 15 aa, Homo sapiens
  CDR3 for beta chain variable domain of TCR clone 376878 (TRBV18, TRBJ2-1)
CASSLPSASYNEQFF

SEQ ID NO: 753757 - protein, 16 aa, Homo sapiens
  CDR3 for alpha chain variable domain of TCR clone 376879 (TRAV8-3, TRAJ38)
CAVGASNAGNNRKLIW

SEQ ID NO: 753758 - protein, 16 aa, Homo sapiens
  CDR3 for beta chain variable domain of TCR clone 376879 (TRBV5-4, TRBJ2-3)
CASQQPGAGGADTQYF

SEQ ID NO: 753759 - protein, 11 aa, Homo sapiens
  CDR3 for alpha chain variable domain of TCR clone 376880 (TRAV2, TRAJ13)
CASVCYQKVTF

SEQ ID NO: 753760 - protein, 15 aa, Homo sapiens
  CDR3 for beta chain variable domain of TCR clone 376880 (TRBV6-1, TRBJ2-2)
CASSRLRGDTGELFF

SEQ ID NO: 753761 - protein, 12 aa, Homo sapiens
  CDR3 for alpha chain variable domain of TCR clone 376881 (TRAV13-1, TRAJ21)
CAAKEGFNKFYF

SEQ ID NO: 753762 - protein, 16 aa, Homo sapiens
  CDR3 for beta chain variable domain of TCR clone 376881 (TRBV7-2, TRBJ2-6)
CARSLAGRSGANGLTF

SEQ ID NO: 753763 - protein, 14 aa, Homo sapiens
  CDR3 for alpha chain variable domain of TCR clone 376882 (TRAV9-2, TRAJ39)
CALYIYNAGNMLTF

SEQ ID NO: 753764 - protein, 17 aa, Homo sapiens
  CDR3 for beta chain variable domain of TCR clone 376882 (TRBV7-9, TRBJ2-7)
CASSFDGSRGGAYEQYF

SEQ ID NO: 753765 - protein, 13 aa, Homo sapiens
  CDR3 for alpha chain variable domain of TCR clone 376883 (TRAV13-1, TRAJ10)
CAAAEGGVNKLTF

SEQ ID NO: 753766 - protein, 15 aa, Homo sapiens
  CDR3 for beta chain variable domain of TCR clone 376883 (TRBV7-8, TRBJ2-2)
CASSLDQGWAGELFF

SEQ ID NO: 753767 - protein, 15 aa, Homo sapiens
  CDR3 for alpha chain variable domain of TCR clone 376884 (TRAV26-1, TRAJ9)
CIVRESNTGGFKTIF

SEQ ID NO: 753768 - protein, 16 aa, Homo sapiens
  CDR3 for beta chain variable domain of TCR clone 376884 (TRBV7-3, TRBJ2-2)
CASSLKRGTLSGELFF

SEQ ID NO: 753769 - protein, 16 aa, Homo sapiens
  CDR3 for alpha chain variable domain of TCR clone 376885 (TRAV38-2/DV8, TRAJ45)
CAYRGNSGGGADGLTF

SEQ ID NO: 753770 - protein, 17 aa, Homo sapiens
  CDR3 for beta chain variable domain of TCR clone 376885 (TRBV11-3, TRBJ2-5)
WASSLPGVRGGKETQYF

SEQ ID NO: 753771 - protein, 13 aa, Homo sapiens
  CDR3 for alpha chain variable domain of TCR clone 376886 (TRAV22, TRAJ29)
CAVGGSGNTPLVF

SEQ ID NO: 753772 - protein, 14 aa, Homo sapiens
  CDR3 for beta chain variable domain of TCR clone 376886 (TRBV5-1, TRBJ2-7)
CVSSRGESLYEQYF

SEQ ID NO: 753773 - protein, 14 aa, Homo sapiens
  CDR3 for alpha chain variable domain of TCR clone 376887 (TRAV14/DV4, TRAJ34)
CAMREGRPHRQAHL

SEQ ID NO: 753774 - protein, 14 aa, Homo sapiens
  CDR3 for beta chain variable domain of TCR clone 376887 (TRBV19, TRBJ2-1)
CASPTFVLSGGQFF

SEQ ID NO: 753775 - protein, 17 aa, Homo sapiens
  CDR3 for alpha chain variable domain of TCR clone 376888 (TRAV3, TRAJ37)
CAVSVYLGSSNTGKLIF

SEQ ID NO: 753776 - protein, 14 aa, Homo sapiens
  CDR3 for beta chain variable domain of TCR clone 376888 (TRBV19, TRBJ2-5)
CASSMTGQQETKYF

SEQ ID NO: 753777 - protein, 13 aa, Homo sapiens
  CDR3 for alpha chain variable domain of TCR clone 376889 (TRAV27, TRAJ45)
CRSSGGGADGLTF

SEQ ID NO: 753778 - protein, 16 aa, Homo sapiens
  CDR3 for beta chain variable domain of TCR clone 376889 (TRBV11-2, TRBJ2-1)
CQQLIAPGVEYNEQFF

SEQ ID NO: 753779 - protein, 12 aa, Homo sapiens
  CDR3 for alpha chain variable domain of TCR clone 376890 (TRAV12-3, TRAJ17)
CAMTLTGNKLTF

SEQ ID NO: 753780 - protein, 13 aa, Homo sapiens
  CDR3 for beta chain variable domain of TCR clone 376890 (TRBV20-1, TRBJ1-1)
CSAPPGGHIEAFF

SEQ ID NO: 753781 - protein, 11 aa, Homo sapiens
  CDR3 for alpha chain variable domain of TCR clone 376891 (TRAV12-1, TRAJ34)
CVVNKGRELIF

SEQ ID NO: 753782 - protein, 14 aa, Homo sapiens
  CDR3 for beta chain variable domain of TCR clone 376891 (TRBV4-1, TRBJ2-2)
CASSQAVNTGELFF

SEQ ID NO: 753783 - protein, 13 aa, Homo sapiens
  CDR3 for alpha chain variable domain of TCR clone 376892 (TRAV13-1, TRAJ5)
CAASDTGRRALTF

SEQ ID NO: 753784 - protein, 13 aa, Homo sapiens
  CDR3 for beta chain variable domain of TCR clone 376892 (TRBV15, TRBJ1-2)
CATSRGQLYGYTF

SEQ ID NO: 753785 - protein, 12 aa, Homo sapiens
  CDR3 for alpha chain variable domain of TCR clone 376893 (TRAV23/DV6, TRAJ30)
CAASKGDDKLIF

SEQ ID NO: 753786 - protein, 15 aa, Homo sapiens
  CDR3 for beta chain variable domain of TCR clone 376893 (TRBV20-1, TRBJ2-7)
CSARDRVSGMDEQYF

SEQ ID NO: 753787 - protein, 16 aa, Homo sapiens
  CDR3 for alpha chain variable domain of TCR clone 376894 (TRAV21, TRAJ37)
CAVRPRGSSNTGKPIF

SEQ ID NO: 753788 - protein, 16 aa, Homo sapiens
  CDR3 for beta chain variable domain of TCR clone 376894 (TRBV2, TRBJ2-1)
CASSVGGSLSYNEQFF

SEQ ID NO: 753789 - protein, 15 aa, Homo sapiens
  CDR3 for alpha chain variable domain of TCR clone 376895 (TRAV17, TRAJ35)
CATAFVIGFGNVLHC

SEQ ID NO: 753790 - protein, 16 aa, Homo sapiens
  CDR3 for beta chain variable domain of TCR clone 376895 (TRBV11-2, TRBJ2-7)
CASSPLAVGPRYEQYF

SEQ ID NO: 753791 - protein, 13 aa, Homo sapiens
  CDR3 for alpha chain variable domain of TCR clone 376896 (TRAV17, TRAJ5)
CALRGTGRRALTF

SEQ ID NO: 753792 - protein, 15 aa, Homo sapiens
  CDR3 for beta chain variable domain of TCR clone 376896 (TRBV9, TRBJ1-6)
CASSVAGTGDSPLRF

SEQ ID NO: 753793 - protein, 19 aa, Homo sapiens
  CDR3 for alpha chain variable domain of TCR clone 376897 (TRAV26-1, TRAJ22)
CCVLLHRWVFSGSARHLTF

SEQ ID NO: 753794 - protein, 19 aa, Homo sapiens
  CDR3 for beta chain variable domain of TCR clone 376897 (TRBV19, TRBJ2-5)
CASSIGQVTDFFLGETQYF

SEQ ID NO: 753795 - protein, 13 aa, Homo sapiens
  CDR3 for alpha chain variable domain of TCR clone 376898 (TRAV16, TRAJ31)
CALSAHNNARLMF

SEQ ID NO: 753796 - protein, 17 aa, Homo sapiens
  CDR3 for beta chain variable domain of TCR clone 376898 (TRBV12-4, TRBJ2-1)
CASSPGLAGGRINEQFL

SEQ ID NO: 753797 - protein, 13 aa, Homo sapiens
  CDR3 for alpha chain variable domain of TCR clone 376899 (TRAV35, TRAJ40)
CAGQLSGTYKYTF

SEQ ID NO: 753798 - protein, 14 aa, Homo sapiens
  CDR3 for beta chain variable domain of TCR clone 376899 (TRBV3-1, TRBJ2-5)
CASSLQLAGETQYF

SEQ ID NO: 753799 - protein, 12 aa, Homo sapiens
  CDR3 for alpha chain variable domain of TCR clone 376900 (TRAV8-1, TRAJ26)
CAVDNYGQNFVF

SEQ ID NO: 753800 - protein, 15 aa, Homo sapiens
  CDR3 for beta chain variable domain of TCR clone 376900 (TRBV20-1, TRBJ1-1)
CSASWDRFLNTEAFF

SEQ ID NO: 753801 - protein, 17 aa, Homo sapiens
  CDR3 for alpha chain variable domain of TCR clone 376901 (TRAV12-2, TRAJ6)
CAPQGPPRAGGSYIPTF

SEQ ID NO: 753802 - protein, 16 aa, Homo sapiens
  CDR3 for beta chain variable domain of TCR clone 376901 (TRBV19, TRBJ2-2)
CASSNARASNTGELFF

SEQ ID NO: 753803 - protein, 15 aa, Homo sapiens
  CDR3 for alpha chain variable domain of TCR clone 376902 (TRAV21, TRAJ53)
CATLNSGGSNYKLTF

SEQ ID NO: 753804 - protein, 16 aa, Homo sapiens
  CDR3 for beta chain variable domain of TCR clone 376902 (TRBV12-5, TRBJ2-5)
CASGPRTSGNQETEYF

SEQ ID NO: 753805 - protein, 14 aa, Homo sapiens
  CDR3 for alpha chain variable domain of TCR clone 376903 (TRAV12-1, TRAJ17)
CVVNYKAASNKLTF

SEQ ID NO: 753806 - protein, 15 aa, Homo sapiens
  CDR3 for beta chain variable domain of TCR clone 376903 (TRBV11-3, TRBJ2-3)
CASLKDGREGDTQYF

SEQ ID NO: 753807 - protein, 15 aa, Homo sapiens
  CDR3 for alpha chain variable domain of TCR clone 376904 (TRAV8-1, TRAJ34)
CAVNSRTYNTDKLIF

SEQ ID NO: 753808 - protein, 16 aa, Homo sapiens
  CDR3 for beta chain variable domain of TCR clone 376904 (TRBV19, TRBJ2-2)
CASRSPGTGATGELFF

SEQ ID NO: 753809 - protein, 12 aa, Homo sapiens
  CDR3 for alpha chain variable domain of TCR clone 376905 (TRAV1-2, TRAJ24)
CAVGGSWGKIQF

SEQ ID NO: 753810 - protein, 15 aa, Homo sapiens
  CDR3 for beta chain variable domain of TCR clone 376905 (TRBV6-1, TRBJ2-7)
CASSEGVGNPYEQYF

SEQ ID NO: 753811 - protein, 13 aa, Homo sapiens
  CDR3 for alpha chain variable domain of TCR clone 376906 (TRAV8-6, TRAJ24)
CAVSSDSWGKLQF

SEQ ID NO: 753812 - protein, 16 aa, Homo sapiens
  CDR3 for beta chain variable domain of TCR clone 376906 (TRBV4-1, TRBJ1-1)
CASSSMSERPNTEAFF

SEQ ID NO: 753813 - protein, 13 aa, Homo sapiens
  CDR3 for alpha chain variable domain of TCR clone 376907 (TRAV27, TRAJ29)
CAGAHSGNTTLVF

SEQ ID NO: 753814 - protein, 15 aa, Homo sapiens
  CDR3 for beta chain variable domain of TCR clone 376907 (TRBV15, TRBJ1-4)
CATSRDMGSYEKLFF

SEQ ID NO: 753815 - protein, 14 aa, Homo sapiens
  CDR3 for alpha chain variable domain of TCR clone 376908 (TRAV30, TRAJ33)
CGTVAPRSNYQSIW

SEQ ID NO: 753816 - protein, 16 aa, Homo sapiens
  CDR3 for beta chain variable domain of TCR clone 376908 (TRBV3-1, TRBJ2-5)
CASSPGQFNGFGTQYF

SEQ ID NO: 753817 - protein, 15 aa, Homo sapiens
  CDR3 for alpha chain variable domain of TCR clone 376909 (TRAV38-1, TRAJ58)
CAFMKQETSGSRLTF

SEQ ID NO: 753818 - protein, 15 aa, Homo sapiens
  CDR3 for beta chain variable domain of TCR clone 376909 (TRBV5-8, TRBJ2-2)
CASSLDRGATGELFF

SEQ ID NO: 753819 - protein, 16 aa, Homo sapiens
  CDR3 for alpha chain variable domain of TCR clone 376910 (TRAV30, TRAJ24)
CGTEIVDADSWGKFQV

SEQ ID NO: 753820 - protein, 17 aa, Homo sapiens
  CDR3 for beta chain variable domain of TCR clone 376910 (TRBV24-1, TRBJ2-4)
CATSDAEARGVRNIQYF

SEQ ID NO: 753821 - protein, 15 aa, Homo sapiens
  CDR3 for alpha chain variable domain of TCR clone 376911 (TRAV17, TRAJ57)
CATGPSQGGSEKPVF

SEQ ID NO: 753822 - protein, 12 aa, Homo sapiens
  CDR3 for beta chain variable domain of TCR clone 376911 (TRBV11-2, TRBJ2-2)
CASSLGGGELFF

SEQ ID NO: 753823 - protein, 11 aa, Homo sapiens
  CDR3 for alpha chain variable domain of TCR clone 376912 (TRAV5, TRAJ3)
CGGSSASKIIF

SEQ ID NO: 753824 - protein, 11 aa, Homo sapiens
  CDR3 for beta chain variable domain of TCR clone 376912 (TRBV29-1, TRBJ2-5)
CSEDRTGTQYF

SEQ ID NO: 753825 - protein, 14 aa, Homo sapiens
  CDR3 for alpha chain variable domain of TCR clone 376913 (TRAV12-1, TRAJ3)
CVVRGDSSASKIIF

SEQ ID NO: 753826 - protein, 13 aa, Homo sapiens
  CDR3 for beta chain variable domain of TCR clone 376913 (TRBV4-1, TRBJ2-1)
CASSLALVNEQFF

SEQ ID NO: 753827 - protein, 16 aa, Homo sapiens
  CDR3 for alpha chain variable domain of TCR clone 376914 (TRAV13-1, TRAJ18)
CAASRMRGSTLGRLYF

SEQ ID NO: 753828 - protein, 16 aa, Homo sapiens
  CDR3 for beta chain variable domain of TCR clone 376914 (TRBV27, TRBJ1-1)
YASSSRGRTGYTEAFF

SEQ ID NO: 753829 - protein, 14 aa, Homo sapiens
  CDR3 for alpha chain variable domain of TCR clone 376915 (TRAV1-2, TRAJ8)
CAVREDTGFQKLGF

SEQ ID NO: 753830 - protein, 16 aa, Homo sapiens
  CDR3 for beta chain variable domain of TCR clone 376915 (TRBV20-1, TRBJ2-1)
CSARDLKQGMNNEQFF

SEQ ID NO: 753831 - protein, 14 aa, Homo sapiens
  CDR3 for alpha chain variable domain of TCR clone 376916 (TRAV13-1, TRAJ35)
CAASKGGFGNVLHC

SEQ ID NO: 753832 - protein, 16 aa, Homo sapiens
  CDR3 for beta chain variable domain of TCR clone 376916 (TRBV5-4, TRBJ2-1)
CASSLALAGAYNEQFF

SEQ ID NO: 753833 - protein, 16 aa, Homo sapiens
  CDR3 for alpha chain variable domain of TCR clone 376917 (TRAV30, TRAJ24)
CGTEIVDADSWGKFQF

SEQ ID NO: 753834 - protein, 15 aa, Homo sapiens
  CDR3 for beta chain variable domain of TCR clone 376917 (TRBV7-8, TRBJ1-5)
CASSLERRGLEPQHF

SEQ ID NO: 753835 - protein, 15 aa, Homo sapiens
  CDR3 for alpha chain variable domain of TCR clone 376918 (TRAV14/DV4, TRAJ22)
CAMSRLSGSTRQLTF

SEQ ID NO: 753836 - protein, 15 aa, Homo sapiens
  CDR3 for beta chain variable domain of TCR clone 376918 (TRBV28, TRBJ2-5)
CASSFRQGALETQYF

SEQ ID NO: 753837 - protein, 14 aa, Homo sapiens
  CDR3 for alpha chain variable domain of TCR clone 376919 (TRAV1-2, TRAJ16)
FAVNRFSDGQKLLF

SEQ ID NO: 753838 - protein, 16 aa, Homo sapiens
  CDR3 for beta chain variable domain of TCR clone 376919 (TRBV7-3, TRBJ2-2)
CASSLKRGTLSGELFF

SEQ ID NO: 753839 - protein, 14 aa, Homo sapiens
  CDR3 for alpha chain variable domain of TCR clone 376920 (TRAV21, TRAJ45)
CAVVSGGGADGLTF

SEQ ID NO: 753840 - protein, 14 aa, Homo sapiens
  CDR3 for beta chain variable domain of TCR clone 376920 (TRBV20-1, TRBJ2-3)
CSALRLEGADTQYF

SEQ ID NO: 753841 - protein, 13 aa, Homo sapiens
  CDR3 for alpha chain variable domain of TCR clone 376921 (TRAV30, TRAJ24)
CGTVTDSWGKLQF

SEQ ID NO: 753842 - protein, 15 aa, Homo sapiens
  CDR3 for beta chain variable domain of TCR clone 376921 (TRBV6-3, TRBJ2-7)
CASSSPGTVFYEQYF

SEQ ID NO: 753843 - protein, 14 aa, Homo sapiens
  CDR3 for alpha chain variable domain of TCR clone 376922 (TRAV1-2, TRAJ16)
CAVNRFSDGKKLLF

SEQ ID NO: 753844 - protein, 17 aa, Homo sapiens
  CDR3 for beta chain variable domain of TCR clone 376922 (TRBV20-1, TRBJ2-1)
CSASSSGLAGSYNEQFF

SEQ ID NO: 753845 - protein, 14 aa, Homo sapiens
  CDR3 for alpha chain variable domain of TCR clone 376923 (TRAV12-2, TRAJ13)
CAVKQTGGYQKVTF

SEQ ID NO: 753846 - protein, 15 aa, Homo sapiens
  CDR3 for beta chain variable domain of TCR clone 376923 (TRBV27, TRBJ2-1)
CASSNGGVSSNEQFF

SEQ ID NO: 753847 - protein, 15 aa, Homo sapiens
  CDR3 for alpha chain variable domain of TCR clone 376924 (TRAV8-3, TRAJ45)
CASSYSGGGADGLTF

SEQ ID NO: 753848 - protein, 15 aa, Homo sapiens
  CDR3 for beta chain variable domain of TCR clone 376924 (TRBV19, TRBJ1-2)
CASSVGQVLNYGYTF

SEQ ID NO: 753849 - protein, 10 aa, Homo sapiens
  CDR3 for alpha chain variable domain of TCR clone 376925 (TRAV8-4, TRAJ43)
CAVSADDMRF

SEQ ID NO: 753850 - protein, 16 aa, Homo sapiens
  CDR3 for beta chain variable domain of TCR clone 376925 (TRBV7-2, TRBJ1-3)
CASSRLEASSGNTIYF

SEQ ID NO: 753851 - protein, 14 aa, Homo sapiens
  CDR3 for alpha chain variable domain of TCR clone 376926 (TRAV12-2, TRAJ17)
FAVLFKAAGNKLTF

SEQ ID NO: 753852 - protein, 14 aa, Homo sapiens
  CDR3 for beta chain variable domain of TCR clone 376926 (TRBV2, TRBJ1-5)
CASGPDRGSEPQHF

SEQ ID NO: 753853 - protein, 16 aa, Homo sapiens
  CDR3 for alpha chain variable domain of TCR clone 376927 (TRAV12-2, TRAJ45)
CAVKRNPGGGADGLTF

SEQ ID NO: 753854 - protein, 15 aa, Homo sapiens
  CDR3 for beta chain variable domain of TCR clone 376927 (TRBV11-2, TRBJ2-1)
CASSSPSTRYNEQFF

SEQ ID NO: 753855 - protein, 15 aa, Homo sapiens
  CDR3 for alpha chain variable domain of TCR clone 376928 (TRAV21, TRAJ24)
CAARSSTYSWGKLQF

SEQ ID NO: 753856 - protein, 13 aa, Homo sapiens
  CDR3 for beta chain variable domain of TCR clone 376928 (TRBV11-2, TRBJ2-5)
CASSSTGEDTQYF

SEQ ID NO: 753857 - protein, 16 aa, Homo sapiens
  CDR3 for alpha chain variable domain of TCR clone 376929 (TRAV1-2, TRAJ10)
CAVRGVLTGVGNKLTF

SEQ ID NO: 753858 - protein, 15 aa, Homo sapiens
  CDR3 for beta chain variable domain of TCR clone 376929 (TRBV4-1, TRBJ1-4)
CASSDTGGTNEKLFF

SEQ ID NO: 753859 - protein, 17 aa, Homo sapiens
  CDR3 for alpha chain variable domain of TCR clone 376930 (TRAV17, TRAJ28)
CATDPRRGGAGSYQLTF

SEQ ID NO: 753860 - protein, 14 aa, Homo sapiens
  CDR3 for beta chain variable domain of TCR clone 376930 (TRBV19, TRBJ2-1)
CASPTFVLSGEQFF

SEQ ID NO: 753861 - protein, 15 aa, Homo sapiens
  CDR3 for alpha chain variable domain of TCR clone 376931 (TRAV3, TRAJ30)
CAVRDEYGRDDKIIF

SEQ ID NO: 753862 - protein, 16 aa, Homo sapiens
  CDR3 for beta chain variable domain of TCR clone 376931 (TRBV5-1, TRBJ2-5)
GASSLANHRGRETQYV

SEQ ID NO: 753863 - protein, 14 aa, Homo sapiens
  CDR3 for alpha chain variable domain of TCR clone 376932 (TRAV17, TRAJ16)
CATADFSDGQKLIF

SEQ ID NO: 753864 - protein, 15 aa, Homo sapiens
  CDR3 for beta chain variable domain of TCR clone 376932 (TRBV18, TRBJ2-1)
CASAPPSASYNEQFF

SEQ ID NO: 753865 - protein, 12 aa, Homo sapiens
  CDR3 for alpha chain variable domain of TCR clone 376933 (TRAV29/DV5, TRAJ15)
CASNQAGTALIF

SEQ ID NO: 753866 - protein, 11 aa, Homo sapiens
  CDR3 for beta chain variable domain of TCR clone 376933 (TRBV11-2, TRBJ2-2)
CASSLPGELFF

SEQ ID NO: 753867 - protein, 14 aa, Homo sapiens
  CDR3 for alpha chain variable domain of TCR clone 376934 (TRAV12-2, TRAJ13)
CAVKETGGYQKVTF

SEQ ID NO: 753868 - protein, 16 aa, Homo sapiens
  CDR3 for beta chain variable domain of TCR clone 376934 (TRBV27, TRBJ2-1)
CASSNGGGPPAMSSSS

SEQ ID NO: 753869 - protein, 15 aa, Homo sapiens
  CDR3 for alpha chain variable domain of TCR clone 376935 (TRAV26-1, TRAJ37)
CIVRVANGNTGKLIF

SEQ ID NO: 753870 - protein, 12 aa, Homo sapiens
  CDR3 for beta chain variable domain of TCR clone 376935 (TRBV12-4, TRBJ1-1)
CASSLVDTEAFF

SEQ ID NO: 753871 - protein, 14 aa, Homo sapiens
  CDR3 for alpha chain variable domain of TCR clone 376936 (TRAV17, TRAJ21)
CATDRGNNFNKFYF

SEQ ID NO: 753872 - protein, 17 aa, Homo sapiens
  CDR3 for beta chain variable domain of TCR clone 376936 (TRBV6-5, TRBJ2-5)
CASRDPDRVTSFETQYF

SEQ ID NO: 753873 - protein, 14 aa, Homo sapiens
  CDR3 for alpha chain variable domain of TCR clone 376937 (TRAV26-2, TRAJ38)
CILYNAGNNRKMIW

SEQ ID NO: 753874 - protein, 13 aa, Homo sapiens
  CDR3 for beta chain variable domain of TCR clone 376937 (TRBV6-6, TRBJ2-3)
CASSQGGRDTQYF

SEQ ID NO: 753875 - protein, 13 aa, Homo sapiens
  CDR3 for alpha chain variable domain of TCR clone 376938 (TRAV8-3, TRAJ44)
CAVVPGTASKLTF

SEQ ID NO: 753876 - protein, 13 aa, Homo sapiens
  CDR3 for beta chain variable domain of TCR clone 376938 (TRBV12-4, TRBJ2-7)
CASSFVRGYEQYF

SEQ ID NO: 753877 - protein, 15 aa, Homo sapiens
  CDR3 for alpha chain variable domain of TCR clone 376939 (TRAV23/DV6, TRAJ18)
CTARYRGSTLGRLYF

SEQ ID NO: 753878 - protein, 15 aa, Homo sapiens
  CDR3 for beta chain variable domain of TCR clone 376939 (TRBV20-1, TRBJ2-7)
CSARDRVSGMDEQYF

SEQ ID NO: 753879 - protein, 14 aa, Homo sapiens
  CDR3 for alpha chain variable domain of TCR clone 376940 (TRAV1-2, TRAJ16)
CAVNRFSDGQKLLF

SEQ ID NO: 753880 - protein, 14 aa, Homo sapiens
  CDR3 for beta chain variable domain of TCR clone 376940 (TRBV5-1, TRBJ2-7)
CASSFRDTGSVQYF

SEQ ID NO: 753881 - protein, 10 aa, Homo sapiens
  CDR3 for alpha chain variable domain of TCR clone 376941 (TRAV30, TRAJ48)
CGIGDEKLTF

SEQ ID NO: 753882 - protein, 14 aa, Homo sapiens
  CDR3 for beta chain variable domain of TCR clone 376941 (TRBV7-6, TRBJ2-3)
CASSVAGGTDTKYF

SEQ ID NO: 753883 - protein, 13 aa, Homo sapiens
  CDR3 for alpha chain variable domain of TCR clone 376942 (TRAV12-1, TRAJ6)
CVVFPGGSYIPTF

SEQ ID NO: 753884 - protein, 16 aa, Homo sapiens
  CDR3 for beta chain variable domain of TCR clone 376942 (TRBV7-7, TRBJ2-1)
CASSLASGTSYNEQFF

SEQ ID NO: 753885 - protein, 15 aa, Homo sapiens
  CDR3 for alpha chain variable domain of TCR clone 376943 (TRAV17, TRAJ35)
CATAFVIGFGNVLHC

SEQ ID NO: 753886 - protein, 13 aa, Homo sapiens
  CDR3 for beta chain variable domain of TCR clone 376943 (TRBV20-1, TRBJ1-6)
CSAPLGVGSPLHF

SEQ ID NO: 753887 - protein, 15 aa, Homo sapiens
  CDR3 for alpha chain variable domain of TCR clone 376944 (TRAV20, TRAJ53)
CAVEASGGSNYKLTF

SEQ ID NO: 753888 - protein, 16 aa, Homo sapiens
  CDR3 for beta chain variable domain of TCR clone 376944 (TRBV6-1, TRBJ2-1)
CASILRQGSSYNEQFF

SEQ ID NO: 753889 - protein, 13 aa, Homo sapiens
  CDR3 for alpha chain variable domain of TCR clone 376945 (TRAV13-1, TRAJ40)
CSARTSGTYKYIL

SEQ ID NO: 753890 - protein, 17 aa, Homo sapiens
  CDR3 for beta chain variable domain of TCR clone 376945 (TRBV4-1, TRBJ2-3)
CASSQGYVSGGTDTQYF

SEQ ID NO: 753891 - protein, 16 aa, Homo sapiens
  CDR3 for alpha chain variable domain of TCR clone 376946 (TRAV2, TRAJ20)
TTVLWSFRSNDYKLSF

SEQ ID NO: 753892 - protein, 12 aa, Homo sapiens
  CDR3 for beta chain variable domain of TCR clone 376946 (TRBV7-6, TRBJ2-3)
CASSTGRDTQYF

SEQ ID NO: 753893 - protein, 15 aa, Homo sapiens
  CDR3 for alpha chain variable domain of TCR clone 376947 (TRAV1-1, TRAJ24)
CALSGGTDSWVKFQF

SEQ ID NO: 753894 - protein, 16 aa, Homo sapiens
  CDR3 for beta chain variable domain of TCR clone 376947 (TRBV2, TRBJ2-7)
CASSEPWTGPSYEQYF

SEQ ID NO: 753895 - protein, 13 aa, Homo sapiens
  CDR3 for alpha chain variable domain of TCR clone 376948 (TRAV12-2, TRAJ18)
CAVRGSTLGRLYF

SEQ ID NO: 753896 - protein, 17 aa, Homo sapiens
  CDR3 for beta chain variable domain of TCR clone 376948 (TRBV20-1, TRBJ2-1)
CSAPPRLAGTRYNEQFF

SEQ ID NO: 753897 - protein, 12 aa, Homo sapiens
  CDR3 for alpha chain variable domain of TCR clone 376949 (TRAV3, TRAJ29)
CAVRSGNTPLVF

SEQ ID NO: 753898 - protein, 11 aa, Homo sapiens
  CDR3 for beta chain variable domain of TCR clone 376949 (TRBV12-4, TRBJ2-3)
CASTATDTQYF

SEQ ID NO: 753899 - protein, 11 aa, Homo sapiens
  CDR3 for alpha chain variable domain of TCR clone 376950 (TRAV35, TRAJ20)
CAGQLAYKLSF

SEQ ID NO: 753900 - protein, 13 aa, Homo sapiens
  CDR3 for beta chain variable domain of TCR clone 376950 (TRBV7-2, TRBJ2-2)
CASSLAVTGELFF

SEQ ID NO: 753901 - protein, 15 aa, Homo sapiens
  CDR3 for alpha chain variable domain of TCR clone 376951 (TRAV8-3, TRAJ37)
CSVGARASNTGKLIF

SEQ ID NO: 753902 - protein, 15 aa, Homo sapiens
  CDR3 for beta chain variable domain of TCR clone 376951 (TRBV5-4, TRBJ2-3)
CASSLAGRVTDTQYF

SEQ ID NO: 753903 - protein, 14 aa, Homo sapiens
  CDR3 for alpha chain variable domain of TCR clone 376952 (TRAV17, TRAJ16)
CATADFSDGQKLLF

SEQ ID NO: 753904 - protein, 13 aa, Homo sapiens
  CDR3 for beta chain variable domain of TCR clone 376952 (TRBV14, TRBJ1-1)
CASSREFGTEAFF

SEQ ID NO: 753905 - protein, 16 aa, Homo sapiens
  CDR3 for alpha chain variable domain of TCR clone 376953 (TRAV12-3, TRAJ53)
CAMSPGSGGSNYKLTF

SEQ ID NO: 753906 - protein, 16 aa, Homo sapiens
  CDR3 for beta chain variable domain of TCR clone 376953 (TRBV19, TRBJ2-3)
CASSPGAASRTDTQYF

SEQ ID NO: 753907 - protein, 14 aa, Homo sapiens
  CDR3 for alpha chain variable domain of TCR clone 376954 (TRAV1-2, TRAJ8)
CAVREDTGFQKLVF

SEQ ID NO: 753908 - protein, 16 aa, Homo sapiens
  CDR3 for beta chain variable domain of TCR clone 376954 (TRBV4-1, TRBJ1-3)
CASSQDELLAGNTIYF

SEQ ID NO: 753909 - protein, 11 aa, Homo sapiens
  CDR3 for alpha chain variable domain of TCR clone 376955 (TRAV1-1, TRAJ23)
CAVRQGGKLIF

SEQ ID NO: 753910 - protein, 20 aa, Homo sapiens
  CDR3 for beta chain variable domain of TCR clone 376955 (TRBV7-8, TRBJ2-2)
WASSHLFPGPTIHITGELFF

SEQ ID NO: 753911 - protein, 17 aa, Homo sapiens
  CDR3 for alpha chain variable domain of TCR clone 376956 (TRAV23/DV6, TRAJ57)
CAASSSLSQGGSEKLVF

SEQ ID NO: 753912 - protein, 14 aa, Homo sapiens
  CDR3 for beta chain variable domain of TCR clone 376956 (TRBV25-1, TRBJ1-1)
CASTHLGGNTEAFF

SEQ ID NO: 753913 - protein, 14 aa, Homo sapiens
  CDR3 for alpha chain variable domain of TCR clone 376957 (TRAV12-1, TRAJ12)
CVVNGRDSSYKLIF

SEQ ID NO: 753914 - protein, 13 aa, Homo sapiens
  CDR3 for beta chain variable domain of TCR clone 376957 (TRBV28, TRBJ2-2)
CASRRESTGELFF

SEQ ID NO: 753915 - protein, 12 aa, Homo sapiens
  CDR3 for alpha chain variable domain of TCR clone 376958 (TRAV13-2, TRAJ23)
CAERHRGGKLIF

SEQ ID NO: 753916 - protein, 13 aa, Homo sapiens
  CDR3 for beta chain variable domain of TCR clone 376958 (TRBV2, TRBJ1-6)
CADSGYYNSPLHF

SEQ ID NO: 753917 - protein, 14 aa, Homo sapiens
  CDR3 for alpha chain variable domain of TCR clone 376959 (TRAV2, TRAJ37)
CAVDFTSNTGKLIF

SEQ ID NO: 753918 - protein, 12 aa, Homo sapiens
  CDR3 for beta chain variable domain of TCR clone 376959 (TRBV14, TRBJ2-5)
CASSHLKETRYF

SEQ ID NO: 753919 - protein, 12 aa, Homo sapiens
  CDR3 for alpha chain variable domain of TCR clone 376960 (TRAV2, TRAJ31)
CAVADNNARLVF

SEQ ID NO: 753920 - protein, 13 aa, Homo sapiens
  CDR3 for beta chain variable domain of TCR clone 376960 (TRBV12-4, TRBJ2-1)
CASSHYTDNEQFF

SEQ ID NO: 753921 - protein, 13 aa, Homo sapiens
  CDR3 for alpha chain variable domain of TCR clone 376961 (TRAV20, TRAJ29)
CAVQAVGITPLVF

SEQ ID NO: 753922 - protein, 15 aa, Homo sapiens
  CDR3 for beta chain variable domain of TCR clone 376961 (TRBV10-2, TRBJ2-5)
CASRGSGGPQETQYF

SEQ ID NO: 753923 - protein, 22 aa, Homo sapiens
  CDR3 for alpha chain variable domain of TCR clone 376962 (TRAV40, )
CLLGDGIPDIQNPDPAVYQLRD

SEQ ID NO: 753924 - protein, 16 aa, Homo sapiens
  CDR3 for beta chain variable domain of TCR clone 376962 (TRBV20-1, TRBJ1-5)
CIAELPGQQTKQTQHF

SEQ ID NO: 753925 - protein, 13 aa, Homo sapiens
  CDR3 for alpha chain variable domain of TCR clone 376963 (TRAV12-2, TRAJ10)
CAVPTGGGNKLTF

SEQ ID NO: 753926 - protein, 16 aa, Homo sapiens
  CDR3 for beta chain variable domain of TCR clone 376963 (TRBV20-1, TRBJ2-5)
CSPGGTSGGYMETQYF

SEQ ID NO: 753927 - protein, 14 aa, Homo sapiens
  CDR3 for alpha chain variable domain of TCR clone 376964 (TRAV20, TRAJ36)
CAVQAGTGANNLFF

SEQ ID NO: 753928 - protein, 15 aa, Homo sapiens
  CDR3 for beta chain variable domain of TCR clone 376964 (TRBV5-1, TRBJ2-1)
CASSPPRAPYNEQFF

SEQ ID NO: 753929 - protein, 11 aa, Homo sapiens
  CDR3 for alpha chain variable domain of TCR clone 376965 (TRAV3, TRAJ21)
CAVGNFNKFYF

SEQ ID NO: 753930 - protein, 17 aa, Homo sapiens
  CDR3 for beta chain variable domain of TCR clone 376965 (TRBV24-1, TRBJ2-1)
CATSDVSTSGTYNAQFF

SEQ ID NO: 753931 - protein, 12 aa, Homo sapiens
  CDR3 for alpha chain variable domain of TCR clone 376966 (TRAV35, TRAJ39)
LAPNNAGNMLTF

SEQ ID NO: 753932 - protein, 16 aa, Homo sapiens
  CDR3 for beta chain variable domain of TCR clone 376966 (TRBV2, TRBJ2-3)
CTSSTSVEGVTDTQYF

SEQ ID NO: 753933 - protein, 12 aa, Homo sapiens
  CDR3 for alpha chain variable domain of TCR clone 376967 (TRAV12-3, TRAJ17)
CAMTLTGNKLTF

SEQ ID NO: 753934 - protein, 13 aa, Homo sapiens
  CDR3 for beta chain variable domain of TCR clone 376967 (TRBV2, TRBJ1-1)
CASNLLRNTESFF

SEQ ID NO: 753935 - protein, 16 aa, Homo sapiens
  CDR3 for alpha chain variable domain of TCR clone 376968 (TRAV8-3, TRAJ13)
CAVGAYPSGGYQKVTF

SEQ ID NO: 753936 - protein, 15 aa, Homo sapiens
  CDR3 for beta chain variable domain of TCR clone 376968 (TRBV19, TRBJ1-5)
CASSIVWADNLPQHF

SEQ ID NO: 753937 - protein, 11 aa, Homo sapiens
  CDR3 for alpha chain variable domain of TCR clone 376969 (TRAV12-1, TRAJ26)
CVVAYGKNLVF

SEQ ID NO: 753938 - protein, 15 aa, Homo sapiens
  CDR3 for beta chain variable domain of TCR clone 376969 (TRBV12-4, TRBJ2-5)
CASSGTGQAQETQYF

SEQ ID NO: 753939 - protein, 16 aa, Homo sapiens
  CDR3 for alpha chain variable domain of TCR clone 376970 (TRAV26-1, TRAJ53)
CIVRAAMGGSNYKLTF

SEQ ID NO: 753940 - protein, 13 aa, Homo sapiens
  CDR3 for beta chain variable domain of TCR clone 376970 (TRBV7-3, TRBJ2-1)
CASSLWPYNEQFF

SEQ ID NO: 753941 - protein, 13 aa, Homo sapiens
  CDR3 for alpha chain variable domain of TCR clone 376971 (TRAV12-3, TRAJ7)
CAMTPYGNNRLAF

SEQ ID NO: 753942 - protein, 16 aa, Homo sapiens
  CDR3 for beta chain variable domain of TCR clone 376971 (TRBV7-3, TRBJ2-1)
CASSLVSGSSNNEQFF

SEQ ID NO: 753943 - protein, 14 aa, Homo sapiens
  CDR3 for alpha chain variable domain of TCR clone 376972 (TRAV3, TRAJ6)
CAVRDWGGSYIPTF

SEQ ID NO: 753944 - protein, 15 aa, Homo sapiens
  CDR3 for beta chain variable domain of TCR clone 376972 (TRBV5-1, TRBJ2-1)
CASSPPGAPYNEQFF

SEQ ID NO: 753945 - protein, 11 aa, Homo sapiens
  CDR3 for alpha chain variable domain of TCR clone 376973 (TRAV21, TRAJ34)
CAVTNTDELIF

SEQ ID NO: 753946 - protein, 16 aa, Homo sapiens
  CDR3 for beta chain variable domain of TCR clone 376973 (TRBV18, TRBJ1-1)
CASSPGVGGRGGEAFF

SEQ ID NO: 753947 - protein, 16 aa, Homo sapiens
  CDR3 for alpha chain variable domain of TCR clone 376974 (TRAV30, TRAJ24)
CGTEIVDADSWGKFQV

SEQ ID NO: 753948 - protein, 13 aa, Homo sapiens
  CDR3 for beta chain variable domain of TCR clone 376974 (TRBV4-1, TRBJ2-2)
CASSQENTGELFF

SEQ ID NO: 753949 - protein, 14 aa, Homo sapiens
  CDR3 for alpha chain variable domain of TCR clone 376975 (TRAV3, TRAJ34)
CAVRDINNTDKLTF

SEQ ID NO: 753950 - protein, 14 aa, Homo sapiens
  CDR3 for beta chain variable domain of TCR clone 376975 (TRBV7-2, TRBJ2-2)
CASSLGQNTGELFF

SEQ ID NO: 753951 - protein, 14 aa, Homo sapiens
  CDR3 for alpha chain variable domain of TCR clone 376976 (TRAV12-2, TRAJ40)
CAVKIPSGTYKYIF

SEQ ID NO: 753952 - protein, 18 aa, Homo sapiens
  CDR3 for beta chain variable domain of TCR clone 376976 (TRBV11-2, TRBJ1-3)
CASTPRVTTLGSGNTIYF

SEQ ID NO: 753953 - protein, 12 aa, Homo sapiens
  CDR3 for alpha chain variable domain of TCR clone 376977 (TRAV26-1, TRAJ36)
GIVRVRADNLFF

SEQ ID NO: 753954 - protein, 13 aa, Homo sapiens
  CDR3 for beta chain variable domain of TCR clone 376977 (TRBV11-2, TRBJ2-5)
CASSRGPSETQYF

SEQ ID NO: 753955 - protein, 13 aa, Homo sapiens
  CDR3 for alpha chain variable domain of TCR clone 376978 (TRAV20, TRAJ40)
CAVRTSGTYKYIF

SEQ ID NO: 753956 - protein, 12 aa, Homo sapiens
  CDR3 for beta chain variable domain of TCR clone 376978 (TRBV7-9, TRBJ2-7)
CASSLEGYEQYF

SEQ ID NO: 753957 - protein, 13 aa, Homo sapiens
  CDR3 for alpha chain variable domain of TCR clone 376979 (TRAV2, TRAJ40)
CAVVTSGTYKFIF

SEQ ID NO: 753958 - protein, 16 aa, Homo sapiens
  CDR3 for beta chain variable domain of TCR clone 376979 (TRBV29-1, TRBJ1-2)
CSVEANRDIANYGYTF

SEQ ID NO: 753959 - protein, 15 aa, Homo sapiens
  CDR3 for alpha chain variable domain of TCR clone 376980 (TRAV23/DV6, TRAJ18)
GAASFRGSTLGRLYF

SEQ ID NO: 753960 - protein, 13 aa, Homo sapiens
  CDR3 for beta chain variable domain of TCR clone 376980 (TRBV28, TRBJ2-7)
CAILDRAGGEQYF

SEQ ID NO: 753961 - protein, 12 aa, Homo sapiens
  CDR3 for alpha chain variable domain of TCR clone 376981 (TRAV21, TRAJ11)
YAATSGYSTLTF

SEQ ID NO: 753962 - protein, 14 aa, Homo sapiens
  CDR3 for beta chain variable domain of TCR clone 376981 (TRBV20-1, TRBJ2-7)
CSALELAGVGEQYF

SEQ ID NO: 753963 - protein, 15 aa, Homo sapiens
  CDR3 for alpha chain variable domain of TCR clone 376982 (TRAV27, TRAJ38)
CAARRNAVNNRKLIW

SEQ ID NO: 753964 - protein, 15 aa, Homo sapiens
  CDR3 for beta chain variable domain of TCR clone 376982 (TRBV5-1, TRBJ2-1)
CASSPPRAPYNEQFF

SEQ ID NO: 753965 - protein, 14 aa, Homo sapiens
  CDR3 for alpha chain variable domain of TCR clone 376983 (TRAV17, TRAJ5)
CATVALTGRRALTF

SEQ ID NO: 753966 - protein, 16 aa, Homo sapiens
  CDR3 for beta chain variable domain of TCR clone 376983 (TRBV7-2, TRBJ2-6)
CASSLAGRSGANVLTF

SEQ ID NO: 753967 - protein, 23 aa, Homo sapiens
  CDR3 for alpha chain variable domain of TCR clone 376984 (TRAV26-1, )
CIADNAGKNHIQNPDPAVYQLRD

SEQ ID NO: 753968 - protein, 12 aa, Homo sapiens
  CDR3 for beta chain variable domain of TCR clone 376984 (TRBV11-2, TRBJ2-2)
CASSLGGGELFF

SEQ ID NO: 753969 - protein, 19 aa, Homo sapiens
  CDR3 for alpha chain variable domain of TCR clone 376985 (TRAV1-2, TRAJ26)
CLLPLCCERPDNYGQNFVF

SEQ ID NO: 753970 - protein, 11 aa, Homo sapiens
  CDR3 for beta chain variable domain of TCR clone 376985 (TRBV29-1, TRBJ2-5)
CSENRTGTQYF

SEQ ID NO: 753971 - protein, 14 aa, Homo sapiens
  CDR3 for alpha chain variable domain of TCR clone 376986 (TRAV1-2, TRAJ16)
CAVNRFSDGQKLLF

SEQ ID NO: 753972 - protein, 14 aa, Homo sapiens
  CDR3 for beta chain variable domain of TCR clone 376986 (TRBV12-3, TRBJ2-5)
CQQSPARPPRDQYF

SEQ ID NO: 753973 - protein, 15 aa, Homo sapiens
  CDR3 for alpha chain variable domain of TCR clone 376987 (TRAV26-1, TRAJ23)
CIVRVLNNQGGKLIF

SEQ ID NO: 753974 - protein, 13 aa, Homo sapiens
  CDR3 for beta chain variable domain of TCR clone 376987 (TRBV7-2, TRBJ1-1)
CASNLKGAKVAFF

SEQ ID NO: 753975 - protein, 14 aa, Homo sapiens
  CDR3 for alpha chain variable domain of TCR clone 376988 (TRAV13-1, TRAJ44)
CAAKATSTASKLTF

SEQ ID NO: 753976 - protein, 13 aa, Homo sapiens
  CDR3 for beta chain variable domain of TCR clone 376988 (TRBV5-5, TRBJ1-2)
CASSFWRGEDYTF

SEQ ID NO: 753977 - protein, 12 aa, Homo sapiens
  CDR3 for alpha chain variable domain of TCR clone 376989 (TRAV12-1, TRAJ40)
RVVYSGTYKYIF

SEQ ID NO: 753978 - protein, 18 aa, Homo sapiens
  CDR3 for beta chain variable domain of TCR clone 376989 (TRBV11-2, TRBJ2-3)
CASCLGGASRGAPNTQYF

SEQ ID NO: 753979 - protein, 14 aa, Homo sapiens
  CDR3 for alpha chain variable domain of TCR clone 376990 (TRAV9-2, TRAJ10)
CALTRTGGGNKLTF

SEQ ID NO: 753980 - protein, 16 aa, Homo sapiens
  CDR3 for beta chain variable domain of TCR clone 376990 (TRBV7-6, TRBJ2-3)
CASSPLAGGSTDTQYF

SEQ ID NO: 753981 - protein, 15 aa, Homo sapiens
  CDR3 for alpha chain variable domain of TCR clone 376991 (TRAV29/DV5, TRAJ29)
CAASERSSGNTPLVF

SEQ ID NO: 753982 - protein, 15 aa, Homo sapiens
  CDR3 for beta chain variable domain of TCR clone 376991 (TRBV7-2, TRBJ2-3)
CASSLVVRGPDTQYF

SEQ ID NO: 753983 - protein, 15 aa, Homo sapiens
  CDR3 for alpha chain variable domain of TCR clone 376992 (TRAV3, TRAJ36)
CAVRASQTGANNPFF

SEQ ID NO: 753984 - protein, 13 aa, Homo sapiens
  CDR3 for beta chain variable domain of TCR clone 376992 (TRBV10-3, TRBJ1-2)
CAISERDSYGYAF

SEQ ID NO: 753985 - protein, 14 aa, Homo sapiens
  CDR3 for alpha chain variable domain of TCR clone 376993 (TRAV1-2, TRAJ10)
CAVSPPGGGNKLTS

SEQ ID NO: 753986 - protein, 15 aa, Homo sapiens
  CDR3 for beta chain variable domain of TCR clone 376993 (TRBV19, TRBJ1-5)
CASSIVWADNQPQHF

SEQ ID NO: 753987 - protein, 20 aa, Homo sapiens
  CDR3 for alpha chain variable domain of TCR clone 376994 (TRAV21, TRAJ22)
SLVTQHPTLKSSGSARQLTF

SEQ ID NO: 753988 - protein, 16 aa, Homo sapiens
  CDR3 for beta chain variable domain of TCR clone 376994 (TRBV7-3, TRBJ2-2)
CASSLKRGTLSGELFF

SEQ ID NO: 753989 - protein, 14 aa, Homo sapiens
  CDR3 for alpha chain variable domain of TCR clone 376995 (TRAV1-2, TRAJ8)
LAVREDTGFQKLVF

SEQ ID NO: 753990 - protein, 13 aa, Homo sapiens
  CDR3 for beta chain variable domain of TCR clone 376995 (TRBV12-4, TRBJ1-2)
CASSLRQGKGYTF

SEQ ID NO: 753991 - protein, 14 aa, Homo sapiens
  CDR3 for alpha chain variable domain of TCR clone 376996 (TRAV12-2, TRAJ9)
CAVNMEGGGFKTIF

SEQ ID NO: 753992 - protein, 14 aa, Homo sapiens
  CDR3 for beta chain variable domain of TCR clone 376996 (TRBV2, TRBJ2-2)
CASRARGNTGELFF

SEQ ID NO: 753993 - protein, 15 aa, Homo sapiens
  CDR3 for alpha chain variable domain of TCR clone 376997 (TRAV27, TRAJ38)
CAARRNAGNNRKLIW

SEQ ID NO: 753994 - protein, 17 aa, Homo sapiens
  CDR3 for beta chain variable domain of TCR clone 376997 (TRBV15, TRBJ1-2)
CATSGREIDVVNYGYTF

SEQ ID NO: 753995 - protein, 14 aa, Homo sapiens
  CDR3 for alpha chain variable domain of TCR clone 376998 (TRAV38-1, TRAJ40)
CALRPTSGTYKYIF

SEQ ID NO: 753996 - protein, 14 aa, Homo sapiens
  CDR3 for beta chain variable domain of TCR clone 376998 (TRBV20-1, TRBJ1-2)
CSGRKDGRAYGYTF

SEQ ID NO: 753997 - protein, 16 aa, Homo sapiens
  CDR3 for alpha chain variable domain of TCR clone 376999 (TRAV12-3, TRAJ53)
CAMSPGSGGSNYKLTF

SEQ ID NO: 753998 - protein, 14 aa, Homo sapiens
  CDR3 for beta chain variable domain of TCR clone 376999 (TRBV12-4, TRBJ1-1)
CASRPGQGRTEAFF

SEQ ID NO: 753999 - protein, 12 aa, Homo sapiens
  CDR3 for alpha chain variable domain of TCR clone 377000 (TRAV23/DV6, TRAJ30)
CASSKGDDKIIF

SEQ ID NO: 754000 - protein, 18 aa, Homo sapiens
  CDR3 for beta chain variable domain of TCR clone 377000 (TRBV10-3, TRBJ2-3)
CAISESRVGPMRGDTQYF

SEQ ID NO: 754001 - protein, 18 aa, Homo sapiens
  CDR3 for alpha chain variable domain of TCR clone 377001 (TRAV13-1, TRAJ52)
CAAKNPNAGGTSYGKLKF

SEQ ID NO: 754002 - protein, 17 aa, Homo sapiens
  CDR3 for beta chain variable domain of TCR clone 377001 (TRBV19, TRBJ2-6)
CASSTGQVFSGANVLTF

SEQ ID NO: 754003 - protein, 14 aa, Homo sapiens
  CDR3 for alpha chain variable domain of TCR clone 377002 (TRAV1-2, TRAJ16)
CAVNRFSDGQKLLF

SEQ ID NO: 754004 - protein, 16 aa, Homo sapiens
  CDR3 for beta chain variable domain of TCR clone 377002 (TRBV12-4, TRBJ1-2)
CASSLGQYRPNYGDTF

SEQ ID NO: 754005 - protein, 14 aa, Homo sapiens
  CDR3 for alpha chain variable domain of TCR clone 377003 (TRAV12-2, TRAJ11)
CAVEGGSGYSTLTF

SEQ ID NO: 754006 - protein, 16 aa, Homo sapiens
  CDR3 for beta chain variable domain of TCR clone 377003 (TRBV7-3, TRBJ2-2)
CASSLKRGTVSGELFF

SEQ ID NO: 754007 - protein, 10 aa, Homo sapiens
  CDR3 for alpha chain variable domain of TCR clone 377004 (TRAV12-2, TRAJ52)
RSTSHGKLTF

SEQ ID NO: 754008 - protein, 11 aa, Homo sapiens
  CDR3 for beta chain variable domain of TCR clone 377004 (TRBV11-2, TRBJ2-2)
CAGSLPGELFF

SEQ ID NO: 754009 - protein, 17 aa, Homo sapiens
  CDR3 for alpha chain variable domain of TCR clone 377005 (TRAV13-1, TRAJ52)
CSAGRNAGGTSYGKLTF

SEQ ID NO: 754010 - protein, 13 aa, Homo sapiens
  CDR3 for beta chain variable domain of TCR clone 377005 (TRBV7-2, TRBJ1-1)
SASNLKGAKVAFF

SEQ ID NO: 754011 - protein, 16 aa, Homo sapiens
  CDR3 for alpha chain variable domain of TCR clone 377006 (TRAV8-6, TRAJ28)
CAVTSKPGAGSYQLTF

SEQ ID NO: 754012 - protein, 16 aa, Homo sapiens
  CDR3 for beta chain variable domain of TCR clone 377006 (TRBV12-4, TRBJ2-5)
CASSSRPPGDLETQYF

SEQ ID NO: 754013 - protein, 11 aa, Homo sapiens
  CDR3 for alpha chain variable domain of TCR clone 377007 (TRAV3, TRAJ21)
CAAGNFNKFYF

SEQ ID NO: 754014 - protein, 15 aa, Homo sapiens
  CDR3 for beta chain variable domain of TCR clone 377007 (TRBV19, TRBJ1-2)
CASSVGQVLNYGYTF

SEQ ID NO: 754015 - protein, 14 aa, Homo sapiens
  CDR3 for alpha chain variable domain of TCR clone 377008 (TRAV13-1, TRAJ26)
CAASSAHYGQNFFL

SEQ ID NO: 754016 - protein, 17 aa, Homo sapiens
  CDR3 for beta chain variable domain of TCR clone 377008 (TRBV25-1, TRBJ2-5)
CASSRRGGRGGQETQYF

SEQ ID NO: 754017 - protein, 11 aa, Homo sapiens
  CDR3 for alpha chain variable domain of TCR clone 377009 (TRAV12-2, TRAJ29)
CAVTLRSPLVF

SEQ ID NO: 754018 - protein, 16 aa, Homo sapiens
  CDR3 for beta chain variable domain of TCR clone 377009 (TRBV5-1, TRBJ2-2)
CASSWGGTGSTGELFF

SEQ ID NO: 754019 - protein, 13 aa, Homo sapiens
  CDR3 for alpha chain variable domain of TCR clone 377010 (TRAV3, TRAJ35)
CGMRKSFGNVLHR

SEQ ID NO: 754020 - protein, 14 aa, Homo sapiens
  CDR3 for beta chain variable domain of TCR clone 377010 (TRBV6-5, TRBJ1-4)
CASSYRAAEEKLFF

SEQ ID NO: 754021 - protein, 12 aa, Homo sapiens
  CDR3 for alpha chain variable domain of TCR clone 377011 (TRAV12-1, TRAJ40)
CVFYSGTYKYIF

SEQ ID NO: 754022 - protein, 14 aa, Homo sapiens
  CDR3 for beta chain variable domain of TCR clone 377011 (TRBV7-3, TRBJ2-1)
CASSLAGGTNEQFF

SEQ ID NO: 754023 - protein, 15 aa, Homo sapiens
  CDR3 for alpha chain variable domain of TCR clone 377012 (TRAV12-3, TRAJ44)
CAMSSLTGTASKLTF

SEQ ID NO: 754024 - protein, 15 aa, Homo sapiens
  CDR3 for beta chain variable domain of TCR clone 377012 (TRBV20-1, TRBJ2-7)
CSARTPGTITYEQYF

SEQ ID NO: 754025 - protein, 11 aa, Homo sapiens
  CDR3 for alpha chain variable domain of TCR clone 377013 (TRAV23/DV6, TRAJ17)
CKCAAGNKLTF

SEQ ID NO: 754026 - protein, 14 aa, Homo sapiens
  CDR3 for beta chain variable domain of TCR clone 377013 (TRBV6-1, TRBJ2-7)
CASSGGSYLYEQYF

SEQ ID NO: 754027 - protein, 13 aa, Homo sapiens
  CDR3 for alpha chain variable domain of TCR clone 377014 (TRAV20, TRAJ42)
CCAGGRKQGNLIF

SEQ ID NO: 754028 - protein, 14 aa, Homo sapiens
  CDR3 for beta chain variable domain of TCR clone 377014 (TRBV28, TRBJ1-2)
CASRIQGANYGYTF

SEQ ID NO: 754029 - protein, 13 aa, Homo sapiens
  CDR3 for alpha chain variable domain of TCR clone 377015 (TRAV12-3, TRAJ33)
CAMSVNSKYQLIW

SEQ ID NO: 754030 - protein, 16 aa, Homo sapiens
  CDR3 for beta chain variable domain of TCR clone 377015 (TRBV13, TRBJ2-5)
CASSLRTGGSWETQYF

SEQ ID NO: 754031 - protein, 11 aa, Homo sapiens
  CDR3 for alpha chain variable domain of TCR clone 377016 (TRAV12-2, TRAJ49)
CAVNTGNQFYF

SEQ ID NO: 754032 - protein, 16 aa, Homo sapiens
  CDR3 for beta chain variable domain of TCR clone 377016 (TRBV5-4, TRBJ2-3)
CASQQPGAGGADTQYF

SEQ ID NO: 754033 - protein, 14 aa, Homo sapiens
  CDR3 for alpha chain variable domain of TCR clone 377017 (TRAV12-3, TRAJ42)
CAMKYGGSQGNLIF

SEQ ID NO: 754034 - protein, 15 aa, Homo sapiens
  CDR3 for beta chain variable domain of TCR clone 377017 (TRBV20-1, TRBJ2-7)
CSARDRVSGMDEQYF

SEQ ID NO: 754035 - protein, 14 aa, Homo sapiens
  CDR3 for alpha chain variable domain of TCR clone 377018 (TRAV8-3, TRAJ4)
CAVGVAGGYNKLIF

SEQ ID NO: 754036 - protein, 15 aa, Homo sapiens
  CDR3 for beta chain variable domain of TCR clone 377018 (TRBV6-5, TRBJ2-1)
CVSSYDAGAGNEQFF

SEQ ID NO: 754037 - protein, 11 aa, Homo sapiens
  CDR3 for alpha chain variable domain of TCR clone 377019 (TRAV1-1, TRAJ23)
CAVRQGGKLIF

SEQ ID NO: 754038 - protein, 12 aa, Homo sapiens
  CDR3 for beta chain variable domain of TCR clone 377019 (TRBV2, TRBJ2-1)
CASRPGPREQFF

SEQ ID NO: 754039 - protein, 13 aa, Homo sapiens
  CDR3 for alpha chain variable domain of TCR clone 377020 (TRAV12-2, TRAJ4)
CAGFSGGYNKLIF

SEQ ID NO: 754040 - protein, 15 aa, Homo sapiens
  CDR3 for beta chain variable domain of TCR clone 377020 (TRBV7-2, TRBJ1-2)
CASSLVSGGDYGYTF

SEQ ID NO: 754041 - protein, 15 aa, Homo sapiens
  CDR3 for alpha chain variable domain of TCR clone 377021 (TRAV1-2, TRAJ30)
CAVRPHGNRDDKIIF

SEQ ID NO: 754042 - protein, 15 aa, Homo sapiens
  CDR3 for beta chain variable domain of TCR clone 377021 (TRBV28, TRBJ1-5)
CASSRTGGYVQPQHF

SEQ ID NO: 754043 - protein, 17 aa, Homo sapiens
  CDR3 for alpha chain variable domain of TCR clone 377022 (TRAV3, TRAJ38)
FAVRDCLNAGNNRKLIW

SEQ ID NO: 754044 - protein, 14 aa, Homo sapiens
  CDR3 for beta chain variable domain of TCR clone 377022 (TRBV5-5, TRBJ1-5)
CASSGQGVDQPQHF

SEQ ID NO: 754045 - protein, 12 aa, Homo sapiens
  CDR3 for alpha chain variable domain of TCR clone 377023 (TRAV21, TRAJ6)
CAAKGGSYIPTF

SEQ ID NO: 754046 - protein, 13 aa, Homo sapiens
  CDR3 for beta chain variable domain of TCR clone 377023 (TRBV11-2, TRBJ1-1)
CASSVTEKTEAFF

SEQ ID NO: 754047 - protein, 13 aa, Homo sapiens
  CDR3 for alpha chain variable domain of TCR clone 377024 (TRAV17, TRAJ5)
CAPMDTGRRALTF

SEQ ID NO: 754048 - protein, 12 aa, Homo sapiens
  CDR3 for beta chain variable domain of TCR clone 377024 (TRBV7-8, TRBJ2-1)
CASSLGHNEQFF

SEQ ID NO: 754049 - protein, 17 aa, Homo sapiens
  CDR3 for alpha chain variable domain of TCR clone 377025 (TRAV27, TRAJ57)
CAGERGRTQGGSEKLFF

SEQ ID NO: 754050 - protein, 15 aa, Homo sapiens
  CDR3 for beta chain variable domain of TCR clone 377025 (TRBV27, TRBJ1-6)
CASSFDRGLGSPLHF

SEQ ID NO: 754051 - protein, 15 aa, Homo sapiens
  CDR3 for alpha chain variable domain of TCR clone 377026 (TRAV1-2, TRAJ28)
CAVQYSGAGSYQLTF

SEQ ID NO: 754052 - protein, 11 aa, Homo sapiens
  CDR3 for beta chain variable domain of TCR clone 377026 (TRBV11-2, TRBJ1-1)
CASSINTEAFF

SEQ ID NO: 754053 - protein, 21 aa, Homo sapiens
  CDR3 for alpha chain variable domain of TCR clone 377027 (TRAV17, TRAJ53)
TASRAADTASQGGGSNYKLTF

SEQ ID NO: 754054 - protein, 16 aa, Homo sapiens
  CDR3 for beta chain variable domain of TCR clone 377027 (TRBV7-3, TRBJ2-2)
CASSLKRGTLSGELFF

SEQ ID NO: 754055 - protein, 15 aa, Homo sapiens
  CDR3 for alpha chain variable domain of TCR clone 377028 (TRAV12-2, TRAJ43)
CAFDMRFGAGTRLTV

SEQ ID NO: 754056 - protein, 15 aa, Homo sapiens
  CDR3 for beta chain variable domain of TCR clone 377028 (TRBV28, TRBJ2-1)
CASSGLAGVDNEQFF

SEQ ID NO: 754057 - protein, 12 aa, Homo sapiens
  CDR3 for alpha chain variable domain of TCR clone 377029 (TRAV12-3, TRAJ17)
CAMTLTGNKLTF

SEQ ID NO: 754058 - protein, 13 aa, Homo sapiens
  CDR3 for beta chain variable domain of TCR clone 377029 (TRBV18, TRBJ2-5)
CQLTWVSQETQYF

SEQ ID NO: 754059 - protein, 15 aa, Homo sapiens
  CDR3 for alpha chain variable domain of TCR clone 377030 (TRAV38-1, TRAJ37)
CAFIFGSGHTGKLIF

SEQ ID NO: 754060 - protein, 12 aa, Homo sapiens
  CDR3 for beta chain variable domain of TCR clone 377030 (TRBV7-9, TRBJ2-7)
CASSLEGYEQYL

SEQ ID NO: 754061 - protein, 16 aa, Homo sapiens
  CDR3 for alpha chain variable domain of TCR clone 377031 (TRAV30, TRAJ24)
CGTEIVDADSWGEFQF

SEQ ID NO: 754062 - protein, 13 aa, Homo sapiens
  CDR3 for beta chain variable domain of TCR clone 377031 (TRBV18, TRBJ1-2)
CASSASATEGDTF

SEQ ID NO: 754063 - protein, 14 aa, Homo sapiens
  CDR3 for alpha chain variable domain of TCR clone 377032 (TRAV16, TRAJ33)
CALSAMDSNYQLIW

SEQ ID NO: 754064 - protein, 15 aa, Homo sapiens
  CDR3 for beta chain variable domain of TCR clone 377032 (TRBV6-1, TRBJ2-2)
CASSRLRGDTGELFF

SEQ ID NO: 754065 - protein, 18 aa, Homo sapiens
  CDR3 for alpha chain variable domain of TCR clone 377033 (TRAV21, TRAJ52)
CAVRPSPAGGTSYGKLPF

SEQ ID NO: 754066 - protein, 14 aa, Homo sapiens
  CDR3 for beta chain variable domain of TCR clone 377033 (TRBV28, TRBJ1-1)
CASSPRTRWAEAFF

SEQ ID NO: 754067 - protein, 13 aa, Homo sapiens
  CDR3 for alpha chain variable domain of TCR clone 377034 (TRAV12-1, TRAJ16)
CVVDGPDGQKLLF

SEQ ID NO: 754068 - protein, 13 aa, Homo sapiens
  CDR3 for beta chain variable domain of TCR clone 377034 (TRBV2, TRBJ1-1)
CARNPTGGCHAFF

SEQ ID NO: 754069 - protein, 11 aa, Homo sapiens
  CDR3 for alpha chain variable domain of TCR clone 377035 (TRAV3, TRAJ21)
CAVGNFNKFYF

SEQ ID NO: 754070 - protein, 15 aa, Homo sapiens
  CDR3 for beta chain variable domain of TCR clone 377035 (TRBV20-1, TRBJ2-7)
CSARDRVSGMDEQFF

SEQ ID NO: 754071 - protein, 14 aa, Homo sapiens
  CDR3 for alpha chain variable domain of TCR clone 377036 (TRAV8-6, TRAJ49)
CAVSDPGTGKQFYF

SEQ ID NO: 754072 - protein, 16 aa, Homo sapiens
  CDR3 for beta chain variable domain of TCR clone 377036 (TRBV24-1, TRBJ2-1)
CATSGVAGANYNEQFF

SEQ ID NO: 754073 - protein, 14 aa, Homo sapiens
  CDR3 for alpha chain variable domain of TCR clone 377037 (TRAV38-1, TRAJ29)
CAFITPSGNTPLVF

SEQ ID NO: 754074 - protein, 16 aa, Homo sapiens
  CDR3 for beta chain variable domain of TCR clone 377037 (TRBV15, TRBJ1-2)
CATSRGPRTGGGGYTF

SEQ ID NO: 754075 - protein, 13 aa, Homo sapiens
  CDR3 for alpha chain variable domain of TCR clone 377038 (TRAV13-1, TRAJ21)
CAASIYNFNKFYF

SEQ ID NO: 754076 - protein, 12 aa, Homo sapiens
  CDR3 for beta chain variable domain of TCR clone 377038 (TRBV6-3, TRBJ2-7)
CASSLTPYEQYF

SEQ ID NO: 754077 - protein, 13 aa, Homo sapiens
  CDR3 for alpha chain variable domain of TCR clone 377039 (TRAV27, TRAJ53)
CAGQGGSNYKLTL

SEQ ID NO: 754078 - protein, 13 aa, Homo sapiens
  CDR3 for beta chain variable domain of TCR clone 377039 (TRBV29-1, TRBJ1-1)
CSVESGFGTDASF

SEQ ID NO: 754079 - protein, 14 aa, Homo sapiens
  CDR3 for alpha chain variable domain of TCR clone 377040 (TRAV12-1, TRAJ43)
CVVNGRSNNNDMRF

SEQ ID NO: 754080 - protein, 13 aa, Homo sapiens
  CDR3 for beta chain variable domain of TCR clone 377040 (TRBV2, TRBJ1-4)
CASSELWVEKLFF

SEQ ID NO: 754081 - protein, 13 aa, Homo sapiens
  CDR3 for alpha chain variable domain of TCR clone 377041 (TRAV13-1, TRAJ5)
CAASGTVRRALTF

SEQ ID NO: 754082 - protein, 12 aa, Homo sapiens
  CDR3 for beta chain variable domain of TCR clone 377041 (TRBV28, TRBJ2-3)
CASSLYRDTQYF

SEQ ID NO: 754083 - protein, 16 aa, Homo sapiens
  CDR3 for alpha chain variable domain of TCR clone 377042 (TRAV30, TRAJ24)
CGTEIVDADSWGKFQF

SEQ ID NO: 754084 - protein, 14 aa, Homo sapiens
  CDR3 for beta chain variable domain of TCR clone 377042 (TRBV10-3, TRBJ2-5)
CAIASGVRGETQYF

SEQ ID NO: 754085 - protein, 16 aa, Homo sapiens
  CDR3 for alpha chain variable domain of TCR clone 377043 (TRAV17, TRAJ54)
CATDSDIIQGAQKLVF

SEQ ID NO: 754086 - protein, 16 aa, Homo sapiens
  CDR3 for beta chain variable domain of TCR clone 377043 (TRBV12-5, TRBJ2-5)
CASGPRTSGNQETQYF

SEQ ID NO: 754087 - protein, 13 aa, Homo sapiens
  CDR3 for alpha chain variable domain of TCR clone 377044 (TRAV2, TRAJ40)
CAVATSGTYKYNF

SEQ ID NO: 754088 - protein, 14 aa, Homo sapiens
  CDR3 for beta chain variable domain of TCR clone 377044 (TRBV19, TRBJ2-1)
CASPTFVLSGEQFF

SEQ ID NO: 754089 - protein, 13 aa, Homo sapiens
  CDR3 for alpha chain variable domain of TCR clone 377045 (TRAV8-6, TRAJ49)
CAVITNTGNQFYF

SEQ ID NO: 754090 - protein, 14 aa, Homo sapiens
  CDR3 for beta chain variable domain of TCR clone 377045 (TRBV25-1, TRBJ1-4)
CASSYSGGQEKLFF

SEQ ID NO: 754091 - protein, 13 aa, Homo sapiens
  CDR3 for alpha chain variable domain of TCR clone 377046 (TRAV21, TRAJ57)
CAVTQGGSEKLVF

SEQ ID NO: 754092 - protein, 17 aa, Homo sapiens
  CDR3 for beta chain variable domain of TCR clone 377046 (TRBV4-1, TRBJ2-5)
CASSQDQTGGPQETQYF

SEQ ID NO: 754093 - protein, 11 aa, Homo sapiens
  CDR3 for alpha chain variable domain of TCR clone 377047 (TRAV3, TRAJ21)
CAVGNFNKFHF

SEQ ID NO: 754094 - protein, 16 aa, Homo sapiens
  CDR3 for beta chain variable domain of TCR clone 377047 (TRBV19, TRBJ2-1)
CASSKAGPSSYNEQFF

SEQ ID NO: 754095 - protein, 15 aa, Homo sapiens
  CDR3 for alpha chain variable domain of TCR clone 377048 (TRAV13-1, TRAJ9)
CAASSWNTGGFKTIF

SEQ ID NO: 754096 - protein, 17 aa, Homo sapiens
  CDR3 for beta chain variable domain of TCR clone 377048 (TRBV4-1, TRBJ1-4)
CASSQEGPRGVEEKLFF

SEQ ID NO: 754097 - protein, 13 aa, Homo sapiens
  CDR3 for alpha chain variable domain of TCR clone 377049 (TRAV1-2, TRAJ9)
CAALNTGGFKTIF

SEQ ID NO: 754098 - protein, 13 aa, Homo sapiens
  CDR3 for beta chain variable domain of TCR clone 377049 (TRBV11-2, TRBJ1-1)
CASSLGRNTEAFF

SEQ ID NO: 754099 - protein, 19 aa, Homo sapiens
  CDR3 for alpha chain variable domain of TCR clone 377050 (TRAV1-2, TRAJ26)
CLLPLCCERPDNYGQNFFF

SEQ ID NO: 754100 - protein, 12 aa, Homo sapiens
  CDR3 for beta chain variable domain of TCR clone 377050 (TRBV7-9, TRBJ2-7)
CATRTDAYEQYF

SEQ ID NO: 754101 - protein, 13 aa, Homo sapiens
  CDR3 for alpha chain variable domain of TCR clone 377051 (TRAV1-2, TRAJ36)
CAVDQTGANNLFF

SEQ ID NO: 754102 - protein, 13 aa, Homo sapiens
  CDR3 for beta chain variable domain of TCR clone 377051 (TRBV7-3, TRBJ1-1)
CASSQDWGAEAFF

SEQ ID NO: 754103 - protein, 11 aa, Homo sapiens
  CDR3 for alpha chain variable domain of TCR clone 377052 (TRAV2, TRAJ13)
CASGGYQKVTF

SEQ ID NO: 754104 - protein, 16 aa, Homo sapiens
  CDR3 for beta chain variable domain of TCR clone 377052 (TRBV28, TRBJ1-1)
CASSSGGQPVATEAFF

SEQ ID NO: 754105 - protein, 13 aa, Homo sapiens
  CDR3 for alpha chain variable domain of TCR clone 377053 (TRAV9-2, TRAJ53)
CALSGGSNYKLTC

SEQ ID NO: 754106 - protein, 17 aa, Homo sapiens
  CDR3 for beta chain variable domain of TCR clone 377053 (TRBV11-2, TRBJ2-1)
CASSLYPPGVEYNEQFF

SEQ ID NO: 754107 - protein, 15 aa, Homo sapiens
  CDR3 for alpha chain variable domain of TCR clone 377054 (TRAV2, TRAJ15)
CAVEDRGQAGTALIF

SEQ ID NO: 754108 - protein, 17 aa, Homo sapiens
  CDR3 for beta chain variable domain of TCR clone 377054 (TRBV11-2, TRBJ2-1)
CASSLYPPGVEYNEQFC

SEQ ID NO: 754109 - protein, 13 aa, Homo sapiens
  CDR3 for alpha chain variable domain of TCR clone 377055 (TRAV35, TRAJ36)
CAGPRIRANNLLF

SEQ ID NO: 754110 - protein, 15 aa, Homo sapiens
  CDR3 for beta chain variable domain of TCR clone 377055 (TRBV28, TRBJ2-5)
CASSPPWSYQETQYF

SEQ ID NO: 754111 - protein, 14 aa, Homo sapiens
  CDR3 for alpha chain variable domain of TCR clone 377056 (TRAV12-2, TRAJ17)
CAVLFKAAGNKLTF

SEQ ID NO: 754112 - protein, 12 aa, Homo sapiens
  CDR3 for beta chain variable domain of TCR clone 377056 (TRBV18, TRBJ1-4)
CASSPSREKLFF

SEQ ID NO: 754113 - protein, 17 aa, Homo sapiens
  CDR3 for alpha chain variable domain of TCR clone 377057 (TRAV17, TRAJ52)
CATERPSGGTSYGKLTF

SEQ ID NO: 754114 - protein, 14 aa, Homo sapiens
  CDR3 for beta chain variable domain of TCR clone 377057 (TRBV7-9, TRBJ2-3)
CASSLEDGTDTQYF

SEQ ID NO: 754115 - protein, 14 aa, Homo sapiens
  CDR3 for alpha chain variable domain of TCR clone 377058 (TRAV35, TRAJ13)
CAGSPSGGYQKVTF

SEQ ID NO: 754116 - protein, 18 aa, Homo sapiens
  CDR3 for beta chain variable domain of TCR clone 377058 (TRBV19, TRBJ1-5)
CASSKGQVSIHSNQPQHF

SEQ ID NO: 754117 - protein, 14 aa, Homo sapiens
  CDR3 for alpha chain variable domain of TCR clone 377059 (TRAV9-2, TRAJ39)
CALYIYNAGNMLTF

SEQ ID NO: 754118 - protein, 17 aa, Homo sapiens
  CDR3 for beta chain variable domain of TCR clone 377059 (TRBV4-3, TRBJ1-2)
CASSSRLQAGGSVGYTF

SEQ ID NO: 754119 - protein, 14 aa, Homo sapiens
  CDR3 for alpha chain variable domain of TCR clone 377060 (TRAV17, TRAJ16)
CATADFSDGQKLVF

SEQ ID NO: 754120 - protein, 12 aa, Homo sapiens
  CDR3 for beta chain variable domain of TCR clone 377060 (TRBV24-1, TRBJ1-1)
CATLYPDTEAFF

SEQ ID NO: 754121 - protein, 14 aa, Homo sapiens
  CDR3 for alpha chain variable domain of TCR clone 377061 (TRAV29/DV5, TRAJ22)
CSASATGSARQLTL

SEQ ID NO: 754122 - protein, 14 aa, Homo sapiens
  CDR3 for beta chain variable domain of TCR clone 377061 (TRBV19, TRBJ2-1)
CASSPGLAPNEQFF

SEQ ID NO: 754123 - protein, 13 aa, Homo sapiens
  CDR3 for alpha chain variable domain of TCR clone 377062 (TRAV2, TRAJ40)
CTVVTLGTYKYIF

SEQ ID NO: 754124 - protein, 14 aa, Homo sapiens
  CDR3 for beta chain variable domain of TCR clone 377062 (TRBV19, TRBJ2-1)
CASPTFVLSGEQFF

SEQ ID NO: 754125 - protein, 12 aa, Homo sapiens
  CDR3 for alpha chain variable domain of TCR clone 377063 (TRAV21, TRAJ20)
CAVGANDYKLSF

SEQ ID NO: 754126 - protein, 16 aa, Homo sapiens
  CDR3 for beta chain variable domain of TCR clone 377063 (TRBV19, TRBJ2-2)
CASRSPGTGATGELFF

SEQ ID NO: 754127 - protein, 13 aa, Homo sapiens
  CDR3 for alpha chain variable domain of TCR clone 377064 (TRAV2, TRAJ40)
CAVVTSGTYKYIF

SEQ ID NO: 754128 - protein, 14 aa, Homo sapiens
  CDR3 for beta chain variable domain of TCR clone 377064 (TRBV19, TRBJ2-1)
CASLTFVVSGEQFF

SEQ ID NO: 754129 - protein, 11 aa, Homo sapiens
  CDR3 for alpha chain variable domain of TCR clone 377065 (TRAV13-2, TRAJ20)
CADSNDSKLSF

SEQ ID NO: 754130 - protein, 12 aa, Homo sapiens
  CDR3 for beta chain variable domain of TCR clone 377065 (TRBV11-2, TRBJ2-2)
CASSLGGGELFF

SEQ ID NO: 754131 - protein, 13 aa, Homo sapiens
  CDR3 for alpha chain variable domain of TCR clone 377066 (TRAV21, TRAJ27)
CAARPGHAGKSTF

SEQ ID NO: 754132 - protein, 12 aa, Homo sapiens
  CDR3 for beta chain variable domain of TCR clone 377066 (TRBV6-3, TRBJ2-7)
CASSLTPYEQYF

SEQ ID NO: 754133 - protein, 14 aa, Homo sapiens
  CDR3 for alpha chain variable domain of TCR clone 377067 (TRAV8-3, TRAJ4)
CAVGAAGGYNKLIF

SEQ ID NO: 754134 - protein, 15 aa, Homo sapiens
  CDR3 for beta chain variable domain of TCR clone 377067 (TRBV5-1, TRBJ2-3)
CASSLGQGAADTQYF

SEQ ID NO: 754135 - protein, 15 aa, Homo sapiens
  CDR3 for alpha chain variable domain of TCR clone 377068 (TRAV21, TRAJ22)
CAVRLFFWFCKATEL

SEQ ID NO: 754136 - protein, 14 aa, Homo sapiens
  CDR3 for beta chain variable domain of TCR clone 377068 (TRBV19, TRBJ1-5)
CASRAPDSFLSQHF

SEQ ID NO: 754137 - protein, 16 aa, Homo sapiens
  CDR3 for alpha chain variable domain of TCR clone 377069 (TRAV30, TRAJ24)
CGTEMVGADSWGKFQF

SEQ ID NO: 754138 - protein, 14 aa, Homo sapiens
  CDR3 for beta chain variable domain of TCR clone 377069 (TRBV12-5, TRBJ2-5)
CASGSRTHQETQYF

SEQ ID NO: 754139 - protein, 15 aa, Homo sapiens
  CDR3 for alpha chain variable domain of TCR clone 377070 (TRAV12-3, TRAJ6)
CAMTATTGGSYIPTF

SEQ ID NO: 754140 - protein, 19 aa, Homo sapiens
  CDR3 for beta chain variable domain of TCR clone 377070 (TRBV25-1, TRBJ2-2)
CAILVYRVDRGRKTGELFF

SEQ ID NO: 754141 - protein, 15 aa, Homo sapiens
  CDR3 for alpha chain variable domain of TCR clone 377071 (TRAV3, TRAJ5)
CAVRDLDTGRRALTF

SEQ ID NO: 754142 - protein, 15 aa, Homo sapiens
  CDR3 for beta chain variable domain of TCR clone 377071 (TRBV28, TRBJ2-5)
CSSSPPWSYQETQYF

SEQ ID NO: 754143 - protein, 14 aa, Homo sapiens
  CDR3 for alpha chain variable domain of TCR clone 377072 (TRAV1-2, TRAJ8)
CAVREDTCFQKLVF

SEQ ID NO: 754144 - protein, 13 aa, Homo sapiens
  CDR3 for beta chain variable domain of TCR clone 377072 (TRBV23-1, TRBJ1-4)
CASRGKFNEKLFF

SEQ ID NO: 754145 - protein, 15 aa, Homo sapiens
  CDR3 for alpha chain variable domain of TCR clone 377073 (TRAV12-1, TRAJ44)
CVVDTPQGTASKLTF

SEQ ID NO: 754146 - protein, 14 aa, Homo sapiens
  CDR3 for beta chain variable domain of TCR clone 377073 (TRBV7-9, TRBJ2-1)
CASSPRDSPYEQFF

SEQ ID NO: 754147 - protein, 12 aa, Homo sapiens
  CDR3 for alpha chain variable domain of TCR clone 377074 (TRAV12-1, TRAJ40)
WAVYSGTYKYIF

SEQ ID NO: 754148 - protein, 18 aa, Homo sapiens
  CDR3 for beta chain variable domain of TCR clone 377074 (TRBV11-2, TRBJ2-3)
CASSLGGASRGAPNTQYF

SEQ ID NO: 754149 - protein, 12 aa, Homo sapiens
  CDR3 for alpha chain variable domain of TCR clone 377075 (TRAV12-1, TRAJ40)
CVVYSGTYKYIF

SEQ ID NO: 754150 - protein, 18 aa, Homo sapiens
  CDR3 for beta chain variable domain of TCR clone 377075 (TRBV11-2, TRBJ2-3)
DASSLGGASRGAPNTQYF

SEQ ID NO: 754151 - protein, 14 aa, Homo sapiens
  CDR3 for alpha chain variable domain of TCR clone 377076 (TRAV12-3, TRAJ28)
CAMCSGAGSYQLTF

SEQ ID NO: 754152 - protein, 13 aa, Homo sapiens
  CDR3 for beta chain variable domain of TCR clone 377076 (TRBV4-2, TRBJ1-1)
CASSQAGNTEAFF

SEQ ID NO: 754153 - protein, 12 aa, Homo sapiens
  CDR3 for alpha chain variable domain of TCR clone 377077 (TRAV36/DV7, TRAJ54)
CAVVRGAQKLVS

SEQ ID NO: 754154 - protein, 13 aa, Homo sapiens
  CDR3 for beta chain variable domain of TCR clone 377077 (TRBV7-9, TRBJ1-2)
CASSLKQNYGYTF

SEQ ID NO: 754155 - protein, 17 aa, Homo sapiens
  CDR3 for alpha chain variable domain of TCR clone 377078 (TRAV38-2/DV8, TRAJ54)
CAYRRGWGSQGAQKLVV

SEQ ID NO: 754156 - protein, 14 aa, Homo sapiens
  CDR3 for beta chain variable domain of TCR clone 377078 (TRBV20-1, TRBJ2-3)
CSARDGVGTDTQYF

SEQ ID NO: 754157 - protein, 17 aa, Homo sapiens
  CDR3 for alpha chain variable domain of TCR clone 377079 (TRAV3, TRAJ42)
CAVRDRDYVGSQGNLIF

SEQ ID NO: 754158 - protein, 20 aa, Homo sapiens
  CDR3 for beta chain variable domain of TCR clone 377079 (TRBV28, TRBJ2-1)
CASTPIGRSPGLAGGNEQFF

SEQ ID NO: 754159 - protein, 10 aa, Homo sapiens
  CDR3 for alpha chain variable domain of TCR clone 377080 (TRAV23/DV6, TRAJ43)
CAAAVAALEQ

SEQ ID NO: 754160 - protein, 11 aa, Homo sapiens
  CDR3 for beta chain variable domain of TCR clone 377080 (TRBV6-3, TRBJ2-3)
CATGQADTQYF

SEQ ID NO: 754161 - protein, 11 aa, Homo sapiens
  CDR3 for alpha chain variable domain of TCR clone 377081 (TRAV2, TRAJ13)
CASGCYQKVTF

SEQ ID NO: 754162 - protein, 17 aa, Homo sapiens
  CDR3 for beta chain variable domain of TCR clone 377081 (TRBV19, TRBJ2-6)
CASSTGQVFSGANVLTF

SEQ ID NO: 754163 - protein, 14 aa, Homo sapiens
  CDR3 for alpha chain variable domain of TCR clone 377082 (TRAV8-3, TRAJ9)
CAVVYNTGGFKIFF

SEQ ID NO: 754164 - protein, 16 aa, Homo sapiens
  CDR3 for beta chain variable domain of TCR clone 377082 (TRBV7-3, TRBJ2-2)
CASSLKRGTLSGELFF

SEQ ID NO: 754165 - protein, 13 aa, Homo sapiens
  CDR3 for alpha chain variable domain of TCR clone 377083 (TRAV21, TRAJ57)
CAVTQGGSEKLVF

SEQ ID NO: 754166 - protein, 14 aa, Homo sapiens
  CDR3 for beta chain variable domain of TCR clone 377083 (TRBV28, TRBJ2-1)
CASKMTGQGNEQFF

SEQ ID NO: 754167 - protein, 12 aa, Homo sapiens
  CDR3 for alpha chain variable domain of TCR clone 377084 (TRAV13-1, TRAJ21)
CAAKEGFNKFYF

SEQ ID NO: 754168 - protein, 16 aa, Homo sapiens
  CDR3 for beta chain variable domain of TCR clone 377084 (TRBV18, TRBJ1-3)
CASSPPPRQGRNTIYF

SEQ ID NO: 754169 - protein, 14 aa, Homo sapiens
  CDR3 for alpha chain variable domain of TCR clone 377085 (TRAV12-2, TRAJ44)
CAVNPAGTASKLTF

SEQ ID NO: 754170 - protein, 13 aa, Homo sapiens
  CDR3 for beta chain variable domain of TCR clone 377085 (TRBV20-1, TRBJ1-6)
CSAPFGVGSRLHF

SEQ ID NO: 754171 - protein, 16 aa, Homo sapiens
  CDR3 for alpha chain variable domain of TCR clone 377086 (TRAV12-2, TRAJ18)
CAVTTDRGSTLGRLYF

SEQ ID NO: 754172 - protein, 15 aa, Homo sapiens
  CDR3 for beta chain variable domain of TCR clone 377086 (TRBV9, TRBJ1-6)
CASSVAGTGDSPLYF

SEQ ID NO: 754173 - protein, 15 aa, Homo sapiens
  CDR3 for alpha chain variable domain of TCR clone 377087 (TRAV20, TRAJ50)
CAVRQMKTSHDKGIF

SEQ ID NO: 754174 - protein, 16 aa, Homo sapiens
  CDR3 for beta chain variable domain of TCR clone 377087 (TRBV15, TRBJ1-2)
CATSRGPRTGGGGYTF

SEQ ID NO: 754175 - protein, 12 aa, Homo sapiens
  CDR3 for alpha chain variable domain of TCR clone 377088 (TRAV21, TRAJ13)
PGPSGGYPKVTF

SEQ ID NO: 754176 - protein, 14 aa, Homo sapiens
  CDR3 for beta chain variable domain of TCR clone 377088 (TRBV20-1, TRBJ2-7)
CSAKDRKGAYEQYF

SEQ ID NO: 754177 - protein, 15 aa, Homo sapiens
  CDR3 for alpha chain variable domain of TCR clone 377089 (TRAV12-1, TRAJ44)
CVVFVNTGTASKLTF

SEQ ID NO: 754178 - protein, 14 aa, Homo sapiens
  CDR3 for beta chain variable domain of TCR clone 377089 (TRBV7-2, TRBJ1-2)
CASSQTGSTYGYTF

SEQ ID NO: 754179 - protein, 16 aa, Homo sapiens
  CDR3 for alpha chain variable domain of TCR clone 377090 (TRAV30, TRAJ24)
CGTEIVDADSWGKFSL

SEQ ID NO: 754180 - protein, 18 aa, Homo sapiens
  CDR3 for beta chain variable domain of TCR clone 377090 (TRBV7-9, TRBJ2-7)
CASSLTTSGSRTWYEQYF

SEQ ID NO: 754181 - protein, 14 aa, Homo sapiens
  CDR3 for alpha chain variable domain of TCR clone 377091 (TRAV12-2, TRAJ40)
CAVKMPSGTYKYIF

SEQ ID NO: 754182 - protein, 12 aa, Homo sapiens
  CDR3 for beta chain variable domain of TCR clone 377091 (TRBV11-2, TRBJ2-1)
CASSPGNNEQFF

SEQ ID NO: 754183 - protein, 14 aa, Homo sapiens
  CDR3 for alpha chain variable domain of TCR clone 377092 (TRAV12-2, TRAJ32)
CAHPEIGATNKLIF

SEQ ID NO: 754184 - protein, 14 aa, Homo sapiens
  CDR3 for beta chain variable domain of TCR clone 377092 (TRBV4-2, TRBJ2-3)
CASRETRAPGIQYF

SEQ ID NO: 754185 - protein, 15 aa, Homo sapiens
  CDR3 for alpha chain variable domain of TCR clone 377093 (TRAV25, TRAJ52)
CAGRPGGTSYGKLTF

SEQ ID NO: 754186 - protein, 14 aa, Homo sapiens
  CDR3 for beta chain variable domain of TCR clone 377093 (TRBV7-8, TRBJ1-6)
CASSAGTGDSPLRF

SEQ ID NO: 754187 - protein, 13 aa, Homo sapiens
  CDR3 for alpha chain variable domain of TCR clone 377094 (TRAV8-3, TRAJ36)
CAVGATGANNLFF

SEQ ID NO: 754188 - protein, 13 aa, Homo sapiens
  CDR3 for beta chain variable domain of TCR clone 377094 (TRBV11-2, TRBJ2-1)
CASSSEAYNEQFF

SEQ ID NO: 754189 - protein, 15 aa, Homo sapiens
  CDR3 for alpha chain variable domain of TCR clone 377095 (TRAV8-4, TRAJ7)
CAVSGGNYGNNRLAF

SEQ ID NO: 754190 - protein, 11 aa, Homo sapiens
  CDR3 for beta chain variable domain of TCR clone 377095 (TRBV20-1, TRBJ2-1)
CSLSSGSGQFF

SEQ ID NO: 754191 - protein, 16 aa, Homo sapiens
  CDR3 for alpha chain variable domain of TCR clone 377096 (TRAV3, TRAJ23)
CAVKIGIYNKGGKIIF

SEQ ID NO: 754192 - protein, 17 aa, Homo sapiens
  CDR3 for beta chain variable domain of TCR clone 377096 (TRBV10-3, TRBJ2-6)
CAISESTAPSGANVLTF

SEQ ID NO: 754193 - protein, 14 aa, Homo sapiens
  CDR3 for alpha chain variable domain of TCR clone 377097 (TRAV38-1, TRAJ40)
CALRPTSGPYKYIF

SEQ ID NO: 754194 - protein, 17 aa, Homo sapiens
  CDR3 for beta chain variable domain of TCR clone 377097 (TRBV20-1, TRBJ2-4)
CSARDWASGGRENIQYF

SEQ ID NO: 754195 - protein, 11 aa, Homo sapiens
  CDR3 for alpha chain variable domain of TCR clone 377098 (TRAV41, TRAJ32)
CAVRIMVVLQT

SEQ ID NO: 754196 - protein, 15 aa, Homo sapiens
  CDR3 for beta chain variable domain of TCR clone 377098 (TRBV11-2, TRBJ2-1)
CASSKNRGLIYEQFF

SEQ ID NO: 754197 - protein, 13 aa, Homo sapiens
  CDR3 for alpha chain variable domain of TCR clone 377099 (TRAV16, TRAJ34)
CALSPHKTDKLIF

SEQ ID NO: 754198 - protein, 17 aa, Homo sapiens
  CDR3 for beta chain variable domain of TCR clone 377099 (TRBV5-1, TRBJ2-1)
CASSTGTSGYSYNEQFF

SEQ ID NO: 754199 - protein, 13 aa, Homo sapiens
  CDR3 for alpha chain variable domain of TCR clone 377100 (TRAV12-2, TRAJ15)
CAVFNQAGTALIF

SEQ ID NO: 754200 - protein, 13 aa, Homo sapiens
  CDR3 for beta chain variable domain of TCR clone 377100 (TRBV7-2, TRBJ2-7)
CASSSPSGSEQYF

SEQ ID NO: 754201 - protein, 18 aa, Homo sapiens
  CDR3 for alpha chain variable domain of TCR clone 377101 (TRAV26-1, TRAJ23)
CIVRVGLEVVDQGGKLIL

SEQ ID NO: 754202 - protein, 16 aa, Homo sapiens
  CDR3 for beta chain variable domain of TCR clone 377101 (TRBV12-4, TRBJ2-5)
CASSFFVRGRQETQYF

SEQ ID NO: 754203 - protein, 15 aa, Homo sapiens
  CDR3 for alpha chain variable domain of TCR clone 377102 (TRAV23/DV6, TRAJ18)
CAARYRGSTLGRLYF

SEQ ID NO: 754204 - protein, 12 aa, Homo sapiens
  CDR3 for beta chain variable domain of TCR clone 377102 (TRBV20-1, TRBJ1-2)
CSAPGFNYGYTF

SEQ ID NO: 754205 - protein, 14 aa, Homo sapiens
  CDR3 for alpha chain variable domain of TCR clone 377103 (TRAV8-3, TRAJ31)
CAVGRGLKNARLMF

SEQ ID NO: 754206 - protein, 15 aa, Homo sapiens
  CDR3 for beta chain variable domain of TCR clone 377103 (TRBV7-2, TRBJ2-2)
CASSLAGGLTGELFF

SEQ ID NO: 754207 - protein, 13 aa, Homo sapiens
  CDR3 for alpha chain variable domain of TCR clone 377104 (TRAV27, TRAJ45)
CRSSGGGADGLTF

SEQ ID NO: 754208 - protein, 17 aa, Homo sapiens
  CDR3 for beta chain variable domain of TCR clone 377104 (TRBV11-2, TRBJ2-1)
CASSVCPPGVEYNEQFF

SEQ ID NO: 754209 - protein, 11 aa, Homo sapiens
  CDR3 for alpha chain variable domain of TCR clone 377105 (TRAV26-1, TRAJ37)
CIVRVGRELIF

SEQ ID NO: 754210 - protein, 13 aa, Homo sapiens
  CDR3 for beta chain variable domain of TCR clone 377105 (TRBV14, TRBJ1-2)
CASSEDRRYGYTF

SEQ ID NO: 754211 - protein, 14 aa, Homo sapiens
  CDR3 for alpha chain variable domain of TCR clone 377106 (TRAV35, TRAJ24)
CAGPRRDSWGKLPF

SEQ ID NO: 754212 - protein, 12 aa, Homo sapiens
  CDR3 for beta chain variable domain of TCR clone 377106 (TRBV12-4, TRBJ2-3)
CASSLGQDTQYF

SEQ ID NO: 754213 - protein, 14 aa, Homo sapiens
  CDR3 for alpha chain variable domain of TCR clone 377107 (TRAV1-1, TRAJ23)
CAVRIYNQGGKLIF

SEQ ID NO: 754214 - protein, 20 aa, Homo sapiens
  CDR3 for beta chain variable domain of TCR clone 377107 (TRBV6-4, TRBJ2-7)
CASSDSSVSGQVPTSYEQYF

SEQ ID NO: 754215 - protein, 12 aa, Homo sapiens
  CDR3 for alpha chain variable domain of TCR clone 377108 (TRAV13-1, TRAJ53)
AASGGSNYKLTF

SEQ ID NO: 754216 - protein, 15 aa, Homo sapiens
  CDR3 for beta chain variable domain of TCR clone 377108 (TRBV5-1, TRBJ2-1)
CASSPPGGRYNEQFF

SEQ ID NO: 754217 - protein, 12 aa, Homo sapiens
  CDR3 for alpha chain variable domain of TCR clone 377109 (TRAV12-1, TRAJ6)
CVVSERSYLPTF

SEQ ID NO: 754218 - protein, 21 aa, Homo sapiens
  CDR3 for beta chain variable domain of TCR clone 377109 (TRBV7-3, TRBJ2-1)
GGTQPCISVPAAYGLAGAQFF

SEQ ID NO: 754219 - protein, 14 aa, Homo sapiens
  CDR3 for alpha chain variable domain of TCR clone 377110 (TRAV35, TRAJ42)
CARRYGGSQGNLIF

SEQ ID NO: 754220 - protein, 15 aa, Homo sapiens
  CDR3 for beta chain variable domain of TCR clone 377110 (TRBV7-9, TRBJ2-1)
CASSLGWGRDNEQFF

SEQ ID NO: 754221 - protein, 12 aa, Homo sapiens
  CDR3 for alpha chain variable domain of TCR clone 377111 (TRAV12-3, TRAJ17)
CAMKLTGNKLPF

SEQ ID NO: 754222 - protein, 15 aa, Homo sapiens
  CDR3 for beta chain variable domain of TCR clone 377111 (TRBV20-1, TRBJ2-7)
CSARDRVSGMDEQYF

SEQ ID NO: 754223 - protein, 15 aa, Homo sapiens
  CDR3 for alpha chain variable domain of TCR clone 377112 (TRAV2, TRAJ32)
CAVANYGGAANKLIF

SEQ ID NO: 754224 - protein, 15 aa, Homo sapiens
  CDR3 for beta chain variable domain of TCR clone 377112 (TRBV7-7, TRBJ2-5)
CASSQLERAEETQYF

SEQ ID NO: 754225 - protein, 14 aa, Homo sapiens
  CDR3 for alpha chain variable domain of TCR clone 377113 (TRAV12-3, TRAJ42)
CAMDYGGSQGNLIF

SEQ ID NO: 754226 - protein, 15 aa, Homo sapiens
  CDR3 for beta chain variable domain of TCR clone 377113 (TRBV5-7, TRBJ1-5)
CASSYGKLWDQPQHF

SEQ ID NO: 754227 - protein, 14 aa, Homo sapiens
  CDR3 for alpha chain variable domain of TCR clone 377114 (TRAV38-1, TRAJ57)
CAFMNTGGSEKMVF

SEQ ID NO: 754228 - protein, 12 aa, Homo sapiens
  CDR3 for beta chain variable domain of TCR clone 377114 (TRBV20-1, TRBJ1-5)
CSTGQGNQPQHF

SEQ ID NO: 754229 - protein, 11 aa, Homo sapiens
  CDR3 for alpha chain variable domain of TCR clone 377115 (TRAV2, TRAJ13)
CASGGYQKVTF

SEQ ID NO: 754230 - protein, 14 aa, Homo sapiens
  CDR3 for beta chain variable domain of TCR clone 377115 (TRBV20-1, TRBJ2-5)
YSAAGTPSQETQYF

SEQ ID NO: 754231 - protein, 13 aa, Homo sapiens
  CDR3 for alpha chain variable domain of TCR clone 377116 (TRAV3, TRAJ21)
CAVREPDFNKFYF

SEQ ID NO: 754232 - protein, 16 aa, Homo sapiens
  CDR3 for beta chain variable domain of TCR clone 377116 (TRBV18, TRBJ2-7)
CASSPMGNRRAHEQYF

SEQ ID NO: 754233 - protein, 16 aa, Homo sapiens
  CDR3 for alpha chain variable domain of TCR clone 377117 (TRAV38-1, TRAJ32)
CAFMKGGGGATNKLIF

SEQ ID NO: 754234 - protein, 13 aa, Homo sapiens
  CDR3 for beta chain variable domain of TCR clone 377117 (TRBV20-1, TRBJ2-5)
CSARDASQETQYF

SEQ ID NO: 754235 - protein, 12 aa, Homo sapiens
  CDR3 for alpha chain variable domain of TCR clone 377118 (TRAV17, TRAJ39)
CATGAAGNMLTF

SEQ ID NO: 754236 - protein, 19 aa, Homo sapiens
  CDR3 for beta chain variable domain of TCR clone 377118 (TRBV2, TRBJ2-2)
CASSQPGLAGGGNTGELFF

SEQ ID NO: 754237 - protein, 14 aa, Homo sapiens
  CDR3 for alpha chain variable domain of TCR clone 377119 (TRAV12-2, TRAJ13)
CAVKKTGGYQKVTF

SEQ ID NO: 754238 - protein, 14 aa, Homo sapiens
  CDR3 for beta chain variable domain of TCR clone 377119 (TRBV27, TRBJ2-7)
CASATGTERREQYF

SEQ ID NO: 754239 - protein, 13 aa, Homo sapiens
  CDR3 for alpha chain variable domain of TCR clone 377120 (TRAV4, TRAJ42)
CLVGGGSQGNLIF

SEQ ID NO: 754240 - protein, 16 aa, Homo sapiens
  CDR3 for beta chain variable domain of TCR clone 377120 (TRBV12-4, TRBJ1-5)
CASSRPVGGSNQPQHF

SEQ ID NO: 754241 - protein, 14 aa, Homo sapiens
  CDR3 for alpha chain variable domain of TCR clone 377121 (TRAV12-2, TRAJ13)
CAVKKTGGYQKVTF

SEQ ID NO: 754242 - protein, 16 aa, Homo sapiens
  CDR3 for beta chain variable domain of TCR clone 377121 (TRBV7-6, TRBJ1-6)
CASSLSSRIGDSPLHF

SEQ ID NO: 754243 - protein, 12 aa, Homo sapiens
  CDR3 for alpha chain variable domain of TCR clone 377122 (TRAV23/DV6, TRAJ17)
CARGSCRPQANF

SEQ ID NO: 754244 - protein, 14 aa, Homo sapiens
  CDR3 for beta chain variable domain of TCR clone 377122 (TRBV7-2, TRBJ1-2)
CASSQTGSTYGYTF

SEQ ID NO: 754245 - protein, 16 aa, Homo sapiens
  CDR3 for alpha chain variable domain of TCR clone 377123 (TRAV1-2, TRAJ16)
CAVNRFSDGQKLPLQG

SEQ ID NO: 754246 - protein, 15 aa, Homo sapiens
  CDR3 for beta chain variable domain of TCR clone 377123 (TRBV9, TRBJ1-6)
CASSVAGTGDSPLHF

SEQ ID NO: 754247 - protein, 16 aa, Homo sapiens
  CDR3 for alpha chain variable domain of TCR clone 377124 (TRAV30, TRAJ24)
CGTEIVDADSWGKFQF

SEQ ID NO: 754248 - protein, 13 aa, Homo sapiens
  CDR3 for beta chain variable domain of TCR clone 377124 (TRBV7-2, TRBJ1-4)
CASSLAGLEKLFY

SEQ ID NO: 754249 - protein, 16 aa, Homo sapiens
  CDR3 for alpha chain variable domain of TCR clone 377125 (TRAV3, TRAJ37)
GAVRGKGSGNTGKLIF

SEQ ID NO: 754250 - protein, 14 aa, Homo sapiens
  CDR3 for beta chain variable domain of TCR clone 377125 (TRBV20-1, TRBJ2-3)
CSARGGTSTDTQYF

SEQ ID NO: 754251 - protein, 13 aa, Homo sapiens
  CDR3 for alpha chain variable domain of TCR clone 377126 (TRAV16, TRAJ11)
CALTQSGYSTPTF

SEQ ID NO: 754252 - protein, 14 aa, Homo sapiens
  CDR3 for beta chain variable domain of TCR clone 377126 (TRBV19, TRBJ2-7)
CASSTTRSSYEQYF

SEQ ID NO: 754253 - protein, 14 aa, Homo sapiens
  CDR3 for alpha chain variable domain of TCR clone 377127 (TRAV29/DV5, TRAJ40)
CAAAVASGTYTYIF

SEQ ID NO: 754254 - protein, 13 aa, Homo sapiens
  CDR3 for beta chain variable domain of TCR clone 377127 (TRBV7-9, TRBJ2-7)
CASSFAGAYEQYF

SEQ ID NO: 754255 - protein, 14 aa, Homo sapiens
  CDR3 for alpha chain variable domain of TCR clone 377128 (TRAV8-4, TRAJ9)
CAVRINTGGFKTIF

SEQ ID NO: 754256 - protein, 14 aa, Homo sapiens
  CDR3 for beta chain variable domain of TCR clone 377128 (TRBV7-2, TRBJ2-7)
CASRSQGAAYEQYF

SEQ ID NO: 754257 - protein, 17 aa, Homo sapiens
  CDR3 for alpha chain variable domain of TCR clone 377129 (TRAV8-3, TRAJ34)
CAIPGKLIFGSGTRLQV

SEQ ID NO: 754258 - protein, 15 aa, Homo sapiens
  CDR3 for beta chain variable domain of TCR clone 377129 (TRBV5-7, TRBJ2-1)
CASSRRLAGDNEQFF

SEQ ID NO: 754259 - protein, 11 aa, Homo sapiens
  CDR3 for alpha chain variable domain of TCR clone 377130 (TRAV1-1, TRAJ23)
CAARQGGKLIF

SEQ ID NO: 754260 - protein, 20 aa, Homo sapiens
  CDR3 for beta chain variable domain of TCR clone 377130 (TRBV7-8, TRBJ2-2)
CASSHLFPGPTIRITGELFF

SEQ ID NO: 754261 - protein, 13 aa, Homo sapiens
  CDR3 for alpha chain variable domain of TCR clone 377131 (TRAV3, TRAJ27)
CAVRPLVAGKSTF

SEQ ID NO: 754262 - protein, 13 aa, Homo sapiens
  CDR3 for beta chain variable domain of TCR clone 377131 (TRBV7-9, TRBJ2-3)
CASSTGSTDTQYF

SEQ ID NO: 754263 - protein, 14 aa, Homo sapiens
  CDR3 for alpha chain variable domain of TCR clone 377132 (TRAV27, TRAJ45)
CAGAQEEVLTDLPL

SEQ ID NO: 754264 - protein, 14 aa, Homo sapiens
  CDR3 for beta chain variable domain of TCR clone 377132 (TRBV19, TRBJ2-1)
CASPTFVLSGEQFF

SEQ ID NO: 754265 - protein, 20 aa, Homo sapiens
  CDR3 for alpha chain variable domain of TCR clone 377133 (TRAV12-3, TRAJ41)
SLFIRDSQPSDSATPEELNF

SEQ ID NO: 754266 - protein, 15 aa, Homo sapiens
  CDR3 for beta chain variable domain of TCR clone 377133 (TRBV5-1, TRBJ2-7)
CASSLDLTSSYEQYF

SEQ ID NO: 754267 - protein, 15 aa, Homo sapiens
  CDR3 for alpha chain variable domain of TCR clone 377134 (TRAV27, TRAJ38)
CAARRNAGNNRKLIW

SEQ ID NO: 754268 - protein, 13 aa, Homo sapiens
  CDR3 for beta chain variable domain of TCR clone 377134 (TRBV12-5, TRBJ2-3)
CAGGDRQSDTQYC

SEQ ID NO: 754269 - protein, 16 aa, Homo sapiens
  CDR3 for alpha chain variable domain of TCR clone 377135 (TRAV20, TRAJ48)
CAVPVGSNFGNEKSTF

SEQ ID NO: 754270 - protein, 12 aa, Homo sapiens
  CDR3 for beta chain variable domain of TCR clone 377135 (TRBV20-1, TRBJ2-7)
CSAGLKMGEQYF

SEQ ID NO: 754271 - protein, 14 aa, Homo sapiens
  CDR3 for alpha chain variable domain of TCR clone 377136 (TRAV4, TRAJ6)
CLVGEAGGSYIPTF

SEQ ID NO: 754272 - protein, 17 aa, Homo sapiens
  CDR3 for beta chain variable domain of TCR clone 377136 (TRBV28, TRBJ2-5)
CASSTPEGDALQETQYF

SEQ ID NO: 754273 - protein, 16 aa, Homo sapiens
  CDR3 for alpha chain variable domain of TCR clone 377137 (TRAV20, TRAJ22)
CAVQASSSGSARQLTF

SEQ ID NO: 754274 - protein, 12 aa, Homo sapiens
  CDR3 for beta chain variable domain of TCR clone 377137 (TRBV7-8, TRBJ2-5)
CASSPRVETQYF

SEQ ID NO: 754275 - protein, 16 aa, Homo sapiens
  CDR3 for alpha chain variable domain of TCR clone 377138 (TRAV12-2, TRAJ45)
CAVNRGSGGGADGLTF

SEQ ID NO: 754276 - protein, 13 aa, Homo sapiens
  CDR3 for beta chain variable domain of TCR clone 377138 (TRBV7-3, TRBJ1-1)
CASSQDWGAEAFF

SEQ ID NO: 754277 - protein, 16 aa, Homo sapiens
  CDR3 for alpha chain variable domain of TCR clone 377139 (TRAV17, TRAJ53)
CATDALSGGSNYKLTF

SEQ ID NO: 754278 - protein, 14 aa, Homo sapiens
  CDR3 for beta chain variable domain of TCR clone 377139 (TRBV12-4, TRBJ1-1)
CASTWTGHDTEAFF

SEQ ID NO: 754279 - protein, 16 aa, Homo sapiens
  CDR3 for alpha chain variable domain of TCR clone 377140 (TRAV30, TRAJ24)
CGTEIVDADSWGKFQF

SEQ ID NO: 754280 - protein, 13 aa, Homo sapiens
  CDR3 for beta chain variable domain of TCR clone 377140 (TRBV7-7, TRBJ2-2)
CASSLTSAGELFC

SEQ ID NO: 754281 - protein, 14 aa, Homo sapiens
  CDR3 for alpha chain variable domain of TCR clone 377141 (TRAV1-1, TRAJ23)
CAVKAYNQGGKLIF

SEQ ID NO: 754282 - protein, 14 aa, Homo sapiens
  CDR3 for beta chain variable domain of TCR clone 377141 (TRBV19, TRBJ2-1)
CASPTFVLSGEQFF

SEQ ID NO: 754283 - protein, 20 aa, Homo sapiens
  CDR3 for alpha chain variable domain of TCR clone 377142 (TRAV12-3, TRAJ41)
SLFIRDSQPSDSATPEALNF

SEQ ID NO: 754284 - protein, 14 aa, Homo sapiens
  CDR3 for beta chain variable domain of TCR clone 377142 (TRBV7-4, TRBJ2-1)
CISVPAAFGGSAFF

SEQ ID NO: 754285 - protein, 10 aa, Homo sapiens
  CDR3 for alpha chain variable domain of TCR clone 377143 (TRAV13-1, TRAJ27)
CAPLARQINL

SEQ ID NO: 754286 - protein, 13 aa, Homo sapiens
  CDR3 for beta chain variable domain of TCR clone 377143 (TRBV7-3, TRBJ1-1)
CASSQDWGAEAVF

SEQ ID NO: 754287 - protein, 13 aa, Homo sapiens
  CDR3 for alpha chain variable domain of TCR clone 377144 (TRAV36/DV7, TRAJ21)
CAVEAYNFNKFYF

SEQ ID NO: 754288 - protein, 13 aa, Homo sapiens
  CDR3 for beta chain variable domain of TCR clone 377144 (TRBV12-4, TRBJ2-7)
CASSPTETYEQYF

SEQ ID NO: 754289 - protein, 15 aa, Homo sapiens
  CDR3 for alpha chain variable domain of TCR clone 377145 (TRAV3, TRAJ22)
CAVRDRGGSARQLTF

SEQ ID NO: 754290 - protein, 14 aa, Homo sapiens
  CDR3 for beta chain variable domain of TCR clone 377145 (TRBV7-3, TRBJ2-3)
CASSSLHTSDTQYF

SEQ ID NO: 754291 - protein, 12 aa, Homo sapiens
  CDR3 for alpha chain variable domain of TCR clone 377146 (TRAV8-3, TRAJ20)
CAVGANDYKLSF

SEQ ID NO: 754292 - protein, 16 aa, Homo sapiens
  CDR3 for beta chain variable domain of TCR clone 377146 (TRBV12-4, TRBJ1-5)
CASSRPIGGSNQPQHF

SEQ ID NO: 754293 - protein, 12 aa, Homo sapiens
  CDR3 for alpha chain variable domain of TCR clone 377147 (TRAV8-3, TRAJ27)
CAVGAEEGKSTF

SEQ ID NO: 754294 - protein, 14 aa, Homo sapiens
  CDR3 for beta chain variable domain of TCR clone 377147 (TRBV2, TRBJ2-1)
CASRLIVGHDEQFF

SEQ ID NO: 754295 - protein, 13 aa, Homo sapiens
  CDR3 for alpha chain variable domain of TCR clone 377148 (TRAV12-1, TRAJ17)
CVVSKAAGHKLNF

SEQ ID NO: 754296 - protein, 17 aa, Homo sapiens
  CDR3 for beta chain variable domain of TCR clone 377148 (TRBV4-1, TRBJ2-5)
CASSQDPSGGPQETQYF

SEQ ID NO: 754297 - protein, 14 aa, Homo sapiens
  CDR3 for alpha chain variable domain of TCR clone 377149 (TRAV2, TRAJ37)
RAVDFTSNTGKLIF

SEQ ID NO: 754298 - protein, 15 aa, Homo sapiens
  CDR3 for beta chain variable domain of TCR clone 377149 (TRBV5-1, TRBJ2-5)
CASSFKGGDQETQYF

SEQ ID NO: 754299 - protein, 14 aa, Homo sapiens
  CDR3 for alpha chain variable domain of TCR clone 377150 (TRAV21, TRAJ35)
CAVMPIGVWNVLHC

SEQ ID NO: 754300 - protein, 12 aa, Homo sapiens
  CDR3 for beta chain variable domain of TCR clone 377150 (TRBV7-9, TRBJ2-7)
CASSIKREEQYF

SEQ ID NO: 754301 - protein, 14 aa, Homo sapiens
  CDR3 for alpha chain variable domain of TCR clone 377151 (TRAV1-2, TRAJ16)
CAVNRFSAGQKLLF

SEQ ID NO: 754302 - protein, 15 aa, Homo sapiens
  CDR3 for beta chain variable domain of TCR clone 377151 (TRBV9, TRBJ2-1)
CASSLAGSSYNEQFF

SEQ ID NO: 754303 - protein, 14 aa, Homo sapiens
  CDR3 for alpha chain variable domain of TCR clone 377152 (TRAV35, TRAJ22)
CAGLRPGSARQLTF

SEQ ID NO: 754304 - protein, 14 aa, Homo sapiens
  CDR3 for beta chain variable domain of TCR clone 377152 (TRBV11-3, TRBJ2-3)
CASSSGQWPDTQYF

SEQ ID NO: 754305 - protein, 11 aa, Homo sapiens
  CDR3 for alpha chain variable domain of TCR clone 377153 (TRAV1-2, TRAJ20)
CAVANDYRLSF

SEQ ID NO: 754306 - protein, 16 aa, Homo sapiens
  CDR3 for beta chain variable domain of TCR clone 377153 (TRBV12-4, TRBJ2-5)
CASSFFVRGRQETQYF

SEQ ID NO: 754307 - protein, 18 aa, Homo sapiens
  CDR3 for alpha chain variable domain of TCR clone 377154 (TRAV21, TRAJ52)
CAVRPSPAGGTSYGTLTF

SEQ ID NO: 754308 - protein, 15 aa, Homo sapiens
  CDR3 for beta chain variable domain of TCR clone 377154 (TRBV20-1, TRBJ2-7)
CSARDRVSGMDEQYF

SEQ ID NO: 754309 - protein, 13 aa, Homo sapiens
  CDR3 for alpha chain variable domain of TCR clone 377155 (TRAV17, TRAJ5)
CAPMDTGRGALTF

SEQ ID NO: 754310 - protein, 11 aa, Homo sapiens
  CDR3 for beta chain variable domain of TCR clone 377155 (TRBV19, TRBJ1-1)
CASSIGSEAFF

SEQ ID NO: 754311 - protein, 13 aa, Homo sapiens
  CDR3 for alpha chain variable domain of TCR clone 377156 (TRAV21, TRAJ20)
FAVGLRVDYKLSF

SEQ ID NO: 754312 - protein, 17 aa, Homo sapiens
  CDR3 for beta chain variable domain of TCR clone 377156 (TRBV28, TRBJ2-1)
CASSSARQALTYNEQFF

SEQ ID NO: 754313 - protein, 13 aa, Homo sapiens
  CDR3 for alpha chain variable domain of TCR clone 377157 (TRAV12-3, TRAJ43)
CAMIRPNNNDMRF

SEQ ID NO: 754314 - protein, 15 aa, Homo sapiens
  CDR3 for beta chain variable domain of TCR clone 377157 (TRBV10-2, TRBJ2-6)
CASSEQGTGANVLTF

SEQ ID NO: 754315 - protein, 14 aa, Homo sapiens
  CDR3 for alpha chain variable domain of TCR clone 377158 (TRAV12-3, TRAJ6)
CTMSATGGSYIPTF

SEQ ID NO: 754316 - protein, 16 aa, Homo sapiens
  CDR3 for beta chain variable domain of TCR clone 377158 (TRBV4-2, TRBJ2-1)
CASSPRAGQGANEQFF

SEQ ID NO: 754317 - protein, 13 aa, Homo sapiens
  CDR3 for alpha chain variable domain of TCR clone 377159 (TRAV21, TRAJ20)
CAVGLRVDYKLSF

SEQ ID NO: 754318 - protein, 15 aa, Homo sapiens
  CDR3 for beta chain variable domain of TCR clone 377159 (TRBV20-1, TRBJ2-7)
CSAESGTSGAYEQYF

SEQ ID NO: 754319 - protein, 15 aa, Homo sapiens
  CDR3 for alpha chain variable domain of TCR clone 377160 (TRAV4, TRAJ39)
SATAVYYFCCNMLTF

SEQ ID NO: 754320 - protein, 18 aa, Homo sapiens
  CDR3 for beta chain variable domain of TCR clone 377160 (TRBV7-9, TRBJ2-1)
CASSLAVSGTSGRNEQFF

SEQ ID NO: 754321 - protein, 13 aa, Homo sapiens
  CDR3 for alpha chain variable domain of TCR clone 377161 (TRAV35, TRAJ44)
CAGLSVTASKLTF

SEQ ID NO: 754322 - protein, 17 aa, Homo sapiens
  CDR3 for beta chain variable domain of TCR clone 377161 (TRBV7-8, TRBJ1-2)
CASSLRPLQGHLYGYTF

SEQ ID NO: 754323 - protein, 14 aa, Homo sapiens
  CDR3 for alpha chain variable domain of TCR clone 377162 (TRAV13-1, TRAJ11)
CAASNRNSGYHPHL

SEQ ID NO: 754324 - protein, 11 aa, Homo sapiens
  CDR3 for beta chain variable domain of TCR clone 377162 (TRBV20-1, TRBJ2-7)
CSARLSYEQYF

SEQ ID NO: 754325 - protein, 10 aa, Homo sapiens
  CDR3 for alpha chain variable domain of TCR clone 377163 (TRAV25, TRAJ53)
CAGSNYKLTF

SEQ ID NO: 754326 - protein, 15 aa, Homo sapiens
  CDR3 for beta chain variable domain of TCR clone 377163 (TRBV7-6, TRBJ2-7)
CASSLGQGASYEQYF

SEQ ID NO: 754327 - protein, 14 aa, Homo sapiens
  CDR3 for alpha chain variable domain of TCR clone 377164 (TRAV13-1, TRAJ44)
CAAKATGTASKLTF

SEQ ID NO: 754328 - protein, 14 aa, Homo sapiens
  CDR3 for beta chain variable domain of TCR clone 377164 (TRBV7-8, TRBJ2-7)
CASSLGDRGSTSGR

SEQ ID NO: 754329 - protein, 12 aa, Homo sapiens
  CDR3 for alpha chain variable domain of TCR clone 377165 (TRAV41, TRAJ34)
CAVVYNTDKLIF

SEQ ID NO: 754330 - protein, 16 aa, Homo sapiens
  CDR3 for beta chain variable domain of TCR clone 377165 (TRBV12-4, TRBJ1-5)
CASSRPVGGSNQPQHF

SEQ ID NO: 754331 - protein, 14 aa, Homo sapiens
  CDR3 for alpha chain variable domain of TCR clone 377166 (TRAV29/DV5, TRAJ36)
CAARRKTGANNLFF

SEQ ID NO: 754332 - protein, 16 aa, Homo sapiens
  CDR3 for beta chain variable domain of TCR clone 377166 (TRBV19, TRBJ2-7)
CASSIDRGATSSTSGR

SEQ ID NO: 754333 - protein, 14 aa, Homo sapiens
  CDR3 for alpha chain variable domain of TCR clone 377167 (TRAV12-2, TRAJ40)
CAVKIPPGTYKYIF

SEQ ID NO: 754334 - protein, 14 aa, Homo sapiens
  CDR3 for beta chain variable domain of TCR clone 377167 (TRBV18, TRBJ2-5)
CASSPLRVQETQYF

SEQ ID NO: 754335 - protein, 15 aa, Homo sapiens
  CDR3 for alpha chain variable domain of TCR clone 377168 (TRAV3, TRAJ5)
CAVRDLDTGRRALTF

SEQ ID NO: 754336 - protein, 18 aa, Homo sapiens
  CDR3 for beta chain variable domain of TCR clone 377168 (TRBV28, TRBJ2-7)
CASSLYAGDNSGLNEQYF

SEQ ID NO: 754337 - protein, 14 aa, Homo sapiens
  CDR3 for alpha chain variable domain of TCR clone 377169 (TRAV13-1, TRAJ44)
CAAKATGTASKLTF

SEQ ID NO: 754338 - protein, 14 aa, Homo sapiens
  CDR3 for beta chain variable domain of TCR clone 377169 (TRBV11-1, TRBJ2-7)
SASSFRQGSYEQYF

SEQ ID NO: 754339 - protein, 14 aa, Homo sapiens
  CDR3 for alpha chain variable domain of TCR clone 377170 (TRAV12-1, TRAJ43)
CVVNCRSNNNDMRF

SEQ ID NO: 754340 - protein, 13 aa, Homo sapiens
  CDR3 for beta chain variable domain of TCR clone 377170 (TRBV10-3, TRBJ2-7)
CASKLAVNYEQYF

SEQ ID NO: 754341 - protein, 13 aa, Homo sapiens
  CDR3 for alpha chain variable domain of TCR clone 377171 (TRAV8-1, TRAJ23)
CAWRYNQGGKLIF

SEQ ID NO: 754342 - protein, 10 aa, Homo sapiens
  CDR3 for beta chain variable domain of TCR clone 377171 (TRBV2, TRBJ2-5)
CASSAATQYF

SEQ ID NO: 754343 - protein, 15 aa, Homo sapiens
  CDR3 for alpha chain variable domain of TCR clone 377172 (TRAV17, TRAJ13)
CATDAGSGGYQKVTV

SEQ ID NO: 754344 - protein, 17 aa, Homo sapiens
  CDR3 for beta chain variable domain of TCR clone 377172 (TRBV11-2, TRBJ2-1)
CASSLYPPGVEYNEQFF

SEQ ID NO: 754345 - protein, 13 aa, Homo sapiens
  CDR3 for alpha chain variable domain of TCR clone 377173 (TRAV36/DV7, TRAJ37)
CAVFSSNTGKLIF

SEQ ID NO: 754346 - protein, 16 aa, Homo sapiens
  CDR3 for beta chain variable domain of TCR clone 377173 (TRBV20-1, TRBJ1-4)
CSAPGQGLLTNEKLFF

SEQ ID NO: 754347 - protein, 15 aa, Homo sapiens
  CDR3 for alpha chain variable domain of TCR clone 377174 (TRAV8-4, TRAJ37)
CAVSRGSGNTGKLIF

SEQ ID NO: 754348 - protein, 16 aa, Homo sapiens
  CDR3 for beta chain variable domain of TCR clone 377174 (TRBV6-1, TRBJ2-5)
CASSETLDRGAETQYF

SEQ ID NO: 754349 - protein, 13 aa, Homo sapiens
  CDR3 for alpha chain variable domain of TCR clone 377175 (TRAV13-2, TRAJ48)
CAEMDFGNEKLTF

SEQ ID NO: 754350 - protein, 15 aa, Homo sapiens
  CDR3 for beta chain variable domain of TCR clone 377175 (TRBV7-9, TRBJ1-6)
CVSSSPGRGNSPLHF

SEQ ID NO: 754351 - protein, 14 aa, Homo sapiens
  CDR3 for alpha chain variable domain of TCR clone 377176 (TRAV17, TRAJ39)
CATDPVRAGNMLTY

SEQ ID NO: 754352 - protein, 15 aa, Homo sapiens
  CDR3 for beta chain variable domain of TCR clone 377176 (TRBV13, TRBJ1-5)
CASSFGQGGVQPQHF

SEQ ID NO: 754353 - protein, 15 aa, Homo sapiens
  CDR3 for alpha chain variable domain of TCR clone 377177 (TRAV8-4, TRAJ48)
CAVSAAYFGNAKLTF

SEQ ID NO: 754354 - protein, 12 aa, Homo sapiens
  CDR3 for beta chain variable domain of TCR clone 377177 (TRBV3-1, TRBJ2-5)
CASSQRGETQYF

SEQ ID NO: 754355 - protein, 12 aa, Homo sapiens
  CDR3 for alpha chain variable domain of TCR clone 377178 (TRAV1-1, TRAJ39)
CAVPVVGNMLTF

SEQ ID NO: 754356 - protein, 15 aa, Homo sapiens
  CDR3 for beta chain variable domain of TCR clone 377178 (TRBV28, TRBJ2-5)
CASSSPLGGGETQYF

SEQ ID NO: 754357 - protein, 13 aa, Homo sapiens
  CDR3 for alpha chain variable domain of TCR clone 377179 (TRAV29/DV5, TRAJ31)
CPASRNNNARLMF

SEQ ID NO: 754358 - protein, 13 aa, Homo sapiens
  CDR3 for beta chain variable domain of TCR clone 377179 (TRBV7-2, TRBJ2-4)
CASSREHANIQYF

SEQ ID NO: 754359 - protein, 13 aa, Homo sapiens
  CDR3 for alpha chain variable domain of TCR clone 377180 (TRAV8-3, TRAJ21)
CAVGAYNFNKFSF

SEQ ID NO: 754360 - protein, 16 aa, Homo sapiens
  CDR3 for beta chain variable domain of TCR clone 377180 (TRBV19, TRBJ2-1)
CASSMGGGSSYNEQFF

SEQ ID NO: 754361 - protein, 14 aa, Homo sapiens
  CDR3 for alpha chain variable domain of TCR clone 377181 (TRAV12-2, TRAJ15)
CAVRDRQAGTALIF

SEQ ID NO: 754362 - protein, 17 aa, Homo sapiens
  CDR3 for beta chain variable domain of TCR clone 377181 (TRBV5-5, TRBJ1-2)
CASSLGSLDGQSEGYTF

SEQ ID NO: 754363 - protein, 14 aa, Homo sapiens
  CDR3 for alpha chain variable domain of TCR clone 377182 (TRAV12-3, TRAJ10)
GHLPLTGGGNKLTF

SEQ ID NO: 754364 - protein, 13 aa, Homo sapiens
  CDR3 for beta chain variable domain of TCR clone 377182 (TRBV2, TRBJ1-6)
CADSGSYNSPLHF

SEQ ID NO: 754365 - protein, 11 aa, Homo sapiens
  CDR3 for alpha chain variable domain of TCR clone 377183 (TRAV20, TRAJ27)
CAVTNAGKSTF

SEQ ID NO: 754366 - protein, 17 aa, Homo sapiens
  CDR3 for beta chain variable domain of TCR clone 377183 (TRBV28, TRBJ2-5)
CASSRQGGLAGAETQYF

SEQ ID NO: 754367 - protein, 14 aa, Homo sapiens
  CDR3 for alpha chain variable domain of TCR clone 377184 (TRAV3, TRAJ36)
CAVREGTGANNLFF

SEQ ID NO: 754368 - protein, 16 aa, Homo sapiens
  CDR3 for beta chain variable domain of TCR clone 377184 (TRBV7-3, TRBJ2-5)
CASIQPGGSVQETQYF

SEQ ID NO: 754369 - protein, 18 aa, Homo sapiens
  CDR3 for alpha chain variable domain of TCR clone 377185 (TRAV17, TRAJ45)
CATSLDLYSGGGADGLTF

SEQ ID NO: 754370 - protein, 15 aa, Homo sapiens
  CDR3 for beta chain variable domain of TCR clone 377185 (TRBV11-2, TRBJ2-1)
CASRKNRGLIYEQFF

SEQ ID NO: 754371 - protein, 16 aa, Homo sapiens
  CDR3 for alpha chain variable domain of TCR clone 377186 (TRAV35, TRAJ37)
CWAFLRGPSNTGKLIF

SEQ ID NO: 754372 - protein, 13 aa, Homo sapiens
  CDR3 for beta chain variable domain of TCR clone 377186 (TRBV2, TRBJ1-2)
CASSVRGNYGYTF

SEQ ID NO: 754373 - protein, 12 aa, Homo sapiens
  CDR3 for alpha chain variable domain of TCR clone 377187 (TRAV1-1, TRAJ23)
CAVTNQGGKLIF

SEQ ID NO: 754374 - protein, 14 aa, Homo sapiens
  CDR3 for beta chain variable domain of TCR clone 377187 (TRBV12-4, TRBJ1-6)
CASNLQGKGSPLLF

SEQ ID NO: 754375 - protein, 13 aa, Homo sapiens
  CDR3 for alpha chain variable domain of TCR clone 377188 (TRAV27, TRAJ6)
CAGGTRGSYIPTL

SEQ ID NO: 754376 - protein, 11 aa, Homo sapiens
  CDR3 for beta chain variable domain of TCR clone 377188 (TRBV29-1, TRBJ2-5)
CSEDRTGTQYF

SEQ ID NO: 754377 - protein, 17 aa, Homo sapiens
  CDR3 for alpha chain variable domain of TCR clone 377189 (TRAV9-2, TRAJ6)
CALSDLHASGGSYIPTF

SEQ ID NO: 754378 - protein, 12 aa, Homo sapiens
  CDR3 for beta chain variable domain of TCR clone 377189 (TRBV5-1, TRBJ2-5)
CASSLGLETQYF

SEQ ID NO: 754379 - protein, 14 aa, Homo sapiens
  CDR3 for alpha chain variable domain of TCR clone 377190 (TRAV26-1, TRAJ38)
CIADNAGNNREMIW

SEQ ID NO: 754380 - protein, 15 aa, Homo sapiens
  CDR3 for beta chain variable domain of TCR clone 377190 (TRBV7-6, TRBJ1-4)
CASSLGAGAGEKLFF

SEQ ID NO: 754381 - protein, 18 aa, Homo sapiens
  CDR3 for alpha chain variable domain of TCR clone 377191 (TRAV12-3, TRAJ52)
CAMSVGGAGGTSYGKLTF

SEQ ID NO: 754382 - protein, 16 aa, Homo sapiens
  CDR3 for beta chain variable domain of TCR clone 377191 (TRBV12-5, TRBJ2-5)
CASGPRTSGNQETQFF

SEQ ID NO: 754383 - protein, 13 aa, Homo sapiens
  CDR3 for alpha chain variable domain of TCR clone 377192 (TRAV3, TRAJ27)
CAVRPLGAGKSTF

SEQ ID NO: 754384 - protein, 17 aa, Homo sapiens
  CDR3 for beta chain variable domain of TCR clone 377192 (TRBV28, TRBJ2-5)
CASSRQGGLAGAETQYF

SEQ ID NO: 754385 - protein, 14 aa, Homo sapiens
  CDR3 for alpha chain variable domain of TCR clone 377193 (TRAV1-2, TRAJ8)
CAVREDKGFQKLVF

SEQ ID NO: 754386 - protein, 15 aa, Homo sapiens
  CDR3 for beta chain variable domain of TCR clone 377193 (TRBV7-2, TRBJ2-1)
CASSPLAGEYNEQFF

SEQ ID NO: 754387 - protein, 11 aa, Homo sapiens
  CDR3 for alpha chain variable domain of TCR clone 377194 (TRAV16, TRAJ31)
CALFNNARLMF

SEQ ID NO: 754388 - protein, 15 aa, Homo sapiens
  CDR3 for beta chain variable domain of TCR clone 377194 (TRBV20-1, TRBJ2-3)
CSARRGETITDTQYF

SEQ ID NO: 754389 - protein, 17 aa, Homo sapiens
  CDR3 for alpha chain variable domain of TCR clone 377195 (TRAV3, TRAJ12)
CAVRDGGRMDSGYKLIF

SEQ ID NO: 754390 - protein, 13 aa, Homo sapiens
  CDR3 for beta chain variable domain of TCR clone 377195 (TRBV4-2, TRBJ1-1)
CASSQAGNTEVFF

SEQ ID NO: 754391 - protein, 14 aa, Homo sapiens
  CDR3 for alpha chain variable domain of TCR clone 377196 (TRAV12-3, TRAJ10)
SHLPLPGGGNKLTF

SEQ ID NO: 754392 - protein, 12 aa, Homo sapiens
  CDR3 for beta chain variable domain of TCR clone 377196 (TRBV7-3, TRBJ2-5)
CASSSPGGTQYF

SEQ ID NO: 754393 - protein, 14 aa, Homo sapiens
  CDR3 for alpha chain variable domain of TCR clone 377197 (TRAV26-1, TRAJ45)
CIEVTGGGADGLTF

SEQ ID NO: 754394 - protein, 16 aa, Homo sapiens
  CDR3 for beta chain variable domain of TCR clone 377197 (TRBV10-2, TRBJ1-1)
CASSECGEGASTEAFF

SEQ ID NO: 754395 - protein, 16 aa, Homo sapiens
  CDR3 for alpha chain variable domain of TCR clone 377198 (TRAV22, TRAJ45)
CAVQRGKRGGADGLTF

SEQ ID NO: 754396 - protein, 16 aa, Homo sapiens
  CDR3 for beta chain variable domain of TCR clone 377198 (TRBV5-1, TRBJ2-5)
CASSLRRTSGQETQYF

SEQ ID NO: 754397 - protein, 16 aa, Homo sapiens
  CDR3 for alpha chain variable domain of TCR clone 377199 (TRAV30, TRAJ24)
CGTELVDADSWGKFQF

SEQ ID NO: 754398 - protein, 15 aa, Homo sapiens
  CDR3 for beta chain variable domain of TCR clone 377199 (TRBV20-1, TRBJ2-7)
CSARDRVSGMDEQYF

SEQ ID NO: 754399 - protein, 13 aa, Homo sapiens
  CDR3 for alpha chain variable domain of TCR clone 377200 (TRAV2, TRAJ40)
RAVVTSGTYKYIF

SEQ ID NO: 754400 - protein, 14 aa, Homo sapiens
  CDR3 for beta chain variable domain of TCR clone 377200 (TRBV19, TRBJ2-1)
CASPTFVSSGEQFF

SEQ ID NO: 754401 - protein, 22 aa, Homo sapiens
  CDR3 for alpha chain variable domain of TCR clone 377201 (TRAV40, )
CLLGDGIPDIQNPDPAAYQLRD

SEQ ID NO: 754402 - protein, 16 aa, Homo sapiens
  CDR3 for beta chain variable domain of TCR clone 377201 (TRBV20-1, TRBJ1-5)
CSAELPGQQTNQPQHF

SEQ ID NO: 754403 - protein, 20 aa, Homo sapiens
  CDR3 for alpha chain variable domain of TCR clone 377202 (TRAV40, )
CLLGDGIPDIQNPDPAGYQL

SEQ ID NO: 754404 - protein, 16 aa, Homo sapiens
  CDR3 for beta chain variable domain of TCR clone 377202 (TRBV20-1, TRBJ1-5)
CSAELPGQQTNQPQHF

SEQ ID NO: 754405 - protein, 11 aa, Homo sapiens
  CDR3 for alpha chain variable domain of TCR clone 377203 (TRAV12-3, TRAJ5)
SWPTGRRALTF

SEQ ID NO: 754406 - protein, 16 aa, Homo sapiens
  CDR3 for beta chain variable domain of TCR clone 377203 (TRBV5-1, TRBJ2-7)
CASRPSFSSNPYEQYF

SEQ ID NO: 754407 - protein, 13 aa, Homo sapiens
  CDR3 for alpha chain variable domain of TCR clone 377204 (TRAV26-2, TRAJ57)
CLLSRGGSEKLVF

SEQ ID NO: 754408 - protein, 16 aa, Homo sapiens
  CDR3 for beta chain variable domain of TCR clone 377204 (TRBV18, TRBJ1-5)
CASSPRTGGGNQPQHF

SEQ ID NO: 754409 - protein, 14 aa, Homo sapiens
  CDR3 for alpha chain variable domain of TCR clone 377205 (TRAV16, TRAJ17)
CALSDRAAGNKLTF

SEQ ID NO: 754410 - protein, 17 aa, Homo sapiens
  CDR3 for beta chain variable domain of TCR clone 377205 (TRBV18, TRBJ2-6)
CASSPRQGAVGANVLTF

SEQ ID NO: 754411 - protein, 15 aa, Homo sapiens
  CDR3 for alpha chain variable domain of TCR clone 377206 (TRAV2, TRAJ37)
CAVGYGSSNTGKLIF

SEQ ID NO: 754412 - protein, 13 aa, Homo sapiens
  CDR3 for beta chain variable domain of TCR clone 377206 (TRBV20-1, TRBJ2-7)
CSAQTGLSYEQYF

SEQ ID NO: 754413 - protein, 18 aa, Homo sapiens
  CDR3 for alpha chain variable domain of TCR clone 377207 (TRAV26-2, TRAJ17)
CCVLLHPAIKAAGNKLTF

SEQ ID NO: 754414 - protein, 13 aa, Homo sapiens
  CDR3 for beta chain variable domain of TCR clone 377207 (TRBV10-3, TRBJ2-7)
CASKLAVNYEQYF

SEQ ID NO: 754415 - protein, 14 aa, Homo sapiens
  CDR3 for alpha chain variable domain of TCR clone 377208 (TRAV8-4, TRAJ13)
CAVTLSGVYQKVTF

SEQ ID NO: 754416 - protein, 16 aa, Homo sapiens
  CDR3 for beta chain variable domain of TCR clone 377208 (TRBV5-7, TRBJ1-4)
CASSPSGGLKTEKLFF

SEQ ID NO: 754417 - protein, 13 aa, Homo sapiens
  CDR3 for alpha chain variable domain of TCR clone 377209 (TRAV8-4, TRAJ48)
CAVSLFGNEKLTF

SEQ ID NO: 754418 - protein, 15 aa, Homo sapiens
  CDR3 for beta chain variable domain of TCR clone 377209 (TRBV7-3, TRBJ2-2)
CASSETGQGTGELFF

SEQ ID NO: 754419 - protein, 12 aa, Homo sapiens
  CDR3 for alpha chain variable domain of TCR clone 377210 (TRAV12-3, TRAJ17)
CAITLTGNKLTF

SEQ ID NO: 754420 - protein, 16 aa, Homo sapiens
  CDR3 for beta chain variable domain of TCR clone 377210 (TRBV5-1, TRBJ2-3)
CASSLGLAVYTDTQYF

SEQ ID NO: 754421 - protein, 12 aa, Homo sapiens
  CDR3 for alpha chain variable domain of TCR clone 377211 (TRAV1-1, TRAJ39)
CAVPVVGNMLTF

SEQ ID NO: 754422 - protein, 15 aa, Homo sapiens
  CDR3 for beta chain variable domain of TCR clone 377211 (TRBV5-1, TRBJ2-1)
CASSFRTPTYNEQFF

SEQ ID NO: 754423 - protein, 14 aa, Homo sapiens
  CDR3 for alpha chain variable domain of TCR clone 377212 (TRAV13-2, TRAJ43)
CAEIPTYNNNDMRF

SEQ ID NO: 754424 - protein, 15 aa, Homo sapiens
  CDR3 for beta chain variable domain of TCR clone 377212 (TRBV7-9, TRBJ2-2)
CASGHLDTFPGELFF

SEQ ID NO: 754425 - protein, 15 aa, Homo sapiens
  CDR3 for alpha chain variable domain of TCR clone 377213 (TRAV26-1, TRAJ29)
CIVRVEGSGNTPLVF

SEQ ID NO: 754426 - protein, 15 aa, Homo sapiens
  CDR3 for beta chain variable domain of TCR clone 377213 (TRBV28, TRBJ2-5)
CASSPGQGSIETKYF

SEQ ID NO: 754427 - protein, 14 aa, Homo sapiens
  CDR3 for alpha chain variable domain of TCR clone 377214 (TRAV35, TRAJ50)
CAGHRKTSYDKVIV

SEQ ID NO: 754428 - protein, 13 aa, Homo sapiens
  CDR3 for beta chain variable domain of TCR clone 377214 (TRBV7-7, TRBJ2-3)
CASSLSRADTQYF

SEQ ID NO: 754429 - protein, 12 aa, Homo sapiens
  CDR3 for alpha chain variable domain of TCR clone 377215 (TRAV35, TRAJ49)
CAGWNTGNQFYF

SEQ ID NO: 754430 - protein, 13 aa, Homo sapiens
  CDR3 for beta chain variable domain of TCR clone 377215 (TRBV5-5, TRBJ1-2)
CASSFWRGEDYTF

SEQ ID NO: 754431 - protein, 11 aa, Homo sapiens
  CDR3 for alpha chain variable domain of TCR clone 377216 (TRAV2, TRAJ16)
CAVGDGQKLLF

SEQ ID NO: 754432 - protein, 16 aa, Homo sapiens
  CDR3 for beta chain variable domain of TCR clone 377216 (TRBV19, TRBJ2-1)
CASSKAGPSSYNEQFF

SEQ ID NO: 754433 - protein, 14 aa, Homo sapiens
  CDR3 for alpha chain variable domain of TCR clone 377217 (TRAV21, TRAJ15)
CAVSLNQAGTDLIF

SEQ ID NO: 754434 - protein, 11 aa, Homo sapiens
  CDR3 for beta chain variable domain of TCR clone 377217 (TRBV20-1, TRBJ2-7)
CSARTSYEQYF

SEQ ID NO: 754435 - protein, 16 aa, Homo sapiens
  CDR3 for alpha chain variable domain of TCR clone 377218 (TRAV17, TRAJ53)
CATDALSGGSNNKLTF

SEQ ID NO: 754436 - protein, 12 aa, Homo sapiens
  CDR3 for beta chain variable domain of TCR clone 377218 (TRBV5-1, TRBJ2-7)
CASSFRGYEQYF

SEQ ID NO: 754437 - protein, 14 aa, Homo sapiens
  CDR3 for alpha chain variable domain of TCR clone 377219 (TRAV23/DV6, TRAJ8)
CAASKNTGFQKLVF

SEQ ID NO: 754438 - protein, 16 aa, Homo sapiens
  CDR3 for beta chain variable domain of TCR clone 377219 (TRBV4-1, TRBJ2-6)
CASSQVGEPGANVLTS

SEQ ID NO: 754439 - protein, 15 aa, Homo sapiens
  CDR3 for alpha chain variable domain of TCR clone 377220 (TRAV8-4, TRAJ7)
GAVSGGNYGNNRLAF

SEQ ID NO: 754440 - protein, 11 aa, Homo sapiens
  CDR3 for beta chain variable domain of TCR clone 377220 (TRBV20-1, TRBJ2-1)
CSLSSGSEQFF

SEQ ID NO: 754441 - protein, 11 aa, Homo sapiens
  CDR3 for alpha chain variable domain of TCR clone 377221 (TRAV3, TRAJ31)
CAVRPDARLMF

SEQ ID NO: 754442 - protein, 15 aa, Homo sapiens
  CDR3 for beta chain variable domain of TCR clone 377221 (TRBV20-1, TRBJ2-7)
CSARDRVSGMDEQYF

SEQ ID NO: 754443 - protein, 11 aa, Homo sapiens
  CDR3 for alpha chain variable domain of TCR clone 377222 (TRAV17, TRAJ9)
CATTGGFKTIF

SEQ ID NO: 754444 - protein, 11 aa, Homo sapiens
  CDR3 for beta chain variable domain of TCR clone 377222 (TRBV29-1, TRBJ2-5)
CSEDRTGTQFF

SEQ ID NO: 754445 - protein, 13 aa, Homo sapiens
  CDR3 for alpha chain variable domain of TCR clone 377223 (TRAV21, TRAJ20)
CAVGLRVDYKLSF

SEQ ID NO: 754446 - protein, 15 aa, Homo sapiens
  CDR3 for beta chain variable domain of TCR clone 377223 (TRBV19, TRBJ2-1)
CASSYSGSPYNEQFF

SEQ ID NO: 754447 - protein, 14 aa, Homo sapiens
  CDR3 for alpha chain variable domain of TCR clone 377224 (TRAV12-1, TRAJ27)
CGEHIRTNSGKSTF

SEQ ID NO: 754448 - protein, 15 aa, Homo sapiens
  CDR3 for beta chain variable domain of TCR clone 377224 (TRBV19, TRBJ1-1)
CASTSGQIQNTEAFF

SEQ ID NO: 754449 - protein, 14 aa, Homo sapiens
  CDR3 for alpha chain variable domain of TCR clone 377225 (TRAV13-2, TRAJ41)
CAERPDWAGYALNF

SEQ ID NO: 754450 - protein, 12 aa, Homo sapiens
  CDR3 for beta chain variable domain of TCR clone 377225 (TRBV7-8, TRBJ2-7)
CASSLGDREQYF

SEQ ID NO: 754451 - protein, 14 aa, Homo sapiens
  CDR3 for alpha chain variable domain of TCR clone 377226 (TRAV17, TRAJ54)
CATDANQGAQKLVF

SEQ ID NO: 754452 - protein, 16 aa, Homo sapiens
  CDR3 for beta chain variable domain of TCR clone 377226 (TRBV19, TRBJ1-2)
CASSTRDSFLRSGYTF

SEQ ID NO: 754453 - protein, 14 aa, Homo sapiens
  CDR3 for alpha chain variable domain of TCR clone 377227 (TRAV16, TRAJ37)
GALDISGNTGKLIF

SEQ ID NO: 754454 - protein, 14 aa, Homo sapiens
  CDR3 for beta chain variable domain of TCR clone 377227 (TRBV7-6, TRBJ2-7)
CASSFRQGADEQYF

SEQ ID NO: 754455 - protein, 15 aa, Homo sapiens
  CDR3 for alpha chain variable domain of TCR clone 377228 (TRAV3, TRAJ47)
CAVRDIGEYGNKLVF

SEQ ID NO: 754456 - protein, 15 aa, Homo sapiens
  CDR3 for beta chain variable domain of TCR clone 377228 (TRBV12-4, TRBJ2-1)
CASSLLATGNNEQFF

SEQ ID NO: 754457 - protein, 17 aa, Homo sapiens
  CDR3 for alpha chain variable domain of TCR clone 377229 (TRAV9-2, TRAJ45)
CALSGYYSGGGADGLTF

SEQ ID NO: 754458 - protein, 13 aa, Homo sapiens
  CDR3 for beta chain variable domain of TCR clone 377229 (TRBV10-3, TRBJ2-7)
CASKLAVNYEQYF

SEQ ID NO: 754459 - protein, 15 aa, Homo sapiens
  CDR3 for alpha chain variable domain of TCR clone 377230 (TRAV26-1, TRAJ29)
CIVRVEGSGNTPLVF

SEQ ID NO: 754460 - protein, 15 aa, Homo sapiens
  CDR3 for beta chain variable domain of TCR clone 377230 (TRBV13, TRBJ1-5)
CASSFGQGGVQPQHF

SEQ ID NO: 754461 - protein, 16 aa, Homo sapiens
  CDR3 for alpha chain variable domain of TCR clone 377231 (TRAV3, TRAJ21)
CAVRDIERGNLKKFYF

SEQ ID NO: 754462 - protein, 13 aa, Homo sapiens
  CDR3 for beta chain variable domain of TCR clone 377231 (TRBV4-2, TRBJ1-1)
CASSQAGNTEAFF

SEQ ID NO: 754463 - protein, 15 aa, Homo sapiens
  CDR3 for alpha chain variable domain of TCR clone 377232 (TRAV3, TRAJ12)
CAVRDIRDSSYKFIF

SEQ ID NO: 754464 - protein, 15 aa, Homo sapiens
  CDR3 for beta chain variable domain of TCR clone 377232 (TRBV27, TRBJ2-7)
CASSLRNEQGYEQYF

SEQ ID NO: 754465 - protein, 11 aa, Homo sapiens
  CDR3 for alpha chain variable domain of TCR clone 377233 (TRAV3, TRAJ21)
CAVGNFNKFYF

SEQ ID NO: 754466 - protein, 14 aa, Homo sapiens
  CDR3 for beta chain variable domain of TCR clone 377233 (TRBV9, TRBJ2-4)
CASSPSGTSGFQYF

SEQ ID NO: 754467 - protein, 11 aa, Homo sapiens
  CDR3 for alpha chain variable domain of TCR clone 377234 (TRAV2, TRAJ13)
CASGGYQKVIF

SEQ ID NO: 754468 - protein, 16 aa, Homo sapiens
  CDR3 for beta chain variable domain of TCR clone 377234 (TRBV2, TRBJ2-1)
CASSVGGSLSYNEQFF

SEQ ID NO: 754469 - protein, 14 aa, Homo sapiens
  CDR3 for alpha chain variable domain of TCR clone 377235 (TRAV1-2, TRAJ8)
CAVREDTGFQKLVF

SEQ ID NO: 754470 - protein, 15 aa, Homo sapiens
  CDR3 for beta chain variable domain of TCR clone 377235 (TRBV12-4, TRBJ1-5)
CQQPPVGGSNQPQHF

SEQ ID NO: 754471 - protein, 14 aa, Homo sapiens
  CDR3 for alpha chain variable domain of TCR clone 377236 (TRAV2, TRAJ37)
CAVDFTSNTDKLTF

SEQ ID NO: 754472 - protein, 15 aa, Homo sapiens
  CDR3 for beta chain variable domain of TCR clone 377236 (TRBV20-1, TRBJ1-1)
CSASRGVTGNTEAFF

SEQ ID NO: 754473 - protein, 17 aa, Homo sapiens
  CDR3 for alpha chain variable domain of TCR clone 377237 (TRAV23/DV6, TRAJ58)
CAARLLRGETSGSRLTF

SEQ ID NO: 754474 - protein, 14 aa, Homo sapiens
  CDR3 for beta chain variable domain of TCR clone 377237 (TRBV7-2, TRBJ2-7)
CASRSQGAAYEQYF

SEQ ID NO: 754475 - protein, 14 aa, Homo sapiens
  CDR3 for alpha chain variable domain of TCR clone 377238 (TRAV1-2, TRAJ8)
CAVREDTGFQKLVS

SEQ ID NO: 754476 - protein, 15 aa, Homo sapiens
  CDR3 for beta chain variable domain of TCR clone 377238 (TRBV6-3, TRBJ2-7)
CASSSPGTVFYAQYF

SEQ ID NO: 754477 - protein, 12 aa, Homo sapiens
  CDR3 for alpha chain variable domain of TCR clone 377239 (TRAV2, TRAJ9)
CAGVAGGFKTIF

SEQ ID NO: 754478 - protein, 16 aa, Homo sapiens
  CDR3 for beta chain variable domain of TCR clone 377239 (TRBV13, TRBJ2-2)
CASSPRTGEHTGELFF

SEQ ID NO: 754479 - protein, 12 aa, Homo sapiens
  CDR3 for alpha chain variable domain of TCR clone 377240 (TRAV12-3, TRAJ17)
CAMTITGNKLTF

SEQ ID NO: 754480 - protein, 12 aa, Homo sapiens
  CDR3 for beta chain variable domain of TCR clone 377240 (TRBV2, TRBJ2-1)
CAYGPPGNEQFF

SEQ ID NO: 754481 - protein, 14 aa, Homo sapiens
  CDR3 for alpha chain variable domain of TCR clone 377241 (TRAV12-3, TRAJ10)
SHLPLTGGGNKLTF

SEQ ID NO: 754482 - protein, 12 aa, Homo sapiens
  CDR3 for beta chain variable domain of TCR clone 377241 (TRBV7-3, TRBJ1-2)
CASSKKGVPVTF

SEQ ID NO: 754483 - protein, 14 aa, Homo sapiens
  CDR3 for alpha chain variable domain of TCR clone 377242 (TRAV26-1, TRAJ38)
CIADTAGNNRKLIW

SEQ ID NO: 754484 - protein, 13 aa, Homo sapiens
  CDR3 for beta chain variable domain of TCR clone 377242 (TRBV20-1, TRBJ1-1)
CSARGGGNTEAVF

SEQ ID NO: 754485 - protein, 14 aa, Homo sapiens
  CDR3 for alpha chain variable domain of TCR clone 377243 (TRAV13-2, TRAJ39)
GDSVRNNAGNMLNF

SEQ ID NO: 754486 - protein, 13 aa, Homo sapiens
  CDR3 for beta chain variable domain of TCR clone 377243 (TRBV20-1, TRBJ2-7)
CSAPGLADYEQYF

SEQ ID NO: 754487 - protein, 15 aa, Homo sapiens
  CDR3 for alpha chain variable domain of TCR clone 377244 (TRAV3, TRAJ47)
CAVRDIGEYGNKLVF

SEQ ID NO: 754488 - protein, 17 aa, Homo sapiens
  CDR3 for beta chain variable domain of TCR clone 377244 (TRBV7-3, TRBJ2-3)
CPSSLMKRMRGADTQYF

SEQ ID NO: 754489 - protein, 13 aa, Homo sapiens
  CDR3 for alpha chain variable domain of TCR clone 377245 (TRAV21, TRAJ27)
CAALNTNAGKSTF

SEQ ID NO: 754490 - protein, 17 aa, Homo sapiens
  CDR3 for beta chain variable domain of TCR clone 377245 (TRBV28, TRBJ2-5)
CASSTPEGDALQETQYF

SEQ ID NO: 754491 - protein, 14 aa, Homo sapiens
  CDR3 for alpha chain variable domain of TCR clone 377246 (TRAV34, TRAJ44)
CGADGTGTASKLTF

SEQ ID NO: 754492 - protein, 20 aa, Homo sapiens
  CDR3 for beta chain variable domain of TCR clone 377246 (TRBV28, TRBJ2-1)
CASTPIGRSPGLAGGNEQFF

SEQ ID NO: 754493 - protein, 14 aa, Homo sapiens
  CDR3 for alpha chain variable domain of TCR clone 377247 (TRAV26-1, TRAJ48)
CIVRVGFGNEKLTF

SEQ ID NO: 754494 - protein, 16 aa, Homo sapiens
  CDR3 for beta chain variable domain of TCR clone 377247 (TRBV5-1, TRBJ1-1)
CASSSGGNSLNTEAFF

SEQ ID NO: 754495 - protein, 16 aa, Homo sapiens
  CDR3 for alpha chain variable domain of TCR clone 377248 (TRAV12-3, TRAJ53)
CAMSPGCGGSNYKLTF

SEQ ID NO: 754496 - protein, 16 aa, Homo sapiens
  CDR3 for beta chain variable domain of TCR clone 377248 (TRBV12-5, TRBJ2-5)
CASGPRTSGNQETQYF

SEQ ID NO: 754497 - protein, 14 aa, Homo sapiens
  CDR3 for alpha chain variable domain of TCR clone 377249 (TRAV1-2, TRAJ16)
CAVNRFSDGQKLFF

SEQ ID NO: 754498 - protein, 17 aa, Homo sapiens
  CDR3 for beta chain variable domain of TCR clone 377249 (TRBV20-1, TRBJ2-1)
CSASSSGLAGSYNEQFF

SEQ ID NO: 754499 - protein, 12 aa, Homo sapiens
  CDR3 for alpha chain variable domain of TCR clone 377250 (TRAV2, TRAJ45)
CAEEDVLTDSPL

SEQ ID NO: 754500 - protein, 14 aa, Homo sapiens
  CDR3 for beta chain variable domain of TCR clone 377250 (TRBV27, TRBJ2-5)
CASSWREGLETQYF

SEQ ID NO: 754501 - protein, 11 aa, Homo sapiens
  CDR3 for alpha chain variable domain of TCR clone 377251 (TRAV3, TRAJ21)
CAVCNFNKFYF

SEQ ID NO: 754502 - protein, 15 aa, Homo sapiens
  CDR3 for beta chain variable domain of TCR clone 377251 (TRBV28, TRBJ2-7)
CASSLISGGSYEQYF

SEQ ID NO: 754503 - protein, 17 aa, Homo sapiens
  CDR3 for alpha chain variable domain of TCR clone 377252 (TRAV23/DV6, TRAJ57)
CAASSTLSRGGSEKLVF

SEQ ID NO: 754504 - protein, 14 aa, Homo sapiens
  CDR3 for beta chain variable domain of TCR clone 377252 (TRBV7-8, TRBJ2-5)
CASSATGGQETQYF

SEQ ID NO: 754505 - protein, 11 aa, Homo sapiens
  CDR3 for alpha chain variable domain of TCR clone 377253 (TRAV4, TRAJ31)
CLVGDNTRLMF

SEQ ID NO: 754506 - protein, 16 aa, Homo sapiens
  CDR3 for beta chain variable domain of TCR clone 377253 (TRBV7-2, TRBJ2-5)
CASSSKWLSGQETQYF

SEQ ID NO: 754507 - protein, 23 aa, Homo sapiens
  CDR3 for alpha chain variable domain of TCR clone 377254 (TRAV26-1, TRAJ38)
CIADNAGNNHIQNPDPAVYQLRD

SEQ ID NO: 754508 - protein, 16 aa, Homo sapiens
  CDR3 for beta chain variable domain of TCR clone 377254 (TRBV7-9, TRBJ1-3)
CASSQTSGLRMGTIYF

SEQ ID NO: 754509 - protein, 15 aa, Homo sapiens
  CDR3 for alpha chain variable domain of TCR clone 377255 (TRAV13-1, TRAJ48)
CAPLGSNFGNEKLTF

SEQ ID NO: 754510 - protein, 16 aa, Homo sapiens
  CDR3 for beta chain variable domain of TCR clone 377255 (TRBV9, TRBJ2-1)
CASSVGGGGNYNEQFF

SEQ ID NO: 754511 - protein, 15 aa, Homo sapiens
  CDR3 for alpha chain variable domain of TCR clone 377256 (TRAV3, TRAJ5)
CAVRDLDTGRRELTF

SEQ ID NO: 754512 - protein, 14 aa, Homo sapiens
  CDR3 for beta chain variable domain of TCR clone 377256 (TRBV25-1, TRBJ1-4)
CASSGGGQPEKLFF

SEQ ID NO: 754513 - protein, 12 aa, Homo sapiens
  CDR3 for alpha chain variable domain of TCR clone 377257 (TRAV2, TRAJ31)
CAVEEGNARLMF

SEQ ID NO: 754514 - protein, 18 aa, Homo sapiens
  CDR3 for beta chain variable domain of TCR clone 377257 (TRBV7-9, TRBJ2-3)
CVSSLDLAGLATPDTQYF

SEQ ID NO: 754515 - protein, 16 aa, Homo sapiens
  CDR3 for alpha chain variable domain of TCR clone 377258 (TRAV16, TRAJ4)
CALSRMFSGGYNKLIF

SEQ ID NO: 754516 - protein, 16 aa, Homo sapiens
  CDR3 for beta chain variable domain of TCR clone 377258 (TRBV24-1, TRBJ2-3)
CATSDPGTGAKDTQYF

SEQ ID NO: 754517 - protein, 16 aa, Homo sapiens
  CDR3 for alpha chain variable domain of TCR clone 377259 (TRAV21, TRAJ37)
CAVRTAGSSNTGKLIF

SEQ ID NO: 754518 - protein, 16 aa, Homo sapiens
  CDR3 for beta chain variable domain of TCR clone 377259 (TRBV2, TRBJ2-3)
CASSTSVEGVTDTQYF

SEQ ID NO: 754519 - protein, 12 aa, Homo sapiens
  CDR3 for alpha chain variable domain of TCR clone 377260 (TRAV1-2, TRAJ33)
CAALASNYQLIW

SEQ ID NO: 754520 - protein, 14 aa, Homo sapiens
  CDR3 for beta chain variable domain of TCR clone 377260 (TRBV19, TRBJ2-3)
CASSAPRGTDTQYF

SEQ ID NO: 754521 - protein, 16 aa, Homo sapiens
  CDR3 for alpha chain variable domain of TCR clone 377261 (TRAV20, TRAJ22)
CAVQASSSGSARQLTF

SEQ ID NO: 754522 - protein, 16 aa, Homo sapiens
  CDR3 for beta chain variable domain of TCR clone 377261 (TRBV20-1, TRBJ1-5)
CRASRGTGYSNQPQHF

SEQ ID NO: 754523 - protein, 15 aa, Homo sapiens
  CDR3 for alpha chain variable domain of TCR clone 377262 (TRAV21, TRAJ24)
CAARSSTDSWGKLQF

SEQ ID NO: 754524 - protein, 14 aa, Homo sapiens
  CDR3 for beta chain variable domain of TCR clone 377262 (TRBV19, TRBJ2-1)
CARGARSFQWEQFF

SEQ ID NO: 754525 - protein, 15 aa, Homo sapiens
  CDR3 for alpha chain variable domain of TCR clone 377263 (TRAV27, TRAJ38)
CAARRNAGNSRKLIW

SEQ ID NO: 754526 - protein, 17 aa, Homo sapiens
  CDR3 for beta chain variable domain of TCR clone 377263 (TRBV13, TRBJ2-3)
CASSLSRVAGGRNTQYF

SEQ ID NO: 754527 - protein, 12 aa, Homo sapiens
  CDR3 for alpha chain variable domain of TCR clone 377264 (TRAV8-1, TRAJ6)
CASSGGSYIPTF

SEQ ID NO: 754528 - protein, 12 aa, Homo sapiens
  CDR3 for beta chain variable domain of TCR clone 377264 (TRBV19, TRBJ1-1)
CASMNIYTEAFF

SEQ ID NO: 754529 - protein, 12 aa, Homo sapiens
  CDR3 for alpha chain variable domain of TCR clone 377265 (TRAV12-3, TRAJ17)
CVMTLTGNKLTF

SEQ ID NO: 754530 - protein, 14 aa, Homo sapiens
  CDR3 for beta chain variable domain of TCR clone 377265 (TRBV7-2, TRBJ2-7)
CASRSQGAAYEQYF

SEQ ID NO: 754531 - protein, 14 aa, Homo sapiens
  CDR3 for alpha chain variable domain of TCR clone 377266 (TRAV8-3, TRAJ17)
CAVGAQTSGNKLTF

SEQ ID NO: 754532 - protein, 11 aa, Homo sapiens
  CDR3 for beta chain variable domain of TCR clone 377266 (TRBV29-1, TRBJ1-4)
CSVSSGEKLFF

SEQ ID NO: 754533 - protein, 11 aa, Homo sapiens
  CDR3 for alpha chain variable domain of TCR clone 377267 (TRAV1-2, TRAJ31)
CAVNNNARLMF

SEQ ID NO: 754534 - protein, 13 aa, Homo sapiens
  CDR3 for beta chain variable domain of TCR clone 377267 (TRBV4-2, TRBJ1-1)
CASSQAGNTEAFF

SEQ ID NO: 754535 - protein, 12 aa, Homo sapiens
  CDR3 for alpha chain variable domain of TCR clone 377268 (TRAV1-1, TRAJ8)
CAGGTGFQKLVF

SEQ ID NO: 754536 - protein, 17 aa, Homo sapiens
  CDR3 for beta chain variable domain of TCR clone 377268 (TRBV7-3, TRBJ2-5)
CASSLGSGRSGSETQYF

SEQ ID NO: 754537 - protein, 17 aa, Homo sapiens
  CDR3 for alpha chain variable domain of TCR clone 377269 (TRAV8-6, TRAJ4)
CAVSDLGVAGGYNKLVF

SEQ ID NO: 754538 - protein, 15 aa, Homo sapiens
  CDR3 for beta chain variable domain of TCR clone 377269 (TRBV10-3, TRBJ2-1)
CAIRNGTSGHNEQFF

SEQ ID NO: 754539 - protein, 12 aa, Homo sapiens
  CDR3 for alpha chain variable domain of TCR clone 377270 (TRAV21, TRAJ11)
CAATSGYSTLTF

SEQ ID NO: 754540 - protein, 13 aa, Homo sapiens
  CDR3 for beta chain variable domain of TCR clone 377270 (TRBV20-1, TRBJ2-7)
QCTELAGVGEQYF

SEQ ID NO: 754541 - protein, 14 aa, Homo sapiens
  CDR3 for alpha chain variable domain of TCR clone 377271 (TRAV8-2, TRAJ13)
CVVSDSGGYQKVTF

SEQ ID NO: 754542 - protein, 15 aa, Homo sapiens
  CDR3 for beta chain variable domain of TCR clone 377271 (TRBV10-2, TRBJ2-6)
CASSEQGTGANVLTF

SEQ ID NO: 754543 - protein, 14 aa, Homo sapiens
  CDR3 for alpha chain variable domain of TCR clone 377272 (TRAV38-1, TRAJ40)
CALRPTSGTYKYIF

SEQ ID NO: 754544 - protein, 13 aa, Homo sapiens
  CDR3 for beta chain variable domain of TCR clone 377272 (TRBV12-4, TRBJ2-7)
CASSLSGVYEQYF

SEQ ID NO: 754545 - protein, 11 aa, Homo sapiens
  CDR3 for alpha chain variable domain of TCR clone 377273 (TRAV20, TRAJ34)
CVVLDTDKLIF

SEQ ID NO: 754546 - protein, 14 aa, Homo sapiens
  CDR3 for beta chain variable domain of TCR clone 377273 (TRBV7-8, TRBJ2-5)
CASSATGGQETQYF

SEQ ID NO: 754547 - protein, 17 aa, Homo sapiens
  CDR3 for alpha chain variable domain of TCR clone 377274 (TRAV4, TRAJ13)
CLVGLQGSSGGYQKVTF

SEQ ID NO: 754548 - protein, 18 aa, Homo sapiens
  CDR3 for beta chain variable domain of TCR clone 377274 (TRBV15, TRBJ2-3)
CATSRDGARSWDTDTQYF

SEQ ID NO: 754549 - protein, 12 aa, Homo sapiens
  CDR3 for alpha chain variable domain of TCR clone 377275 (TRAV12-2, TRAJ10)
WGVTGGGNKLTF

SEQ ID NO: 754550 - protein, 14 aa, Homo sapiens
  CDR3 for beta chain variable domain of TCR clone 377275 (TRBV5-1, TRBJ2-7)
CASSLQGAVDEQYF

SEQ ID NO: 754551 - protein, 12 aa, Homo sapiens
  CDR3 for alpha chain variable domain of TCR clone 377276 (TRAV12-3, TRAJ17)
CAMTLTGNKLTF

SEQ ID NO: 754552 - protein, 20 aa, Homo sapiens
  CDR3 for beta chain variable domain of TCR clone 377276 (TRBV7-8, TRBJ2-2)
CASSHLFPGPTIHITGELYF

SEQ ID NO: 754553 - protein, 14 aa, Homo sapiens
  CDR3 for alpha chain variable domain of TCR clone 377277 (TRAV12-2, TRAJ13)
CAVKKTGGYQKVTF

SEQ ID NO: 754554 - protein, 23 aa, Homo sapiens
  CDR3 for beta chain variable domain of TCR clone 377277 (TRBV4-2, TRBJ2-3)
CASSQDPPRASSSSGGRGDTQYF

SEQ ID NO: 754555 - protein, 12 aa, Homo sapiens
  CDR3 for alpha chain variable domain of TCR clone 377278 (TRAV8-6, TRAJ8)
CAVTPGFQKLVF

SEQ ID NO: 754556 - protein, 16 aa, Homo sapiens
  CDR3 for beta chain variable domain of TCR clone 377278 (TRBV7-3, TRBJ2-2)
CAISLKRGTLSGELFF

SEQ ID NO: 754557 - protein, 16 aa, Homo sapiens
  CDR3 for alpha chain variable domain of TCR clone 377279 (TRAV36/DV7, TRAJ33)
WRPGNKVQDSNYQLIW

SEQ ID NO: 754558 - protein, 15 aa, Homo sapiens
  CDR3 for beta chain variable domain of TCR clone 377279 (TRBV29-1, TRBJ2-1)
CSVGRHPLFYNEQFF

SEQ ID NO: 754559 - protein, 15 aa, Homo sapiens
  CDR3 for alpha chain variable domain of TCR clone 377280 (TRAV8-3, TRAJ37)
CAVGGLSSNTGKLIF

SEQ ID NO: 754560 - protein, 11 aa, Homo sapiens
  CDR3 for beta chain variable domain of TCR clone 377280 (TRBV7-8, TRBJ2-7)
CASSLSLEQYF

SEQ ID NO: 754561 - protein, 12 aa, Homo sapiens
  CDR3 for alpha chain variable domain of TCR clone 377281 (TRAV27, TRAJ36)
CEGMTGANNLFF

SEQ ID NO: 754562 - protein, 14 aa, Homo sapiens
  CDR3 for beta chain variable domain of TCR clone 377281 (TRBV12-4, TRBJ2-3)
CASSLVPSTDTQYF

SEQ ID NO: 754563 - protein, 10 aa, Homo sapiens
  CDR3 for alpha chain variable domain of TCR clone 377282 (TRAV13-1, TRAJ8)
CAAPFQKLVF

SEQ ID NO: 754564 - protein, 20 aa, Homo sapiens
  CDR3 for beta chain variable domain of TCR clone 377282 (TRBV3-1, TRBJ2-6)
CARSPRPGLEGGAGANVLTF

SEQ ID NO: 754565 - protein, 15 aa, Homo sapiens
  CDR3 for alpha chain variable domain of TCR clone 377283 (TRAV25, TRAJ23)
CALAPNYNQGGKLIF

SEQ ID NO: 754566 - protein, 13 aa, Homo sapiens
  CDR3 for beta chain variable domain of TCR clone 377283 (TRBV11-3, TRBJ1-1)
CASSWDGNNEAFF

SEQ ID NO: 754567 - protein, 17 aa, Homo sapiens
  CDR3 for alpha chain variable domain of TCR clone 377284 (TRAV3, TRAJ6)
CAVSDGPRAGGSYIPTF

SEQ ID NO: 754568 - protein, 14 aa, Homo sapiens
  CDR3 for beta chain variable domain of TCR clone 377284 (TRBV7-2, TRBJ2-7)
CARSPKTSFYEQYF

SEQ ID NO: 754569 - protein, 14 aa, Homo sapiens
  CDR3 for alpha chain variable domain of TCR clone 377285 (TRAV26-1, TRAJ21)
CIVRVVYNYNKFYF

SEQ ID NO: 754570 - protein, 11 aa, Homo sapiens
  CDR3 for beta chain variable domain of TCR clone 377285 (TRBV5-6, TRBJ2-5)
CASSLERTQYF

SEQ ID NO: 754571 - protein, 15 aa, Homo sapiens
  CDR3 for alpha chain variable domain of TCR clone 377286 (TRAV21, TRAJ53)
CATLNSGGSNYKLTF

SEQ ID NO: 754572 - protein, 15 aa, Homo sapiens
  CDR3 for beta chain variable domain of TCR clone 377286 (TRBV20-1, TRBJ2-7)
CSARDRVSGVDEQYF

SEQ ID NO: 754573 - protein, 15 aa, Homo sapiens
  CDR3 for alpha chain variable domain of TCR clone 377287 (TRAV12-1, TRAJ45)
CVVLSGGGGADGLTF

SEQ ID NO: 754574 - protein, 14 aa, Homo sapiens
  CDR3 for beta chain variable domain of TCR clone 377287 (TRBV13, TRBJ2-7)
CASSLKGASYEQYF

SEQ ID NO: 754575 - protein, 11 aa, Homo sapiens
  CDR3 for alpha chain variable domain of TCR clone 377288 (TRAV3, TRAJ21)
CAVGNFNKFYF

SEQ ID NO: 754576 - protein, 14 aa, Homo sapiens
  CDR3 for beta chain variable domain of TCR clone 377288 (TRBV7-8, TRBJ2-3)
CASSLEAGTETQYF

SEQ ID NO: 754577 - protein, 13 aa, Homo sapiens
  CDR3 for alpha chain variable domain of TCR clone 377289 (TRAV12-3, TRAJ54)
CAMTPQGAPKLVF

SEQ ID NO: 754578 - protein, 14 aa, Homo sapiens
  CDR3 for beta chain variable domain of TCR clone 377289 (TRBV4-1, TRBJ2-2)
CASSQAVNTGELFF

SEQ ID NO: 754579 - protein, 11 aa, Homo sapiens
  CDR3 for alpha chain variable domain of TCR clone 377290 (TRAV12-1, TRAJ34)
WVVNKGRELIF

SEQ ID NO: 754580 - protein, 15 aa, Homo sapiens
  CDR3 for beta chain variable domain of TCR clone 377290 (TRBV10-3, TRBJ2-1)
CAIRNGTSGHNEQFF

SEQ ID NO: 754581 - protein, 12 aa, Homo sapiens
  CDR3 for alpha chain variable domain of TCR clone 377291 (TRAV12-3, TRAJ17)
CAMTLTGNKLTF

SEQ ID NO: 754582 - protein, 19 aa, Homo sapiens
  CDR3 for beta chain variable domain of TCR clone 377291 (TRBV25-1, TRBJ2-2)
CAILVYRVDRWRKTGELFF

SEQ ID NO: 754583 - protein, 17 aa, Homo sapiens
  CDR3 for alpha chain variable domain of TCR clone 377292 (TRAV8-6, TRAJ58)
CAVSSWVGETSGSRLTF

SEQ ID NO: 754584 - protein, 14 aa, Homo sapiens
  CDR3 for beta chain variable domain of TCR clone 377292 (TRBV4-2, TRBJ2-1)
CACGLDRAYNEQFF

SEQ ID NO: 754585 - protein, 13 aa, Homo sapiens
  CDR3 for alpha chain variable domain of TCR clone 377293 (TRAV12-2, TRAJ4)
CAGFSGGYNKLIF

SEQ ID NO: 754586 - protein, 14 aa, Homo sapiens
  CDR3 for beta chain variable domain of TCR clone 377293 (TRBV12-4, TRBJ2-2)
CASNQGANTGELFF

SEQ ID NO: 754587 - protein, 13 aa, Homo sapiens
  CDR3 for alpha chain variable domain of TCR clone 377294 (TRAV2, TRAJ40)
CAVDTSGTYKYIF

SEQ ID NO: 754588 - protein, 14 aa, Homo sapiens
  CDR3 for beta chain variable domain of TCR clone 377294 (TRBV11-3, TRBJ1-6)
CASSFSGGDSPLHF

SEQ ID NO: 754589 - protein, 15 aa, Homo sapiens
  CDR3 for alpha chain variable domain of TCR clone 377295 (TRAV8-1, TRAJ34)
CAVNSRTYNTDKLIF

SEQ ID NO: 754590 - protein, 15 aa, Homo sapiens
  CDR3 for beta chain variable domain of TCR clone 377295 (TRBV4-1, TRBJ2-1)
CASSQDPGNYNERFF

SEQ ID NO: 754591 - protein, 15 aa, Homo sapiens
  CDR3 for alpha chain variable domain of TCR clone 377296 (TRAV25, TRAJ23)
CALAPNYNQGGKLIF

SEQ ID NO: 754592 - protein, 15 aa, Homo sapiens
  CDR3 for beta chain variable domain of TCR clone 377296 (TRBV20-1, TRBJ2-2)
CSAIPGHSNTGELFF

SEQ ID NO: 754593 - protein, 11 aa, Homo sapiens
  CDR3 for alpha chain variable domain of TCR clone 377297 (TRAV3, TRAJ32)
CAVREGTMVVL

SEQ ID NO: 754594 - protein, 14 aa, Homo sapiens
  CDR3 for beta chain variable domain of TCR clone 377297 (TRBV12-4, TRBJ1-1)
CASSLGTGGTEAFF

SEQ ID NO: 754595 - protein, 13 aa, Homo sapiens
  CDR3 for alpha chain variable domain of TCR clone 377298 (TRAV26-2, TRAJ43)
CILRAVNNNDMRF

SEQ ID NO: 754596 - protein, 17 aa, Homo sapiens
  CDR3 for beta chain variable domain of TCR clone 377298 (TRBV11-3, TRBJ2-6)
CASKWGQGLSGANVLTF

SEQ ID NO: 754597 - protein, 11 aa, Homo sapiens
  CDR3 for alpha chain variable domain of TCR clone 377299 (TRAV21, TRAJ34)
CAVTNTDKLLF

SEQ ID NO: 754598 - protein, 16 aa, Homo sapiens
  CDR3 for beta chain variable domain of TCR clone 377299 (TRBV18, TRBJ1-1)
CASSPGVGGQGGEAFF

SEQ ID NO: 754599 - protein, 14 aa, Homo sapiens
  CDR3 for alpha chain variable domain of TCR clone 377300 (TRAV1-2, TRAJ16)
CAVNRFSDGQQLLF

SEQ ID NO: 754600 - protein, 13 aa, Homo sapiens
  CDR3 for beta chain variable domain of TCR clone 377300 (TRBV2, TRBJ2-7)
CASSVGGSGEQYF

SEQ ID NO: 754601 - protein, 16 aa, Homo sapiens
  CDR3 for alpha chain variable domain of TCR clone 377301 (TRAV2, TRAJ4)
CAVEDRFSGGYNKLIF

SEQ ID NO: 754602 - protein, 13 aa, Homo sapiens
  CDR3 for beta chain variable domain of TCR clone 377301 (TRBV15, TRBJ2-7)
CATSTTGHYKQYF

SEQ ID NO: 754603 - protein, 12 aa, Homo sapiens
  CDR3 for alpha chain variable domain of TCR clone 377302 (TRAV20, TRAJ36)
CAQVTGADNLFF

SEQ ID NO: 754604 - protein, 14 aa, Homo sapiens
  CDR3 for beta chain variable domain of TCR clone 377302 (TRBV6-1, TRBJ2-2)
CASSQRQATGELFF

SEQ ID NO: 754605 - protein, 15 aa, Homo sapiens
  CDR3 for alpha chain variable domain of TCR clone 377303 (TRAV17, TRAJ57)
CATAPSQGGSEKLVF

SEQ ID NO: 754606 - protein, 16 aa, Homo sapiens
  CDR3 for beta chain variable domain of TCR clone 377303 (TRBV12-4, TRBJ1-5)
CSSSRPVGGSNQPQHF

SEQ ID NO: 754607 - protein, 14 aa, Homo sapiens
  CDR3 for alpha chain variable domain of TCR clone 377304 (TRAV26-1, TRAJ30)
CIVRVANRDDKTIF

SEQ ID NO: 754608 - protein, 15 aa, Homo sapiens
  CDR3 for beta chain variable domain of TCR clone 377304 (TRBV7-2, TRBJ1-2)
CASSPRAGWNYGYTF

SEQ ID NO: 754609 - protein, 13 aa, Homo sapiens
  CDR3 for alpha chain variable domain of TCR clone 377305 (TRAV21, TRAJ20)
CAVGLRVDYKLSF

SEQ ID NO: 754610 - protein, 14 aa, Homo sapiens
  CDR3 for beta chain variable domain of TCR clone 377305 (TRBV7-6, TRBJ2-4)
CARSPAPGSFLWYF

SEQ ID NO: 754611 - protein, 12 aa, Homo sapiens
  CDR3 for alpha chain variable domain of TCR clone 377306 (TRAV13-1, TRAJ49)
CAATNTGNQFYF

SEQ ID NO: 754612 - protein, 17 aa, Homo sapiens
  CDR3 for beta chain variable domain of TCR clone 377306 (TRBV25-1, TRBJ2-7)
CASSDARVVFSSYEQYF

SEQ ID NO: 754613 - protein, 13 aa, Homo sapiens
  CDR3 for alpha chain variable domain of TCR clone 377307 (TRAV36/DV7, TRAJ37)
CAVFSSNTCKLIF

SEQ ID NO: 754614 - protein, 15 aa, Homo sapiens
  CDR3 for beta chain variable domain of TCR clone 377307 (TRBV5-1, TRBJ2-2)
CASSSQGGNTGELFF

SEQ ID NO: 754615 - protein, 14 aa, Homo sapiens
  CDR3 for alpha chain variable domain of TCR clone 377308 (TRAV14/DV4, TRAJ7)
SAMREAYGNNRLAF

SEQ ID NO: 754616 - protein, 15 aa, Homo sapiens
  CDR3 for beta chain variable domain of TCR clone 377308 (TRBV19, TRBJ2-1)
CASSINREPSHEQFF

SEQ ID NO: 754617 - protein, 15 aa, Homo sapiens
  CDR3 for alpha chain variable domain of TCR clone 377309 (TRAV13-1, TRAJ32)
CAASIYGGATNKLIF

SEQ ID NO: 754618 - protein, 17 aa, Homo sapiens
  CDR3 for beta chain variable domain of TCR clone 377309 (TRBV7-3, TRBJ2-5)
YASSLGSGRSGSETQYF

SEQ ID NO: 754619 - protein, 13 aa, Homo sapiens
  CDR3 for alpha chain variable domain of TCR clone 377310 (TRAV35, TRAJ36)
CAGPRIGANNLFF

SEQ ID NO: 754620 - protein, 14 aa, Homo sapiens
  CDR3 for beta chain variable domain of TCR clone 377310 (TRBV7-6, TRBJ2-3)
CASSLGTVTDTQYF

SEQ ID NO: 754621 - protein, 15 aa, Homo sapiens
  CDR3 for alpha chain variable domain of TCR clone 377311 (TRAV3, TRAJ47)
CAVRDIGEYGNKLVF

SEQ ID NO: 754622 - protein, 14 aa, Homo sapiens
  CDR3 for beta chain variable domain of TCR clone 377311 (TRBV2, TRBJ2-1)
CASRPGSSYNEQFF

SEQ ID NO: 754623 - protein, 12 aa, Homo sapiens
  CDR3 for alpha chain variable domain of TCR clone 377312 (TRAV27, TRAJ35)
CAGADFGNVLHC

SEQ ID NO: 754624 - protein, 16 aa, Homo sapiens
  CDR3 for beta chain variable domain of TCR clone 377312 (TRBV6-1, TRBJ2-1)
CASILRHGSSYNEQFF

SEQ ID NO: 754625 - protein, 13 aa, Homo sapiens
  CDR3 for alpha chain variable domain of TCR clone 377313 (TRAV4, TRAJ42)
CLVGGGSQGNLIF

SEQ ID NO: 754626 - protein, 16 aa, Homo sapiens
  CDR3 for beta chain variable domain of TCR clone 377313 (TRBV5-1, TRBJ2-3)
CASSLQGRVGADTQYF

SEQ ID NO: 754627 - protein, 14 aa, Homo sapiens
  CDR3 for alpha chain variable domain of TCR clone 377314 (TRAV1-2, TRAJ16)
CAVNRFSDGQKLLF

SEQ ID NO: 754628 - protein, 16 aa, Homo sapiens
  CDR3 for beta chain variable domain of TCR clone 377314 (TRBV11-2, TRBJ2-1)
CASSVTADFSYNEQFF

SEQ ID NO: 754629 - protein, 20 aa, Homo sapiens
  CDR3 for alpha chain variable domain of TCR clone 377315 (TRAV1-1, TRAJ4)
CLLLLRCEGFLSGGYNKLIF

SEQ ID NO: 754630 - protein, 12 aa, Homo sapiens
  CDR3 for beta chain variable domain of TCR clone 377315 (TRBV19, TRBJ1-5)
CASSIAQQPQHF

SEQ ID NO: 754631 - protein, 16 aa, Homo sapiens
  CDR3 for alpha chain variable domain of TCR clone 377316 (TRAV8-3, TRAJ13)
CAVGACPSGGYQKVTF

SEQ ID NO: 754632 - protein, 13 aa, Homo sapiens
  CDR3 for beta chain variable domain of TCR clone 377316 (TRBV7-9, TRBJ1-2)
CASSLKQNYGYTF

SEQ ID NO: 754633 - protein, 15 aa, Homo sapiens
  CDR3 for alpha chain variable domain of TCR clone 377317 (TRAV8-3, TRAJ45)
CASSYSGGGADVLTF

SEQ ID NO: 754634 - protein, 13 aa, Homo sapiens
  CDR3 for beta chain variable domain of TCR clone 377317 (TRBV7-2, TRBJ2-5)
CASSLNRQETQYF

SEQ ID NO: 754635 - protein, 12 aa, Homo sapiens
  CDR3 for alpha chain variable domain of TCR clone 377318 (TRAV27, TRAJ9)
CAGESGGFKTIF

SEQ ID NO: 754636 - protein, 18 aa, Homo sapiens
  CDR3 for beta chain variable domain of TCR clone 377318 (TRBV10-2, TRBJ2-2)
CISATAVHRQADAGELFF

SEQ ID NO: 754637 - protein, 13 aa, Homo sapiens
  CDR3 for alpha chain variable domain of TCR clone 377319 (TRAV27, TRAJ6)
CAGGTRGSYIPTF

SEQ ID NO: 754638 - protein, 14 aa, Homo sapiens
  CDR3 for beta chain variable domain of TCR clone 377319 (TRBV12-4, TRBJ2-5)
CASSFGASGGTQYF

SEQ ID NO: 754639 - protein, 15 aa, Homo sapiens
  CDR3 for alpha chain variable domain of TCR clone 377320 (TRAV23/DV6, TRAJ37)
CAAGEGSSNTGKLIF

SEQ ID NO: 754640 - protein, 15 aa, Homo sapiens
  CDR3 for beta chain variable domain of TCR clone 377320 (TRBV9, TRBJ1-6)
CASSVAGTGDSPLHF

SEQ ID NO: 754641 - protein, 13 aa, Homo sapiens
  CDR3 for alpha chain variable domain of TCR clone 377321 (TRAV17, TRAJ34)
CATVPYNTDKLIF

SEQ ID NO: 754642 - protein, 13 aa, Homo sapiens
  CDR3 for beta chain variable domain of TCR clone 377321 (TRBV10-3, TRBJ2-7)
CASKLAVNYEQYF

SEQ ID NO: 754643 - protein, 15 aa, Homo sapiens
  CDR3 for alpha chain variable domain of TCR clone 377322 (TRAV17, TRAJ22)
CATVAPSGSARQLTF

SEQ ID NO: 754644 - protein, 11 aa, Homo sapiens
  CDR3 for beta chain variable domain of TCR clone 377322 (TRBV18, TRBJ2-5)
CASSPRETQYF

SEQ ID NO: 754645 - protein, 14 aa, Homo sapiens
  CDR3 for alpha chain variable domain of TCR clone 377323 (TRAV24, TRAJ42)
CAQNYEGSQGNLIF

SEQ ID NO: 754646 - protein, 15 aa, Homo sapiens
  CDR3 for beta chain variable domain of TCR clone 377323 (TRBV19, TRBJ1-5)
CASSIPGGAGQPQHF

SEQ ID NO: 754647 - protein, 13 aa, Homo sapiens
  CDR3 for alpha chain variable domain of TCR clone 377324 (TRAV21, TRAJ56)
CAVRTGANSKLSF

SEQ ID NO: 754648 - protein, 15 aa, Homo sapiens
  CDR3 for beta chain variable domain of TCR clone 377324 (TRBV7-9, TRBJ1-1)
CASSHRGTVNTEAFF

SEQ ID NO: 754649 - protein, 15 aa, Homo sapiens
  CDR3 for alpha chain variable domain of TCR clone 377325 (TRAV27, TRAJ38)
CAARRNSGNNRKLIW

SEQ ID NO: 754650 - protein, 13 aa, Homo sapiens
  CDR3 for beta chain variable domain of TCR clone 377325 (TRBV7-3, TRBJ2-1)
CASSLDSYNEQFF

SEQ ID NO: 754651 - protein, 13 aa, Homo sapiens
  CDR3 for alpha chain variable domain of TCR clone 377326 (TRAV21, TRAJ16)
CAVRGSDGQKLLF

SEQ ID NO: 754652 - protein, 13 aa, Homo sapiens
  CDR3 for beta chain variable domain of TCR clone 377326 (TRBV4-1, TRBJ2-2)
CASSQENTGELFF

SEQ ID NO: 754653 - protein, 17 aa, Homo sapiens
  CDR3 for alpha chain variable domain of TCR clone 377327 (TRAV26-1, TRAJ53)
CIVRVDDSGGSNYKLTF

SEQ ID NO: 754654 - protein, 15 aa, Homo sapiens
  CDR3 for beta chain variable domain of TCR clone 377327 (TRBV20-1, TRBJ2-7)
CSARVPAAYFYEQCF

SEQ ID NO: 754655 - protein, 13 aa, Homo sapiens
  CDR3 for alpha chain variable domain of TCR clone 377328 (TRAV38-1, TRAJ42)
CARWGRSQVNLIF

SEQ ID NO: 754656 - protein, 10 aa, Homo sapiens
  CDR3 for beta chain variable domain of TCR clone 377328 (TRBV2, TRBJ2-5)
CASSAATQYF

SEQ ID NO: 754657 - protein, 11 aa, Homo sapiens
  CDR3 for alpha chain variable domain of TCR clone 377329 (TRAV17, TRAJ31)
FATSNNARLMF

SEQ ID NO: 754658 - protein, 17 aa, Homo sapiens
  CDR3 for beta chain variable domain of TCR clone 377329 (TRBV7-8, TRBJ2-6)
CASSAGTGGAGANVLTF

SEQ ID NO: 754659 - protein, 14 aa, Homo sapiens
  CDR3 for alpha chain variable domain of TCR clone 377330 (TRAV8-4, TRAJ40)
CAVIPTSGTYKYIF

SEQ ID NO: 754660 - protein, 16 aa, Homo sapiens
  CDR3 for beta chain variable domain of TCR clone 377330 (TRBV12-5, TRBJ2-5)
CASGPRTSGNQETQYF

SEQ ID NO: 754661 - protein, 16 aa, Homo sapiens
  CDR3 for alpha chain variable domain of TCR clone 377331 (TRAV26-1, )
CIDIQNPDPAVYQLRD

SEQ ID NO: 754662 - protein, 16 aa, Homo sapiens
  CDR3 for beta chain variable domain of TCR clone 377331 (TRBV19, TRBJ2-5)
VSDRLPIFFLGETQYF

SEQ ID NO: 754663 - protein, 15 aa, Homo sapiens
  CDR3 for alpha chain variable domain of TCR clone 377332 (TRAV12-2, TRAJ43)
CAFDMRLGAGTRLTV

SEQ ID NO: 754664 - protein, 17 aa, Homo sapiens
  CDR3 for beta chain variable domain of TCR clone 377332 (TRBV13, TRBJ2-3)
CASSLSRVAGGRNTQYF

SEQ ID NO: 754665 - protein, 14 aa, Homo sapiens
  CDR3 for alpha chain variable domain of TCR clone 377333 (TRAV13-1, TRAJ44)
CAAKATGTASKLTF

SEQ ID NO: 754666 - protein, 14 aa, Homo sapiens
  CDR3 for beta chain variable domain of TCR clone 377333 (TRBV19, TRBJ2-3)
CASSAPRGTDTQYF

SEQ ID NO: 754667 - protein, 15 aa, Homo sapiens
  CDR3 for alpha chain variable domain of TCR clone 377334 (TRAV13-1, TRAJ17)
CAASIERDAGNKLTF

SEQ ID NO: 754668 - protein, 12 aa, Homo sapiens
  CDR3 for beta chain variable domain of TCR clone 377334 (TRBV5-7, TRBJ1-1)
CASSLGRGKAVF

SEQ ID NO: 754669 - protein, 15 aa, Homo sapiens
  CDR3 for alpha chain variable domain of TCR clone 377335 (TRAV13-1, TRAJ44)
CAESRGGGTAIKLTF

SEQ ID NO: 754670 - protein, 16 aa, Homo sapiens
  CDR3 for beta chain variable domain of TCR clone 377335 (TRBV29-1, TRBJ2-7)
CSVEVVGTSGSYEQYF

SEQ ID NO: 754671 - protein, 16 aa, Homo sapiens
  CDR3 for alpha chain variable domain of TCR clone 377336 (TRAV3, TRAJ3)
CAVRDRAKSSASKIIF

SEQ ID NO: 754672 - protein, 17 aa, Homo sapiens
  CDR3 for beta chain variable domain of TCR clone 377336 (TRBV10-3, TRBJ2-7)
CASKLGELRAVLRAGHQ

SEQ ID NO: 754673 - protein, 13 aa, Homo sapiens
  CDR3 for alpha chain variable domain of TCR clone 377337 (TRAV16, TRAJ28)
CALTGAGSYQITF

SEQ ID NO: 754674 - protein, 16 aa, Homo sapiens
  CDR3 for beta chain variable domain of TCR clone 377337 (TRBV28, TRBJ1-5)
CASSLTGQGWNQPQHF

SEQ ID NO: 754675 - protein, 12 aa, Homo sapiens
  CDR3 for alpha chain variable domain of TCR clone 377338 (TRAV25, TRAJ11)
CARASGYSTLTF

SEQ ID NO: 754676 - protein, 14 aa, Homo sapiens
  CDR3 for beta chain variable domain of TCR clone 377338 (TRBV5-8, TRBJ2-3)
CASSLGQGTDTQYF

SEQ ID NO: 754677 - protein, 15 aa, Homo sapiens
  CDR3 for alpha chain variable domain of TCR clone 377339 (TRAV17, TRAJ37)
CATDHGSSNTGQLIF

SEQ ID NO: 754678 - protein, 17 aa, Homo sapiens
  CDR3 for beta chain variable domain of TCR clone 377339 (TRBV7-3, TRBJ2-3)
CASSLMKRMRGADTQYF

SEQ ID NO: 754679 - protein, 13 aa, Homo sapiens
  CDR3 for alpha chain variable domain of TCR clone 377340 (TRAV2, TRAJ24)
CAVSTDSWGKLQL

SEQ ID NO: 754680 - protein, 14 aa, Homo sapiens
  CDR3 for beta chain variable domain of TCR clone 377340 (TRBV13, TRBJ2-5)
CASSLGTAQETQYF

SEQ ID NO: 754681 - protein, 14 aa, Homo sapiens
  CDR3 for alpha chain variable domain of TCR clone 377341 (TRAV1-2, TRAJ16)
CAVNRFSDGQKLLF

SEQ ID NO: 754682 - protein, 14 aa, Homo sapiens
  CDR3 for beta chain variable domain of TCR clone 377341 (TRBV7-2, TRBJ2-7)
CASSPKTSFYEQNF

SEQ ID NO: 754683 - protein, 12 aa, Homo sapiens
  CDR3 for alpha chain variable domain of TCR clone 377342 (TRAV13-1, TRAJ53)
CAAGGSNYKLTC

SEQ ID NO: 754684 - protein, 11 aa, Homo sapiens
  CDR3 for beta chain variable domain of TCR clone 377342 (TRBV2, TRBJ1-1)
CASREGTEAFF

SEQ ID NO: 754685 - protein, 11 aa, Homo sapiens
  CDR3 for alpha chain variable domain of TCR clone 377343 (TRAV12-1, TRAJ31)
CVGRVQRQTHV

SEQ ID NO: 754686 - protein, 14 aa, Homo sapiens
  CDR3 for beta chain variable domain of TCR clone 377343 (TRBV28, TRBJ2-1)
CASSYCTAYNEQFF

SEQ ID NO: 754687 - protein, 10 aa, Homo sapiens
  CDR3 for alpha chain variable domain of TCR clone 377344 (TRAV30, TRAJ48)
CGIGNEKLTF

SEQ ID NO: 754688 - protein, 14 aa, Homo sapiens
  CDR3 for beta chain variable domain of TCR clone 377344 (TRBV7-9, TRBJ1-2)
CASSRQGANYGYTF

SEQ ID NO: 754689 - protein, 12 aa, Homo sapiens
  CDR3 for alpha chain variable domain of TCR clone 377345 (TRAV1-2, TRAJ29)
CAVPSGNTPLVF

SEQ ID NO: 754690 - protein, 16 aa, Homo sapiens
  CDR3 for beta chain variable domain of TCR clone 377345 (TRBV6-1, TRBJ1-2)
CASSGAWQGRSHGYTF

SEQ ID NO: 754691 - protein, 14 aa, Homo sapiens
  CDR3 for alpha chain variable domain of TCR clone 377346 (TRAV8-3, TRAJ39)
CAVGANNAGNMITF

SEQ ID NO: 754692 - protein, 19 aa, Homo sapiens
  CDR3 for beta chain variable domain of TCR clone 377346 (TRBV25-1, TRBJ2-2)
CAILVYRVDRGRKTGELFF

SEQ ID NO: 754693 - protein, 13 aa, Homo sapiens
  CDR3 for alpha chain variable domain of TCR clone 377347 (TRAV21, TRAJ15)
CAVANQAGTALIF

SEQ ID NO: 754694 - protein, 14 aa, Homo sapiens
  CDR3 for beta chain variable domain of TCR clone 377347 (TRBV27, TRBJ2-2)
CASSLEAATGELFF

SEQ ID NO: 754695 - protein, 14 aa, Homo sapiens
  CDR3 for alpha chain variable domain of TCR clone 377348 (TRAV4, TRAJ26)
CLVGPHNYGQNFVF

SEQ ID NO: 754696 - protein, 16 aa, Homo sapiens
  CDR3 for beta chain variable domain of TCR clone 377348 (TRBV10-3, TRBJ2-1)
CAISGVGDGGGGEQFF

SEQ ID NO: 754697 - protein, 13 aa, Homo sapiens
  CDR3 for alpha chain variable domain of TCR clone 377349 (TRAV36/DV7, TRAJ37)
CAVFSSNTGKLIF

SEQ ID NO: 754698 - protein, 15 aa, Homo sapiens
  CDR3 for beta chain variable domain of TCR clone 377349 (TRBV28, TRBJ2-1)
CASSIIAGGRSEHFF

SEQ ID NO: 754699 - protein, 12 aa, Homo sapiens
  CDR3 for alpha chain variable domain of TCR clone 377350 (TRAV16, TRAJ10)
CSRTGGGSKLTF

SEQ ID NO: 754700 - protein, 17 aa, Homo sapiens
  CDR3 for beta chain variable domain of TCR clone 377350 (TRBV6-3, TRBJ2-7)
CTSVPAVPPTVFYEQYF

SEQ ID NO: 754701 - protein, 15 aa, Homo sapiens
  CDR3 for alpha chain variable domain of TCR clone 377351 (TRAV8-1, TRAJ6)
CAVNANPGGSYIPTF

SEQ ID NO: 754702 - protein, 12 aa, Homo sapiens
  CDR3 for beta chain variable domain of TCR clone 377351 (TRBV5-7, TRBJ2-7)
CASSVQGGEQYF

SEQ ID NO: 754703 - protein, 18 aa, Homo sapiens
  CDR3 for alpha chain variable domain of TCR clone 377352 (TRAV12-3, TRAJ52)
CAMSVGGAGGTSYGKLTF

SEQ ID NO: 754704 - protein, 16 aa, Homo sapiens
  CDR3 for beta chain variable domain of TCR clone 377352 (TRBV12-5, TRBJ2-5)
CASGPRTRGNQEAQYF

SEQ ID NO: 754705 - protein, 16 aa, Homo sapiens
  CDR3 for alpha chain variable domain of TCR clone 377353 (TRAV4, TRAJ22)
CLVGDLYSGSARQLTF

SEQ ID NO: 754706 - protein, 16 aa, Homo sapiens
  CDR3 for beta chain variable domain of TCR clone 377353 (TRBV20-1, TRBJ1-2)
CSASTFGGAENYVYTF

SEQ ID NO: 754707 - protein, 14 aa, Homo sapiens
  CDR3 for alpha chain variable domain of TCR clone 377354 (TRAV12-2, TRAJ9)
CAVYMEGGGFKTIF

SEQ ID NO: 754708 - protein, 14 aa, Homo sapiens
  CDR3 for beta chain variable domain of TCR clone 377354 (TRBV2, TRBJ2-5)
CASSEVLAQETQYF

SEQ ID NO: 754709 - protein, 17 aa, Homo sapiens
  CDR3 for alpha chain variable domain of TCR clone 377355 (TRAV4, TRAJ18)
CLVGERSVGSTLGRLYF

SEQ ID NO: 754710 - protein, 16 aa, Homo sapiens
  CDR3 for beta chain variable domain of TCR clone 377355 (TRBV19, TRBJ2-1)
CASSKAGLSSYNEQFF

SEQ ID NO: 754711 - protein, 14 aa, Homo sapiens
  CDR3 for alpha chain variable domain of TCR clone 377356 (TRAV8-1, TRAJ4)
CAVKFSSGYNKLIF

SEQ ID NO: 754712 - protein, 22 aa, Homo sapiens
  CDR3 for beta chain variable domain of TCR clone 377356 (TRBV7-3, TRBJ2-5)
CASARDRVILRPRDPVLRARHA

SEQ ID NO: 754713 - protein, 13 aa, Homo sapiens
  CDR3 for alpha chain variable domain of TCR clone 377357 (TRAV12-2, TRAJ10)
CAVPTGGGNKLTF

SEQ ID NO: 754714 - protein, 13 aa, Homo sapiens
  CDR3 for beta chain variable domain of TCR clone 377357 (TRBV11-2, TRBJ2-1)
CASSLGLAGGRFF

SEQ ID NO: 754715 - protein, 15 aa, Homo sapiens
  CDR3 for alpha chain variable domain of TCR clone 377358 (TRAV35, TRAJ40)
CAGQLGTSGTYKYIF

SEQ ID NO: 754716 - protein, 14 aa, Homo sapiens
  CDR3 for beta chain variable domain of TCR clone 377358 (TRBV7-3, TRBJ2-1)
CASSGAGGTNEQFF

SEQ ID NO: 754717 - protein, 16 aa, Homo sapiens
  CDR3 for alpha chain variable domain of TCR clone 377359 (TRAV30, TRAJ24)
CGTEIVDANSWGKFQF

SEQ ID NO: 754718 - protein, 13 aa, Homo sapiens
  CDR3 for beta chain variable domain of TCR clone 377359 (TRBV20-1, TRBJ1-1)
CSARGGGNTEAFF

SEQ ID NO: 754719 - protein, 12 aa, Homo sapiens
  CDR3 for alpha chain variable domain of TCR clone 377360 (TRAV38-1, TRAJ30)
CAFESEDDKIIF

SEQ ID NO: 754720 - protein, 16 aa, Homo sapiens
  CDR3 for beta chain variable domain of TCR clone 377360 (TRBV10-3, TRBJ2-1)
CAISGVGDGGGGEQFF

SEQ ID NO: 754721 - protein, 14 aa, Homo sapiens
  CDR3 for alpha chain variable domain of TCR clone 377361 (TRAV38-1, TRAJ45)
CASHSGGGADGLTF

SEQ ID NO: 754722 - protein, 13 aa, Homo sapiens
  CDR3 for beta chain variable domain of TCR clone 377361 (TRBV10-3, TRBJ1-2)
CASSERDSYSYTF

SEQ ID NO: 754723 - protein, 15 aa, Homo sapiens
  CDR3 for alpha chain variable domain of TCR clone 377362 (TRAV29/DV5, TRAJ24)
CAASGATDSWGKFQF

SEQ ID NO: 754724 - protein, 12 aa, Homo sapiens
  CDR3 for beta chain variable domain of TCR clone 377362 (TRBV11-2, TRBJ2-2)
SASSLPTGELFF

SEQ ID NO: 754725 - protein, 18 aa, Homo sapiens
  CDR3 for alpha chain variable domain of TCR clone 377363 (TRAV21, TRAJ52)
CAVRPSPAGGTSYGKLTF

SEQ ID NO: 754726 - protein, 15 aa, Homo sapiens
  CDR3 for beta chain variable domain of TCR clone 377363 (TRBV3-1, TRBJ2-1)
CASSQQPSGGNEQFF

SEQ ID NO: 754727 - protein, 19 aa, Homo sapiens
  CDR3 for alpha chain variable domain of TCR clone 377364 (TRAV13-1, TRAJ52)
CAASPYQNAGGTSNGKLTF

SEQ ID NO: 754728 - protein, 14 aa, Homo sapiens
  CDR3 for beta chain variable domain of TCR clone 377364 (TRBV19, TRBJ2-7)
CASTVQGRPYEQYF

SEQ ID NO: 754729 - protein, 10 aa, Homo sapiens
  CDR3 for alpha chain variable domain of TCR clone 377365 (TRAV23/DV6, TRAJ57)
CAASSTLSQG

SEQ ID NO: 754730 - protein, 14 aa, Homo sapiens
  CDR3 for beta chain variable domain of TCR clone 377365 (TRBV7-9, TRBJ2-1)
CASSPRDSLYEQFF

SEQ ID NO: 754731 - protein, 18 aa, Homo sapiens
  CDR3 for alpha chain variable domain of TCR clone 377366 (TRAV21, TRAJ52)
CAVRPSPAGGNSYGKLTF

SEQ ID NO: 754732 - protein, 17 aa, Homo sapiens
  CDR3 for beta chain variable domain of TCR clone 377366 (TRBV20-1, TRBJ2-1)
CSAPPRLAGTRYNEQFF

SEQ ID NO: 754733 - protein, 12 aa, Homo sapiens
  CDR3 for alpha chain variable domain of TCR clone 377367 (TRAV21, TRAJ29)
CAVTSGNTPLVF

SEQ ID NO: 754734 - protein, 15 aa, Homo sapiens
  CDR3 for beta chain variable domain of TCR clone 377367 (TRBV6-3, TRBJ2-7)
CASSSPGTVFYEQYF

SEQ ID NO: 754735 - protein, 14 aa, Homo sapiens
  CDR3 for alpha chain variable domain of TCR clone 377368 (TRAV1-2, TRAJ8)
CAVREDTGFQKRVF

SEQ ID NO: 754736 - protein, 13 aa, Homo sapiens
  CDR3 for beta chain variable domain of TCR clone 377368 (TRBV18, TRBJ1-1)
CASSGGRNTEAFF

SEQ ID NO: 754737 - protein, 15 aa, Homo sapiens
  CDR3 for alpha chain variable domain of TCR clone 377369 (TRAV8-3, TRAJ45)
CASSYSGGGADGLTF

SEQ ID NO: 754738 - protein, 16 aa, Homo sapiens
  CDR3 for beta chain variable domain of TCR clone 377369 (TRBV7-9, TRBJ2-2)
CASSGFGGANTGELYF

SEQ ID NO: 754739 - protein, 20 aa, Homo sapiens
  CDR3 for alpha chain variable domain of TCR clone 377370 (TRAV1-1, TRAJ4)
CLLLLRCEGFLSGRYNKLIF

SEQ ID NO: 754740 - protein, 16 aa, Homo sapiens
  CDR3 for beta chain variable domain of TCR clone 377370 (TRBV28, TRBJ1-4)
CASSPPYRGRSEKLFF

SEQ ID NO: 754741 - protein, 12 aa, Homo sapiens
  CDR3 for alpha chain variable domain of TCR clone 377371 (TRAV36/DV7, TRAJ54)
CAVVLGAQKLVF

SEQ ID NO: 754742 - protein, 13 aa, Homo sapiens
  CDR3 for beta chain variable domain of TCR clone 377371 (TRBV7-9, TRBJ1-2)
CASSLKQNYGYTF

SEQ ID NO: 754743 - protein, 17 aa, Homo sapiens
  CDR3 for alpha chain variable domain of TCR clone 377372 (TRAV3, TRAJ6)
CAVRDGPRAGGSYIPTL

SEQ ID NO: 754744 - protein, 16 aa, Homo sapiens
  CDR3 for beta chain variable domain of TCR clone 377372 (TRBV7-9, TRBJ1-3)
CASSQTSGLRMGTIYF

SEQ ID NO: 754745 - protein, 16 aa, Homo sapiens
  CDR3 for alpha chain variable domain of TCR clone 377373 (TRAV30, TRAJ24)
CGTEIVDADSWGKFQF

SEQ ID NO: 754746 - protein, 13 aa, Homo sapiens
  CDR3 for beta chain variable domain of TCR clone 377373 (TRBV18, TRBJ1-2)
CASSASATEGDSF

SEQ ID NO: 754747 - protein, 14 aa, Homo sapiens
  CDR3 for alpha chain variable domain of TCR clone 377374 (TRAV2, TRAJ9)
CAVEDRSGGFKTIF

SEQ ID NO: 754748 - protein, 16 aa, Homo sapiens
  CDR3 for beta chain variable domain of TCR clone 377374 (TRBV20-1, TRBJ2-3)
CSAVRDKGPIADTQYF

SEQ ID NO: 754749 - protein, 12 aa, Homo sapiens
  CDR3 for alpha chain variable domain of TCR clone 377375 (TRAV25, TRAJ29)
CAGHSGNTPLVF

SEQ ID NO: 754750 - protein, 12 aa, Homo sapiens
  CDR3 for beta chain variable domain of TCR clone 377375 (TRBV20-1, TRBJ2-1)
CSARLGTDEQFF

SEQ ID NO: 754751 - protein, 13 aa, Homo sapiens
  CDR3 for alpha chain variable domain of TCR clone 377376 (TRAV8-6, TRAJ21)
CAVSPSSLNKFYF

SEQ ID NO: 754752 - protein, 14 aa, Homo sapiens
  CDR3 for beta chain variable domain of TCR clone 377376 (TRBV7-3, TRBJ2-2)
CASSSGGYTGELFF

SEQ ID NO: 754753 - protein, 13 aa, Homo sapiens
  CDR3 for alpha chain variable domain of TCR clone 377377 (TRAV13-1, TRAJ39)
CSKYSNAGNMLTF

SEQ ID NO: 754754 - protein, 17 aa, Homo sapiens
  CDR3 for beta chain variable domain of TCR clone 377377 (TRBV11-2, TRBJ2-1)
CASSLYPPGVEYNEQFF

SEQ ID NO: 754755 - protein, 23 aa, Homo sapiens
  CDR3 for alpha chain variable domain of TCR clone 377378 (TRAV10, TRAJ32)
CVVSAGIWWCYKQAHLWNWHSAF

SEQ ID NO: 754756 - protein, 15 aa, Homo sapiens
  CDR3 for beta chain variable domain of TCR clone 377378 (TRBV28, TRBJ1-3)
CASSMGWASGNTIYF

SEQ ID NO: 754757 - protein, 17 aa, Homo sapiens
  CDR3 for alpha chain variable domain of TCR clone 377379 (TRAV8-6, TRAJ58)
CAVSSWVGETSGARLTF

SEQ ID NO: 754758 - protein, 15 aa, Homo sapiens
  CDR3 for beta chain variable domain of TCR clone 377379 (TRBV6-3, TRBJ2-7)
CASSSPGTVFYEQYF

SEQ ID NO: 754759 - protein, 18 aa, Homo sapiens
  CDR3 for alpha chain variable domain of TCR clone 377380 (TRAV2, TRAJ20)
LHVREADAAVYRDCKLSF

SEQ ID NO: 754760 - protein, 13 aa, Homo sapiens
  CDR3 for beta chain variable domain of TCR clone 377380 (TRBV7-3, TRBJ2-5)
CASSFRGSQTQYF

SEQ ID NO: 754761 - protein, 17 aa, Homo sapiens
  CDR3 for alpha chain variable domain of TCR clone 377381 (TRAV3, TRAJ6)
CAVRDGPRAGGSDIPTF

SEQ ID NO: 754762 - protein, 15 aa, Homo sapiens
  CDR3 for beta chain variable domain of TCR clone 377381 (TRBV5-8, TRBJ2-2)
CASSLDRGATGELFF

SEQ ID NO: 754763 - protein, 14 aa, Homo sapiens
  CDR3 for alpha chain variable domain of TCR clone 377382 (TRAV9-2, TRAJ39)
CALDIYNAGNMLTF

SEQ ID NO: 754764 - protein, 16 aa, Homo sapiens
  CDR3 for beta chain variable domain of TCR clone 377382 (TRBV5-6, TRBJ2-3)
CASSSLGGAITDTQYF

SEQ ID NO: 754765 - protein, 12 aa, Homo sapiens
  CDR3 for alpha chain variable domain of TCR clone 377383 (TRAV20, TRAJ37)
CALSSNTGKLIF

SEQ ID NO: 754766 - protein, 14 aa, Homo sapiens
  CDR3 for beta chain variable domain of TCR clone 377383 (TRBV19, TRBJ2-1)
CASPTFVLSGEQFF

SEQ ID NO: 754767 - protein, 13 aa, Homo sapiens
  CDR3 for alpha chain variable domain of TCR clone 377384 (TRAV17, TRAJ57)
CAIYQGGSEKLFF

SEQ ID NO: 754768 - protein, 16 aa, Homo sapiens
  CDR3 for beta chain variable domain of TCR clone 377384 (TRBV4-3, TRBJ2-1)
CASSQERLAGFNEQFF

SEQ ID NO: 754769 - protein, 12 aa, Homo sapiens
  CDR3 for alpha chain variable domain of TCR clone 377385 (TRAV12-3, TRAJ21)
CAMFNNFNKFYF

SEQ ID NO: 754770 - protein, 12 aa, Homo sapiens
  CDR3 for beta chain variable domain of TCR clone 377385 (TRBV14, TRBJ2-7)
CASSRLKGEQYF

SEQ ID NO: 754771 - protein, 17 aa, Homo sapiens
  CDR3 for alpha chain variable domain of TCR clone 377386 (TRAV3, TRAJ6)
CAVRDGPRAGGSYIPSF

SEQ ID NO: 754772 - protein, 13 aa, Homo sapiens
  CDR3 for beta chain variable domain of TCR clone 377386 (TRBV7-3, TRBJ1-1)
CASSQDWGAEAFF

SEQ ID NO: 754773 - protein, 17 aa, Homo sapiens
  CDR3 for alpha chain variable domain of TCR clone 377387 (TRAV3, TRAJ6)
CAVRDGPRAGGRYIPTF

SEQ ID NO: 754774 - protein, 14 aa, Homo sapiens
  CDR3 for beta chain variable domain of TCR clone 377387 (TRBV19, TRBJ2-1)
CASPTFVLSGEQLF

SEQ ID NO: 754775 - protein, 12 aa, Homo sapiens
  CDR3 for alpha chain variable domain of TCR clone 377388 (TRAV13-1, TRAJ21)
CAAKEGFNKFYF

SEQ ID NO: 754776 - protein, 17 aa, Homo sapiens
  CDR3 for beta chain variable domain of TCR clone 377388 (TRBV20-1, TRBJ2-1)
CSASSSGLAGSCNEQFF

SEQ ID NO: 754777 - protein, 14 aa, Homo sapiens
  CDR3 for alpha chain variable domain of TCR clone 377389 (TRAV1-2, TRAJ16)
CAVNRFSDGQKLLF

SEQ ID NO: 754778 - protein, 16 aa, Homo sapiens
  CDR3 for beta chain variable domain of TCR clone 377389 (TRBV7-9, TRBJ2-6)
CASSLKGPLRANVLTF

SEQ ID NO: 754779 - protein, 14 aa, Homo sapiens
  CDR3 for alpha chain variable domain of TCR clone 377390 (TRAV13-1, TRAJ3)
CSKGGYSRASKIIF

SEQ ID NO: 754780 - protein, 14 aa, Homo sapiens
  CDR3 for beta chain variable domain of TCR clone 377390 (TRBV7-3, TRBJ2-1)
CASSLSGSYNEQFF

SEQ ID NO: 754781 - protein, 14 aa, Homo sapiens
  CDR3 for alpha chain variable domain of TCR clone 377391 (TRAV12-2, TRAJ13)
CAVKKTGGYQKVTF

SEQ ID NO: 754782 - protein, 15 aa, Homo sapiens
  CDR3 for beta chain variable domain of TCR clone 377391 (TRBV7-2, TRBJ2-1)
CARSSGLAGGNEQFF

SEQ ID NO: 754783 - protein, 10 aa, Homo sapiens
  CDR3 for alpha chain variable domain of TCR clone 377392 (TRAV23/DV6, TRAJ57)
CAASSTLSQG

SEQ ID NO: 754784 - protein, 15 aa, Homo sapiens
  CDR3 for beta chain variable domain of TCR clone 377392 (TRBV18, TRBJ1-2)
CASSPGNGLGYGYTF

SEQ ID NO: 754785 - protein, 11 aa, Homo sapiens
  CDR3 for alpha chain variable domain of TCR clone 377393 (TRAV2, TRAJ23)
CAVETRGKLIF

SEQ ID NO: 754786 - protein, 14 aa, Homo sapiens
  CDR3 for beta chain variable domain of TCR clone 377393 (TRBV2, TRBJ2-3)
CASSEGQNTDSQYF

SEQ ID NO: 754787 - protein, 14 aa, Homo sapiens
  CDR3 for alpha chain variable domain of TCR clone 377394 (TRAV1-2, TRAJ16)
CAVNRFSDGQKLLF

SEQ ID NO: 754788 - protein, 16 aa, Homo sapiens
  CDR3 for beta chain variable domain of TCR clone 377394 (TRBV5-1, TRBJ2-7)
CASSFTTGTALVEQYF

SEQ ID NO: 754789 - protein, 15 aa, Homo sapiens
  CDR3 for alpha chain variable domain of TCR clone 377395 (TRAV8-6, TRAJ10)
CAVSDQAGGGNKLTF

SEQ ID NO: 754790 - protein, 14 aa, Homo sapiens
  CDR3 for beta chain variable domain of TCR clone 377395 (TRBV28, TRBJ1-1)
CASSESGRGTEAFF

SEQ ID NO: 754791 - protein, 13 aa, Homo sapiens
  CDR3 for alpha chain variable domain of TCR clone 377396 (TRAV12-3, TRAJ7)
CAMPPYGNNRLAF

SEQ ID NO: 754792 - protein, 16 aa, Homo sapiens
  CDR3 for beta chain variable domain of TCR clone 377396 (TRBV20-1, TRBJ1-4)
CSARPYGGELNEKLFF

SEQ ID NO: 754793 - protein, 14 aa, Homo sapiens
  CDR3 for alpha chain variable domain of TCR clone 377397 (TRAV13-1, TRAJ26)
CTASSAHYGQNFVF

SEQ ID NO: 754794 - protein, 17 aa, Homo sapiens
  CDR3 for beta chain variable domain of TCR clone 377397 (TRBV25-1, TRBJ2-5)
CASSRRGGRGGQETQYF

SEQ ID NO: 754795 - protein, 12 aa, Homo sapiens
  CDR3 for alpha chain variable domain of TCR clone 377398 (TRAV8-3, TRAJ20)
CAVGANDYKLSF

SEQ ID NO: 754796 - protein, 15 aa, Homo sapiens
  CDR3 for beta chain variable domain of TCR clone 377398 (TRBV4-1, TRBJ1-4)
CASSDTGGTNENLFF

SEQ ID NO: 754797 - protein, 13 aa, Homo sapiens
  CDR3 for alpha chain variable domain of TCR clone 377399 (TRAV23/DV6, TRAJ34)
CAAIENNTDKLIF

SEQ ID NO: 754798 - protein, 13 aa, Homo sapiens
  CDR3 for beta chain variable domain of TCR clone 377399 (TRBV19, TRBJ2-1)
CASSMYRVNEQFF

SEQ ID NO: 754799 - protein, 13 aa, Homo sapiens
  CDR3 for alpha chain variable domain of TCR clone 377400 (TRAV8-1, TRAJ23)
CAWRDNQGGKLIF

SEQ ID NO: 754800 - protein, 13 aa, Homo sapiens
  CDR3 for beta chain variable domain of TCR clone 377400 (TRBV20-1, TRBJ2-7)
CSATHTSGYEQYF

SEQ ID NO: 754801 - protein, 14 aa, Homo sapiens
  CDR3 for alpha chain variable domain of TCR clone 377401 (TRAV17, TRAJ57)
CATDPQGGSEKLVF

SEQ ID NO: 754802 - protein, 17 aa, Homo sapiens
  CDR3 for beta chain variable domain of TCR clone 377401 (TRBV11-2, TRBJ2-6)
CASSQRDIFSGANVLTF

SEQ ID NO: 754803 - protein, 15 aa, Homo sapiens
  CDR3 for alpha chain variable domain of TCR clone 377402 (TRAV26-1, TRAJ29)
CIVRVEGSGNTPLVF

SEQ ID NO: 754804 - protein, 15 aa, Homo sapiens
  CDR3 for beta chain variable domain of TCR clone 377402 (TRBV7-2, TRBJ2-1)
CASRKTGSAYNEQFF

SEQ ID NO: 754805 - protein, 11 aa, Homo sapiens
  CDR3 for alpha chain variable domain of TCR clone 377403 (TRAV26-1, TRAJ27)
CIDPNAGKSTF

SEQ ID NO: 754806 - protein, 18 aa, Homo sapiens
  CDR3 for beta chain variable domain of TCR clone 377403 (TRBV7-9, TRBJ2-6)
CASSFPGAGIPGANVLTF

SEQ ID NO: 754807 - protein, 15 aa, Homo sapiens
  CDR3 for alpha chain variable domain of TCR clone 377404 (TRAV3, TRAJ20)
CAVRDIKLSDYKLSF

SEQ ID NO: 754808 - protein, 14 aa, Homo sapiens
  CDR3 for beta chain variable domain of TCR clone 377404 (TRBV5-1, TRBJ2-7)
CASSRGESLYEQYF

SEQ ID NO: 754809 - protein, 10 aa, Homo sapiens
  CDR3 for alpha chain variable domain of TCR clone 377405 (TRAV12-2, TRAJ10)
CAAWTGVETH

SEQ ID NO: 754810 - protein, 14 aa, Homo sapiens
  CDR3 for beta chain variable domain of TCR clone 377405 (TRBV2, TRBJ2-3)
CASRLAGLKDTQYF

SEQ ID NO: 754811 - protein, 14 aa, Homo sapiens
  CDR3 for alpha chain variable domain of TCR clone 377406 (TRAV21, TRAJ9)
CCGGGGTGGFNTIF

SEQ ID NO: 754812 - protein, 13 aa, Homo sapiens
  CDR3 for beta chain variable domain of TCR clone 377406 (TRBV12-4, TRBJ1-2)
CASSSGLTVISTF

SEQ ID NO: 754813 - protein, 14 aa, Homo sapiens
  CDR3 for alpha chain variable domain of TCR clone 377407 (TRAV17, TRAJ37)
CATDGSSNTGKLIF

SEQ ID NO: 754814 - protein, 12 aa, Homo sapiens
  CDR3 for beta chain variable domain of TCR clone 377407 (TRBV11-2, TRBJ2-1)
CASLDLVNEQFF

SEQ ID NO: 754815 - protein, 12 aa, Homo sapiens
  CDR3 for alpha chain variable domain of TCR clone 377408 (TRAV26-1, TRAJ53)
CIEGGSNYKLTF

SEQ ID NO: 754816 - protein, 15 aa, Homo sapiens
  CDR3 for beta chain variable domain of TCR clone 377408 (TRBV7-9, TRBJ1-6)
CASSSPGRGNSPLHF

SEQ ID NO: 754817 - protein, 13 aa, Homo sapiens
  CDR3 for alpha chain variable domain of TCR clone 377409 (TRAV21, TRAJ15)
CASPNQAGTALIF

SEQ ID NO: 754818 - protein, 18 aa, Homo sapiens
  CDR3 for beta chain variable domain of TCR clone 377409 (TRBV4-1, TRBJ2-3)
CASSHQLAGGRSTDTQYF

SEQ ID NO: 754819 - protein, 14 aa, Homo sapiens
  CDR3 for alpha chain variable domain of TCR clone 377410 (TRAV12-2, TRAJ40)
CAVKIPSGTYKDIF

SEQ ID NO: 754820 - protein, 14 aa, Homo sapiens
  CDR3 for beta chain variable domain of TCR clone 377410 (TRBV7-8, TRBJ2-7)
CASSPRDRVYEQYF

SEQ ID NO: 754821 - protein, 14 aa, Homo sapiens
  CDR3 for alpha chain variable domain of TCR clone 377411 (TRAV23/DV6, TRAJ13)
CAALYSGGYQKVTF

SEQ ID NO: 754822 - protein, 14 aa, Homo sapiens
  CDR3 for beta chain variable domain of TCR clone 377411 (TRBV7-9, TRBJ2-1)
CASNPRDSLYEQFF

SEQ ID NO: 754823 - protein, 14 aa, Homo sapiens
  CDR3 for alpha chain variable domain of TCR clone 377412 (TRAV12-2, TRAJ45)
CAVNIGGGADGLTF

SEQ ID NO: 754824 - protein, 14 aa, Homo sapiens
  CDR3 for beta chain variable domain of TCR clone 377412 (TRBV11-3, TRBJ2-3)
CASSLDPATDTQYF

SEQ ID NO: 754825 - protein, 14 aa, Homo sapiens
  CDR3 for alpha chain variable domain of TCR clone 377413 (TRAV13-1, TRAJ29)
CSASSNSGNTPLVF

SEQ ID NO: 754826 - protein, 15 aa, Homo sapiens
  CDR3 for beta chain variable domain of TCR clone 377413 (TRBV12-4, TRBJ2-5)
CASSPPTGLQETQYF

SEQ ID NO: 754827 - protein, 13 aa, Homo sapiens
  CDR3 for alpha chain variable domain of TCR clone 377414 (TRAV1-2, TRAJ9)
CAALNTGGFKTIF

SEQ ID NO: 754828 - protein, 13 aa, Homo sapiens
  CDR3 for beta chain variable domain of TCR clone 377414 (TRBV12-4, TRBJ1-2)
CASSSGLTVISTF

SEQ ID NO: 754829 - protein, 14 aa, Homo sapiens
  CDR3 for alpha chain variable domain of TCR clone 377415 (TRAV3, TRAJ40)
CAVRDMTGTYKYIF

SEQ ID NO: 754830 - protein, 16 aa, Homo sapiens
  CDR3 for beta chain variable domain of TCR clone 377415 (TRBV18, TRBJ2-7)
CGSSPGRAGGAYEQYF

SEQ ID NO: 754831 - protein, 15 aa, Homo sapiens
  CDR3 for alpha chain variable domain of TCR clone 377416 (TRAV3, TRAJ22)
CTVRDRGGSARQLTF

SEQ ID NO: 754832 - protein, 14 aa, Homo sapiens
  CDR3 for beta chain variable domain of TCR clone 377416 (TRBV20-1, TRBJ2-5)
CSALVPGSQETQYF

SEQ ID NO: 754833 - protein, 14 aa, Homo sapiens
  CDR3 for alpha chain variable domain of TCR clone 377417 (TRAV13-1, TRAJ35)
CAASKGGFGNVLHC

SEQ ID NO: 754834 - protein, 15 aa, Homo sapiens
  CDR3 for beta chain variable domain of TCR clone 377417 (TRBV7-9, TRBJ1-6)
CASSSPGRQNSPLHF

SEQ ID NO: 754835 - protein, 15 aa, Homo sapiens
  CDR3 for alpha chain variable domain of TCR clone 377418 (TRAV3, TRAJ5)
CAVRDLDTGRRALTF

SEQ ID NO: 754836 - protein, 14 aa, Homo sapiens
  CDR3 for beta chain variable domain of TCR clone 377418 (TRBV12-4, TRBJ1-3)
CASTLTGAGNTIYF

SEQ ID NO: 754837 - protein, 11 aa, Homo sapiens
  CDR3 for alpha chain variable domain of TCR clone 377419 (TRAV35, TRAJ30)
CAGPGDDKIIF

SEQ ID NO: 754838 - protein, 16 aa, Homo sapiens
  CDR3 for beta chain variable domain of TCR clone 377419 (TRBV7-2, TRBJ2-6)
CASSLAGRSGANVLTF

SEQ ID NO: 754839 - protein, 11 aa, Homo sapiens
  CDR3 for alpha chain variable domain of TCR clone 377420 (TRAV4, TRAJ31)
CLVGDNARLMF

SEQ ID NO: 754840 - protein, 16 aa, Homo sapiens
  CDR3 for beta chain variable domain of TCR clone 377420 (TRBV19, TRBJ2-1)
CASSKAGPSSYNEQFF

SEQ ID NO: 754841 - protein, 14 aa, Homo sapiens
  CDR3 for alpha chain variable domain of TCR clone 377421 (TRAV12-2, TRAJ49)
CAVTLGLYGNQFYF

SEQ ID NO: 754842 - protein, 13 aa, Homo sapiens
  CDR3 for beta chain variable domain of TCR clone 377421 (TRBV7-9, TRBJ1-2)
CASSLKQNYGYTF

SEQ ID NO: 754843 - protein, 14 aa, Homo sapiens
  CDR3 for alpha chain variable domain of TCR clone 377422 (TRAV12-3, TRAJ10)
SHLPLTGGGNELTF

SEQ ID NO: 754844 - protein, 19 aa, Homo sapiens
  CDR3 for beta chain variable domain of TCR clone 377422 (TRBV25-1, TRBJ2-2)
CAILVYRVDRGRKTGELFF

SEQ ID NO: 754845 - protein, 14 aa, Homo sapiens
  CDR3 for alpha chain variable domain of TCR clone 377423 (TRAV8-4, TRAJ9)
CAVRINTGGFKTIF

SEQ ID NO: 754846 - protein, 16 aa, Homo sapiens
  CDR3 for beta chain variable domain of TCR clone 377423 (TRBV24-1, TRBJ2-3)
CATSDPGTGATDTQYF

SEQ ID NO: 754847 - protein, 14 aa, Homo sapiens
  CDR3 for alpha chain variable domain of TCR clone 377424 (TRAV13-1, TRAJ35)
CAASKGGFGNVLHC

SEQ ID NO: 754848 - protein, 15 aa, Homo sapiens
  CDR3 for beta chain variable domain of TCR clone 377424 (TRBV28, TRBJ2-5)
CASSPPWSYQETQYF

SEQ ID NO: 754849 - protein, 16 aa, Homo sapiens
  CDR3 for alpha chain variable domain of TCR clone 377425 (TRAV30, TRAJ24)
CGTEIVDADSWGKFQF

SEQ ID NO: 754850 - protein, 15 aa, Homo sapiens
  CDR3 for beta chain variable domain of TCR clone 377425 (TRBV4-3, TRBJ1-5)
CASSQEAVGGQTQHF

SEQ ID NO: 754851 - protein, 14 aa, Homo sapiens
  CDR3 for alpha chain variable domain of TCR clone 377426 (TRAV1-2, TRAJ16)
CAVKRFSDGQKLLF

SEQ ID NO: 754852 - protein, 14 aa, Homo sapiens
  CDR3 for beta chain variable domain of TCR clone 377426 (TRBV4-1, TRBJ2-2)
CASSQAVNTGELFF

SEQ ID NO: 754853 - protein, 15 aa, Homo sapiens
  CDR3 for alpha chain variable domain of TCR clone 377427 (TRAV13-1, TRAJ22)
CAAIPLSGSARQLTF

SEQ ID NO: 754854 - protein, 15 aa, Homo sapiens
  CDR3 for beta chain variable domain of TCR clone 377427 (TRBV20-1, TRBJ2-7)
CSARDRVSGMDEQYF

SEQ ID NO: 754855 - protein, 18 aa, Homo sapiens
  CDR3 for alpha chain variable domain of TCR clone 377428 (TRAV13-1, TRAJ52)
CAAKNPNAGGTSYGRLTF

SEQ ID NO: 754856 - protein, 13 aa, Homo sapiens
  CDR3 for beta chain variable domain of TCR clone 377428 (TRBV11-2, TRBJ1-6)
CASSLAGVSPLHF

SEQ ID NO: 754857 - protein, 15 aa, Homo sapiens
  CDR3 for alpha chain variable domain of TCR clone 377429 (TRAV17, TRAJ22)
CATVAPSGSARQLTF

SEQ ID NO: 754858 - protein, 15 aa, Homo sapiens
  CDR3 for beta chain variable domain of TCR clone 377429 (TRBV27, TRBJ1-6)
CASSFDRGLWSPLHF

SEQ ID NO: 754859 - protein, 15 aa, Homo sapiens
  CDR3 for alpha chain variable domain of TCR clone 377430 (TRAV12-3, TRAJ48)
CAMNAKNFGNEKLTF

SEQ ID NO: 754860 - protein, 14 aa, Homo sapiens
  CDR3 for beta chain variable domain of TCR clone 377430 (TRBV2, TRBJ1-6)
CASSESRNKSPLHF

SEQ ID NO: 754861 - protein, 23 aa, Homo sapiens
  CDR3 for alpha chain variable domain of TCR clone 377431 (TRAV26-1, TRAJ38)
CIADNAGNNHLQNPDPAVYQLRD

SEQ ID NO: 754862 - protein, 13 aa, Homo sapiens
  CDR3 for beta chain variable domain of TCR clone 377431 (TRBV20-1, TRBJ1-1)
CSARGGGNTEAFF

SEQ ID NO: 754863 - protein, 15 aa, Homo sapiens
  CDR3 for alpha chain variable domain of TCR clone 377432 (TRAV2, TRAJ9)
CAVEDRGTGGFKTIF

SEQ ID NO: 754864 - protein, 19 aa, Homo sapiens
  CDR3 for beta chain variable domain of TCR clone 377432 (TRBV28, TRBJ2-7)
CASSYYGTSRLGWVYEQYF

SEQ ID NO: 754865 - protein, 16 aa, Homo sapiens
  CDR3 for alpha chain variable domain of TCR clone 377433 (TRAV3, TRAJ10)
CAVRDMRAGGGNKLTF

SEQ ID NO: 754866 - protein, 16 aa, Homo sapiens
  CDR3 for beta chain variable domain of TCR clone 377433 (TRBV6-1, TRBJ2-1)
CASSARLAGSYNEQFF

SEQ ID NO: 754867 - protein, 13 aa, Homo sapiens
  CDR3 for alpha chain variable domain of TCR clone 377434 (TRAV12-1, TRAJ29)
CAGRNSGNTPLVF

SEQ ID NO: 754868 - protein, 14 aa, Homo sapiens
  CDR3 for beta chain variable domain of TCR clone 377434 (TRBV7-2, TRBJ2-7)
CASRSQGAAYEQYF

SEQ ID NO: 754869 - protein, 10 aa, Homo sapiens
  CDR3 for alpha chain variable domain of TCR clone 377435 (TRAV12-1, TRAJ37)
ARGNTGKLIF

SEQ ID NO: 754870 - protein, 11 aa, Homo sapiens
  CDR3 for beta chain variable domain of TCR clone 377435 (TRBV7-8, TRBJ2-7)
CASSLSLEQYF

SEQ ID NO: 754871 - protein, 17 aa, Homo sapiens
  CDR3 for alpha chain variable domain of TCR clone 377436 (TRAV3, TRAJ42)
CAVRDRDYGGSQGNLIL

SEQ ID NO: 754872 - protein, 13 aa, Homo sapiens
  CDR3 for beta chain variable domain of TCR clone 377436 (TRBV10-3, TRBJ2-7)
CASKLAVNYEQYF

SEQ ID NO: 754873 - protein, 13 aa, Homo sapiens
  CDR3 for alpha chain variable domain of TCR clone 377437 (TRAV1-2, TRAJ26)
SAVRPNYGQNFVF

SEQ ID NO: 754874 - protein, 14 aa, Homo sapiens
  CDR3 for beta chain variable domain of TCR clone 377437 (TRBV4-1, TRBJ2-5)
CASSQDLALETQYF

SEQ ID NO: 754875 - protein, 13 aa, Homo sapiens
  CDR3 for alpha chain variable domain of TCR clone 377438 (TRAV8-3, TRAJ43)
CAVGPDNNNDMRF

SEQ ID NO: 754876 - protein, 13 aa, Homo sapiens
  CDR3 for beta chain variable domain of TCR clone 377438 (TRBV12-4, TRBJ2-7)
CASSPTETYEQYF

SEQ ID NO: 754877 - protein, 10 aa, Homo sapiens
  CDR3 for alpha chain variable domain of TCR clone 377439 (TRAV39, TRAJ49)
CAVAGNQFYF

SEQ ID NO: 754878 - protein, 15 aa, Homo sapiens
  CDR3 for beta chain variable domain of TCR clone 377439 (TRBV10-3, TRBJ2-3)
CAISLTSGGTDTQYF

SEQ ID NO: 754879 - protein, 22 aa, Homo sapiens
  CDR3 for alpha chain variable domain of TCR clone 377440 (TRAV1-1, TRAJ30)
CAVRDQTEMTRSSLEKGHDFIF

SEQ ID NO: 754880 - protein, 15 aa, Homo sapiens
  CDR3 for beta chain variable domain of TCR clone 377440 (TRBV6-3, TRBJ2-7)
CASSSPGTVFYEQYF

SEQ ID NO: 754881 - protein, 13 aa, Homo sapiens
  CDR3 for alpha chain variable domain of TCR clone 377441 (TRAV21, TRAJ27)
CAARPGNAGKSTF

SEQ ID NO: 754882 - protein, 15 aa, Homo sapiens
  CDR3 for beta chain variable domain of TCR clone 377441 (TRBV20-1, TRBJ2-7)
CSARDRVSGMDAQYF

SEQ ID NO: 754883 - protein, 16 aa, Homo sapiens
  CDR3 for alpha chain variable domain of TCR clone 377442 (TRAV1-2, TRAJ17)
CAVRDGFKAAVNKLTF

SEQ ID NO: 754884 - protein, 14 aa, Homo sapiens
  CDR3 for beta chain variable domain of TCR clone 377442 (TRBV6-1, TRBJ2-5)
CASSYAGGEETQYF

SEQ ID NO: 754885 - protein, 16 aa, Homo sapiens
  CDR3 for alpha chain variable domain of TCR clone 377443 (TRAV26-2, TRAJ40)
CILRDVIGGGTYKYIF

SEQ ID NO: 754886 - protein, 12 aa, Homo sapiens
  CDR3 for beta chain variable domain of TCR clone 377443 (TRBV11-2, TRBJ2-1)
CASSPGNNEQFF

SEQ ID NO: 754887 - protein, 14 aa, Homo sapiens
  CDR3 for alpha chain variable domain of TCR clone 377444 (TRAV1-2, TRAJ8)
CAVREDTGFQKLVF

SEQ ID NO: 754888 - protein, 15 aa, Homo sapiens
  CDR3 for beta chain variable domain of TCR clone 377444 (TRBV7-3, TRBJ2-2)
CASSETGQGAGELFF

SEQ ID NO: 754889 - protein, 12 aa, Homo sapiens
  CDR3 for alpha chain variable domain of TCR clone 377445 (TRAV16, TRAJ10)
CSRTGGGNKLTF

SEQ ID NO: 754890 - protein, 14 aa, Homo sapiens
  CDR3 for beta chain variable domain of TCR clone 377445 (TRBV2, TRBJ1-5)
CASSGTGFNQPQHF

SEQ ID NO: 754891 - protein, 12 aa, Homo sapiens
  CDR3 for alpha chain variable domain of TCR clone 377446 (TRAV17, TRAJ57)
CATDGGSEKLVF

SEQ ID NO: 754892 - protein, 13 aa, Homo sapiens
  CDR3 for beta chain variable domain of TCR clone 377446 (TRBV7-9, TRBJ2-7)
CASSFAGAYEQHL

SEQ ID NO: 754893 - protein, 11 aa, Homo sapiens
  CDR3 for alpha chain variable domain of TCR clone 377447 (TRAV23/DV6, TRAJ48)
CAPRWGWKLTF

SEQ ID NO: 754894 - protein, 13 aa, Homo sapiens
  CDR3 for beta chain variable domain of TCR clone 377447 (TRBV12-4, TRBJ2-5)
CASSPGTEETQYF

SEQ ID NO: 754895 - protein, 15 aa, Homo sapiens
  CDR3 for alpha chain variable domain of TCR clone 377448 (TRAV3, TRAJ9)
CAVRDSNTGGFKTIF

SEQ ID NO: 754896 - protein, 15 aa, Homo sapiens
  CDR3 for beta chain variable domain of TCR clone 377448 (TRBV5-1, TRBJ2-3)
CASSVTSGSTDTQYF

SEQ ID NO: 754897 - protein, 12 aa, Homo sapiens
  CDR3 for alpha chain variable domain of TCR clone 377449 (TRAV12-3, TRAJ29)
CAAREGKTPLVF

SEQ ID NO: 754898 - protein, 17 aa, Homo sapiens
  CDR3 for beta chain variable domain of TCR clone 377449 (TRBV18, TRBJ2-1)
CASSPLAAGAGDNEQFF

SEQ ID NO: 754899 - protein, 10 aa, Homo sapiens
  CDR3 for alpha chain variable domain of TCR clone 377450 (TRAV12-2, TRAJ52)
RSTSYGKLTF

SEQ ID NO: 754900 - protein, 11 aa, Homo sapiens
  CDR3 for beta chain variable domain of TCR clone 377450 (TRBV11-2, TRBJ2-2)
CDSSLPGELFF

SEQ ID NO: 754901 - protein, 15 aa, Homo sapiens
  CDR3 for alpha chain variable domain of TCR clone 377451 (TRAV17, TRAJ57)
CATGPSKGGSEKLVF

SEQ ID NO: 754902 - protein, 17 aa, Homo sapiens
  CDR3 for beta chain variable domain of TCR clone 377451 (TRBV12-4, TRBJ2-1)
CASSPGLAGGRINEQFF

SEQ ID NO: 754903 - protein, 14 aa, Homo sapiens
  CDR3 for alpha chain variable domain of TCR clone 377452 (TRAV1-2, TRAJ16)
CAVNRFSDGQKLLF

SEQ ID NO: 754904 - protein, 17 aa, Homo sapiens
  CDR3 for beta chain variable domain of TCR clone 377452 (TRBV20-1, TRBJ2-1)
CSASSAGLAGSYNEQFF

SEQ ID NO: 754905 - protein, 12 aa, Homo sapiens
  CDR3 for alpha chain variable domain of TCR clone 377453 (TRAV35, TRAJ39)
LSPNNAGNMLTF

SEQ ID NO: 754906 - protein, 16 aa, Homo sapiens
  CDR3 for beta chain variable domain of TCR clone 377453 (TRBV2, TRBJ2-3)
CASSTPVEGVTDTQYF

SEQ ID NO: 754907 - protein, 14 aa, Homo sapiens
  CDR3 for alpha chain variable domain of TCR clone 377454 (TRAV8-1, TRAJ5)
CAVRTDTGRRALTF

SEQ ID NO: 754908 - protein, 16 aa, Homo sapiens
  CDR3 for beta chain variable domain of TCR clone 377454 (TRBV7-2, TRBJ2-1)
CASSSLGGRAGEEQFF

SEQ ID NO: 754909 - protein, 15 aa, Homo sapiens
  CDR3 for alpha chain variable domain of TCR clone 377455 (TRAV3, TRAJ16)
CAVRDGFSDGQKLLF

SEQ ID NO: 754910 - protein, 14 aa, Homo sapiens
  CDR3 for beta chain variable domain of TCR clone 377455 (TRBV13, TRBJ2-5)
CASSLGRGQETQYF

SEQ ID NO: 754911 - protein, 16 aa, Homo sapiens
  CDR3 for alpha chain variable domain of TCR clone 377456 (TRAV8-3, TRAJ44)
CAVGTFMTGTASKLTF

SEQ ID NO: 754912 - protein, 17 aa, Homo sapiens
  CDR3 for beta chain variable domain of TCR clone 377456 (TRBV11-2, TRBJ2-1)
CASSLYPPGVEYNEQFF

SEQ ID NO: 754913 - protein, 14 aa, Homo sapiens
  CDR3 for alpha chain variable domain of TCR clone 377457 (TRAV1-2, TRAJ16)
CAVNRFSDGQKLLF

SEQ ID NO: 754914 - protein, 13 aa, Homo sapiens
  CDR3 for beta chain variable domain of TCR clone 377457 (TRBV12-4, TRBJ2-2)
CASSITGCGELFF

SEQ ID NO: 754915 - protein, 15 aa, Homo sapiens
  CDR3 for alpha chain variable domain of TCR clone 377458 (TRAV14/DV4, TRAJ22)
CAMSRLSGSARQLTF

SEQ ID NO: 754916 - protein, 13 aa, Homo sapiens
  CDR3 for beta chain variable domain of TCR clone 377458 (TRBV7-2, TRBJ2-7)
CASSSPSGSEQYF

SEQ ID NO: 754917 - protein, 14 aa, Homo sapiens
  CDR3 for alpha chain variable domain of TCR clone 377459 (TRAV26-1, TRAJ45)
CIEVTGGGADGLTF

SEQ ID NO: 754918 - protein, 17 aa, Homo sapiens
  CDR3 for beta chain variable domain of TCR clone 377459 (TRBV20-1, TRBJ2-1)
CSASSSGLAGSYNEQFF

SEQ ID NO: 754919 - protein, 16 aa, Homo sapiens
  CDR3 for alpha chain variable domain of TCR clone 377460 (TRAV35, TRAJ52)
CAGQCSGGTSYGKLTF

SEQ ID NO: 754920 - protein, 17 aa, Homo sapiens
  CDR3 for beta chain variable domain of TCR clone 377460 (TRBV13, TRBJ2-3)
CASSLSRVAGGRNTQYF

SEQ ID NO: 754921 - protein, 13 aa, Homo sapiens
  CDR3 for alpha chain variable domain of TCR clone 377461 (TRAV12-3, TRAJ33)
CAMSVNSNYQLIW

SEQ ID NO: 754922 - protein, 16 aa, Homo sapiens
  CDR3 for beta chain variable domain of TCR clone 377461 (TRBV7-3, TRBJ2-3)
CASSVSGYRPEDTQYF

SEQ ID NO: 754923 - protein, 18 aa, Homo sapiens
  CDR3 for alpha chain variable domain of TCR clone 377462 (TRAV12-3, TRAJ52)
CAMSVGGAGGTSYGKLTF

SEQ ID NO: 754924 - protein, 14 aa, Homo sapiens
  CDR3 for beta chain variable domain of TCR clone 377462 (TRBV7-2, TRBJ1-2)
CASSQTGSTYGYTF

SEQ ID NO: 754925 - protein, 15 aa, Homo sapiens
  CDR3 for alpha chain variable domain of TCR clone 377463 (TRAV20, TRAJ40)
CAVQRGTSGTYKYIF

SEQ ID NO: 754926 - protein, 19 aa, Homo sapiens
  CDR3 for beta chain variable domain of TCR clone 377463 (TRBV28, TRBJ2-7)
CASSYSGTSRLGGVYEQYF

SEQ ID NO: 754927 - protein, 11 aa, Homo sapiens
  CDR3 for alpha chain variable domain of TCR clone 377464 (TRAV29/DV5, TRAJ47)
SAAQRGNKLVF

SEQ ID NO: 754928 - protein, 12 aa, Homo sapiens
  CDR3 for beta chain variable domain of TCR clone 377464 (TRBV11-2, TRBJ2-7)
CASSLPTYEQYF

SEQ ID NO: 754929 - protein, 16 aa, Homo sapiens
  CDR3 for alpha chain variable domain of TCR clone 377465 (TRAV19, TRAJ4)
CALSGPLVGGYNKLIF

SEQ ID NO: 754930 - protein, 14 aa, Homo sapiens
  CDR3 for beta chain variable domain of TCR clone 377465 (TRBV25-1, TRBJ1-1)
CASTHLGGNTEAFF

SEQ ID NO: 754931 - protein, 14 aa, Homo sapiens
  CDR3 for alpha chain variable domain of TCR clone 377466 (TRAV23/DV6, TRAJ27)
CAASRDTNAGKSTF

SEQ ID NO: 754932 - protein, 17 aa, Homo sapiens
  CDR3 for beta chain variable domain of TCR clone 377466 (TRBV13, TRBJ2-3)
CASSLSRVAGGRNTQYF

SEQ ID NO: 754933 - protein, 13 aa, Homo sapiens
  CDR3 for alpha chain variable domain of TCR clone 377467 (TRAV12-3, TRAJ9)
CAMRNTGGFKTIF

SEQ ID NO: 754934 - protein, 14 aa, Homo sapiens
  CDR3 for beta chain variable domain of TCR clone 377467 (TRBV11-2, TRBJ2-7)
CVSSSTGEGYEQYF

SEQ ID NO: 754935 - protein, 17 aa, Homo sapiens
  CDR3 for alpha chain variable domain of TCR clone 377468 (TRAV26-1, TRAJ28)
CIVRLAYSGAGSYQLTF

SEQ ID NO: 754936 - protein, 14 aa, Homo sapiens
  CDR3 for beta chain variable domain of TCR clone 377468 (TRBV10-3, TRBJ2-5)
CATSRDRDRETQYF

SEQ ID NO: 754937 - protein, 13 aa, Homo sapiens
  CDR3 for alpha chain variable domain of TCR clone 377469 (TRAV8-3, TRAJ36)
CAVGATRANNLFF

SEQ ID NO: 754938 - protein, 15 aa, Homo sapiens
  CDR3 for beta chain variable domain of TCR clone 377469 (TRBV5-1, TRBJ2-3)
CASSVTSGSTDTQYF

SEQ ID NO: 754939 - protein, 13 aa, Homo sapiens
  CDR3 for alpha chain variable domain of TCR clone 377470 (TRAV12-3, TRAJ53)
CAMRGGSNYKLTF

SEQ ID NO: 754940 - protein, 15 aa, Homo sapiens
  CDR3 for beta chain variable domain of TCR clone 377470 (TRBV7-2, TRBJ2-1)
CASSSGLAGGNEQFF

SEQ ID NO: 754941 - protein, 14 aa, Homo sapiens
  CDR3 for alpha chain variable domain of TCR clone 377471 (TRAV13-1, TRAJ32)
CAARGSGATNKLIF

SEQ ID NO: 754942 - protein, 16 aa, Homo sapiens
  CDR3 for beta chain variable domain of TCR clone 377471 (TRBV7-3, TRBJ2-1)
CASSLEGYRSYNEQFF

SEQ ID NO: 754943 - protein, 13 aa, Homo sapiens
  CDR3 for alpha chain variable domain of TCR clone 377472 (TRAV3, TRAJ36)
CAVRDTGANNLFF

SEQ ID NO: 754944 - protein, 15 aa, Homo sapiens
  CDR3 for beta chain variable domain of TCR clone 377472 (TRBV24-1, TRBJ2-1)
CATSGSGGSYNEQFF

SEQ ID NO: 754945 - protein, 14 aa, Homo sapiens
  CDR3 for alpha chain variable domain of TCR clone 377473 (TRAV21, TRAJ53)
CAPPNGGSNYKLTF

SEQ ID NO: 754946 - protein, 16 aa, Homo sapiens
  CDR3 for beta chain variable domain of TCR clone 377473 (TRBV7-9, TRBJ1-2)
CASSLGFSSGEDGYTF

SEQ ID NO: 754947 - protein, 14 aa, Homo sapiens
  CDR3 for alpha chain variable domain of TCR clone 377474 (TRAV12-1, TRAJ9)
CVVTGDTGGFKTIF

SEQ ID NO: 754948 - protein, 16 aa, Homo sapiens
  CDR3 for beta chain variable domain of TCR clone 377474 (TRBV29-1, TRBJ1-2)
CSVEANRDIAHYGYTF

SEQ ID NO: 754949 - protein, 18 aa, Homo sapiens
  CDR3 for alpha chain variable domain of TCR clone 377475 (TRAV29/DV5, TRAJ52)
CAAGFRGAGGTSYGKLTL

SEQ ID NO: 754950 - protein, 17 aa, Homo sapiens
  CDR3 for beta chain variable domain of TCR clone 377475 (TRBV20-1, TRBJ2-3)
CSARSAGLAGVTDTQYF

SEQ ID NO: 754951 - protein, 17 aa, Homo sapiens
  CDR3 for alpha chain variable domain of TCR clone 377476 (TRAV3, TRAJ42)
CAVRDRDYGGSQGNLIF

SEQ ID NO: 754952 - protein, 17 aa, Homo sapiens
  CDR3 for beta chain variable domain of TCR clone 377476 (TRBV19, TRBJ1-1)
CASSIAGRGLMNTEAFF

SEQ ID NO: 754953 - protein, 16 aa, Homo sapiens
  CDR3 for alpha chain variable domain of TCR clone 377477 (TRAV30, TRAJ24)
CGTEIVDADSWGKFQL

SEQ ID NO: 754954 - protein, 16 aa, Homo sapiens
  CDR3 for beta chain variable domain of TCR clone 377477 (TRBV12-5, TRBJ2-5)
CASGPRTSGNQETQYV

SEQ ID NO: 754955 - protein, 12 aa, Homo sapiens
  CDR3 for alpha chain variable domain of TCR clone 377478 (TRAV12-2, TRAJ43)
CAVKVNNNDMRF

SEQ ID NO: 754956 - protein, 14 aa, Homo sapiens
  CDR3 for beta chain variable domain of TCR clone 377478 (TRBV25-1, TRBJ2-2)
CASSELGLPGELFF

SEQ ID NO: 754957 - protein, 14 aa, Homo sapiens
  CDR3 for alpha chain variable domain of TCR clone 377479 (TRAV12-2, TRAJ40)
CAVKIPSGTYKYIF

SEQ ID NO: 754958 - protein, 16 aa, Homo sapiens
  CDR3 for beta chain variable domain of TCR clone 377479 (TRBV15, TRBJ2-5)
CATSPTTGQGMETQYF

SEQ ID NO: 754959 - protein, 14 aa, Homo sapiens
  CDR3 for alpha chain variable domain of TCR clone 377480 (TRAV2, TRAJ9)
CAVEDRSGGFTTIF

SEQ ID NO: 754960 - protein, 14 aa, Homo sapiens
  CDR3 for beta chain variable domain of TCR clone 377480 (TRBV7-3, TRBJ2-1)
CASSLAGGTNEQFF

SEQ ID NO: 754961 - protein, 11 aa, Homo sapiens
  CDR3 for alpha chain variable domain of TCR clone 377481 (TRAV1-1, TRAJ20)
CAVFNDYKLCF

SEQ ID NO: 754962 - protein, 16 aa, Homo sapiens
  CDR3 for beta chain variable domain of TCR clone 377481 (TRBV29-1, TRBJ2-2)
CSVEKTSEGNTGELFF

SEQ ID NO: 754963 - protein, 14 aa, Homo sapiens
  CDR3 for alpha chain variable domain of TCR clone 377482 (TRAV20, TRAJ22)
CAVQGSGSARQLTF

SEQ ID NO: 754964 - protein, 13 aa, Homo sapiens
  CDR3 for beta chain variable domain of TCR clone 377482 (TRBV20-1, TRBJ2-5)
CSAREGGKETQYF

SEQ ID NO: 754965 - protein, 16 aa, Homo sapiens
  CDR3 for alpha chain variable domain of TCR clone 377483 (TRAV27, TRAJ53)
CAAPEGSGGSDYKLTF

SEQ ID NO: 754966 - protein, 14 aa, Homo sapiens
  CDR3 for beta chain variable domain of TCR clone 377483 (TRBV4-3, TRBJ1-5)
CASSQGGQGWPQHF

SEQ ID NO: 754967 - protein, 12 aa, Homo sapiens
  CDR3 for alpha chain variable domain of TCR clone 377484 (TRAV12-2, TRAJ42)
CAVGGSQGNLIF

SEQ ID NO: 754968 - protein, 15 aa, Homo sapiens
  CDR3 for beta chain variable domain of TCR clone 377484 (TRBV7-2, TRBJ2-3)
CASSLVVRGPDTQYF

SEQ ID NO: 754969 - protein, 14 aa, Homo sapiens
  CDR3 for alpha chain variable domain of TCR clone 377485 (TRAV8-4, TRAJ48)
CAVRETFGNEKLTF

SEQ ID NO: 754970 - protein, 14 aa, Homo sapiens
  CDR3 for beta chain variable domain of TCR clone 377485 (TRBV25-1, TRBJ1-1)
CASTHLGGNTEAFF

SEQ ID NO: 754971 - protein, 14 aa, Homo sapiens
  CDR3 for alpha chain variable domain of TCR clone 377486 (TRAV26-1, TRAJ38)
CIADNAGDNRKLIW

SEQ ID NO: 754972 - protein, 12 aa, Homo sapiens
  CDR3 for beta chain variable domain of TCR clone 377486 (TRBV7-8, TRBJ2-7)
CASSLGDREQYF

SEQ ID NO: 754973 - protein, 14 aa, Homo sapiens
  CDR3 for alpha chain variable domain of TCR clone 377487 (TRAV12-2, TRAJ13)
CAVKKTGGYQKVTF

SEQ ID NO: 754974 - protein, 13 aa, Homo sapiens
  CDR3 for beta chain variable domain of TCR clone 377487 (TRBV10-3, TRBJ2-7)
CASKLAVNYEQSF

SEQ ID NO: 754975 - protein, 18 aa, Homo sapiens
  CDR3 for alpha chain variable domain of TCR clone 377488 (TRAV13-1, TRAJ52)
CAAKNPNAGGTSYGNLTF

SEQ ID NO: 754976 - protein, 18 aa, Homo sapiens
  CDR3 for beta chain variable domain of TCR clone 377488 (TRBV4-1, TRBJ1-4)
CASSPRTGGAWTNEKLFF

SEQ ID NO: 754977 - protein, 18 aa, Homo sapiens
  CDR3 for alpha chain variable domain of TCR clone 377489 (TRAV26-1, TRAJ23)
CIVRVGLEVWNQGGKIIF

SEQ ID NO: 754978 - protein, 15 aa, Homo sapiens
  CDR3 for beta chain variable domain of TCR clone 377489 (TRBV12-4, TRBJ2-5)
CQQFFCQGRQETQYF

SEQ ID NO: 754979 - protein, 12 aa, Homo sapiens
  CDR3 for alpha chain variable domain of TCR clone 377490 (TRAV12-3, TRAJ17)
CAMTLTVNKITF

SEQ ID NO: 754980 - protein, 15 aa, Homo sapiens
  CDR3 for beta chain variable domain of TCR clone 377490 (TRBV20-1, TRBJ2-7)
CSARDRVAGMDEQYF

SEQ ID NO: 754981 - protein, 17 aa, Homo sapiens
  CDR3 for alpha chain variable domain of TCR clone 377491 (TRAV3, TRAJ6)
CAVRDGPRAGGSYIPTF

SEQ ID NO: 754982 - protein, 15 aa, Homo sapiens
  CDR3 for beta chain variable domain of TCR clone 377491 (TRBV24-1, TRBJ1-4)
CATSDPQGADEKLFF

SEQ ID NO: 754983 - protein, 15 aa, Homo sapiens
  CDR3 for alpha chain variable domain of TCR clone 377492 (TRAV13-2, TRAJ35)
CAQSPNIGFGNVLHC

SEQ ID NO: 754984 - protein, 13 aa, Homo sapiens
  CDR3 for beta chain variable domain of TCR clone 377492 (TRBV10-2, TRBJ2-5)
CASSTLARETQYF

SEQ ID NO: 754985 - protein, 14 aa, Homo sapiens
  CDR3 for alpha chain variable domain of TCR clone 377493 (TRAV12-2, TRAJ45)
CAVYSGGDADGLTF

SEQ ID NO: 754986 - protein, 13 aa, Homo sapiens
  CDR3 for beta chain variable domain of TCR clone 377493 (TRBV7-7, TRBJ2-3)
CASSLSRADTQYF

SEQ ID NO: 754987 - protein, 12 aa, Homo sapiens
  CDR3 for alpha chain variable domain of TCR clone 377494 (TRAV25, TRAJ29)
CAGPRGNTPLVF

SEQ ID NO: 754988 - protein, 13 aa, Homo sapiens
  CDR3 for beta chain variable domain of TCR clone 377494 (TRBV10-3, TRBJ2-7)
CASKLAVNYEQYF

SEQ ID NO: 754989 - protein, 15 aa, Homo sapiens
  CDR3 for alpha chain variable domain of TCR clone 377495 (TRAV2, TRAJ11)
CAVGGRNSGYSTLTF

SEQ ID NO: 754990 - protein, 17 aa, Homo sapiens
  CDR3 for beta chain variable domain of TCR clone 377495 (TRBV11-1, TRBJ2-7)
CASSLLDGGDSAYEQYF

SEQ ID NO: 754991 - protein, 12 aa, Homo sapiens
  CDR3 for alpha chain variable domain of TCR clone 377496 (TRAV35, TRAJ30)
CAGFNRDDKIIF

SEQ ID NO: 754992 - protein, 15 aa, Homo sapiens
  CDR3 for beta chain variable domain of TCR clone 377496 (TRBV9, TRBJ1-6)
CASSVAGTGDSPLHF

SEQ ID NO: 754993 - protein, 13 aa, Homo sapiens
  CDR3 for alpha chain variable domain of TCR clone 377497 (TRAV3, TRAJ20)
CAVRLSNDYKLSF

SEQ ID NO: 754994 - protein, 12 aa, Homo sapiens
  CDR3 for beta chain variable domain of TCR clone 377497 (TRBV24-1, TRBJ2-7)
CATSDPGYEQYF

SEQ ID NO: 754995 - protein, 13 aa, Homo sapiens
  CDR3 for alpha chain variable domain of TCR clone 377498 (TRAV35, TRAJ33)
CAGRHDSNYQLIW

SEQ ID NO: 754996 - protein, 19 aa, Homo sapiens
  CDR3 for beta chain variable domain of TCR clone 377498 (TRBV6-3, TRBJ2-1)
CARSYSWTSGRATYNEQFF

SEQ ID NO: 754997 - protein, 14 aa, Homo sapiens
  CDR3 for alpha chain variable domain of TCR clone 377499 (TRAV12-2, TRAJ13)
CAVAGSGGYPKVTF

SEQ ID NO: 754998 - protein, 14 aa, Homo sapiens
  CDR3 for beta chain variable domain of TCR clone 377499 (TRBV6-5, TRBJ2-7)
CASSYGVGEAEQYF

SEQ ID NO: 754999 - protein, 13 aa, Homo sapiens
  CDR3 for alpha chain variable domain of TCR clone 377500 (TRAV12-2, TRAJ34)
CAVRGYNTDKLIF

SEQ ID NO: 755000 - protein, 14 aa, Homo sapiens
  CDR3 for beta chain variable domain of TCR clone 377500 (TRBV4-1, TRBJ2-2)
CASSQAVNTGELFF

SEQ ID NO: 755001 - protein, 13 aa, Homo sapiens
  CDR3 for alpha chain variable domain of TCR clone 377501 (TRAV24, TRAJ42)
CAFSTGIQGNLIF

SEQ ID NO: 755002 - protein, 13 aa, Homo sapiens
  CDR3 for beta chain variable domain of TCR clone 377501 (TRBV10-3, TRBJ1-2)
CAISERDSYGYTF

SEQ ID NO: 755003 - protein, 15 aa, Homo sapiens
  CDR3 for alpha chain variable domain of TCR clone 377502 (TRAV17, TRAJ6)
CATDLPSGGSYIPTF

SEQ ID NO: 755004 - protein, 16 aa, Homo sapiens
  CDR3 for beta chain variable domain of TCR clone 377502 (TRBV4-1, TRBJ2-7)
CASSQYPTGYSYEQYF

SEQ ID NO: 755005 - protein, 12 aa, Homo sapiens
  CDR3 for alpha chain variable domain of TCR clone 377503 (TRAV8-4, TRAJ43)
WAVSVNNNDMRF

SEQ ID NO: 755006 - protein, 14 aa, Homo sapiens
  CDR3 for beta chain variable domain of TCR clone 377503 (TRBV11-2, TRBJ1-2)
CASSLGTANYGYTF

SEQ ID NO: 755007 - protein, 12 aa, Homo sapiens
  CDR3 for alpha chain variable domain of TCR clone 377504 (TRAV8-3, TRAJ31)
CAVGLNNARLMF

SEQ ID NO: 755008 - protein, 17 aa, Homo sapiens
  CDR3 for beta chain variable domain of TCR clone 377504 (TRBV7-6, TRBJ2-2)
CASGGAGGPTNTGELFF

SEQ ID NO: 755009 - protein, 12 aa, Homo sapiens
  CDR3 for alpha chain variable domain of TCR clone 377505 (TRAV3, TRAJ20)
CAVRDHDYKLSF

SEQ ID NO: 755010 - protein, 13 aa, Homo sapiens
  CDR3 for beta chain variable domain of TCR clone 377505 (TRBV9, TRBJ2-7)
FASSVGQGGEQYF

SEQ ID NO: 755011 - protein, 15 aa, Homo sapiens
  CDR3 for alpha chain variable domain of TCR clone 377506 (TRAV12-3, TRAJ6)
CAMSPASGGSYILTF

SEQ ID NO: 755012 - protein, 15 aa, Homo sapiens
  CDR3 for beta chain variable domain of TCR clone 377506 (TRBV2, TRBJ1-2)
CASSESRTVNYGYTF

SEQ ID NO: 755013 - protein, 14 aa, Homo sapiens
  CDR3 for alpha chain variable domain of TCR clone 377507 (TRAV30, TRAJ26)
CGTAIVSYGQNFVF

SEQ ID NO: 755014 - protein, 14 aa, Homo sapiens
  CDR3 for beta chain variable domain of TCR clone 377507 (TRBV10-3, TRBJ2-1)
CAISSDLAYNEQFF

SEQ ID NO: 755015 - protein, 12 aa, Homo sapiens
  CDR3 for alpha chain variable domain of TCR clone 377508 (TRAV13-2, TRAJ23)
CAERHRGGKLIF

SEQ ID NO: 755016 - protein, 15 aa, Homo sapiens
  CDR3 for beta chain variable domain of TCR clone 377508 (TRBV11-1, TRBJ2-7)
CASSLNYGASYEQYF

SEQ ID NO: 755017 - protein, 14 aa, Homo sapiens
  CDR3 for alpha chain variable domain of TCR clone 377509 (TRAV1-2, TRAJ16)
CAVNRFSDGQKLLF

SEQ ID NO: 755018 - protein, 17 aa, Homo sapiens
  CDR3 for beta chain variable domain of TCR clone 377509 (TRBV7-8, TRBJ2-6)
CASSARTGGAGANVLTF

SEQ ID NO: 755019 - protein, 15 aa, Homo sapiens
  CDR3 for alpha chain variable domain of TCR clone 377510 (TRAV3, TRAJ29)
CAVRHLYSGNTPLVF

SEQ ID NO: 755020 - protein, 17 aa, Homo sapiens
  CDR3 for beta chain variable domain of TCR clone 377510 (TRBV20-1, TRBJ2-1)
CSARDPLAGVWDNEQFF

SEQ ID NO: 755021 - protein, 16 aa, Homo sapiens
  CDR3 for alpha chain variable domain of TCR clone 377511 (TRAV30, TRAJ24)
FGTEIVDADSWGKFQF

SEQ ID NO: 755022 - protein, 15 aa, Homo sapiens
  CDR3 for beta chain variable domain of TCR clone 377511 (TRBV19, TRBJ1-1)
CASTSGQIQNTEAFS

SEQ ID NO: 755023 - protein, 12 aa, Homo sapiens
  CDR3 for alpha chain variable domain of TCR clone 377512 (TRAV24, TRAJ37)
CASSSNTGKLIF

SEQ ID NO: 755024 - protein, 11 aa, Homo sapiens
  CDR3 for beta chain variable domain of TCR clone 377512 (TRBV29-1, TRBJ2-5)
CSEDRTGTQYF

SEQ ID NO: 755025 - protein, 17 aa, Homo sapiens
  CDR3 for alpha chain variable domain of TCR clone 377513 (TRAV26-1, TRAJ27)
CIVSTPWINTNAGKSTF

SEQ ID NO: 755026 - protein, 16 aa, Homo sapiens
  CDR3 for beta chain variable domain of TCR clone 377513 (TRBV7-9, TRBJ2-1)
CASSLDPGLAIDGQFF

SEQ ID NO: 755027 - protein, 12 aa, Homo sapiens
  CDR3 for alpha chain variable domain of TCR clone 377514 (TRAV1-2, TRAJ17)
CAVRAAGNKLTF

SEQ ID NO: 755028 - protein, 12 aa, Homo sapiens
  CDR3 for beta chain variable domain of TCR clone 377514 (TRBV14, TRBJ2-5)
CASSQLKETQYF

SEQ ID NO: 755029 - protein, 12 aa, Homo sapiens
  CDR3 for alpha chain variable domain of TCR clone 377515 (TRAV12-2, TRAJ10)
WGVTGGGNKLTF

SEQ ID NO: 755030 - protein, 16 aa, Homo sapiens
  CDR3 for beta chain variable domain of TCR clone 377515 (TRBV9, TRBJ2-2)
CASSVDMSPNTGELFF

SEQ ID NO: 755031 - protein, 16 aa, Homo sapiens
  CDR3 for alpha chain variable domain of TCR clone 377516 (TRAV13-1, TRAJ37)
CAASSSSSGNTGKLIF

SEQ ID NO: 755032 - protein, 18 aa, Homo sapiens
  CDR3 for beta chain variable domain of TCR clone 377516 (TRBV7-3, TRBJ2-1)
CASSLTLASGRAMVSSSS

SEQ ID NO: 755033 - protein, 15 aa, Homo sapiens
  CDR3 for alpha chain variable domain of TCR clone 377517 (TRAV3, TRAJ4)
CAVRDPSGGYNKLIF

SEQ ID NO: 755034 - protein, 13 aa, Homo sapiens
  CDR3 for beta chain variable domain of TCR clone 377517 (TRBV19, TRBJ2-5)
CASSTPYGETQYF

SEQ ID NO: 755035 - protein, 13 aa, Homo sapiens
  CDR3 for alpha chain variable domain of TCR clone 377518 (TRAV3, TRAJ36)
CAVRDTWANNLFF

SEQ ID NO: 755036 - protein, 15 aa, Homo sapiens
  CDR3 for beta chain variable domain of TCR clone 377518 (TRBV24-1, TRBJ2-1)
CATSGSGGFYNEQFF

SEQ ID NO: 755037 - protein, 16 aa, Homo sapiens
  CDR3 for alpha chain variable domain of TCR clone 377519 (TRAV3, TRAJ21)
CAVRDIERGNFNKFYF

SEQ ID NO: 755038 - protein, 15 aa, Homo sapiens
  CDR3 for beta chain variable domain of TCR clone 377519 (TRBV27, TRBJ2-7)
CASSLTTGYEQYFVR

SEQ ID NO: 755039 - protein, 14 aa, Homo sapiens
  CDR3 for alpha chain variable domain of TCR clone 377520 (TRAV2, TRAJ9)
CAVEDRSGGFKTIF

SEQ ID NO: 755040 - protein, 15 aa, Homo sapiens
  CDR3 for beta chain variable domain of TCR clone 377520 (TRBV28, TRBJ2-3)
CASSFPGPITDTQYF

SEQ ID NO: 755041 - protein, 16 aa, Homo sapiens
  CDR3 for alpha chain variable domain of TCR clone 377521 (TRAV12-3, TRAJ53)
CAMSPGSGGSNYKLTF

SEQ ID NO: 755042 - protein, 16 aa, Homo sapiens
  CDR3 for beta chain variable domain of TCR clone 377521 (TRBV7-9, TRBJ1-2)
CASSLGFSSGEDGYAF

SEQ ID NO: 755043 - protein, 16 aa, Homo sapiens
  CDR3 for alpha chain variable domain of TCR clone 377522 (TRAV3, TRAJ10)
CAVRDMRAGGGNKLPF

SEQ ID NO: 755044 - protein, 13 aa, Homo sapiens
  CDR3 for beta chain variable domain of TCR clone 377522 (TRBV6-1, TRBJ1-1)
CASSRQGNTEAFF

SEQ ID NO: 755045 - protein, 17 aa, Homo sapiens
  CDR3 for alpha chain variable domain of TCR clone 377523 (TRAV26-2, TRAJ42)
CILRDVGHGGSHGNLIF

SEQ ID NO: 755046 - protein, 16 aa, Homo sapiens
  CDR3 for beta chain variable domain of TCR clone 377523 (TRBV12-4, TRBJ2-7)
CASSLIGGTGTYEQYF

SEQ ID NO: 755047 - protein, 14 aa, Homo sapiens
  CDR3 for alpha chain variable domain of TCR clone 377524 (TRAV23/DV6, TRAJ11)
CAASLESGYSTLTF

SEQ ID NO: 755048 - protein, 14 aa, Homo sapiens
  CDR3 for beta chain variable domain of TCR clone 377524 (TRBV19, TRBJ2-1)
CASPTFVLSGEQFF

SEQ ID NO: 755049 - protein, 21 aa, Homo sapiens
  CDR3 for alpha chain variable domain of TCR clone 377525 (TRAV26-1, TRAJ17)
CCVLLHRQSSASKAAGNKLTF

SEQ ID NO: 755050 - protein, 14 aa, Homo sapiens
  CDR3 for beta chain variable domain of TCR clone 377525 (TRBV28, TRBJ1-2)
CASRIQGANYGYTF

SEQ ID NO: 755051 - protein, 13 aa, Homo sapiens
  CDR3 for alpha chain variable domain of TCR clone 377526 (TRAV16, TRAJ27)
CALRRTNAGKSTF

SEQ ID NO: 755052 - protein, 16 aa, Homo sapiens
  CDR3 for beta chain variable domain of TCR clone 377526 (TRBV7-9, TRBJ2-3)
CASSFSVAGGTDTQYF

SEQ ID NO: 755053 - protein, 13 aa, Homo sapiens
  CDR3 for alpha chain variable domain of TCR clone 377527 (TRAV8-6, TRAJ32)
CAVSDRATNKLIF

SEQ ID NO: 755054 - protein, 13 aa, Homo sapiens
  CDR3 for beta chain variable domain of TCR clone 377527 (TRBV11-2, TRBJ2-7)
CSSSLDLGYEQYF

SEQ ID NO: 755055 - protein, 20 aa, Homo sapiens
  CDR3 for alpha chain variable domain of TCR clone 377528 (TRAV12-3, TRAJ41)
SLFIRHSQPSDSATPEALNF

SEQ ID NO: 755056 - protein, 15 aa, Homo sapiens
  CDR3 for beta chain variable domain of TCR clone 377528 (TRBV5-1, TRBJ2-7)
CASSLDLTSSYEQYF

SEQ ID NO: 755057 - protein, 14 aa, Homo sapiens
  CDR3 for alpha chain variable domain of TCR clone 377529 (TRAV13-1, TRAJ29)
CAASSNSGNTPLVF

SEQ ID NO: 755058 - protein, 16 aa, Homo sapiens
  CDR3 for beta chain variable domain of TCR clone 377529 (TRBV7-3, TRBJ2-2)
CASSLKRGTLSGELFF

SEQ ID NO: 755059 - protein, 14 aa, Homo sapiens
  CDR3 for alpha chain variable domain of TCR clone 377530 (TRAV13-2, TRAJ16)
CAENNWEDGQKLLV

SEQ ID NO: 755060 - protein, 14 aa, Homo sapiens
  CDR3 for beta chain variable domain of TCR clone 377530 (TRBV7-9, TRBJ1-1)
CASSLGGLKTEAFF

SEQ ID NO: 755061 - protein, 16 aa, Homo sapiens
  CDR3 for alpha chain variable domain of TCR clone 377531 (TRAV3, TRAJ23)
CAVKIGIYNQGGKLIF

SEQ ID NO: 755062 - protein, 17 aa, Homo sapiens
  CDR3 for beta chain variable domain of TCR clone 377531 (TRBV10-3, TRBJ2-6)
CAISESTAPSGTNVLTF

SEQ ID NO: 755063 - protein, 15 aa, Homo sapiens
  CDR3 for alpha chain variable domain of TCR clone 377532 (TRAV1-1, TRAJ20)
CAVRDNVANDYKLSF

SEQ ID NO: 755064 - protein, 13 aa, Homo sapiens
  CDR3 for beta chain variable domain of TCR clone 377532 (TRBV4-1, TRBJ2-2)
CASSQENTGQLFF

SEQ ID NO: 755065 - protein, 15 aa, Homo sapiens
  CDR3 for alpha chain variable domain of TCR clone 377533 (TRAV21, TRAJ13)
CAVRPTSGGYQKVTF

SEQ ID NO: 755066 - protein, 14 aa, Homo sapiens
  CDR3 for beta chain variable domain of TCR clone 377533 (TRBV7-2, TRBJ2-7)
CASSPKTSFYEQYF

SEQ ID NO: 755067 - protein, 14 aa, Homo sapiens
  CDR3 for alpha chain variable domain of TCR clone 377534 (TRAV8-2, TRAJ4)
WVVRPSGGYNKLIF

SEQ ID NO: 755068 - protein, 15 aa, Homo sapiens
  CDR3 for beta chain variable domain of TCR clone 377534 (TRBV2, TRBJ2-1)
CASSELAGSYNEQFF

SEQ ID NO: 755069 - protein, 14 aa, Homo sapiens
  CDR3 for alpha chain variable domain of TCR clone 377535 (TRAV12-1, TRAJ46)
CVVTAKSSGDKLTF

SEQ ID NO: 755070 - protein, 17 aa, Homo sapiens
  CDR3 for beta chain variable domain of TCR clone 377535 (TRBV4-1, TRBJ2-3)
CASSQDPAGRPLDTQYF

SEQ ID NO: 755071 - protein, 12 aa, Homo sapiens
  CDR3 for alpha chain variable domain of TCR clone 377536 (TRAV25, TRAJ29)
CAGPRGNTPLVF

SEQ ID NO: 755072 - protein, 15 aa, Homo sapiens
  CDR3 for beta chain variable domain of TCR clone 377536 (TRBV5-5, TRBJ1-5)
CASSSTPGSDQPQHF

SEQ ID NO: 755073 - protein, 13 aa, Homo sapiens
  CDR3 for alpha chain variable domain of TCR clone 377537 (TRAV3, TRAJ21)
CAVREPDFNKFYF

SEQ ID NO: 755074 - protein, 15 aa, Homo sapiens
  CDR3 for beta chain variable domain of TCR clone 377537 (TRBV9, TRBJ1-6)
CASSVAGTGDSHLHF

SEQ ID NO: 755075 - protein, 17 aa, Homo sapiens
  CDR3 for alpha chain variable domain of TCR clone 377538 (TRAV16, TRAJ37)
CAFWPKNGSSNAGKLIF

SEQ ID NO: 755076 - protein, 16 aa, Homo sapiens
  CDR3 for beta chain variable domain of TCR clone 377538 (TRBV4-1, TRBJ2-3)
CASSQSTSGAEDTQYF

SEQ ID NO: 755077 - protein, 14 aa, Homo sapiens
  CDR3 for alpha chain variable domain of TCR clone 377539 (TRAV3, TRAJ7)
CAVREEEREQQTRF

SEQ ID NO: 755078 - protein, 12 aa, Homo sapiens
  CDR3 for beta chain variable domain of TCR clone 377539 (TRBV7-8, TRBJ2-2)
CASSLGGGELFF

SEQ ID NO: 755079 - protein, 17 aa, Homo sapiens
  CDR3 for alpha chain variable domain of TCR clone 377540 (TRAV3, TRAJ6)
CAMRDGPRAGGSYIPTF

SEQ ID NO: 755080 - protein, 16 aa, Homo sapiens
  CDR3 for beta chain variable domain of TCR clone 377540 (TRBV7-8, TRBJ2-3)
CASSTEGQRETDTQYF

SEQ ID NO: 755081 - protein, 14 aa, Homo sapiens
  CDR3 for alpha chain variable domain of TCR clone 377541 (TRAV12-1, TRAJ12)
CVVTRMDSSYKLIF

SEQ ID NO: 755082 - protein, 13 aa, Homo sapiens
  CDR3 for beta chain variable domain of TCR clone 377541 (TRBV20-1, TRBJ1-6)
CSAPLGVGSPLHF

SEQ ID NO: 755083 - protein, 13 aa, Homo sapiens
  CDR3 for alpha chain variable domain of TCR clone 377542 (TRAV21, TRAJ15)
CALPNQAGTALIF

SEQ ID NO: 755084 - protein, 15 aa, Homo sapiens
  CDR3 for beta chain variable domain of TCR clone 377542 (TRBV12-4, TRBJ2-7)
CASSRGLAGTYEQYF

SEQ ID NO: 755085 - protein, 16 aa, Homo sapiens
  CDR3 for alpha chain variable domain of TCR clone 377543 (TRAV23/DV6, TRAJ9)
CAASIGGNTGGFKTIF

SEQ ID NO: 755086 - protein, 15 aa, Homo sapiens
  CDR3 for beta chain variable domain of TCR clone 377543 (TRBV20-1, TRBJ2-7)
CSAESGTSGAYEQYF

SEQ ID NO: 755087 - protein, 14 aa, Homo sapiens
  CDR3 for alpha chain variable domain of TCR clone 377544 (TRAV4, TRAJ17)
CLVGDMAAGNKLTF

SEQ ID NO: 755088 - protein, 15 aa, Homo sapiens
  CDR3 for beta chain variable domain of TCR clone 377544 (TRBV3-1, TRBJ2-7)
CASTQEWTGSYEQYF

SEQ ID NO: 755089 - protein, 16 aa, Homo sapiens
  CDR3 for alpha chain variable domain of TCR clone 377545 (TRAV30, TRAJ24)
CGTEIVDADSWGKFQF

SEQ ID NO: 755090 - protein, 15 aa, Homo sapiens
  CDR3 for beta chain variable domain of TCR clone 377545 (TRBV11-3, TRBJ2-3)
CASLKDEREGDTQYF

SEQ ID NO: 755091 - protein, 12 aa, Homo sapiens
  CDR3 for alpha chain variable domain of TCR clone 377546 (TRAV13-1, TRAJ15)
CAASQAGTALIF

SEQ ID NO: 755092 - protein, 18 aa, Homo sapiens
  CDR3 for beta chain variable domain of TCR clone 377546 (TRBV7-9, TRBJ2-3)
CASSLPINGQISKDTQYF

SEQ ID NO: 755093 - protein, 15 aa, Homo sapiens
  CDR3 for alpha chain variable domain of TCR clone 377547 (TRAV8-2, TRAJ24)
CVVSDRTDSWGKLQF

SEQ ID NO: 755094 - protein, 11 aa, Homo sapiens
  CDR3 for beta chain variable domain of TCR clone 377547 (TRBV20-1, TRBJ1-2)
CSVQGAGGYTL

SEQ ID NO: 755095 - protein, 14 aa, Homo sapiens
  CDR3 for alpha chain variable domain of TCR clone 377548 (TRAV1-2, TRAJ27)
CAPAEYTNAGKSTF

SEQ ID NO: 755096 - protein, 18 aa, Homo sapiens
  CDR3 for beta chain variable domain of TCR clone 377548 (TRBV28, TRBJ1-2)
CASRQQQGKRGCNYGYTF

SEQ ID NO: 755097 - protein, 16 aa, Homo sapiens
  CDR3 for alpha chain variable domain of TCR clone 377549 (TRAV21, TRAJ52)
CAVTNAGGTSYGKLTC

SEQ ID NO: 755098 - protein, 13 aa, Homo sapiens
  CDR3 for beta chain variable domain of TCR clone 377549 (TRBV20-1, TRBJ2-3)
CSARLAGTDTQYF

SEQ ID NO: 755099 - protein, 12 aa, Homo sapiens
  CDR3 for alpha chain variable domain of TCR clone 377550 (TRAV8-3, TRAJ20)
CAVGANDYKLSF

SEQ ID NO: 755100 - protein, 17 aa, Homo sapiens
  CDR3 for beta chain variable domain of TCR clone 377550 (TRBV20-1, TRBJ2-7)
CSARDPEGDHREYEQYF

SEQ ID NO: 755101 - protein, 12 aa, Homo sapiens
  CDR3 for alpha chain variable domain of TCR clone 377551 (TRAV13-2, TRAJ23)
CAERHRGGKLIF

SEQ ID NO: 755102 - protein, 12 aa, Homo sapiens
  CDR3 for beta chain variable domain of TCR clone 377551 (TRBV12-4, TRBJ1-2)
CASSFIWLRLRF

SEQ ID NO: 755103 - protein, 10 aa, Homo sapiens
  CDR3 for alpha chain variable domain of TCR clone 377552 (TRAV1-2, TRAJ31)
CAFFDARLMF

SEQ ID NO: 755104 - protein, 16 aa, Homo sapiens
  CDR3 for beta chain variable domain of TCR clone 377552 (TRBV2, TRBJ2-1)
CASSVGGSLSYNEQFF

SEQ ID NO: 755105 - protein, 13 aa, Homo sapiens
  CDR3 for alpha chain variable domain of TCR clone 377553 (TRAV2, TRAJ40)
CAVVTSGTYTYIF

SEQ ID NO: 755106 - protein, 12 aa, Homo sapiens
  CDR3 for beta chain variable domain of TCR clone 377553 (TRBV11-2, TRBJ2-1)
CASSPGNNEQFF

SEQ ID NO: 755107 - protein, 16 aa, Homo sapiens
  CDR3 for alpha chain variable domain of TCR clone 377554 (TRAV12-2, TRAJ32)
CAVNLGQGGATNKLIF

SEQ ID NO: 755108 - protein, 13 aa, Homo sapiens
  CDR3 for beta chain variable domain of TCR clone 377554 (TRBV9, TRBJ2-2)
CASSPRPAGELFS

SEQ ID NO: 755109 - protein, 16 aa, Homo sapiens
  CDR3 for alpha chain variable domain of TCR clone 377555 (TRAV3, TRAJ5)
CAVRNLMDTGRRALTF

SEQ ID NO: 755110 - protein, 16 aa, Homo sapiens
  CDR3 for beta chain variable domain of TCR clone 377555 (TRBV4-2, TRBJ2-7)
CASSQEGLANSYEQYI

SEQ ID NO: 755111 - protein, 14 aa, Homo sapiens
  CDR3 for alpha chain variable domain of TCR clone 377556 (TRAV13-1, TRAJ10)
CAAKEPGGGNKLTF

SEQ ID NO: 755112 - protein, 15 aa, Homo sapiens
  CDR3 for beta chain variable domain of TCR clone 377556 (TRBV6-1, TRBJ2-3)
CASSERGGVTDTQYF

SEQ ID NO: 755113 - protein, 21 aa, Homo sapiens
  CDR3 for alpha chain variable domain of TCR clone 377557 (TRAV38-1, TRAJ28)
CDVFLCFHEAHIWGWEYQLTF

SEQ ID NO: 755114 - protein, 15 aa, Homo sapiens
  CDR3 for beta chain variable domain of TCR clone 377557 (TRBV5-1, TRBJ2-4)
CASSLGGGGSYIQYF

SEQ ID NO: 755115 - protein, 20 aa, Homo sapiens
  CDR3 for alpha chain variable domain of TCR clone 377558 (TRAV26-1, TRAJ42)
CCVLLHRQTYYGGSQGNLIF

SEQ ID NO: 755116 - protein, 16 aa, Homo sapiens
  CDR3 for beta chain variable domain of TCR clone 377558 (TRBV7-3, TRBJ2-2)
CASSLKRGTLSGQLFF

SEQ ID NO: 755117 - protein, 12 aa, Homo sapiens
  CDR3 for alpha chain variable domain of TCR clone 377559 (TRAV12-1, TRAJ34)
CVLAGATDKLIF

SEQ ID NO: 755118 - protein, 16 aa, Homo sapiens
  CDR3 for beta chain variable domain of TCR clone 377559 (TRBV7-2, TRBJ1-2)
CASSSNQDRRGHGYTF

SEQ ID NO: 755119 - protein, 15 aa, Homo sapiens
  CDR3 for alpha chain variable domain of TCR clone 377560 (TRAV17, TRAJ57)
CATGPSQGGSEKLVF

SEQ ID NO: 755120 - protein, 12 aa, Homo sapiens
  CDR3 for beta chain variable domain of TCR clone 377560 (TRBV11-2, TRBJ2-5)
CASGPPAETQYF

SEQ ID NO: 755121 - protein, 15 aa, Homo sapiens
  CDR3 for alpha chain variable domain of TCR clone 377561 (TRAV20, TRAJ53)
CAVQASGGSNYKLTF

SEQ ID NO: 755122 - protein, 16 aa, Homo sapiens
  CDR3 for beta chain variable domain of TCR clone 377561 (TRBV5-1, TRBJ2-2)
CASSSRTGGRTGELFF

SEQ ID NO: 755123 - protein, 14 aa, Homo sapiens
  CDR3 for alpha chain variable domain of TCR clone 377562 (TRAV12-3, TRAJ42)
CAMNYGGSQGNLIL

SEQ ID NO: 755124 - protein, 17 aa, Homo sapiens
  CDR3 for beta chain variable domain of TCR clone 377562 (TRBV4-3, TRBJ2-1)
CASSQFSSGRASGEQFF

SEQ ID NO: 755125 - protein, 17 aa, Homo sapiens
  CDR3 for alpha chain variable domain of TCR clone 377563 (TRAV3, TRAJ6)
CAVREGPRAEGSYIPTF

SEQ ID NO: 755126 - protein, 14 aa, Homo sapiens
  CDR3 for beta chain variable domain of TCR clone 377563 (TRBV7-2, TRBJ2-7)
CASSPKTSFYEQYF

SEQ ID NO: 755127 - protein, 15 aa, Homo sapiens
  CDR3 for alpha chain variable domain of TCR clone 377564 (TRAV34, TRAJ38)
CGADFTPGNNRKLIW

SEQ ID NO: 755128 - protein, 11 aa, Homo sapiens
  CDR3 for beta chain variable domain of TCR clone 377564 (TRBV11-2, TRBJ1-1)
CASSINTEAFF

SEQ ID NO: 755129 - protein, 14 aa, Homo sapiens
  CDR3 for alpha chain variable domain of TCR clone 377565 (TRAV16, TRAJ44)
CALSTTGTASKLTF

SEQ ID NO: 755130 - protein, 14 aa, Homo sapiens
  CDR3 for beta chain variable domain of TCR clone 377565 (TRBV11-2, TRBJ1-2)
CASSLGTANYGYTF

SEQ ID NO: 755131 - protein, 12 aa, Homo sapiens
  CDR3 for alpha chain variable domain of TCR clone 377566 (TRAV9-2, TRAJ9)
CAMNTGGFKTIF

SEQ ID NO: 755132 - protein, 14 aa, Homo sapiens
  CDR3 for beta chain variable domain of TCR clone 377566 (TRBV7-2, TRBJ2-7)
CASSPKTSFYEQYF

SEQ ID NO: 755133 - protein, 13 aa, Homo sapiens
  CDR3 for alpha chain variable domain of TCR clone 377567 (TRAV21, TRAJ15)
CAVANQAGTALIF

SEQ ID NO: 755134 - protein, 14 aa, Homo sapiens
  CDR3 for beta chain variable domain of TCR clone 377567 (TRBV12-5, TRBJ2-5)
CASGSRTHLETQYF

SEQ ID NO: 755135 - protein, 15 aa, Homo sapiens
  CDR3 for alpha chain variable domain of TCR clone 377568 (TRAV3, TRAJ22)
CAVRDRGGSARQLTF

SEQ ID NO: 755136 - protein, 14 aa, Homo sapiens
  CDR3 for beta chain variable domain of TCR clone 377568 (TRBV4-3, TRBJ2-2)
CASSQGHVTGELFF

SEQ ID NO: 755137 - protein, 13 aa, Homo sapiens
  CDR3 for alpha chain variable domain of TCR clone 377569 (TRAV20, TRAJ42)
CAVQGGSQGNLIF

SEQ ID NO: 755138 - protein, 17 aa, Homo sapiens
  CDR3 for beta chain variable domain of TCR clone 377569 (TRBV11-2, TRBJ2-1)
CASSLYPPGVEYNEQFF

SEQ ID NO: 755139 - protein, 10 aa, Homo sapiens
  CDR3 for alpha chain variable domain of TCR clone 377570 (TRAV16, TRAJ22)
SAMYLRQLTF

SEQ ID NO: 755140 - protein, 15 aa, Homo sapiens
  CDR3 for beta chain variable domain of TCR clone 377570 (TRBV7-9, TRBJ1-6)
CASSSPGRGNATLHF

SEQ ID NO: 755141 - protein, 14 aa, Homo sapiens
  CDR3 for alpha chain variable domain of TCR clone 377571 (TRAV1-2, TRAJ27)
CAVRSGTNAGKSTF

SEQ ID NO: 755142 - protein, 15 aa, Homo sapiens
  CDR3 for beta chain variable domain of TCR clone 377571 (TRBV18, TRBJ2-7)
CASSPRQGRTYEQYF

SEQ ID NO: 755143 - protein, 14 aa, Homo sapiens
  CDR3 for alpha chain variable domain of TCR clone 377572 (TRAV26-1, TRAJ34)
CIVRESYNTDKLIF

SEQ ID NO: 755144 - protein, 12 aa, Homo sapiens
  CDR3 for beta chain variable domain of TCR clone 377572 (TRBV7-9, TRBJ2-7)
CASSIKREEQYF

SEQ ID NO: 755145 - protein, 17 aa, Homo sapiens
  CDR3 for alpha chain variable domain of TCR clone 377573 (TRAV3, TRAJ38)
CAVRDCLNAGNNRKLIW

SEQ ID NO: 755146 - protein, 16 aa, Homo sapiens
  CDR3 for beta chain variable domain of TCR clone 377573 (TRBV20-1, TRBJ1-1)
CSARALTQGMNTEAFF

SEQ ID NO: 755147 - protein, 16 aa, Homo sapiens
  CDR3 for alpha chain variable domain of TCR clone 377574 (TRAV3, TRAJ18)
CAVRDGRGSTLGRLHF

SEQ ID NO: 755148 - protein, 15 aa, Homo sapiens
  CDR3 for beta chain variable domain of TCR clone 377574 (TRBV7-9, TRBJ1-6)
CASSSLGRGNSPLHF

SEQ ID NO: 755149 - protein, 14 aa, Homo sapiens
  CDR3 for alpha chain variable domain of TCR clone 377575 (TRAV8-1, TRAJ5)
CAVRTDTGRRALTF

SEQ ID NO: 755150 - protein, 15 aa, Homo sapiens
  CDR3 for beta chain variable domain of TCR clone 377575 (TRBV20-1, TRBJ2-7)
CSAESGTSGAYEQYF

SEQ ID NO: 755151 - protein, 18 aa, Homo sapiens
  CDR3 for alpha chain variable domain of TCR clone 377576 (TRAV12-3, TRAJ52)
CAMSVGGAGATSYGKLTF

SEQ ID NO: 755152 - protein, 15 aa, Homo sapiens
  CDR3 for beta chain variable domain of TCR clone 377576 (TRBV27, TRBJ1-6)
CASSFDRGLGSHLHF

SEQ ID NO: 755153 - protein, 11 aa, Homo sapiens
  CDR3 for alpha chain variable domain of TCR clone 377577 (TRAV2, TRAJ33)
CAVDSNYQLIW

SEQ ID NO: 755154 - protein, 15 aa, Homo sapiens
  CDR3 for beta chain variable domain of TCR clone 377577 (TRBV5-5, TRBJ1-5)
CASSSTPGSNQPQHF

SEQ ID NO: 755155 - protein, 14 aa, Homo sapiens
  CDR3 for alpha chain variable domain of TCR clone 377578 (TRAV8-2, TRAJ44)
CVVSLTGTASKRTF

SEQ ID NO: 755156 - protein, 15 aa, Homo sapiens
  CDR3 for beta chain variable domain of TCR clone 377578 (TRBV7-2, TRBJ2-1)
CASSFSGGSYNEQSF

SEQ ID NO: 755157 - protein, 15 aa, Homo sapiens
  CDR3 for alpha chain variable domain of TCR clone 377579 (TRAV8-3, TRAJ27)
CAVGSSKTNAGKSTF

SEQ ID NO: 755158 - protein, 14 aa, Homo sapiens
  CDR3 for beta chain variable domain of TCR clone 377579 (TRBV4-2, TRBJ2-5)
CASSQDRGRETQYF

SEQ ID NO: 755159 - protein, 16 aa, Homo sapiens
  CDR3 for alpha chain variable domain of TCR clone 377580 (TRAV12-1, TRAJ26)
CALWSEFCLCSRNQIV

SEQ ID NO: 755160 - protein, 14 aa, Homo sapiens
  CDR3 for beta chain variable domain of TCR clone 377580 (TRBV5-4, TRBJ2-1)
CASSLDQGLNEQFF

SEQ ID NO: 755161 - protein, 18 aa, Homo sapiens
  CDR3 for alpha chain variable domain of TCR clone 377581 (TRAV3, TRAJ21)
CAVRDIERGNFNNFTLDL

SEQ ID NO: 755162 - protein, 13 aa, Homo sapiens
  CDR3 for beta chain variable domain of TCR clone 377581 (TRBV4-2, TRBJ1-1)
CASSQAGNTEAFF

SEQ ID NO: 755163 - protein, 16 aa, Homo sapiens
  CDR3 for alpha chain variable domain of TCR clone 377582 (TRAV12-1, TRAJ43)
CVVYPHRFGAGTRLTV

SEQ ID NO: 755164 - protein, 13 aa, Homo sapiens
  CDR3 for beta chain variable domain of TCR clone 377582 (TRBV20-1, TRBJ1-1)
CSARGGGNTEAFF

SEQ ID NO: 755165 - protein, 15 aa, Homo sapiens
  CDR3 for alpha chain variable domain of TCR clone 377583 (TRAV8-3, TRAJ45)
CASSYSGGGADGLTF

SEQ ID NO: 755166 - protein, 16 aa, Homo sapiens
  CDR3 for beta chain variable domain of TCR clone 377583 (TRBV12-4, TRBJ2-1)
CASKRTSGDTYNEQFF

SEQ ID NO: 755167 - protein, 13 aa, Homo sapiens
  CDR3 for alpha chain variable domain of TCR clone 377584 (TRAV36/DV7, TRAJ49)
CAVEVNTGNQFYF

SEQ ID NO: 755168 - protein, 13 aa, Homo sapiens
  CDR3 for beta chain variable domain of TCR clone 377584 (TRBV10-3, TRBJ2-7)
CASKLAVNYEQYF

SEQ ID NO: 755169 - protein, 13 aa, Homo sapiens
  CDR3 for alpha chain variable domain of TCR clone 377585 (TRAV21, TRAJ27)
CSARPGNAGKSTF

SEQ ID NO: 755170 - protein, 14 aa, Homo sapiens
  CDR3 for beta chain variable domain of TCR clone 377585 (TRBV7-6, TRBJ2-3)
CASSLGTVTDTQYL

SEQ ID NO: 755171 - protein, 10 aa, Homo sapiens
  CDR3 for alpha chain variable domain of TCR clone 377586 (TRAV26-1, TRAJ40)
CRAGTYKYIF

SEQ ID NO: 755172 - protein, 15 aa, Homo sapiens
  CDR3 for beta chain variable domain of TCR clone 377586 (TRBV19, TRBJ2-1)
CASSSPGVPLDEQFF

SEQ ID NO: 755173 - protein, 16 aa, Homo sapiens
  CDR3 for alpha chain variable domain of TCR clone 377587 (TRAV17, TRAJ22)
CATGPISSGSARPLTF

SEQ ID NO: 755174 - protein, 13 aa, Homo sapiens
  CDR3 for beta chain variable domain of TCR clone 377587 (TRBV11-2, TRBJ2-1)
CASSLGLAGGRFF

SEQ ID NO: 755175 - protein, 12 aa, Homo sapiens
  CDR3 for alpha chain variable domain of TCR clone 377588 (TRAV2, TRAJ33)
CAFMDSNYQLIW

SEQ ID NO: 755176 - protein, 14 aa, Homo sapiens
  CDR3 for beta chain variable domain of TCR clone 377588 (TRBV9, TRBJ2-7)
CASSVGVGSYEQYF

SEQ ID NO: 755177 - protein, 17 aa, Homo sapiens
  CDR3 for alpha chain variable domain of TCR clone 377589 (TRAV13-1, TRAJ5)
CSNPSLSRDTGRRAITF

SEQ ID NO: 755178 - protein, 17 aa, Homo sapiens
  CDR3 for beta chain variable domain of TCR clone 377589 (TRBV24-1, TRBJ2-1)
CATSDVSTSGTYNEQFF

SEQ ID NO: 755179 - protein, 14 aa, Homo sapiens
  CDR3 for alpha chain variable domain of TCR clone 377590 (TRAV36/DV7, TRAJ16)
CAVEADSDGQKLRF

SEQ ID NO: 755180 - protein, 15 aa, Homo sapiens
  CDR3 for beta chain variable domain of TCR clone 377590 (TRBV5-4, TRBJ2-3)
CATKSSGGALDTQYF

SEQ ID NO: 755181 - protein, 16 aa, Homo sapiens
  CDR3 for alpha chain variable domain of TCR clone 377591 (TRAV4, TRAJ22)
CLVGDLYSGSARQLPF

SEQ ID NO: 755182 - protein, 14 aa, Homo sapiens
  CDR3 for beta chain variable domain of TCR clone 377591 (TRBV19, TRBJ2-1)
CASPTFILSGEQFF

SEQ ID NO: 755183 - protein, 14 aa, Homo sapiens
  CDR3 for alpha chain variable domain of TCR clone 377592 (TRAV9-2, TRAJ56)
CALSYTGANSKLTF

SEQ ID NO: 755184 - protein, 16 aa, Homo sapiens
  CDR3 for beta chain variable domain of TCR clone 377592 (TRBV5-1, TRBJ2-2)
CASSLWDPTNTGELFF

SEQ ID NO: 755185 - protein, 15 aa, Homo sapiens
  CDR3 for alpha chain variable domain of TCR clone 377593 (TRAV3, TRAJ22)
CAVRDRGCSARQLTF

SEQ ID NO: 755186 - protein, 13 aa, Homo sapiens
  CDR3 for beta chain variable domain of TCR clone 377593 (TRBV7-3, TRBJ2-1)
CASSPVAYNEQFF

SEQ ID NO: 755187 - protein, 16 aa, Homo sapiens
  CDR3 for alpha chain variable domain of TCR clone 377594 (TRAV30, TRAJ24)
CGTENVDADSWGKFQF

SEQ ID NO: 755188 - protein, 13 aa, Homo sapiens
  CDR3 for beta chain variable domain of TCR clone 377594 (TRBV9, TRBJ1-1)
CASSPTGSTEAFF

SEQ ID NO: 755189 - protein, 16 aa, Homo sapiens
  CDR3 for alpha chain variable domain of TCR clone 377595 (TRAV3, TRAJ28)
CAVLPRSGAGSYQLTF

SEQ ID NO: 755190 - protein, 20 aa, Homo sapiens
  CDR3 for beta chain variable domain of TCR clone 377595 (TRBV28, TRBJ2-1)
CASTPIGRSPGLAGGNEQFF

SEQ ID NO: 755191 - protein, 14 aa, Homo sapiens
  CDR3 for alpha chain variable domain of TCR clone 377596 (TRAV13-2, TRAJ4)
CAEKGPKGYNKLIF

SEQ ID NO: 755192 - protein, 13 aa, Homo sapiens
  CDR3 for beta chain variable domain of TCR clone 377596 (TRBV18, TRBJ2-5)
CASSPAGKETQYF

SEQ ID NO: 755193 - protein, 14 aa, Homo sapiens
  CDR3 for alpha chain variable domain of TCR clone 377597 (TRAV14/DV4, TRAJ26)
CAMREGTYGQNFVF

SEQ ID NO: 755194 - protein, 18 aa, Homo sapiens
  CDR3 for beta chain variable domain of TCR clone 377597 (TRBV11-2, TRBJ2-3)
CASSLGGASRGAPNTQYF

SEQ ID NO: 755195 - protein, 14 aa, Homo sapiens
  CDR3 for alpha chain variable domain of TCR clone 377598 (TRAV9-2, TRAJ39)
CALYIYNAGNMLTF

SEQ ID NO: 755196 - protein, 16 aa, Homo sapiens
  CDR3 for beta chain variable domain of TCR clone 377598 (TRBV5-4, TRBJ2-3)
CASQQPGAGGADTQYF

SEQ ID NO: 755197 - protein, 14 aa, Homo sapiens
  CDR3 for alpha chain variable domain of TCR clone 377599 (TRAV8-2, TRAJ37)
CVVSISGNTGKLIF

SEQ ID NO: 755198 - protein, 11 aa, Homo sapiens
  CDR3 for beta chain variable domain of TCR clone 377599 (TRBV18, TRBJ2-5)
CASSPQETQYF

SEQ ID NO: 755199 - protein, 12 aa, Homo sapiens
  CDR3 for alpha chain variable domain of TCR clone 377600 (TRAV8-4, TRAJ43)
CAMSVNNNDMPL

SEQ ID NO: 755200 - protein, 14 aa, Homo sapiens
  CDR3 for beta chain variable domain of TCR clone 377600 (TRBV11-2, TRBJ1-2)
CASSLGTANYGYTF

SEQ ID NO: 755201 - protein, 17 aa, Homo sapiens
  CDR3 for alpha chain variable domain of TCR clone 377601 (TRAV26-1, TRAJ46)
IASSESEKKSSGDKLTF

SEQ ID NO: 755202 - protein, 15 aa, Homo sapiens
  CDR3 for beta chain variable domain of TCR clone 377601 (TRBV5-1, TRBJ2-2)
CASSWTSPNTGELFF

SEQ ID NO: 755203 - protein, 17 aa, Homo sapiens
  CDR3 for alpha chain variable domain of TCR clone 377602 (TRAV17, TRAJ28)
CATDPRRGGAGSYQPTF

SEQ ID NO: 755204 - protein, 16 aa, Homo sapiens
  CDR3 for beta chain variable domain of TCR clone 377602 (TRBV25-1, TRBJ1-1)
CASSGDRDGGRIEAFF

SEQ ID NO: 755205 - protein, 13 aa, Homo sapiens
  CDR3 for alpha chain variable domain of TCR clone 377603 (TRAV8-1, TRAJ32)
CAADGGATNKPIF

SEQ ID NO: 755206 - protein, 18 aa, Homo sapiens
  CDR3 for beta chain variable domain of TCR clone 377603 (TRBV18, TRBJ2-3)
CASSYTSGAAGGTDTQYF

SEQ ID NO: 755207 - protein, 14 aa, Homo sapiens
  CDR3 for alpha chain variable domain of TCR clone 377604 (TRAV1-2, TRAJ16)
CAVTRFSDGQKLLF

SEQ ID NO: 755208 - protein, 18 aa, Homo sapiens
  CDR3 for beta chain variable domain of TCR clone 377604 (TRBV20-1, TRBJ2-6)
CSAETTPTHGSGANDLTF

SEQ ID NO: 755209 - protein, 13 aa, Homo sapiens
  CDR3 for alpha chain variable domain of TCR clone 377605 (TRAV17, TRAJ40)
CAGALGGTYKSIF

SEQ ID NO: 755210 - protein, 16 aa, Homo sapiens
  CDR3 for beta chain variable domain of TCR clone 377605 (TRBV11-2, TRBJ1-2)
CASSLDTGGADYGYTF

SEQ ID NO: 755211 - protein, 16 aa, Homo sapiens
  CDR3 for alpha chain variable domain of TCR clone 377606 (TRAV13-1, TRAJ17)
CAARKGVKAAGNKLTF

SEQ ID NO: 755212 - protein, 15 aa, Homo sapiens
  CDR3 for beta chain variable domain of TCR clone 377606 (TRBV20-1, TRBJ1-5)
CSAREGGYSNQHQHF

SEQ ID NO: 755213 - protein, 15 aa, Homo sapiens
  CDR3 for alpha chain variable domain of TCR clone 377607 (TRAV2, TRAJ9)
CAVEDRGTGGFKTIF

SEQ ID NO: 755214 - protein, 20 aa, Homo sapiens
  CDR3 for beta chain variable domain of TCR clone 377607 (TRBV19, TRBJ2-1)
CASSISRTVTSTRLNNEQFF

SEQ ID NO: 755215 - protein, 15 aa, Homo sapiens
  CDR3 for alpha chain variable domain of TCR clone 377608 (TRAV21, TRAJ52)
CAVRRGGTSYGKLTF

SEQ ID NO: 755216 - protein, 15 aa, Homo sapiens
  CDR3 for beta chain variable domain of TCR clone 377608 (TRBV18, TRBJ1-5)
CASSPSDRSNQPQHF

SEQ ID NO: 755217 - protein, 16 aa, Homo sapiens
  CDR3 for alpha chain variable domain of TCR clone 377609 (TRAV14/DV4, TRAJ53)
CAMREGGGGSNYKLTF

SEQ ID NO: 755218 - protein, 14 aa, Homo sapiens
  CDR3 for beta chain variable domain of TCR clone 377609 (TRBV19, TRBJ1-2)
CASSLQGQAYGYTF

SEQ ID NO: 755219 - protein, 14 aa, Homo sapiens
  CDR3 for alpha chain variable domain of TCR clone 377610 (TRAV13-1, TRAJ40)
CAARSTSGTYKCIF

SEQ ID NO: 755220 - protein, 15 aa, Homo sapiens
  CDR3 for beta chain variable domain of TCR clone 377610 (TRBV18, TRBJ1-5)
CASSETGGNNQPQHF

SEQ ID NO: 755221 - protein, 15 aa, Homo sapiens
  CDR3 for alpha chain variable domain of TCR clone 377611 (TRAV8-3, TRAJ35)
CAVGATIGFGNVLHC

SEQ ID NO: 755222 - protein, 14 aa, Homo sapiens
  CDR3 for beta chain variable domain of TCR clone 377611 (TRBV25-1, TRBJ1-1)
CASTHLGGNTEAFF

SEQ ID NO: 755223 - protein, 11 aa, Homo sapiens
  CDR3 for alpha chain variable domain of TCR clone 377612 (TRAV2, TRAJ33)
CAVDNNYQLIW

SEQ ID NO: 755224 - protein, 15 aa, Homo sapiens
  CDR3 for beta chain variable domain of TCR clone 377612 (TRBV7-9, TRBJ1-6)
CASSSPGRGNSPLHF

SEQ ID NO: 755225 - protein, 15 aa, Homo sapiens
  CDR3 for alpha chain variable domain of TCR clone 377613 (TRAV3, TRAJ22)
CAVRDRGGSARQLTF

SEQ ID NO: 755226 - protein, 13 aa, Homo sapiens
  CDR3 for beta chain variable domain of TCR clone 377613 (TRBV9, TRBJ2-1)
CASSPSGGSEQFF

SEQ ID NO: 755227 - protein, 15 aa, Homo sapiens
  CDR3 for alpha chain variable domain of TCR clone 377614 (TRAV13-2, TRAJ10)
CAENRDTGGGNKLTF

SEQ ID NO: 755228 - protein, 20 aa, Homo sapiens
  CDR3 for beta chain variable domain of TCR clone 377614 (TRBV28, TRBJ2-1)
CARTPIGRSPGLAGGNEQFF

SEQ ID NO: 755229 - protein, 15 aa, Homo sapiens
  CDR3 for alpha chain variable domain of TCR clone 377615 (TRAV26-1, TRAJ29)
CIVRVEGSGNTPLVF

SEQ ID NO: 755230 - protein, 15 aa, Homo sapiens
  CDR3 for beta chain variable domain of TCR clone 377615 (TRBV7-6, TRBJ2-5)
CASSKPTGPRETQYF

SEQ ID NO: 755231 - protein, 15 aa, Homo sapiens
  CDR3 for alpha chain variable domain of TCR clone 377616 (TRAV12-1, TRAJ4)
CVVNPFSGGYNELIF

SEQ ID NO: 755232 - protein, 13 aa, Homo sapiens
  CDR3 for beta chain variable domain of TCR clone 377616 (TRBV20-1, TRBJ1-2)
CSARGTADYGYTF

SEQ ID NO: 755233 - protein, 16 aa, Homo sapiens
  CDR3 for alpha chain variable domain of TCR clone 377617 (TRAV13-1, TRAJ48)
CAASIFGNFGNEKLTF

SEQ ID NO: 755234 - protein, 14 aa, Homo sapiens
  CDR3 for beta chain variable domain of TCR clone 377617 (TRBV7-3, TRBJ1-1)
CASSLKGGNTEDFF

SEQ ID NO: 755235 - protein, 15 aa, Homo sapiens
  CDR3 for alpha chain variable domain of TCR clone 377618 (TRAV8-3, TRAJ45)
CASSYSGGGADGFTF

SEQ ID NO: 755236 - protein, 12 aa, Homo sapiens
  CDR3 for beta chain variable domain of TCR clone 377618 (TRBV29-1, TRBJ2-3)
CSVTGGADTQYF

SEQ ID NO: 755237 - protein, 16 aa, Homo sapiens
  CDR3 for alpha chain variable domain of TCR clone 377619 (TRAV3, TRAJ37)
CAVRPHGSDNTCKLIF

SEQ ID NO: 755238 - protein, 17 aa, Homo sapiens
  CDR3 for beta chain variable domain of TCR clone 377619 (TRBV20-1, TRBJ2-1)
CSASSSGLAGSYNEQFF

SEQ ID NO: 755239 - protein, 17 aa, Homo sapiens
  CDR3 for alpha chain variable domain of TCR clone 377620 (TRAV13-1, TRAJ31)
CAPRDRLIFGDVTQLVV

SEQ ID NO: 755240 - protein, 12 aa, Homo sapiens
  CDR3 for beta chain variable domain of TCR clone 377620 (TRBV7-9, TRBJ2-7)
CASSLEGYEQYF

SEQ ID NO: 755241 - protein, 10 aa, Homo sapiens
  CDR3 for alpha chain variable domain of TCR clone 377621 (TRAV9-2, TRAJ34)
CALSYDKLIF

SEQ ID NO: 755242 - protein, 14 aa, Homo sapiens
  CDR3 for beta chain variable domain of TCR clone 377621 (TRBV7-8, TRBJ2-7)
CASSVGQGAYEQYF

SEQ ID NO: 755243 - protein, 23 aa, Homo sapiens
  CDR3 for alpha chain variable domain of TCR clone 377622 (TRAV8-3, TRAJ32)
CSFYLFFLVLLCCLFGATNKLIF

SEQ ID NO: 755244 - protein, 15 aa, Homo sapiens
  CDR3 for beta chain variable domain of TCR clone 377622 (TRBV6-3, TRBJ2-7)
CASSSPGTVFYEQYF

SEQ ID NO: 755245 - protein, 17 aa, Homo sapiens
  CDR3 for alpha chain variable domain of TCR clone 377623 (TRAV20, TRAJ28)
CAVPGGYSGAGSYQLTF

SEQ ID NO: 755246 - protein, 15 aa, Homo sapiens
  CDR3 for beta chain variable domain of TCR clone 377623 (TRBV7-2, TRBJ2-7)
CASSLSSGRTYEQYF

SEQ ID NO: 755247 - protein, 11 aa, Homo sapiens
  CDR3 for alpha chain variable domain of TCR clone 377624 (TRAV21, TRAJ34)
CAVTNTDKLIF

SEQ ID NO: 755248 - protein, 15 aa, Homo sapiens
  CDR3 for beta chain variable domain of TCR clone 377624 (TRBV6-6, TRBJ2-7)
CASSYSYGGSYEQYF

SEQ ID NO: 755249 - protein, 14 aa, Homo sapiens
  CDR3 for alpha chain variable domain of TCR clone 377625 (TRAV4, TRAJ13)
CLVGYSGGYQKVTF

SEQ ID NO: 755250 - protein, 15 aa, Homo sapiens
  CDR3 for beta chain variable domain of TCR clone 377625 (TRBV7-9, TRBJ1-6)
CASSSPGRGNSPLHF

SEQ ID NO: 755251 - protein, 18 aa, Homo sapiens
  CDR3 for alpha chain variable domain of TCR clone 377626 (TRAV26-1, TRAJ5)
CIVRVVPPLDTGRRALTF

SEQ ID NO: 755252 - protein, 15 aa, Homo sapiens
  CDR3 for beta chain variable domain of TCR clone 377626 (TRBV7-9, TRBJ2-7)
CASSLPMGQANEQYF

SEQ ID NO: 755253 - protein, 14 aa, Homo sapiens
  CDR3 for alpha chain variable domain of TCR clone 377627 (TRAV1-2, TRAJ16)
CAVNRFSDGKKLLF

SEQ ID NO: 755254 - protein, 14 aa, Homo sapiens
  CDR3 for beta chain variable domain of TCR clone 377627 (TRBV7-3, TRBJ1-1)
CASSLGTGYTEAFF

SEQ ID NO: 755255 - protein, 23 aa, Homo sapiens
  CDR3 for alpha chain variable domain of TCR clone 377628 (TRAV26-1, TRAJ38)
CIADNAGNNHIQNPDPAVYQLRD

SEQ ID NO: 755256 - protein, 12 aa, Homo sapiens
  CDR3 for beta chain variable domain of TCR clone 377628 (TRBV7-8, TRBJ2-7)
CASSLGDRGQYF

SEQ ID NO: 755257 - protein, 14 aa, Homo sapiens
  CDR3 for alpha chain variable domain of TCR clone 377629 (TRAV2, TRAJ9)
CAVEDRSGGFKTIF

SEQ ID NO: 755258 - protein, 18 aa, Homo sapiens
  CDR3 for beta chain variable domain of TCR clone 377629 (TRBV20-1, TRBJ2-5)
CSQTGDSGRLGGRETQYF

SEQ ID NO: 755259 - protein, 15 aa, Homo sapiens
  CDR3 for alpha chain variable domain of TCR clone 377630 (TRAV21, TRAJ40)
CAVRPQTSGTYKYIF

SEQ ID NO: 755260 - protein, 15 aa, Homo sapiens
  CDR3 for beta chain variable domain of TCR clone 377630 (TRBV7-3, TRBJ2-7)
CASSLTPTGYDEQYF

SEQ ID NO: 755261 - protein, 14 aa, Homo sapiens
  CDR3 for alpha chain variable domain of TCR clone 377631 (TRAV1-2, TRAJ8)
CAVREDTGFQKLVF

SEQ ID NO: 755262 - protein, 16 aa, Homo sapiens
  CDR3 for beta chain variable domain of TCR clone 377631 (TRBV4-1, TRBJ2-7)
CASSQNDRVNSYEQYF

SEQ ID NO: 755263 - protein, 15 aa, Homo sapiens
  CDR3 for alpha chain variable domain of TCR clone 377632 (TRAV8-3, TRAJ11)
CAVGLLNSGYSTLTF

SEQ ID NO: 755264 - protein, 16 aa, Homo sapiens
  CDR3 for beta chain variable domain of TCR clone 377632 (TRBV7-9, TRBJ1-2)
CASSLGFSSGEDGYTF

SEQ ID NO: 755265 - protein, 13 aa, Homo sapiens
  CDR3 for alpha chain variable domain of TCR clone 377633 (TRAV12-2, TRAJ15)
CAVFNQAGTALIF

SEQ ID NO: 755266 - protein, 14 aa, Homo sapiens
  CDR3 for beta chain variable domain of TCR clone 377633 (TRBV7-8, TRBJ1-5)
CHQPGGGADQPQHF

SEQ ID NO: 755267 - protein, 13 aa, Homo sapiens
  CDR3 for alpha chain variable domain of TCR clone 377634 (TRAV3, TRAJ36)
CAVRDTGANNLFF

SEQ ID NO: 755268 - protein, 15 aa, Homo sapiens
  CDR3 for beta chain variable domain of TCR clone 377634 (TRBV24-1, TRBJ2-1)
CATSGSGWFYNEQFF

SEQ ID NO: 755269 - protein, 14 aa, Homo sapiens
  CDR3 for alpha chain variable domain of TCR clone 377635 (TRAV3, TRAJ21)
CAVRDPYNFNKFYF

SEQ ID NO: 755270 - protein, 11 aa, Homo sapiens
  CDR3 for beta chain variable domain of TCR clone 377635 (TRBV29-1, TRBJ2-5)
CSEDRTGTQYF

SEQ ID NO: 755271 - protein, 12 aa, Homo sapiens
  CDR3 for alpha chain variable domain of TCR clone 377636 (TRAV3, TRAJ43)
CAVRDPNNYMRF

SEQ ID NO: 755272 - protein, 17 aa, Homo sapiens
  CDR3 for beta chain variable domain of TCR clone 377636 (TRBV7-8, TRBJ2-6)
CASSAGTGGAGANVLTF

SEQ ID NO: 755273 - protein, 18 aa, Homo sapiens
  CDR3 for alpha chain variable domain of TCR clone 377637 (TRAV17, TRAJ28)
CATDPPRGAGAGSYQLTF

SEQ ID NO: 755274 - protein, 14 aa, Homo sapiens
  CDR3 for beta chain variable domain of TCR clone 377637 (TRBV13, TRBJ2-5)
CASSLDYPQETQYF

SEQ ID NO: 755275 - protein, 13 aa, Homo sapiens
  CDR3 for alpha chain variable domain of TCR clone 377638 (TRAV21, TRAJ15)
CAVANQAGTALIF

SEQ ID NO: 755276 - protein, 11 aa, Homo sapiens
  CDR3 for beta chain variable domain of TCR clone 377638 (TRBV19, TRBJ2-5)
CASSIKETQYF

SEQ ID NO: 755277 - protein, 12 aa, Homo sapiens
  CDR3 for alpha chain variable domain of TCR clone 377639 (TRAV27, TRAJ41)
CAGRNSGYALNF

SEQ ID NO: 755278 - protein, 15 aa, Homo sapiens
  CDR3 for beta chain variable domain of TCR clone 377639 (TRBV6-3, TRBJ2-7)
CAGSSPGTVFYEQYF

SEQ ID NO: 755279 - protein, 15 aa, Homo sapiens
  CDR3 for alpha chain variable domain of TCR clone 377640 (TRAV25, TRAJ52)
CAGRPGGTSYGKLTF

SEQ ID NO: 755280 - protein, 13 aa, Homo sapiens
  CDR3 for beta chain variable domain of TCR clone 377640 (TRBV2, TRBJ2-1)
CATSRGTDNEQFF

SEQ ID NO: 755281 - protein, 14 aa, Homo sapiens
  CDR3 for alpha chain variable domain of TCR clone 377641 (TRAV8-4, TRAJ13)
CAVTLSGGYQKVTF

SEQ ID NO: 755282 - protein, 14 aa, Homo sapiens
  CDR3 for beta chain variable domain of TCR clone 377641 (TRBV7-2, TRBJ1-2)
CASSQTGSNYGYTF

SEQ ID NO: 755283 - protein, 13 aa, Homo sapiens
  CDR3 for alpha chain variable domain of TCR clone 377642 (TRAV21, TRAJ27)
CAARPGTAGKSTF

SEQ ID NO: 755284 - protein, 15 aa, Homo sapiens
  CDR3 for beta chain variable domain of TCR clone 377642 (TRBV9, TRBJ1-6)
CASSVAGTGDSPLHF

SEQ ID NO: 755285 - protein, 20 aa, Homo sapiens
  CDR3 for alpha chain variable domain of TCR clone 377643 (TRAV25, TRAJ33)
TATQTTDVGTSRGSNYQLIW

SEQ ID NO: 755286 - protein, 14 aa, Homo sapiens
  CDR3 for beta chain variable domain of TCR clone 377643 (TRBV7-2, TRBJ2-5)
CASSTGGELKIQYF

SEQ ID NO: 755287 - protein, 10 aa, Homo sapiens
  CDR3 for alpha chain variable domain of TCR clone 377644 (TRAV25, TRAJ20)
CAVNDYKLSF

SEQ ID NO: 755288 - protein, 18 aa, Homo sapiens
  CDR3 for beta chain variable domain of TCR clone 377644 (TRBV20-1, TRBJ2-6)
CSAETTPTHGSGAYVLTF

SEQ ID NO: 755289 - protein, 12 aa, Homo sapiens
  CDR3 for alpha chain variable domain of TCR clone 377645 (TRAV3, TRAJ20)
CAVRDGDYKLSF

SEQ ID NO: 755290 - protein, 15 aa, Homo sapiens
  CDR3 for beta chain variable domain of TCR clone 377645 (TRBV6-1, TRBJ1-5)
CATSDIDSKDQPQHF

SEQ ID NO: 755291 - protein, 14 aa, Homo sapiens
  CDR3 for alpha chain variable domain of TCR clone 377646 (TRAV2, TRAJ21)
CAVEDRNNFNKLYF

SEQ ID NO: 755292 - protein, 14 aa, Homo sapiens
  CDR3 for beta chain variable domain of TCR clone 377646 (TRBV7-9, TRBJ2-1)
CASSSMVGFGEQFF

SEQ ID NO: 755293 - protein, 14 aa, Homo sapiens
  CDR3 for alpha chain variable domain of TCR clone 377647 (TRAV1-2, TRAJ8)
CAVREDTGFQKLVF

SEQ ID NO: 755294 - protein, 12 aa, Homo sapiens
  CDR3 for beta chain variable domain of TCR clone 377647 (TRBV11-2, TRBJ2-2)
CASSLPTGEMFF

SEQ ID NO: 755295 - protein, 16 aa, Homo sapiens
  CDR3 for alpha chain variable domain of TCR clone 377648 (TRAV3, TRAJ10)
CAVRDMNAGGGNKPPF

SEQ ID NO: 755296 - protein, 16 aa, Homo sapiens
  CDR3 for beta chain variable domain of TCR clone 377648 (TRBV6-3, TRBJ1-2)
CASSYSRRASNYGYTF

SEQ ID NO: 755297 - protein, 14 aa, Homo sapiens
  CDR3 for alpha chain variable domain of TCR clone 377649 (TRAV8-2, TRAJ11)
CVVSEKSGYSTLTF

SEQ ID NO: 755298 - protein, 18 aa, Homo sapiens
  CDR3 for beta chain variable domain of TCR clone 377649 (TRBV7-9, TRBJ2-7)
CASSLTTSGSRTWYEQYF

SEQ ID NO: 755299 - protein, 17 aa, Homo sapiens
  CDR3 for alpha chain variable domain of TCR clone 377650 (TRAV36/DV7, TRAJ52)
CAAAQRAGGTSYGKLTF

SEQ ID NO: 755300 - protein, 14 aa, Homo sapiens
  CDR3 for beta chain variable domain of TCR clone 377650 (TRBV6-1, TRBJ1-3)
CASVQGGGGNTIYF

SEQ ID NO: 755301 - protein, 12 aa, Homo sapiens
  CDR3 for alpha chain variable domain of TCR clone 377651 (TRAV1-1, TRAJ8)
CAGGTGFQKLVF

SEQ ID NO: 755302 - protein, 22 aa, Homo sapiens
  CDR3 for beta chain variable domain of TCR clone 377651 (TRBV7-9, TRBJ1-4)
RGTRPCISVPAAGRGFNEKLFF

SEQ ID NO: 755303 - protein, 13 aa, Homo sapiens
  CDR3 for alpha chain variable domain of TCR clone 377652 (TRAV8-6, TRAJ13)
CAVSSGGFQKVTF

SEQ ID NO: 755304 - protein, 15 aa, Homo sapiens
  CDR3 for beta chain variable domain of TCR clone 377652 (TRBV7-9, TRBJ2-7)
CASSLPMGQANEQYF

SEQ ID NO: 755305 - protein, 13 aa, Homo sapiens
  CDR3 for alpha chain variable domain of TCR clone 377653 (TRAV2, TRAJ15)
CAVEAQAGTALIF

SEQ ID NO: 755306 - protein, 15 aa, Homo sapiens
  CDR3 for beta chain variable domain of TCR clone 377653 (TRBV7-9, TRBJ2-7)
CASSLALAEAYEQYF

SEQ ID NO: 755307 - protein, 15 aa, Homo sapiens
  CDR3 for alpha chain variable domain of TCR clone 377654 (TRAV4, TRAJ35)
CLVETRGALGMCCIA

SEQ ID NO: 755308 - protein, 17 aa, Homo sapiens
  CDR3 for beta chain variable domain of TCR clone 377654 (TRBV11-2, TRBJ2-1)
CAISLYPPGVEYNEQFF

SEQ ID NO: 755309 - protein, 14 aa, Homo sapiens
  CDR3 for alpha chain variable domain of TCR clone 377655 (TRAV12-2, TRAJ44)
CAVNPAGTASKLTF

SEQ ID NO: 755310 - protein, 13 aa, Homo sapiens
  CDR3 for beta chain variable domain of TCR clone 377655 (TRBV20-1, TRBJ1-6)
CRAPLGVGSPLHF

SEQ ID NO: 755311 - protein, 14 aa, Homo sapiens
  CDR3 for alpha chain variable domain of TCR clone 377656 (TRAV1-2, TRAJ8)
RAVREDTGFQKLVF

SEQ ID NO: 755312 - protein, 16 aa, Homo sapiens
  CDR3 for beta chain variable domain of TCR clone 377656 (TRBV5-1, TRBJ2-2)
CASSLWDTTNTGELFF

SEQ ID NO: 755313 - protein, 11 aa, Homo sapiens
  CDR3 for alpha chain variable domain of TCR clone 377657 (TRAV13-2, TRAJ15)
CSHQAGTALIF

SEQ ID NO: 755314 - protein, 12 aa, Homo sapiens
  CDR3 for beta chain variable domain of TCR clone 377657 (TRBV5-1, TRBJ2-4)
LAGEWTKNIQYF

SEQ ID NO: 755315 - protein, 12 aa, Homo sapiens
  CDR3 for alpha chain variable domain of TCR clone 377658 (TRAV30, TRAJ9)
CDTEERGNDMRF

SEQ ID NO: 755316 - protein, 13 aa, Homo sapiens
  CDR3 for beta chain variable domain of TCR clone 377658 (TRBV12-4, TRBJ1-2)
CASSSGSKDGYTF

SEQ ID NO: 755317 - protein, 14 aa, Homo sapiens
  CDR3 for alpha chain variable domain of TCR clone 377659 (TRAV8-3, TRAJ39)
CAVGANNAGNMLTL

SEQ ID NO: 755318 - protein, 13 aa, Homo sapiens
  CDR3 for beta chain variable domain of TCR clone 377659 (TRBV3-1, TRBJ2-5)
CASSPVLSETQYF

SEQ ID NO: 755319 - protein, 13 aa, Homo sapiens
  CDR3 for alpha chain variable domain of TCR clone 377660 (TRAV12-3, TRAJ43)
CAMIRPNNNDMRF

SEQ ID NO: 755320 - protein, 12 aa, Homo sapiens
  CDR3 for beta chain variable domain of TCR clone 377660 (TRBV11-2, TRBJ2-5)
CARSLGQETQYF

SEQ ID NO: 755321 - protein, 17 aa, Homo sapiens
  CDR3 for alpha chain variable domain of TCR clone 377661 (TRAV26-1, TRAJ37)
CIVRVITVSSNTGKLIF

SEQ ID NO: 755322 - protein, 16 aa, Homo sapiens
  CDR3 for beta chain variable domain of TCR clone 377661 (TRBV6-6, TRBJ2-4)
CASSNAGQGAKNIQYF

SEQ ID NO: 755323 - protein, 14 aa, Homo sapiens
  CDR3 for alpha chain variable domain of TCR clone 377662 (TRAV3, TRAJ22)
CAVRDYGSARQLTF

SEQ ID NO: 755324 - protein, 15 aa, Homo sapiens
  CDR3 for beta chain variable domain of TCR clone 377662 (TRBV2, TRBJ2-5)
CASRIAGVGGETQYF

SEQ ID NO: 755325 - protein, 13 aa, Homo sapiens
  CDR3 for alpha chain variable domain of TCR clone 377663 (TRAV17, TRAJ22)
CAHHSGSARQLTF

SEQ ID NO: 755326 - protein, 14 aa, Homo sapiens
  CDR3 for beta chain variable domain of TCR clone 377663 (TRBV16, TRBJ1-1)
CASSQAGPNTEAFF

SEQ ID NO: 755327 - protein, 18 aa, Homo sapiens
  CDR3 for alpha chain variable domain of TCR clone 377664 (TRAV12-3, TRAJ52)
CAMSRTNAGGTSYGKLTF

SEQ ID NO: 755328 - protein, 16 aa, Homo sapiens
  CDR3 for beta chain variable domain of TCR clone 377664 (TRBV7-3, TRBJ2-3)
ELSLMKRMRGTDTQYF

SEQ ID NO: 755329 - protein, 15 aa, Homo sapiens
  CDR3 for alpha chain variable domain of TCR clone 377665 (TRAV26-1, TRAJ42)
CIVRVKGGSQGNLIF

SEQ ID NO: 755330 - protein, 12 aa, Homo sapiens
  CDR3 for beta chain variable domain of TCR clone 377665 (TRBV11-2, TRBJ2-2)
CASSLGGGELFF

SEQ ID NO: 755331 - protein, 14 aa, Homo sapiens
  CDR3 for alpha chain variable domain of TCR clone 377666 (TRAV1-2, TRAJ15)
CAVRDRQAGTALIF

SEQ ID NO: 755332 - protein, 13 aa, Homo sapiens
  CDR3 for beta chain variable domain of TCR clone 377666 (TRBV10-3, TRBJ1-2)
CAISERDSYGYTF

SEQ ID NO: 755333 - protein, 18 aa, Homo sapiens
  CDR3 for alpha chain variable domain of TCR clone 377667 (TRAV21, TRAJ53)
CAVKGGENSGGSNYKLTF

SEQ ID NO: 755334 - protein, 11 aa, Homo sapiens
  CDR3 for beta chain variable domain of TCR clone 377667 (TRBV7-9, TRBJ2-1)
CASSSQNEQFF

SEQ ID NO: 755335 - protein, 13 aa, Homo sapiens
  CDR3 for alpha chain variable domain of TCR clone 377668 (TRAV8-3, TRAJ44)
CAVVPGTASKLTF

SEQ ID NO: 755336 - protein, 12 aa, Homo sapiens
  CDR3 for beta chain variable domain of TCR clone 377668 (TRBV4-1, TRBJ2-3)
CASSQGTDTQYF

SEQ ID NO: 755337 - protein, 17 aa, Homo sapiens
  CDR3 for alpha chain variable domain of TCR clone 377669 (TRAV22, TRAJ53)
CAVEFSNSGGSNYKLIF

SEQ ID NO: 755338 - protein, 15 aa, Homo sapiens
  CDR3 for beta chain variable domain of TCR clone 377669 (TRBV29-1, TRBJ2-1)
CSVPTGLALYNEQFF

SEQ ID NO: 755339 - protein, 16 aa, Homo sapiens
  CDR3 for alpha chain variable domain of TCR clone 377670 (TRAV3, TRAJ37)
CAVGGKGSGNKGKLLF

SEQ ID NO: 755340 - protein, 15 aa, Homo sapiens
  CDR3 for beta chain variable domain of TCR clone 377670 (TRBV7-3, TRBJ2-2)
CASSETGQGTGELFF

SEQ ID NO: 755341 - protein, 15 aa, Homo sapiens
  CDR3 for alpha chain variable domain of TCR clone 377671 (TRAV27, TRAJ38)
CAARRNAGNNRKLIW

SEQ ID NO: 755342 - protein, 16 aa, Homo sapiens
  CDR3 for beta chain variable domain of TCR clone 377671 (TRBV2, TRBJ2-1)
CASSVGGSLSYNEQFF

SEQ ID NO: 755343 - protein, 14 aa, Homo sapiens
  CDR3 for alpha chain variable domain of TCR clone 377672 (TRAV38-1, TRAJ45)
CAYYSGGGADGLTF

SEQ ID NO: 755344 - protein, 12 aa, Homo sapiens
  CDR3 for beta chain variable domain of TCR clone 377672 (TRBV29-1, TRBJ2-3)
CSVTGGADTQYF

SEQ ID NO: 755345 - protein, 15 aa, Homo sapiens
  CDR3 for alpha chain variable domain of TCR clone 377673 (TRAV29/DV5, TRAJ24)
CAASGATDSWEKFRF

SEQ ID NO: 755346 - protein, 12 aa, Homo sapiens
  CDR3 for beta chain variable domain of TCR clone 377673 (TRBV11-2, TRBJ2-2)
CASSLPTGELFF

SEQ ID NO: 755347 - protein, 18 aa, Homo sapiens
  CDR3 for alpha chain variable domain of TCR clone 377674 (TRAV21, TRAJ52)
CAVRPSPAGGTSYGKLTF

SEQ ID NO: 755348 - protein, 12 aa, Homo sapiens
  CDR3 for beta chain variable domain of TCR clone 377674 (TRBV18, TRBJ1-4)
CASSPSREKLFF

SEQ ID NO: 755349 - protein, 13 aa, Homo sapiens
  CDR3 for alpha chain variable domain of TCR clone 377675 (TRAV9-2, TRAJ53)
CAMSGGSNYKLTF

SEQ ID NO: 755350 - protein, 17 aa, Homo sapiens
  CDR3 for beta chain variable domain of TCR clone 377675 (TRBV11-2, TRBJ2-1)
CASSLYPPGVEYNEQFF

SEQ ID NO: 755351 - protein, 13 aa, Homo sapiens
  CDR3 for alpha chain variable domain of TCR clone 377676 (TRAV3, TRAJ21)
CAVREPDFNKFYL

SEQ ID NO: 755352 - protein, 14 aa, Homo sapiens
  CDR3 for beta chain variable domain of TCR clone 377676 (TRBV20-1, TRBJ2-3)
CSARGGTSTDTQYF

SEQ ID NO: 755353 - protein, 18 aa, Homo sapiens
  CDR3 for alpha chain variable domain of TCR clone 377677 (TRAV21, TRAJ53)
CAVKGGGNSGGSNYKLTF

SEQ ID NO: 755354 - protein, 13 aa, Homo sapiens
  CDR3 for beta chain variable domain of TCR clone 377677 (TRBV9, TRBJ2-1)
CASSPSGGSEQFF

SEQ ID NO: 755355 - protein, 13 aa, Homo sapiens
  CDR3 for alpha chain variable domain of TCR clone 377678 (TRAV38-2/DV8, TRAJ34)
CAYRTWNTDKLFF

SEQ ID NO: 755356 - protein, 18 aa, Homo sapiens
  CDR3 for beta chain variable domain of TCR clone 377678 (TRBV6-6, TRBJ1-3)
CASSYSKWDSISGNTIYF

SEQ ID NO: 755357 - protein, 16 aa, Homo sapiens
  CDR3 for alpha chain variable domain of TCR clone 377679 (TRAV30, TRAJ24)
CGTEIVDADSWGNFQF

SEQ ID NO: 755358 - protein, 13 aa, Homo sapiens
  CDR3 for beta chain variable domain of TCR clone 377679 (TRBV11-2, TRBJ2-5)
CASSSTGEETQYF

SEQ ID NO: 755359 - protein, 14 aa, Homo sapiens
  CDR3 for alpha chain variable domain of TCR clone 377680 (TRAV3, TRAJ9)
CAVRLNTGGSKTIF

SEQ ID NO: 755360 - protein, 14 aa, Homo sapiens
  CDR3 for beta chain variable domain of TCR clone 377680 (TRBV4-1, TRBJ2-7)
CASSPVAGGDEQYF

SEQ ID NO: 755361 - protein, 17 aa, Homo sapiens
  CDR3 for alpha chain variable domain of TCR clone 377681 (TRAV8-6, TRAJ8)
CTVKEGIENTGFQKLVF

SEQ ID NO: 755362 - protein, 12 aa, Homo sapiens
  CDR3 for beta chain variable domain of TCR clone 377681 (TRBV19, TRBJ1-4)
CASKDWPGGLFF

SEQ ID NO: 755363 - protein, 15 aa, Homo sapiens
  CDR3 for alpha chain variable domain of TCR clone 377682 (TRAV26-1, TRAJ29)
CIVRVEGSGNTPLVS

SEQ ID NO: 755364 - protein, 10 aa, Homo sapiens
  CDR3 for beta chain variable domain of TCR clone 377682 (TRBV7-9, TRBJ1-5)
CASSQGHQPD

SEQ ID NO: 755365 - protein, 14 aa, Homo sapiens
  CDR3 for alpha chain variable domain of TCR clone 377683 (TRAV8-3, TRAJ9)
CAVVYNTGGFKNIC

SEQ ID NO: 755366 - protein, 14 aa, Homo sapiens
  CDR3 for beta chain variable domain of TCR clone 377683 (TRBV7-3, TRBJ2-2)
CASSSGGYTGELFF

SEQ ID NO: 755367 - protein, 13 aa, Homo sapiens
  CDR3 for alpha chain variable domain of TCR clone 377684 (TRAV20, TRAJ56)
CCAVWGANSKLTF

SEQ ID NO: 755368 - protein, 14 aa, Homo sapiens
  CDR3 for beta chain variable domain of TCR clone 377684 (TRBV20-1, TRBJ2-7)
CSAKRGRSSYEQYF

SEQ ID NO: 755369 - protein, 13 aa, Homo sapiens
  CDR3 for alpha chain variable domain of TCR clone 377685 (TRAV8-3, TRAJ43)
CAVGADNNNDMRL

SEQ ID NO: 755370 - protein, 13 aa, Homo sapiens
  CDR3 for beta chain variable domain of TCR clone 377685 (TRBV4-2, TRBJ1-1)
CASSQAGNTEAFF

SEQ ID NO: 755371 - protein, 18 aa, Homo sapiens
  CDR3 for alpha chain variable domain of TCR clone 377686 (TRAV21, TRAJ52)
CAVRHFQAGGTSYGKLTF

SEQ ID NO: 755372 - protein, 17 aa, Homo sapiens
  CDR3 for beta chain variable domain of TCR clone 377686 (TRBV13, TRBJ2-3)
CASSLSRVAGGRNTQYF

SEQ ID NO: 755373 - protein, 10 aa, Homo sapiens
  CDR3 for alpha chain variable domain of TCR clone 377687 (TRAV1-2, TRAJ20)
CACNDYKLSF

SEQ ID NO: 755374 - protein, 15 aa, Homo sapiens
  CDR3 for beta chain variable domain of TCR clone 377687 (TRBV9, TRBJ2-1)
CASSLAGSSYNEQFF

SEQ ID NO: 755375 - protein, 14 aa, Homo sapiens
  CDR3 for alpha chain variable domain of TCR clone 377688 (TRAV13-1, TRAJ29)
CAASSNSGNTPLVF

SEQ ID NO: 755376 - protein, 14 aa, Homo sapiens
  CDR3 for beta chain variable domain of TCR clone 377688 (TRBV7-6, TRBJ2-3)
CASNSGGDANTQYF

SEQ ID NO: 755377 - protein, 14 aa, Homo sapiens
  CDR3 for alpha chain variable domain of TCR clone 377689 (TRAV1-2, TRAJ16)
CAVNRFSYGQKLLF

SEQ ID NO: 755378 - protein, 14 aa, Homo sapiens
  CDR3 for beta chain variable domain of TCR clone 377689 (TRBV7-2, TRBJ2-7)
CASSLYPGRYEQYF

SEQ ID NO: 755379 - protein, 14 aa, Homo sapiens
  CDR3 for alpha chain variable domain of TCR clone 377690 (TRAV8-2, TRAJ4)
CVVRPSGGYNKLIF

SEQ ID NO: 755380 - protein, 15 aa, Homo sapiens
  CDR3 for beta chain variable domain of TCR clone 377690 (TRBV5-1, TRBJ2-2)
CASSSQGGNTGELFF

SEQ ID NO: 755381 - protein, 14 aa, Homo sapiens
  CDR3 for alpha chain variable domain of TCR clone 377691 (TRAV12-2, TRAJ45)
CAVNIGGGADGLTF

SEQ ID NO: 755382 - protein, 16 aa, Homo sapiens
  CDR3 for beta chain variable domain of TCR clone 377691 (TRBV4-1, TRBJ1-2)
CASSQDAGQVLYGYTF

SEQ ID NO: 755383 - protein, 14 aa, Homo sapiens
  CDR3 for alpha chain variable domain of TCR clone 377692 (TRAV20, TRAJ22)
CALQVSGSARQLTF

SEQ ID NO: 755384 - protein, 15 aa, Homo sapiens
  CDR3 for beta chain variable domain of TCR clone 377692 (TRBV11-3, TRBJ2-7)
CASSPGPASSYEQYF

SEQ ID NO: 755385 - protein, 16 aa, Homo sapiens
  CDR3 for alpha chain variable domain of TCR clone 377693 (TRAV30, TRAJ24)
CGTEIVDADSWGKFQF

SEQ ID NO: 755386 - protein, 13 aa, Homo sapiens
  CDR3 for beta chain variable domain of TCR clone 377693 (TRBV5-1, TRBJ2-7)
CASSATGGNEQYF

SEQ ID NO: 755387 - protein, 12 aa, Homo sapiens
  CDR3 for alpha chain variable domain of TCR clone 377694 (TRAV8-3, TRAJ26)
CAGDNYGQNFVS

SEQ ID NO: 755388 - protein, 12 aa, Homo sapiens
  CDR3 for beta chain variable domain of TCR clone 377694 (TRBV11-2, TRBJ2-1)
CASSPGNNEQFF

SEQ ID NO: 755389 - protein, 12 aa, Homo sapiens
  CDR3 for alpha chain variable domain of TCR clone 377695 (TRAV16, TRAJ20)
CSGPSNDYKRSF

SEQ ID NO: 755390 - protein, 15 aa, Homo sapiens
  CDR3 for beta chain variable domain of TCR clone 377695 (TRBV5-1, TRBJ2-2)
CASSRVGSDTGELFF

SEQ ID NO: 755391 - protein, 14 aa, Homo sapiens
  CDR3 for alpha chain variable domain of TCR clone 377696 (TRAV8-4, TRAJ13)
CAVTLSGGYQKVTF

SEQ ID NO: 755392 - protein, 15 aa, Homo sapiens
  CDR3 for beta chain variable domain of TCR clone 377696 (TRBV19, TRBJ2-1)
CASSIVRGEGREQFF

SEQ ID NO: 755393 - protein, 12 aa, Homo sapiens
  CDR3 for alpha chain variable domain of TCR clone 377697 (TRAV13-1, TRAJ21)
CAAKEGFNKFYF

SEQ ID NO: 755394 - protein, 20 aa, Homo sapiens
  CDR3 for beta chain variable domain of TCR clone 377697 (TRBV7-8, TRBJ2-2)
CASSDLFSGPTIHITGELFF

SEQ ID NO: 755395 - protein, 17 aa, Homo sapiens
  CDR3 for alpha chain variable domain of TCR clone 377698 (TRAV8-6, TRAJ58)
CAVSSWVGETSGSRLTF

SEQ ID NO: 755396 - protein, 16 aa, Homo sapiens
  CDR3 for beta chain variable domain of TCR clone 377698 (TRBV19, TRBJ2-1)
CASSKAGPSSYNEQFF

SEQ ID NO: 755397 - protein, 17 aa, Homo sapiens
  CDR3 for alpha chain variable domain of TCR clone 377699 (TRAV8-6, TRAJ58)
CAVSSWVGEASGPRLTF

SEQ ID NO: 755398 - protein, 15 aa, Homo sapiens
  CDR3 for beta chain variable domain of TCR clone 377699 (TRBV6-5, TRBJ2-1)
CASSYDAGAGNEQFF

SEQ ID NO: 755399 - protein, 13 aa, Homo sapiens
  CDR3 for alpha chain variable domain of TCR clone 377700 (TRAV17, TRAJ54)
CATDAGGAQKLVF

SEQ ID NO: 755400 - protein, 17 aa, Homo sapiens
  CDR3 for beta chain variable domain of TCR clone 377700 (TRBV25-1, TRBJ1-6)
CASSEYIGERGNSPLLF

SEQ ID NO: 755401 - protein, 10 aa, Homo sapiens
  CDR3 for alpha chain variable domain of TCR clone 377701 (TRAV27, TRAJ43)
CAGNNNDMRF

SEQ ID NO: 755402 - protein, 13 aa, Homo sapiens
  CDR3 for beta chain variable domain of TCR clone 377701 (TRBV29-1, TRBJ1-1)
CSVGDSRNTEAFF

SEQ ID NO: 755403 - protein, 14 aa, Homo sapiens
  CDR3 for alpha chain variable domain of TCR clone 377702 (TRAV38-1, TRAJ45)
CAYYSGGGADGLTL

SEQ ID NO: 755404 - protein, 15 aa, Homo sapiens
  CDR3 for beta chain variable domain of TCR clone 377702 (TRBV15, TRBJ1-4)
CATSRDMGSYEKLFF

SEQ ID NO: 755405 - protein, 14 aa, Homo sapiens
  CDR3 for alpha chain variable domain of TCR clone 377703 (TRAV12-2, TRAJ40)
CAVRIPSGAYKYIF

SEQ ID NO: 755406 - protein, 15 aa, Homo sapiens
  CDR3 for beta chain variable domain of TCR clone 377703 (TRBV11-3, TRBJ2-3)
CASLKDGREGDTQYF

SEQ ID NO: 755407 - protein, 14 aa, Homo sapiens
  CDR3 for alpha chain variable domain of TCR clone 377704 (TRAV12-3, TRAJ9)
CAMSPNTGGFKTIF

SEQ ID NO: 755408 - protein, 16 aa, Homo sapiens
  CDR3 for beta chain variable domain of TCR clone 377704 (TRBV19, TRBJ2-3)
CASSPGAASRTDTQYF

SEQ ID NO: 755409 - protein, 12 aa, Homo sapiens
  CDR3 for alpha chain variable domain of TCR clone 377705 (TRAV3, TRAJ43)
CAVRDPNNDMRF

SEQ ID NO: 755410 - protein, 13 aa, Homo sapiens
  CDR3 for beta chain variable domain of TCR clone 377705 (TRBV4-1, TRBJ2-5)
CASSLTRGETQYF

SEQ ID NO: 755411 - protein, 18 aa, Homo sapiens
  CDR3 for alpha chain variable domain of TCR clone 377706 (TRAV21, TRAJ52)
CAVRPSPAGGTSYGKLTF

SEQ ID NO: 755412 - protein, 17 aa, Homo sapiens
  CDR3 for beta chain variable domain of TCR clone 377706 (TRBV13, TRBJ2-3)
CAISLSSVAGGRNTQYF

SEQ ID NO: 755413 - protein, 11 aa, Homo sapiens
  CDR3 for alpha chain variable domain of TCR clone 377707 (TRAV8-4, TRAJ20)
CAVTNVLTTTS

SEQ ID NO: 755414 - protein, 15 aa, Homo sapiens
  CDR3 for beta chain variable domain of TCR clone 377707 (TRBV6-1, TRBJ1-2)
CSSGAWQGRSHGYTF

SEQ ID NO: 755415 - protein, 13 aa, Homo sapiens
  CDR3 for alpha chain variable domain of TCR clone 377708 (TRAV27, TRAJ41)
CAGEGDSGYALNF

SEQ ID NO: 755416 - protein, 15 aa, Homo sapiens
  CDR3 for beta chain variable domain of TCR clone 377708 (TRBV4-1, TRBJ1-4)
CASSDTGGTNEKLFF

SEQ ID NO: 755417 - protein, 13 aa, Homo sapiens
  CDR3 for alpha chain variable domain of TCR clone 377709 (TRAV12-3, TRAJ43)
CAMIRPNNNDIRF

SEQ ID NO: 755418 - protein, 12 aa, Homo sapiens
  CDR3 for beta chain variable domain of TCR clone 377709 (TRBV11-2, TRBJ2-2)
CASSLGGGELFF

SEQ ID NO: 755419 - protein, 13 aa, Homo sapiens
  CDR3 for alpha chain variable domain of TCR clone 377710 (TRAV16, TRAJ48)
CSPLNFGNEKLTF

SEQ ID NO: 755420 - protein, 11 aa, Homo sapiens
  CDR3 for beta chain variable domain of TCR clone 377710 (TRBV7-9, TRBJ2-3)
CASSSTDTQYF

SEQ ID NO: 755421 - protein, 14 aa, Homo sapiens
  CDR3 for alpha chain variable domain of TCR clone 377711 (TRAV13-1, TRAJ53)
CAASISSSNYKLTF

SEQ ID NO: 755422 - protein, 15 aa, Homo sapiens
  CDR3 for beta chain variable domain of TCR clone 377711 (TRBV4-1, TRBJ1-4)
CASSDTGGTNEKLFF

SEQ ID NO: 755423 - protein, 14 aa, Homo sapiens
  CDR3 for alpha chain variable domain of TCR clone 377712 (TRAV16, TRAJ15)
CALSGPQAGTALIF

SEQ ID NO: 755424 - protein, 12 aa, Homo sapiens
  CDR3 for beta chain variable domain of TCR clone 377712 (TRBV18, TRBJ2-5)
CASSPSKENQYF

SEQ ID NO: 755425 - protein, 14 aa, Homo sapiens
  CDR3 for alpha chain variable domain of TCR clone 377713 (TRAV1-2, TRAJ8)
CAVREDTGFQKLVF

SEQ ID NO: 755426 - protein, 14 aa, Homo sapiens
  CDR3 for beta chain variable domain of TCR clone 377713 (TRBV7-3, TRBJ2-1)
CASSLAGGTNEQFL

SEQ ID NO: 755427 - protein, 13 aa, Homo sapiens
  CDR3 for alpha chain variable domain of TCR clone 377714 (TRAV21, TRAJ24)
GLMTTDSWGKLQF

SEQ ID NO: 755428 - protein, 16 aa, Homo sapiens
  CDR3 for beta chain variable domain of TCR clone 377714 (TRBV5-4, TRBJ2-3)
CASQQPGAGGADTQYF

SEQ ID NO: 755429 - protein, 14 aa, Homo sapiens
  CDR3 for alpha chain variable domain of TCR clone 377715 (TRAV13-1, TRAJ6)
CAASNGGGSYIPTF

SEQ ID NO: 755430 - protein, 12 aa, Homo sapiens
  CDR3 for beta chain variable domain of TCR clone 377715 (TRBV3-1, TRBJ2-1)
CASSQGSSGQFF

SEQ ID NO: 755431 - protein, 18 aa, Homo sapiens
  CDR3 for alpha chain variable domain of TCR clone 377716 (TRAV26-2, TRAJ45)
CILRVDKYSGGGADGLTF

SEQ ID NO: 755432 - protein, 18 aa, Homo sapiens
  CDR3 for beta chain variable domain of TCR clone 377716 (TRBV7-9, TRBJ2-7)
CASSLTTSGSRTWYEQYF

SEQ ID NO: 755433 - protein, 16 aa, Homo sapiens
  CDR3 for alpha chain variable domain of TCR clone 377717 (TRAV14/DV4, TRAJ54)
CAMREGRIQGAQKLGF

SEQ ID NO: 755434 - protein, 18 aa, Homo sapiens
  CDR3 for beta chain variable domain of TCR clone 377717 (TRBV25-1, TRBJ1-2)
CASSGRQNGQGLIFGYTF

SEQ ID NO: 755435 - protein, 13 aa, Homo sapiens
  CDR3 for alpha chain variable domain of TCR clone 377718 (TRAV12-3, TRAJ13)
CAMRSGGYQKVTF

SEQ ID NO: 755436 - protein, 13 aa, Homo sapiens
  CDR3 for beta chain variable domain of TCR clone 377718 (TRBV20-1, TRBJ1-1)
CSAPPGGHTEAFF

SEQ ID NO: 755437 - protein, 13 aa, Homo sapiens
  CDR3 for alpha chain variable domain of TCR clone 377719 (TRAV13-2, TRAJ48)
CAEMDFGNEKLTF

SEQ ID NO: 755438 - protein, 15 aa, Homo sapiens
  CDR3 for beta chain variable domain of TCR clone 377719 (TRBV7-2, TRBJ1-1)
CASSLDGTGETEAFF

SEQ ID NO: 755439 - protein, 19 aa, Homo sapiens
  CDR3 for alpha chain variable domain of TCR clone 377720 (TRAV25, TRAJ20)
TATQTTDVGILPHDYKLSF

SEQ ID NO: 755440 - protein, 13 aa, Homo sapiens
  CDR3 for beta chain variable domain of TCR clone 377720 (TRBV12-5, TRBJ2-1)
CASGLGRGNEQFF

SEQ ID NO: 755441 - protein, 20 aa, Homo sapiens
  CDR3 for alpha chain variable domain of TCR clone 377721 (TRAV12-3, TRAJ37)
CALVRVWQHRQTNLWARDNF

SEQ ID NO: 755442 - protein, 11 aa, Homo sapiens
  CDR3 for beta chain variable domain of TCR clone 377721 (TRBV12-4, TRBJ2-3)
CASTATDTQYF

SEQ ID NO: 755443 - protein, 15 aa, Homo sapiens
  CDR3 for alpha chain variable domain of TCR clone 377722 (TRAV8-3, TRAJ15)
CAVGAPNQSGTALSF

SEQ ID NO: 755444 - protein, 17 aa, Homo sapiens
  CDR3 for beta chain variable domain of TCR clone 377722 (TRBV20-1, TRBJ2-2)
CSASGSGQGGLTGELFF

SEQ ID NO: 755445 - protein, 12 aa, Homo sapiens
  CDR3 for alpha chain variable domain of TCR clone 377723 (TRAV36/DV7, TRAJ54)
CSVVRGAQKLVF

SEQ ID NO: 755446 - protein, 18 aa, Homo sapiens
  CDR3 for beta chain variable domain of TCR clone 377723 (TRBV20-1, TRBJ2-3)
CSASGLAGGPGTTDTQYF

SEQ ID NO: 755447 - protein, 14 aa, Homo sapiens
  CDR3 for alpha chain variable domain of TCR clone 377724 (TRAV2, TRAJ9)
CAVEDRSGVFKTIF

SEQ ID NO: 755448 - protein, 16 aa, Homo sapiens
  CDR3 for beta chain variable domain of TCR clone 377724 (TRBV15, TRBJ2-7)
CATSRDGGIPSYEQYF

SEQ ID NO: 755449 - protein, 15 aa, Homo sapiens
  CDR3 for alpha chain variable domain of TCR clone 377725 (TRAV8-6, TRAJ10)
CAVSGQAGGGHKLTF

SEQ ID NO: 755450 - protein, 15 aa, Homo sapiens
  CDR3 for beta chain variable domain of TCR clone 377725 (TRBV3-1, TRBJ2-5)
CASSANLGGPETQYF

SEQ ID NO: 755451 - protein, 12 aa, Homo sapiens
  CDR3 for alpha chain variable domain of TCR clone 377726 (TRAV12-3, TRAJ17)
CAMTLTGNKLTF

SEQ ID NO: 755452 - protein, 16 aa, Homo sapiens
  CDR3 for beta chain variable domain of TCR clone 377726 (TRBV7-2, TRBJ2-7)
CASSSQGLAPTYEQYF

SEQ ID NO: 755453 - protein, 11 aa, Homo sapiens
  CDR3 for alpha chain variable domain of TCR clone 377727 (TRAV2, TRAJ13)
CASGGYQKVTF

SEQ ID NO: 755454 - protein, 13 aa, Homo sapiens
  CDR3 for beta chain variable domain of TCR clone 377727 (TRBV12-4, TRBJ1-2)
CASSLRQGKGYTL

SEQ ID NO: 755455 - protein, 12 aa, Homo sapiens
  CDR3 for alpha chain variable domain of TCR clone 377728 (TRAV21, TRAJ31)
CVLAGNNARVMF

SEQ ID NO: 755456 - protein, 16 aa, Homo sapiens
  CDR3 for beta chain variable domain of TCR clone 377728 (TRBV27, TRBJ2-5)
CASSFGPGGTKETQYF

SEQ ID NO: 755457 - protein, 16 aa, Homo sapiens
  CDR3 for alpha chain variable domain of TCR clone 377729 (TRAV30, TRAJ42)
CGTSKNYGGSQGNLIF

SEQ ID NO: 755458 - protein, 14 aa, Homo sapiens
  CDR3 for beta chain variable domain of TCR clone 377729 (TRBV19, TRBJ2-1)
CARGARSFQWEQLF

SEQ ID NO: 755459 - protein, 13 aa, Homo sapiens
  CDR3 for alpha chain variable domain of TCR clone 377730 (TRAV26-1, TRAJ24)
CIVGVDSWGKLQF

SEQ ID NO: 755460 - protein, 13 aa, Homo sapiens
  CDR3 for beta chain variable domain of TCR clone 377730 (TRBV4-2, TRBJ1-1)
CASSQAGNTEAFF

SEQ ID NO: 755461 - protein, 12 aa, Homo sapiens
  CDR3 for alpha chain variable domain of TCR clone 377731 (TRAV21, TRAJ24)
CAVMDSWGKLQF

SEQ ID NO: 755462 - protein, 16 aa, Homo sapiens
  CDR3 for beta chain variable domain of TCR clone 377731 (TRBV13, TRBJ2-2)
CASSDVFGANTGELFF

SEQ ID NO: 755463 - protein, 15 aa, Homo sapiens
  CDR3 for alpha chain variable domain of TCR clone 377732 (TRAV21, TRAJ53)
CATLNSGGSNYKLTF

SEQ ID NO: 755464 - protein, 13 aa, Homo sapiens
  CDR3 for beta chain variable domain of TCR clone 377732 (TRBV19, TRBJ2-5)
CASSIHSQETQYF

SEQ ID NO: 755465 - protein, 13 aa, Homo sapiens
  CDR3 for alpha chain variable domain of TCR clone 377733 (TRAV13-1, TRAJ29)
CAAGIGLNTPLVF

SEQ ID NO: 755466 - protein, 15 aa, Homo sapiens
  CDR3 for beta chain variable domain of TCR clone 377733 (TRBV6-1, TRBJ2-5)
CASSEFPLMGETQYF

SEQ ID NO: 755467 - protein, 12 aa, Homo sapiens
  CDR3 for alpha chain variable domain of TCR clone 377734 (TRAV20, TRAJ49)
CAVNKDGNQFYF

SEQ ID NO: 755468 - protein, 14 aa, Homo sapiens
  CDR3 for beta chain variable domain of TCR clone 377734 (TRBV7-2, TRBJ2-7)
CASRSQGAAYEQYF

SEQ ID NO: 755469 - protein, 13 aa, Homo sapiens
  CDR3 for alpha chain variable domain of TCR clone 377735 (TRAV2, TRAJ40)
CAVVTSGTYKYIF

SEQ ID NO: 755470 - protein, 14 aa, Homo sapiens
  CDR3 for beta chain variable domain of TCR clone 377735 (TRBV4-3, TRBJ1-4)
CASSPLQRNEKLLF

SEQ ID NO: 755471 - protein, 14 aa, Homo sapiens
  CDR3 for alpha chain variable domain of TCR clone 377736 (TRAV9-2, TRAJ6)
CALSDPGGSYIPTF

SEQ ID NO: 755472 - protein, 12 aa, Homo sapiens
  CDR3 for beta chain variable domain of TCR clone 377736 (TRBV19, TRBJ2-1)
CASSRQGAEQFF

SEQ ID NO: 755473 - protein, 14 aa, Homo sapiens
  CDR3 for alpha chain variable domain of TCR clone 377737 (TRAV1-2, TRAJ16)
CAVNRFSDGQKLLF

SEQ ID NO: 755474 - protein, 14 aa, Homo sapiens
  CDR3 for beta chain variable domain of TCR clone 377737 (TRBV6-5, TRBJ2-4)
CASGGRLEKNNQYF

SEQ ID NO: 755475 - protein, 16 aa, Homo sapiens
  CDR3 for alpha chain variable domain of TCR clone 377738 (TRAV12-2, TRAJ40)
CAVIRGGISGTYKYIF

SEQ ID NO: 755476 - protein, 14 aa, Homo sapiens
  CDR3 for beta chain variable domain of TCR clone 377738 (TRBV20-1, TRBJ2-5)
CSARDGRAGETQYF

SEQ ID NO: 755477 - protein, 15 aa, Homo sapiens
  CDR3 for alpha chain variable domain of TCR clone 377739 (TRAV8-3, TRAJ45)
CASSYSGGGADGLTF

SEQ ID NO: 755478 - protein, 17 aa, Homo sapiens
  CDR3 for beta chain variable domain of TCR clone 377739 (TRBV4-1, TRBJ2-5)
CASSQDQTGGPQETQYF

SEQ ID NO: 755479 - protein, 13 aa, Homo sapiens
  CDR3 for alpha chain variable domain of TCR clone 377740 (TRAV2, TRAJ15)
CAVASQAGTALIF

SEQ ID NO: 755480 - protein, 15 aa, Homo sapiens
  CDR3 for beta chain variable domain of TCR clone 377740 (TRBV20-1, TRBJ2-7)
CSARDRVSEMDEQYF

SEQ ID NO: 755481 - protein, 12 aa, Homo sapiens
  CDR3 for alpha chain variable domain of TCR clone 377741 (TRAV13-1, TRAJ21)
CAAKEGFHKFYF

SEQ ID NO: 755482 - protein, 14 aa, Homo sapiens
  CDR3 for beta chain variable domain of TCR clone 377741 (TRBV20-1, TRBJ2-7)
CSAPELAGVGEQYF

SEQ ID NO: 755483 - protein, 14 aa, Homo sapiens
  CDR3 for alpha chain variable domain of TCR clone 377742 (TRAV12-1, TRAJ26)
CVVKGSNYGQNFVF

SEQ ID NO: 755484 - protein, 17 aa, Homo sapiens
  CDR3 for beta chain variable domain of TCR clone 377742 (TRBV11-2, TRBJ2-6)
RASSQRDIFSGANVLTF

SEQ ID NO: 755485 - protein, 15 aa, Homo sapiens
  CDR3 for alpha chain variable domain of TCR clone 377743 (TRAV8-6, TRAJ6)
CAVSGESGGSYIPTF

SEQ ID NO: 755486 - protein, 14 aa, Homo sapiens
  CDR3 for beta chain variable domain of TCR clone 377743 (TRBV7-9, TRBJ2-1)
CASSSMVGFGEQYF

SEQ ID NO: 755487 - protein, 14 aa, Homo sapiens
  CDR3 for alpha chain variable domain of TCR clone 377744 (TRAV35, TRAJ22)
CAGLRPGSARQLTF

SEQ ID NO: 755488 - protein, 19 aa, Homo sapiens
  CDR3 for beta chain variable domain of TCR clone 377744 (TRBV12-4, TRBJ2-1)
CASTLAFDPRDKEANEQFF

SEQ ID NO: 755489 - protein, 12 aa, Homo sapiens
  CDR3 for alpha chain variable domain of TCR clone 377745 (TRAV13-1, TRAJ21)
CAAKEGFNKFYF

SEQ ID NO: 755490 - protein, 11 aa, Homo sapiens
  CDR3 for beta chain variable domain of TCR clone 377745 (TRBV6-1, TRBJ2-1)
CASISSSEQFF

SEQ ID NO: 755491 - protein, 13 aa, Homo sapiens
  CDR3 for alpha chain variable domain of TCR clone 377746 (TRAV1-2, TRAJ9)
CAALNTGGFKTIF

SEQ ID NO: 755492 - protein, 20 aa, Homo sapiens
  CDR3 for beta chain variable domain of TCR clone 377746 (TRBV28, TRBJ2-1)
CASTTIGRSPGLAGGNEQFF

SEQ ID NO: 755493 - protein, 16 aa, Homo sapiens
  CDR3 for alpha chain variable domain of TCR clone 377747 (TRAV13-1, TRAJ17)
CAASKGVKAAGNKLTF

SEQ ID NO: 755494 - protein, 15 aa, Homo sapiens
  CDR3 for beta chain variable domain of TCR clone 377747 (TRBV20-1, TRBJ1-5)
CSAREGGYSNQPQHV

SEQ ID NO: 755495 - protein, 16 aa, Homo sapiens
  CDR3 for alpha chain variable domain of TCR clone 377748 (TRAV1-2, TRAJ6)
CAVRNIASGGSYIPTF

SEQ ID NO: 755496 - protein, 18 aa, Homo sapiens
  CDR3 for beta chain variable domain of TCR clone 377748 (TRBV20-1, TRBJ2-3)
CSASGLAGGPGTTDTQYF

SEQ ID NO: 755497 - protein, 17 aa, Homo sapiens
  CDR3 for alpha chain variable domain of TCR clone 377749 (TRAV3, TRAJ12)
CAVRDGGRLDSSYKLIF

SEQ ID NO: 755498 - protein, 15 aa, Homo sapiens
  CDR3 for beta chain variable domain of TCR clone 377749 (TRBV20-1, TRBJ2-5)
CSAEGTGGLQETQYF

SEQ ID NO: 755499 - protein, 15 aa, Homo sapiens
  CDR3 for alpha chain variable domain of TCR clone 377750 (TRAV25, TRAJ52)
CAGRPGGTSYGKLTF

SEQ ID NO: 755500 - protein, 12 aa, Homo sapiens
  CDR3 for beta chain variable domain of TCR clone 377750 (TRBV7-6, TRBJ2-7)
CASSLADSEQYF

SEQ ID NO: 755501 - protein, 18 aa, Homo sapiens
  CDR3 for alpha chain variable domain of TCR clone 377751 (TRAV21, TRAJ52)
CAVRPYQAGGTSYGKLTF

SEQ ID NO: 755502 - protein, 19 aa, Homo sapiens
  CDR3 for beta chain variable domain of TCR clone 377751 (TRBV28, TRBJ2-4)
CASSFQPGGPAHSKNIQYF

SEQ ID NO: 755503 - protein, 16 aa, Homo sapiens
  CDR3 for alpha chain variable domain of TCR clone 377752 (TRAV1-2, TRAJ10)
CAVRGVLTGGGNKLTF

SEQ ID NO: 755504 - protein, 16 aa, Homo sapiens
  CDR3 for beta chain variable domain of TCR clone 377752 (TRBV20-1, TRBJ1-2)
CSASMGQGVANYGYAF

SEQ ID NO: 755505 - protein, 14 aa, Homo sapiens
  CDR3 for alpha chain variable domain of TCR clone 377753 (TRAV8-1, TRAJ3)
CAVGLYSSASKIIF

SEQ ID NO: 755506 - protein, 15 aa, Homo sapiens
  CDR3 for beta chain variable domain of TCR clone 377753 (TRBV7-9, TRBJ2-7)
CASSSSGLAVYEQYF

SEQ ID NO: 755507 - protein, 13 aa, Homo sapiens
  CDR3 for alpha chain variable domain of TCR clone 377754 (TRAV8-3, TRAJ48)
CAVVHFGNEKLTF

SEQ ID NO: 755508 - protein, 12 aa, Homo sapiens
  CDR3 for beta chain variable domain of TCR clone 377754 (TRBV11-2, TRBJ2-2)
CASSLGGGELFF

SEQ ID NO: 755509 - protein, 11 aa, Homo sapiens
  CDR3 for alpha chain variable domain of TCR clone 377755 (TRAV3, TRAJ21)
CAVGTFNNFYF

SEQ ID NO: 755510 - protein, 16 aa, Homo sapiens
  CDR3 for beta chain variable domain of TCR clone 377755 (TRBV19, TRBJ2-1)
CASSKAGPSSYNEQFF

SEQ ID NO: 755511 - protein, 13 aa, Homo sapiens
  CDR3 for alpha chain variable domain of TCR clone 377756 (TRAV12-3, TRAJ33)
CAMSVNSNYQLIW

SEQ ID NO: 755512 - protein, 16 aa, Homo sapiens
  CDR3 for beta chain variable domain of TCR clone 377756 (TRBV7-2, TRBJ2-3)
CASSLVALYSTDTQYF

SEQ ID NO: 755513 - protein, 12 aa, Homo sapiens
  CDR3 for alpha chain variable domain of TCR clone 377757 (TRAV12-2, TRAJ7)
CAVMRGHNRLAF

SEQ ID NO: 755514 - protein, 17 aa, Homo sapiens
  CDR3 for beta chain variable domain of TCR clone 377757 (TRBV7-9, TRBJ2-3)
CASSPTVAGDLTDTQYF

SEQ ID NO: 755515 - protein, 14 aa, Homo sapiens
  CDR3 for alpha chain variable domain of TCR clone 377758 (TRAV38-1, TRAJ45)
CAYYSGGGADGLTF

SEQ ID NO: 755516 - protein, 13 aa, Homo sapiens
  CDR3 for beta chain variable domain of TCR clone 377758 (TRBV7-7, TRBJ2-3)
CASSLSRADTQYF

SEQ ID NO: 755517 - protein, 15 aa, Homo sapiens
  CDR3 for alpha chain variable domain of TCR clone 377759 (TRAV12-1, TRAJ44)
CVVDEYTGTASKLTF

SEQ ID NO: 755518 - protein, 13 aa, Homo sapiens
  CDR3 for beta chain variable domain of TCR clone 377759 (TRBV20-1, TRBJ1-1)
CSARGGGNTEAFF

SEQ ID NO: 755519 - protein, 13 aa, Homo sapiens
  CDR3 for alpha chain variable domain of TCR clone 377760 (TRAV27, TRAJ15)
CRRNNQAGTALIF

SEQ ID NO: 755520 - protein, 14 aa, Homo sapiens
  CDR3 for beta chain variable domain of TCR clone 377760 (TRBV20-1, TRBJ2-1)
CSAPVGGRGNEQFF

SEQ ID NO: 755521 - protein, 14 aa, Homo sapiens
  CDR3 for alpha chain variable domain of TCR clone 377761 (TRAV12-2, TRAJ13)
CAVKKTGGYQKVTF

SEQ ID NO: 755522 - protein, 15 aa, Homo sapiens
  CDR3 for beta chain variable domain of TCR clone 377761 (TRBV2, TRBJ2-1)
CATLPSGLPYNEQFF

SEQ ID NO: 755523 - protein, 12 aa, Homo sapiens
  CDR3 for alpha chain variable domain of TCR clone 377762 (TRAV12-2, TRAJ16)
CAVAPDGQKLLF

SEQ ID NO: 755524 - protein, 15 aa, Homo sapiens
  CDR3 for beta chain variable domain of TCR clone 377762 (TRBV4-1, TRBJ2-7)
CASSQNTGRLYEQYF

SEQ ID NO: 755525 - protein, 12 aa, Homo sapiens
  CDR3 for alpha chain variable domain of TCR clone 377763 (TRAV1-1, TRAJ39)
CAVPVGGNMLTF

SEQ ID NO: 755526 - protein, 18 aa, Homo sapiens
  CDR3 for beta chain variable domain of TCR clone 377763 (TRBV7-9, TRBJ2-7)
CASSLTTSGSRTWYEQYF

SEQ ID NO: 755527 - protein, 11 aa, Homo sapiens
  CDR3 for alpha chain variable domain of TCR clone 377764 (TRAV35, TRAJ30)
CAGPGDDKIIF

SEQ ID NO: 755528 - protein, 16 aa, Homo sapiens
  CDR3 for beta chain variable domain of TCR clone 377764 (TRBV12-5, TRBJ2-5)
CASGPRTSGNQETQYF

SEQ ID NO: 755529 - protein, 15 aa, Homo sapiens
  CDR3 for alpha chain variable domain of TCR clone 377765 (TRAV35, TRAJ50)
CAGQLRKTSYDEVIF

SEQ ID NO: 755530 - protein, 12 aa, Homo sapiens
  CDR3 for beta chain variable domain of TCR clone 377765 (TRBV5-1, TRBJ2-5)
FASSLGLETQYF

SEQ ID NO: 755531 - protein, 13 aa, Homo sapiens
  CDR3 for alpha chain variable domain of TCR clone 377766 (TRAV2, TRAJ24)
CAVTTDSWGKLQF

SEQ ID NO: 755532 - protein, 14 aa, Homo sapiens
  CDR3 for beta chain variable domain of TCR clone 377766 (TRBV7-8, TRBJ2-3)
CASSLEAGTDTQYF

SEQ ID NO: 755533 - protein, 17 aa, Homo sapiens
  CDR3 for alpha chain variable domain of TCR clone 377767 (TRAV23/DV6, TRAJ57)
CSASSTLSQGGSEKLSF

SEQ ID NO: 755534 - protein, 14 aa, Homo sapiens
  CDR3 for beta chain variable domain of TCR clone 377767 (TRBV25-1, TRBJ1-1)
CASTHLGGNTEAFF

SEQ ID NO: 755535 - protein, 14 aa, Homo sapiens
  CDR3 for alpha chain variable domain of TCR clone 377768 (TRAV38-1, TRAJ29)
CAFLTPSGNTPLVF

SEQ ID NO: 755536 - protein, 14 aa, Homo sapiens
  CDR3 for beta chain variable domain of TCR clone 377768 (TRBV18, TRBJ2-7)
CASSPRGGAYEQYF

SEQ ID NO: 755537 - protein, 16 aa, Homo sapiens
  CDR3 for alpha chain variable domain of TCR clone 377769 (TRAV20, TRAJ6)
CAVQAGGTGGSYIPTF

SEQ ID NO: 755538 - protein, 14 aa, Homo sapiens
  CDR3 for beta chain variable domain of TCR clone 377769 (TRBV7-6, TRBJ2-3)
CASSLGTVTDTQYF

SEQ ID NO: 755539 - protein, 15 aa, Homo sapiens
  CDR3 for alpha chain variable domain of TCR clone 377770 (TRAV12-3, TRAJ6)
CAMSATTGGSYIPTF

SEQ ID NO: 755540 - protein, 13 aa, Homo sapiens
  CDR3 for beta chain variable domain of TCR clone 377770 (TRBV4-1, TRBJ2-2)
CASSQDNTGELFF

SEQ ID NO: 755541 - protein, 15 aa, Homo sapiens
  CDR3 for alpha chain variable domain of TCR clone 377771 (TRAV12-2, TRAJ53)
CAVNGGGGNNYKLTF

SEQ ID NO: 755542 - protein, 15 aa, Homo sapiens
  CDR3 for beta chain variable domain of TCR clone 377771 (TRBV7-9, TRBJ1-4)
CASSARTGGNEKLFF

SEQ ID NO: 755543 - protein, 11 aa, Homo sapiens
  CDR3 for alpha chain variable domain of TCR clone 377772 (TRAV2, TRAJ13)
CASGGYQKVTF

SEQ ID NO: 755544 - protein, 15 aa, Homo sapiens
  CDR3 for beta chain variable domain of TCR clone 377772 (TRBV5-1, TRBJ2-7)
CASSLGDFTTYEQYF

SEQ ID NO: 755545 - protein, 15 aa, Homo sapiens
  CDR3 for alpha chain variable domain of TCR clone 377773 (TRAV8-3, TRAJ23)
CAVGDRCNQGGKLIF

SEQ ID NO: 755546 - protein, 22 aa, Homo sapiens
  CDR3 for beta chain variable domain of TCR clone 377773 (TRBV29-1, TRBJ2-5)
TVSNMSPEDSSIYLCSAGTQYF

SEQ ID NO: 755547 - protein, 13 aa, Homo sapiens
  CDR3 for alpha chain variable domain of TCR clone 377774 (TRAV20, TRAJ37)
CAGCSSNTGKLIF

SEQ ID NO: 755548 - protein, 22 aa, Homo sapiens
  CDR3 for beta chain variable domain of TCR clone 377774 (TRBV11-2, TRBJ1-4)
CASSLDITRRGIPRKDNEKLFF

SEQ ID NO: 755549 - protein, 15 aa, Homo sapiens
  CDR3 for alpha chain variable domain of TCR clone 377775 (TRAV2, TRAJ27)
CAVDSITPMQASQPL

SEQ ID NO: 755550 - protein, 18 aa, Homo sapiens
  CDR3 for beta chain variable domain of TCR clone 377775 (TRBV7-9, TRBJ2-7)
CASSLTTSGSRTWYEQYF

SEQ ID NO: 755551 - protein, 14 aa, Homo sapiens
  CDR3 for alpha chain variable domain of TCR clone 377776 (TRAV38-1, TRAJ45)
CTSHSGGGADGLTF

SEQ ID NO: 755552 - protein, 16 aa, Homo sapiens
  CDR3 for beta chain variable domain of TCR clone 377776 (TRBV27, TRBJ2-2)
CASSFRGLVRTGELFF

SEQ ID NO: 755553 - protein, 13 aa, Homo sapiens
  CDR3 for alpha chain variable domain of TCR clone 377777 (TRAV26-1, TRAJ33)
CIVRVDSNYQLIW

SEQ ID NO: 755554 - protein, 15 aa, Homo sapiens
  CDR3 for beta chain variable domain of TCR clone 377777 (TRBV7-2, TRBJ1-5)
CASSFSAWINQPQHF

SEQ ID NO: 755555 - protein, 12 aa, Homo sapiens
  CDR3 for alpha chain variable domain of TCR clone 377778 (TRAV13-1, TRAJ15)
CAANQAGTALIF

SEQ ID NO: 755556 - protein, 16 aa, Homo sapiens
  CDR3 for beta chain variable domain of TCR clone 377778 (TRBV12-4, TRBJ1-5)
CASSRPVGGSNQPQHF

SEQ ID NO: 755557 - protein, 18 aa, Homo sapiens
  CDR3 for alpha chain variable domain of TCR clone 377779 (TRAV12-3, TRAJ52)
CAMSVGGAGGTSYGQLTF

SEQ ID NO: 755558 - protein, 15 aa, Homo sapiens
  CDR3 for beta chain variable domain of TCR clone 377779 (TRBV7-2, TRBJ1-2)
CASSPRAGWNYGYTF

SEQ ID NO: 755559 - protein, 18 aa, Homo sapiens
  CDR3 for alpha chain variable domain of TCR clone 377780 (TRAV26-1, TRAJ23)
CILRVGLEVWNQGGKLIF

SEQ ID NO: 755560 - protein, 16 aa, Homo sapiens
  CDR3 for beta chain variable domain of TCR clone 377780 (TRBV12-4, TRBJ2-5)
CASSFFVRGRQETQYF

SEQ ID NO: 755561 - protein, 12 aa, Homo sapiens
  CDR3 for alpha chain variable domain of TCR clone 377781 (TRAV21, TRAJ33)
CAVQDSNYQLIW

SEQ ID NO: 755562 - protein, 13 aa, Homo sapiens
  CDR3 for beta chain variable domain of TCR clone 377781 (TRBV12-5, TRBJ2-3)
CASGDRQSDTQYF

SEQ ID NO: 755563 - protein, 11 aa, Homo sapiens
  CDR3 for alpha chain variable domain of TCR clone 377782 (TRAV12-2, TRAJ43)
CAAYNNNDMLF

SEQ ID NO: 755564 - protein, 21 aa, Homo sapiens
  CDR3 for beta chain variable domain of TCR clone 377782 (TRBV7-2, TRBJ2-7)
RRTRPCISVPAVGGGSYEQYF

SEQ ID NO: 755565 - protein, 13 aa, Homo sapiens
  CDR3 for alpha chain variable domain of TCR clone 377783 (TRAV22, TRAJ29)
CAVGGSGNTPLVF

SEQ ID NO: 755566 - protein, 13 aa, Homo sapiens
  CDR3 for beta chain variable domain of TCR clone 377783 (TRBV4-2, TRBJ1-1)
RASSQAGNTEAFF

SEQ ID NO: 755567 - protein, 16 aa, Homo sapiens
  CDR3 for alpha chain variable domain of TCR clone 377784 (TRAV3, TRAJ3)
CAVRGRAKSSASKIIF

SEQ ID NO: 755568 - protein, 16 aa, Homo sapiens
  CDR3 for beta chain variable domain of TCR clone 377784 (TRBV20-1, TRBJ2-4)
CSATSLAELAKNIQYF

SEQ ID NO: 755569 - protein, 14 aa, Homo sapiens
  CDR3 for alpha chain variable domain of TCR clone 377785 (TRAV1-2, TRAJ12)
CAVSGTDSSYKLIF

SEQ ID NO: 755570 - protein, 15 aa, Homo sapiens
  CDR3 for beta chain variable domain of TCR clone 377785 (TRBV2, TRBJ2-4)
CASSGTNLAENIQYF

SEQ ID NO: 755571 - protein, 14 aa, Homo sapiens
  CDR3 for alpha chain variable domain of TCR clone 377786 (TRAV17, TRAJ12)
CATDEKESSYKLIF

SEQ ID NO: 755572 - protein, 16 aa, Homo sapiens
  CDR3 for beta chain variable domain of TCR clone 377786 (TRBV11-2, TRBJ2-1)
CASSPRLAGVYNEQFF

SEQ ID NO: 755573 - protein, 10 aa, Homo sapiens
  CDR3 for alpha chain variable domain of TCR clone 377787 (TRAV13-1, TRAJ8)
CAAPFQKLVF

SEQ ID NO: 755574 - protein, 20 aa, Homo sapiens
  CDR3 for beta chain variable domain of TCR clone 377787 (TRBV3-1, TRBJ2-6)
CDSSPRPGLEGGAGANVLTF

SEQ ID NO: 755575 - protein, 13 aa, Homo sapiens
  CDR3 for alpha chain variable domain of TCR clone 377788 (TRAV16, TRAJ9)
CALRATGGFKTIF

SEQ ID NO: 755576 - protein, 15 aa, Homo sapiens
  CDR3 for beta chain variable domain of TCR clone 377788 (TRBV7-6, TRBJ2-5)
CASSKPTGPQETQYF

SEQ ID NO: 755577 - protein, 13 aa, Homo sapiens
  CDR3 for alpha chain variable domain of TCR clone 377789 (TRAV20, TRAJ40)
CAVRTSGTYKYIF

SEQ ID NO: 755578 - protein, 16 aa, Homo sapiens
  CDR3 for beta chain variable domain of TCR clone 377789 (TRBV7-3, TRBJ2-2)
CASSLKRGTLSGELFF

SEQ ID NO: 755579 - protein, 13 aa, Homo sapiens
  CDR3 for alpha chain variable domain of TCR clone 377790 (TRAV12-3, TRAJ13)
CAMTTGGYQKVTF

SEQ ID NO: 755580 - protein, 13 aa, Homo sapiens
  CDR3 for beta chain variable domain of TCR clone 377790 (TRBV7-9, TRBJ1-2)
CASSLKQNYGYTF

SEQ ID NO: 755581 - protein, 15 aa, Homo sapiens
  CDR3 for alpha chain variable domain of TCR clone 377791 (TRAV8-4, TRAJ11)
RAVSRPLSGYSTLTF

SEQ ID NO: 755582 - protein, 13 aa, Homo sapiens
  CDR3 for beta chain variable domain of TCR clone 377791 (TRBV10-3, TRBJ2-7)
CASKLAVNYEQYF

SEQ ID NO: 755583 - protein, 12 aa, Homo sapiens
  CDR3 for alpha chain variable domain of TCR clone 377792 (TRAV20, TRAJ49)
CAVNKDGNQFYF

SEQ ID NO: 755584 - protein, 14 aa, Homo sapiens
  CDR3 for beta chain variable domain of TCR clone 377792 (TRBV7-8, TRBJ2-3)
CASSLEAGTDTQYF

SEQ ID NO: 755585 - protein, 12 aa, Homo sapiens
  CDR3 for alpha chain variable domain of TCR clone 377793 (TRAV30, TRAJ43)
CGTEERGNDMRF

SEQ ID NO: 755586 - protein, 15 aa, Homo sapiens
  CDR3 for beta chain variable domain of TCR clone 377793 (TRBV27, TRBJ2-7)
CASSFSQGYESTSGR

SEQ ID NO: 755587 - protein, 17 aa, Homo sapiens
  CDR3 for alpha chain variable domain of TCR clone 377794 (TRAV3, TRAJ6)
CAVRDGPRAGGSYIPPF

SEQ ID NO: 755588 - protein, 14 aa, Homo sapiens
  CDR3 for beta chain variable domain of TCR clone 377794 (TRBV7-2, TRBJ2-7)
CASGPKTSFYEQYF

SEQ ID NO: 755589 - protein, 13 aa, Homo sapiens
  CDR3 for alpha chain variable domain of TCR clone 377795 (TRAV20, TRAJ54)
CAVQAGGAQKLVF

SEQ ID NO: 755590 - protein, 13 aa, Homo sapiens
  CDR3 for beta chain variable domain of TCR clone 377795 (TRBV19, TRBJ2-7)
CASRKAGGSEQYF

SEQ ID NO: 755591 - protein, 15 aa, Homo sapiens
  CDR3 for alpha chain variable domain of TCR clone 377796 (TRAV23/DV6, TRAJ44)
CAARTLTGTASKLTF

SEQ ID NO: 755592 - protein, 17 aa, Homo sapiens
  CDR3 for beta chain variable domain of TCR clone 377796 (TRBV13, TRBJ2-3)
CASSLSRVAGGRNTQYF

SEQ ID NO: 755593 - protein, 11 aa, Homo sapiens
  CDR3 for alpha chain variable domain of TCR clone 377797 (TRAV4, TRAJ31)
CLAGDNARLMF

SEQ ID NO: 755594 - protein, 15 aa, Homo sapiens
  CDR3 for beta chain variable domain of TCR clone 377797 (TRBV20-1, TRBJ2-7)
CSARDRVSGMDEQYF

SEQ ID NO: 755595 - protein, 13 aa, Homo sapiens
  CDR3 for alpha chain variable domain of TCR clone 377798 (TRAV26-2, TRAJ57)
CILSRGGSEKLFF

SEQ ID NO: 755596 - protein, 16 aa, Homo sapiens
  CDR3 for beta chain variable domain of TCR clone 377798 (TRBV18, TRBJ1-5)
CASSPRTGGGNQPQHF

SEQ ID NO: 755597 - protein, 19 aa, Homo sapiens
  CDR3 for alpha chain variable domain of TCR clone 377799 (TRAV26-1, TRAJ52)
CIVRAHRSAGGTSYGKLTF

SEQ ID NO: 755598 - protein, 15 aa, Homo sapiens
  CDR3 for beta chain variable domain of TCR clone 377799 (TRBV12-4, TRBJ2-5)
CASSPPTGLQETQSF

SEQ ID NO: 755599 - protein, 16 aa, Homo sapiens
  CDR3 for alpha chain variable domain of TCR clone 377800 (TRAV30, TRAJ24)
CGTEIVDADSWGKFQF

SEQ ID NO: 755600 - protein, 15 aa, Homo sapiens
  CDR3 for beta chain variable domain of TCR clone 377800 (TRBV12-4, TRBJ2-2)
CASSPYDAGTGELFF

SEQ ID NO: 755601 - protein, 14 aa, Homo sapiens
  CDR3 for alpha chain variable domain of TCR clone 377801 (TRAV1-2, TRAJ16)
CAVNRLSDGQKLLF

SEQ ID NO: 755602 - protein, 17 aa, Homo sapiens
  CDR3 for beta chain variable domain of TCR clone 377801 (TRBV7-2, TRBJ2-7)
CASSFETSGSTSSTSGR

SEQ ID NO: 755603 - protein, 15 aa, Homo sapiens
  CDR3 for alpha chain variable domain of TCR clone 377802 (TRAV23/DV6, TRAJ32)
CAARSYGGATNKLIF

SEQ ID NO: 755604 - protein, 15 aa, Homo sapiens
  CDR3 for beta chain variable domain of TCR clone 377802 (TRBV4-3, TRBJ1-1)
CASSQDRGLNTEAFF

SEQ ID NO: 755605 - protein, 16 aa, Homo sapiens
  CDR3 for alpha chain variable domain of TCR clone 377803 (TRAV12-3, TRAJ53)
CAMSPGSGGSNYKLTF

SEQ ID NO: 755606 - protein, 17 aa, Homo sapiens
  CDR3 for beta chain variable domain of TCR clone 377803 (TRBV4-2, TRBJ2-1)
CASSQGGGQGRGNEQFF

SEQ ID NO: 755607 - protein, 13 aa, Homo sapiens
  CDR3 for alpha chain variable domain of TCR clone 377804 (TRAV35, TRAJ36)
CAGPRIGAHNLFF

SEQ ID NO: 755608 - protein, 15 aa, Homo sapiens
  CDR3 for beta chain variable domain of TCR clone 377804 (TRBV28, TRBJ2-5)
CASSPPWSYQETQYF

SEQ ID NO: 755609 - protein, 16 aa, Homo sapiens
  CDR3 for alpha chain variable domain of TCR clone 377805 (TRAV12-2, TRAJ6)
RAAPLAGSGGSYIPTF

SEQ ID NO: 755610 - protein, 13 aa, Homo sapiens
  CDR3 for beta chain variable domain of TCR clone 377805 (TRBV6-9, TRBJ2-5)
CASKGDGRRTQYF

SEQ ID NO: 755611 - protein, 13 aa, Homo sapiens
  CDR3 for alpha chain variable domain of TCR clone 377806 (TRAV35, TRAJ37)
CAGSSGNTGKLIF

SEQ ID NO: 755612 - protein, 16 aa, Homo sapiens
  CDR3 for beta chain variable domain of TCR clone 377806 (TRBV10-3, TRBJ2-1)
CAISLTSGSSYNEQFF

SEQ ID NO: 755613 - protein, 10 aa, Homo sapiens
  CDR3 for alpha chain variable domain of TCR clone 377807 (TRAV13-1, TRAJ47)
CAAPKLVFGA

SEQ ID NO: 755614 - protein, 13 aa, Homo sapiens
  CDR3 for beta chain variable domain of TCR clone 377807 (TRBV7-6, TRBJ1-2)
CASSLVADYGYTF

SEQ ID NO: 755615 - protein, 13 aa, Homo sapiens
  CDR3 for alpha chain variable domain of TCR clone 377808 (TRAV26-2, TRAJ43)
CILRAVNNNNMRF

SEQ ID NO: 755616 - protein, 13 aa, Homo sapiens
  CDR3 for beta chain variable domain of TCR clone 377808 (TRBV14, TRBJ2-1)
CASSQDRRNEQFF

SEQ ID NO: 755617 - protein, 15 aa, Homo sapiens
  CDR3 for alpha chain variable domain of TCR clone 377809 (TRAV27, TRAJ38)
CAARRNAGNNRKLIW

SEQ ID NO: 755618 - protein, 17 aa, Homo sapiens
  CDR3 for beta chain variable domain of TCR clone 377809 (TRBV13, TRBJ2-3)
CASSLSRVAGGRNTQYF

SEQ ID NO: 755619 - protein, 14 aa, Homo sapiens
  CDR3 for alpha chain variable domain of TCR clone 377810 (TRAV35, TRAJ22)
CAGLRPGSAWQLTF

SEQ ID NO: 755620 - protein, 15 aa, Homo sapiens
  CDR3 for beta chain variable domain of TCR clone 377810 (TRBV12-4, TRBJ2-5)
CASSPPTGLQETRYF

SEQ ID NO: 755621 - protein, 17 aa, Homo sapiens
  CDR3 for alpha chain variable domain of TCR clone 377811 (TRAV3, TRAJ6)
CAVRDGPRAGGSYIPTF

SEQ ID NO: 755622 - protein, 13 aa, Homo sapiens
  CDR3 for beta chain variable domain of TCR clone 377811 (TRBV13, TRBJ2-7)
CASSKGLTYEQYF

SEQ ID NO: 755623 - protein, 13 aa, Homo sapiens
  CDR3 for alpha chain variable domain of TCR clone 377812 (TRAV29/DV5, TRAJ31)
CAASRNNNAILMF

SEQ ID NO: 755624 - protein, 12 aa, Homo sapiens
  CDR3 for beta chain variable domain of TCR clone 377812 (TRBV14, TRBJ2-7)
CASSLDKDEQYF

SEQ ID NO: 755625 - protein, 14 aa, Homo sapiens
  CDR3 for alpha chain variable domain of TCR clone 377813 (TRAV1-2, TRAJ8)
CAVRDDTGFQKLVV

SEQ ID NO: 755626 - protein, 15 aa, Homo sapiens
  CDR3 for beta chain variable domain of TCR clone 377813 (TRBV6-3, TRBJ2-7)
CASSSPGTVFYEQYF

SEQ ID NO: 755627 - protein, 13 aa, Homo sapiens
  CDR3 for alpha chain variable domain of TCR clone 377814 (TRAV13-1, TRAJ5)
CAASDTGSRALTF

SEQ ID NO: 755628 - protein, 14 aa, Homo sapiens
  CDR3 for beta chain variable domain of TCR clone 377814 (TRBV19, TRBJ2-1)
CASGKSTQYNEQFF

SEQ ID NO: 755629 - protein, 12 aa, Homo sapiens
  CDR3 for alpha chain variable domain of TCR clone 377815 (TRAV12-3, TRAJ17)
CAMTLTGNKRTF

SEQ ID NO: 755630 - protein, 15 aa, Homo sapiens
  CDR3 for beta chain variable domain of TCR clone 377815 (TRBV20-1, TRBJ2-7)
CSARDRVSWMDEQYF

SEQ ID NO: 755631 - protein, 15 aa, Homo sapiens
  CDR3 for alpha chain variable domain of TCR clone 377816 (TRAV3, TRAJ22)
CAVRDRGGFSRQPPF

SEQ ID NO: 755632 - protein, 16 aa, Homo sapiens
  CDR3 for beta chain variable domain of TCR clone 377816 (TRBV5-4, TRBJ2-3)
CASQQPGAGGADTQYF

SEQ ID NO: 755633 - protein, 13 aa, Homo sapiens
  CDR3 for alpha chain variable domain of TCR clone 377817 (TRAV12-1, TRAJ40)
CVVPTSGTYKYIF

SEQ ID NO: 755634 - protein, 13 aa, Homo sapiens
  CDR3 for beta chain variable domain of TCR clone 377817 (TRBV7-9, TRBJ1-2)
CASSLKQNYGYAF

SEQ ID NO: 755635 - protein, 15 aa, Homo sapiens
  CDR3 for alpha chain variable domain of TCR clone 377818 (TRAV8-3, TRAJ27)
CAVGPSKTNAGKSTC

SEQ ID NO: 755636 - protein, 15 aa, Homo sapiens
  CDR3 for beta chain variable domain of TCR clone 377818 (TRBV7-2, TRBJ2-1)
CASSSGLAGGNEQFL

SEQ ID NO: 755637 - protein, 14 aa, Homo sapiens
  CDR3 for alpha chain variable domain of TCR clone 377819 (TRAV1-2, TRAJ16)
CAVNRFSDGPKLPF

SEQ ID NO: 755638 - protein, 12 aa, Homo sapiens
  CDR3 for beta chain variable domain of TCR clone 377819 (TRBV7-6, TRBJ2-7)
CASSLADSEQYF

SEQ ID NO: 755639 - protein, 15 aa, Homo sapiens
  CDR3 for alpha chain variable domain of TCR clone 377820 (TRAV16, TRAJ12)
CSKWPLRDSSYKFIF

SEQ ID NO: 755640 - protein, 13 aa, Homo sapiens
  CDR3 for beta chain variable domain of TCR clone 377820 (TRBV4-2, TRBJ1-1)
CASSQAGNTEAFF

SEQ ID NO: 755641 - protein, 14 aa, Homo sapiens
  CDR3 for alpha chain variable domain of TCR clone 377821 (TRAV12-1, TRAJ38)
CVVNNAGNNRKLIW

SEQ ID NO: 755642 - protein, 17 aa, Homo sapiens
  CDR3 for beta chain variable domain of TCR clone 377821 (TRBV11-2, TRBJ2-1)
CASSLYPPGVEYNEQFF

SEQ ID NO: 755643 - protein, 16 aa, Homo sapiens
  CDR3 for alpha chain variable domain of TCR clone 377822 (TRAV26-1, TRAJ23)
CIARVERYNQGGKLIF

SEQ ID NO: 755644 - protein, 15 aa, Homo sapiens
  CDR3 for beta chain variable domain of TCR clone 377822 (TRBV18, TRBJ2-7)
CASSPRGGKGYEQYF

SEQ ID NO: 755645 - protein, 17 aa, Homo sapiens
  CDR3 for alpha chain variable domain of TCR clone 377823 (TRAV4, TRAJ13)
CLVGVQGSSGGYQKVTF

SEQ ID NO: 755646 - protein, 14 aa, Homo sapiens
  CDR3 for beta chain variable domain of TCR clone 377823 (TRBV2, TRBJ2-7)
CASSLTSGGYEQYF

SEQ ID NO: 755647 - protein, 14 aa, Homo sapiens
  CDR3 for alpha chain variable domain of TCR clone 377824 (TRAV17, TRAJ54)
CATDANQGAPNLVF

SEQ ID NO: 755648 - protein, 14 aa, Homo sapiens
  CDR3 for beta chain variable domain of TCR clone 377824 (TRBV4-2, TRBJ2-1)
CASGLDRAYNEQFF

SEQ ID NO: 755649 - protein, 14 aa, Homo sapiens
  CDR3 for alpha chain variable domain of TCR clone 377825 (TRAV8-3, TRAJ34)
CAVGPPHNTDKLIF

SEQ ID NO: 755650 - protein, 15 aa, Homo sapiens
  CDR3 for beta chain variable domain of TCR clone 377825 (TRBV7-3, TRBJ2-1)
CASSQRGGALIEQFF

SEQ ID NO: 755651 - protein, 16 aa, Homo sapiens
  CDR3 for alpha chain variable domain of TCR clone 377826 (TRAV4, TRAJ37)
CLVGWFGSSTTGKLIF

SEQ ID NO: 755652 - protein, 15 aa, Homo sapiens
  CDR3 for beta chain variable domain of TCR clone 377826 (TRBV12-4, TRBJ2-3)
CASSLAERPIDTQYF

SEQ ID NO: 755653 - protein, 13 aa, Homo sapiens
  CDR3 for alpha chain variable domain of TCR clone 377827 (TRAV27, TRAJ56)
CAGKPGANSKLTF

SEQ ID NO: 755654 - protein, 14 aa, Homo sapiens
  CDR3 for beta chain variable domain of TCR clone 377827 (TRBV7-9, TRBJ1-1)
CASTPLQSYTEAFF

SEQ ID NO: 755655 - protein, 11 aa, Homo sapiens
  CDR3 for alpha chain variable domain of TCR clone 377828 (TRAV2, TRAJ13)
CASWGYQKVTF

SEQ ID NO: 755656 - protein, 13 aa, Homo sapiens
  CDR3 for beta chain variable domain of TCR clone 377828 (TRBV12-5, TRBJ2-3)
CASGDRQSDTQYF

SEQ ID NO: 755657 - protein, 15 aa, Homo sapiens
  CDR3 for alpha chain variable domain of TCR clone 377829 (TRAV6, TRAJ32)
CALDMGGRATNKLIF

SEQ ID NO: 755658 - protein, 16 aa, Homo sapiens
  CDR3 for beta chain variable domain of TCR clone 377829 (TRBV7-3, TRBJ2-2)
CASSLKRGTLSGELFF

SEQ ID NO: 755659 - protein, 14 aa, Homo sapiens
  CDR3 for alpha chain variable domain of TCR clone 377830 (TRAV20, TRAJ47)
CAVTFGEYGNKLVF

SEQ ID NO: 755660 - protein, 15 aa, Homo sapiens
  CDR3 for beta chain variable domain of TCR clone 377830 (TRBV19, TRBJ1-6)
CASSTQGAVGSPLHF

SEQ ID NO: 755661 - protein, 10 aa, Homo sapiens
  CDR3 for alpha chain variable domain of TCR clone 377831 (TRAV27, TRAJ58)
SETSGTRLTF

SEQ ID NO: 755662 - protein, 14 aa, Homo sapiens
  CDR3 for beta chain variable domain of TCR clone 377831 (TRBV7-2, TRBJ2-7)
CASSPKTSFYEQYF

SEQ ID NO: 755663 - protein, 14 aa, Homo sapiens
  CDR3 for alpha chain variable domain of TCR clone 377832 (TRAV8-4, TRAJ8)
CAVSGNTGFQKLVF

SEQ ID NO: 755664 - protein, 16 aa, Homo sapiens
  CDR3 for beta chain variable domain of TCR clone 377832 (TRBV9, TRBJ2-1)
CASSVEGDGSYNEQFF

SEQ ID NO: 755665 - protein, 15 aa, Homo sapiens
  CDR3 for alpha chain variable domain of TCR clone 377833 (TRAV25, TRAJ52)
CAGRPGGTSYGQLTF

SEQ ID NO: 755666 - protein, 17 aa, Homo sapiens
  CDR3 for beta chain variable domain of TCR clone 377833 (TRBV7-8, TRBJ2-6)
CASSAGTGGAGANVLSF

SEQ ID NO: 755667 - protein, 11 aa, Homo sapiens
  CDR3 for alpha chain variable domain of TCR clone 377834 (TRAV1-2, TRAJ20)
CAVANDYKLSF

SEQ ID NO: 755668 - protein, 14 aa, Homo sapiens
  CDR3 for beta chain variable domain of TCR clone 377834 (TRBV19, TRBJ2-1)
CASPTLVLSGEQFF

SEQ ID NO: 755669 - protein, 12 aa, Homo sapiens
  CDR3 for alpha chain variable domain of TCR clone 377835 (TRAV17, TRAJ36)
CATLTGANNLFF

SEQ ID NO: 755670 - protein, 15 aa, Homo sapiens
  CDR3 for beta chain variable domain of TCR clone 377835 (TRBV19, TRBJ1-2)
CASSTNTDTNYGYTF

SEQ ID NO: 755671 - protein, 21 aa, Homo sapiens
  CDR3 for alpha chain variable domain of TCR clone 377836 (TRAV1-2, TRAJ37)
CLLPLCCERFHVSGNTGKLIF

SEQ ID NO: 755672 - protein, 14 aa, Homo sapiens
  CDR3 for beta chain variable domain of TCR clone 377836 (TRBV2, TRBJ2-5)
CASSEVLAQETQYF

SEQ ID NO: 755673 - protein, 13 aa, Homo sapiens
  CDR3 for alpha chain variable domain of TCR clone 377837 (TRAV21, TRAJ47)
CAVSGLYGNKLVF

SEQ ID NO: 755674 - protein, 17 aa, Homo sapiens
  CDR3 for beta chain variable domain of TCR clone 377837 (TRBV15, TRBJ2-3)
CATSGTTSKEGTDTQYF

SEQ ID NO: 755675 - protein, 15 aa, Homo sapiens
  CDR3 for alpha chain variable domain of TCR clone 377838 (TRAV26-1, TRAJ48)
CIVRVGDFGTEKLNF

SEQ ID NO: 755676 - protein, 16 aa, Homo sapiens
  CDR3 for beta chain variable domain of TCR clone 377838 (TRBV4-1, TRBJ2-3)
CASSQRAGGLTDTQYF

SEQ ID NO: 755677 - protein, 13 aa, Homo sapiens
  CDR3 for alpha chain variable domain of TCR clone 377839 (TRAV3, TRAJ20)
CAVRDTGDYRLSF

SEQ ID NO: 755678 - protein, 15 aa, Homo sapiens
  CDR3 for beta chain variable domain of TCR clone 377839 (TRBV6-1, TRBJ2-7)
CASSEGGGVSYEQYF

SEQ ID NO: 755679 - protein, 12 aa, Homo sapiens
  CDR3 for alpha chain variable domain of TCR clone 377840 (TRAV2, TRAJ37)
CAVAGNTGKLIF

SEQ ID NO: 755680 - protein, 13 aa, Homo sapiens
  CDR3 for beta chain variable domain of TCR clone 377840 (TRBV10-2, TRBJ2-7)
CASGTSGGYEQYF

SEQ ID NO: 755681 - protein, 15 aa, Homo sapiens
  CDR3 for alpha chain variable domain of TCR clone 377841 (TRAV3, TRAJ15)
CAVRPANQAGTTLTF

SEQ ID NO: 755682 - protein, 14 aa, Homo sapiens
  CDR3 for beta chain variable domain of TCR clone 377841 (TRBV4-1, TRBJ2-2)
CASSQAVNTGELFF

SEQ ID NO: 755683 - protein, 12 aa, Homo sapiens
  CDR3 for alpha chain variable domain of TCR clone 377842 (TRAV3, TRAJ43)
CAVRDPNNDMRF

SEQ ID NO: 755684 - protein, 15 aa, Homo sapiens
  CDR3 for beta chain variable domain of TCR clone 377842 (TRBV4-3, TRBJ2-7)
CASSQGDWGDYGQYF

SEQ ID NO: 755685 - protein, 16 aa, Homo sapiens
  CDR3 for alpha chain variable domain of TCR clone 377843 (TRAV12-3, TRAJ53)
CAMSPGSGGSNYKLTF

SEQ ID NO: 755686 - protein, 18 aa, Homo sapiens
  CDR3 for beta chain variable domain of TCR clone 377843 (TRBV4-1, TRBJ1-5)
CASSQDPRGQGLNQPQHF

SEQ ID NO: 755687 - protein, 14 aa, Homo sapiens
  CDR3 for alpha chain variable domain of TCR clone 377844 (TRAV21, TRAJ38)
CAVMGADNNRKLIW

SEQ ID NO: 755688 - protein, 13 aa, Homo sapiens
  CDR3 for beta chain variable domain of TCR clone 377844 (TRBV7-3, TRBJ2-5)
CASSIGFFEAQYF

SEQ ID NO: 755689 - protein, 13 aa, Homo sapiens
  CDR3 for alpha chain variable domain of TCR clone 377845 (TRAV12-1, TRAJ29)
CVVRNSGNTALVF

SEQ ID NO: 755690 - protein, 17 aa, Homo sapiens
  CDR3 for beta chain variable domain of TCR clone 377845 (TRBV19, TRBJ2-5)
CASSIARTSGGEETQYF

SEQ ID NO: 755691 - protein, 14 aa, Homo sapiens
  CDR3 for alpha chain variable domain of TCR clone 377846 (TRAV26-1, TRAJ26)
CIVRATFLGQNFVF

SEQ ID NO: 755692 - protein, 13 aa, Homo sapiens
  CDR3 for beta chain variable domain of TCR clone 377846 (TRBV7-9, TRBJ2-5)
CASTQRGGETQYF

SEQ ID NO: 755693 - protein, 13 aa, Homo sapiens
  CDR3 for alpha chain variable domain of TCR clone 377847 (TRAV2, TRAJ40)
CAVVTSGTYKYIF

SEQ ID NO: 755694 - protein, 19 aa, Homo sapiens
  CDR3 for beta chain variable domain of TCR clone 377847 (TRBV5-1, TRBJ2-3)
CASSLWLAGGITTTYTQYF

SEQ ID NO: 755695 - protein, 17 aa, Homo sapiens
  CDR3 for alpha chain variable domain of TCR clone 377848 (TRAV22, TRAJ53)
FAVEFSSSGGSNYKLTF

SEQ ID NO: 755696 - protein, 15 aa, Homo sapiens
  CDR3 for beta chain variable domain of TCR clone 377848 (TRBV29-1, TRBJ2-1)
CSVPTGLALYNEQFF

SEQ ID NO: 755697 - protein, 11 aa, Homo sapiens
  CDR3 for alpha chain variable domain of TCR clone 377849 (TRAV3, TRAJ21)
CAVGNFNKFYF

SEQ ID NO: 755698 - protein, 15 aa, Homo sapiens
  CDR3 for beta chain variable domain of TCR clone 377849 (TRBV19, TRBJ2-1)
CASSIVRGEGREQFF

SEQ ID NO: 755699 - protein, 13 aa, Homo sapiens
  CDR3 for alpha chain variable domain of TCR clone 377850 (TRAV12-1, TRAJ34)
CVVTGYNTDKLIF

SEQ ID NO: 755700 - protein, 13 aa, Homo sapiens
  CDR3 for beta chain variable domain of TCR clone 377850 (TRBV12-4, TRBJ1-2)
CASSLRQGKGYTF

SEQ ID NO: 755701 - protein, 13 aa, Homo sapiens
  CDR3 for alpha chain variable domain of TCR clone 377851 (TRAV12-2, TRAJ12)
CAVNWDSSYKLFF

SEQ ID NO: 755702 - protein, 14 aa, Homo sapiens
  CDR3 for beta chain variable domain of TCR clone 377851 (TRBV3-1, TRBJ2-5)
CASSQGPDQETQYF

SEQ ID NO: 755703 - protein, 12 aa, Homo sapiens
  CDR3 for alpha chain variable domain of TCR clone 377852 (TRAV12-1, TRAJ20)
CVAHFNDYKLSF

SEQ ID NO: 755704 - protein, 14 aa, Homo sapiens
  CDR3 for beta chain variable domain of TCR clone 377852 (TRBV7-8, TRBJ2-7)
CASSPGLADYEQYF

SEQ ID NO: 755705 - protein, 14 aa, Homo sapiens
  CDR3 for alpha chain variable domain of TCR clone 377853 (TRAV14/DV4, TRAJ9)
CAMGESTGGFKTIF

SEQ ID NO: 755706 - protein, 19 aa, Homo sapiens
  CDR3 for beta chain variable domain of TCR clone 377853 (TRBV19, TRBJ2-2)
CASTRPGLAGGRVTGELFF

SEQ ID NO: 755707 - protein, 13 aa, Homo sapiens
  CDR3 for alpha chain variable domain of TCR clone 377854 (TRAV21, TRAJ48)
CAVVEFGNEKLTF

SEQ ID NO: 755708 - protein, 13 aa, Homo sapiens
  CDR3 for beta chain variable domain of TCR clone 377854 (TRBV28, TRBJ2-5)
CASSFAGGETQYF

SEQ ID NO: 755709 - protein, 16 aa, Homo sapiens
  CDR3 for alpha chain variable domain of TCR clone 377855 (TRAV3, TRAJ27)
CAVRDHQGTNAGKSTF

SEQ ID NO: 755710 - protein, 17 aa, Homo sapiens
  CDR3 for beta chain variable domain of TCR clone 377855 (TRBV4-1, TRBJ2-7)
CASSQGRGLQTSYEQYF

SEQ ID NO: 755711 - protein, 12 aa, Homo sapiens
  CDR3 for alpha chain variable domain of TCR clone 377856 (TRAV8-2, TRAJ5)
CVVSDIGRALTF

SEQ ID NO: 755712 - protein, 14 aa, Homo sapiens
  CDR3 for beta chain variable domain of TCR clone 377856 (TRBV19, TRBJ2-7)
CASNFRDTFTGMYC

SEQ ID NO: 755713 - protein, 15 aa, Homo sapiens
  CDR3 for alpha chain variable domain of TCR clone 377857 (TRAV12-1, TRAJ44)
CVVFVNTGTASKLTF

SEQ ID NO: 755714 - protein, 14 aa, Homo sapiens
  CDR3 for beta chain variable domain of TCR clone 377857 (TRBV5-7, TRBJ1-5)
CASSRTGGGQPLHF

SEQ ID NO: 755715 - protein, 19 aa, Homo sapiens
  CDR3 for alpha chain variable domain of TCR clone 377858 (TRAV29/DV5, TRAJ49)
CSVLLSSKLTVDTGNQFYF

SEQ ID NO: 755716 - protein, 15 aa, Homo sapiens
  CDR3 for beta chain variable domain of TCR clone 377858 (TRBV4-3, TRBJ2-2)
CASSQGGTPTGELFF

SEQ ID NO: 755717 - protein, 14 aa, Homo sapiens
  CDR3 for alpha chain variable domain of TCR clone 377859 (TRAV1-2, TRAJ16)
CAVNRFSDGQKLLF

SEQ ID NO: 755718 - protein, 14 aa, Homo sapiens
  CDR3 for beta chain variable domain of TCR clone 377859 (TRBV9, TRBJ2-4)
CASSPSGTSGFQYF

SEQ ID NO: 755719 - protein, 14 aa, Homo sapiens
  CDR3 for alpha chain variable domain of TCR clone 377860 (TRAV2, TRAJ37)
CAVDFTSNTGKLIF

SEQ ID NO: 755720 - protein, 13 aa, Homo sapiens
  CDR3 for beta chain variable domain of TCR clone 377860 (TRBV20-1, TRBJ1-1)
CIAPLGGGTEAFF

SEQ ID NO: 755721 - protein, 13 aa, Homo sapiens
  CDR3 for alpha chain variable domain of TCR clone 377861 (TRAV30, TRAJ39)
CGTKKNVGNMLTF

SEQ ID NO: 755722 - protein, 12 aa, Homo sapiens
  CDR3 for beta chain variable domain of TCR clone 377861 (TRBV12-4, TRBJ2-5)
CASSSAQETQYF

SEQ ID NO: 755723 - protein, 18 aa, Homo sapiens
  CDR3 for alpha chain variable domain of TCR clone 377862 (TRAV3, TRAJ17)
CAVRARRGGRSCRQQANF

SEQ ID NO: 755724 - protein, 13 aa, Homo sapiens
  CDR3 for beta chain variable domain of TCR clone 377862 (TRBV7-9, TRBJ1-2)
CASSPKTGYGYTF

SEQ ID NO: 755725 - protein, 13 aa, Homo sapiens
  CDR3 for alpha chain variable domain of TCR clone 377863 (TRAV23/DV6, TRAJ22)
CAPWGGSARQLTF

SEQ ID NO: 755726 - protein, 14 aa, Homo sapiens
  CDR3 for beta chain variable domain of TCR clone 377863 (TRBV7-2, TRBJ2-7)
CASSPKTSFYEQYF

SEQ ID NO: 755727 - protein, 16 aa, Homo sapiens
  CDR3 for alpha chain variable domain of TCR clone 377864 (TRAV38-2/DV8, TRAJ47)
FAYRSAIMEYGNKLVF

SEQ ID NO: 755728 - protein, 14 aa, Homo sapiens
  CDR3 for beta chain variable domain of TCR clone 377864 (TRBV19, TRBJ2-7)
CASSIFAGTYEQYF

SEQ ID NO: 755729 - protein, 13 aa, Homo sapiens
  CDR3 for alpha chain variable domain of TCR clone 377865 (TRAV1-2, TRAJ9)
CAVLNTRGFKTIF

SEQ ID NO: 755730 - protein, 14 aa, Homo sapiens
  CDR3 for beta chain variable domain of TCR clone 377865 (TRBV20-1, TRBJ2-3)
CSARGGTSTDTQYF

SEQ ID NO: 755731 - protein, 13 aa, Homo sapiens
  CDR3 for alpha chain variable domain of TCR clone 377866 (TRAV21, TRAJ57)
CAVVEGGSEKLVF

SEQ ID NO: 755732 - protein, 15 aa, Homo sapiens
  CDR3 for beta chain variable domain of TCR clone 377866 (TRBV10-3, TRBJ2-5)
CAISEFGRGQETQYF

SEQ ID NO: 755733 - protein, 13 aa, Homo sapiens
  CDR3 for alpha chain variable domain of TCR clone 377867 (TRAV12-2, TRAJ42)
CAVKRGSQGNRIF

SEQ ID NO: 755734 - protein, 16 aa, Homo sapiens
  CDR3 for beta chain variable domain of TCR clone 377867 (TRBV9, TRBJ2-2)
CASSAMGKGNTGELFF

SEQ ID NO: 755735 - protein, 14 aa, Homo sapiens
  CDR3 for alpha chain variable domain of TCR clone 377868 (TRAV35, TRAJ42)
CAGRYGGSQGNLIF

SEQ ID NO: 755736 - protein, 14 aa, Homo sapiens
  CDR3 for beta chain variable domain of TCR clone 377868 (TRBV11-2, TRBJ2-3)
CASSRLARTDTQYF

SEQ ID NO: 755737 - protein, 15 aa, Homo sapiens
  CDR3 for alpha chain variable domain of TCR clone 377869 (TRAV14/DV4, TRAJ12)
CAMREERDSSYKLIL

SEQ ID NO: 755738 - protein, 16 aa, Homo sapiens
  CDR3 for beta chain variable domain of TCR clone 377869 (TRBV11-2, TRBJ1-2)
CASSLDTGGADYGYTF

SEQ ID NO: 755739 - protein, 12 aa, Homo sapiens
  CDR3 for alpha chain variable domain of TCR clone 377870 (TRAV22, TRAJ29)
CAPGSGNTPLVF

SEQ ID NO: 755740 - protein, 18 aa, Homo sapiens
  CDR3 for beta chain variable domain of TCR clone 377870 (TRBV28, TRBJ2-7)
CASIPTSVVSRGDYEQYF

SEQ ID NO: 755741 - protein, 15 aa, Homo sapiens
  CDR3 for alpha chain variable domain of TCR clone 377871 (TRAV3, TRAJ22)
CAVRDRGGSARQLTF

SEQ ID NO: 755742 - protein, 15 aa, Homo sapiens
  CDR3 for beta chain variable domain of TCR clone 377871 (TRBV6-5, TRBJ1-2)
CASSYSQAFNYGYTF

SEQ ID NO: 755743 - protein, 14 aa, Homo sapiens
  CDR3 for alpha chain variable domain of TCR clone 377872 (TRAV23/DV6, TRAJ40)
CAARKNSGTNKYIF

SEQ ID NO: 755744 - protein, 14 aa, Homo sapiens
  CDR3 for beta chain variable domain of TCR clone 377872 (TRBV10-3, TRBJ2-5)
CAISERDYQETQYF

SEQ ID NO: 755745 - protein, 13 aa, Homo sapiens
  CDR3 for alpha chain variable domain of TCR clone 377873 (TRAV12-2, TRAJ53)
CAGVGGSNYKLTF

SEQ ID NO: 755746 - protein, 12 aa, Homo sapiens
  CDR3 for beta chain variable domain of TCR clone 377873 (TRBV7-8, TRBJ2-7)
CASSLGDREQYF

SEQ ID NO: 755747 - protein, 13 aa, Homo sapiens
  CDR3 for alpha chain variable domain of TCR clone 377874 (TRAV2, TRAJ15)
CAVASHAGTALIF

SEQ ID NO: 755748 - protein, 14 aa, Homo sapiens
  CDR3 for beta chain variable domain of TCR clone 377874 (TRBV5-1, TRBJ2-7)
CASSRGESLYEQYF

SEQ ID NO: 755749 - protein, 14 aa, Homo sapiens
  CDR3 for alpha chain variable domain of TCR clone 377875 (TRAV16, TRAJ33)
CALSAMDSNYQLIW

SEQ ID NO: 755750 - protein, 16 aa, Homo sapiens
  CDR3 for beta chain variable domain of TCR clone 377875 (TRBV25-1, TRBJ2-7)
CTSSELTGGGIYEQYF

SEQ ID NO: 755751 - protein, 12 aa, Homo sapiens
  CDR3 for alpha chain variable domain of TCR clone 377876 (TRAV1-2, TRAJ29)
CAVPSGNTPLVF

SEQ ID NO: 755752 - protein, 14 aa, Homo sapiens
  CDR3 for beta chain variable domain of TCR clone 377876 (TRBV18, TRBJ2-5)
CASSPGVSQETRYF

SEQ ID NO: 755753 - protein, 16 aa, Homo sapiens
  CDR3 for alpha chain variable domain of TCR clone 377877 (TRAV38-1, TRAJ37)
CAFKGDGASNTGKLLF

SEQ ID NO: 755754 - protein, 13 aa, Homo sapiens
  CDR3 for beta chain variable domain of TCR clone 377877 (TRBV12-4, TRBJ2-5)
CASSLFRRETQYF

SEQ ID NO: 755755 - protein, 15 aa, Homo sapiens
  CDR3 for alpha chain variable domain of TCR clone 377878 (TRAV8-3, TRAJ11)
CAVGLLNSGYSTLTF

SEQ ID NO: 755756 - protein, 18 aa, Homo sapiens
  CDR3 for beta chain variable domain of TCR clone 377878 (TRBV18, TRBJ1-3)
CASSPRGGAGPSGNTIYF

SEQ ID NO: 755757 - protein, 14 aa, Homo sapiens
  CDR3 for alpha chain variable domain of TCR clone 377879 (TRAV1-1, TRAJ27)
CAVIYNTNAGKSTF

SEQ ID NO: 755758 - protein, 18 aa, Homo sapiens
  CDR3 for beta chain variable domain of TCR clone 377879 (TRBV7-3, TRBJ2-1)
CASSLTLASGRDMVSSSS

SEQ ID NO: 755759 - protein, 14 aa, Homo sapiens
  CDR3 for alpha chain variable domain of TCR clone 377880 (TRAV8-3, TRAJ4)
CAVGAAGGYNKLIF

SEQ ID NO: 755760 - protein, 15 aa, Homo sapiens
  CDR3 for beta chain variable domain of TCR clone 377880 (TRBV20-1, TRBJ2-5)
CRAPPRTGFGETQYF

SEQ ID NO: 755761 - protein, 15 aa, Homo sapiens
  CDR3 for alpha chain variable domain of TCR clone 377881 (TRAV34, TRAJ38)
CGADFTPGTNRKLIW

SEQ ID NO: 755762 - protein, 14 aa, Homo sapiens
  CDR3 for beta chain variable domain of TCR clone 377881 (TRBV12-5, TRBJ2-5)
CASGSRTHQETQYF

SEQ ID NO: 755763 - protein, 14 aa, Homo sapiens
  CDR3 for alpha chain variable domain of TCR clone 377882 (TRAV12-2, TRAJ5)
CAVNRSTGRRALTF

SEQ ID NO: 755764 - protein, 14 aa, Homo sapiens
  CDR3 for beta chain variable domain of TCR clone 377882 (TRBV7-8, TRBJ2-5)
CASSATGGQETQYF

SEQ ID NO: 755765 - protein, 14 aa, Homo sapiens
  CDR3 for alpha chain variable domain of TCR clone 377883 (TRAV26-1, TRAJ44)
CIVKSTGTASKLTF

SEQ ID NO: 755766 - protein, 12 aa, Homo sapiens
  CDR3 for beta chain variable domain of TCR clone 377883 (TRBV19, TRBJ1-1)
CASSLSDTEAFF

SEQ ID NO: 755767 - protein, 19 aa, Homo sapiens
  CDR3 for alpha chain variable domain of TCR clone 377884 (TRAV1-2, TRAJ26)
CLLPLCCERPDNYGQNFVF

SEQ ID NO: 755768 - protein, 14 aa, Homo sapiens
  CDR3 for beta chain variable domain of TCR clone 377884 (TRBV11-2, TRBJ2-3)
CASSRLARTDTQYF

SEQ ID NO: 755769 - protein, 13 aa, Homo sapiens
  CDR3 for alpha chain variable domain of TCR clone 377885 (TRAV30, TRAJ49)
CGTEPNTGTQFYF

SEQ ID NO: 755770 - protein, 14 aa, Homo sapiens
  CDR3 for beta chain variable domain of TCR clone 377885 (TRBV29-1, TRBJ2-1)
CSVEFRGIPFEQFF

SEQ ID NO: 755771 - protein, 14 aa, Homo sapiens
  CDR3 for alpha chain variable domain of TCR clone 377886 (TRAV2, TRAJ9)
CAVEDRSGGFKTIF

SEQ ID NO: 755772 - protein, 16 aa, Homo sapiens
  CDR3 for beta chain variable domain of TCR clone 377886 (TRBV7-3, TRBJ2-2)
CASSLNRGTLSGELFF

SEQ ID NO: 755773 - protein, 15 aa, Homo sapiens
  CDR3 for alpha chain variable domain of TCR clone 377887 (TRAV17, TRAJ45)
TSVLRTGGGADGLTF

SEQ ID NO: 755774 - protein, 16 aa, Homo sapiens
  CDR3 for beta chain variable domain of TCR clone 377887 (TRBV27, TRBJ2-2)
CASSLRPGGAPGELFF

SEQ ID NO: 755775 - protein, 17 aa, Homo sapiens
  CDR3 for alpha chain variable domain of TCR clone 377888 (TRAV12-2, TRAJ4)
CAVNVRPVSGGHNKLIF

SEQ ID NO: 755776 - protein, 17 aa, Homo sapiens
  CDR3 for beta chain variable domain of TCR clone 377888 (TRBV6-3, TRBJ2-1)
CASSYSSGTRGLDEQFF

SEQ ID NO: 755777 - protein, 11 aa, Homo sapiens
  CDR3 for alpha chain variable domain of TCR clone 377889 (TRAV4, TRAJ31)
CLVGDNARLMF

SEQ ID NO: 755778 - protein, 11 aa, Homo sapiens
  CDR3 for beta chain variable domain of TCR clone 377889 (TRBV7-9, TRBJ2-3)
CASSPTDTQYF

SEQ ID NO: 755779 - protein, 14 aa, Homo sapiens
  CDR3 for alpha chain variable domain of TCR clone 377890 (TRAV1-2, TRAJ16)
CAVNRFSDGQKLLF

SEQ ID NO: 755780 - protein, 14 aa, Homo sapiens
  CDR3 for beta chain variable domain of TCR clone 377890 (TRBV7-9, TRBJ1-4)
CAITECEANEKLFF

SEQ ID NO: 755781 - protein, 17 aa, Homo sapiens
  CDR3 for alpha chain variable domain of TCR clone 377891 (TRAV3, TRAJ38)
CAVRGCLNAGKNRKLIW

SEQ ID NO: 755782 - protein, 16 aa, Homo sapiens
  CDR3 for beta chain variable domain of TCR clone 377891 (TRBV20-1, TRBJ1-4)
CSAPGQGLLTNEKLFF

SEQ ID NO: 755783 - protein, 13 aa, Homo sapiens
  CDR3 for alpha chain variable domain of TCR clone 377892 (TRAV27, TRAJ17)
CAGAATAGNKLTF

SEQ ID NO: 755784 - protein, 15 aa, Homo sapiens
  CDR3 for beta chain variable domain of TCR clone 377892 (TRBV5-1, TRBJ2-3)
CASRNQAGSIDTQYF

SEQ ID NO: 755785 - protein, 15 aa, Homo sapiens
  CDR3 for alpha chain variable domain of TCR clone 377893 (TRAV12-3, TRAJ6)
CAMSATTGGSYIPTF

SEQ ID NO: 755786 - protein, 17 aa, Homo sapiens
  CDR3 for beta chain variable domain of TCR clone 377893 (TRBV15, TRBJ2-3)
CATSGTTSEEGTDTQYF

SEQ ID NO: 755787 - protein, 12 aa, Homo sapiens
  CDR3 for alpha chain variable domain of TCR clone 377894 (TRAV21, TRAJ27)
CAANTNAGKSTF

SEQ ID NO: 755788 - protein, 15 aa, Homo sapiens
  CDR3 for beta chain variable domain of TCR clone 377894 (TRBV29-1, TRBJ1-4)
CSVVGIGDINEKLSF

SEQ ID NO: 755789 - protein, 12 aa, Homo sapiens
  CDR3 for alpha chain variable domain of TCR clone 377895 (TRAV12-1, TRAJ40)
CVFYSGTYKYIF

SEQ ID NO: 755790 - protein, 18 aa, Homo sapiens
  CDR3 for beta chain variable domain of TCR clone 377895 (TRBV12-4, TRBJ2-2)
CASSLVAATRGRTGELFF

SEQ ID NO: 755791 - protein, 16 aa, Homo sapiens
  CDR3 for alpha chain variable domain of TCR clone 377896 (TRAV8-3, TRAJ48)
FAVGLISNFGNEKLTF

SEQ ID NO: 755792 - protein, 13 aa, Homo sapiens
  CDR3 for beta chain variable domain of TCR clone 377896 (TRBV20-1, TRBJ1-5)
CSASWGRSQPQHF

SEQ ID NO: 755793 - protein, 14 aa, Homo sapiens
  CDR3 for alpha chain variable domain of TCR clone 377897 (TRAV12-1, TRAJ3)
CVVILYSSASKIIF

SEQ ID NO: 755794 - protein, 16 aa, Homo sapiens
  CDR3 for beta chain variable domain of TCR clone 377897 (TRBV5-1, TRBJ2-5)
CASSLSLAGAQENQYF

SEQ ID NO: 755795 - protein, 13 aa, Homo sapiens
  CDR3 for alpha chain variable domain of TCR clone 377898 (TRAV23/DV6, TRAJ58)
CAASEIGGSRLTF

SEQ ID NO: 755796 - protein, 14 aa, Homo sapiens
  CDR3 for beta chain variable domain of TCR clone 377898 (TRBV20-1, TRBJ2-3)
CSARGGTSTDTQYF

SEQ ID NO: 755797 - protein, 14 aa, Homo sapiens
  CDR3 for alpha chain variable domain of TCR clone 377899 (TRAV12-3, TRAJ6)
CAMSATGGSYIPTF

SEQ ID NO: 755798 - protein, 16 aa, Homo sapiens
  CDR3 for beta chain variable domain of TCR clone 377899 (TRBV20-1, TRBJ1-4)
CSAPGQGLLTNEKLFF

SEQ ID NO: 755799 - protein, 15 aa, Homo sapiens
  CDR3 for alpha chain variable domain of TCR clone 377900 (TRAV25, TRAJ52)
CAGTSGGTSYGKLTF

SEQ ID NO: 755800 - protein, 14 aa, Homo sapiens
  CDR3 for beta chain variable domain of TCR clone 377900 (TRBV12-5, TRBJ2-5)
CASGSRTHQETQYF

SEQ ID NO: 755801 - protein, 14 aa, Homo sapiens
  CDR3 for alpha chain variable domain of TCR clone 377901 (TRAV3, TRAJ34)
CSVRDINNTDKLIF

SEQ ID NO: 755802 - protein, 15 aa, Homo sapiens
  CDR3 for beta chain variable domain of TCR clone 377901 (TRBV20-1, TRBJ2-7)
CSARDRVSGMDEQYF

SEQ ID NO: 755803 - protein, 14 aa, Homo sapiens
  CDR3 for alpha chain variable domain of TCR clone 377902 (TRAV13-1, TRAJ35)
CAASKGGFGNVLHC

SEQ ID NO: 755804 - protein, 14 aa, Homo sapiens
  CDR3 for beta chain variable domain of TCR clone 377902 (TRBV7-3, TRBJ1-1)
CASSLKGGNTEAFF

SEQ ID NO: 755805 - protein, 14 aa, Homo sapiens
  CDR3 for alpha chain variable domain of TCR clone 377903 (TRAV27, TRAJ36)
RAGPPKRGANNLFF

SEQ ID NO: 755806 - protein, 15 aa, Homo sapiens
  CDR3 for beta chain variable domain of TCR clone 377903 (TRBV18, TRBJ2-7)
RASSPASTPNYEQYF

SEQ ID NO: 755807 - protein, 14 aa, Homo sapiens
  CDR3 for alpha chain variable domain of TCR clone 377904 (TRAV9-2, TRAJ39)
CALYIYNAGNMLTF

SEQ ID NO: 755808 - protein, 15 aa, Homo sapiens
  CDR3 for beta chain variable domain of TCR clone 377904 (TRBV19, TRBJ2-2)
CQPISRDRGHGELFF

SEQ ID NO: 755809 - protein, 12 aa, Homo sapiens
  CDR3 for alpha chain variable domain of TCR clone 377905 (TRAV21, TRAJ56)
CAVGVNRSKLTF

SEQ ID NO: 755810 - protein, 14 aa, Homo sapiens
  CDR3 for beta chain variable domain of TCR clone 377905 (TRBV12-5, TRBJ2-5)
CASGSRTHQETQYF

SEQ ID NO: 755811 - protein, 10 aa, Homo sapiens
  CDR3 for alpha chain variable domain of TCR clone 377906 (TRAV6, TRAJ36)
PLFTANNLFF

SEQ ID NO: 755812 - protein, 14 aa, Homo sapiens
  CDR3 for beta chain variable domain of TCR clone 377906 (TRBV10-2, TRBJ1-5)
CASSSTGRNQPQHF

SEQ ID NO: 755813 - protein, 13 aa, Homo sapiens
  CDR3 for alpha chain variable domain of TCR clone 377907 (TRAV2, TRAJ39)
CAVLNNAGNILTF

SEQ ID NO: 755814 - protein, 16 aa, Homo sapiens
  CDR3 for beta chain variable domain of TCR clone 377907 (TRBV19, TRBJ2-1)
CASRTSSGSIVNEQFF

SEQ ID NO: 755815 - protein, 16 aa, Homo sapiens
  CDR3 for alpha chain variable domain of TCR clone 377908 (TRAV26-1, TRAJ37)
CIVRGDGSDNTGKLIF

SEQ ID NO: 755816 - protein, 15 aa, Homo sapiens
  CDR3 for beta chain variable domain of TCR clone 377908 (TRBV7-3, TRBJ2-1)
CASSPTGGGEVEQFF

SEQ ID NO: 755817 - protein, 14 aa, Homo sapiens
  CDR3 for alpha chain variable domain of TCR clone 377909 (TRAV3, TRAJ22)
CAVRDYGSARQLTF

SEQ ID NO: 755818 - protein, 13 aa, Homo sapiens
  CDR3 for beta chain variable domain of TCR clone 377909 (TRBV20-1, TRBJ2-2)
CSASAAGTGELFF

SEQ ID NO: 755819 - protein, 16 aa, Homo sapiens
  CDR3 for alpha chain variable domain of TCR clone 377910 (TRAV38-1, TRAJ37)
CAFKGDGSSNTGKLIF

SEQ ID NO: 755820 - protein, 11 aa, Homo sapiens
  CDR3 for beta chain variable domain of TCR clone 377910 (TRBV11-2, TRBJ2-2)
CASSLPGELFF

SEQ ID NO: 755821 - protein, 13 aa, Homo sapiens
  CDR3 for alpha chain variable domain of TCR clone 377911 (TRAV13-2, TRAJ5)
CAVMDTGRKALTF

SEQ ID NO: 755822 - protein, 12 aa, Homo sapiens
  CDR3 for beta chain variable domain of TCR clone 377911 (TRBV28, TRBJ2-7)
CASSVSSYEQYF

SEQ ID NO: 755823 - protein, 11 aa, Homo sapiens
  CDR3 for alpha chain variable domain of TCR clone 377912 (TRAV2, TRAJ13)
RASGGYQKVTF

SEQ ID NO: 755824 - protein, 14 aa, Homo sapiens
  CDR3 for beta chain variable domain of TCR clone 377912 (TRBV18, TRBJ2-5)
CASSPGVSQETQYF

SEQ ID NO: 755825 - protein, 17 aa, Homo sapiens
  CDR3 for alpha chain variable domain of TCR clone 377913 (TRAV17, TRAJ7)
CATLGRFAFGKGNQVVV

SEQ ID NO: 755826 - protein, 13 aa, Homo sapiens
  CDR3 for beta chain variable domain of TCR clone 377913 (TRBV12-4, TRBJ2-7)
CASSLERVREQYF

SEQ ID NO: 755827 - protein, 11 aa, Homo sapiens
  CDR3 for alpha chain variable domain of TCR clone 377914 (TRAV12-1, TRAJ33)
CVVNMNYQLIW

SEQ ID NO: 755828 - protein, 10 aa, Homo sapiens
  CDR3 for beta chain variable domain of TCR clone 377914 (TRBV27, TRBJ2-7)
CASSPYEQYF

SEQ ID NO: 755829 - protein, 14 aa, Homo sapiens
  CDR3 for alpha chain variable domain of TCR clone 377915 (TRAV38-1, TRAJ40)
CALRPTSGTYKYIF

SEQ ID NO: 755830 - protein, 13 aa, Homo sapiens
  CDR3 for beta chain variable domain of TCR clone 377915 (TRBV19, TRBJ1-1)
CASSFGRNTEAFF

SEQ ID NO: 755831 - protein, 14 aa, Homo sapiens
  CDR3 for alpha chain variable domain of TCR clone 377916 (TRAV20, TRAJ42)
CAVQAGGSQGNLIF

SEQ ID NO: 755832 - protein, 14 aa, Homo sapiens
  CDR3 for beta chain variable domain of TCR clone 377916 (TRBV28, TRBJ1-2)
CASRIQGATYGYTF

SEQ ID NO: 755833 - protein, 12 aa, Homo sapiens
  CDR3 for alpha chain variable domain of TCR clone 377917 (TRAV12-1, TRAJ34)
CVVAGATDKLIL

SEQ ID NO: 755834 - protein, 12 aa, Homo sapiens
  CDR3 for beta chain variable domain of TCR clone 377917 (TRBV7-9, TRBJ1-1)
CASSLVRGEAFF

SEQ ID NO: 755835 - protein, 14 aa, Homo sapiens
  CDR3 for alpha chain variable domain of TCR clone 377918 (TRAV38-1, TRAJ35)
CAFLTIGFGNVLHC

SEQ ID NO: 755836 - protein, 17 aa, Homo sapiens
  CDR3 for beta chain variable domain of TCR clone 377918 (TRBV28, TRBJ2-5)
CASSTPEGDALQETQYF

SEQ ID NO: 755837 - protein, 15 aa, Homo sapiens
  CDR3 for alpha chain variable domain of TCR clone 377919 (TRAV3, TRAJ10)
CAVRDGTGGGSKLTF

SEQ ID NO: 755838 - protein, 15 aa, Homo sapiens
  CDR3 for beta chain variable domain of TCR clone 377919 (TRBV4-2, TRBJ1-4)
CASSLVQREVENLFF

SEQ ID NO: 755839 - protein, 15 aa, Homo sapiens
  CDR3 for alpha chain variable domain of TCR clone 377920 (TRAV26-1, TRAJ29)
CIVRVEGSGKTPLVF

SEQ ID NO: 755840 - protein, 14 aa, Homo sapiens
  CDR3 for beta chain variable domain of TCR clone 377920 (TRBV18, TRBJ2-5)
CTSSPGVSQETQYF

SEQ ID NO: 755841 - protein, 12 aa, Homo sapiens
  CDR3 for alpha chain variable domain of TCR clone 377921 (TRAV1-1, TRAJ39)
CAVPVVGNMLTF

SEQ ID NO: 755842 - protein, 12 aa, Homo sapiens
  CDR3 for beta chain variable domain of TCR clone 377921 (TRBV13, TRBJ2-1)
CASSLGAQEQFF

SEQ ID NO: 755843 - protein, 14 aa, Homo sapiens
  CDR3 for alpha chain variable domain of TCR clone 377922 (TRAV8-4, TRAJ13)
CAVTLSGGYQKVTF

SEQ ID NO: 755844 - protein, 16 aa, Homo sapiens
  CDR3 for beta chain variable domain of TCR clone 377922 (TRBV18, TRBJ1-5)
CASSPYRVEGNQPQHF

SEQ ID NO: 755845 - protein, 14 aa, Homo sapiens
  CDR3 for alpha chain variable domain of TCR clone 377923 (TRAV38-1, TRAJ45)
CAYYSGGGADGLTF

SEQ ID NO: 755846 - protein, 13 aa, Homo sapiens
  CDR3 for beta chain variable domain of TCR clone 377923 (TRBV19, TRBJ2-3)
CATWDKITDTQYF

SEQ ID NO: 755847 - protein, 13 aa, Homo sapiens
  CDR3 for alpha chain variable domain of TCR clone 377924 (TRAV3, TRAJ30)
CAVRDRGDDKIIF

SEQ ID NO: 755848 - protein, 18 aa, Homo sapiens
  CDR3 for beta chain variable domain of TCR clone 377924 (TRBV25-1, TRBJ1-2)
CASSGLQNGQGLIFGYTF

SEQ ID NO: 755849 - protein, 15 aa, Homo sapiens
  CDR3 for alpha chain variable domain of TCR clone 377925 (TRAV17, TRAJ16)
CATALRFSDGQKLLF

SEQ ID NO: 755850 - protein, 13 aa, Homo sapiens
  CDR3 for beta chain variable domain of TCR clone 377925 (TRBV6-4, TRBJ1-5)
CASSADLNQPQHF

SEQ ID NO: 755851 - protein, 14 aa, Homo sapiens
  CDR3 for alpha chain variable domain of TCR clone 377926 (TRAV8-3, TRAJ9)
CAVVYNTGGFKTIF

SEQ ID NO: 755852 - protein, 13 aa, Homo sapiens
  CDR3 for beta chain variable domain of TCR clone 377926 (TRBV7-2, TRBJ2-2)
CASSFAETGELFF

SEQ ID NO: 755853 - protein, 12 aa, Homo sapiens
  CDR3 for alpha chain variable domain of TCR clone 377927 (TRAV21, TRAJ33)
CAKMDSNYQLIW

SEQ ID NO: 755854 - protein, 13 aa, Homo sapiens
  CDR3 for beta chain variable domain of TCR clone 377927 (TRBV3-1, TRBJ2-2)
SASLARGSGELFF

SEQ ID NO: 755855 - protein, 14 aa, Homo sapiens
  CDR3 for alpha chain variable domain of TCR clone 377928 (TRAV12-2, TRAJ40)
CAVKIPSGTYKYIF

SEQ ID NO: 755856 - protein, 15 aa, Homo sapiens
  CDR3 for beta chain variable domain of TCR clone 377928 (TRBV6-3, TRBJ2-2)
CASSFLATLTGELFF

SEQ ID NO: 755857 - protein, 11 aa, Homo sapiens
  CDR3 for alpha chain variable domain of TCR clone 377929 (TRAV2, TRAJ33)
CAVESNYQLIW

SEQ ID NO: 755858 - protein, 13 aa, Homo sapiens
  CDR3 for beta chain variable domain of TCR clone 377929 (TRBV27, TRBJ2-1)
CASRTLGVGEQFF

SEQ ID NO: 755859 - protein, 14 aa, Homo sapiens
  CDR3 for alpha chain variable domain of TCR clone 377930 (TRAV35, TRAJ22)
CAGLRPGSARQLTF

SEQ ID NO: 755860 - protein, 19 aa, Homo sapiens
  CDR3 for beta chain variable domain of TCR clone 377930 (TRBV12-4, TRBJ2-5)
CASSPDRPPRDPVLRARHA

SEQ ID NO: 755861 - protein, 14 aa, Homo sapiens
  CDR3 for alpha chain variable domain of TCR clone 377931 (TRAV13-1, TRAJ35)
CAASKGGFGNLLHC

SEQ ID NO: 755862 - protein, 13 aa, Homo sapiens
  CDR3 for beta chain variable domain of TCR clone 377931 (TRBV7-3, TRBJ1-1)
CASSQDWGAKAFF

SEQ ID NO: 755863 - protein, 12 aa, Homo sapiens
  CDR3 for alpha chain variable domain of TCR clone 377932 (TRAV22, TRAJ22)
CALGGSARQLTF

SEQ ID NO: 755864 - protein, 13 aa, Homo sapiens
  CDR3 for beta chain variable domain of TCR clone 377932 (TRBV15, TRBJ1-6)
CATSGGLNSPLHF

SEQ ID NO: 755865 - protein, 13 aa, Homo sapiens
  CDR3 for alpha chain variable domain of TCR clone 377933 (TRAV3, TRAJ30)
CAVRDRRDDKMIF

SEQ ID NO: 755866 - protein, 16 aa, Homo sapiens
  CDR3 for beta chain variable domain of TCR clone 377933 (TRBV7-3, TRBJ2-2)
CASSLKRGTLSGELFF

SEQ ID NO: 755867 - protein, 13 aa, Homo sapiens
  CDR3 for alpha chain variable domain of TCR clone 377934 (TRAV2, TRAJ13)
TTVLPGGYQKVTF

SEQ ID NO: 755868 - protein, 16 aa, Homo sapiens
  CDR3 for beta chain variable domain of TCR clone 377934 (TRBV6-1, TRBJ2-5)
CASGETLDRGAETQYF

SEQ ID NO: 755869 - protein, 14 aa, Homo sapiens
  CDR3 for alpha chain variable domain of TCR clone 377935 (TRAV13-2, TRAJ22)
CADGPLGSARQLTF

SEQ ID NO: 755870 - protein, 16 aa, Homo sapiens
  CDR3 for beta chain variable domain of TCR clone 377935 (TRBV19, TRBJ2-1)
CASSSKGTRSYNEQFF

SEQ ID NO: 755871 - protein, 14 aa, Homo sapiens
  CDR3 for alpha chain variable domain of TCR clone 377936 (TRAV35, TRAJ22)
CAGHLSGSARQLTF

SEQ ID NO: 755872 - protein, 13 aa, Homo sapiens
  CDR3 for beta chain variable domain of TCR clone 377936 (TRBV7-3, TRBJ1-1)
CASSQDWGAEAFF

SEQ ID NO: 755873 - protein, 17 aa, Homo sapiens
  CDR3 for alpha chain variable domain of TCR clone 377937 (TRAV13-1, TRAJ52)
CAASSGAGGTSYGKLTF

SEQ ID NO: 755874 - protein, 21 aa, Homo sapiens
  CDR3 for beta chain variable domain of TCR clone 377937 (TRBV11-1, TRBJ2-1)
CASSARERLRPEGPSYNEQFF

SEQ ID NO: 755875 - protein, 16 aa, Homo sapiens
  CDR3 for alpha chain variable domain of TCR clone 377938 (TRAV38-1, TRAJ32)
CAFMPFLGGATNKLIF

SEQ ID NO: 755876 - protein, 13 aa, Homo sapiens
  CDR3 for beta chain variable domain of TCR clone 377938 (TRBV7-9, TRBJ1-2)
CASGVKQNYGYTF

SEQ ID NO: 755877 - protein, 14 aa, Homo sapiens
  CDR3 for alpha chain variable domain of TCR clone 377939 (TRAV3, TRAJ21)
CALGRGSTNFTLDL

SEQ ID NO: 755878 - protein, 14 aa, Homo sapiens
  CDR3 for beta chain variable domain of TCR clone 377939 (TRBV20-1, TRBJ2-3)
CSARVRGSTDTQYF

SEQ ID NO: 755879 - protein, 12 aa, Homo sapiens
  CDR3 for alpha chain variable domain of TCR clone 377940 (TRAV12-1, TRAJ27)
CVVNTNAGKSTF

SEQ ID NO: 755880 - protein, 15 aa, Homo sapiens
  CDR3 for beta chain variable domain of TCR clone 377940 (TRBV4-1, TRBJ2-5)
CASSQWDLYQETQYF

SEQ ID NO: 755881 - protein, 14 aa, Homo sapiens
  CDR3 for alpha chain variable domain of TCR clone 377941 (TRAV12-2, TRAJ45)
CAVNIGGGADGLTF

SEQ ID NO: 755882 - protein, 16 aa, Homo sapiens
  CDR3 for beta chain variable domain of TCR clone 377941 (TRBV12-4, TRBJ2-5)
CASSCFVRGRQETQYF

SEQ ID NO: 755883 - protein, 13 aa, Homo sapiens
  CDR3 for alpha chain variable domain of TCR clone 377942 (TRAV17, TRAJ9)
CATDGTGGFKTIF

SEQ ID NO: 755884 - protein, 12 aa, Homo sapiens
  CDR3 for beta chain variable domain of TCR clone 377942 (TRBV20-1, TRBJ2-1)
CSARLGTDEQFF

SEQ ID NO: 755885 - protein, 11 aa, Homo sapiens
  CDR3 for alpha chain variable domain of TCR clone 377943 (TRAV4, TRAJ31)
CLAGDNARLMF

SEQ ID NO: 755886 - protein, 16 aa, Homo sapiens
  CDR3 for beta chain variable domain of TCR clone 377943 (TRBV7-2, TRBJ2-5)
CASSSKWWSGQETQYF

SEQ ID NO: 755887 - protein, 13 aa, Homo sapiens
  CDR3 for alpha chain variable domain of TCR clone 377944 (TRAV27, TRAJ6)
CAVGTRGSYIPTF

SEQ ID NO: 755888 - protein, 14 aa, Homo sapiens
  CDR3 for beta chain variable domain of TCR clone 377944 (TRBV20-1, TRBJ2-4)
CSASGRVGENIQYF

SEQ ID NO: 755889 - protein, 15 aa, Homo sapiens
  CDR3 for alpha chain variable domain of TCR clone 377945 (TRAV14/DV4, TRAJ12)
CAMREERDSSYKLIF

SEQ ID NO: 755890 - protein, 16 aa, Homo sapiens
  CDR3 for beta chain variable domain of TCR clone 377945 (TRBV11-2, TRBJ1-2)
CASSLDTGGADYSYTF

SEQ ID NO: 755891 - protein, 12 aa, Homo sapiens
  CDR3 for alpha chain variable domain of TCR clone 377946 (TRAV8-3, TRAJ20)
CAVGANDYKLSF

SEQ ID NO: 755892 - protein, 14 aa, Homo sapiens
  CDR3 for beta chain variable domain of TCR clone 377946 (TRBV11-2, TRBJ1-2)
CASSLGTANYGYTF

SEQ ID NO: 755893 - protein, 12 aa, Homo sapiens
  CDR3 for alpha chain variable domain of TCR clone 377947 (TRAV1-2, TRAJ29)
CAVRNFNTPLVF

SEQ ID NO: 755894 - protein, 15 aa, Homo sapiens
  CDR3 for beta chain variable domain of TCR clone 377947 (TRBV27, TRBJ2-3)
CASSLGLAGPDTQYF

SEQ ID NO: 755895 - protein, 16 aa, Homo sapiens
  CDR3 for alpha chain variable domain of TCR clone 377948 (TRAV14/DV4, TRAJ21)
CAMREGPENNFNKFYF

SEQ ID NO: 755896 - protein, 12 aa, Homo sapiens
  CDR3 for beta chain variable domain of TCR clone 377948 (TRBV29-1, TRBJ2-2)
CSVVKYTGELVF

SEQ ID NO: 755897 - protein, 13 aa, Homo sapiens
  CDR3 for alpha chain variable domain of TCR clone 377949 (TRAV8-2, TRAJ21)
CVVSQCNFNKFYF

SEQ ID NO: 755898 - protein, 15 aa, Homo sapiens
  CDR3 for beta chain variable domain of TCR clone 377949 (TRBV5-1, TRBJ2-1)
CASSPPRAPYNEQFF

SEQ ID NO: 755899 - protein, 13 aa, Homo sapiens
  CDR3 for alpha chain variable domain of TCR clone 377950 (TRAV30, TRAJ39)
CGTEKNAGNMLTF

SEQ ID NO: 755900 - protein, 19 aa, Homo sapiens
  CDR3 for beta chain variable domain of TCR clone 377950 (TRBV7-3, TRBJ2-2)
CASSLRAGGSGPNTGELSF

SEQ ID NO: 755901 - protein, 13 aa, Homo sapiens
  CDR3 for alpha chain variable domain of TCR clone 377951 (TRAV27, TRAJ39)
CAGAQGAGNMLTF

SEQ ID NO: 755902 - protein, 13 aa, Homo sapiens
  CDR3 for beta chain variable domain of TCR clone 377951 (TRBV7-3, TRBJ2-1)
CASSLDSYNEQFF

SEQ ID NO: 755903 - protein, 17 aa, Homo sapiens
  CDR3 for alpha chain variable domain of TCR clone 377952 (TRAV3, TRAJ28)
CAVRDQNSGAGSYQLTF

SEQ ID NO: 755904 - protein, 13 aa, Homo sapiens
  CDR3 for beta chain variable domain of TCR clone 377952 (TRBV7-9, TRBJ1-2)
CASSLKQNYGYTF

SEQ ID NO: 755905 - protein, 23 aa, Homo sapiens
  CDR3 for alpha chain variable domain of TCR clone 377953 (TRAV26-1, TRAJ38)
CIADNAGNNHIQKPDPAVYQLRD

SEQ ID NO: 755906 - protein, 17 aa, Homo sapiens
  CDR3 for beta chain variable domain of TCR clone 377953 (TRBV11-2, TRBJ2-1)
CASSLYPPGVEYNEQFF

SEQ ID NO: 755907 - protein, 14 aa, Homo sapiens
  CDR3 for alpha chain variable domain of TCR clone 377954 (TRAV3, TRAJ34)
CAVGDINKTDKLIF

SEQ ID NO: 755908 - protein, 14 aa, Homo sapiens
  CDR3 for beta chain variable domain of TCR clone 377954 (TRBV7-2, TRBJ2-2)
CASSLGQNTGELFF

SEQ ID NO: 755909 - protein, 19 aa, Homo sapiens
  CDR3 for alpha chain variable domain of TCR clone 377955 (TRAV16, TRAJ23)
CITVLEVPALYNQGGKLIF

SEQ ID NO: 755910 - protein, 19 aa, Homo sapiens
  CDR3 for beta chain variable domain of TCR clone 377955 (TRBV19, TRBJ2-5)
CASSIGQVTDFFLGETQYF

SEQ ID NO: 755911 - protein, 14 aa, Homo sapiens
  CDR3 for alpha chain variable domain of TCR clone 377956 (TRAV1-2, TRAJ16)
CGVNRFSDGQKLLF

SEQ ID NO: 755912 - protein, 12 aa, Homo sapiens
  CDR3 for beta chain variable domain of TCR clone 377956 (TRBV11-2, TRBJ2-2)
CASSLGGGELFF

SEQ ID NO: 755913 - protein, 18 aa, Homo sapiens
  CDR3 for alpha chain variable domain of TCR clone 377957 (TRAV21, TRAJ52)
CAVRPSPAGGTSYGKLTL

SEQ ID NO: 755914 - protein, 14 aa, Homo sapiens
  CDR3 for beta chain variable domain of TCR clone 377957 (TRBV7-2, TRBJ2-1)
CASSLEGGYNEQFF

SEQ ID NO: 755915 - protein, 14 aa, Homo sapiens
  CDR3 for alpha chain variable domain of TCR clone 377958 (TRAV13-2, TRAJ17)
CAENSKAAGNKLTI

SEQ ID NO: 755916 - protein, 15 aa, Homo sapiens
  CDR3 for beta chain variable domain of TCR clone 377958 (TRBV27, TRBJ2-1)
CASSNGGGSSNEQFF

SEQ ID NO: 755917 - protein, 11 aa, Homo sapiens
  CDR3 for alpha chain variable domain of TCR clone 377959 (TRAV2, TRAJ13)
CASGGYQKVTF

SEQ ID NO: 755918 - protein, 14 aa, Homo sapiens
  CDR3 for beta chain variable domain of TCR clone 377959 (TRBV4-2, TRBJ2-1)
CASGLDRAYNDQFF

SEQ ID NO: 755919 - protein, 11 aa, Homo sapiens
  CDR3 for alpha chain variable domain of TCR clone 377960 (TRAV12-1, TRAJ34)
CVVNKGRELIF

SEQ ID NO: 755920 - protein, 14 aa, Homo sapiens
  CDR3 for beta chain variable domain of TCR clone 377960 (TRBV7-3, TRBJ1-1)
CASSLKGGNTEAFF

SEQ ID NO: 755921 - protein, 13 aa, Homo sapiens
  CDR3 for alpha chain variable domain of TCR clone 377961 (TRAV12-3, TRAJ7)
CAMTPYGNNRLAF

SEQ ID NO: 755922 - protein, 15 aa, Homo sapiens
  CDR3 for beta chain variable domain of TCR clone 377961 (TRBV7-2, TRBJ2-7)
CASSTPGLTRGEQYF

SEQ ID NO: 755923 - protein, 13 aa, Homo sapiens
  CDR3 for alpha chain variable domain of TCR clone 377962 (TRAV26-2, TRAJ57)
CILSRGGSEKLVF

SEQ ID NO: 755924 - protein, 14 aa, Homo sapiens
  CDR3 for beta chain variable domain of TCR clone 377962 (TRBV19, TRBJ2-1)
CASPTFVLSGEQFF

SEQ ID NO: 755925 - protein, 17 aa, Homo sapiens
  CDR3 for alpha chain variable domain of TCR clone 377963 (TRAV4, )
CLVDIQNPDPAVYQLID

SEQ ID NO: 755926 - protein, 15 aa, Homo sapiens
  CDR3 for beta chain variable domain of TCR clone 377963 (TRBV20-1, TRBJ1-5)
CSARVGRVVSQPQHF

SEQ ID NO: 755927 - protein, 14 aa, Homo sapiens
  CDR3 for alpha chain variable domain of TCR clone 377964 (TRAV8-3, TRAJ12)
CAVGARDSSYKFIF

SEQ ID NO: 755928 - protein, 15 aa, Homo sapiens
  CDR3 for beta chain variable domain of TCR clone 377964 (TRBV19, TRBJ1-2)
CASSVGQVLNYGYTF

SEQ ID NO: 755929 - protein, 10 aa, Homo sapiens
  CDR3 for alpha chain variable domain of TCR clone 377965 (TRAV21, TRAJ49)
CAVTGNQFYF

SEQ ID NO: 755930 - protein, 15 aa, Homo sapiens
  CDR3 for beta chain variable domain of TCR clone 377965 (TRBV27, TRBJ2-7)
CASSPIVTGAYEQYF

SEQ ID NO: 755931 - protein, 14 aa, Homo sapiens
  CDR3 for alpha chain variable domain of TCR clone 377966 (TRAV29/DV5, TRAJ36)
CAASRKTGANNLLG

SEQ ID NO: 755932 - protein, 14 aa, Homo sapiens
  CDR3 for beta chain variable domain of TCR clone 377966 (TRBV12-5, TRBJ2-5)
CASGSRTHQETQYF

SEQ ID NO: 755933 - protein, 15 aa, Homo sapiens
  CDR3 for alpha chain variable domain of TCR clone 377967 (TRAV12-3, TRAJ6)
CAMSATTGGSYIPTF

SEQ ID NO: 755934 - protein, 16 aa, Homo sapiens
  CDR3 for beta chain variable domain of TCR clone 377967 (TRBV20-1, TRBJ1-2)
CSASMGQGVAGYGDTF

SEQ ID NO: 755935 - protein, 11 aa, Homo sapiens
  CDR3 for alpha chain variable domain of TCR clone 377968 (TRAV2, TRAJ13)
CASGVYQKVTF

SEQ ID NO: 755936 - protein, 14 aa, Homo sapiens
  CDR3 for beta chain variable domain of TCR clone 377968 (TRBV7-3, TRBJ2-1)
CASSVAGGTNEQFF

SEQ ID NO: 755937 - protein, 15 aa, Homo sapiens
  CDR3 for alpha chain variable domain of TCR clone 377969 (TRAV23/DV6, TRAJ49)
CAATPGQVCRSFQIS

SEQ ID NO: 755938 - protein, 15 aa, Homo sapiens
  CDR3 for beta chain variable domain of TCR clone 377969 (TRBV7-2, TRBJ2-7)
CASSLVSSGSYEQYF

SEQ ID NO: 755939 - protein, 12 aa, Homo sapiens
  CDR3 for alpha chain variable domain of TCR clone 377970 (TRAV3, TRAJ20)
CAVRDGDYKLSF

SEQ ID NO: 755940 - protein, 16 aa, Homo sapiens
  CDR3 for beta chain variable domain of TCR clone 377970 (TRBV10-3, TRBJ2-1)
CAISGVGDGGGGEQFF

SEQ ID NO: 755941 - protein, 12 aa, Homo sapiens
  CDR3 for alpha chain variable domain of TCR clone 377971 (TRAV38-1, TRAJ43)
CSFMTRLADMRF

SEQ ID NO: 755942 - protein, 13 aa, Homo sapiens
  CDR3 for beta chain variable domain of TCR clone 377971 (TRBV27, TRBJ2-1)
CASRTLGVGEQFF

SEQ ID NO: 755943 - protein, 12 aa, Homo sapiens
  CDR3 for alpha chain variable domain of TCR clone 377972 (TRAV12-1, TRAJ23)
CVVNIPGGKLIS

SEQ ID NO: 755944 - protein, 15 aa, Homo sapiens
  CDR3 for beta chain variable domain of TCR clone 377972 (TRBV7-2, TRBJ2-7)
CASSLVSSGSYEQYF

SEQ ID NO: 755945 - protein, 16 aa, Homo sapiens
  CDR3 for alpha chain variable domain of TCR clone 377973 (TRAV3, TRAJ28)
CAVLPRSGAGSYQLTF

SEQ ID NO: 755946 - protein, 14 aa, Homo sapiens
  CDR3 for beta chain variable domain of TCR clone 377973 (TRBV7-8, TRBJ2-7)
CASSPRDRVYEQYF

SEQ ID NO: 755947 - protein, 14 aa, Homo sapiens
  CDR3 for alpha chain variable domain of TCR clone 377974 (TRAV26-1, TRAJ38)
CIADNAVNSRKLIW

SEQ ID NO: 755948 - protein, 13 aa, Homo sapiens
  CDR3 for beta chain variable domain of TCR clone 377974 (TRBV20-1, TRBJ1-1)
CSARGGGNTEAFF

SEQ ID NO: 755949 - protein, 15 aa, Homo sapiens
  CDR3 for alpha chain variable domain of TCR clone 377975 (TRAV17, TRAJ54)
CATTRSEQGAQKLVF

SEQ ID NO: 755950 - protein, 12 aa, Homo sapiens
  CDR3 for beta chain variable domain of TCR clone 377975 (TRBV12-4, TRBJ1-3)
CASSFSGNTIYF

SEQ ID NO: 755951 - protein, 14 aa, Homo sapiens
  CDR3 for alpha chain variable domain of TCR clone 377976 (TRAV13-1, TRAJ44)
RAAKATGTASKLTF

SEQ ID NO: 755952 - protein, 17 aa, Homo sapiens
  CDR3 for beta chain variable domain of TCR clone 377976 (TRBV7-3, TRBJ2-3)
CASSLMKRMRGADTQCF

SEQ ID NO: 755953 - protein, 15 aa, Homo sapiens
  CDR3 for alpha chain variable domain of TCR clone 377977 (TRAV26-1, TRAJ37)
FIVKTGSSNTGKLIF

SEQ ID NO: 755954 - protein, 12 aa, Homo sapiens
  CDR3 for beta chain variable domain of TCR clone 377977 (TRBV7-8, TRBJ2-7)
CASSLGDREQYF

SEQ ID NO: 755955 - protein, 20 aa, Homo sapiens
  CDR3 for alpha chain variable domain of TCR clone 377978 (TRAV30, TRAJ54)
SAAQSRSETQVVQGAQKLVF

SEQ ID NO: 755956 - protein, 14 aa, Homo sapiens
  CDR3 for beta chain variable domain of TCR clone 377978 (TRBV6-3, TRBJ1-1)
CASSYQRRDTEAFF

SEQ ID NO: 755957 - protein, 17 aa, Homo sapiens
  CDR3 for alpha chain variable domain of TCR clone 377979 (TRAV12-1, TRAJ13)
CVVNKRGEFWGLPESYI

SEQ ID NO: 755958 - protein, 17 aa, Homo sapiens
  CDR3 for beta chain variable domain of TCR clone 377979 (TRBV28, TRBJ2-5)
CASSTPEGDALQETQYF

SEQ ID NO: 755959 - protein, 11 aa, Homo sapiens
  CDR3 for alpha chain variable domain of TCR clone 377980 (TRAV2, TRAJ33)
CAVESNYQLIW

SEQ ID NO: 755960 - protein, 15 aa, Homo sapiens
  CDR3 for beta chain variable domain of TCR clone 377980 (TRBV7-6, TRBJ2-7)
CASSGRRDTVGEQYF

SEQ ID NO: 755961 - protein, 10 aa, Homo sapiens
  CDR3 for alpha chain variable domain of TCR clone 377981 (TRAV13-1, TRAJ8)
CAAPFQKLVL

SEQ ID NO: 755962 - protein, 20 aa, Homo sapiens
  CDR3 for beta chain variable domain of TCR clone 377981 (TRBV3-1, TRBJ2-6)
CASSPRPGLEGGAGANVLTF

SEQ ID NO: 755963 - protein, 14 aa, Homo sapiens
  CDR3 for alpha chain variable domain of TCR clone 377982 (TRAV12-3, TRAJ10)
SHLPRTGGGNKLTF

SEQ ID NO: 755964 - protein, 14 aa, Homo sapiens
  CDR3 for beta chain variable domain of TCR clone 377982 (TRBV7-2, TRBJ2-2)
CASSLNSNTGELFF

SEQ ID NO: 755965 - protein, 11 aa, Homo sapiens
  CDR3 for alpha chain variable domain of TCR clone 377983 (TRAV12-1, TRAJ8)
CVVAGFQKLVF

SEQ ID NO: 755966 - protein, 14 aa, Homo sapiens
  CDR3 for beta chain variable domain of TCR clone 377983 (TRBV19, TRBJ2-1)
CASGKSTQYNELFF

SEQ ID NO: 755967 - protein, 12 aa, Homo sapiens
  CDR3 for alpha chain variable domain of TCR clone 377984 (TRAV13-1, TRAJ15)
FAASQAGTALIF

SEQ ID NO: 755968 - protein, 13 aa, Homo sapiens
  CDR3 for beta chain variable domain of TCR clone 377984 (TRBV4-1, TRBJ1-1)
CASSQLGTGEAFF

SEQ ID NO: 755969 - protein, 14 aa, Homo sapiens
  CDR3 for alpha chain variable domain of TCR clone 377985 (TRAV26-1, TRAJ26)
CIVRATFLGQNFVF

SEQ ID NO: 755970 - protein, 16 aa, Homo sapiens
  CDR3 for beta chain variable domain of TCR clone 377985 (TRBV20-1, TRBJ1-4)
CSAPGQGLLTNEKLFF

SEQ ID NO: 755971 - protein, 17 aa, Homo sapiens
  CDR3 for alpha chain variable domain of TCR clone 377986 (TRAV3, TRAJ12)
CAVRDGRRIDSSYKLIF

SEQ ID NO: 755972 - protein, 14 aa, Homo sapiens
  CDR3 for beta chain variable domain of TCR clone 377986 (TRBV7-9, TRBJ1-2)
CASSRQGANYGYTF

SEQ ID NO: 755973 - protein, 13 aa, Homo sapiens
  CDR3 for alpha chain variable domain of TCR clone 377987 (TRAV9-2, TRAJ53)
CALRGGSNYKLTF

SEQ ID NO: 755974 - protein, 11 aa, Homo sapiens
  CDR3 for beta chain variable domain of TCR clone 377987 (TRBV7-9, TRBJ2-3)
CASSGPDTQYY

SEQ ID NO: 755975 - protein, 16 aa, Homo sapiens
  CDR3 for alpha chain variable domain of TCR clone 377988 (TRAV30, TRAJ24)
CGTEIVDADSWGKFQF

SEQ ID NO: 755976 - protein, 13 aa, Homo sapiens
  CDR3 for beta chain variable domain of TCR clone 377988 (TRBV18, TRBJ1-2)
CASSASATEGETF

SEQ ID NO: 755977 - protein, 14 aa, Homo sapiens
  CDR3 for alpha chain variable domain of TCR clone 377989 (TRAV2, TRAJ37)
CAVDFTSNTGELIF

SEQ ID NO: 755978 - protein, 17 aa, Homo sapiens
  CDR3 for beta chain variable domain of TCR clone 377989 (TRBV20-1, TRBJ2-2)
CSASGSGQGGLTGELFF

SEQ ID NO: 755979 - protein, 14 aa, Homo sapiens
  CDR3 for alpha chain variable domain of TCR clone 377990 (TRAV21, TRAJ28)
CAVGSGAGSYQLTF

SEQ ID NO: 755980 - protein, 16 aa, Homo sapiens
  CDR3 for beta chain variable domain of TCR clone 377990 (TRBV7-3, TRBJ2-1)
CASSLTVESSYNEQFF

SEQ ID NO: 755981 - protein, 12 aa, Homo sapiens
  CDR3 for alpha chain variable domain of TCR clone 377991 (TRAV27, TRAJ35)
CAGADFGNVLHC

SEQ ID NO: 755982 - protein, 12 aa, Homo sapiens
  CDR3 for beta chain variable domain of TCR clone 377991 (TRBV3-1, TRBJ2-1)
CASSQGSSGQFF

SEQ ID NO: 755983 - protein, 15 aa, Homo sapiens
  CDR3 for alpha chain variable domain of TCR clone 377992 (TRAV9-2, TRAJ56)
CALSDVDGANSKLTL

SEQ ID NO: 755984 - protein, 14 aa, Homo sapiens
  CDR3 for beta chain variable domain of TCR clone 377992 (TRBV5-1, TRBJ2-7)
CASSRGESLYEQYF

SEQ ID NO: 755985 - protein, 10 aa, Homo sapiens
  CDR3 for alpha chain variable domain of TCR clone 377993 (TRAV30, TRAJ48)
CGIGNEKLTF

SEQ ID NO: 755986 - protein, 15 aa, Homo sapiens
  CDR3 for beta chain variable domain of TCR clone 377993 (TRBV28, TRBJ2-5)
CSSSPPWSYQETQYF

SEQ ID NO: 755987 - protein, 15 aa, Homo sapiens
  CDR3 for alpha chain variable domain of TCR clone 377994 (TRAV26-1, TRAJ38)
CIVRAEGGNNRKLSW

SEQ ID NO: 755988 - protein, 14 aa, Homo sapiens
  CDR3 for beta chain variable domain of TCR clone 377994 (TRBV7-6, TRBJ2-5)
CASSSPSGSETQYF

SEQ ID NO: 755989 - protein, 14 aa, Homo sapiens
  CDR3 for alpha chain variable domain of TCR clone 377995 (TRAV1-2, TRAJ16)
CAVNRFSDGQKLLF

SEQ ID NO: 755990 - protein, 16 aa, Homo sapiens
  CDR3 for beta chain variable domain of TCR clone 377995 (TRBV3-1, TRBJ2-5)
CASSPGQCNGFGTQYF

SEQ ID NO: 755991 - protein, 17 aa, Homo sapiens
  CDR3 for alpha chain variable domain of TCR clone 377996 (TRAV17, TRAJ28)
CATDPRRGGAGRYQLTF

SEQ ID NO: 755992 - protein, 16 aa, Homo sapiens
  CDR3 for beta chain variable domain of TCR clone 377996 (TRBV25-1, TRBJ1-1)
CASSGDRDMGRIEAFF

SEQ ID NO: 755993 - protein, 17 aa, Homo sapiens
  CDR3 for alpha chain variable domain of TCR clone 377997 (TRAV13-1, TRAJ31)
CAPRDRLMFGDGTQLVV

SEQ ID NO: 755994 - protein, 14 aa, Homo sapiens
  CDR3 for beta chain variable domain of TCR clone 377997 (TRBV12-4, TRBJ1-1)
CASSLGTGGTEAFL

SEQ ID NO: 755995 - protein, 16 aa, Homo sapiens
  CDR3 for alpha chain variable domain of TCR clone 377998 (TRAV17, TRAJ36)
CSTVSLNWGKQPLLWD

SEQ ID NO: 755996 - protein, 13 aa, Homo sapiens
  CDR3 for beta chain variable domain of TCR clone 377998 (TRBV4-1, TRBJ1-1)
CASSQLGTGEAFF

SEQ ID NO: 755997 - protein, 11 aa, Homo sapiens
  CDR3 for alpha chain variable domain of TCR clone 377999 (TRAV13-2, TRAJ39)
CAENAGNMLTF

SEQ ID NO: 755998 - protein, 13 aa, Homo sapiens
  CDR3 for beta chain variable domain of TCR clone 377999 (TRBV7-6, TRBJ1-3)
CASSSQQGNTIYF

SEQ ID NO: 755999 - protein, 14 aa, Homo sapiens
  CDR3 for alpha chain variable domain of TCR clone 378000 (TRAV8-3, TRAJ39)
CAVGANNAGNMLTF

SEQ ID NO: 756000 - protein, 16 aa, Homo sapiens
  CDR3 for beta chain variable domain of TCR clone 378000 (TRBV6-1, TRBJ2-5)
CASIETLDRGAETQYF

SEQ ID NO: 756001 - protein, 14 aa, Homo sapiens
  CDR3 for alpha chain variable domain of TCR clone 378001 (TRAV14/DV4, TRAJ41)
CARGGPDSGYALNF

SEQ ID NO: 756002 - protein, 15 aa, Homo sapiens
  CDR3 for beta chain variable domain of TCR clone 378001 (TRBV19, TRBJ2-1)
CASSIQTTSYNEQFF

SEQ ID NO: 756003 - protein, 14 aa, Homo sapiens
  CDR3 for alpha chain variable domain of TCR clone 378002 (TRAV38-1, TRAJ29)
CAFIMSSGNTPLVF

SEQ ID NO: 756004 - protein, 15 aa, Homo sapiens
  CDR3 for beta chain variable domain of TCR clone 378002 (TRBV20-1, TRBJ2-7)
CSARDRVSGMDEQYF

SEQ ID NO: 756005 - protein, 12 aa, Homo sapiens
  CDR3 for alpha chain variable domain of TCR clone 378003 (TRAV3, TRAJ43)
CAVRDPNNDILF

SEQ ID NO: 756006 - protein, 15 aa, Homo sapiens
  CDR3 for beta chain variable domain of TCR clone 378003 (TRBV27, TRBJ1-5)
CASSLGTGFDQPQHF

SEQ ID NO: 756007 - protein, 15 aa, Homo sapiens
  CDR3 for alpha chain variable domain of TCR clone 378004 (TRAV13-2, TRAJ10)
CAENKIGGGGNKLTF

SEQ ID NO: 756008 - protein, 12 aa, Homo sapiens
  CDR3 for beta chain variable domain of TCR clone 378004 (TRBV7-9, TRBJ1-5)
CASSPQGQPQHF

SEQ ID NO: 756009 - protein, 13 aa, Homo sapiens
  CDR3 for alpha chain variable domain of TCR clone 378005 (TRAV21, TRAJ27)
CAARPGNAGKSTF

SEQ ID NO: 756010 - protein, 15 aa, Homo sapiens
  CDR3 for beta chain variable domain of TCR clone 378005 (TRBV7-6, TRBJ1-5)
CASSSTPGSNQPQHF

SEQ ID NO: 756011 - protein, 14 aa, Homo sapiens
  CDR3 for alpha chain variable domain of TCR clone 378006 (TRAV12-2, TRAJ45)
CAVNIGVGADGLTF

SEQ ID NO: 756012 - protein, 13 aa, Homo sapiens
  CDR3 for beta chain variable domain of TCR clone 378006 (TRBV5-5, TRBJ1-2)
CASSFWRGEDYTF

SEQ ID NO: 756013 - protein, 14 aa, Homo sapiens
  CDR3 for alpha chain variable domain of TCR clone 378007 (TRAV1-2, TRAJ16)
CAVNRFSDGQKLLF

SEQ ID NO: 756014 - protein, 15 aa, Homo sapiens
  CDR3 for beta chain variable domain of TCR clone 378007 (TRBV5-1, TRBJ2-2)
CASSSQGGDTGELFF

SEQ ID NO: 756015 - protein, 13 aa, Homo sapiens
  CDR3 for alpha chain variable domain of TCR clone 378008 (TRAV2, TRAJ40)
CAVFTSGTYKYIF

SEQ ID NO: 756016 - protein, 13 aa, Homo sapiens
  CDR3 for beta chain variable domain of TCR clone 378008 (TRBV7-2, TRBJ2-7)
CASSSPSGSEQYF

SEQ ID NO: 756017 - protein, 13 aa, Homo sapiens
  CDR3 for alpha chain variable domain of TCR clone 378009 (TRAV8-2, TRAJ43)
CVVSDQGDNDMRV

SEQ ID NO: 756018 - protein, 12 aa, Homo sapiens
  CDR3 for beta chain variable domain of TCR clone 378009 (TRBV7-8, TRBJ2-7)
CASSLGDREQYF

SEQ ID NO: 756019 - protein, 13 aa, Homo sapiens
  CDR3 for alpha chain variable domain of TCR clone 378010 (TRAV30, TRAJ24)
CGTVTDSWGKLQF

SEQ ID NO: 756020 - protein, 15 aa, Homo sapiens
  CDR3 for beta chain variable domain of TCR clone 378010 (TRBV19, TRBJ1-1)
YASTSGQIKNTEAFF

SEQ ID NO: 756021 - protein, 15 aa, Homo sapiens
  CDR3 for alpha chain variable domain of TCR clone 378011 (TRAV14/DV4, TRAJ46)
CAMGAKKSSGDKLTF

SEQ ID NO: 756022 - protein, 13 aa, Homo sapiens
  CDR3 for beta chain variable domain of TCR clone 378011 (TRBV20-1, TRBJ2-5)
CSAREAFQETQYF

SEQ ID NO: 756023 - protein, 15 aa, Homo sapiens
  CDR3 for alpha chain variable domain of TCR clone 378012 (TRAV8-2, TRAJ28)
CVVSESGAGSYQLTF

SEQ ID NO: 756024 - protein, 19 aa, Homo sapiens
  CDR3 for beta chain variable domain of TCR clone 378012 (TRBV7-2, TRBJ2-3)
CASSFLSRNWGGGTDTQYF

SEQ ID NO: 756025 - protein, 12 aa, Homo sapiens
  CDR3 for alpha chain variable domain of TCR clone 378013 (TRAV13-1, TRAJ21)
CAAKEGFNKFYF

SEQ ID NO: 756026 - protein, 16 aa, Homo sapiens
  CDR3 for beta chain variable domain of TCR clone 378013 (TRBV29-1, TRBJ2-6)
CSVEDITYSGANVLTF

SEQ ID NO: 756027 - protein, 15 aa, Homo sapiens
  CDR3 for alpha chain variable domain of TCR clone 378014 (TRAV8-3, TRAJ45)
CASSYSGGGPDGLTL

SEQ ID NO: 756028 - protein, 13 aa, Homo sapiens
  CDR3 for beta chain variable domain of TCR clone 378014 (TRBV10-3, TRBJ2-7)
CASKLAVNYEQYF

SEQ ID NO: 756029 - protein, 14 aa, Homo sapiens
  CDR3 for alpha chain variable domain of TCR clone 378015 (TRAV12-2, TRAJ24)
CAVTPADSWGKLQF

SEQ ID NO: 756030 - protein, 15 aa, Homo sapiens
  CDR3 for beta chain variable domain of TCR clone 378015 (TRBV27, TRBJ2-1)
CAGSNGGGSSNEQFF

SEQ ID NO: 756031 - protein, 13 aa, Homo sapiens
  CDR3 for alpha chain variable domain of TCR clone 378016 (TRAV13-1, TRAJ5)
CAASDTGRRALTF

SEQ ID NO: 756032 - protein, 12 aa, Homo sapiens
  CDR3 for beta chain variable domain of TCR clone 378016 (TRBV28, TRBJ2-2)
CASSLGGGELFF

SEQ ID NO: 756033 - protein, 13 aa, Homo sapiens
  CDR3 for alpha chain variable domain of TCR clone 378017 (TRAV27, TRAJ56)
CAGKPGANSKLTF

SEQ ID NO: 756034 - protein, 13 aa, Homo sapiens
  CDR3 for beta chain variable domain of TCR clone 378017 (TRBV7-9, TRBJ2-7)
CASSFAGAYEQYF

SEQ ID NO: 756035 - protein, 11 aa, Homo sapiens
  CDR3 for alpha chain variable domain of TCR clone 378018 (TRAV8-3, TRAJ15)
CAVGPATALLF

SEQ ID NO: 756036 - protein, 18 aa, Homo sapiens
  CDR3 for beta chain variable domain of TCR clone 378018 (TRBV18, TRBJ2-3)
CASSYTSGAAGGTDTQYF

SEQ ID NO: 756037 - protein, 15 aa, Homo sapiens
  CDR3 for alpha chain variable domain of TCR clone 378019 (TRAV17, TRAJ57)
CATGPSQGGSEKLVF

SEQ ID NO: 756038 - protein, 13 aa, Homo sapiens
  CDR3 for beta chain variable domain of TCR clone 378019 (TRBV12-4, TRBJ2-7)
CASSPTETYEQYF

SEQ ID NO: 756039 - protein, 13 aa, Homo sapiens
  CDR3 for alpha chain variable domain of TCR clone 378020 (TRAV17, TRAJ9)
CATAITGGFKTIF

SEQ ID NO: 756040 - protein, 15 aa, Homo sapiens
  CDR3 for beta chain variable domain of TCR clone 378020 (TRBV5-1, TRBJ1-5)
CASSLSGNSNQPQHF

SEQ ID NO: 756041 - protein, 16 aa, Homo sapiens
  CDR3 for alpha chain variable domain of TCR clone 378021 (TRAV12-3, TRAJ37)
CAVRTACSSNTGKLIF

SEQ ID NO: 756042 - protein, 13 aa, Homo sapiens
  CDR3 for beta chain variable domain of TCR clone 378021 (TRBV7-9, TRBJ2-5)
CASLPSGRETQYF

SEQ ID NO: 756043 - protein, 12 aa, Homo sapiens
  CDR3 for alpha chain variable domain of TCR clone 378022 (TRAV12-2, TRAJ10)
WGVTGGGNKLTF

SEQ ID NO: 756044 - protein, 14 aa, Homo sapiens
  CDR3 for beta chain variable domain of TCR clone 378022 (TRBV28, TRBJ2-1)
CASSLNGRNNEQFF

SEQ ID NO: 756045 - protein, 23 aa, Homo sapiens
  CDR3 for alpha chain variable domain of TCR clone 378023 (TRAV26-1, TRAJ38)
CIADNAGNNHIQNHDPAVHQPRD

SEQ ID NO: 756046 - protein, 13 aa, Homo sapiens
  CDR3 for beta chain variable domain of TCR clone 378023 (TRBV20-1, TRBJ1-1)
CSARGGGNTEAFF

SEQ ID NO: 756047 - protein, 14 aa, Homo sapiens
  CDR3 for alpha chain variable domain of TCR clone 378024 (TRAV26-1, TRAJ38)
CIADNVGNNRKLIW

SEQ ID NO: 756048 - protein, 14 aa, Homo sapiens
  CDR3 for beta chain variable domain of TCR clone 378024 (TRBV18, TRBJ2-7)
CASSPRWGSYEQYF

SEQ ID NO: 756049 - protein, 13 aa, Homo sapiens
  CDR3 for alpha chain variable domain of TCR clone 378025 (TRAV26-1, TRAJ24)
CIVGVDSWGKLQF

SEQ ID NO: 756050 - protein, 15 aa, Homo sapiens
  CDR3 for beta chain variable domain of TCR clone 378025 (TRBV5-1, TRBJ2-7)
CASSPQGRPLDEQYF

SEQ ID NO: 756051 - protein, 17 aa, Homo sapiens
  CDR3 for alpha chain variable domain of TCR clone 378026 (TRAV23/DV6, TRAJ58)
CAARLLRGETSGSRLTF

SEQ ID NO: 756052 - protein, 16 aa, Homo sapiens
  CDR3 for beta chain variable domain of TCR clone 378026 (TRBV7-3, TRBJ2-1)
CASSLAGGRMSSSAGQ

SEQ ID NO: 756053 - protein, 11 aa, Homo sapiens
  CDR3 for alpha chain variable domain of TCR clone 378027 (TRAV16, TRAJ33)
CALHSNYQLIW

SEQ ID NO: 756054 - protein, 15 aa, Homo sapiens
  CDR3 for beta chain variable domain of TCR clone 378027 (TRBV4-1, TRBJ2-7)
CASSQQGQGFDKQYF

SEQ ID NO: 756055 - protein, 14 aa, Homo sapiens
  CDR3 for alpha chain variable domain of TCR clone 378028 (TRAV23/DV6, TRAJ53)
CAARSGGSNYKLTF

SEQ ID NO: 756056 - protein, 16 aa, Homo sapiens
  CDR3 for beta chain variable domain of TCR clone 378028 (TRBV5-5, TRBJ2-2)
CASSGRREGATGELFF

SEQ ID NO: 756057 - protein, 15 aa, Homo sapiens
  CDR3 for alpha chain variable domain of TCR clone 378029 (TRAV3, TRAJ20)
CAVRDIKLSDYKFSF

SEQ ID NO: 756058 - protein, 14 aa, Homo sapiens
  CDR3 for beta chain variable domain of TCR clone 378029 (TRBV12-5, TRBJ2-5)
CASGSRTHQETQYF

SEQ ID NO: 756059 - protein, 15 aa, Homo sapiens
  CDR3 for alpha chain variable domain of TCR clone 378030 (TRAV1-2, TRAJ15)
CAVEAANQAGTALIF

SEQ ID NO: 756060 - protein, 15 aa, Homo sapiens
  CDR3 for beta chain variable domain of TCR clone 378030 (TRBV5-1, TRBJ2-7)
CASSLVANSYNEQFF

SEQ ID NO: 756061 - protein, 13 aa, Homo sapiens
  CDR3 for alpha chain variable domain of TCR clone 378031 (TRAV17, TRAJ5)
CAPMDTGGRALTF

SEQ ID NO: 756062 - protein, 13 aa, Homo sapiens
  CDR3 for beta chain variable domain of TCR clone 378031 (TRBV7-9, TRBJ1-2)
CASSLKQNYGYTF

SEQ ID NO: 756063 - protein, 19 aa, Homo sapiens
  CDR3 for alpha chain variable domain of TCR clone 378032 (TRAV12-3, TRAJ40)
SPVIQPPTSVQDRTYKYIF

SEQ ID NO: 756064 - protein, 15 aa, Homo sapiens
  CDR3 for beta chain variable domain of TCR clone 378032 (TRBV27, TRBJ2-1)
CASSNGGGSSNEQSF

SEQ ID NO: 756065 - protein, 13 aa, Homo sapiens
  CDR3 for alpha chain variable domain of TCR clone 378033 (TRAV27, TRAJ11)
CAGGGSGYSTLTF

SEQ ID NO: 756066 - protein, 15 aa, Homo sapiens
  CDR3 for beta chain variable domain of TCR clone 378033 (TRBV7-9, TRBJ1-5)
CASSQGHQPNQPQHF

SEQ ID NO: 756067 - protein, 15 aa, Homo sapiens
  CDR3 for alpha chain variable domain of TCR clone 378034 (TRAV13-1, TRAJ27)
CAARELNTNAGKSTF

SEQ ID NO: 756068 - protein, 14 aa, Homo sapiens
  CDR3 for beta chain variable domain of TCR clone 378034 (TRBV7-6, TRBJ2-3)
CASSLGTVTDTQYF

SEQ ID NO: 756069 - protein, 11 aa, Homo sapiens
  CDR3 for alpha chain variable domain of TCR clone 378035 (TRAV1-2, TRAJ31)
CAVNNNARLMF

SEQ ID NO: 756070 - protein, 12 aa, Homo sapiens
  CDR3 for beta chain variable domain of TCR clone 378035 (TRBV12-4, TRBJ2-1)
CASTYVLNEQFF

SEQ ID NO: 756071 - protein, 16 aa, Homo sapiens
  CDR3 for alpha chain variable domain of TCR clone 378036 (TRAV21, TRAJ37)
CGVRTAGSSNTGKLIF

SEQ ID NO: 756072 - protein, 13 aa, Homo sapiens
  CDR3 for beta chain variable domain of TCR clone 378036 (TRBV7-9, TRBJ2-5)
CASLPSGRETQYF

SEQ ID NO: 756073 - protein, 16 aa, Homo sapiens
  CDR3 for alpha chain variable domain of TCR clone 378037 (TRAV4, TRAJ22)
CLVGDLYSGSARQLTF

SEQ ID NO: 756074 - protein, 16 aa, Homo sapiens
  CDR3 for beta chain variable domain of TCR clone 378037 (TRBV7-9, TRBJ2-1)
SASSDVAGGSYNEQFF

SEQ ID NO: 756075 - protein, 15 aa, Homo sapiens
  CDR3 for alpha chain variable domain of TCR clone 378038 (TRAV17, TRAJ6)
CATDLPSGGSYIPTF

SEQ ID NO: 756076 - protein, 16 aa, Homo sapiens
  CDR3 for beta chain variable domain of TCR clone 378038 (TRBV4-1, TRBJ2-7)
CASSQDPTGYYYEQYF

SEQ ID NO: 756077 - protein, 12 aa, Homo sapiens
  CDR3 for alpha chain variable domain of TCR clone 378039 (TRAV1-1, TRAJ39)
CAVPVVGNMLTF

SEQ ID NO: 756078 - protein, 18 aa, Homo sapiens
  CDR3 for beta chain variable domain of TCR clone 378039 (TRBV7-9, TRBJ2-7)
CASRLTTSGSRTWYEQYF

SEQ ID NO: 756079 - protein, 11 aa, Homo sapiens
  CDR3 for alpha chain variable domain of TCR clone 378040 (TRAV3, TRAJ21)
CAVGNVNKCYF

SEQ ID NO: 756080 - protein, 16 aa, Homo sapiens
  CDR3 for beta chain variable domain of TCR clone 378040 (TRBV19, TRBJ2-1)
CASSKAGPSSYNEQFF

SEQ ID NO: 756081 - protein, 12 aa, Homo sapiens
  CDR3 for alpha chain variable domain of TCR clone 378041 (TRAV12-3, TRAJ17)
CAMTLTGNKLTF

SEQ ID NO: 756082 - protein, 15 aa, Homo sapiens
  CDR3 for beta chain variable domain of TCR clone 378041 (TRBV11-3, TRBJ2-3)
CASLRDGREGYTQYF

SEQ ID NO: 756083 - protein, 12 aa, Homo sapiens
  CDR3 for alpha chain variable domain of TCR clone 378042 (TRAV1-2, TRAJ24)
CAVGGSWGKFQF

SEQ ID NO: 756084 - protein, 15 aa, Homo sapiens
  CDR3 for beta chain variable domain of TCR clone 378042 (TRBV2, TRBJ2-7)
CASSEGLARSYEQYF

SEQ ID NO: 756085 - protein, 12 aa, Homo sapiens
  CDR3 for alpha chain variable domain of TCR clone 378043 (TRAV17, TRAJ53)
CATEGSNYKLTF

SEQ ID NO: 756086 - protein, 19 aa, Homo sapiens
  CDR3 for beta chain variable domain of TCR clone 378043 (TRBV5-1, TRBJ2-3)
CASSLWTSGGITTPDTQYL

SEQ ID NO: 756087 - protein, 14 aa, Homo sapiens
  CDR3 for alpha chain variable domain of TCR clone 378044 (TRAV21, TRAJ10)
CAVALTGGGNKLTF

SEQ ID NO: 756088 - protein, 15 aa, Homo sapiens
  CDR3 for beta chain variable domain of TCR clone 378044 (TRBV29-1, TRBJ2-1)
CSGRDRKSSYNEQFF

SEQ ID NO: 756089 - protein, 13 aa, Homo sapiens
  CDR3 for alpha chain variable domain of TCR clone 378045 (TRAV3, TRAJ21)
CAVREPDFNKFYF

SEQ ID NO: 756090 - protein, 17 aa, Homo sapiens
  CDR3 for beta chain variable domain of TCR clone 378045 (TRBV11-2, TRBJ2-4)
CASSSVGSGGHRNIQYF

SEQ ID NO: 756091 - protein, 12 aa, Homo sapiens
  CDR3 for alpha chain variable domain of TCR clone 378046 (TRAV13-2, TRAJ23)
CAERHRGGKLIF

SEQ ID NO: 756092 - protein, 19 aa, Homo sapiens
  CDR3 for beta chain variable domain of TCR clone 378046 (TRBV19, TRBJ2-5)
CASSIGQVTDFSLGETQYF

SEQ ID NO: 756093 - protein, 11 aa, Homo sapiens
  CDR3 for alpha chain variable domain of TCR clone 378047 (TRAV23/DV6, TRAJ45)
CAASWEEVLTY

SEQ ID NO: 756094 - protein, 16 aa, Homo sapiens
  CDR3 for beta chain variable domain of TCR clone 378047 (TRBV6-1, TRBJ2-5)
CASSETLDRGAETQYF

SEQ ID NO: 756095 - protein, 14 aa, Homo sapiens
  CDR3 for alpha chain variable domain of TCR clone 378048 (TRAV20, TRAJ56)
CAVQFCGANSKLTF

SEQ ID NO: 756096 - protein, 14 aa, Homo sapiens
  CDR3 for beta chain variable domain of TCR clone 378048 (TRBV20-1, TRBJ2-7)
CSAKRGRSPYEQYF

SEQ ID NO: 756097 - protein, 15 aa, Homo sapiens
  CDR3 for alpha chain variable domain of TCR clone 378049 (TRAV8-3, TRAJ45)
CASSYSGGGADVLTF

SEQ ID NO: 756098 - protein, 13 aa, Homo sapiens
  CDR3 for beta chain variable domain of TCR clone 378049 (TRBV20-1, TRBJ1-1)
CSAFDKENTEAFF

SEQ ID NO: 756099 - protein, 12 aa, Homo sapiens
  CDR3 for alpha chain variable domain of TCR clone 378050 (TRAV3, TRAJ20)
CAVRDPDYKLSF

SEQ ID NO: 756100 - protein, 14 aa, Homo sapiens
  CDR3 for beta chain variable domain of TCR clone 378050 (TRBV4-2, TRBJ2-1)
CASGLDRAYNEQFV

SEQ ID NO: 756101 - protein, 13 aa, Homo sapiens
  CDR3 for alpha chain variable domain of TCR clone 378051 (TRAV2, TRAJ40)
CAVVTSGTHKYIS

SEQ ID NO: 756102 - protein, 14 aa, Homo sapiens
  CDR3 for beta chain variable domain of TCR clone 378051 (TRBV19, TRBJ2-1)
CASPTFVLSGEQFF

SEQ ID NO: 756103 - protein, 12 aa, Homo sapiens
  CDR3 for alpha chain variable domain of TCR clone 378052 (TRAV8-4, TRAJ43)
CAVSANNNDMRL

SEQ ID NO: 756104 - protein, 16 aa, Homo sapiens
  CDR3 for beta chain variable domain of TCR clone 378052 (TRBV7-2, TRBJ2-6)
CASSLAGRSGANVLTF

SEQ ID NO: 756105 - protein, 16 aa, Homo sapiens
  CDR3 for alpha chain variable domain of TCR clone 378053 (TRAV3, TRAJ37)
CAVRGKGSGNTGKLIF

SEQ ID NO: 756106 - protein, 17 aa, Homo sapiens
  CDR3 for beta chain variable domain of TCR clone 378053 (TRBV7-9, TRBJ1-4)
CASSSGQLGGRSEKLFF

SEQ ID NO: 756107 - protein, 15 aa, Homo sapiens
  CDR3 for alpha chain variable domain of TCR clone 378054 (TRAV12-2, TRAJ53)
CAVNGGGGSNYKLTF

SEQ ID NO: 756108 - protein, 14 aa, Homo sapiens
  CDR3 for beta chain variable domain of TCR clone 378054 (TRBV7-8, TRBJ2-7)
CASSPRDRVYEQYF

SEQ ID NO: 756109 - protein, 11 aa, Homo sapiens
  CDR3 for alpha chain variable domain of TCR clone 378055 (TRAV2, TRAJ13)
CASGGYQKVTF

SEQ ID NO: 756110 - protein, 20 aa, Homo sapiens
  CDR3 for beta chain variable domain of TCR clone 378055 (TRBV7-8, TRBJ2-2)
CASSHLFPGLTIHITGELFF

SEQ ID NO: 756111 - protein, 12 aa, Homo sapiens
  CDR3 for alpha chain variable domain of TCR clone 378056 (TRAV36/DV7, TRAJ54)
CALVRGAQKLVF

SEQ ID NO: 756112 - protein, 13 aa, Homo sapiens
  CDR3 for beta chain variable domain of TCR clone 378056 (TRBV7-3, TRBJ1-1)
CQQLKGGNTEAFF

SEQ ID NO: 756113 - protein, 15 aa, Homo sapiens
  CDR3 for alpha chain variable domain of TCR clone 378057 (TRAV4, TRAJ32)
CLVGEDGGATNKLIF

SEQ ID NO: 756114 - protein, 16 aa, Homo sapiens
  CDR3 for beta chain variable domain of TCR clone 378057 (TRBV13, TRBJ2-2)
CASSPRTGELTGELFF

SEQ ID NO: 756115 - protein, 14 aa, Homo sapiens
  CDR3 for alpha chain variable domain of TCR clone 378058 (TRAV27, TRAJ39)
CAGRPTGAGNMLTF

SEQ ID NO: 756116 - protein, 14 aa, Homo sapiens
  CDR3 for beta chain variable domain of TCR clone 378058 (TRBV11-2, TRBJ2-3)
CASSRLARTDTQYF

SEQ ID NO: 756117 - protein, 11 aa, Homo sapiens
  CDR3 for alpha chain variable domain of TCR clone 378059 (TRAV1-1, TRAJ23)
CAVRHGGKLIF

SEQ ID NO: 756118 - protein, 13 aa, Homo sapiens
  CDR3 for beta chain variable domain of TCR clone 378059 (TRBV7-3, TRBJ1-1)
CASSQDWGAEVFF

SEQ ID NO: 756119 - protein, 11 aa, Homo sapiens
  CDR3 for alpha chain variable domain of TCR clone 378060 (TRAV35, TRAJ30)
CAPGGDDKLIF

SEQ ID NO: 756120 - protein, 14 aa, Homo sapiens
  CDR3 for beta chain variable domain of TCR clone 378060 (TRBV7-6, TRBJ2-1)
CASSLGGGADEQFF

SEQ ID NO: 756121 - protein, 16 aa, Homo sapiens
  CDR3 for alpha chain variable domain of TCR clone 378061 (TRAV26-1, TRAJ6)
CIVRVPRTGGSYIPNF

SEQ ID NO: 756122 - protein, 15 aa, Homo sapiens
  CDR3 for beta chain variable domain of TCR clone 378061 (TRBV10-3, TRBJ2-7)
CAISDMTALSYEQYF

SEQ ID NO: 756123 - protein, 13 aa, Homo sapiens
  CDR3 for alpha chain variable domain of TCR clone 378062 (TRAV8-3, TRAJ34)
CAVGGGNTDKLIF

SEQ ID NO: 756124 - protein, 17 aa, Homo sapiens
  CDR3 for beta chain variable domain of TCR clone 378062 (TRBV20-1, TRBJ2-2)
CSASGSGQGGLTGELFF

SEQ ID NO: 756125 - protein, 14 aa, Homo sapiens
  CDR3 for alpha chain variable domain of TCR clone 378063 (TRAV26-1, TRAJ34)
CIVRVAYNTDKLIF

SEQ ID NO: 756126 - protein, 16 aa, Homo sapiens
  CDR3 for beta chain variable domain of TCR clone 378063 (TRBV19, TRBJ2-2)
CASSFPGQGLAGELFF

SEQ ID NO: 756127 - protein, 10 aa, Homo sapiens
  CDR3 for alpha chain variable domain of TCR clone 378064 (TRAV23/DV6, TRAJ57)
CAASSTLSQG

SEQ ID NO: 756128 - protein, 16 aa, Homo sapiens
  CDR3 for beta chain variable domain of TCR clone 378064 (TRBV3-1, TRBJ1-6)
CASSQEFQGSYSPLHF

SEQ ID NO: 756129 - protein, 15 aa, Homo sapiens
  CDR3 for alpha chain variable domain of TCR clone 378065 (TRAV2, TRAJ15)
CAVEDREQAGTALIF

SEQ ID NO: 756130 - protein, 13 aa, Homo sapiens
  CDR3 for beta chain variable domain of TCR clone 378065 (TRBV4-2, TRBJ1-1)
CASSQAGNTEAFF

SEQ ID NO: 756131 - protein, 12 aa, Homo sapiens
  CDR3 for alpha chain variable domain of TCR clone 378066 (TRAV8-3, TRAJ20)
CAVGGGEYKLSF

SEQ ID NO: 756132 - protein, 14 aa, Homo sapiens
  CDR3 for beta chain variable domain of TCR clone 378066 (TRBV5-1, TRBJ2-7)
CASSRGESLYEQYF

SEQ ID NO: 756133 - protein, 11 aa, Homo sapiens
  CDR3 for alpha chain variable domain of TCR clone 378067 (TRAV2, TRAJ31)
CAAVPPARLMF

SEQ ID NO: 756134 - protein, 13 aa, Homo sapiens
  CDR3 for beta chain variable domain of TCR clone 378067 (TRBV4-1, TRBJ2-3)
CASSQPPTDTQYF

SEQ ID NO: 756135 - protein, 15 aa, Homo sapiens
  CDR3 for alpha chain variable domain of TCR clone 378068 (TRAV12-1, TRAJ44)
CVVFVNTGTASKLTF

SEQ ID NO: 756136 - protein, 17 aa, Homo sapiens
  CDR3 for beta chain variable domain of TCR clone 378068 (TRBV7-8, TRBJ2-6)
YASSAGTGGAGANILTF

SEQ ID NO: 756137 - protein, 16 aa, Homo sapiens
  CDR3 for alpha chain variable domain of TCR clone 378069 (TRAV1-2, TRAJ10)
CAVRGVLTGGGNKLTF

SEQ ID NO: 756138 - protein, 13 aa, Homo sapiens
  CDR3 for beta chain variable domain of TCR clone 378069 (TRBV7-8, TRBJ2-7)
CASSLGDREQYFG

SEQ ID NO: 756139 - protein, 15 aa, Homo sapiens
  CDR3 for alpha chain variable domain of TCR clone 378070 (TRAV3, TRAJ22)
CAVRDRGGSGRQLTF

SEQ ID NO: 756140 - protein, 14 aa, Homo sapiens
  CDR3 for beta chain variable domain of TCR clone 378070 (TRBV20-1, TRBJ1-1)
CSAQTRIGGTEAFF

SEQ ID NO: 756141 - protein, 11 aa, Homo sapiens
  CDR3 for alpha chain variable domain of TCR clone 378071 (TRAV35, TRAJ34)
CWARNTDKLIF

SEQ ID NO: 756142 - protein, 17 aa, Homo sapiens
  CDR3 for beta chain variable domain of TCR clone 378071 (TRBV7-8, TRBJ2-7)
CASSFTSGRPPSYEQYF

SEQ ID NO: 756143 - protein, 16 aa, Homo sapiens
  CDR3 for alpha chain variable domain of TCR clone 378072 (TRAV39, TRAJ17)
CAVDIQRSTAGNKLTF

SEQ ID NO: 756144 - protein, 16 aa, Homo sapiens
  CDR3 for beta chain variable domain of TCR clone 378072 (TRBV7-3, TRBJ2-1)
CASSLEGYRSYNEQFF

SEQ ID NO: 756145 - protein, 14 aa, Homo sapiens
  CDR3 for alpha chain variable domain of TCR clone 378073 (TRAV12-3, TRAJ10)
SHLPLKGGGNKLTF

SEQ ID NO: 756146 - protein, 14 aa, Homo sapiens
  CDR3 for beta chain variable domain of TCR clone 378073 (TRBV12-5, TRBJ2-5)
CASGSRTHQETQYF

SEQ ID NO: 756147 - protein, 14 aa, Homo sapiens
  CDR3 for alpha chain variable domain of TCR clone 378074 (TRAV12-3, TRAJ10)
SHLPLTGGGTKLTF

SEQ ID NO: 756148 - protein, 14 aa, Homo sapiens
  CDR3 for beta chain variable domain of TCR clone 378074 (TRBV19, TRBJ2-7)
CASTVQGRPYEQYF

SEQ ID NO: 756149 - protein, 21 aa, Homo sapiens
  CDR3 for alpha chain variable domain of TCR clone 378075 (TRAV12-1, TRAJ32)
SSVIQPPTSMNYGGATNKLIF

SEQ ID NO: 756150 - protein, 18 aa, Homo sapiens
  CDR3 for beta chain variable domain of TCR clone 378075 (TRBV20-1, TRBJ2-3)
CSDSGLAGGPGTTDTQYF

SEQ ID NO: 756151 - protein, 18 aa, Homo sapiens
  CDR3 for alpha chain variable domain of TCR clone 378076 (TRAV13-1, TRAJ52)
CAASKRSACGTSYGKLTF

SEQ ID NO: 756152 - protein, 14 aa, Homo sapiens
  CDR3 for beta chain variable domain of TCR clone 378076 (TRBV7-2, TRBJ1-4)
CASSHSKTNEKLFF

SEQ ID NO: 756153 - protein, 18 aa, Homo sapiens
  CDR3 for alpha chain variable domain of TCR clone 378077 (TRAV26-2, TRAJ54)
CILRDVEGGIQGAQKLVF

SEQ ID NO: 756154 - protein, 13 aa, Homo sapiens
  CDR3 for beta chain variable domain of TCR clone 378077 (TRBV6-1, TRBJ1-1)
CASSRQGNTEAVF

SEQ ID NO: 756155 - protein, 13 aa, Homo sapiens
  CDR3 for alpha chain variable domain of TCR clone 378078 (TRAV8-6, TRAJ49)
CAVITNTGNQFYF

SEQ ID NO: 756156 - protein, 14 aa, Homo sapiens
  CDR3 for beta chain variable domain of TCR clone 378078 (TRBV19, TRBJ2-3)
CASSAPRGTDTQYF

SEQ ID NO: 756157 - protein, 12 aa, Homo sapiens
  CDR3 for alpha chain variable domain of TCR clone 378079 (TRAV2, TRAJ36)
CAELTGANILFF

SEQ ID NO: 756158 - protein, 14 aa, Homo sapiens
  CDR3 for beta chain variable domain of TCR clone 378079 (TRBV18, TRBJ2-7)
CASSPRGGAYEQYF

SEQ ID NO: 756159 - protein, 14 aa, Homo sapiens
  CDR3 for alpha chain variable domain of TCR clone 378080 (TRAV38-2/DV8, TRAJ29)
CAYRSRSGNTPLVF

SEQ ID NO: 756160 - protein, 17 aa, Homo sapiens
  CDR3 for beta chain variable domain of TCR clone 378080 (TRBV6-1, TRBJ1-2)
CASSGTHSQRGDYGYTF

SEQ ID NO: 756161 - protein, 13 aa, Homo sapiens
  CDR3 for alpha chain variable domain of TCR clone 378081 (TRAV13-1, TRAJ6)
CAASSVGSYIPTF

SEQ ID NO: 756162 - protein, 15 aa, Homo sapiens
  CDR3 for beta chain variable domain of TCR clone 378081 (TRBV12-4, TRBJ2-5)
CASSPPTGLQETQYF

SEQ ID NO: 756163 - protein, 11 aa, Homo sapiens
  CDR3 for alpha chain variable domain of TCR clone 378082 (TRAV2, TRAJ13)
CASGGYQKATF

SEQ ID NO: 756164 - protein, 15 aa, Homo sapiens
  CDR3 for beta chain variable domain of TCR clone 378082 (TRBV20-1, TRBJ2-7)
CSARVPAAYFYEQYF

SEQ ID NO: 756165 - protein, 17 aa, Homo sapiens
  CDR3 for alpha chain variable domain of TCR clone 378083 (TRAV36/DV7, TRAJ44)
CAVEQIPALPVNSPLGL

SEQ ID NO: 756166 - protein, 19 aa, Homo sapiens
  CDR3 for beta chain variable domain of TCR clone 378083 (TRBV25-1, TRBJ2-2)
CAILVYRVDRGRKTGELFF

SEQ ID NO: 756167 - protein, 16 aa, Homo sapiens
  CDR3 for alpha chain variable domain of TCR clone 378084 (TRAV13-1, TRAJ45)
CSASWESGGGADGLTF

SEQ ID NO: 756168 - protein, 14 aa, Homo sapiens
  CDR3 for beta chain variable domain of TCR clone 378084 (TRBV12-4, TRBJ1-3)
CASGQTVSGNTMYF

SEQ ID NO: 756169 - protein, 13 aa, Homo sapiens
  CDR3 for alpha chain variable domain of TCR clone 378085 (TRAV21, TRAJ15)
CAVANQAGTALIF

SEQ ID NO: 756170 - protein, 14 aa, Homo sapiens
  CDR3 for beta chain variable domain of TCR clone 378085 (TRBV12-5, TRBJ2-5)
CASGSRTHQETQYF

SEQ ID NO: 756171 - protein, 14 aa, Homo sapiens
  CDR3 for alpha chain variable domain of TCR clone 378086 (TRAV2, TRAJ9)
CAVEDRSGGFKTIF

SEQ ID NO: 756172 - protein, 12 aa, Homo sapiens
  CDR3 for beta chain variable domain of TCR clone 378086 (TRBV27, TRBJ2-5)
CASSPTGETQYF

SEQ ID NO: 756173 - protein, 12 aa, Homo sapiens
  CDR3 for alpha chain variable domain of TCR clone 378087 (TRAV13-1, TRAJ21)
CAAKEGFNKFYF

SEQ ID NO: 756174 - protein, 13 aa, Homo sapiens
  CDR3 for beta chain variable domain of TCR clone 378087 (TRBV12-4, TRBJ2-7)
CASSPTETYEQYF

SEQ ID NO: 756175 - protein, 14 aa, Homo sapiens
  CDR3 for alpha chain variable domain of TCR clone 378088 (TRAV8-1, TRAJ5)
CAVRTDTGRRALTF

SEQ ID NO: 756176 - protein, 12 aa, Homo sapiens
  CDR3 for beta chain variable domain of TCR clone 378088 (TRBV19, TRBJ1-5)
CASSIAQQPQHF

SEQ ID NO: 756177 - protein, 16 aa, Homo sapiens
  CDR3 for alpha chain variable domain of TCR clone 378089 (TRAV30, TRAJ24)
CGTEIVDADSWGKFQF

SEQ ID NO: 756178 - protein, 15 aa, Homo sapiens
  CDR3 for beta chain variable domain of TCR clone 378089 (TRBV20-1, TRBJ2-4)
CSARDLTGRPNIQYF

SEQ ID NO: 756179 - protein, 13 aa, Homo sapiens
  CDR3 for alpha chain variable domain of TCR clone 378090 (TRAV8-4, TRAJ36)
CAVSVAGANNLFF

SEQ ID NO: 756180 - protein, 15 aa, Homo sapiens
  CDR3 for beta chain variable domain of TCR clone 378090 (TRBV7-2, TRBJ2-5)
CASSVEGRGVETQYF

SEQ ID NO: 756181 - protein, 13 aa, Homo sapiens
  CDR3 for alpha chain variable domain of TCR clone 378091 (TRAV6, TRAJ16)
CALDDSDGQKLLF

SEQ ID NO: 756182 - protein, 16 aa, Homo sapiens
  CDR3 for beta chain variable domain of TCR clone 378091 (TRBV12-4, TRBJ1-6)
CASNVQGKGSPLHLGT

SEQ ID NO: 756183 - protein, 11 aa, Homo sapiens
  CDR3 for alpha chain variable domain of TCR clone 378092 (TRAV21, TRAJ20)
CAVRDDYKLSF

SEQ ID NO: 756184 - protein, 16 aa, Homo sapiens
  CDR3 for beta chain variable domain of TCR clone 378092 (TRBV12-4, TRBJ1-1)
CASSFSQMNTEAFLDK

SEQ ID NO: 756185 - protein, 15 aa, Homo sapiens
  CDR3 for alpha chain variable domain of TCR clone 378093 (TRAV17, TRAJ56)
PSVLRTPGANSKLTF

SEQ ID NO: 756186 - protein, 15 aa, Homo sapiens
  CDR3 for beta chain variable domain of TCR clone 378093 (TRBV27, TRBJ2-7)
CASSLFGTGLDEQYF

SEQ ID NO: 756187 - protein, 10 aa, Homo sapiens
  CDR3 for alpha chain variable domain of TCR clone 378094 (TRAV21, TRAJ35)
CAVFGNVLHC

SEQ ID NO: 756188 - protein, 15 aa, Homo sapiens
  CDR3 for beta chain variable domain of TCR clone 378094 (TRBV20-1, TRBJ2-7)
CSARDRVSGMDEQYF

SEQ ID NO: 756189 - protein, 12 aa, Homo sapiens
  CDR3 for alpha chain variable domain of TCR clone 378095 (TRAV13-1, TRAJ49)
CAAPNTGTQFYF

SEQ ID NO: 756190 - protein, 17 aa, Homo sapiens
  CDR3 for beta chain variable domain of TCR clone 378095 (TRBV25-1, TRBJ2-7)
CASSDARVVFSSYEQYF

SEQ ID NO: 756191 - protein, 13 aa, Homo sapiens
  CDR3 for alpha chain variable domain of TCR clone 378096 (TRAV8-4, TRAJ9)
CAVSDAGGFKTIF

SEQ ID NO: 756192 - protein, 16 aa, Homo sapiens
  CDR3 for beta chain variable domain of TCR clone 378096 (TRBV19, TRBJ2-1)
CASSKAGPSSYNEQFF

SEQ ID NO: 756193 - protein, 12 aa, Homo sapiens
  CDR3 for alpha chain variable domain of TCR clone 378097 (TRAV8-3, TRAJ26)
CAGDNYGQNFVF

SEQ ID NO: 756194 - protein, 14 aa, Homo sapiens
  CDR3 for beta chain variable domain of TCR clone 378097 (TRBV9, TRBJ2-1)
CQQPRGELLNEQFF

SEQ ID NO: 756195 - protein, 15 aa, Homo sapiens
  CDR3 for alpha chain variable domain of TCR clone 378098 (TRAV12-1, TRAJ4)
CVVNGFSGGYNKLIF

SEQ ID NO: 756196 - protein, 18 aa, Homo sapiens
  CDR3 for beta chain variable domain of TCR clone 378098 (TRBV6-5, TRBJ2-1)
CASSYSSRRAGVYIEQFF

SEQ ID NO: 756197 - protein, 15 aa, Homo sapiens
  CDR3 for alpha chain variable domain of TCR clone 378099 (TRAV3, TRAJ21)
CAVREPDLTNFTLDL

SEQ ID NO: 756198 - protein, 13 aa, Homo sapiens
  CDR3 for beta chain variable domain of TCR clone 378099 (TRBV9, TRBJ2-1)
CASSPSGGNEQFF

SEQ ID NO: 756199 - protein, 15 aa, Homo sapiens
  CDR3 for alpha chain variable domain of TCR clone 378100 (TRAV3, TRAJ3)
CAVRDRASSASKIIF

SEQ ID NO: 756200 - protein, 18 aa, Homo sapiens
  CDR3 for beta chain variable domain of TCR clone 378100 (TRBV25-1, TRBJ1-2)
CASSGLQNGQSLIFGYTF

SEQ ID NO: 756201 - protein, 13 aa, Homo sapiens
  CDR3 for alpha chain variable domain of TCR clone 378101 (TRAV12-1, TRAJ26)
SATYLYYGQNFVF

SEQ ID NO: 756202 - protein, 14 aa, Homo sapiens
  CDR3 for beta chain variable domain of TCR clone 378101 (TRBV4-1, TRBJ2-2)
CASSQAVNTGELFF

SEQ ID NO: 756203 - protein, 19 aa, Homo sapiens
  CDR3 for alpha chain variable domain of TCR clone 378102 (TRAV1-2, TRAJ26)
CLLPLCCERHDNYGQNFVF

SEQ ID NO: 756204 - protein, 15 aa, Homo sapiens
  CDR3 for beta chain variable domain of TCR clone 378102 (TRBV27, TRBJ2-1)
CASSNGGGSSNEQFF

SEQ ID NO: 756205 - protein, 11 aa, Homo sapiens
  CDR3 for alpha chain variable domain of TCR clone 378103 (TRAV35, TRAJ30)
CAGERDEKIIF

SEQ ID NO: 756206 - protein, 14 aa, Homo sapiens
  CDR3 for beta chain variable domain of TCR clone 378103 (TRBV15, TRBJ2-5)
CATSGDRGQETQYF

SEQ ID NO: 756207 - protein, 13 aa, Homo sapiens
  CDR3 for alpha chain variable domain of TCR clone 378104 (TRAV12-2, TRAJ20)
CAVYPSNDYNLSF

SEQ ID NO: 756208 - protein, 13 aa, Homo sapiens
  CDR3 for beta chain variable domain of TCR clone 378104 (TRBV7-2, TRBJ2-7)
CASSSPSGSEQYF

SEQ ID NO: 756209 - protein, 13 aa, Homo sapiens
  CDR3 for alpha chain variable domain of TCR clone 378105 (TRAV12-1, TRAJ7)
CVVNMRGNNRLAF

SEQ ID NO: 756210 - protein, 14 aa, Homo sapiens
  CDR3 for beta chain variable domain of TCR clone 378105 (TRBV9, TRBJ2-7)
CASSVGVGSYEQYF

SEQ ID NO: 756211 - protein, 13 aa, Homo sapiens
  CDR3 for alpha chain variable domain of TCR clone 378106 (TRAV21, TRAJ57)
CAVTQGGSERLVF

SEQ ID NO: 756212 - protein, 16 aa, Homo sapiens
  CDR3 for beta chain variable domain of TCR clone 378106 (TRBV29-1, TRBJ2-7)
CSVEGAEDGTAYEQYF

SEQ ID NO: 756213 - protein, 15 aa, Homo sapiens
  CDR3 for alpha chain variable domain of TCR clone 378107 (TRAV17, TRAJ57)
CATGPSQGGSEKLVF

SEQ ID NO: 756214 - protein, 15 aa, Homo sapiens
  CDR3 for beta chain variable domain of TCR clone 378107 (TRBV15, TRBJ1-3)
CATSRDRGPGNTIYF

SEQ ID NO: 756215 - protein, 18 aa, Homo sapiens
  CDR3 for alpha chain variable domain of TCR clone 378108 (TRAV21, TRAJ52)
CAVRPSPAGGTSYVKMTF

SEQ ID NO: 756216 - protein, 17 aa, Homo sapiens
  CDR3 for beta chain variable domain of TCR clone 378108 (TRBV13, TRBJ2-3)
CASSLSRVAGGRNTQYF

SEQ ID NO: 756217 - protein, 14 aa, Homo sapiens
  CDR3 for alpha chain variable domain of TCR clone 378109 (TRAV16, TRAJ54)
CALSLIQGAQKLVF

SEQ ID NO: 756218 - protein, 13 aa, Homo sapiens
  CDR3 for beta chain variable domain of TCR clone 378109 (TRBV7-6, TRBJ2-7)
CASSLDHTHEQYF

SEQ ID NO: 756219 - protein, 12 aa, Homo sapiens
  CDR3 for alpha chain variable domain of TCR clone 378110 (TRAV8-4, TRAJ37)
CAVRSNTGKLIF

SEQ ID NO: 756220 - protein, 16 aa, Homo sapiens
  CDR3 for beta chain variable domain of TCR clone 378110 (TRBV7-2, TRBJ2-3)
CASSLVGDASTDKQYF

SEQ ID NO: 756221 - protein, 14 aa, Homo sapiens
  CDR3 for alpha chain variable domain of TCR clone 378111 (TRAV1-2, TRAJ16)
CAVNRFSDGQKLLF

SEQ ID NO: 756222 - protein, 15 aa, Homo sapiens
  CDR3 for beta chain variable domain of TCR clone 378111 (TRBV28, TRBJ2-1)
CVSSIIAGGRSEQFF

SEQ ID NO: 756223 - protein, 10 aa, Homo sapiens
  CDR3 for alpha chain variable domain of TCR clone 378112 (TRAV26-2, TRAJ20)
CILGGYKLSF

SEQ ID NO: 756224 - protein, 12 aa, Homo sapiens
  CDR3 for beta chain variable domain of TCR clone 378112 (TRBV28, TRBJ2-6)
CAIQAGANVLTF

SEQ ID NO: 756225 - protein, 11 aa, Homo sapiens
  CDR3 for alpha chain variable domain of TCR clone 378113 (TRAV12-2, TRAJ3)
CAVKRASKLIF

SEQ ID NO: 756226 - protein, 14 aa, Homo sapiens
  CDR3 for beta chain variable domain of TCR clone 378113 (TRBV6-5, TRBJ1-1)
CASNRQRSDTEAVF

SEQ ID NO: 756227 - protein, 16 aa, Homo sapiens
  CDR3 for alpha chain variable domain of TCR clone 378114 (TRAV26-2, TRAJ48)
CILRPPCNFGNEKLTF

SEQ ID NO: 756228 - protein, 14 aa, Homo sapiens
  CDR3 for beta chain variable domain of TCR clone 378114 (TRBV25-1, TRBJ1-1)
CASTHLGGNTEAFF

SEQ ID NO: 756229 - protein, 18 aa, Homo sapiens
  CDR3 for alpha chain variable domain of TCR clone 378115 (TRAV13-1, TRAJ52)
CEAKNPNAGGTSYGKLTF

SEQ ID NO: 756230 - protein, 15 aa, Homo sapiens
  CDR3 for beta chain variable domain of TCR clone 378115 (TRBV9, TRBJ1-6)
CASSVAGTGDSPLHF

SEQ ID NO: 756231 - protein, 16 aa, Homo sapiens
  CDR3 for alpha chain variable domain of TCR clone 378116 (TRAV13-1, TRAJ13)
CTAFFLGVTRKLPLEL

SEQ ID NO: 756232 - protein, 17 aa, Homo sapiens
  CDR3 for beta chain variable domain of TCR clone 378116 (TRBV11-2, TRBJ2-1)
CASSLYPPGVEYNEQFF

SEQ ID NO: 756233 - protein, 17 aa, Homo sapiens
  CDR3 for alpha chain variable domain of TCR clone 378117 (TRAV2, TRAJ22)
ILQVREADAAAQRRLTF

SEQ ID NO: 756234 - protein, 16 aa, Homo sapiens
  CDR3 for beta chain variable domain of TCR clone 378117 (TRBV2, TRBJ2-5)
CASSETQGVGEETQYF

SEQ ID NO: 756235 - protein, 15 aa, Homo sapiens
  CDR3 for alpha chain variable domain of TCR clone 378118 (TRAV26-1, TRAJ29)
CIVRVEGSGNTPLFV

SEQ ID NO: 756236 - protein, 15 aa, Homo sapiens
  CDR3 for beta chain variable domain of TCR clone 378118 (TRBV7-9, TRBJ1-5)
CASSQGHQPNQPQHF

SEQ ID NO: 756237 - protein, 15 aa, Homo sapiens
  CDR3 for alpha chain variable domain of TCR clone 378119 (TRAV3, TRAJ22)
CAVRDRGGSARQLTF

SEQ ID NO: 756238 - protein, 16 aa, Homo sapiens
  CDR3 for beta chain variable domain of TCR clone 378119 (TRBV7-3, TRBJ2-1)
CASSLVSGSSNNEQFF

SEQ ID NO: 756239 - protein, 13 aa, Homo sapiens
  CDR3 for alpha chain variable domain of TCR clone 378120 (TRAV24, TRAJ42)
CAFSTGSQGNLIF

SEQ ID NO: 756240 - protein, 16 aa, Homo sapiens
  CDR3 for beta chain variable domain of TCR clone 378120 (TRBV4-2, TRBJ1-1)
CASSQAGFGMNTEAFF

SEQ ID NO: 756241 - protein, 15 aa, Homo sapiens
  CDR3 for alpha chain variable domain of TCR clone 378121 (TRAV23/DV6, TRAJ18)
CGARYRGSTLGRLYF

SEQ ID NO: 756242 - protein, 13 aa, Homo sapiens
  CDR3 for beta chain variable domain of TCR clone 378121 (TRBV7-2, TRBJ2-7)
CASSSPSGSEQYF

SEQ ID NO: 756243 - protein, 15 aa, Homo sapiens
  CDR3 for alpha chain variable domain of TCR clone 378122 (TRAV21, TRAJ38)
CAVRQDAGNNRKLIW

SEQ ID NO: 756244 - protein, 16 aa, Homo sapiens
  CDR3 for beta chain variable domain of TCR clone 378122 (TRBV4-2, TRBJ1-1)
CASRPLDGGGDTEAFF

SEQ ID NO: 756245 - protein, 17 aa, Homo sapiens
  CDR3 for alpha chain variable domain of TCR clone 378123 (TRAV4, TRAJ18)
CLVGERSGGSTLGRLYF

SEQ ID NO: 756246 - protein, 16 aa, Homo sapiens
  CDR3 for beta chain variable domain of TCR clone 378123 (TRBV4-2, TRBJ1-1)
CASSPSPGRAAPEAFF

SEQ ID NO: 756247 - protein, 14 aa, Homo sapiens
  CDR3 for alpha chain variable domain of TCR clone 378124 (TRAV1-2, TRAJ16)
CAVNRFSDAQKLLF

SEQ ID NO: 756248 - protein, 16 aa, Homo sapiens
  CDR3 for beta chain variable domain of TCR clone 378124 (TRBV19, TRBJ2-3)
CASSPEWDRGTDTQYF

SEQ ID NO: 756249 - protein, 13 aa, Homo sapiens
  CDR3 for alpha chain variable domain of TCR clone 378125 (TRAV12-2, TRAJ50)
CAVIVTSYDKVIF

SEQ ID NO: 756250 - protein, 14 aa, Homo sapiens
  CDR3 for beta chain variable domain of TCR clone 378125 (TRBV19, TRBJ2-5)
CASSMTGQQETQYF

SEQ ID NO: 756251 - protein, 14 aa, Homo sapiens
  CDR3 for alpha chain variable domain of TCR clone 378126 (TRAV8-4, TRAJ13)
CAGTLSGGYQKVTF

SEQ ID NO: 756252 - protein, 16 aa, Homo sapiens
  CDR3 for beta chain variable domain of TCR clone 378126 (TRBV5-7, TRBJ1-4)
CASSPSGGLKTEKLFF

SEQ ID NO: 756253 - protein, 17 aa, Homo sapiens
  CDR3 for alpha chain variable domain of TCR clone 378127 (TRAV2, TRAJ32)
CCLLLWGGGGATNKLIF

SEQ ID NO: 756254 - protein, 13 aa, Homo sapiens
  CDR3 for beta chain variable domain of TCR clone 378127 (TRBV20-1, TRBJ1-1)
CSARGGGDTEAFF

SEQ ID NO: 756255 - protein, 14 aa, Homo sapiens
  CDR3 for alpha chain variable domain of TCR clone 378128 (TRAV13-1, TRAJ40)
CAASMTSGSYKYIF

SEQ ID NO: 756256 - protein, 13 aa, Homo sapiens
  CDR3 for beta chain variable domain of TCR clone 378128 (TRBV4-1, TRBJ2-5)
CASSQEVQENQYF

SEQ ID NO: 756257 - protein, 14 aa, Homo sapiens
  CDR3 for alpha chain variable domain of TCR clone 378129 (TRAV12-3, TRAJ10)
SHLPLTGGGNKLTF

SEQ ID NO: 756258 - protein, 15 aa, Homo sapiens
  CDR3 for beta chain variable domain of TCR clone 378129 (TRBV3-1, TRBJ2-7)
CASSQAPSGSYEQYF

SEQ ID NO: 756259 - protein, 14 aa, Homo sapiens
  CDR3 for alpha chain variable domain of TCR clone 378130 (TRAV1-2, TRAJ16)
CAVNRFSDGQKLLF

SEQ ID NO: 756260 - protein, 15 aa, Homo sapiens
  CDR3 for beta chain variable domain of TCR clone 378130 (TRBV2, TRBJ2-1)
CASDIGLAGEGEQFF

SEQ ID NO: 756261 - protein, 12 aa, Homo sapiens
  CDR3 for alpha chain variable domain of TCR clone 378131 (TRAV17, TRAJ49)
CATVTTGNQFYF

SEQ ID NO: 756262 - protein, 15 aa, Homo sapiens
  CDR3 for beta chain variable domain of TCR clone 378131 (TRBV10-3, TRBJ1-3)
CAISGSQGAGNTIYF

SEQ ID NO: 756263 - protein, 17 aa, Homo sapiens
  CDR3 for alpha chain variable domain of TCR clone 378132 (TRAV23/DV6, TRAJ57)
CAASSTLSQGGYEKLVF

SEQ ID NO: 756264 - protein, 14 aa, Homo sapiens
  CDR3 for beta chain variable domain of TCR clone 378132 (TRBV25-1, TRBJ1-1)
CASTHLGGNTEALF

SEQ ID NO: 756265 - protein, 16 aa, Homo sapiens
  CDR3 for alpha chain variable domain of TCR clone 378133 (TRAV30, TRAJ24)
SGTEIVDADSWGKFQF

SEQ ID NO: 756266 - protein, 14 aa, Homo sapiens
  CDR3 for beta chain variable domain of TCR clone 378133 (TRBV12-5, TRBJ2-5)
CASGSRTHQGTQYF

SEQ ID NO: 756267 - protein, 12 aa, Homo sapiens
  CDR3 for alpha chain variable domain of TCR clone 378134 (TRAV17, TRAJ4)
CATDGGYNKLIF

SEQ ID NO: 756268 - protein, 14 aa, Homo sapiens
  CDR3 for beta chain variable domain of TCR clone 378134 (TRBV7-6, TRBJ2-3)
CASSLGTVTDTQYF

SEQ ID NO: 756269 - protein, 14 aa, Homo sapiens
  CDR3 for alpha chain variable domain of TCR clone 378135 (TRAV12-3, TRAJ15)
CAMIPPQAGTALLF

SEQ ID NO: 756270 - protein, 12 aa, Homo sapiens
  CDR3 for beta chain variable domain of TCR clone 378135 (TRBV11-2, TRBJ2-2)
CASSFGGGELFF

SEQ ID NO: 756271 - protein, 14 aa, Homo sapiens
  CDR3 for alpha chain variable domain of TCR clone 378136 (TRAV4, TRAJ9)
CLVGSGTGGCKTIF

SEQ ID NO: 756272 - protein, 15 aa, Homo sapiens
  CDR3 for beta chain variable domain of TCR clone 378136 (TRBV11-3, TRBJ2-3)
CASLKDGREGDTQYF

SEQ ID NO: 756273 - protein, 14 aa, Homo sapiens
  CDR3 for alpha chain variable domain of TCR clone 378137 (TRAV12-1, TRAJ17)
WVVNFKAAGKKLTF

SEQ ID NO: 756274 - protein, 17 aa, Homo sapiens
  CDR3 for beta chain variable domain of TCR clone 378137 (TRBV20-1, TRBJ2-1)
CSASASGLAGSYNEQFF

SEQ ID NO: 756275 - protein, 15 aa, Homo sapiens
  CDR3 for alpha chain variable domain of TCR clone 378138 (TRAV13-1, TRAJ42)
CAASIAGGSRGNFIF

SEQ ID NO: 756276 - protein, 15 aa, Homo sapiens
  CDR3 for beta chain variable domain of TCR clone 378138 (TRBV19, TRBJ2-1)
CASSIVRGEGREQFF

SEQ ID NO: 756277 - protein, 14 aa, Homo sapiens
  CDR3 for alpha chain variable domain of TCR clone 378139 (TRAV12-3, TRAJ47)
CAMSVREYGNKLVF

SEQ ID NO: 756278 - protein, 15 aa, Homo sapiens
  CDR3 for beta chain variable domain of TCR clone 378139 (TRBV20-1, TRBJ2-2)
CSARDTRLNAGELFF

SEQ ID NO: 756279 - protein, 11 aa, Homo sapiens
  CDR3 for alpha chain variable domain of TCR clone 378140 (TRAV3, TRAJ21)
CAVGNFNKFYF

SEQ ID NO: 756280 - protein, 17 aa, Homo sapiens
  CDR3 for beta chain variable domain of TCR clone 378140 (TRBV4-2, TRBJ1-1)
CASTQFGGGSGNTEAFF

SEQ ID NO: 756281 - protein, 11 aa, Homo sapiens
  CDR3 for alpha chain variable domain of TCR clone 378141 (TRAV12-1, TRAJ30)
CVVNGQDKIIF

SEQ ID NO: 756282 - protein, 12 aa, Homo sapiens
  CDR3 for beta chain variable domain of TCR clone 378141 (TRBV27, TRBJ2-2)
CASKLFTGKLFF

SEQ ID NO: 756283 - protein, 16 aa, Homo sapiens
  CDR3 for alpha chain variable domain of TCR clone 378142 (TRAV23/DV6, TRAJ9)
CAASIGGNTGGFKTIF

SEQ ID NO: 756284 - protein, 17 aa, Homo sapiens
  CDR3 for beta chain variable domain of TCR clone 378142 (TRBV4-1, TRBJ2-7)
CASSRDPLGVRGGEQYF

SEQ ID NO: 756285 - protein, 13 aa, Homo sapiens
  CDR3 for alpha chain variable domain of TCR clone 378143 (TRAV13-1, TRAJ11)
CAASIRGYSTLTF

SEQ ID NO: 756286 - protein, 13 aa, Homo sapiens
  CDR3 for beta chain variable domain of TCR clone 378143 (TRBV7-3, TRBJ1-1)
CASSQDWGAEAFF

SEQ ID NO: 756287 - protein, 11 aa, Homo sapiens
  CDR3 for alpha chain variable domain of TCR clone 378144 (TRAV1-2, TRAJ31)
CAVNNYARLMF

SEQ ID NO: 756288 - protein, 15 aa, Homo sapiens
  CDR3 for beta chain variable domain of TCR clone 378144 (TRBV28, TRBJ2-1)
CASSIIAGGRSEQFF

SEQ ID NO: 756289 - protein, 13 aa, Homo sapiens
  CDR3 for alpha chain variable domain of TCR clone 378145 (TRAV13-1, TRAJ39)
CSKYSNAGNMLTF

SEQ ID NO: 756290 - protein, 11 aa, Homo sapiens
  CDR3 for beta chain variable domain of TCR clone 378145 (TRBV7-8, TRBJ2-5)
CASSPSETQYF

SEQ ID NO: 756291 - protein, 17 aa, Homo sapiens
  CDR3 for alpha chain variable domain of TCR clone 378146 (TRAV3, TRAJ6)
CAVRDGPRVGGSYITSF

SEQ ID NO: 756292 - protein, 12 aa, Homo sapiens
  CDR3 for beta chain variable domain of TCR clone 378146 (TRBV11-2, TRBJ2-2)
CASSLGGGELFF

SEQ ID NO: 756293 - protein, 11 aa, Homo sapiens
  CDR3 for alpha chain variable domain of TCR clone 378147 (TRAV21, TRAJ11)
CAVNGYSTLTF

SEQ ID NO: 756294 - protein, 14 aa, Homo sapiens
  CDR3 for beta chain variable domain of TCR clone 378147 (TRBV7-9, TRBJ2-5)
CASSLAFGQETQYF

SEQ ID NO: 756295 - protein, 12 aa, Homo sapiens
  CDR3 for alpha chain variable domain of TCR clone 378148 (TRAV3, TRAJ43)
CAVRDPNNDMRF

SEQ ID NO: 756296 - protein, 15 aa, Homo sapiens
  CDR3 for beta chain variable domain of TCR clone 378148 (TRBV7-2, TRBJ2-3)
CASSLAGAFIDTQYF

SEQ ID NO: 756297 - protein, 17 aa, Homo sapiens
  CDR3 for alpha chain variable domain of TCR clone 378149 (TRAV21, TRAJ24)
CAGIRLRSTDSWGKLQF

SEQ ID NO: 756298 - protein, 15 aa, Homo sapiens
  CDR3 for beta chain variable domain of TCR clone 378149 (TRBV7-2, TRBJ2-3)
CASSPRRLSTDTQYF

SEQ ID NO: 756299 - protein, 18 aa, Homo sapiens
  CDR3 for alpha chain variable domain of TCR clone 378150 (TRAV21, TRAJ52)
CAVRPSPAGGTSFGKLTF

SEQ ID NO: 756300 - protein, 14 aa, Homo sapiens
  CDR3 for beta chain variable domain of TCR clone 378150 (TRBV28, TRBJ1-1)
CASSPRTRWAEAFF

SEQ ID NO: 756301 - protein, 14 aa, Homo sapiens
  CDR3 for alpha chain variable domain of TCR clone 378151 (TRAV1-2, TRAJ16)
CAVNRFSDGQRLLF

SEQ ID NO: 756302 - protein, 13 aa, Homo sapiens
  CDR3 for beta chain variable domain of TCR clone 378151 (TRBV11-2, TRBJ2-1)
CASSLGLAGGRFF

SEQ ID NO: 756303 - protein, 10 aa, Homo sapiens
  CDR3 for alpha chain variable domain of TCR clone 378152 (TRAV30, TRAJ48)
SGIGNEKLTF

SEQ ID NO: 756304 - protein, 14 aa, Homo sapiens
  CDR3 for beta chain variable domain of TCR clone 378152 (TRBV7-6, TRBJ2-3)
CASSVAGGTDTQYF

SEQ ID NO: 756305 - protein, 14 aa, Homo sapiens
  CDR3 for alpha chain variable domain of TCR clone 378153 (TRAV3, TRAJ36)
CAVSDGTGANNLFF

SEQ ID NO: 756306 - protein, 16 aa, Homo sapiens
  CDR3 for beta chain variable domain of TCR clone 378153 (TRBV7-3, TRBJ2-5)
CVSIQPGGSVQETQYF

SEQ ID NO: 756307 - protein, 14 aa, Homo sapiens
  CDR3 for alpha chain variable domain of TCR clone 378154 (TRAV38-1, TRAJ29)
CAFITPSGNTPLVF

SEQ ID NO: 756308 - protein, 15 aa, Homo sapiens
  CDR3 for beta chain variable domain of TCR clone 378154 (TRBV5-1, TRBJ2-7)
CASSLNGGPAREQYF

SEQ ID NO: 756309 - protein, 14 aa, Homo sapiens
  CDR3 for alpha chain variable domain of TCR clone 378155 (TRAV12-3, TRAJ35)
CAMSLIGFGNVLHC

SEQ ID NO: 756310 - protein, 19 aa, Homo sapiens
  CDR3 for beta chain variable domain of TCR clone 378155 (TRBV7-6, TRBJ2-7)
CASSLAQLAAIPTSSTSGR

SEQ ID NO: 756311 - protein, 16 aa, Homo sapiens
  CDR3 for alpha chain variable domain of TCR clone 378156 (TRAV30, TRAJ24)
CGTEIVDADSWGKFQF

SEQ ID NO: 756312 - protein, 15 aa, Homo sapiens
  CDR3 for beta chain variable domain of TCR clone 378156 (TRBV11-2, TRBJ2-1)
CASSPAGQSLNEQFF

SEQ ID NO: 756313 - protein, 15 aa, Homo sapiens
  CDR3 for alpha chain variable domain of TCR clone 378157 (TRAV17, TRAJ57)
WATDWTPGGSEKLVF

SEQ ID NO: 756314 - protein, 15 aa, Homo sapiens
  CDR3 for beta chain variable domain of TCR clone 378157 (TRBV27, TRBJ2-1)
CASSLAGGPFNEQFF

SEQ ID NO: 756315 - protein, 14 aa, Homo sapiens
  CDR3 for alpha chain variable domain of TCR clone 378158 (TRAV2, TRAJ37)
CAVEDQGNTGKLIF

SEQ ID NO: 756316 - protein, 14 aa, Homo sapiens
  CDR3 for beta chain variable domain of TCR clone 378158 (TRBV18, TRBJ2-1)
CASSPQGRFNEQSV

SEQ ID NO: 756317 - protein, 15 aa, Homo sapiens
  CDR3 for alpha chain variable domain of TCR clone 378159 (TRAV1-2, TRAJ39)
CAVEGVDNAGNMLTS

SEQ ID NO: 756318 - protein, 13 aa, Homo sapiens
  CDR3 for beta chain variable domain of TCR clone 378159 (TRBV27, TRBJ1-6)
CASRWTGYSPLHF

SEQ ID NO: 756319 - protein, 12 aa, Homo sapiens
  CDR3 for alpha chain variable domain of TCR clone 378160 (TRAV1-1, TRAJ30)
CAVRGRDDKIIF

SEQ ID NO: 756320 - protein, 13 aa, Homo sapiens
  CDR3 for beta chain variable domain of TCR clone 378160 (TRBV11-1, TRBJ2-7)
CASSLDKLYEQYF

SEQ ID NO: 756321 - protein, 14 aa, Homo sapiens
  CDR3 for alpha chain variable domain of TCR clone 378161 (TRAV13-2, TRAJ43)
CAEIPTYNNNDMRV

SEQ ID NO: 756322 - protein, 15 aa, Homo sapiens
  CDR3 for beta chain variable domain of TCR clone 378161 (TRBV7-9, TRBJ2-2)
CASGPLDTFPGELFF

SEQ ID NO: 756323 - protein, 16 aa, Homo sapiens
  CDR3 for alpha chain variable domain of TCR clone 378162 (TRAV30, TRAJ24)
CCTEIVDADSWGKFHF

SEQ ID NO: 756324 - protein, 15 aa, Homo sapiens
  CDR3 for beta chain variable domain of TCR clone 378162 (TRBV20-1, TRBJ2-7)
CSARDRVSGMDEQYF

SEQ ID NO: 756325 - protein, 21 aa, Homo sapiens
  CDR3 for alpha chain variable domain of TCR clone 378163 (TRAV12-1, TRAJ37)
CVVNGGLWQHRQTNLWARDNF

SEQ ID NO: 756326 - protein, 12 aa, Homo sapiens
  CDR3 for beta chain variable domain of TCR clone 378163 (TRBV20-1, TRBJ1-2)
CSGPGFNYGYTF

SEQ ID NO: 756327 - protein, 12 aa, Homo sapiens
  CDR3 for alpha chain variable domain of TCR clone 378164 (TRAV1-1, TRAJ39)
CAVPVVCNMLTF

SEQ ID NO: 756328 - protein, 15 aa, Homo sapiens
  CDR3 for beta chain variable domain of TCR clone 378164 (TRBV20-1, TRBJ2-5)
CSAEGTGGLQETQYF

SEQ ID NO: 756329 - protein, 16 aa, Homo sapiens
  CDR3 for alpha chain variable domain of TCR clone 378165 (TRAV3, TRAJ10)
CAVRDMRAGGGNKLTF

SEQ ID NO: 756330 - protein, 14 aa, Homo sapiens
  CDR3 for beta chain variable domain of TCR clone 378165 (TRBV4-1, TRBJ2-2)
CASRRGRASGELFF

SEQ ID NO: 756331 - protein, 16 aa, Homo sapiens
  CDR3 for alpha chain variable domain of TCR clone 378166 (TRAV12-1, TRAJ53)
CVVTSVAGGSNYKLTF

SEQ ID NO: 756332 - protein, 14 aa, Homo sapiens
  CDR3 for beta chain variable domain of TCR clone 378166 (TRBV7-9, TRBJ2-5)
CASSLVGGEETQYF

SEQ ID NO: 756333 - protein, 12 aa, Homo sapiens
  CDR3 for alpha chain variable domain of TCR clone 378167 (TRAV2, TRAJ5)
CALDTGRRALTF

SEQ ID NO: 756334 - protein, 20 aa, Homo sapiens
  CDR3 for beta chain variable domain of TCR clone 378167 (TRBV4-3, TRBJ2-4)
CASSQGRWTGGLRSLNIQYF

SEQ ID NO: 756335 - protein, 17 aa, Homo sapiens
  CDR3 for alpha chain variable domain of TCR clone 378168 (TRAV26-1, TRAJ37)
CIVRVITVSSNTGKLIF

SEQ ID NO: 756336 - protein, 14 aa, Homo sapiens
  CDR3 for beta chain variable domain of TCR clone 378168 (TRBV7-9, TRBJ2-2)
CAGSGLADTGELFF

SEQ ID NO: 756337 - protein, 14 aa, Homo sapiens
  CDR3 for alpha chain variable domain of TCR clone 378169 (TRAV12-1, TRAJ17)
CVVNYKAAGNKLTF

SEQ ID NO: 756338 - protein, 15 aa, Homo sapiens
  CDR3 for beta chain variable domain of TCR clone 378169 (TRBV6-1, TRBJ2-3)
CASSERGGITDTQYF

SEQ ID NO: 756339 - protein, 15 aa, Homo sapiens
  CDR3 for alpha chain variable domain of TCR clone 378170 (TRAV8-3, TRAJ45)
CASTYSGGGADGLTF

SEQ ID NO: 756340 - protein, 16 aa, Homo sapiens
  CDR3 for beta chain variable domain of TCR clone 378170 (TRBV7-9, TRBJ2-2)
CASSGFGGANTGELFF

SEQ ID NO: 756341 - protein, 16 aa, Homo sapiens
  CDR3 for alpha chain variable domain of TCR clone 378171 (TRAV3, TRAJ18)
CAVRDGRGSTLGRLYF

SEQ ID NO: 756342 - protein, 14 aa, Homo sapiens
  CDR3 for beta chain variable domain of TCR clone 378171 (TRBV20-1, TRBJ1-1)
CSAQTRIGGTEAFF

SEQ ID NO: 756343 - protein, 12 aa, Homo sapiens
  CDR3 for alpha chain variable domain of TCR clone 378172 (TRAV8-3, TRAJ20)
CAVGANDYKLSF

SEQ ID NO: 756344 - protein, 15 aa, Homo sapiens
  CDR3 for beta chain variable domain of TCR clone 378172 (TRBV2, TRBJ2-3)
CASSDFEKATDTQYF

SEQ ID NO: 756345 - protein, 16 aa, Homo sapiens
  CDR3 for alpha chain variable domain of TCR clone 378173 (TRAV26-1, TRAJ58)
IASSESGETSGCRLTF

SEQ ID NO: 756346 - protein, 14 aa, Homo sapiens
  CDR3 for beta chain variable domain of TCR clone 378173 (TRBV9, TRBJ2-1)
CASSVDPRGKEQFF

SEQ ID NO: 756347 - protein, 15 aa, Homo sapiens
  CDR3 for alpha chain variable domain of TCR clone 378174 (TRAV16, TRAJ10)
CALEGLTGGGNKLTF

SEQ ID NO: 756348 - protein, 14 aa, Homo sapiens
  CDR3 for beta chain variable domain of TCR clone 378174 (TRBV20-1, TRBJ2-2)
CSAPDTANTGELFF

SEQ ID NO: 756349 - protein, 15 aa, Homo sapiens
  CDR3 for alpha chain variable domain of TCR clone 378175 (TRAV13-1, TRAJ52)
CAATSPRPSYGKLTF

SEQ ID NO: 756350 - protein, 12 aa, Homo sapiens
  CDR3 for beta chain variable domain of TCR clone 378175 (TRBV7-8, TRBJ2-7)
CASSLGDREQYF

SEQ ID NO: 756351 - protein, 12 aa, Homo sapiens
  CDR3 for alpha chain variable domain of TCR clone 378176 (TRAV12-3, TRAJ17)
CAMTLTGNKLTF

SEQ ID NO: 756352 - protein, 19 aa, Homo sapiens
  CDR3 for beta chain variable domain of TCR clone 378176 (TRBV25-1, TRBJ2-2)
CAILVDRVDRGRKSGELFF

SEQ ID NO: 756353 - protein, 15 aa, Homo sapiens
  CDR3 for alpha chain variable domain of TCR clone 378177 (TRAV12-3, TRAJ53)
CNEPGEWRSNYKLPF

SEQ ID NO: 756354 - protein, 11 aa, Homo sapiens
  CDR3 for beta chain variable domain of TCR clone 378177 (TRBV29-1, TRBJ2-5)
CSEDRTGTQYF

SEQ ID NO: 756355 - protein, 13 aa, Homo sapiens
  CDR3 for alpha chain variable domain of TCR clone 378178 (TRAV27, TRAJ41)
CAGEGNSGYALNF

SEQ ID NO: 756356 - protein, 14 aa, Homo sapiens
  CDR3 for beta chain variable domain of TCR clone 378178 (TRBV28, TRBJ2-3)
CASSWRGRADTQYF

SEQ ID NO: 756357 - protein, 15 aa, Homo sapiens
  CDR3 for alpha chain variable domain of TCR clone 378179 (TRAV12-3, TRAJ27)
CAMRAYNTNAGKSTF

SEQ ID NO: 756358 - protein, 14 aa, Homo sapiens
  CDR3 for beta chain variable domain of TCR clone 378179 (TRBV19, TRBJ2-1)
CASSMGSGRRSSSS

SEQ ID NO: 756359 - protein, 11 aa, Homo sapiens
  CDR3 for alpha chain variable domain of TCR clone 378180 (TRAV1-1, TRAJ16)
CAAGDGQKLLF

SEQ ID NO: 756360 - protein, 15 aa, Homo sapiens
  CDR3 for beta chain variable domain of TCR clone 378180 (TRBV28, TRBJ1-2)
CASIPQGSGDYGYTF

SEQ ID NO: 756361 - protein, 14 aa, Homo sapiens
  CDR3 for alpha chain variable domain of TCR clone 378181 (TRAV13-1, TRAJ20)
CAARPGSNDYKLSF

SEQ ID NO: 756362 - protein, 18 aa, Homo sapiens
  CDR3 for beta chain variable domain of TCR clone 378181 (TRBV7-9, TRBJ2-7)
CASSLTTSGSRTWYEQYF

SEQ ID NO: 756363 - protein, 15 aa, Homo sapiens
  CDR3 for alpha chain variable domain of TCR clone 378182 (TRAV13-1, TRAJ16)
CAERYQMARSCSLQG

SEQ ID NO: 756364 - protein, 13 aa, Homo sapiens
  CDR3 for beta chain variable domain of TCR clone 378182 (TRBV4-1, TRBJ2-1)
CASSQAGGDEQFF

SEQ ID NO: 756365 - protein, 13 aa, Homo sapiens
  CDR3 for alpha chain variable domain of TCR clone 378183 (TRAV12-3, TRAJ20)
CAMRRSNDYKLSF

SEQ ID NO: 756366 - protein, 15 aa, Homo sapiens
  CDR3 for beta chain variable domain of TCR clone 378183 (TRBV7-2, TRBJ2-5)
CASSFLRGGEETQYF

SEQ ID NO: 756367 - protein, 14 aa, Homo sapiens
  CDR3 for alpha chain variable domain of TCR clone 378184 (TRAV12-3, TRAJ9)
CAMSPNTGGFKTIF

SEQ ID NO: 756368 - protein, 13 aa, Homo sapiens
  CDR3 for beta chain variable domain of TCR clone 378184 (TRBV12-4, TRBJ1-2)
CASSSGPNYGYTF

SEQ ID NO: 756369 - protein, 12 aa, Homo sapiens
  CDR3 for alpha chain variable domain of TCR clone 378185 (TRAV17, TRAJ30)
CVPERRVDKIIF

SEQ ID NO: 756370 - protein, 14 aa, Homo sapiens
  CDR3 for beta chain variable domain of TCR clone 378185 (TRBV7-7, TRBJ2-2)
CASSRDRSTGELFF

SEQ ID NO: 756371 - protein, 18 aa, Homo sapiens
  CDR3 for alpha chain variable domain of TCR clone 378186 (TRAV21, TRAJ52)
CAVRPSPAGGTSYGKLTF

SEQ ID NO: 756372 - protein, 16 aa, Homo sapiens
  CDR3 for beta chain variable domain of TCR clone 378186 (TRBV18, TRBJ2-2)
CASSRAGPTNTGELFF

SEQ ID NO: 756373 - protein, 11 aa, Homo sapiens
  CDR3 for alpha chain variable domain of TCR clone 378187 (TRAV4, TRAJ28)
CLMGDNRAETL

SEQ ID NO: 756374 - protein, 15 aa, Homo sapiens
  CDR3 for beta chain variable domain of TCR clone 378187 (TRBV20-1, TRBJ2-7)
CSARDRVSGMDEQYF

SEQ ID NO: 756375 - protein, 15 aa, Homo sapiens
  CDR3 for alpha chain variable domain of TCR clone 378188 (TRAV27, TRAJ38)
CAARRNAGNNRKLIW

SEQ ID NO: 756376 - protein, 14 aa, Homo sapiens
  CDR3 for beta chain variable domain of TCR clone 378188 (TRBV7-2, TRBJ2-2)
CASRGQGAAGELFF

SEQ ID NO: 756377 - protein, 18 aa, Homo sapiens
  CDR3 for alpha chain variable domain of TCR clone 378189 (TRAV29/DV5, TRAJ37)
CSVLLCSEGSGNTGKIIF

SEQ ID NO: 756378 - protein, 14 aa, Homo sapiens
  CDR3 for beta chain variable domain of TCR clone 378189 (TRBV5-1, TRBJ1-1)
CASSLAVGSGEAFF

SEQ ID NO: 756379 - protein, 14 aa, Homo sapiens
  CDR3 for alpha chain variable domain of TCR clone 378190 (TRAV9-2, TRAJ39)
CALYIYNAGNMLTF

SEQ ID NO: 756380 - protein, 17 aa, Homo sapiens
  CDR3 for beta chain variable domain of TCR clone 378190 (TRBV28, TRBJ2-5)
CASSTPEGDALQETQFF

SEQ ID NO: 756381 - protein, 14 aa, Homo sapiens
  CDR3 for alpha chain variable domain of TCR clone 378191 (TRAV23/DV6, TRAJ22)
CAASVSGSARQLTF

SEQ ID NO: 756382 - protein, 15 aa, Homo sapiens
  CDR3 for beta chain variable domain of TCR clone 378191 (TRBV28, TRBJ2-5)
CASSSGRTIQETQYF

SEQ ID NO: 756383 - protein, 14 aa, Homo sapiens
  CDR3 for alpha chain variable domain of TCR clone 378192 (TRAV38-1, TRAJ45)
CASHSGGGADGLTF

SEQ ID NO: 756384 - protein, 13 aa, Homo sapiens
  CDR3 for beta chain variable domain of TCR clone 378192 (TRBV10-3, TRBJ1-2)
CAISERNSYGYTF

SEQ ID NO: 756385 - protein, 14 aa, Homo sapiens
  CDR3 for alpha chain variable domain of TCR clone 378193 (TRAV25, TRAJ35)
CARRMEGFGNVLHC

SEQ ID NO: 756386 - protein, 13 aa, Homo sapiens
  CDR3 for beta chain variable domain of TCR clone 378193 (TRBV7-2, TRBJ1-4)
CASSLAGSEKLFF

SEQ ID NO: 756387 - protein, 17 aa, Homo sapiens
  CDR3 for alpha chain variable domain of TCR clone 378194 (TRAV1-2, TRAJ8)
CAVRDPDENTGFQTLVF

SEQ ID NO: 756388 - protein, 16 aa, Homo sapiens
  CDR3 for beta chain variable domain of TCR clone 378194 (TRBV7-9, TRBJ2-2)
CASSGFGGANTGELFF

SEQ ID NO: 756389 - protein, 14 aa, Homo sapiens
  CDR3 for alpha chain variable domain of TCR clone 378195 (TRAV12-2, TRAJ4)
CAEDLSGGYNKLIL

SEQ ID NO: 756390 - protein, 13 aa, Homo sapiens
  CDR3 for beta chain variable domain of TCR clone 378195 (TRBV7-9, TRBJ1-2)
CASSLKQNYGYTV

SEQ ID NO: 756391 - protein, 14 aa, Homo sapiens
  CDR3 for alpha chain variable domain of TCR clone 378196 (TRAV4, TRAJ10)
CLVGDTRGGNKLIF

SEQ ID NO: 756392 - protein, 13 aa, Homo sapiens
  CDR3 for beta chain variable domain of TCR clone 378196 (TRBV10-2, TRBJ2-5)
CASSVGPQETQYF

SEQ ID NO: 756393 - protein, 16 aa, Homo sapiens
  CDR3 for alpha chain variable domain of TCR clone 378197 (TRAV30, TRAJ24)
CGTEIVDADSWGKFQF

SEQ ID NO: 756394 - protein, 16 aa, Homo sapiens
  CDR3 for beta chain variable domain of TCR clone 378197 (TRBV4-2, TRBJ2-7)
CASSQEGLANSYEQYF

SEQ ID NO: 756395 - protein, 15 aa, Homo sapiens
  CDR3 for alpha chain variable domain of TCR clone 378198 (TRAV16, TRAJ16)
CALPGGGPDGQKLLF

SEQ ID NO: 756396 - protein, 13 aa, Homo sapiens
  CDR3 for beta chain variable domain of TCR clone 378198 (TRBV12-5, TRBJ2-3)
CASGDRQSDTQYF

SEQ ID NO: 756397 - protein, 13 aa, Homo sapiens
  CDR3 for alpha chain variable domain of TCR clone 378199 (TRAV12-1, TRAJ40)
CVVPTSGTYKYIF

SEQ ID NO: 756398 - protein, 16 aa, Homo sapiens
  CDR3 for beta chain variable domain of TCR clone 378199 (TRBV7-9, TRBJ1-2)
CASSLGVSSGEDGYTF

SEQ ID NO: 756399 - protein, 16 aa, Homo sapiens
  CDR3 for alpha chain variable domain of TCR clone 378200 (TRAV26-1, TRAJ23)
CIVRVHPYNQGGKLIF

SEQ ID NO: 756400 - protein, 14 aa, Homo sapiens
  CDR3 for beta chain variable domain of TCR clone 378200 (TRBV19, TRBJ2-1)
CASEVTGARNEQFF

SEQ ID NO: 756401 - protein, 18 aa, Homo sapiens
  CDR3 for alpha chain variable domain of TCR clone 378201 (TRAV21, TRAJ52)
CAVRPSPAGGTSYGKLTF

SEQ ID NO: 756402 - protein, 12 aa, Homo sapiens
  CDR3 for beta chain variable domain of TCR clone 378201 (TRBV5-1, TRBJ2-7)
CASSFRGYEQYF

SEQ ID NO: 756403 - protein, 13 aa, Homo sapiens
  CDR3 for alpha chain variable domain of TCR clone 378202 (TRAV26-2, TRAJ54)
CIPRVGGAPKLVF

SEQ ID NO: 756404 - protein, 16 aa, Homo sapiens
  CDR3 for beta chain variable domain of TCR clone 378202 (TRBV4-1, TRBJ1-1)
CASSSMSERPNTEAFF

SEQ ID NO: 756405 - protein, 14 aa, Homo sapiens
  CDR3 for alpha chain variable domain of TCR clone 378203 (TRAV20, TRAJ16)
CAVQENSDGQKPLF

SEQ ID NO: 756406 - protein, 13 aa, Homo sapiens
  CDR3 for beta chain variable domain of TCR clone 378203 (TRBV27, TRBJ2-3)
CASSSLPGDTQYF

SEQ ID NO: 756407 - protein, 13 aa, Homo sapiens
  CDR3 for alpha chain variable domain of TCR clone 378204 (TRAV26-1, TRAJ48)
CIVRVVGDEKLTF

SEQ ID NO: 756408 - protein, 16 aa, Homo sapiens
  CDR3 for beta chain variable domain of TCR clone 378204 (TRBV29-1, TRBJ2-7)
CSVEVVGTSGSYEQYF

SEQ ID NO: 756409 - protein, 10 aa, Homo sapiens
  CDR3 for alpha chain variable domain of TCR clone 378205 (TRAV8-4, TRAJ43)
GAVSADDMRF

SEQ ID NO: 756410 - protein, 11 aa, Homo sapiens
  CDR3 for beta chain variable domain of TCR clone 378205 (TRBV12-4, TRBJ2-3)
CASTATDTQYF

SEQ ID NO: 756411 - protein, 12 aa, Homo sapiens
  CDR3 for alpha chain variable domain of TCR clone 378206 (TRAV13-1, TRAJ16)
CAAVSDGQKLLF

SEQ ID NO: 756412 - protein, 16 aa, Homo sapiens
  CDR3 for beta chain variable domain of TCR clone 378206 (TRBV7-2, TRBJ2-1)
CASSLLAGAGYNEQFF

SEQ ID NO: 756413 - protein, 14 aa, Homo sapiens
  CDR3 for alpha chain variable domain of TCR clone 378207 (TRAV12-2, TRAJ41)
CAVNRANSGYALNF

SEQ ID NO: 756414 - protein, 14 aa, Homo sapiens
  CDR3 for beta chain variable domain of TCR clone 378207 (TRBV2, TRBJ1-5)
CASSENRGGQPQHF

SEQ ID NO: 756415 - protein, 13 aa, Homo sapiens
  CDR3 for alpha chain variable domain of TCR clone 378208 (TRAV23/DV6, TRAJ21)
CAARREQLQQILL

SEQ ID NO: 756416 - protein, 16 aa, Homo sapiens
  CDR3 for beta chain variable domain of TCR clone 378208 (TRBV20-1, TRBJ2-3)
CSAVRDRGPIADTQYF

SEQ ID NO: 756417 - protein, 13 aa, Homo sapiens
  CDR3 for alpha chain variable domain of TCR clone 378209 (TRAV21, TRAJ27)
CAARPGNAGKSTF

SEQ ID NO: 756418 - protein, 14 aa, Homo sapiens
  CDR3 for beta chain variable domain of TCR clone 378209 (TRBV7-2, TRBJ1-5)
CASSTQGAGQPQHF

SEQ ID NO: 756419 - protein, 14 aa, Homo sapiens
  CDR3 for alpha chain variable domain of TCR clone 378210 (TRAV12-3, TRAJ57)
CAMSAWGGPEKLVF

SEQ ID NO: 756420 - protein, 14 aa, Homo sapiens
  CDR3 for beta chain variable domain of TCR clone 378210 (TRBV18, TRBJ2-5)
CASSPGVSQETQYF

SEQ ID NO: 756421 - protein, 11 aa, Homo sapiens
  CDR3 for alpha chain variable domain of TCR clone 378211 (TRAV2, TRAJ20)
CAVINDYKLSF

SEQ ID NO: 756422 - protein, 16 aa, Homo sapiens
  CDR3 for beta chain variable domain of TCR clone 378211 (TRBV11-1, TRBJ2-2)
CASSAEGLKNTGELFF

SEQ ID NO: 756423 - protein, 18 aa, Homo sapiens
  CDR3 for alpha chain variable domain of TCR clone 378212 (TRAV21, TRAJ52)
CTVRPSPAGGTSYGKLTF

SEQ ID NO: 756424 - protein, 14 aa, Homo sapiens
  CDR3 for beta chain variable domain of TCR clone 378212 (TRBV28, TRBJ1-1)
CASSPRTRWAEAFF

SEQ ID NO: 756425 - protein, 12 aa, Homo sapiens
  CDR3 for alpha chain variable domain of TCR clone 378213 (TRAV22, TRAJ29)
CAPPSGNTPLVF

SEQ ID NO: 756426 - protein, 14 aa, Homo sapiens
  CDR3 for beta chain variable domain of TCR clone 378213 (TRBV11-2, TRBJ2-7)
CASSLGAGAYEQYL

SEQ ID NO: 756427 - protein, 14 aa, Homo sapiens
  CDR3 for alpha chain variable domain of TCR clone 378214 (TRAV12-2, TRAJ4)
CSEDLSGGYNKLIF

SEQ ID NO: 756428 - protein, 13 aa, Homo sapiens
  CDR3 for beta chain variable domain of TCR clone 378214 (TRBV7-9, TRBJ1-2)
CASSLKQNYGYTF

SEQ ID NO: 756429 - protein, 15 aa, Homo sapiens
  CDR3 for alpha chain variable domain of TCR clone 378215 (TRAV1-1, TRAJ37)
CAVLDGSGNTGKLIF

SEQ ID NO: 756430 - protein, 14 aa, Homo sapiens
  CDR3 for beta chain variable domain of TCR clone 378215 (TRBV7-8, TRBJ2-3)
CASSIEAGTDTQYF

SEQ ID NO: 756431 - protein, 14 aa, Homo sapiens
  CDR3 for alpha chain variable domain of TCR clone 378216 (TRAV12-2, TRAJ13)
CAVKKTGGDQKVTF

SEQ ID NO: 756432 - protein, 13 aa, Homo sapiens
  CDR3 for beta chain variable domain of TCR clone 378216 (TRBV20-1, TRBJ2-3)
CSARLAGTDTQYF

SEQ ID NO: 756433 - protein, 14 aa, Homo sapiens
  CDR3 for alpha chain variable domain of TCR clone 378217 (TRAV8-4, TRAJ13)
CSVTLSGGYQKVTF

SEQ ID NO: 756434 - protein, 14 aa, Homo sapiens
  CDR3 for beta chain variable domain of TCR clone 378217 (TRBV7-2, TRBJ1-2)
RASSQTGSTYGCTF

SEQ ID NO: 756435 - protein, 13 aa, Homo sapiens
  CDR3 for alpha chain variable domain of TCR clone 378218 (TRAV38-1, TRAJ42)
CARWGGSQGNLIF

SEQ ID NO: 756436 - protein, 17 aa, Homo sapiens
  CDR3 for beta chain variable domain of TCR clone 378218 (TRBV20-1, TRBJ2-1)
CIARDPLAGVWDNEQLF

SEQ ID NO: 756437 - protein, 15 aa, Homo sapiens
  CDR3 for alpha chain variable domain of TCR clone 378219 (TRAV25, TRAJ52)
CAGRPGGTSYGKLTF

SEQ ID NO: 756438 - protein, 17 aa, Homo sapiens
  CDR3 for beta chain variable domain of TCR clone 378219 (TRBV7-8, TRBJ2-6)
CASSAGTGGAGANDLTL

SEQ ID NO: 756439 - protein, 13 aa, Homo sapiens
  CDR3 for alpha chain variable domain of TCR clone 378220 (TRAV20, TRAJ34)
CAVRSYNTDKLIF

SEQ ID NO: 756440 - protein, 20 aa, Homo sapiens
  CDR3 for beta chain variable domain of TCR clone 378220 (TRBV7-8, TRBJ2-2)
CASSHLFPGPTIHITGELFF

SEQ ID NO: 756441 - protein, 18 aa, Homo sapiens
  CDR3 for alpha chain variable domain of TCR clone 378221 (TRAV21, TRAJ52)
CAVRPSPTGGTSFGKLTF

SEQ ID NO: 756442 - protein, 17 aa, Homo sapiens
  CDR3 for beta chain variable domain of TCR clone 378221 (TRBV13, TRBJ2-3)
CASSLSRVAGGRNTQYF

SEQ ID NO: 756443 - protein, 13 aa, Homo sapiens
  CDR3 for alpha chain variable domain of TCR clone 378222 (TRAV16, TRAJ33)
SLSAMDSNYQLIW

SEQ ID NO: 756444 - protein, 12 aa, Homo sapiens
  CDR3 for beta chain variable domain of TCR clone 378222 (TRBV28, TRBJ2-6)
CAIQAGANVLTF

SEQ ID NO: 756445 - protein, 16 aa, Homo sapiens
  CDR3 for alpha chain variable domain of TCR clone 378223 (TRAV30, TRAJ24)
CGTEIVDADSWGKFQF

SEQ ID NO: 756446 - protein, 13 aa, Homo sapiens
  CDR3 for beta chain variable domain of TCR clone 378223 (TRBV25-1, TRBJ2-5)
CASSESGRETQYF

SEQ ID NO: 756447 - protein, 13 aa, Homo sapiens
  CDR3 for alpha chain variable domain of TCR clone 378224 (TRAV1-2, TRAJ9)
CAALNTGGFKTTF

SEQ ID NO: 756448 - protein, 13 aa, Homo sapiens
  CDR3 for beta chain variable domain of TCR clone 378224 (TRBV19, TRBJ1-2)
CDSSVPGQDGYTF

SEQ ID NO: 756449 - protein, 13 aa, Homo sapiens
  CDR3 for alpha chain variable domain of TCR clone 378225 (TRAV38-1, TRAJ57)
CALVQGGSEKLVF

SEQ ID NO: 756450 - protein, 17 aa, Homo sapiens
  CDR3 for beta chain variable domain of TCR clone 378225 (TRBV29-1, TRBJ2-3)
CSVDPPPRGARTDTQYF

SEQ ID NO: 756451 - protein, 16 aa, Homo sapiens
  CDR3 for alpha chain variable domain of TCR clone 378226 (TRAV30, TRAJ24)
CGTEIVDADSWGKFQF

SEQ ID NO: 756452 - protein, 17 aa, Homo sapiens
  CDR3 for beta chain variable domain of TCR clone 378226 (TRBV20-1, TRBJ2-1)
CGARDRRRASSYNEQFF

SEQ ID NO: 756453 - protein, 15 aa, Homo sapiens
  CDR3 for alpha chain variable domain of TCR clone 378227 (TRAV26-1, TRAJ29)
CIARVEGSGNTPLVL

SEQ ID NO: 756454 - protein, 15 aa, Homo sapiens
  CDR3 for beta chain variable domain of TCR clone 378227 (TRBV7-9, TRBJ1-5)
CASSQGHQPNQPQHF

SEQ ID NO: 756455 - protein, 15 aa, Homo sapiens
  CDR3 for alpha chain variable domain of TCR clone 378228 (TRAV3, TRAJ22)
CAVRDRGGSARQLTI

SEQ ID NO: 756456 - protein, 14 aa, Homo sapiens
  CDR3 for beta chain variable domain of TCR clone 378228 (TRBV20-1, TRBJ2-5)
CSALVPGYQETQYF

SEQ ID NO: 756457 - protein, 11 aa, Homo sapiens
  CDR3 for alpha chain variable domain of TCR clone 378229 (TRAV13-1, TRAJ22)
CAASSARQLTF

SEQ ID NO: 756458 - protein, 13 aa, Homo sapiens
  CDR3 for beta chain variable domain of TCR clone 378229 (TRBV27, TRBJ1-1)
CASSLSIGAEAFF

SEQ ID NO: 756459 - protein, 14 aa, Homo sapiens
  CDR3 for alpha chain variable domain of TCR clone 378230 (TRAV12-2, TRAJ6)
CASKWGAGSYIPTF

SEQ ID NO: 756460 - protein, 17 aa, Homo sapiens
  CDR3 for beta chain variable domain of TCR clone 378230 (TRBV4-1, TRBJ1-4)
CASSQEGPRGVEEKLFF

SEQ ID NO: 756461 - protein, 14 aa, Homo sapiens
  CDR3 for alpha chain variable domain of TCR clone 378231 (TRAV38-2/DV8, TRAJ29)
CAYRSRSGNTPLVF

SEQ ID NO: 756462 - protein, 15 aa, Homo sapiens
  CDR3 for beta chain variable domain of TCR clone 378231 (TRBV27, TRBJ2-1)
CASSNGGGSSNEQFF

SEQ ID NO: 756463 - protein, 15 aa, Homo sapiens
  CDR3 for alpha chain variable domain of TCR clone 378232 (TRAV38-2/DV8, TRAJ45)
CAYWDSGGGADGLTF

SEQ ID NO: 756464 - protein, 13 aa, Homo sapiens
  CDR3 for beta chain variable domain of TCR clone 378232 (TRBV20-1, TRBJ1-6)
CSAPLGVGSPLHF

SEQ ID NO: 756465 - protein, 15 aa, Homo sapiens
  CDR3 for alpha chain variable domain of TCR clone 378233 (TRAV21, TRAJ45)
CAVSYSGGGADGLTF

SEQ ID NO: 756466 - protein, 12 aa, Homo sapiens
  CDR3 for beta chain variable domain of TCR clone 378233 (TRBV12-4, TRBJ2-7)
CASSLGGYEQYF

SEQ ID NO: 756467 - protein, 14 aa, Homo sapiens
  CDR3 for alpha chain variable domain of TCR clone 378234 (TRAV34, TRAJ22)
CGADTSGSARQLTF

SEQ ID NO: 756468 - protein, 15 aa, Homo sapiens
  CDR3 for beta chain variable domain of TCR clone 378234 (TRBV5-1, TRBJ1-1)
CASSWTGRGNTEAFF

SEQ ID NO: 756469 - protein, 10 aa, Homo sapiens
  CDR3 for alpha chain variable domain of TCR clone 378235 (TRAV21, TRAJ31)
CAVDNARLMF

SEQ ID NO: 756470 - protein, 15 aa, Homo sapiens
  CDR3 for beta chain variable domain of TCR clone 378235 (TRBV7-6, TRBJ1-5)
CASSQSSGINQPQHF

SEQ ID NO: 756471 - protein, 14 aa, Homo sapiens
  CDR3 for alpha chain variable domain of TCR clone 378236 (TRAV12-3, TRAJ57)
CARALEGGSEKLVF

SEQ ID NO: 756472 - protein, 17 aa, Homo sapiens
  CDR3 for beta chain variable domain of TCR clone 378236 (TRBV11-3, TRBJ2-3)
CASSLGLRGGGTDTQYF

SEQ ID NO: 756473 - protein, 15 aa, Homo sapiens
  CDR3 for alpha chain variable domain of TCR clone 378237 (TRAV20, TRAJ23)
CAVQAVRNQGGKLIF

SEQ ID NO: 756474 - protein, 14 aa, Homo sapiens
  CDR3 for beta chain variable domain of TCR clone 378237 (TRBV20-1, TRBJ2-5)
CSARDGRAGETQYF

SEQ ID NO: 756475 - protein, 11 aa, Homo sapiens
  CDR3 for alpha chain variable domain of TCR clone 378238 (TRAV2, TRAJ20)
CAVLNDYQLSF

SEQ ID NO: 756476 - protein, 16 aa, Homo sapiens
  CDR3 for beta chain variable domain of TCR clone 378238 (TRBV11-1, TRBJ2-2)
CASSAEGLKNTGELFF

SEQ ID NO: 756477 - protein, 14 aa, Homo sapiens
  CDR3 for alpha chain variable domain of TCR clone 378239 (TRAV23/DV6, TRAJ5)
CAAKRPAGRRDLTF

SEQ ID NO: 756478 - protein, 15 aa, Homo sapiens
  CDR3 for beta chain variable domain of TCR clone 378239 (TRBV27, TRBJ1-5)
CASSSSGTGNQPQHF

SEQ ID NO: 756479 - protein, 14 aa, Homo sapiens
  CDR3 for alpha chain variable domain of TCR clone 378240 (TRAV21, TRAJ32)
CCGDYVGATTKLIF

SEQ ID NO: 756480 - protein, 13 aa, Homo sapiens
  CDR3 for beta chain variable domain of TCR clone 378240 (TRBV2, TRBJ1-6)
CASGRGGISPLHF

SEQ ID NO: 756481 - protein, 15 aa, Homo sapiens
  CDR3 for alpha chain variable domain of TCR clone 378241 (TRAV2, TRAJ9)
CAVVDRGTGGFKTIF

SEQ ID NO: 756482 - protein, 14 aa, Homo sapiens
  CDR3 for beta chain variable domain of TCR clone 378241 (TRBV4-1, TRBJ2-2)
CASSQAVNTGELFF

SEQ ID NO: 756483 - protein, 14 aa, Homo sapiens
  CDR3 for alpha chain variable domain of TCR clone 378242 (TRAV26-2, TRAJ32)
CCVGYGGSTNKLIF

SEQ ID NO: 756484 - protein, 15 aa, Homo sapiens
  CDR3 for beta chain variable domain of TCR clone 378242 (TRBV27, TRBJ2-5)
CASSLYPRGGETQYF

SEQ ID NO: 756485 - protein, 18 aa, Homo sapiens
  CDR3 for alpha chain variable domain of TCR clone 378243 (TRAV26-1, TRAJ23)
CIVRVGLEVWNQGGKLIF

SEQ ID NO: 756486 - protein, 16 aa, Homo sapiens
  CDR3 for beta chain variable domain of TCR clone 378243 (TRBV12-4, TRBJ2-5)
CASSFFVRGGQETQYF

SEQ ID NO: 756487 - protein, 13 aa, Homo sapiens
  CDR3 for alpha chain variable domain of TCR clone 378244 (TRAV27, TRAJ42)
CAGARGSQGNLIF

SEQ ID NO: 756488 - protein, 14 aa, Homo sapiens
  CDR3 for beta chain variable domain of TCR clone 378244 (TRBV10-3, TRBJ2-2)
CHQNRQGGHRGAVF

SEQ ID NO: 756489 - protein, 17 aa, Homo sapiens
  CDR3 for alpha chain variable domain of TCR clone 378245 (TRAV23/DV6, TRAJ12)
CAPIDLGAMDSSYKLIF

SEQ ID NO: 756490 - protein, 15 aa, Homo sapiens
  CDR3 for beta chain variable domain of TCR clone 378245 (TRBV12-4, TRBJ2-5)
CASTLNSGRGETQYF

SEQ ID NO: 756491 - protein, 10 aa, Homo sapiens
  CDR3 for alpha chain variable domain of TCR clone 378246 (TRAV30, TRAJ48)
CGTGNEKLTF

SEQ ID NO: 756492 - protein, 16 aa, Homo sapiens
  CDR3 for beta chain variable domain of TCR clone 378246 (TRBV19, TRBJ2-2)
CASRSPGTGATGELFF

SEQ ID NO: 756493 - protein, 13 aa, Homo sapiens
  CDR3 for alpha chain variable domain of TCR clone 378247 (TRAV26-1, TRAJ35)
CIVSRRVGEMLHC

SEQ ID NO: 756494 - protein, 17 aa, Homo sapiens
  CDR3 for beta chain variable domain of TCR clone 378247 (TRBV7-9, TRBJ2-7)
CASSFDGSHGGAYEQYF

SEQ ID NO: 756495 - protein, 13 aa, Homo sapiens
  CDR3 for alpha chain variable domain of TCR clone 378248 (TRAV27, TRAJ54)
CAGAGQGAQKLVF

SEQ ID NO: 756496 - protein, 15 aa, Homo sapiens
  CDR3 for beta chain variable domain of TCR clone 378248 (TRBV18, TRBJ2-6)
CASSPSYAGVNVLTF

SEQ ID NO: 756497 - protein, 15 aa, Homo sapiens
  CDR3 for alpha chain variable domain of TCR clone 378249 (TRAV26-2, TRAJ45)
CILRDRVDQEEVLTG

SEQ ID NO: 756498 - protein, 15 aa, Homo sapiens
  CDR3 for beta chain variable domain of TCR clone 378249 (TRBV7-6, TRBJ2-5)
CASSKPTGPQETQYF

SEQ ID NO: 756499 - protein, 14 aa, Homo sapiens
  CDR3 for alpha chain variable domain of TCR clone 378250 (TRAV1-2, TRAJ8)
WAVREDTGFQKLVF

SEQ ID NO: 756500 - protein, 13 aa, Homo sapiens
  CDR3 for beta chain variable domain of TCR clone 378250 (TRBV15, TRBJ2-7)
CATSTTGHYEQYF

SEQ ID NO: 756501 - protein, 15 aa, Homo sapiens
  CDR3 for alpha chain variable domain of TCR clone 378251 (TRAV12-3, TRAJ18)
CAMSAEAQPWRGYTL

SEQ ID NO: 756502 - protein, 13 aa, Homo sapiens
  CDR3 for beta chain variable domain of TCR clone 378251 (TRBV15, TRBJ1-6)
CSTSGGLNSPLHF

SEQ ID NO: 756503 - protein, 15 aa, Homo sapiens
  CDR3 for alpha chain variable domain of TCR clone 378252 (TRAV21, TRAJ24)
CAARSSTDSWGKLQF

SEQ ID NO: 756504 - protein, 13 aa, Homo sapiens
  CDR3 for beta chain variable domain of TCR clone 378252 (TRBV19, TRBJ2-1)
CASSPRASLEQFF

SEQ ID NO: 756505 - protein, 15 aa, Homo sapiens
  CDR3 for alpha chain variable domain of TCR clone 378253 (TRAV27, TRAJ38)
CAGRFNAGNNRKPIL

SEQ ID NO: 756506 - protein, 13 aa, Homo sapiens
  CDR3 for beta chain variable domain of TCR clone 378253 (TRBV12-5, TRBJ2-3)
CASQNRGIDTQYF

SEQ ID NO: 756507 - protein, 12 aa, Homo sapiens
  CDR3 for alpha chain variable domain of TCR clone 378254 (TRAV12-2, TRAJ21)
CAVRYNFNKFYF

SEQ ID NO: 756508 - protein, 14 aa, Homo sapiens
  CDR3 for beta chain variable domain of TCR clone 378254 (TRBV28, TRBJ2-1)
CASSYYTAYNGQLF

SEQ ID NO: 756509 - protein, 14 aa, Homo sapiens
  CDR3 for alpha chain variable domain of TCR clone 378255 (TRAV8-3, TRAJ4)
SAVGAAGGYNKLIF

SEQ ID NO: 756510 - protein, 15 aa, Homo sapiens
  CDR3 for beta chain variable domain of TCR clone 378255 (TRBV6-3, TRBJ2-7)
CASSSPGTVFYEQYF

SEQ ID NO: 756511 - protein, 12 aa, Homo sapiens
  CDR3 for alpha chain variable domain of TCR clone 378256 (TRAV30, TRAJ20)
CGTESNDYKLSF

SEQ ID NO: 756512 - protein, 15 aa, Homo sapiens
  CDR3 for beta chain variable domain of TCR clone 378256 (TRBV20-1, TRBJ2-7)
CSARDRVSGTDEQYF

SEQ ID NO: 756513 - protein, 16 aa, Homo sapiens
  CDR3 for alpha chain variable domain of TCR clone 378257 (TRAV16, TRAJ4)
FALSRMFSGGYNKLIF

SEQ ID NO: 756514 - protein, 19 aa, Homo sapiens
  CDR3 for beta chain variable domain of TCR clone 378257 (TRBV28, TRBJ2-7)
CASSYSGTSRLGWVYEQYF

SEQ ID NO: 756515 - protein, 12 aa, Homo sapiens
  CDR3 for alpha chain variable domain of TCR clone 378258 (TRAV1-1, TRAJ39)
CAVPVVGNMFTF

SEQ ID NO: 756516 - protein, 17 aa, Homo sapiens
  CDR3 for beta chain variable domain of TCR clone 378258 (TRBV28, TRBJ2-5)
CASSTPEGDALQETQYF

SEQ ID NO: 756517 - protein, 15 aa, Homo sapiens
  CDR3 for alpha chain variable domain of TCR clone 378259 (TRAV26-1, TRAJ38)
CIVRAEGGNDRKLIW

SEQ ID NO: 756518 - protein, 14 aa, Homo sapiens
  CDR3 for beta chain variable domain of TCR clone 378259 (TRBV7-6, TRBJ2-5)
CASSSPSGSETQYF

SEQ ID NO: 756519 - protein, 15 aa, Homo sapiens
  CDR3 for alpha chain variable domain of TCR clone 378260 (TRAV21, TRAJ40)
CAVKPQTSGTYKYIF

SEQ ID NO: 756520 - protein, 13 aa, Homo sapiens
  CDR3 for beta chain variable domain of TCR clone 378260 (TRBV7-2, TRBJ2-2)
CASSSVRAGELFF

SEQ ID NO: 756521 - protein, 15 aa, Homo sapiens
  CDR3 for alpha chain variable domain of TCR clone 378261 (TRAV13-1, TRAJ45)
CAASGSGGGADGLAF

SEQ ID NO: 756522 - protein, 14 aa, Homo sapiens
  CDR3 for beta chain variable domain of TCR clone 378261 (TRBV12-4, TRBJ1-2)
CASSFVGTAYGYTF

SEQ ID NO: 756523 - protein, 14 aa, Homo sapiens
  CDR3 for alpha chain variable domain of TCR clone 378262 (TRAV8-4, TRAJ9)
CAVRINTGGFKTIF

SEQ ID NO: 756524 - protein, 16 aa, Homo sapiens
  CDR3 for beta chain variable domain of TCR clone 378262 (TRBV19, TRBJ2-2)
CASRSPGTGASGELFF

SEQ ID NO: 756525 - protein, 16 aa, Homo sapiens
  CDR3 for alpha chain variable domain of TCR clone 378263 (TRAV21, TRAJ33)
CAVSPASMDSNYQLIW

SEQ ID NO: 756526 - protein, 19 aa, Homo sapiens
  CDR3 for beta chain variable domain of TCR clone 378263 (TRBV2, TRBJ1-4)
CASSKRELTQGRKNCFLAV

SEQ ID NO: 756527 - protein, 11 aa, Homo sapiens
  CDR3 for alpha chain variable domain of TCR clone 378264 (TRAV17, TRAJ36)
CVPTGANNLFF

SEQ ID NO: 756528 - protein, 12 aa, Homo sapiens
  CDR3 for beta chain variable domain of TCR clone 378264 (TRBV29-1, TRBJ2-3)
CSVTGGADTQYF

SEQ ID NO: 756529 - protein, 19 aa, Homo sapiens
  CDR3 for alpha chain variable domain of TCR clone 378265 (TRAV3, TRAJ6)
CAVRDRNPSRSGGSYIPTF

SEQ ID NO: 756530 - protein, 15 aa, Homo sapiens
  CDR3 for beta chain variable domain of TCR clone 378265 (TRBV18, TRBJ2-7)
CPSSPTFMDSYEQYF

SEQ ID NO: 756531 - protein, 12 aa, Homo sapiens
  CDR3 for alpha chain variable domain of TCR clone 378266 (TRAV12-3, TRAJ17)
CAMTLTGNKLTF

SEQ ID NO: 756532 - protein, 15 aa, Homo sapiens
  CDR3 for beta chain variable domain of TCR clone 378266 (TRBV20-1, TRBJ2-7)
CSDSDRVSGMDEQYF

SEQ ID NO: 756533 - protein, 14 aa, Homo sapiens
  CDR3 for alpha chain variable domain of TCR clone 378267 (TRAV26-1, TRAJ45)
CIEVTGGGADGLTF

SEQ ID NO: 756534 - protein, 11 aa, Homo sapiens
  CDR3 for beta chain variable domain of TCR clone 378267 (TRBV19, TRBJ2-1)
CASRRRYEQFF

SEQ ID NO: 756535 - protein, 14 aa, Homo sapiens
  CDR3 for alpha chain variable domain of TCR clone 378268 (TRAV12-3, TRAJ10)
SHLPLTGGGNKLTF

SEQ ID NO: 756536 - protein, 11 aa, Homo sapiens
  CDR3 for beta chain variable domain of TCR clone 378268 (TRBV19, TRBJ2-2)
CASRYSGELFF

SEQ ID NO: 756537 - protein, 18 aa, Homo sapiens
  CDR3 for alpha chain variable domain of TCR clone 378269 (TRAV21, TRAJ52)
CAVMPSPAGGTSYGKLTF

SEQ ID NO: 756538 - protein, 17 aa, Homo sapiens
  CDR3 for beta chain variable domain of TCR clone 378269 (TRBV13, TRBJ2-3)
GASSLSRVAGGRNTQYF

SEQ ID NO: 756539 - protein, 16 aa, Homo sapiens
  CDR3 for alpha chain variable domain of TCR clone 378270 (TRAV30, TRAJ24)
CGTEIVDADSWEKFQF

SEQ ID NO: 756540 - protein, 16 aa, Homo sapiens
  CDR3 for beta chain variable domain of TCR clone 378270 (TRBV7-3, TRBJ2-2)
CASSLKRGTLSGELFF

SEQ ID NO: 756541 - protein, 13 aa, Homo sapiens
  CDR3 for alpha chain variable domain of TCR clone 378271 (TRAV17, TRAJ26)
CATVDNYGQNFVF

SEQ ID NO: 756542 - protein, 13 aa, Homo sapiens
  CDR3 for beta chain variable domain of TCR clone 378271 (TRBV11-2, TRBJ2-5)
CASSSTGEETQYF

SEQ ID NO: 756543 - protein, 16 aa, Homo sapiens
  CDR3 for alpha chain variable domain of TCR clone 378272 (TRAV3, TRAJ10)
CAVRDMGGGGGNKLTF

SEQ ID NO: 756544 - protein, 20 aa, Homo sapiens
  CDR3 for beta chain variable domain of TCR clone 378272 (TRBV11-3, TRBJ2-7)
CASSQRTSGSLRAVLRAGHQ

SEQ ID NO: 756545 - protein, 15 aa, Homo sapiens
  CDR3 for alpha chain variable domain of TCR clone 378273 (TRAV10, TRAJ6)
CVVSGGSGGSYIPTF

SEQ ID NO: 756546 - protein, 15 aa, Homo sapiens
  CDR3 for beta chain variable domain of TCR clone 378273 (TRBV11-3, TRBJ2-3)
CASLKDGREGDTQYF

SEQ ID NO: 756547 - protein, 15 aa, Homo sapiens
  CDR3 for alpha chain variable domain of TCR clone 378274 (TRAV35, TRAJ40)
CAGQLGTSGIYKYIF

SEQ ID NO: 756548 - protein, 14 aa, Homo sapiens
  CDR3 for beta chain variable domain of TCR clone 378274 (TRBV7-3, TRBJ2-1)
CASSLAGGTNEQFF

SEQ ID NO: 756549 - protein, 12 aa, Homo sapiens
  CDR3 for alpha chain variable domain of TCR clone 378275 (TRAV3, TRAJ7)
CADLLWEQQTRF

SEQ ID NO: 756550 - protein, 21 aa, Homo sapiens
  CDR3 for beta chain variable domain of TCR clone 378275 (TRBV7-3, TRBJ2-5)
GGTQPCISVPAASGGGETQYF

SEQ ID NO: 756551 - protein, 12 aa, Homo sapiens
  CDR3 for alpha chain variable domain of TCR clone 378276 (TRAV21, TRAJ33)
CAKMDSNYQLIG

SEQ ID NO: 756552 - protein, 17 aa, Homo sapiens
  CDR3 for beta chain variable domain of TCR clone 378276 (TRBV20-1, TRBJ2-2)
CSASGSGQGGLTGELFF

SEQ ID NO: 756553 - protein, 19 aa, Homo sapiens
  CDR3 for alpha chain variable domain of TCR clone 378277 (TRAV1-2, TRAJ32)
CLLPLCCELYGGATNKLIF

SEQ ID NO: 756554 - protein, 13 aa, Homo sapiens
  CDR3 for beta chain variable domain of TCR clone 378277 (TRBV7-9, TRBJ1-2)
CASSLKQNYGDTF

SEQ ID NO: 756555 - protein, 12 aa, Homo sapiens
  CDR3 for alpha chain variable domain of TCR clone 378278 (TRAV21, TRAJ41)
CAVRELGMHSTS

SEQ ID NO: 756556 - protein, 15 aa, Homo sapiens
  CDR3 for beta chain variable domain of TCR clone 378278 (TRBV18, TRBJ1-5)
CASSPQARSNQPQHF

SEQ ID NO: 756557 - protein, 13 aa, Homo sapiens
  CDR3 for alpha chain variable domain of TCR clone 378279 (TRAV2, TRAJ40)
CAVVTSGTYKYIF

SEQ ID NO: 756558 - protein, 16 aa, Homo sapiens
  CDR3 for beta chain variable domain of TCR clone 378279 (TRBV29-1, TRBJ1-2)
CSVEASRDIANYGYTF

SEQ ID NO: 756559 - protein, 12 aa, Homo sapiens
  CDR3 for alpha chain variable domain of TCR clone 378280 (TRAV30, TRAJ20)
CGTESNDYKLSF

SEQ ID NO: 756560 - protein, 15 aa, Homo sapiens
  CDR3 for beta chain variable domain of TCR clone 378280 (TRBV20-1, TRBJ2-7)
CSARDRDSGMDEQYF

SEQ ID NO: 756561 - protein, 15 aa, Homo sapiens
  CDR3 for alpha chain variable domain of TCR clone 378281 (TRAV27, TRAJ17)
CRSTMIKAAGNKLTF

SEQ ID NO: 756562 - protein, 14 aa, Homo sapiens
  CDR3 for beta chain variable domain of TCR clone 378281 (TRBV7-3, TRBJ2-2)
CASSSGGYTGELFF

SEQ ID NO: 756563 - protein, 15 aa, Homo sapiens
  CDR3 for alpha chain variable domain of TCR clone 378282 (TRAV26-1, TRAJ40)
CIDRYATSGTSKYIF

SEQ ID NO: 756564 - protein, 11 aa, Homo sapiens
  CDR3 for beta chain variable domain of TCR clone 378282 (TRBV7-9, TRBJ2-1)
CASSSQNEQFF

SEQ ID NO: 756565 - protein, 13 aa, Homo sapiens
  CDR3 for alpha chain variable domain of TCR clone 378283 (TRAV12-3, TRAJ33)
CAMSVNSNYQLTW

SEQ ID NO: 756566 - protein, 13 aa, Homo sapiens
  CDR3 for beta chain variable domain of TCR clone 378283 (TRBV7-2, TRBJ2-2)
CASSLAVTGELFV

SEQ ID NO: 756567 - protein, 22 aa, Homo sapiens
  CDR3 for alpha chain variable domain of TCR clone 378284 (TRAV21, TRAJ39)
AASQPGDSAPPKGAKAGNMLTF

SEQ ID NO: 756568 - protein, 11 aa, Homo sapiens
  CDR3 for beta chain variable domain of TCR clone 378284 (TRBV10-3, TRBJ2-1)
CAISDRGLQFF

SEQ ID NO: 756569 - protein, 12 aa, Homo sapiens
  CDR3 for alpha chain variable domain of TCR clone 378285 (TRAV12-3, TRAJ17)
CAMTLTGNKLTF

SEQ ID NO: 756570 - protein, 15 aa, Homo sapiens
  CDR3 for beta chain variable domain of TCR clone 378285 (TRBV20-1, TRBJ2-7)
CSARDWVSGMDDQYF

SEQ ID NO: 756571 - protein, 11 aa, Homo sapiens
  CDR3 for alpha chain variable domain of TCR clone 378286 (TRAV13-1, TRAJ5)
CAPKGRRALTF

SEQ ID NO: 756572 - protein, 11 aa, Homo sapiens
  CDR3 for beta chain variable domain of TCR clone 378286 (TRBV12-4, TRBJ2-3)
CASTATDTQYF

SEQ ID NO: 756573 - protein, 14 aa, Homo sapiens
  CDR3 for alpha chain variable domain of TCR clone 378287 (TRAV21, TRAJ35)
CAVMPIDFGNVLHC

SEQ ID NO: 756574 - protein, 12 aa, Homo sapiens
  CDR3 for beta chain variable domain of TCR clone 378287 (TRBV7-9, TRBJ2-7)
CASSIKLEEQYF

SEQ ID NO: 756575 - protein, 14 aa, Homo sapiens
  CDR3 for alpha chain variable domain of TCR clone 378288 (TRAV12-2, TRAJ17)
CAVNIKAAGNKLTF

SEQ ID NO: 756576 - protein, 16 aa, Homo sapiens
  CDR3 for beta chain variable domain of TCR clone 378288 (TRBV7-3, TRBJ2-2)
CASSLKRGTLSGELFF

SEQ ID NO: 756577 - protein, 19 aa, Homo sapiens
  CDR3 for alpha chain variable domain of TCR clone 378289 (TRAV26-1, TRAJ52)
CIVRAHRNAGGTSYGKLTF

SEQ ID NO: 756578 - protein, 14 aa, Homo sapiens
  CDR3 for beta chain variable domain of TCR clone 378289 (TRBV19, TRBJ2-1)
CASPTFVLSGEQFF

SEQ ID NO: 756579 - protein, 14 aa, Homo sapiens
  CDR3 for alpha chain variable domain of TCR clone 378290 (TRAV12-3, TRAJ58)
CAMSTETSGSRLTF

SEQ ID NO: 756580 - protein, 13 aa, Homo sapiens
  CDR3 for beta chain variable domain of TCR clone 378290 (TRBV27, TRBJ2-3)
CASSCGRTDTQYF

SEQ ID NO: 756581 - protein, 15 aa, Homo sapiens
  CDR3 for alpha chain variable domain of TCR clone 378291 (TRAV2, TRAJ13)
CCLLLCFRGYQKVTF

SEQ ID NO: 756582 - protein, 15 aa, Homo sapiens
  CDR3 for beta chain variable domain of TCR clone 378291 (TRBV28, TRBJ1-3)
CASSMGWASGNTIYF

SEQ ID NO: 756583 - protein, 15 aa, Homo sapiens
  CDR3 for alpha chain variable domain of TCR clone 378292 (TRAV17, TRAJ16)
CATALRFSDGQKLLF

SEQ ID NO: 756584 - protein, 13 aa, Homo sapiens
  CDR3 for beta chain variable domain of TCR clone 378292 (TRBV14, TRBJ2-7)
CASSQGRRYEQYF

SEQ ID NO: 756585 - protein, 10 aa, Homo sapiens
  CDR3 for alpha chain variable domain of TCR clone 378293 (TRAV23/DV6, TRAJ57)
CAASPTLSQG

SEQ ID NO: 756586 - protein, 16 aa, Homo sapiens
  CDR3 for beta chain variable domain of TCR clone 378293 (TRBV7-3, TRBJ2-1)
CASSLEGYRSYNEQFF

SEQ ID NO: 756587 - protein, 13 aa, Homo sapiens
  CDR3 for alpha chain variable domain of TCR clone 378294 (TRAV12-1, TRAJ11)
CVVNRAGYSTLTF

SEQ ID NO: 756588 - protein, 16 aa, Homo sapiens
  CDR3 for beta chain variable domain of TCR clone 378294 (TRBV12-5, TRBJ2-5)
CASGPRTSGNQETQYF

SEQ ID NO: 756589 - protein, 17 aa, Homo sapiens
  CDR3 for alpha chain variable domain of TCR clone 378295 (TRAV3, TRAJ38)
CAVRDCLNAGNNRKLIW

SEQ ID NO: 756590 - protein, 15 aa, Homo sapiens
  CDR3 for beta chain variable domain of TCR clone 378295 (TRBV27, TRBJ2-1)
CACSNGGGSSNEQFF

SEQ ID NO: 756591 - protein, 13 aa, Homo sapiens
  CDR3 for alpha chain variable domain of TCR clone 378296 (TRAV13-1, TRAJ39)
CAASIWAGNMLTF

SEQ ID NO: 756592 - protein, 14 aa, Homo sapiens
  CDR3 for beta chain variable domain of TCR clone 378296 (TRBV2, TRBJ1-2)
CASNEGTGPYGYTF

SEQ ID NO: 756593 - protein, 16 aa, Homo sapiens
  CDR3 for alpha chain variable domain of TCR clone 378297 (TRAV2, TRAJ20)
TTVLWSFRSNDYKLSF

SEQ ID NO: 756594 - protein, 12 aa, Homo sapiens
  CDR3 for beta chain variable domain of TCR clone 378297 (TRBV7-6, TRBJ2-3)
CASSTWTDTQYF

SEQ ID NO: 756595 - protein, 12 aa, Homo sapiens
  CDR3 for alpha chain variable domain of TCR clone 378298 (TRAV12-2, TRAJ8)
CAVNTGFQKLVF

SEQ ID NO: 756596 - protein, 15 aa, Homo sapiens
  CDR3 for beta chain variable domain of TCR clone 378298 (TRBV7-8, TRBJ1-5)
CASSLERRELEPQHF

SEQ ID NO: 756597 - protein, 12 aa, Homo sapiens
  CDR3 for alpha chain variable domain of TCR clone 378299 (TRAV22, TRAJ29)
CCGGSGNTPLVF

SEQ ID NO: 756598 - protein, 14 aa, Homo sapiens
  CDR3 for beta chain variable domain of TCR clone 378299 (TRBV5-1, TRBJ2-7)
CASSRGESLYEQYF

SEQ ID NO: 756599 - protein, 15 aa, Homo sapiens
  CDR3 for alpha chain variable domain of TCR clone 378300 (TRAV4, TRAJ39)
CLAGPNNNAGNMLTF

SEQ ID NO: 756600 - protein, 12 aa, Homo sapiens
  CDR3 for beta chain variable domain of TCR clone 378300 (TRBV12-4, TRBJ2-7)
CASNPGGGEQYF

SEQ ID NO: 756601 - protein, 17 aa, Homo sapiens
  CDR3 for alpha chain variable domain of TCR clone 378301 (TRAV3, TRAJ12)
CAVRDGGRTDSSYKLIF

SEQ ID NO: 756602 - protein, 16 aa, Homo sapiens
  CDR3 for beta chain variable domain of TCR clone 378301 (TRBV9, TRBJ2-2)
CASSAMGKGNTGELFF

SEQ ID NO: 756603 - protein, 13 aa, Homo sapiens
  CDR3 for alpha chain variable domain of TCR clone 378302 (TRAV12-3, TRAJ9)
CSMRNTGGFKTIF

SEQ ID NO: 756604 - protein, 16 aa, Homo sapiens
  CDR3 for beta chain variable domain of TCR clone 378302 (TRBV6-1, TRBJ2-5)
CASSETLDRGAETQYF

SEQ ID NO: 756605 - protein, 14 aa, Homo sapiens
  CDR3 for alpha chain variable domain of TCR clone 378303 (TRAV29/DV5, TRAJ36)
CAARRKPGANNLFF

SEQ ID NO: 756606 - protein, 17 aa, Homo sapiens
  CDR3 for beta chain variable domain of TCR clone 378303 (TRBV7-6, TRBJ2-5)
CASSPGLADPWGETQYF

SEQ ID NO: 756607 - protein, 14 aa, Homo sapiens
  CDR3 for alpha chain variable domain of TCR clone 378304 (TRAV12-2, TRAJ24)
CAVTPADSWGKLQF

SEQ ID NO: 756608 - protein, 16 aa, Homo sapiens
  CDR3 for beta chain variable domain of TCR clone 378304 (TRBV6-4, TRBJ2-3)
ALSEGGRAWGTDTQYF

SEQ ID NO: 756609 - protein, 16 aa, Homo sapiens
  CDR3 for alpha chain variable domain of TCR clone 378305 (TRAV30, TRAJ24)
CGTEIVDADSRGKFQF

SEQ ID NO: 756610 - protein, 14 aa, Homo sapiens
  CDR3 for beta chain variable domain of TCR clone 378305 (TRBV12-5, TRBJ2-5)
CASGSRTQQETQYF

SEQ ID NO: 756611 - protein, 14 aa, Homo sapiens
  CDR3 for alpha chain variable domain of TCR clone 378306 (TRAV1-2, TRAJ16)
CAVNRFSDGQKLLF

SEQ ID NO: 756612 - protein, 12 aa, Homo sapiens
  CDR3 for beta chain variable domain of TCR clone 378306 (TRBV7-8, TRBJ2-7)
CASSLGVREQYF

SEQ ID NO: 756613 - protein, 17 aa, Homo sapiens
  CDR3 for alpha chain variable domain of TCR clone 378307 (TRAV2, TRAJ36)
CAEEDRGNWGKQPLLWD

SEQ ID NO: 756614 - protein, 14 aa, Homo sapiens
  CDR3 for beta chain variable domain of TCR clone 378307 (TRBV7-9, TRBJ2-5)
CASSLDTAQETQYF

SEQ ID NO: 756615 - protein, 11 aa, Homo sapiens
  CDR3 for alpha chain variable domain of TCR clone 378308 (TRAV12-3, TRAJ43)
CAMSVSNDMRF

SEQ ID NO: 756616 - protein, 13 aa, Homo sapiens
  CDR3 for beta chain variable domain of TCR clone 378308 (TRBV7-7, TRBJ2-5)
CASSRSGQETQYF

SEQ ID NO: 756617 - protein, 16 aa, Homo sapiens
  CDR3 for alpha chain variable domain of TCR clone 378309 (TRAV30, TRAJ24)
CGTEIVDADSWGKFQF

SEQ ID NO: 756618 - protein, 15 aa, Homo sapiens
  CDR3 for beta chain variable domain of TCR clone 378309 (TRBV28, TRBJ1-4)
CASSVSGSGLEKLFF

SEQ ID NO: 756619 - protein, 12 aa, Homo sapiens
  CDR3 for alpha chain variable domain of TCR clone 378310 (TRAV17, TRAJ30)
CVSERRDEKTIF

SEQ ID NO: 756620 - protein, 14 aa, Homo sapiens
  CDR3 for beta chain variable domain of TCR clone 378310 (TRBV7-7, TRBJ2-2)
CASSRDRSTGELFF

SEQ ID NO: 756621 - protein, 15 aa, Homo sapiens
  CDR3 for alpha chain variable domain of TCR clone 378311 (TRAV21, TRAJ53)
CATLNRGGSNYKLTF

SEQ ID NO: 756622 - protein, 14 aa, Homo sapiens
  CDR3 for beta chain variable domain of TCR clone 378311 (TRBV7-2, TRBJ2-7)
CASRSQGAAYEQYF

SEQ ID NO: 756623 - protein, 14 aa, Homo sapiens
  CDR3 for alpha chain variable domain of TCR clone 378312 (TRAV17, TRAJ22)
CATSPSGSARQLTF

SEQ ID NO: 756624 - protein, 13 aa, Homo sapiens
  CDR3 for beta chain variable domain of TCR clone 378312 (TRBV12-4, TRBJ1-2)
CASSLRQGKGYTS

SEQ ID NO: 756625 - protein, 14 aa, Homo sapiens
  CDR3 for alpha chain variable domain of TCR clone 378313 (TRAV12-3, TRAJ57)
CAMSAWGGSEKLVF

SEQ ID NO: 756626 - protein, 13 aa, Homo sapiens
  CDR3 for beta chain variable domain of TCR clone 378313 (TRBV27, TRBJ2-1)
CASRTLGVGEQFF

SEQ ID NO: 756627 - protein, 14 aa, Homo sapiens
  CDR3 for alpha chain variable domain of TCR clone 378314 (TRAV12-1, TRAJ12)
CVVNRPDSSYILIF

SEQ ID NO: 756628 - protein, 15 aa, Homo sapiens
  CDR3 for beta chain variable domain of TCR clone 378314 (TRBV5-1, TRBJ1-1)
CASSLGMGTSTEAFF

SEQ ID NO: 756629 - protein, 12 aa, Homo sapiens
  CDR3 for alpha chain variable domain of TCR clone 378315 (TRAV13-1, TRAJ21)
CAAKEGFNKFYF

SEQ ID NO: 756630 - protein, 14 aa, Homo sapiens
  CDR3 for beta chain variable domain of TCR clone 378315 (TRBV4-3, TRBJ2-2)
CASSQGHVTGELFC

SEQ ID NO: 756631 - protein, 14 aa, Homo sapiens
  CDR3 for alpha chain variable domain of TCR clone 378316 (TRAV17, TRAJ57)
CATDPQGGSEKLVF

SEQ ID NO: 756632 - protein, 15 aa, Homo sapiens
  CDR3 for beta chain variable domain of TCR clone 378316 (TRBV5-1, TRBJ2-7)
CASSLDLTSSYEQDF

SEQ ID NO: 756633 - protein, 15 aa, Homo sapiens
  CDR3 for alpha chain variable domain of TCR clone 378317 (TRAV17, TRAJ48)
CATDETNFGNEKLTF

SEQ ID NO: 756634 - protein, 11 aa, Homo sapiens
  CDR3 for beta chain variable domain of TCR clone 378317 (TRBV6-3, TRBJ2-3)
CATGQADTQYF

SEQ ID NO: 756635 - protein, 12 aa, Homo sapiens
  CDR3 for alpha chain variable domain of TCR clone 378318 (TRAV38-1, TRAJ28)
CGSGAGSYQLTF

SEQ ID NO: 756636 - protein, 12 aa, Homo sapiens
  CDR3 for beta chain variable domain of TCR clone 378318 (TRBV24-1, TRBJ1-1)
CATLYPDTEAFF

SEQ ID NO: 756637 - protein, 12 aa, Homo sapiens
  CDR3 for alpha chain variable domain of TCR clone 378319 (TRAV12-1, TRAJ32)
CVVKGATNKLIF

SEQ ID NO: 756638 - protein, 14 aa, Homo sapiens
  CDR3 for beta chain variable domain of TCR clone 378319 (TRBV11-2, TRBJ2-5)
CASSRTGGIETQYF

SEQ ID NO: 756639 - protein, 13 aa, Homo sapiens
  CDR3 for alpha chain variable domain of TCR clone 378320 (TRAV20, TRAJ34)
CAVSSYNTDKLIF

SEQ ID NO: 756640 - protein, 13 aa, Homo sapiens
  CDR3 for beta chain variable domain of TCR clone 378320 (TRBV7-9, TRBJ1-2)
CASSSEQNYGYTF

SEQ ID NO: 756641 - protein, 13 aa, Homo sapiens
  CDR3 for alpha chain variable domain of TCR clone 378321 (TRAV30, TRAJ6)
CGTEAGGSYIPTF

SEQ ID NO: 756642 - protein, 16 aa, Homo sapiens
  CDR3 for beta chain variable domain of TCR clone 378321 (TRBV4-3, TRBJ2-3)
CARSLGLAGEGDTQYF

SEQ ID NO: 756643 - protein, 15 aa, Homo sapiens
  CDR3 for alpha chain variable domain of TCR clone 378322 (TRAV27, TRAJ53)
CRAINRGGRNYKLTF

SEQ ID NO: 756644 - protein, 14 aa, Homo sapiens
  CDR3 for beta chain variable domain of TCR clone 378322 (TRBV7-3, TRBJ2-1)
CASSLAGGTNEQFF

SEQ ID NO: 756645 - protein, 12 aa, Homo sapiens
  CDR3 for alpha chain variable domain of TCR clone 378323 (TRAV3, TRAJ31)
CAAQRANARLMF

SEQ ID NO: 756646 - protein, 13 aa, Homo sapiens
  CDR3 for beta chain variable domain of TCR clone 378323 (TRBV7-3, TRBJ2-5)
CASGFRGGETQYF

SEQ ID NO: 756647 - protein, 15 aa, Homo sapiens
  CDR3 for alpha chain variable domain of TCR clone 378324 (TRAV3, TRAJ32)
CAVSSYGGATNKLIF

SEQ ID NO: 756648 - protein, 15 aa, Homo sapiens
  CDR3 for beta chain variable domain of TCR clone 378324 (TRBV7-3, TRBJ2-1)
CASSPTGGGEVEQFF

SEQ ID NO: 756649 - protein, 17 aa, Homo sapiens
  CDR3 for alpha chain variable domain of TCR clone 378325 (TRAV3, TRAJ42)
CAVRDRDYGVSQGNLIF

SEQ ID NO: 756650 - protein, 13 aa, Homo sapiens
  CDR3 for beta chain variable domain of TCR clone 378325 (TRBV10-3, TRBJ2-7)
CASKLAVSYEQYF

SEQ ID NO: 756651 - protein, 16 aa, Homo sapiens
  CDR3 for alpha chain variable domain of TCR clone 378326 (TRAV29/DV5, )
CAARQNKTETSASYSH

SEQ ID NO: 756652 - protein, 14 aa, Homo sapiens
  CDR3 for beta chain variable domain of TCR clone 378326 (TRBV12-5, TRBJ2-5)
CASGSRTHQETQYF

SEQ ID NO: 756653 - protein, 16 aa, Homo sapiens
  CDR3 for alpha chain variable domain of TCR clone 378327 (TRAV30, TRAJ24)
CGTEIVDADSWGKFQF

SEQ ID NO: 756654 - protein, 20 aa, Homo sapiens
  CDR3 for beta chain variable domain of TCR clone 378327 (TRBV19, TRBJ2-1)
CASSISRTVTSTRLNDEQFF

SEQ ID NO: 756655 - protein, 12 aa, Homo sapiens
  CDR3 for alpha chain variable domain of TCR clone 378328 (TRAV12-3, TRAJ17)
CAMTLTSNKLTF

SEQ ID NO: 756656 - protein, 13 aa, Homo sapiens
  CDR3 for beta chain variable domain of TCR clone 378328 (TRBV7-3, TRBJ1-1)
CASSQDWGAEAFF

SEQ ID NO: 756657 - protein, 14 aa, Homo sapiens
  CDR3 for alpha chain variable domain of TCR clone 378329 (TRAV12-2, TRAJ5)
CAVNRSTGRRALTF

SEQ ID NO: 756658 - protein, 15 aa, Homo sapiens
  CDR3 for beta chain variable domain of TCR clone 378329 (TRBV4-2, TRBJ1-2)
CASSQRTGGRDGYTF

SEQ ID NO: 756659 - protein, 12 aa, Homo sapiens
  CDR3 for alpha chain variable domain of TCR clone 378330 (TRAV20, TRAJ20)
CAVRLNDYKLSL

SEQ ID NO: 756660 - protein, 14 aa, Homo sapiens
  CDR3 for beta chain variable domain of TCR clone 378330 (TRBV20-1, TRBJ2-1)
CSAQIGGSANEQFF

SEQ ID NO: 756661 - protein, 13 aa, Homo sapiens
  CDR3 for alpha chain variable domain of TCR clone 378331 (TRAV9-2, TRAJ53)
CALSGGSNYKLTF

SEQ ID NO: 756662 - protein, 15 aa, Homo sapiens
  CDR3 for beta chain variable domain of TCR clone 378331 (TRBV7-9, TRBJ1-6)
CASSSPGRGNSPLHF

SEQ ID NO: 756663 - protein, 13 aa, Homo sapiens
  CDR3 for alpha chain variable domain of TCR clone 378332 (TRAV35, TRAJ42)
CAGFPGSQGNLIF

SEQ ID NO: 756664 - protein, 16 aa, Homo sapiens
  CDR3 for beta chain variable domain of TCR clone 378332 (TRBV7-9, TRBJ1-2)
CASSLGFSSGEDGYTF

SEQ ID NO: 756665 - protein, 13 aa, Homo sapiens
  CDR3 for alpha chain variable domain of TCR clone 378333 (TRAV8-3, TRAJ28)
CAVGAVGSYQLTF

SEQ ID NO: 756666 - protein, 15 aa, Homo sapiens
  CDR3 for beta chain variable domain of TCR clone 378333 (TRBV7-9, TRBJ1-5)
CASSQGNRPNQPQHF

SEQ ID NO: 756667 - protein, 13 aa, Homo sapiens
  CDR3 for alpha chain variable domain of TCR clone 378334 (TRAV20, TRAJ34)
CAVRSYNTDKLIF

SEQ ID NO: 756668 - protein, 14 aa, Homo sapiens
  CDR3 for beta chain variable domain of TCR clone 378334 (TRBV4-1, TRBJ2-2)
CASGQAVNTGELFF

SEQ ID NO: 756669 - protein, 17 aa, Homo sapiens
  CDR3 for alpha chain variable domain of TCR clone 378335 (TRAV23/DV6, TRAJ57)
CAASSTLSQGGSEKLVF

SEQ ID NO: 756670 - protein, 15 aa, Homo sapiens
  CDR3 for beta chain variable domain of TCR clone 378335 (TRBV6-3, TRBJ2-7)
CASSSPGTVFYEQYF

SEQ ID NO: 756671 - protein, 20 aa, Homo sapiens
  CDR3 for alpha chain variable domain of TCR clone 378336 (TRAV26-1, TRAJ57)
CCVLLHRQIETQGRSEKLVF

SEQ ID NO: 756672 - protein, 16 aa, Homo sapiens
  CDR3 for beta chain variable domain of TCR clone 378336 (TRBV4-2, TRBJ2-7)
CASSQEELAGTYEQYF

SEQ ID NO: 756673 - protein, 12 aa, Homo sapiens
  CDR3 for alpha chain variable domain of TCR clone 378337 (TRAV21, TRAJ29)
CAVTSGNTPLVF

SEQ ID NO: 756674 - protein, 15 aa, Homo sapiens
  CDR3 for beta chain variable domain of TCR clone 378337 (TRBV12-4, TRBJ2-7)
CASSQDLGSSYEQYF

SEQ ID NO: 756675 - protein, 18 aa, Homo sapiens
  CDR3 for alpha chain variable domain of TCR clone 378338 (TRAV2, TRAJ32)
CCLLLCFHYGGATYKLIF

SEQ ID NO: 756676 - protein, 16 aa, Homo sapiens
  CDR3 for beta chain variable domain of TCR clone 378338 (TRBV7-9, TRBJ2-7)
CASSYPDREGGYEQYF

SEQ ID NO: 756677 - protein, 16 aa, Homo sapiens
  CDR3 for alpha chain variable domain of TCR clone 378339 (TRAV27, TRAJ48)
TAAQPGDTGLYLPLTF

SEQ ID NO: 756678 - protein, 17 aa, Homo sapiens
  CDR3 for beta chain variable domain of TCR clone 378339 (TRBV7-8, TRBJ2-6)
CASSAGTGGAGANVLTF

SEQ ID NO: 756679 - protein, 11 aa, Homo sapiens
  CDR3 for alpha chain variable domain of TCR clone 378340 (TRAV26-1, TRAJ38)
CIVIMLATTIS

SEQ ID NO: 756680 - protein, 15 aa, Homo sapiens
  CDR3 for beta chain variable domain of TCR clone 378340 (TRBV27, TRBJ2-1)
CASSNGGGSSNEQFF

SEQ ID NO: 756681 - protein, 11 aa, Homo sapiens
  CDR3 for alpha chain variable domain of TCR clone 378341 (TRAV29/DV5, TRAJ37)
CATSNTGKLIF

SEQ ID NO: 756682 - protein, 16 aa, Homo sapiens
  CDR3 for beta chain variable domain of TCR clone 378341 (TRBV11-2, TRBJ2-4)
CASSAERTLAKNIQYF

SEQ ID NO: 756683 - protein, 14 aa, Homo sapiens
  CDR3 for alpha chain variable domain of TCR clone 378342 (TRAV1-2, TRAJ8)
CAVREDTGFQKLVF

SEQ ID NO: 756684 - protein, 11 aa, Homo sapiens
  CDR3 for beta chain variable domain of TCR clone 378342 (TRBV27, TRBJ2-2)
CQQTLHRGAVF

SEQ ID NO: 756685 - protein, 14 aa, Homo sapiens
  CDR3 for alpha chain variable domain of TCR clone 378343 (TRAV2, TRAJ9)
CAVEERSGGFKTIF

SEQ ID NO: 756686 - protein, 12 aa, Homo sapiens
  CDR3 for beta chain variable domain of TCR clone 378343 (TRBV11-2, TRBJ2-1)
CASSPGNNEQFF

SEQ ID NO: 756687 - protein, 13 aa, Homo sapiens
  CDR3 for alpha chain variable domain of TCR clone 378344 (TRAV26-1, TRAJ34)
CIVRPWIIDRLIF

SEQ ID NO: 756688 - protein, 14 aa, Homo sapiens
  CDR3 for beta chain variable domain of TCR clone 378344 (TRBV7-2, TRBJ2-7)
CASRSQGAAYEQYF

SEQ ID NO: 756689 - protein, 11 aa, Homo sapiens
  CDR3 for alpha chain variable domain of TCR clone 378345 (TRAV13-1, TRAJ15)
CAATRGTALIF

SEQ ID NO: 756690 - protein, 15 aa, Homo sapiens
  CDR3 for beta chain variable domain of TCR clone 378345 (TRBV28, TRBJ2-5)
CASSPPWSYQETQYF

SEQ ID NO: 756691 - protein, 13 aa, Homo sapiens
  CDR3 for alpha chain variable domain of TCR clone 378346 (TRAV6, TRAJ4)
CAPLRGGYNKLIF

SEQ ID NO: 756692 - protein, 16 aa, Homo sapiens
  CDR3 for beta chain variable domain of TCR clone 378346 (TRBV5-1, TRBJ2-1)
CASSIRSGGSYNEQFF

SEQ ID NO: 756693 - protein, 14 aa, Homo sapiens
  CDR3 for alpha chain variable domain of TCR clone 378347 (TRAV35, TRAJ22)
CAGLRPVSAWQLTF

SEQ ID NO: 756694 - protein, 15 aa, Homo sapiens
  CDR3 for beta chain variable domain of TCR clone 378347 (TRBV12-4, TRBJ2-5)
CASSPPTGLQETQYF

SEQ ID NO: 756695 - protein, 12 aa, Homo sapiens
  CDR3 for alpha chain variable domain of TCR clone 378348 (TRAV12-2, TRAJ10)
WGVTGGGKKLTF

SEQ ID NO: 756696 - protein, 15 aa, Homo sapiens
  CDR3 for beta chain variable domain of TCR clone 378348 (TRBV20-1, TRBJ2-7)
CSARDRVSGMDEQYF

SEQ ID NO: 756697 - protein, 13 aa, Homo sapiens
  CDR3 for alpha chain variable domain of TCR clone 378349 (TRAV1-1, TRAJ9)
CAAKNTGGFTTIF

SEQ ID NO: 756698 - protein, 14 aa, Homo sapiens
  CDR3 for beta chain variable domain of TCR clone 378349 (TRBV20-1, TRBJ2-1)
CSAQMGGSANEQFF

SEQ ID NO: 756699 - protein, 14 aa, Homo sapiens
  CDR3 for alpha chain variable domain of TCR clone 378350 (TRAV12-3, TRAJ47)
WAMSVREYGNKLVF

SEQ ID NO: 756700 - protein, 15 aa, Homo sapiens
  CDR3 for beta chain variable domain of TCR clone 378350 (TRBV20-1, TRBJ2-2)
CSARDTRLNTGELFF

SEQ ID NO: 756701 - protein, 14 aa, Homo sapiens
  CDR3 for alpha chain variable domain of TCR clone 378351 (TRAV1-2, TRAJ8)
CAVREDTGFQKLVF

SEQ ID NO: 756702 - protein, 16 aa, Homo sapiens
  CDR3 for beta chain variable domain of TCR clone 378351 (TRBV5-7, TRBJ2-5)
CASTLAPAGDRETQYF

SEQ ID NO: 756703 - protein, 12 aa, Homo sapiens
  CDR3 for alpha chain variable domain of TCR clone 378352 (TRAV21, TRAJ49)
CAVTNTGDQFYF

SEQ ID NO: 756704 - protein, 17 aa, Homo sapiens
  CDR3 for beta chain variable domain of TCR clone 378352 (TRBV13, TRBJ2-3)
CASSISRVAGGRNTQYF

SEQ ID NO: 756705 - protein, 17 aa, Homo sapiens
  CDR3 for alpha chain variable domain of TCR clone 378353 (TRAV3, TRAJ6)
CAVSDGPRAGVSYIPTF

SEQ ID NO: 756706 - protein, 20 aa, Homo sapiens
  CDR3 for beta chain variable domain of TCR clone 378353 (TRBV28, TRBJ2-1)
CASTPIGRSPGLAGGNEQFF

SEQ ID NO: 756707 - protein, 14 aa, Homo sapiens
  CDR3 for alpha chain variable domain of TCR clone 378354 (TRAV12-3, TRAJ10)
SHLPLTGGGNKLTF

SEQ ID NO: 756708 - protein, 13 aa, Homo sapiens
  CDR3 for beta chain variable domain of TCR clone 378354 (TRBV27, TRBJ2-7)
CASSLRHRYEQYF

SEQ ID NO: 756709 - protein, 14 aa, Homo sapiens
  CDR3 for alpha chain variable domain of TCR clone 378355 (TRAV1-2, TRAJ8)
CAVREDTGFQKLVF

SEQ ID NO: 756710 - protein, 15 aa, Homo sapiens
  CDR3 for beta chain variable domain of TCR clone 378355 (TRBV11-2, TRBJ2-1)
RASCTGTSGYNEQFF

SEQ ID NO: 756711 - protein, 14 aa, Homo sapiens
  CDR3 for alpha chain variable domain of TCR clone 378356 (TRAV25, TRAJ53)
CAGPRGGSNYKLTF

SEQ ID NO: 756712 - protein, 17 aa, Homo sapiens
  CDR3 for beta chain variable domain of TCR clone 378356 (TRBV20-1, TRBJ2-7)
CSATGTGDIAGGSEQYF

SEQ ID NO: 756713 - protein, 14 aa, Homo sapiens
  CDR3 for alpha chain variable domain of TCR clone 378357 (TRAV26-1, TRAJ38)
CIADNAGNNRKLIW

SEQ ID NO: 756714 - protein, 15 aa, Homo sapiens
  CDR3 for beta chain variable domain of TCR clone 378357 (TRBV7-2, TRBJ2-1)
CASSLVAGGHNEQFF

SEQ ID NO: 756715 - protein, 15 aa, Homo sapiens
  CDR3 for alpha chain variable domain of TCR clone 378358 (TRAV12-1, TRAJ44)
CVADLPTGTASKLTF

SEQ ID NO: 756716 - protein, 15 aa, Homo sapiens
  CDR3 for beta chain variable domain of TCR clone 378358 (TRBV9, TRBJ1-6)
CASSVAGTGDSPLHF

SEQ ID NO: 756717 - protein, 12 aa, Homo sapiens
  CDR3 for alpha chain variable domain of TCR clone 378359 (TRAV12-2, TRAJ36)
CAVRIGANNPFF

SEQ ID NO: 756718 - protein, 13 aa, Homo sapiens
  CDR3 for beta chain variable domain of TCR clone 378359 (TRBV7-3, TRBJ1-1)
CASSQDWGAEAFF

SEQ ID NO: 756719 - protein, 16 aa, Homo sapiens
  CDR3 for alpha chain variable domain of TCR clone 378360 (TRAV16, TRAJ26)
CALPGSEFCLWSRNQI

SEQ ID NO: 756720 - protein, 12 aa, Homo sapiens
  CDR3 for beta chain variable domain of TCR clone 378360 (TRBV11-2, TRBJ2-1)
CASSPGNNEQFF

SEQ ID NO: 756721 - protein, 15 aa, Homo sapiens
  CDR3 for alpha chain variable domain of TCR clone 378361 (TRAV17, TRAJ22)
CATVAPSGSARQLTF

SEQ ID NO: 756722 - protein, 14 aa, Homo sapiens
  CDR3 for beta chain variable domain of TCR clone 378361 (TRBV20-1, TRBJ1-5)
CNARDGGSGQPQHF

SEQ ID NO: 756723 - protein, 11 aa, Homo sapiens
  CDR3 for alpha chain variable domain of TCR clone 378362 (TRAV12-3, TRAJ26)
CAMSHGQNFVF

SEQ ID NO: 756724 - protein, 13 aa, Homo sapiens
  CDR3 for beta chain variable domain of TCR clone 378362 (TRBV12-4, TRBJ2-1)
CASSLAENNEQFF

SEQ ID NO: 756725 - protein, 13 aa, Homo sapiens
  CDR3 for alpha chain variable domain of TCR clone 378363 (TRAV12-3, TRAJ40)
CAMSARGTSKYIF

SEQ ID NO: 756726 - protein, 13 aa, Homo sapiens
  CDR3 for beta chain variable domain of TCR clone 378363 (TRBV4-1, TRBJ2-2)
CASSQENTGELFF

SEQ ID NO: 756727 - protein, 14 aa, Homo sapiens
  CDR3 for alpha chain variable domain of TCR clone 378364 (TRAV38-1, TRAJ40)
CALRPTSGTYKYIF

SEQ ID NO: 756728 - protein, 14 aa, Homo sapiens
  CDR3 for beta chain variable domain of TCR clone 378364 (TRBV25-1, TRBJ1-1)
CASTHLGGNNEDFF

SEQ ID NO: 756729 - protein, 14 aa, Homo sapiens
  CDR3 for alpha chain variable domain of TCR clone 378365 (TRAV1-2, TRAJ8)
CAVREDTGFQKLVF

SEQ ID NO: 756730 - protein, 12 aa, Homo sapiens
  CDR3 for beta chain variable domain of TCR clone 378365 (TRBV11-2, TRBJ2-5)
CASSLGQVTQYF

SEQ ID NO: 756731 - protein, 14 aa, Homo sapiens
  CDR3 for alpha chain variable domain of TCR clone 378366 (TRAV8-3, TRAJ4)
CAVGAAGGYNKLIF

SEQ ID NO: 756732 - protein, 15 aa, Homo sapiens
  CDR3 for beta chain variable domain of TCR clone 378366 (TRBV6-5, TRBJ2-1)
CSSSYDAGAGNEQFF

SEQ ID NO: 756733 - protein, 16 aa, Homo sapiens
  CDR3 for alpha chain variable domain of TCR clone 378367 (TRAV8-3, TRAJ8)
CAVPRDGNTGFQKLVF

SEQ ID NO: 756734 - protein, 14 aa, Homo sapiens
  CDR3 for beta chain variable domain of TCR clone 378367 (TRBV19, TRBJ2-5)
CASSMTGQQETQYF

SEQ ID NO: 756735 - protein, 18 aa, Homo sapiens
  CDR3 for alpha chain variable domain of TCR clone 378368 (TRAV12-3, TRAJ52)
CAMSVGGAGGTSYGKLTF

SEQ ID NO: 756736 - protein, 17 aa, Homo sapiens
  CDR3 for beta chain variable domain of TCR clone 378368 (TRBV27, TRBJ1-6)
CASSFDRGLGHTSTLGT

SEQ ID NO: 756737 - protein, 14 aa, Homo sapiens
  CDR3 for alpha chain variable domain of TCR clone 378369 (TRAV3, TRAJ21)
CAVESQANFNKFYF

SEQ ID NO: 756738 - protein, 15 aa, Homo sapiens
  CDR3 for beta chain variable domain of TCR clone 378369 (TRBV2, TRBJ2-1)
CASSELAGSYNEQFF

SEQ ID NO: 756739 - protein, 17 aa, Homo sapiens
  CDR3 for alpha chain variable domain of TCR clone 378370 (TRAV17, TRAJ28)
CATDPWRGGAGGYQLTL

SEQ ID NO: 756740 - protein, 16 aa, Homo sapiens
  CDR3 for beta chain variable domain of TCR clone 378370 (TRBV25-1, TRBJ1-1)
CASSGDRDRGRIEAFF

SEQ ID NO: 756741 - protein, 10 aa, Homo sapiens
  CDR3 for alpha chain variable domain of TCR clone 378371 (TRAV23/DV6, TRAJ43)
CAAAVAALEQ

SEQ ID NO: 756742 - protein, 13 aa, Homo sapiens
  CDR3 for beta chain variable domain of TCR clone 378371 (TRBV12-4, TRBJ1-2)
CASSLRQGKGYIF

SEQ ID NO: 756743 - protein, 11 aa, Homo sapiens
  CDR3 for alpha chain variable domain of TCR clone 378372 (TRAV8-6, TRAJ7)
CAVKGNNRLAF

SEQ ID NO: 756744 - protein, 14 aa, Homo sapiens
  CDR3 for beta chain variable domain of TCR clone 378372 (TRBV7-8, TRBJ2-3)
CASSLEAGTDTQYF

SEQ ID NO: 756745 - protein, 12 aa, Homo sapiens
  CDR3 for alpha chain variable domain of TCR clone 378373 (TRAV27, TRAJ9)
CAGVSGGFKTIF

SEQ ID NO: 756746 - protein, 18 aa, Homo sapiens
  CDR3 for beta chain variable domain of TCR clone 378373 (TRBV11-2, TRBJ2-3)
CASSLRGASRGAPNTQYF

SEQ ID NO: 756747 - protein, 13 aa, Homo sapiens
  CDR3 for alpha chain variable domain of TCR clone 378374 (TRAV27, TRAJ6)
CAGGTRGSYIPTF

SEQ ID NO: 756748 - protein, 16 aa, Homo sapiens
  CDR3 for beta chain variable domain of TCR clone 378374 (TRBV4-1, TRBJ2-6)
CASSQDGGPGANVLTF

SEQ ID NO: 756749 - protein, 14 aa, Homo sapiens
  CDR3 for alpha chain variable domain of TCR clone 378375 (TRAV8-4, TRAJ54)
CAVSEVLGAQKLVC

SEQ ID NO: 756750 - protein, 17 aa, Homo sapiens
  CDR3 for beta chain variable domain of TCR clone 378375 (TRBV4-1, TRBJ1-4)
CASSQEGPRGVEEKLFF

SEQ ID NO: 756751 - protein, 17 aa, Homo sapiens
  CDR3 for alpha chain variable domain of TCR clone 378376 (TRAV3, TRAJ6)
CAVRGGPRAGGSYIPTF

SEQ ID NO: 756752 - protein, 19 aa, Homo sapiens
  CDR3 for beta chain variable domain of TCR clone 378376 (TRBV25-1, TRBJ2-2)
CAILVYRVDRGRKTGELFF

SEQ ID NO: 756753 - protein, 12 aa, Homo sapiens
  CDR3 for alpha chain variable domain of TCR clone 378377 (TRAV3, TRAJ39)
CAVIGWSNMLTF

SEQ ID NO: 756754 - protein, 14 aa, Homo sapiens
  CDR3 for beta chain variable domain of TCR clone 378377 (TRBV7-8, TRBJ2-3)
CASSFPYGQDTQYF

SEQ ID NO: 756755 - protein, 14 aa, Homo sapiens
  CDR3 for alpha chain variable domain of TCR clone 378378 (TRAV12-2, TRAJ13)
CAVKKTEGYQKVTF

SEQ ID NO: 756756 - protein, 17 aa, Homo sapiens
  CDR3 for beta chain variable domain of TCR clone 378378 (TRBV13, TRBJ2-3)
CASSLSRVAGGRNTQYF

SEQ ID NO: 756757 - protein, 12 aa, Homo sapiens
  CDR3 for alpha chain variable domain of TCR clone 378379 (TRAV2, TRAJ33)
CAVWGSNYQLIW

SEQ ID NO: 756758 - protein, 16 aa, Homo sapiens
  CDR3 for beta chain variable domain of TCR clone 378379 (TRBV20-1, TRBJ1-4)
CSAPGQGLLTNDKLFF

SEQ ID NO: 756759 - protein, 13 aa, Homo sapiens
  CDR3 for alpha chain variable domain of TCR clone 378380 (TRAV12-1, TRAJ43)
CVASHHNNNDMRF

SEQ ID NO: 756760 - protein, 14 aa, Homo sapiens
  CDR3 for beta chain variable domain of TCR clone 378380 (TRBV5-5, TRBJ2-2)
CASSLLGDTGELFF

SEQ ID NO: 756761 - protein, 18 aa, Homo sapiens
  CDR3 for alpha chain variable domain of TCR clone 378381 (TRAV12-3, TRAJ52)
CAMSVAGAGGTSYGKLTF

SEQ ID NO: 756762 - protein, 16 aa, Homo sapiens
  CDR3 for beta chain variable domain of TCR clone 378381 (TRBV7-9, TRBJ1-2)
CASSISLDRGGYGYTF

SEQ ID NO: 756763 - protein, 12 aa, Homo sapiens
  CDR3 for alpha chain variable domain of TCR clone 378382 (TRAV20, TRAJ31)
CAVQADNARLMF

SEQ ID NO: 756764 - protein, 15 aa, Homo sapiens
  CDR3 for beta chain variable domain of TCR clone 378382 (TRBV5-1, TRBJ2-2)
CASSSQGGNTGELFF

SEQ ID NO: 756765 - protein, 16 aa, Homo sapiens
  CDR3 for alpha chain variable domain of TCR clone 378383 (TRAV22, TRAJ45)
CAVERGKRGGADGRTY

SEQ ID NO: 756766 - protein, 13 aa, Homo sapiens
  CDR3 for beta chain variable domain of TCR clone 378383 (TRBV27, TRBJ1-1)
CASSLSIGADAFF

SEQ ID NO: 756767 - protein, 13 aa, Homo sapiens
  CDR3 for alpha chain variable domain of TCR clone 378384 (TRAV30, TRAJ34)
CGTVGYNTDKLIF

SEQ ID NO: 756768 - protein, 16 aa, Homo sapiens
  CDR3 for beta chain variable domain of TCR clone 378384 (TRBV7-9, TRBJ1-2)
CASSLGCSSGEDGYTF

SEQ ID NO: 756769 - protein, 13 aa, Homo sapiens
  CDR3 for alpha chain variable domain of TCR clone 378385 (TRAV1-2, TRAJ9)
CAALNTGGFKTIF

SEQ ID NO: 756770 - protein, 14 aa, Homo sapiens
  CDR3 for beta chain variable domain of TCR clone 378385 (TRBV7-3, TRBJ2-1)
CASGLAGGTNEQFF

SEQ ID NO: 756771 - protein, 12 aa, Homo sapiens
  CDR3 for alpha chain variable domain of TCR clone 378386 (TRAV29/DV5, TRAJ49)
CAATDTGNQFYF

SEQ ID NO: 756772 - protein, 13 aa, Homo sapiens
  CDR3 for beta chain variable domain of TCR clone 378386 (TRBV7-7, TRBJ2-5)
CASSRSGQETQYF

SEQ ID NO: 756773 - protein, 14 aa, Homo sapiens
  CDR3 for alpha chain variable domain of TCR clone 378387 (TRAV17, TRAJ42)
CAQNYGGSQGNLIF

SEQ ID NO: 756774 - protein, 13 aa, Homo sapiens
  CDR3 for beta chain variable domain of TCR clone 378387 (TRBV20-1, TRBJ1-2)
CSAPRPGRYGYTF

SEQ ID NO: 756775 - protein, 16 aa, Homo sapiens
  CDR3 for alpha chain variable domain of TCR clone 378388 (TRAV30, TRAJ24)
CGTDIVDADSWGKFKF

SEQ ID NO: 756776 - protein, 14 aa, Homo sapiens
  CDR3 for beta chain variable domain of TCR clone 378388 (TRBV12-5, TRBJ2-5)
CASGSRTHQETQYF

SEQ ID NO: 756777 - protein, 14 aa, Homo sapiens
  CDR3 for alpha chain variable domain of TCR clone 378389 (TRAV12-1, TRAJ12)
CVVNRPDSSYKLIF

SEQ ID NO: 756778 - protein, 13 aa, Homo sapiens
  CDR3 for beta chain variable domain of TCR clone 378389 (TRBV19, TRBJ1-2)
CASSVPGQDGYTF

SEQ ID NO: 756779 - protein, 13 aa, Homo sapiens
  CDR3 for alpha chain variable domain of TCR clone 378390 (TRAV21, TRAJ20)
CAVGLRVDYKLSF

SEQ ID NO: 756780 - protein, 15 aa, Homo sapiens
  CDR3 for beta chain variable domain of TCR clone 378390 (TRBV19, TRBJ2-1)
CASNTDGDPNNEQFF

SEQ ID NO: 756781 - protein, 16 aa, Homo sapiens
  CDR3 for alpha chain variable domain of TCR clone 378391 (TRAV13-1, TRAJ48)
CSKYRESNFGNEKLTF

SEQ ID NO: 756782 - protein, 15 aa, Homo sapiens
  CDR3 for beta chain variable domain of TCR clone 378391 (TRBV28, TRBJ2-5)
CASSPGQGSIETQYF

SEQ ID NO: 756783 - protein, 12 aa, Homo sapiens
  CDR3 for alpha chain variable domain of TCR clone 378392 (TRAV13-1, TRAJ15)
CAASQAGTALIF

SEQ ID NO: 756784 - protein, 16 aa, Homo sapiens
  CDR3 for beta chain variable domain of TCR clone 378392 (TRBV12-5, TRBJ2-5)
CASGPRTSGNQETQYF

SEQ ID NO: 756785 - protein, 19 aa, Homo sapiens
  CDR3 for alpha chain variable domain of TCR clone 378393 (TRAV26-1, TRAJ28)
CIVRVAHAYSGAGSCQLTF

SEQ ID NO: 756786 - protein, 15 aa, Homo sapiens
  CDR3 for beta chain variable domain of TCR clone 378393 (TRBV20-1, TRBJ1-1)
CSASRGVTGNTGAFF

SEQ ID NO: 756787 - protein, 17 aa, Homo sapiens
  CDR3 for alpha chain variable domain of TCR clone 378394 (TRAV13-1, TRAJ28)
CAASPPYSGAGSYQLTF

SEQ ID NO: 756788 - protein, 12 aa, Homo sapiens
  CDR3 for beta chain variable domain of TCR clone 378394 (TRBV11-2, TRBJ2-2)
CASSLPAGELFF

SEQ ID NO: 756789 - protein, 13 aa, Homo sapiens
  CDR3 for alpha chain variable domain of TCR clone 378395 (TRAV12-1, TRAJ31)
CVANMNNNARLMF

SEQ ID NO: 756790 - protein, 15 aa, Homo sapiens
  CDR3 for beta chain variable domain of TCR clone 378395 (TRBV4-1, TRBJ1-2)
CASSQGQGAAYGYTF

SEQ ID NO: 756791 - protein, 17 aa, Homo sapiens
  CDR3 for alpha chain variable domain of TCR clone 378396 (TRAV3, TRAJ42)
CAVRDRDYGRSQGNLIF

SEQ ID NO: 756792 - protein, 14 aa, Homo sapiens
  CDR3 for beta chain variable domain of TCR clone 378396 (TRBV19, TRBJ2-5)
CASSMTGQQETQYF

SEQ ID NO: 756793 - protein, 15 aa, Homo sapiens
  CDR3 for alpha chain variable domain of TCR clone 378397 (TRAV3, TRAJ9)
CAVRARNTGGFKTIF

SEQ ID NO: 756794 - protein, 14 aa, Homo sapiens
  CDR3 for beta chain variable domain of TCR clone 378397 (TRBV7-3, TRBJ2-1)
CASSLAGGTNEQFF

SEQ ID NO: 756795 - protein, 10 aa, Homo sapiens
  CDR3 for alpha chain variable domain of TCR clone 378398 (TRAV1-2, TRAJ31)
CAFFDARLMF

SEQ ID NO: 756796 - protein, 15 aa, Homo sapiens
  CDR3 for beta chain variable domain of TCR clone 378398 (TRBV7-6, TRBJ2-1)
CASSPGQGPYNEQFF

SEQ ID NO: 756797 - protein, 14 aa, Homo sapiens
  CDR3 for alpha chain variable domain of TCR clone 378399 (TRAV12-2, TRAJ5)
CAVNRSTGRRALSF

SEQ ID NO: 756798 - protein, 12 aa, Homo sapiens
  CDR3 for beta chain variable domain of TCR clone 378399 (TRBV7-9, TRBJ1-4)
CASSTDREKLFF

SEQ ID NO: 756799 - protein, 14 aa, Homo sapiens
  CDR3 for alpha chain variable domain of TCR clone 378400 (TRAV1-2, TRAJ8)
CAVREDTGFQKHVF

SEQ ID NO: 756800 - protein, 16 aa, Homo sapiens
  CDR3 for beta chain variable domain of TCR clone 378400 (TRBV7-6, TRBJ2-6)
CASSLPGLSGANVLTF

SEQ ID NO: 756801 - protein, 10 aa, Homo sapiens
  CDR3 for alpha chain variable domain of TCR clone 378401 (TRAV13-1, TRAJ27)
CAPLARQTNL

SEQ ID NO: 756802 - protein, 13 aa, Homo sapiens
  CDR3 for beta chain variable domain of TCR clone 378401 (TRBV7-3, TRBJ1-1)
CASSQDWGAEALF

SEQ ID NO: 756803 - protein, 15 aa, Homo sapiens
  CDR3 for alpha chain variable domain of TCR clone 378402 (TRAV13-1, TRAJ32)
CAASIYGGATNKLTF

SEQ ID NO: 756804 - protein, 14 aa, Homo sapiens
  CDR3 for beta chain variable domain of TCR clone 378402 (TRBV7-9, TRBJ2-1)
CASSLASGSNEQFF

SEQ ID NO: 756805 - protein, 15 aa, Homo sapiens
  CDR3 for alpha chain variable domain of TCR clone 378403 (TRAV20, TRAJ43)
CAVQAGKSSNNDMRF

SEQ ID NO: 756806 - protein, 17 aa, Homo sapiens
  CDR3 for beta chain variable domain of TCR clone 378403 (TRBV4-1, TRBJ2-5)
CASSQDLTGGPIETQYF

SEQ ID NO: 756807 - protein, 17 aa, Homo sapiens
  CDR3 for alpha chain variable domain of TCR clone 378404 (TRAV1-2, TRAJ8)
CAVRDPDENTGFQKLVF

SEQ ID NO: 756808 - protein, 11 aa, Homo sapiens
  CDR3 for beta chain variable domain of TCR clone 378404 (TRBV7-9, TRBJ2-2)
CASSGFRGANT

SEQ ID NO: 756809 - protein, 14 aa, Homo sapiens
  CDR3 for alpha chain variable domain of TCR clone 378405 (TRAV8-3, TRAJ4)
CAVGAAGGYNKLIF

SEQ ID NO: 756810 - protein, 18 aa, Homo sapiens
  CDR3 for beta chain variable domain of TCR clone 378405 (TRBV6-5, TRBJ1-1)
CASSYSAPGWTGGTEAFF

SEQ ID NO: 756811 - protein, 19 aa, Homo sapiens
  CDR3 for alpha chain variable domain of TCR clone 378406 (TRAV26-1, TRAJ38)
CIADNAGNNHIQNPDPAVF

SEQ ID NO: 756812 - protein, 17 aa, Homo sapiens
  CDR3 for beta chain variable domain of TCR clone 378406 (TRBV11-2, TRBJ2-6)
CASSQRDIFSGANVLTF

SEQ ID NO: 756813 - protein, 13 aa, Homo sapiens
  CDR3 for alpha chain variable domain of TCR clone 378407 (TRAV30, TRAJ24)
CGTVTDSWGKLQF

SEQ ID NO: 756814 - protein, 15 aa, Homo sapiens
  CDR3 for beta chain variable domain of TCR clone 378407 (TRBV5-7, TRBJ1-2)
CASSLGVAANYGYTF

SEQ ID NO: 756815 - protein, 16 aa, Homo sapiens
  CDR3 for alpha chain variable domain of TCR clone 378408 (TRAV12-3, TRAJ53)
CAMSPGSGGSNYKLTF

SEQ ID NO: 756816 - protein, 13 aa, Homo sapiens
  CDR3 for beta chain variable domain of TCR clone 378408 (TRBV18, TRBJ2-7)
CASSRSGSCEQYF

SEQ ID NO: 756817 - protein, 15 aa, Homo sapiens
  CDR3 for alpha chain variable domain of TCR clone 378409 (TRAV21, TRAJ57)
CAVIITQGGSEKLVF

SEQ ID NO: 756818 - protein, 15 aa, Homo sapiens
  CDR3 for beta chain variable domain of TCR clone 378409 (TRBV4-1, TRBJ2-7)
CASSQQGQGFDEQYF

SEQ ID NO: 756819 - protein, 15 aa, Homo sapiens
  CDR3 for alpha chain variable domain of TCR clone 378410 (TRAV12-2, TRAJ52)
PSARAGGTSYGKLTF

SEQ ID NO: 756820 - protein, 17 aa, Homo sapiens
  CDR3 for beta chain variable domain of TCR clone 378410 (TRBV4-1, TRBJ1-5)
CASSQQPPTVANQPQHF

SEQ ID NO: 756821 - protein, 15 aa, Homo sapiens
  CDR3 for alpha chain variable domain of TCR clone 378411 (TRAV26-1, TRAJ48)
CIARWSCFGNEKLTF

SEQ ID NO: 756822 - protein, 12 aa, Homo sapiens
  CDR3 for beta chain variable domain of TCR clone 378411 (TRBV19, TRBJ2-5)
CASSISEETQYF

SEQ ID NO: 756823 - protein, 11 aa, Homo sapiens
  CDR3 for alpha chain variable domain of TCR clone 378412 (TRAV3, TRAJ21)
CAVGNFNKFYF

SEQ ID NO: 756824 - protein, 12 aa, Homo sapiens
  CDR3 for beta chain variable domain of TCR clone 378412 (TRBV7-9, TRBJ2-7)
CASSLEGYEQYS

SEQ ID NO: 756825 - protein, 12 aa, Homo sapiens
  CDR3 for alpha chain variable domain of TCR clone 378413 (TRAV25, TRAJ30)
CAGKNRDDKIIF

SEQ ID NO: 756826 - protein, 11 aa, Homo sapiens
  CDR3 for beta chain variable domain of TCR clone 378413 (TRBV12-4, TRBJ2-7)
CATPEKGKQYF

SEQ ID NO: 756827 - protein, 14 aa, Homo sapiens
  CDR3 for alpha chain variable domain of TCR clone 378414 (TRAV17, TRAJ39)
CSTDPVRAGNMLTF

SEQ ID NO: 756828 - protein, 15 aa, Homo sapiens
  CDR3 for beta chain variable domain of TCR clone 378414 (TRBV13, TRBJ1-5)
CASSFGQGGVQPQHF

SEQ ID NO: 756829 - protein, 18 aa, Homo sapiens
  CDR3 for alpha chain variable domain of TCR clone 378415 (TRAV12-3, TRAJ52)
CAMCVGVAGGTSYGKLTF

SEQ ID NO: 756830 - protein, 15 aa, Homo sapiens
  CDR3 for beta chain variable domain of TCR clone 378415 (TRBV27, TRBJ1-6)
CASSFDRGLGSPLHF

SEQ ID NO: 756831 - protein, 13 aa, Homo sapiens
  CDR3 for alpha chain variable domain of TCR clone 378416 (TRAV13-1, TRAJ6)
CAASSGGSYIPTF

SEQ ID NO: 756832 - protein, 14 aa, Homo sapiens
  CDR3 for beta chain variable domain of TCR clone 378416 (TRBV20-1, TRBJ2-4)
CSAVAGGTGNIQYF

SEQ ID NO: 756833 - protein, 14 aa, Homo sapiens
  CDR3 for alpha chain variable domain of TCR clone 378417 (TRAV17, TRAJ40)
CATALTSGTYKYIF

SEQ ID NO: 756834 - protein, 13 aa, Homo sapiens
  CDR3 for beta chain variable domain of TCR clone 378417 (TRBV27, TRBJ2-1)
CASSSGSYKEQFF

SEQ ID NO: 756835 - protein, 15 aa, Homo sapiens
  CDR3 for alpha chain variable domain of TCR clone 378418 (TRAV35, TRAJ23)
CAGQRGYNQGGKPIF

SEQ ID NO: 756836 - protein, 16 aa, Homo sapiens
  CDR3 for beta chain variable domain of TCR clone 378418 (TRBV27, TRBJ2-1)
CASSSRLAGKYNEQFF

SEQ ID NO: 756837 - protein, 10 aa, Homo sapiens
  CDR3 for alpha chain variable domain of TCR clone 378419 (TRAV12-2, TRAJ43)
CSVKILSMRF

SEQ ID NO: 756838 - protein, 14 aa, Homo sapiens
  CDR3 for beta chain variable domain of TCR clone 378419 (TRBV11-2, TRBJ2-7)
CASSLGNSLYEQYF

SEQ ID NO: 756839 - protein, 16 aa, Homo sapiens
  CDR3 for alpha chain variable domain of TCR clone 378420 (TRAV3, TRAJ37)
CAVSGKGSGNTGKLIF

SEQ ID NO: 756840 - protein, 13 aa, Homo sapiens
  CDR3 for beta chain variable domain of TCR clone 378420 (TRBV11-2, TRBJ2-1)
CASSSEAYNEQFF

SEQ ID NO: 756841 - protein, 14 aa, Homo sapiens
  CDR3 for alpha chain variable domain of TCR clone 378421 (TRAV2, TRAJ9)
CAVEDRSGGFKTIF

SEQ ID NO: 756842 - protein, 12 aa, Homo sapiens
  CDR3 for beta chain variable domain of TCR clone 378421 (TRBV12-4, TRBJ2-4)
CASSSPGNIQYF

SEQ ID NO: 756843 - protein, 13 aa, Homo sapiens
  CDR3 for alpha chain variable domain of TCR clone 378422 (TRAV27, TRAJ27)
CAGKDTNAGKSTF

SEQ ID NO: 756844 - protein, 15 aa, Homo sapiens
  CDR3 for beta chain variable domain of TCR clone 378422 (TRBV5-7, TRBJ1-5)
CASSYGKLWDQPQHF

SEQ ID NO: 756845 - protein, 15 aa, Homo sapiens
  CDR3 for alpha chain variable domain of TCR clone 378423 (TRAV21, TRAJ53)
CATLNSGGSNYKLTF

SEQ ID NO: 756846 - protein, 16 aa, Homo sapiens
  CDR3 for beta chain variable domain of TCR clone 378423 (TRBV7-8, TRBJ2-6)
CQQRRDRGAGANVLTF

SEQ ID NO: 756847 - protein, 13 aa, Homo sapiens
  CDR3 for alpha chain variable domain of TCR clone 378424 (TRAV12-3, TRAJ33)
CAMSVNSNYQLIW

SEQ ID NO: 756848 - protein, 18 aa, Homo sapiens
  CDR3 for beta chain variable domain of TCR clone 378424 (TRBV3-1, TRBJ2-7)
CASSRISAGGRSSYEQYF

SEQ ID NO: 756849 - protein, 19 aa, Homo sapiens
  CDR3 for alpha chain variable domain of TCR clone 378425 (TRAV2, TRAJ20)
ILQVREADAAVYRDCELSF

SEQ ID NO: 756850 - protein, 17 aa, Homo sapiens
  CDR3 for beta chain variable domain of TCR clone 378425 (TRBV11-2, TRBJ2-1)
CASSLYPPGVEYNEQFF

SEQ ID NO: 756851 - protein, 13 aa, Homo sapiens
  CDR3 for alpha chain variable domain of TCR clone 378426 (TRAV12-1, TRAJ21)
CAVIGDNFNKFYF

SEQ ID NO: 756852 - protein, 14 aa, Homo sapiens
  CDR3 for beta chain variable domain of TCR clone 378426 (TRBV7-3, TRBJ2-2)
CASSLYPLTGELFF

SEQ ID NO: 756853 - protein, 15 aa, Homo sapiens
  CDR3 for alpha chain variable domain of TCR clone 378427 (TRAV3, TRAJ9)
CAVRARNTGGFKTIF

SEQ ID NO: 756854 - protein, 15 aa, Homo sapiens
  CDR3 for beta chain variable domain of TCR clone 378427 (TRBV27, TRBJ1-1)
CASSPYADPYNEAFF

SEQ ID NO: 756855 - protein, 12 aa, Homo sapiens
  CDR3 for alpha chain variable domain of TCR clone 378428 (TRAV21, TRAJ31)
CVLAGNNARLMF

SEQ ID NO: 756856 - protein, 14 aa, Homo sapiens
  CDR3 for beta chain variable domain of TCR clone 378428 (TRBV7-3, TRBJ2-2)
CASSSGGYTGELFF

SEQ ID NO: 756857 - protein, 15 aa, Homo sapiens
  CDR3 for alpha chain variable domain of TCR clone 378429 (TRAV20, TRAJ43)
CAVQAGKRSKNNMRF

SEQ ID NO: 756858 - protein, 14 aa, Homo sapiens
  CDR3 for beta chain variable domain of TCR clone 378429 (TRBV27, TRBJ2-1)
CASRHLGGGKEQFF

SEQ ID NO: 756859 - protein, 15 aa, Homo sapiens
  CDR3 for alpha chain variable domain of TCR clone 378430 (TRAV26-1, TRAJ44)
CIVRANTGTASKLTF

SEQ ID NO: 756860 - protein, 15 aa, Homo sapiens
  CDR3 for beta chain variable domain of TCR clone 378430 (TRBV4-3, TRBJ1-1)
CASSQELGRGTEAFF

SEQ ID NO: 756861 - protein, 14 aa, Homo sapiens
  CDR3 for alpha chain variable domain of TCR clone 378431 (TRAV12-3, TRAJ57)
CARALEGGSEKLVF

SEQ ID NO: 756862 - protein, 14 aa, Homo sapiens
  CDR3 for beta chain variable domain of TCR clone 378431 (TRBV19, TRBJ1-1)
CASSIEVSGRSAFF

SEQ ID NO: 756863 - protein, 11 aa, Homo sapiens
  CDR3 for alpha chain variable domain of TCR clone 378432 (TRAV4, TRAJ31)
CLVGDNSRLMF

SEQ ID NO: 756864 - protein, 14 aa, Homo sapiens
  CDR3 for beta chain variable domain of TCR clone 378432 (TRBV4-1, TRBJ2-2)
CASSQAVNTGELFF

SEQ ID NO: 756865 - protein, 14 aa, Homo sapiens
  CDR3 for alpha chain variable domain of TCR clone 378433 (TRAV27, TRAJ22)
CAGVSVLGKRHLTF

SEQ ID NO: 756866 - protein, 17 aa, Homo sapiens
  CDR3 for beta chain variable domain of TCR clone 378433 (TRBV14, TRBJ2-1)
CASSQDRRVTSYNEQFF

SEQ ID NO: 756867 - protein, 14 aa, Homo sapiens
  CDR3 for alpha chain variable domain of TCR clone 378434 (TRAV26-1, TRAJ38)
RIADNAGNNRKLIW

SEQ ID NO: 756868 - protein, 17 aa, Homo sapiens
  CDR3 for beta chain variable domain of TCR clone 378434 (TRBV7-9, TRBJ2-3)
CASSPTGAGDLTDTQYF

SEQ ID NO: 756869 - protein, 12 aa, Homo sapiens
  CDR3 for alpha chain variable domain of TCR clone 378435 (TRAV2, TRAJ33)
CAVPDSNYQLIW

SEQ ID NO: 756870 - protein, 17 aa, Homo sapiens
  CDR3 for beta chain variable domain of TCR clone 378435 (TRBV7-8, TRBJ2-6)
CASSAGTGGAGANVLTF

SEQ ID NO: 756871 - protein, 12 aa, Homo sapiens
  CDR3 for alpha chain variable domain of TCR clone 378436 (TRAV13-2, TRAJ23)
CAERHRGGKLIF

SEQ ID NO: 756872 - protein, 15 aa, Homo sapiens
  CDR3 for beta chain variable domain of TCR clone 378436 (TRBV5-1, TRBJ2-1)
CASTGSGRTYNEQFF

SEQ ID NO: 756873 - protein, 14 aa, Homo sapiens
  CDR3 for alpha chain variable domain of TCR clone 378437 (TRAV16, TRAJ39)
CALSKNNAGNMLTF

SEQ ID NO: 756874 - protein, 16 aa, Homo sapiens
  CDR3 for beta chain variable domain of TCR clone 378437 (TRBV6-6, TRBJ2-1)
CASCYSFSGSYNEQFF

SEQ ID NO: 756875 - protein, 14 aa, Homo sapiens
  CDR3 for alpha chain variable domain of TCR clone 378438 (TRAV20, TRAJ56)
CAVQFGGANSKLTF

SEQ ID NO: 756876 - protein, 14 aa, Homo sapiens
  CDR3 for beta chain variable domain of TCR clone 378438 (TRBV7-2, TRBJ1-1)
CASSFLTGTTEDFF

SEQ ID NO: 756877 - protein, 14 aa, Homo sapiens
  CDR3 for alpha chain variable domain of TCR clone 378439 (TRAV1-2, TRAJ16)
CAVNRFSDGQKLLF

SEQ ID NO: 756878 - protein, 15 aa, Homo sapiens
  CDR3 for beta chain variable domain of TCR clone 378439 (TRBV5-1, TRBJ2-3)
CASSYTSGSTDTQYF

SEQ ID NO: 756879 - protein, 21 aa, Homo sapiens
  CDR3 for alpha chain variable domain of TCR clone 378440 (TRAV25, TRAJ7)
TATQTTDVGTYFCPGNNRLAF

SEQ ID NO: 756880 - protein, 14 aa, Homo sapiens
  CDR3 for beta chain variable domain of TCR clone 378440 (TRBV11-2, TRBJ2-2)
CASSLGLRVRELLF

SEQ ID NO: 756881 - protein, 18 aa, Homo sapiens
  CDR3 for alpha chain variable domain of TCR clone 378441 (TRAV13-1, TRAJ52)
CAAKNPNAGGTSYGKLKF

SEQ ID NO: 756882 - protein, 15 aa, Homo sapiens
  CDR3 for beta chain variable domain of TCR clone 378441 (TRBV27, TRBJ2-1)
CASSNGGGSSNEQFF

SEQ ID NO: 756883 - protein, 12 aa, Homo sapiens
  CDR3 for alpha chain variable domain of TCR clone 378442 (TRAV21, TRAJ29)
CCEDSGNTPLVF

SEQ ID NO: 756884 - protein, 15 aa, Homo sapiens
  CDR3 for beta chain variable domain of TCR clone 378442 (TRBV6-1, TRBJ2-3)
CASSERGGITDTQYF

SEQ ID NO: 756885 - protein, 15 aa, Homo sapiens
  CDR3 for alpha chain variable domain of TCR clone 378443 (TRAV8-3, TRAJ6)
CAVGPLGGGSYIPTF

SEQ ID NO: 756886 - protein, 14 aa, Homo sapiens
  CDR3 for beta chain variable domain of TCR clone 378443 (TRBV19, TRBJ2-2)
CANSTGQGAGELFF

SEQ ID NO: 756887 - protein, 16 aa, Homo sapiens
  CDR3 for alpha chain variable domain of TCR clone 378444 (TRAV3, TRAJ10)
CAVRDMRAGGGNKLTF

SEQ ID NO: 756888 - protein, 16 aa, Homo sapiens
  CDR3 for beta chain variable domain of TCR clone 378444 (TRBV20-1, TRBJ2-6)
CSASSQGYDGANVLTF

SEQ ID NO: 756889 - protein, 17 aa, Homo sapiens
  CDR3 for alpha chain variable domain of TCR clone 378445 (TRAV8-6, TRAJ58)
CAVSSWVGETSGSRLTF

SEQ ID NO: 756890 - protein, 15 aa, Homo sapiens
  CDR3 for beta chain variable domain of TCR clone 378445 (TRBV20-1, TRBJ2-7)
CSARDRVSGMEEQYF

SEQ ID NO: 756891 - protein, 18 aa, Homo sapiens
  CDR3 for alpha chain variable domain of TCR clone 378446 (TRAV21, TRAJ52)
CAVRPSPAGGTSYGKLTF

SEQ ID NO: 756892 - protein, 15 aa, Homo sapiens
  CDR3 for beta chain variable domain of TCR clone 378446 (TRBV18, TRBJ2-2)
CASSTSGLHTGELFF

SEQ ID NO: 756893 - protein, 16 aa, Homo sapiens
  CDR3 for alpha chain variable domain of TCR clone 378447 (TRAV30, TRAJ24)
CGTGIVDADSWGKFQF

SEQ ID NO: 756894 - protein, 17 aa, Homo sapiens
  CDR3 for beta chain variable domain of TCR clone 378447 (TRBV20-1, TRBJ2-2)
CSASGSGQGGLTGELFF

SEQ ID NO: 756895 - protein, 14 aa, Homo sapiens
  CDR3 for alpha chain variable domain of TCR clone 378448 (TRAV3, TRAJ40)
CAVRDRRGTYKSIF

SEQ ID NO: 756896 - protein, 15 aa, Homo sapiens
  CDR3 for beta chain variable domain of TCR clone 378448 (TRBV28, TRBJ2-1)
CASSIIAGGRSEQFF

SEQ ID NO: 756897 - protein, 16 aa, Homo sapiens
  CDR3 for alpha chain variable domain of TCR clone 378449 (TRAV30, TRAJ24)
CGTEIVDADSWGKFQF

SEQ ID NO: 756898 - protein, 12 aa, Homo sapiens
  CDR3 for beta chain variable domain of TCR clone 378449 (TRBV5-4, TRBJ2-7)
CASSWAGQGENF

SEQ ID NO: 756899 - protein, 16 aa, Homo sapiens
  CDR3 for alpha chain variable domain of TCR clone 378450 (TRAV12-2, TRAJ45)
CAANRGSGGDADGLTF

SEQ ID NO: 756900 - protein, 15 aa, Homo sapiens
  CDR3 for beta chain variable domain of TCR clone 378450 (TRBV9, TRBJ1-4)
CASSGTGGAYEKLLF

SEQ ID NO: 756901 - protein, 14 aa, Homo sapiens
  CDR3 for alpha chain variable domain of TCR clone 378451 (TRAV12-2, TRAJ44)
CAVNKSGTASKLTF

SEQ ID NO: 756902 - protein, 12 aa, Homo sapiens
  CDR3 for beta chain variable domain of TCR clone 378451 (TRBV19, TRBJ1-4)
CASKDWPGGLFF

SEQ ID NO: 756903 - protein, 12 aa, Homo sapiens
  CDR3 for alpha chain variable domain of TCR clone 378452 (TRAV12-3, TRAJ17)
CAMTLTGNKLTF

SEQ ID NO: 756904 - protein, 15 aa, Homo sapiens
  CDR3 for beta chain variable domain of TCR clone 378452 (TRBV4-1, TRBJ1-4)
CASSDTGGTNEKLFC

SEQ ID NO: 756905 - protein, 13 aa, Homo sapiens
  CDR3 for alpha chain variable domain of TCR clone 378453 (TRAV36/DV7, TRAJ49)
CAGDSNTGNQFYF

SEQ ID NO: 756906 - protein, 16 aa, Homo sapiens
  CDR3 for beta chain variable domain of TCR clone 378453 (TRBV5-1, TRBJ1-1)
CSSSKTGTEVGTEAFF

SEQ ID NO: 756907 - protein, 14 aa, Homo sapiens
  CDR3 for alpha chain variable domain of TCR clone 378454 (TRAV8-4, TRAJ37)
CAVSESSNTGKLIF

SEQ ID NO: 756908 - protein, 15 aa, Homo sapiens
  CDR3 for beta chain variable domain of TCR clone 378454 (TRBV4-3, TRBJ1-6)
CASSQDSQGGSPLHF

SEQ ID NO: 756909 - protein, 14 aa, Homo sapiens
  CDR3 for alpha chain variable domain of TCR clone 378455 (TRAV12-3, TRAJ56)
CAMSVTGANSKLTF

SEQ ID NO: 756910 - protein, 14 aa, Homo sapiens
  CDR3 for beta chain variable domain of TCR clone 378455 (TRBV7-9, TRBJ2-2)
CASSLVQDTGELFF

SEQ ID NO: 756911 - protein, 14 aa, Homo sapiens
  CDR3 for alpha chain variable domain of TCR clone 378456 (TRAV13-1, TRAJ44)
CAAKATGTASKLTF

SEQ ID NO: 756912 - protein, 14 aa, Homo sapiens
  CDR3 for beta chain variable domain of TCR clone 378456 (TRBV28, TRBJ2-1)
CASSLVAPYNEQFF

SEQ ID NO: 756913 - protein, 14 aa, Homo sapiens
  CDR3 for alpha chain variable domain of TCR clone 378457 (TRAV2, TRAJ9)
CAVEDRSGGFKTIF

SEQ ID NO: 756914 - protein, 15 aa, Homo sapiens
  CDR3 for beta chain variable domain of TCR clone 378457 (TRBV20-1, TRBJ2-7)
CSARDRVSGMDGQYF

SEQ ID NO: 756915 - protein, 10 aa, Homo sapiens
  CDR3 for alpha chain variable domain of TCR clone 378458 (TRAV1-2, TRAJ31)
CAFFDARLMF

SEQ ID NO: 756916 - protein, 16 aa, Homo sapiens
  CDR3 for beta chain variable domain of TCR clone 378458 (TRBV4-1, TRBJ2-7)
CASSRGDILNSYEQYF

SEQ ID NO: 756917 - protein, 14 aa, Homo sapiens
  CDR3 for alpha chain variable domain of TCR clone 378459 (TRAV4, TRAJ17)
FLVGDLAAGNKLTL

SEQ ID NO: 756918 - protein, 14 aa, Homo sapiens
  CDR3 for beta chain variable domain of TCR clone 378459 (TRBV7-6, TRBJ2-3)
CASSLGTVTDTQYF

SEQ ID NO: 756919 - protein, 10 aa, Homo sapiens
  CDR3 for alpha chain variable domain of TCR clone 378460 (TRAV23/DV6, TRAJ23)
CAASMKGKKP

SEQ ID NO: 756920 - protein, 17 aa, Homo sapiens
  CDR3 for beta chain variable domain of TCR clone 378460 (TRBV13, TRBJ2-3)
CASSLSRVAGGRNTQYF

SEQ ID NO: 756921 - protein, 16 aa, Homo sapiens
  CDR3 for alpha chain variable domain of TCR clone 378461 (TRAV30, TRAJ24)
CGTEIVSADSWGKFQF

SEQ ID NO: 756922 - protein, 14 aa, Homo sapiens
  CDR3 for beta chain variable domain of TCR clone 378461 (TRBV12-5, TRBJ2-5)
CASGSRTHQETQYF

SEQ ID NO: 756923 - protein, 16 aa, Homo sapiens
  CDR3 for alpha chain variable domain of TCR clone 378462 (TRAV23/DV6, TRAJ48)
CAASGVVNFGSEKLTF

SEQ ID NO: 756924 - protein, 15 aa, Homo sapiens
  CDR3 for beta chain variable domain of TCR clone 378462 (TRBV20-1, TRBJ2-5)
CSAGLAGVSQETQYF

SEQ ID NO: 756925 - protein, 12 aa, Homo sapiens
  CDR3 for alpha chain variable domain of TCR clone 378463 (TRAV2, TRAJ31)
CAVEDNNARLMF

SEQ ID NO: 756926 - protein, 14 aa, Homo sapiens
  CDR3 for beta chain variable domain of TCR clone 378463 (TRBV19, TRBJ2-7)
CASTVQGRPYEQYF

SEQ ID NO: 756927 - protein, 17 aa, Homo sapiens
  CDR3 for alpha chain variable domain of TCR clone 378464 (TRAV3, TRAJ6)
CAVRDGPRAGGSYIPTF

SEQ ID NO: 756928 - protein, 13 aa, Homo sapiens
  CDR3 for beta chain variable domain of TCR clone 378464 (TRBV27, TRBJ2-1)
CASRTLGVCEQFF

SEQ ID NO: 756929 - protein, 13 aa, Homo sapiens
  CDR3 for alpha chain variable domain of TCR clone 378465 (TRAV1-1, TRAJ9)
CAAKNTGGFKTIF

SEQ ID NO: 756930 - protein, 16 aa, Homo sapiens
  CDR3 for beta chain variable domain of TCR clone 378465 (TRBV25-1, TRBJ2-7)
CASSELTGGGIYEQYF

SEQ ID NO: 756931 - protein, 14 aa, Homo sapiens
  CDR3 for alpha chain variable domain of TCR clone 378466 (TRAV12-3, TRAJ10)
SHLPLTGGGNKLIF

SEQ ID NO: 756932 - protein, 19 aa, Homo sapiens
  CDR3 for beta chain variable domain of TCR clone 378466 (TRBV4-1, TRBJ1-1)
CASSRIILTPRGVNTEAFF

SEQ ID NO: 756933 - protein, 14 aa, Homo sapiens
  CDR3 for alpha chain variable domain of TCR clone 378467 (TRAV26-1, TRAJ15)
CIEAGNQAGTALIF

SEQ ID NO: 756934 - protein, 12 aa, Homo sapiens
  CDR3 for beta chain variable domain of TCR clone 378467 (TRBV7-9, TRBJ2-7)
CASSIKREEQYF

SEQ ID NO: 756935 - protein, 14 aa, Homo sapiens
  CDR3 for alpha chain variable domain of TCR clone 378468 (TRAV12-2, TRAJ21)
CAPRTTSTNFTLDL

SEQ ID NO: 756936 - protein, 16 aa, Homo sapiens
  CDR3 for beta chain variable domain of TCR clone 378468 (TRBV13, TRBJ2-2)
CASSPRTGEHTGELFF

SEQ ID NO: 756937 - protein, 13 aa, Homo sapiens
  CDR3 for alpha chain variable domain of TCR clone 378469 (TRAV3, TRAJ8)
CAVRFTGFQKLVF

SEQ ID NO: 756938 - protein, 16 aa, Homo sapiens
  CDR3 for beta chain variable domain of TCR clone 378469 (TRBV4-1, TRBJ1-5)
CASSQGGHTTNQPQHF

SEQ ID NO: 756939 - protein, 16 aa, Homo sapiens
  CDR3 for alpha chain variable domain of TCR clone 378470 (TRAV30, TRAJ24)
CGTEIVDADSWGKFQW

SEQ ID NO: 756940 - protein, 14 aa, Homo sapiens
  CDR3 for beta chain variable domain of TCR clone 378470 (TRBV12-5, TRBJ2-5)
CASGSRTHQETQYF

SEQ ID NO: 756941 - protein, 15 aa, Homo sapiens
  CDR3 for alpha chain variable domain of TCR clone 378471 (TRAV12-3, TRAJ6)
CAMSATTGGSYIPTF

SEQ ID NO: 756942 - protein, 15 aa, Homo sapiens
  CDR3 for beta chain variable domain of TCR clone 378471 (TRBV5-1, TRBJ2-7)
CASSLNGGPAREHYF

SEQ ID NO: 756943 - protein, 16 aa, Homo sapiens
  CDR3 for alpha chain variable domain of TCR clone 378472 (TRAV30, TRAJ24)
CGTEIVDADSWGKFRF

SEQ ID NO: 756944 - protein, 14 aa, Homo sapiens
  CDR3 for beta chain variable domain of TCR clone 378472 (TRBV12-5, TRBJ2-5)
CASGSRTHQENQYF

SEQ ID NO: 756945 - protein, 12 aa, Homo sapiens
  CDR3 for alpha chain variable domain of TCR clone 378473 (TRAV12-3, TRAJ17)
CAMTLTGNKLTL

SEQ ID NO: 756946 - protein, 18 aa, Homo sapiens
  CDR3 for beta chain variable domain of TCR clone 378473 (TRBV11-2, TRBJ2-6)
CASSLNPFLGTGANVLTF

SEQ ID NO: 756947 - protein, 10 aa, Homo sapiens
  CDR3 for alpha chain variable domain of TCR clone 378474 (TRAV38-1, TRAJ53)
CAFLKHGLES

SEQ ID NO: 756948 - protein, 13 aa, Homo sapiens
  CDR3 for beta chain variable domain of TCR clone 378474 (TRBV19, TRBJ2-7)
CASSPRQSYEQYF

SEQ ID NO: 756949 - protein, 12 aa, Homo sapiens
  CDR3 for alpha chain variable domain of TCR clone 378475 (TRAV8-3, TRAJ43)
SAVGAGNNDMRF

SEQ ID NO: 756950 - protein, 14 aa, Homo sapiens
  CDR3 for beta chain variable domain of TCR clone 378475 (TRBV4-2, TRBJ1-5)
CASSRDRGNQPQHF

SEQ ID NO: 756951 - protein, 17 aa, Homo sapiens
  CDR3 for alpha chain variable domain of TCR clone 378476 (TRAV4, TRAJ18)
CLVGERSVGSTLGRLYF

SEQ ID NO: 756952 - protein, 14 aa, Homo sapiens
  CDR3 for beta chain variable domain of TCR clone 378476 (TRBV6-5, TRBJ1-2)
CASSYDGTGRGYTF

SEQ ID NO: 756953 - protein, 13 aa, Homo sapiens
  CDR3 for alpha chain variable domain of TCR clone 378477 (TRAV35, TRAJ37)
CAGSSGNTGNLIF

SEQ ID NO: 756954 - protein, 16 aa, Homo sapiens
  CDR3 for beta chain variable domain of TCR clone 378477 (TRBV10-3, TRBJ2-1)
CAISLTSGNSYNEQFF

SEQ ID NO: 756955 - protein, 15 aa, Homo sapiens
  CDR3 for alpha chain variable domain of TCR clone 378478 (TRAV23/DV6, TRAJ18)
CAARYRGSTLGMLYF

SEQ ID NO: 756956 - protein, 15 aa, Homo sapiens
  CDR3 for beta chain variable domain of TCR clone 378478 (TRBV20-1, TRBJ2-7)
CSARDRVSGMDEQYF

SEQ ID NO: 756957 - protein, 15 aa, Homo sapiens
  CDR3 for alpha chain variable domain of TCR clone 378479 (TRAV3, TRAJ17)
CAVSPKEAAGNKLTF

SEQ ID NO: 756958 - protein, 14 aa, Homo sapiens
  CDR3 for beta chain variable domain of TCR clone 378479 (TRBV7-9, TRBJ2-5)
CASSLAFGQETQYF

SEQ ID NO: 756959 - protein, 13 aa, Homo sapiens
  CDR3 for alpha chain variable domain of TCR clone 378480 (TRAV17, TRAJ41)
CATGRNSGYALNL

SEQ ID NO: 756960 - protein, 12 aa, Homo sapiens
  CDR3 for beta chain variable domain of TCR clone 378480 (TRBV12-4, TRBJ2-7)
CASSLGGYEQYF

SEQ ID NO: 756961 - protein, 16 aa, Homo sapiens
  CDR3 for alpha chain variable domain of TCR clone 378481 (TRAV30, TRAJ24)
CGTEMVYADSWGKFQF

SEQ ID NO: 756962 - protein, 14 aa, Homo sapiens
  CDR3 for beta chain variable domain of TCR clone 378481 (TRBV12-5, TRBJ2-5)
CASGSRTHQETQYF

SEQ ID NO: 756963 - protein, 12 aa, Homo sapiens
  CDR3 for alpha chain variable domain of TCR clone 378482 (TRAV8-3, TRAJ20)
CAVGANDYKLSS

SEQ ID NO: 756964 - protein, 15 aa, Homo sapiens
  CDR3 for beta chain variable domain of TCR clone 378482 (TRBV11-2, TRBJ2-1)
CASSLGTSGLNEQFF

SEQ ID NO: 756965 - protein, 12 aa, Homo sapiens
  CDR3 for alpha chain variable domain of TCR clone 378483 (TRAV13-1, TRAJ21)
CAATEGSNKFYF

SEQ ID NO: 756966 - protein, 17 aa, Homo sapiens
  CDR3 for beta chain variable domain of TCR clone 378483 (TRBV19, TRBJ2-7)
CASSISFYDSYPYEQYF

SEQ ID NO: 756967 - protein, 14 aa, Homo sapiens
  CDR3 for alpha chain variable domain of TCR clone 378484 (TRAV1-2, TRAJ8)
CAAREDTGFQKLVF

SEQ ID NO: 756968 - protein, 15 aa, Homo sapiens
  CDR3 for beta chain variable domain of TCR clone 378484 (TRBV9, TRBJ1-6)
CASSVAGTGDSPLHF

SEQ ID NO: 756969 - protein, 19 aa, Homo sapiens
  CDR3 for alpha chain variable domain of TCR clone 378485 (TRAV1-2, TRAJ26)
CLLPLCCDRPDNYGQNFVF

SEQ ID NO: 756970 - protein, 15 aa, Homo sapiens
  CDR3 for beta chain variable domain of TCR clone 378485 (TRBV9, TRBJ1-6)
CASSVAGTGDSPLHF

SEQ ID NO: 756971 - protein, 13 aa, Homo sapiens
  CDR3 for alpha chain variable domain of TCR clone 378486 (TRAV1-2, TRAJ9)
CAALNTGGFKTIF

SEQ ID NO: 756972 - protein, 13 aa, Homo sapiens
  CDR3 for beta chain variable domain of TCR clone 378486 (TRBV7-9, TRBJ1-2)
CASSLKQNYDYSF

SEQ ID NO: 756973 - protein, 11 aa, Homo sapiens
  CDR3 for alpha chain variable domain of TCR clone 378487 (TRAV1-1, TRAJ23)
CAVRQGGKLIF

SEQ ID NO: 756974 - protein, 15 aa, Homo sapiens
  CDR3 for beta chain variable domain of TCR clone 378487 (TRBV25-1, TRBJ2-5)
CASSDTGTHQETQYF

SEQ ID NO: 756975 - protein, 13 aa, Homo sapiens
  CDR3 for alpha chain variable domain of TCR clone 378488 (TRAV13-2, TRAJ13)
CAERTGGYQKVTF

SEQ ID NO: 756976 - protein, 14 aa, Homo sapiens
  CDR3 for beta chain variable domain of TCR clone 378488 (TRBV23-1, TRBJ2-5)
CASSFLRSQETQYF

SEQ ID NO: 756977 - protein, 13 aa, Homo sapiens
  CDR3 for alpha chain variable domain of TCR clone 378489 (TRAV8-6, TRAJ49)
CAVITNTGNQFYF

SEQ ID NO: 756978 - protein, 15 aa, Homo sapiens
  CDR3 for beta chain variable domain of TCR clone 378489 (TRBV7-2, TRBJ2-3)
CASSLVVRGPDTQYF

SEQ ID NO: 756979 - protein, 14 aa, Homo sapiens
  CDR3 for alpha chain variable domain of TCR clone 378490 (TRAV20, TRAJ42)
CAVQAGGSQGNLIF

SEQ ID NO: 756980 - protein, 11 aa, Homo sapiens
  CDR3 for beta chain variable domain of TCR clone 378490 (TRBV7-8, TRBJ2-7)
CASSLSLEQYF

SEQ ID NO: 756981 - protein, 16 aa, Homo sapiens
  CDR3 for alpha chain variable domain of TCR clone 378491 (TRAV3, TRAJ37)
CAVRGKGSGNTGKLIF

SEQ ID NO: 756982 - protein, 14 aa, Homo sapiens
  CDR3 for beta chain variable domain of TCR clone 378491 (TRBV7-2, TRBJ2-2)
CASSLNSNTGELFF

SEQ ID NO: 756983 - protein, 15 aa, Homo sapiens
  CDR3 for alpha chain variable domain of TCR clone 378492 (TRAV21, TRAJ52)
CAERGGGTSYGKLTF

SEQ ID NO: 756984 - protein, 15 aa, Homo sapiens
  CDR3 for beta chain variable domain of TCR clone 378492 (TRBV18, TRBJ1-5)
CASSPSDRSNQPQHF

SEQ ID NO: 756985 - protein, 14 aa, Homo sapiens
  CDR3 for alpha chain variable domain of TCR clone 378493 (TRAV20, TRAJ56)
CAVQFGGANSKLTF

SEQ ID NO: 756986 - protein, 13 aa, Homo sapiens
  CDR3 for beta chain variable domain of TCR clone 378493 (TRBV5-5, TRBJ1-2)
CASSFWRGEDYTF

SEQ ID NO: 756987 - protein, 12 aa, Homo sapiens
  CDR3 for alpha chain variable domain of TCR clone 378494 (TRAV12-2, TRAJ17)
CAMTLTGNKLTF

SEQ ID NO: 756988 - protein, 16 aa, Homo sapiens
  CDR3 for beta chain variable domain of TCR clone 378494 (TRBV2, TRBJ2-1)
CASRSPAGGKYNEQFF

SEQ ID NO: 756989 - protein, 15 aa, Homo sapiens
  CDR3 for alpha chain variable domain of TCR clone 378495 (TRAV8-3, TRAJ11)
CAVGLLNSGYSTLTF

SEQ ID NO: 756990 - protein, 14 aa, Homo sapiens
  CDR3 for beta chain variable domain of TCR clone 378495 (TRBV27, TRBJ2-1)
CAGSIAETYNEQFF

SEQ ID NO: 756991 - protein, 13 aa, Homo sapiens
  CDR3 for alpha chain variable domain of TCR clone 378496 (TRAV12-2, TRAJ37)
CAGGSGNTGKLIF

SEQ ID NO: 756992 - protein, 15 aa, Homo sapiens
  CDR3 for beta chain variable domain of TCR clone 378496 (TRBV7-2, TRBJ2-1)
CASSSRTSREDEQFF

SEQ ID NO: 756993 - protein, 14 aa, Homo sapiens
  CDR3 for alpha chain variable domain of TCR clone 378497 (TRAV12-2, TRAJ17)
CAVLFKAASNKLTF

SEQ ID NO: 756994 - protein, 17 aa, Homo sapiens
  CDR3 for beta chain variable domain of TCR clone 378497 (TRBV20-1, TRBJ2-2)
CSASGSGQGGLTGELFV

SEQ ID NO: 756995 - protein, 14 aa, Homo sapiens
  CDR3 for alpha chain variable domain of TCR clone 378498 (TRAV27, TRAJ17)
CRSPIRAAGNKLTF

SEQ ID NO: 756996 - protein, 16 aa, Homo sapiens
  CDR3 for beta chain variable domain of TCR clone 378498 (TRBV5-7, TRBJ2-5)
CASTVAPAGGRETQYF

SEQ ID NO: 756997 - protein, 18 aa, Homo sapiens
  CDR3 for alpha chain variable domain of TCR clone 378499 (TRAV26-1, TRAJ23)
CIVRVGLEGSNQGGKLIF

SEQ ID NO: 756998 - protein, 16 aa, Homo sapiens
  CDR3 for beta chain variable domain of TCR clone 378499 (TRBV12-4, TRBJ2-5)
CASSFFVRGRQETQYF

SEQ ID NO: 756999 - protein, 14 aa, Homo sapiens
  CDR3 for alpha chain variable domain of TCR clone 378500 (TRAV12-2, TRAJ53)
CAVKGGGSNYKLTS

SEQ ID NO: 757000 - protein, 14 aa, Homo sapiens
  CDR3 for beta chain variable domain of TCR clone 378500 (TRBV4-1, TRBJ2-3)
CASSQEWSTDTQYF

SEQ ID NO: 757001 - protein, 15 aa, Homo sapiens
  CDR3 for alpha chain variable domain of TCR clone 378501 (TRAV26-1, TRAJ22)
CIVRVSFWFCKATDL

SEQ ID NO: 757002 - protein, 13 aa, Homo sapiens
  CDR3 for beta chain variable domain of TCR clone 378501 (TRBV7-9, TRBJ1-2)
CATSLKQNYGYTF

SEQ ID NO: 757003 - protein, 16 aa, Homo sapiens
  CDR3 for alpha chain variable domain of TCR clone 378502 (TRAV26-1, TRAJ23)
CIVRPRFYNQGGKLIF

SEQ ID NO: 757004 - protein, 13 aa, Homo sapiens
  CDR3 for beta chain variable domain of TCR clone 378502 (TRBV20-1, TRBJ2-2)
CSALSGGAGELFF

SEQ ID NO: 757005 - protein, 15 aa, Homo sapiens
  CDR3 for alpha chain variable domain of TCR clone 378503 (TRAV3, TRAJ4)
CAVRDGTGGYNKLIC

SEQ ID NO: 757006 - protein, 16 aa, Homo sapiens
  CDR3 for beta chain variable domain of TCR clone 378503 (TRBV27, TRBJ2-2)
CASSSSGVSDTGELFF

SEQ ID NO: 757007 - protein, 16 aa, Homo sapiens
  CDR3 for alpha chain variable domain of TCR clone 378504 (TRAV23/DV6, TRAJ9)
CAARIGGNTGGFKAIF

SEQ ID NO: 757008 - protein, 14 aa, Homo sapiens
  CDR3 for beta chain variable domain of TCR clone 378504 (TRBV9, TRBJ2-7)
CASSVGVGSYEQYF

SEQ ID NO: 757009 - protein, 12 aa, Homo sapiens
  CDR3 for alpha chain variable domain of TCR clone 378505 (TRAV16, TRAJ15)
CSNRQAGTALIF

SEQ ID NO: 757010 - protein, 15 aa, Homo sapiens
  CDR3 for beta chain variable domain of TCR clone 378505 (TRBV4-1, TRBJ1-1)
CASSYYGTGGTEAFF

SEQ ID NO: 757011 - protein, 15 aa, Homo sapiens
  CDR3 for alpha chain variable domain of TCR clone 378506 (TRAV36/DV7, TRAJ44)
CAVCRNTGTASKLTF

SEQ ID NO: 757012 - protein, 16 aa, Homo sapiens
  CDR3 for beta chain variable domain of TCR clone 378506 (TRBV12-4, TRBJ1-5)
CASSSGPRGSNQPQHF

SEQ ID NO: 757013 - protein, 12 aa, Homo sapiens
  CDR3 for alpha chain variable domain of TCR clone 378507 (TRAV4, TRAJ26)
CLVGDYGQNFVF

SEQ ID NO: 757014 - protein, 16 aa, Homo sapiens
  CDR3 for beta chain variable domain of TCR clone 378507 (TRBV7-9, TRBJ2-1)
CASSDVAGGSYNEQFF

SEQ ID NO: 757015 - protein, 15 aa, Homo sapiens
  CDR3 for alpha chain variable domain of TCR clone 378508 (TRAV3, TRAJ5)
CAVRDLDTGRRALTF

SEQ ID NO: 757016 - protein, 15 aa, Homo sapiens
  CDR3 for beta chain variable domain of TCR clone 378508 (TRBV10-2, TRBJ2-5)
CASKPEDRRQETQYF

SEQ ID NO: 757017 - protein, 12 aa, Homo sapiens
  CDR3 for alpha chain variable domain of TCR clone 378509 (TRAV3, TRAJ43)
CAVSDPNNDMRF

SEQ ID NO: 757018 - protein, 12 aa, Homo sapiens
  CDR3 for beta chain variable domain of TCR clone 378509 (TRBV24-1, TRBJ1-1)
CATSDSDRGAFF

SEQ ID NO: 757019 - protein, 16 aa, Homo sapiens
  CDR3 for alpha chain variable domain of TCR clone 378510 (TRAV14/DV4, TRAJ15)
CAMGEGPAQAGTALIF

SEQ ID NO: 757020 - protein, 12 aa, Homo sapiens
  CDR3 for beta chain variable domain of TCR clone 378510 (TRBV28, TRBJ2-6)
CAIQAGANGLTF

SEQ ID NO: 757021 - protein, 14 aa, Homo sapiens
  CDR3 for alpha chain variable domain of TCR clone 378511 (TRAV1-2, TRAJ16)
CAVNRFSDGQKLLF

SEQ ID NO: 757022 - protein, 13 aa, Homo sapiens
  CDR3 for beta chain variable domain of TCR clone 378511 (TRBV7-2, TRBJ2-4)
WASSREHANIQYF

SEQ ID NO: 757023 - protein, 14 aa, Homo sapiens
  CDR3 for alpha chain variable domain of TCR clone 378512 (TRAV8-4, TRAJ23)
CAVSAPGSGGKLIF

SEQ ID NO: 757024 - protein, 17 aa, Homo sapiens
  CDR3 for beta chain variable domain of TCR clone 378512 (TRBV4-3, TRBJ2-3)
CASSPDPLEGAVDTQYF

SEQ ID NO: 757025 - protein, 12 aa, Homo sapiens
  CDR3 for alpha chain variable domain of TCR clone 378513 (TRAV1-1, TRAJ30)
CAVRGRDYKIIF

SEQ ID NO: 757026 - protein, 14 aa, Homo sapiens
  CDR3 for beta chain variable domain of TCR clone 378513 (TRBV6-1, TRBJ1-3)
CASVQGGGGNTIYF

SEQ ID NO: 757027 - protein, 14 aa, Homo sapiens
  CDR3 for alpha chain variable domain of TCR clone 378514 (TRAV1-2, TRAJ8)
CAVREDTGYQKLVF

SEQ ID NO: 757028 - protein, 16 aa, Homo sapiens
  CDR3 for beta chain variable domain of TCR clone 378514 (TRBV12-5, TRBJ2-5)
CASGPRTSGNQETQYF

SEQ ID NO: 757029 - protein, 12 aa, Homo sapiens
  CDR3 for alpha chain variable domain of TCR clone 378515 (TRAV12-3, TRAJ17)
CAMTLTGNKLAF

SEQ ID NO: 757030 - protein, 14 aa, Homo sapiens
  CDR3 for beta chain variable domain of TCR clone 378515 (TRBV18, TRBJ2-5)
CASSPGVSQETQYF

SEQ ID NO: 757031 - protein, 13 aa, Homo sapiens
  CDR3 for alpha chain variable domain of TCR clone 378516 (TRAV3, TRAJ15)
CAVRDQAGTALIF

SEQ ID NO: 757032 - protein, 13 aa, Homo sapiens
  CDR3 for beta chain variable domain of TCR clone 378516 (TRBV7-9, TRBJ1-2)
CASSLKQNYGYTF

SEQ ID NO: 757033 - protein, 11 aa, Homo sapiens
  CDR3 for alpha chain variable domain of TCR clone 378517 (TRAV1-2, TRAJ31)
CAVNNNARLMF

SEQ ID NO: 757034 - protein, 17 aa, Homo sapiens
  CDR3 for beta chain variable domain of TCR clone 378517 (TRBV7-3, TRBJ2-3)
CASSLMKRMRGADTQYF

SEQ ID NO: 757035 - protein, 13 aa, Homo sapiens
  CDR3 for alpha chain variable domain of TCR clone 378518 (TRAV23/DV6, TRAJ15)
CAALPAGRNCSDL

SEQ ID NO: 757036 - protein, 14 aa, Homo sapiens
  CDR3 for beta chain variable domain of TCR clone 378518 (TRBV7-9, TRBJ1-2)
CASSRQGANYGYIF

SEQ ID NO: 757037 - protein, 13 aa, Homo sapiens
  CDR3 for alpha chain variable domain of TCR clone 378519 (TRAV2, TRAJ40)
CAVVTSGTYKYSF

SEQ ID NO: 757038 - protein, 14 aa, Homo sapiens
  CDR3 for beta chain variable domain of TCR clone 378519 (TRBV6-1, TRBJ1-3)
CASVQGGGGNTIYF

SEQ ID NO: 757039 - protein, 13 aa, Homo sapiens
  CDR3 for alpha chain variable domain of TCR clone 378520 (TRAV12-1, TRAJ33)
CGDAPDSNFQLIW

SEQ ID NO: 757040 - protein, 14 aa, Homo sapiens
  CDR3 for beta chain variable domain of TCR clone 378520 (TRBV13, TRBJ2-7)
CASSLKGASYEQYF

SEQ ID NO: 757041 - protein, 17 aa, Homo sapiens
  CDR3 for alpha chain variable domain of TCR clone 378521 (TRAV12-2, TRAJ48)
CASNEKLTFGTGTRLTI

SEQ ID NO: 757042 - protein, 15 aa, Homo sapiens
  CDR3 for beta chain variable domain of TCR clone 378521 (TRBV20-1, TRBJ2-7)
CSARDRVSGMDEQYF

SEQ ID NO: 757043 - protein, 16 aa, Homo sapiens
  CDR3 for alpha chain variable domain of TCR clone 378522 (TRAV8-6, TRAJ39)
CAVMPMNNNAGNMLTF

SEQ ID NO: 757044 - protein, 13 aa, Homo sapiens
  CDR3 for beta chain variable domain of TCR clone 378522 (TRBV12-5, TRBJ2-3)
CASGDRQSDTQYF

SEQ ID NO: 757045 - protein, 14 aa, Homo sapiens
  CDR3 for alpha chain variable domain of TCR clone 378523 (TRAV17, TRAJ6)
CATFSSGGSYIPTF

SEQ ID NO: 757046 - protein, 15 aa, Homo sapiens
  CDR3 for beta chain variable domain of TCR clone 378523 (TRBV11-2, TRBJ2-1)
CASSLTSGGYNEQFF

SEQ ID NO: 757047 - protein, 14 aa, Homo sapiens
  CDR3 for alpha chain variable domain of TCR clone 378524 (TRAV1-1, TRAJ28)
CAAPSGAGSYQLTF

SEQ ID NO: 757048 - protein, 15 aa, Homo sapiens
  CDR3 for beta chain variable domain of TCR clone 378524 (TRBV7-2, TRBJ1-2)
CASSLVSGGDYGDAF

SEQ ID NO: 757049 - protein, 15 aa, Homo sapiens
  CDR3 for alpha chain variable domain of TCR clone 378525 (TRAV12-2, TRAJ53)
CAVNGGGGSNYKLTF

SEQ ID NO: 757050 - protein, 17 aa, Homo sapiens
  CDR3 for beta chain variable domain of TCR clone 378525 (TRBV7-3, TRBJ2-3)
RASSLMKRMRGADTQYV

SEQ ID NO: 757051 - protein, 13 aa, Homo sapiens
  CDR3 for alpha chain variable domain of TCR clone 378526 (TRAV21, TRAJ57)
CAVTQGGSEKLVF

SEQ ID NO: 757052 - protein, 14 aa, Homo sapiens
  CDR3 for beta chain variable domain of TCR clone 378526 (TRBV6-5, TRBJ1-6)
CASSDRAGNSPLHF

SEQ ID NO: 757053 - protein, 13 aa, Homo sapiens
  CDR3 for alpha chain variable domain of TCR clone 378527 (TRAV16, TRAJ28)
CAPTGAGSYQPTF

SEQ ID NO: 757054 - protein, 16 aa, Homo sapiens
  CDR3 for beta chain variable domain of TCR clone 378527 (TRBV28, TRBJ1-5)
CASSLTGQGWNQPQHF

SEQ ID NO: 757055 - protein, 13 aa, Homo sapiens
  CDR3 for alpha chain variable domain of TCR clone 378528 (TRAV13-1, TRAJ20)
CAARVSNDYKLSF

SEQ ID NO: 757056 - protein, 16 aa, Homo sapiens
  CDR3 for beta chain variable domain of TCR clone 378528 (TRBV11-1, TRBJ1-1)
CATNPRDRAFDTEAVF

SEQ ID NO: 757057 - protein, 16 aa, Homo sapiens
  CDR3 for alpha chain variable domain of TCR clone 378529 (TRAV17, TRAJ54)
CATDSDIIQGAQKLVF

SEQ ID NO: 757058 - protein, 15 aa, Homo sapiens
  CDR3 for beta chain variable domain of TCR clone 378529 (TRBV20-1, TRBJ2-7)
CSARDRVSGMDEQYL

SEQ ID NO: 757059 - protein, 12 aa, Homo sapiens
  CDR3 for alpha chain variable domain of TCR clone 378530 (TRAV8-3, TRAJ26)
CAGDNYGQNFDF

SEQ ID NO: 757060 - protein, 12 aa, Homo sapiens
  CDR3 for beta chain variable domain of TCR clone 378530 (TRBV11-2, TRBJ2-1)
CASSPGNNEQFF

SEQ ID NO: 757061 - protein, 11 aa, Homo sapiens
  CDR3 for alpha chain variable domain of TCR clone 378531 (TRAV1-1, TRAJ30)
CAQNRDDKIIF

SEQ ID NO: 757062 - protein, 15 aa, Homo sapiens
  CDR3 for beta chain variable domain of TCR clone 378531 (TRBV5-1, TRBJ2-1)
CASSPPRAPYNEQFF

SEQ ID NO: 757063 - protein, 16 aa, Homo sapiens
  CDR3 for alpha chain variable domain of TCR clone 378532 (TRAV23/DV6, TRAJ9)
CAASIGGNTGGFKPIF

SEQ ID NO: 757064 - protein, 13 aa, Homo sapiens
  CDR3 for beta chain variable domain of TCR clone 378532 (TRBV7-3, TRBJ1-1)
CASSQDWGAEAFF

SEQ ID NO: 757065 - protein, 14 aa, Homo sapiens
  CDR3 for alpha chain variable domain of TCR clone 378533 (TRAV12-2, TRAJ13)
CSVKKTGGYQKVTF

SEQ ID NO: 757066 - protein, 20 aa, Homo sapiens
  CDR3 for beta chain variable domain of TCR clone 378533 (TRBV7-8, TRBJ2-2)
CASSHLFPGPTIHITGELFF

SEQ ID NO: 757067 - protein, 11 aa, Homo sapiens
  CDR3 for alpha chain variable domain of TCR clone 378534 (TRAV36/DV7, TRAJ20)
CAANNDYKPSF

SEQ ID NO: 757068 - protein, 13 aa, Homo sapiens
  CDR3 for beta chain variable domain of TCR clone 378534 (TRBV6-1, TRBJ2-7)
CASRASGGYEQYF

SEQ ID NO: 757069 - protein, 13 aa, Homo sapiens
  CDR3 for alpha chain variable domain of TCR clone 378535 (TRAV1-2, TRAJ36)
CAVDQTGSNNLFF

SEQ ID NO: 757070 - protein, 14 aa, Homo sapiens
  CDR3 for beta chain variable domain of TCR clone 378535 (TRBV20-1, TRBJ2-5)
CSAREMTKQETQYF

SEQ ID NO: 757071 - protein, 13 aa, Homo sapiens
  CDR3 for alpha chain variable domain of TCR clone 378536 (TRAV29/DV5, TRAJ31)
CAASRNNNARLMF

SEQ ID NO: 757072 - protein, 16 aa, Homo sapiens
  CDR3 for beta chain variable domain of TCR clone 378536 (TRBV19, TRBJ2-2)
CASRSPVTGATGELFF

SEQ ID NO: 757073 - protein, 16 aa, Homo sapiens
  CDR3 for alpha chain variable domain of TCR clone 378537 (TRAV3, TRAJ37)
CAVRPHGSGNTGKLIF

SEQ ID NO: 757074 - protein, 16 aa, Homo sapiens
  CDR3 for beta chain variable domain of TCR clone 378537 (TRBV29-1, TRBJ2-7)
CSVEVVGTSGSYEQYF

SEQ ID NO: 757075 - protein, 12 aa, Homo sapiens
  CDR3 for alpha chain variable domain of TCR clone 378538 (TRAV21, TRAJ31)
CAVWGNKARLMF

SEQ ID NO: 757076 - protein, 16 aa, Homo sapiens
  CDR3 for beta chain variable domain of TCR clone 378538 (TRBV27, TRBJ2-5)
CASSYGPGGQKETQYF

SEQ ID NO: 757077 - protein, 14 aa, Homo sapiens
  CDR3 for alpha chain variable domain of TCR clone 378539 (TRAV1-2, TRAJ16)
CAVNRFSAGQKLLF

SEQ ID NO: 757078 - protein, 15 aa, Homo sapiens
  CDR3 for beta chain variable domain of TCR clone 378539 (TRBV29-1, TRBJ2-7)
CSVEFFDRGSYEQYF

SEQ ID NO: 757079 - protein, 16 aa, Homo sapiens
  CDR3 for alpha chain variable domain of TCR clone 378540 (TRAV30, TRAJ24)
CGTEIADADSWGKFQF

SEQ ID NO: 757080 - protein, 16 aa, Homo sapiens
  CDR3 for beta chain variable domain of TCR clone 378540 (TRBV28, TRBJ2-7)
CASSLFFETGGPEQYF

SEQ ID NO: 757081 - protein, 14 aa, Homo sapiens
  CDR3 for alpha chain variable domain of TCR clone 378541 (TRAV1-2, TRAJ16)
CAVNRFSDGQKLLF

SEQ ID NO: 757082 - protein, 15 aa, Homo sapiens
  CDR3 for beta chain variable domain of TCR clone 378541 (TRBV12-5, TRBJ2-5)
ASGPRTSGNQETQYF

SEQ ID NO: 757083 - protein, 14 aa, Homo sapiens
  CDR3 for alpha chain variable domain of TCR clone 378542 (TRAV26-1, TRAJ38)
CIADNAGNTRKLIR

SEQ ID NO: 757084 - protein, 13 aa, Homo sapiens
  CDR3 for beta chain variable domain of TCR clone 378542 (TRBV20-1, TRBJ1-1)
CSARGGENTEAFF

SEQ ID NO: 757085 - protein, 14 aa, Homo sapiens
  CDR3 for alpha chain variable domain of TCR clone 378543 (TRAV1-2, TRAJ8)
CAVREDTGFRKLVF

SEQ ID NO: 757086 - protein, 16 aa, Homo sapiens
  CDR3 for beta chain variable domain of TCR clone 378543 (TRBV4-1, TRBJ2-3)
CASSRATSGAEDTQYF

SEQ ID NO: 757087 - protein, 14 aa, Homo sapiens
  CDR3 for alpha chain variable domain of TCR clone 378544 (TRAV8-3, TRAJ15)
CAVGRHQAETAMIF

SEQ ID NO: 757088 - protein, 13 aa, Homo sapiens
  CDR3 for beta chain variable domain of TCR clone 378544 (TRBV9, TRBJ2-7)
CASSASDSYEQYF

SEQ ID NO: 757089 - protein, 13 aa, Homo sapiens
  CDR3 for alpha chain variable domain of TCR clone 378545 (TRAV30, TRAJ24)
CGTVTDSWGKLQF

SEQ ID NO: 757090 - protein, 15 aa, Homo sapiens
  CDR3 for beta chain variable domain of TCR clone 378545 (TRBV4-1, TRBJ2-1)
CASSHDPGNYNEQFF

SEQ ID NO: 757091 - protein, 16 aa, Homo sapiens
  CDR3 for alpha chain variable domain of TCR clone 378546 (TRAV30, TRAJ24)
CGTEIVDADSGGKFQF

SEQ ID NO: 757092 - protein, 14 aa, Homo sapiens
  CDR3 for beta chain variable domain of TCR clone 378546 (TRBV12-5, TRBJ2-5)
CASVSRTHQEAQYF

SEQ ID NO: 757093 - protein, 14 aa, Homo sapiens
  CDR3 for alpha chain variable domain of TCR clone 378547 (TRAV12-1, TRAJ17)
CVVNYKAVGNKLTF

SEQ ID NO: 757094 - protein, 17 aa, Homo sapiens
  CDR3 for beta chain variable domain of TCR clone 378547 (TRBV20-1, TRBJ2-1)
CSASSSGLVGSYNEQFF

SEQ ID NO: 757095 - protein, 16 aa, Homo sapiens
  CDR3 for alpha chain variable domain of TCR clone 378548 (TRAV3, TRAJ10)
CAVRDMRAGGGNKLTF

SEQ ID NO: 757096 - protein, 13 aa, Homo sapiens
  CDR3 for beta chain variable domain of TCR clone 378548 (TRBV6-1, TRBJ1-1)
CASRRQGNNEAFF

SEQ ID NO: 757097 - protein, 14 aa, Homo sapiens
  CDR3 for alpha chain variable domain of TCR clone 378549 (TRAV12-3, TRAJ29)
CAMSPYSGNTPLDF

SEQ ID NO: 757098 - protein, 15 aa, Homo sapiens
  CDR3 for beta chain variable domain of TCR clone 378549 (TRBV27, TRBJ2-1)
CASSNGGGSSNEQFF

SEQ ID NO: 757099 - protein, 15 aa, Homo sapiens
  CDR3 for alpha chain variable domain of TCR clone 378550 (TRAV3, TRAJ4)
CAVRDGTGGVNKLIF

SEQ ID NO: 757100 - protein, 15 aa, Homo sapiens
  CDR3 for beta chain variable domain of TCR clone 378550 (TRBV27, TRBJ2-7)
CASSPDQGRLYEQYF

SEQ ID NO: 757101 - protein, 13 aa, Homo sapiens
  CDR3 for alpha chain variable domain of TCR clone 378551 (TRAV2, TRAJ15)
CAVEAQAGTALIF

SEQ ID NO: 757102 - protein, 13 aa, Homo sapiens
  CDR3 for beta chain variable domain of TCR clone 378551 (TRBV19, TRBJ1-2)
CASSVPGQDGYTF

SEQ ID NO: 757103 - protein, 13 aa, Homo sapiens
  CDR3 for alpha chain variable domain of TCR clone 378552 (TRAV1-2, TRAJ12)
CAVSMDSSYKLIF

SEQ ID NO: 757104 - protein, 13 aa, Homo sapiens
  CDR3 for beta chain variable domain of TCR clone 378552 (TRBV20-1, TRBJ1-5)
CSATAAGGQPQHF

SEQ ID NO: 757105 - protein, 13 aa, Homo sapiens
  CDR3 for alpha chain variable domain of TCR clone 378553 (TRAV1-1, TRAJ13)
CAVNSGGYQKDTF

SEQ ID NO: 757106 - protein, 12 aa, Homo sapiens
  CDR3 for beta chain variable domain of TCR clone 378553 (TRBV28, TRBJ2-1)
CASSVQINEQFF

SEQ ID NO: 757107 - protein, 15 aa, Homo sapiens
  CDR3 for alpha chain variable domain of TCR clone 378554 (TRAV21, TRAJ53)
CATLNSGGSNYKLTF

SEQ ID NO: 757108 - protein, 15 aa, Homo sapiens
  CDR3 for beta chain variable domain of TCR clone 378554 (TRBV18, TRBJ2-1)
CASSRPSASYNEQFF

SEQ ID NO: 757109 - protein, 13 aa, Homo sapiens
  CDR3 for alpha chain variable domain of TCR clone 378555 (TRAV3, TRAJ20)
FAVRDTPRYKLSF

SEQ ID NO: 757110 - protein, 15 aa, Homo sapiens
  CDR3 for beta chain variable domain of TCR clone 378555 (TRBV11-2, TRBJ2-1)
CASSKNRGLIYEQFF

SEQ ID NO: 757111 - protein, 13 aa, Homo sapiens
  CDR3 for alpha chain variable domain of TCR clone 378556 (TRAV9-2, TRAJ44)
CALLTGTASKLTF

SEQ ID NO: 757112 - protein, 16 aa, Homo sapiens
  CDR3 for beta chain variable domain of TCR clone 378556 (TRBV19, TRBJ2-1)
CASSKAGPSSYNEQFF

SEQ ID NO: 757113 - protein, 18 aa, Homo sapiens
  CDR3 for alpha chain variable domain of TCR clone 378557 (TRAV26-2, TRAJ54)
CILRDVEVGIQGAQKLVF

SEQ ID NO: 757114 - protein, 16 aa, Homo sapiens
  CDR3 for beta chain variable domain of TCR clone 378557 (TRBV4-1, TRBJ2-5)
CASSSGLAGVLGTQYF

SEQ ID NO: 757115 - protein, 13 aa, Homo sapiens
  CDR3 for alpha chain variable domain of TCR clone 378558 (TRAV27, TRAJ45)
CRSSGGGADGLTF

SEQ ID NO: 757116 - protein, 17 aa, Homo sapiens
  CDR3 for beta chain variable domain of TCR clone 378558 (TRBV11-2, TRBJ2-1)
GASSLYPPGVGYNEQFF

SEQ ID NO: 757117 - protein, 11 aa, Homo sapiens
  CDR3 for alpha chain variable domain of TCR clone 378559 (TRAV2, TRAJ33)
CAVESNYQLIW

SEQ ID NO: 757118 - protein, 15 aa, Homo sapiens
  CDR3 for beta chain variable domain of TCR clone 378559 (TRBV19, TRBJ1-1)
CASTSGQIQTTEAFF

SEQ ID NO: 757119 - protein, 13 aa, Homo sapiens
  CDR3 for alpha chain variable domain of TCR clone 378560 (TRAV8-6, TRAJ49)
CAVITNNGNQFYF

SEQ ID NO: 757120 - protein, 13 aa, Homo sapiens
  CDR3 for beta chain variable domain of TCR clone 378560 (TRBV7-2, TRBJ2-2)
CASSLAVTGELFF

SEQ ID NO: 757121 - protein, 15 aa, Homo sapiens
  CDR3 for alpha chain variable domain of TCR clone 378561 (TRAV17, TRAJ16)
CATALRFSDGQKLLF

SEQ ID NO: 757122 - protein, 17 aa, Homo sapiens
  CDR3 for beta chain variable domain of TCR clone 378561 (TRBV7-8, TRBJ2-6)
CASSAGTGGAGANDLTF

SEQ ID NO: 757123 - protein, 15 aa, Homo sapiens
  CDR3 for alpha chain variable domain of TCR clone 378562 (TRAV12-3, TRAJ13)
CAMSARSGGYQKVTF

SEQ ID NO: 757124 - protein, 18 aa, Homo sapiens
  CDR3 for beta chain variable domain of TCR clone 378562 (TRBV3-1, TRBJ2-7)
CASSQEGGGRSGHYEQYF

SEQ ID NO: 757125 - protein, 17 aa, Homo sapiens
  CDR3 for alpha chain variable domain of TCR clone 378563 (TRAV14/DV4, TRAJ28)
CAMRGTSSGAGSYQLTC

SEQ ID NO: 757126 - protein, 13 aa, Homo sapiens
  CDR3 for beta chain variable domain of TCR clone 378563 (TRBV28, TRBJ2-5)
CASSFAGGETQYF

SEQ ID NO: 757127 - protein, 14 aa, Homo sapiens
  CDR3 for alpha chain variable domain of TCR clone 378564 (TRAV9-2, TRAJ39)
CALYIYNAGNMLNF

SEQ ID NO: 757128 - protein, 15 aa, Homo sapiens
  CDR3 for beta chain variable domain of TCR clone 378564 (TRBV29-1, TRBJ2-1)
CSVGRHALFYNEQFF

SEQ ID NO: 757129 - protein, 14 aa, Homo sapiens
  CDR3 for alpha chain variable domain of TCR clone 378565 (TRAV12-2, TRAJ15)
CAPHTGQAGTALIF

SEQ ID NO: 757130 - protein, 14 aa, Homo sapiens
  CDR3 for beta chain variable domain of TCR clone 378565 (TRBV27, TRBJ2-1)
CASSATGGYNEQFF

SEQ ID NO: 757131 - protein, 12 aa, Homo sapiens
  CDR3 for alpha chain variable domain of TCR clone 378566 (TRAV12-2, TRAJ33)
CAVGDSNYQLIW

SEQ ID NO: 757132 - protein, 13 aa, Homo sapiens
  CDR3 for beta chain variable domain of TCR clone 378566 (TRBV6-1, TRBJ1-2)
CASSAREGYGDTF

SEQ ID NO: 757133 - protein, 15 aa, Homo sapiens
  CDR3 for alpha chain variable domain of TCR clone 378567 (TRAV3, TRAJ36)
CAVRASQTGANNLFF

SEQ ID NO: 757134 - protein, 14 aa, Homo sapiens
  CDR3 for beta chain variable domain of TCR clone 378567 (TRBV5-4, TRBJ2-3)
CASSLRAGTDTQYF

SEQ ID NO: 757135 - protein, 10 aa, Homo sapiens
  CDR3 for alpha chain variable domain of TCR clone 378568 (TRAV1-2, TRAJ31)
CAFFDARVMF

SEQ ID NO: 757136 - protein, 13 aa, Homo sapiens
  CDR3 for beta chain variable domain of TCR clone 378568 (TRBV7-9, TRBJ1-2)
CASSLKQNYGYSF

SEQ ID NO: 757137 - protein, 15 aa, Homo sapiens
  CDR3 for alpha chain variable domain of TCR clone 378569 (TRAV21, TRAJ27)
CAARPGNAGKSPFVD

SEQ ID NO: 757138 - protein, 14 aa, Homo sapiens
  CDR3 for beta chain variable domain of TCR clone 378569 (TRBV7-6, TRBJ2-3)
CASSLGTVTDTQYF

SEQ ID NO: 757139 - protein, 13 aa, Homo sapiens
  CDR3 for alpha chain variable domain of TCR clone 378570 (TRAV8-3, TRAJ36)
CAVGATGANNLLF

SEQ ID NO: 757140 - protein, 16 aa, Homo sapiens
  CDR3 for beta chain variable domain of TCR clone 378570 (TRBV20-1, TRBJ1-4)
CSAPGQGVLTNEKLFF

SEQ ID NO: 757141 - protein, 16 aa, Homo sapiens
  CDR3 for alpha chain variable domain of TCR clone 378571 (TRAV3, TRAJ37)
CAVRPHGPGNTGKLIF

SEQ ID NO: 757142 - protein, 13 aa, Homo sapiens
  CDR3 for beta chain variable domain of TCR clone 378571 (TRBV2, TRBJ1-5)
CASGTGGYQPQHF

SEQ ID NO: 757143 - protein, 17 aa, Homo sapiens
  CDR3 for alpha chain variable domain of TCR clone 378572 (TRAV3, TRAJ6)
CAVRDGPRAGGSYIPTF

SEQ ID NO: 757144 - protein, 17 aa, Homo sapiens
  CDR3 for beta chain variable domain of TCR clone 378572 (TRBV20-1, TRBJ1-5)
CSASLSPGQGGNQTQHF

SEQ ID NO: 757145 - protein, 15 aa, Homo sapiens
  CDR3 for alpha chain variable domain of TCR clone 378573 (TRAV17, TRAJ22)
CATVAPSGSARQLTF

SEQ ID NO: 757146 - protein, 16 aa, Homo sapiens
  CDR3 for beta chain variable domain of TCR clone 378573 (TRBV27, TRBJ2-5)
CASSLSRTAGGETQYF

SEQ ID NO: 757147 - protein, 15 aa, Homo sapiens
  CDR3 for alpha chain variable domain of TCR clone 378574 (TRAV8-3, TRAJ11)
CAVGLLNSGYNTLTF

SEQ ID NO: 757148 - protein, 23 aa, Homo sapiens
  CDR3 for beta chain variable domain of TCR clone 378574 (TRBV7-9, TRBJ1-2)
EAQLEKSRLLSDRFSSGEDGYTF

SEQ ID NO: 757149 - protein, 12 aa, Homo sapiens
  CDR3 for alpha chain variable domain of TCR clone 378575 (TRAV12-3, TRAJ17)
FAMTLTGNKQTF

SEQ ID NO: 757150 - protein, 15 aa, Homo sapiens
  CDR3 for beta chain variable domain of TCR clone 378575 (TRBV20-1, TRBJ2-7)
CSARDRVSGMDEQYF

SEQ ID NO: 757151 - protein, 13 aa, Homo sapiens
  CDR3 for alpha chain variable domain of TCR clone 378576 (TRAV1-2, TRAJ9)
CAALNTGGFKTIF

SEQ ID NO: 757152 - protein, 13 aa, Homo sapiens
  CDR3 for beta chain variable domain of TCR clone 378576 (TRBV19, TRBJ1-2)
CAGSVPGQDDYTF

SEQ ID NO: 757153 - protein, 19 aa, Homo sapiens
  CDR3 for alpha chain variable domain of TCR clone 378577 (TRAV8-4, TRAJ3)
CAVTGENLVQQCFPDNLLI

SEQ ID NO: 757154 - protein, 16 aa, Homo sapiens
  CDR3 for beta chain variable domain of TCR clone 378577 (TRBV4-2, TRBJ1-1)
CASSQAGFGMNTEAFF

SEQ ID NO: 757155 - protein, 10 aa, Homo sapiens
  CDR3 for alpha chain variable domain of TCR clone 378578 (TRAV12-2, TRAJ31)
CAVNNARLMF

SEQ ID NO: 757156 - protein, 14 aa, Homo sapiens
  CDR3 for beta chain variable domain of TCR clone 378578 (TRBV7-6, TRBJ2-3)
CASSLGTVTDTQYF

SEQ ID NO: 757157 - protein, 16 aa, Homo sapiens
  CDR3 for alpha chain variable domain of TCR clone 378579 (TRAV26-1, TRAJ37)
CIVRGDGSGNTGKLIF

SEQ ID NO: 757158 - protein, 14 aa, Homo sapiens
  CDR3 for beta chain variable domain of TCR clone 378579 (TRBV11-2, TRBJ2-7)
CASSLGAGAYEQYF

SEQ ID NO: 757159 - protein, 14 aa, Homo sapiens
  CDR3 for alpha chain variable domain of TCR clone 378580 (TRAV13-2, TRAJ11)
CAETGNSGYRTLTF

SEQ ID NO: 757160 - protein, 17 aa, Homo sapiens
  CDR3 for beta chain variable domain of TCR clone 378580 (TRBV11-2, TRBJ2-1)
CASSLYPPGVEYNEQFF

SEQ ID NO: 757161 - protein, 12 aa, Homo sapiens
  CDR3 for alpha chain variable domain of TCR clone 378581 (TRAV2, TRAJ33)
CVVPDSNYQLIW

SEQ ID NO: 757162 - protein, 17 aa, Homo sapiens
  CDR3 for beta chain variable domain of TCR clone 378581 (TRBV6-5, TRBJ2-3)
CASSYGTSLYKSDTQYF

SEQ ID NO: 757163 - protein, 16 aa, Homo sapiens
  CDR3 for alpha chain variable domain of TCR clone 378582 (TRAV12-2, TRAJ56)
CAVRRVDTGANSKMTF

SEQ ID NO: 757164 - protein, 11 aa, Homo sapiens
  CDR3 for beta chain variable domain of TCR clone 378582 (TRBV3-1, TRBJ2-7)
CASSQVREQYF

SEQ ID NO: 757165 - protein, 14 aa, Homo sapiens
  CDR3 for alpha chain variable domain of TCR clone 378583 (TRAV13-1, TRAJ44)
CAAKATGTASKLTF

SEQ ID NO: 757166 - protein, 17 aa, Homo sapiens
  CDR3 for beta chain variable domain of TCR clone 378583 (TRBV7-3, TRBJ2-3)
CASSLMKRMRGADTQDF

SEQ ID NO: 757167 - protein, 14 aa, Homo sapiens
  CDR3 for alpha chain variable domain of TCR clone 378584 (TRAV12-2, TRAJ13)
CAVKKTGGYKKVTF

SEQ ID NO: 757168 - protein, 12 aa, Homo sapiens
  CDR3 for beta chain variable domain of TCR clone 378584 (TRBV29-1, TRBJ1-1)
CSESDGNTEAFF

SEQ ID NO: 757169 - protein, 12 aa, Homo sapiens
  CDR3 for alpha chain variable domain of TCR clone 378585 (TRAV21, TRAJ27)
CCASRQCRQMTF

SEQ ID NO: 757170 - protein, 20 aa, Homo sapiens
  CDR3 for beta chain variable domain of TCR clone 378585 (TRBV4-2, TRBJ2-7)
CASSQASGGNLRAVLRAGHQ

SEQ ID NO: 757171 - protein, 18 aa, Homo sapiens
  CDR3 for alpha chain variable domain of TCR clone 378586 (TRAV16, TRAJ52)
CALSGVDAGGTSYGKLTF

SEQ ID NO: 757172 - protein, 13 aa, Homo sapiens
  CDR3 for beta chain variable domain of TCR clone 378586 (TRBV11-3, TRBJ1-2)
CASSLPGDVGYTF

SEQ ID NO: 757173 - protein, 14 aa, Homo sapiens
  CDR3 for alpha chain variable domain of TCR clone 378587 (TRAV1-2, TRAJ8)
CAVREDTGFQKLVF

SEQ ID NO: 757174 - protein, 13 aa, Homo sapiens
  CDR3 for beta chain variable domain of TCR clone 378587 (TRBV4-1, TRBJ2-5)
CASSQGHRETRYF

SEQ ID NO: 757175 - protein, 15 aa, Homo sapiens
  CDR3 for alpha chain variable domain of TCR clone 378588 (TRAV21, TRAJ24)
CAARSSTDSWGKLQF

SEQ ID NO: 757176 - protein, 15 aa, Homo sapiens
  CDR3 for beta chain variable domain of TCR clone 378588 (TRBV6-3, TRBJ2-1)
CASIPGYFSYNEQFL

SEQ ID NO: 757177 - protein, 12 aa, Homo sapiens
  CDR3 for alpha chain variable domain of TCR clone 378589 (TRAV12-2, TRAJ43)
CAVNVNNNDMRF

SEQ ID NO: 757178 - protein, 14 aa, Homo sapiens
  CDR3 for beta chain variable domain of TCR clone 378589 (TRBV7-2, TRBJ2-7)
CTSSFLGRVYEQYF

SEQ ID NO: 757179 - protein, 14 aa, Homo sapiens
  CDR3 for alpha chain variable domain of TCR clone 378590 (TRAV1-2, TRAJ8)
FAVREDTGFQKLVF

SEQ ID NO: 757180 - protein, 13 aa, Homo sapiens
  CDR3 for beta chain variable domain of TCR clone 378590 (TRBV2, TRBJ2-7)
CASSVGGSGEQYF

SEQ ID NO: 757181 - protein, 12 aa, Homo sapiens
  CDR3 for alpha chain variable domain of TCR clone 378591 (TRAV3, TRAJ43)
CAVRDPNNDMRF

SEQ ID NO: 757182 - protein, 14 aa, Homo sapiens
  CDR3 for beta chain variable domain of TCR clone 378591 (TRBV4-2, TRBJ2-7)
CASSQGQTAYEQYF

SEQ ID NO: 757183 - protein, 18 aa, Homo sapiens
  CDR3 for alpha chain variable domain of TCR clone 378592 (TRAV21, TRAJ52)
CAVRPSPAGGTSYGKLTF

SEQ ID NO: 757184 - protein, 16 aa, Homo sapiens
  CDR3 for beta chain variable domain of TCR clone 378592 (TRBV4-1, TRBJ2-1)
CASSQARQGWINEQFF

SEQ ID NO: 757185 - protein, 15 aa, Homo sapiens
  CDR3 for alpha chain variable domain of TCR clone 378593 (TRAV3, TRAJ22)
CAARDRGGSARQLTF

SEQ ID NO: 757186 - protein, 13 aa, Homo sapiens
  CDR3 for beta chain variable domain of TCR clone 378593 (TRBV2, TRBJ1-5)
CATAGPGNQPQHF

SEQ ID NO: 757187 - protein, 16 aa, Homo sapiens
  CDR3 for alpha chain variable domain of TCR clone 378594 (TRAV1-2, TRAJ10)
CAVRDQGGGGGNKLTF

SEQ ID NO: 757188 - protein, 14 aa, Homo sapiens
  CDR3 for beta chain variable domain of TCR clone 378594 (TRBV15, TRBJ2-7)
CATSPDRGLYKQYF

SEQ ID NO: 757189 - protein, 13 aa, Homo sapiens
  CDR3 for alpha chain variable domain of TCR clone 378595 (TRAV21, TRAJ20)
FAVGLRVDYKLSF

SEQ ID NO: 757190 - protein, 13 aa, Homo sapiens
  CDR3 for beta chain variable domain of TCR clone 378595 (TRBV29-1, TRBJ2-1)
CSVEGGRVNEQFF

SEQ ID NO: 757191 - protein, 18 aa, Homo sapiens
  CDR3 for alpha chain variable domain of TCR clone 378596 (TRAV13-1, TRAJ52)
CSASKRSAGGTSYGKLTF

SEQ ID NO: 757192 - protein, 15 aa, Homo sapiens
  CDR3 for beta chain variable domain of TCR clone 378596 (TRBV20-1, TRBJ1-1)
CSASRGVTGNTEAFF

SEQ ID NO: 757193 - protein, 15 aa, Homo sapiens
  CDR3 for alpha chain variable domain of TCR clone 378597 (TRAV38-1, TRAJ37)
CAFIFGSGNTGKLIL

SEQ ID NO: 757194 - protein, 16 aa, Homo sapiens
  CDR3 for beta chain variable domain of TCR clone 378597 (TRBV6-1, TRBJ2-3)
CASSEVIGQGTDTQYF

SEQ ID NO: 757195 - protein, 13 aa, Homo sapiens
  CDR3 for alpha chain variable domain of TCR clone 378598 (TRAV26-1, TRAJ36)
CIVVGTGATNLFF

SEQ ID NO: 757196 - protein, 13 aa, Homo sapiens
  CDR3 for beta chain variable domain of TCR clone 378598 (TRBV6-5, TRBJ2-6)
CASSTSGPHRLDF

SEQ ID NO: 757197 - protein, 12 aa, Homo sapiens
  CDR3 for alpha chain variable domain of TCR clone 378599 (TRAV1-2, TRAJ9)
CAGYTGGFKTIF

SEQ ID NO: 757198 - protein, 15 aa, Homo sapiens
  CDR3 for beta chain variable domain of TCR clone 378599 (TRBV11-3, TRBJ2-3)
CASLKDGREGDTQYF

SEQ ID NO: 757199 - protein, 14 aa, Homo sapiens
  CDR3 for alpha chain variable domain of TCR clone 378600 (TRAV2, TRAJ9)
CAVEDRSGGFKTIF

SEQ ID NO: 757200 - protein, 15 aa, Homo sapiens
  CDR3 for beta chain variable domain of TCR clone 378600 (TRBV7-2, TRBJ2-1)
CASRKTGSSYNEQFF

SEQ ID NO: 757201 - protein, 14 aa, Homo sapiens
  CDR3 for alpha chain variable domain of TCR clone 378601 (TRAV1-2, TRAJ8)
CAVREDTGFKKLVF

SEQ ID NO: 757202 - protein, 15 aa, Homo sapiens
  CDR3 for beta chain variable domain of TCR clone 378601 (TRBV7-3, TRBJ2-2)
CASSETGQGTGELFF

SEQ ID NO: 757203 - protein, 14 aa, Homo sapiens
  CDR3 for alpha chain variable domain of TCR clone 378602 (TRAV8-6, TRAJ54)
CAVSLIQGGQKLVF

SEQ ID NO: 757204 - protein, 12 aa, Homo sapiens
  CDR3 for beta chain variable domain of TCR clone 378602 (TRBV7-2, TRBJ2-5)
CASSTGPGPQYF

SEQ ID NO: 757205 - protein, 15 aa, Homo sapiens
  CDR3 for alpha chain variable domain of TCR clone 378603 (TRAV36/DV7, TRAJ52)
CCGGAGGTSYGKLTF

SEQ ID NO: 757206 - protein, 12 aa, Homo sapiens
  CDR3 for beta chain variable domain of TCR clone 378603 (TRBV11-2, TRBJ2-2)
CASSLGGGELFF

SEQ ID NO: 757207 - protein, 14 aa, Homo sapiens
  CDR3 for alpha chain variable domain of TCR clone 378604 (TRAV13-1, TRAJ10)
CAASSTGGGNKLTL

SEQ ID NO: 757208 - protein, 15 aa, Homo sapiens
  CDR3 for beta chain variable domain of TCR clone 378604 (TRBV11-3, TRBJ1-3)
CASSLFGPSGNTIYF

SEQ ID NO: 757209 - protein, 16 aa, Homo sapiens
  CDR3 for alpha chain variable domain of TCR clone 378605 (TRAV3, TRAJ10)
CAVRDMRAGGGNKLTF

SEQ ID NO: 757210 - protein, 13 aa, Homo sapiens
  CDR3 for beta chain variable domain of TCR clone 378605 (TRBV12-3, TRBJ2-7)
CASSPTETYEQYF

SEQ ID NO: 757211 - protein, 17 aa, Homo sapiens
  CDR3 for alpha chain variable domain of TCR clone 378606 (TRAV3, TRAJ6)
CAVRDGPRAGGSYIPTF

SEQ ID NO: 757212 - protein, 18 aa, Homo sapiens
  CDR3 for beta chain variable domain of TCR clone 378606 (TRBV7-9, TRBJ2-7)
CASSQTTSGSRTWYEQYF

SEQ ID NO: 757213 - protein, 15 aa, Homo sapiens
  CDR3 for alpha chain variable domain of TCR clone 378607 (TRAV3, TRAJ17)
CAVSPKEAAGNKLTF

SEQ ID NO: 757214 - protein, 14 aa, Homo sapiens
  CDR3 for beta chain variable domain of TCR clone 378607 (TRBV18, TRBJ2-3)
CASSLGGGSDTQYF

SEQ ID NO: 757215 - protein, 13 aa, Homo sapiens
  CDR3 for alpha chain variable domain of TCR clone 378608 (TRAV2, TRAJ40)
CAVVTSGTYKFIF

SEQ ID NO: 757216 - protein, 14 aa, Homo sapiens
  CDR3 for beta chain variable domain of TCR clone 378608 (TRBV19, TRBJ2-1)
CASPTFVLSGEQLF

SEQ ID NO: 757217 - protein, 13 aa, Homo sapiens
  CDR3 for alpha chain variable domain of TCR clone 378609 (TRAV2, TRAJ15)
CAVASQAGTALIF

SEQ ID NO: 757218 - protein, 13 aa, Homo sapiens
  CDR3 for beta chain variable domain of TCR clone 378609 (TRBV19, TRBJ2-7)
CASSGQGVHEQYF

SEQ ID NO: 757219 - protein, 15 aa, Homo sapiens
  CDR3 for alpha chain variable domain of TCR clone 378610 (TRAV26-2, TRAJ57)
CILRDIRGGSEKLVF

SEQ ID NO: 757220 - protein, 15 aa, Homo sapiens
  CDR3 for beta chain variable domain of TCR clone 378610 (TRBV7-9, TRBJ1-5)
CASSQGHQPNQPQHF

SEQ ID NO: 757221 - protein, 13 aa, Homo sapiens
  CDR3 for alpha chain variable domain of TCR clone 378611 (TRAV8-4, TRAJ29)
CAVSATGNTPLVF

SEQ ID NO: 757222 - protein, 16 aa, Homo sapiens
  CDR3 for beta chain variable domain of TCR clone 378611 (TRBV4-1, TRBJ1-2)
CASSQDAGQVLYGYTF

SEQ ID NO: 757223 - protein, 15 aa, Homo sapiens
  CDR3 for alpha chain variable domain of TCR clone 378612 (TRAV27, TRAJ38)
CAGRFNAGNNRKLIW

SEQ ID NO: 757224 - protein, 16 aa, Homo sapiens
  CDR3 for beta chain variable domain of TCR clone 378612 (TRBV12-4, TRBJ2-7)
CASSLIGGTGTYEQYF

SEQ ID NO: 757225 - protein, 14 aa, Homo sapiens
  CDR3 for alpha chain variable domain of TCR clone 378613 (TRAV13-1, TRAJ35)
CAASKGGFGNVLHC

SEQ ID NO: 757226 - protein, 16 aa, Homo sapiens
  CDR3 for beta chain variable domain of TCR clone 378613 (TRBV6-1, TRBJ2-1)
CASSDLPGQLNNEQFF

SEQ ID NO: 757227 - protein, 15 aa, Homo sapiens
  CDR3 for alpha chain variable domain of TCR clone 378614 (TRAV21, TRAJ38)
CAVRQDAGNNCKLIW

SEQ ID NO: 757228 - protein, 16 aa, Homo sapiens
  CDR3 for beta chain variable domain of TCR clone 378614 (TRBV4-2, TRBJ1-1)
CASRPLDGGGDTEAFF

SEQ ID NO: 757229 - protein, 15 aa, Homo sapiens
  CDR3 for alpha chain variable domain of TCR clone 378615 (TRAV17, TRAJ35)
CATAFVIGFGNVLTC

SEQ ID NO: 757230 - protein, 15 aa, Homo sapiens
  CDR3 for beta chain variable domain of TCR clone 378615 (TRBV7-9, TRBJ2-7)
CASSLALAEAYEQYF

SEQ ID NO: 757231 - protein, 14 aa, Homo sapiens
  CDR3 for alpha chain variable domain of TCR clone 378616 (TRAV1-1, TRAJ34)
CAVSPSYNTDKVIF

SEQ ID NO: 757232 - protein, 15 aa, Homo sapiens
  CDR3 for beta chain variable domain of TCR clone 378616 (TRBV6-3, TRBJ2-7)
CASSSPGTVFYEQYF

SEQ ID NO: 757233 - protein, 11 aa, Homo sapiens
  CDR3 for alpha chain variable domain of TCR clone 378617 (TRAV1-1, TRAJ5)
CAVRVRRALTF

SEQ ID NO: 757234 - protein, 15 aa, Homo sapiens
  CDR3 for beta chain variable domain of TCR clone 378617 (TRBV7-9, TRBJ1-1)
CASSPELGGGTEAFF

SEQ ID NO: 757235 - protein, 15 aa, Homo sapiens
  CDR3 for alpha chain variable domain of TCR clone 378618 (TRAV26-1, TRAJ22)
CIVRVSFWFCKATDL

SEQ ID NO: 757236 - protein, 18 aa, Homo sapiens
  CDR3 for beta chain variable domain of TCR clone 378618 (TRBV27, TRBJ2-1)
CASTAGTSGKAAYNEQFF

SEQ ID NO: 757237 - protein, 12 aa, Homo sapiens
  CDR3 for alpha chain variable domain of TCR clone 378619 (TRAV27, TRAJ35)
CAGADFGNGPHC

SEQ ID NO: 757238 - protein, 16 aa, Homo sapiens
  CDR3 for beta chain variable domain of TCR clone 378619 (TRBV6-1, TRBJ2-1)
CASILRQGSSYNEQFF

SEQ ID NO: 757239 - protein, 11 aa, Homo sapiens
  CDR3 for alpha chain variable domain of TCR clone 378620 (TRAV2, TRAJ13)
CATGGYQKVTF

SEQ ID NO: 757240 - protein, 15 aa, Homo sapiens
  CDR3 for beta chain variable domain of TCR clone 378620 (TRBV20-1, TRBJ2-7)
CSARDRVSGMDEQYF

SEQ ID NO: 757241 - protein, 16 aa, Homo sapiens
  CDR3 for alpha chain variable domain of TCR clone 378621 (TRAV30, TRAJ24)
CGTEIVDADSWGKFQF

SEQ ID NO: 757242 - protein, 14 aa, Homo sapiens
  CDR3 for beta chain variable domain of TCR clone 378621 (TRBV7-3, TRBJ2-1)
CASSLGTSANEQFF

SEQ ID NO: 757243 - protein, 14 aa, Homo sapiens
  CDR3 for alpha chain variable domain of TCR clone 378622 (TRAV12-1, TRAJ38)
CVVNNAGNNRKLIW

SEQ ID NO: 757244 - protein, 14 aa, Homo sapiens
  CDR3 for beta chain variable domain of TCR clone 378622 (TRBV7-2, TRBJ2-7)
CASSPKTSFYEQYF

SEQ ID NO: 757245 - protein, 14 aa, Homo sapiens
  CDR3 for alpha chain variable domain of TCR clone 378623 (TRAV1-2, TRAJ16)
CAVNRFSDGQKLLF

SEQ ID NO: 757246 - protein, 16 aa, Homo sapiens
  CDR3 for beta chain variable domain of TCR clone 378623 (TRBV9, TRBJ2-2)
CASSAMGKGNTGELFF

SEQ ID NO: 757247 - protein, 13 aa, Homo sapiens
  CDR3 for alpha chain variable domain of TCR clone 378624 (TRAV2, TRAJ23)
CAGRGDWEESLSS

SEQ ID NO: 757248 - protein, 20 aa, Homo sapiens
  CDR3 for beta chain variable domain of TCR clone 378624 (TRBV3-1, TRBJ2-6)
CASSPRPGLEGGAGANVLTF

SEQ ID NO: 757249 - protein, 12 aa, Homo sapiens
  CDR3 for alpha chain variable domain of TCR clone 378625 (TRAV12-1, TRAJ40)
CVVYSGTYKYIF

SEQ ID NO: 757250 - protein, 14 aa, Homo sapiens
  CDR3 for beta chain variable domain of TCR clone 378625 (TRBV7-9, TRBJ2-7)
CASSLAPSLGEQYF

SEQ ID NO: 757251 - protein, 16 aa, Homo sapiens
  CDR3 for alpha chain variable domain of TCR clone 378626 (TRAV2, TRAJ4)
CAVEDRFSGGYNKLIF

SEQ ID NO: 757252 - protein, 17 aa, Homo sapiens
  CDR3 for beta chain variable domain of TCR clone 378626 (TRBV7-7, TRBJ2-5)
CASSRSGKRPSTSGQAR

SEQ ID NO: 757253 - protein, 11 aa, Homo sapiens
  CDR3 for alpha chain variable domain of TCR clone 378627 (TRAV2, TRAJ13)
CASGGYQKVTF

SEQ ID NO: 757254 - protein, 14 aa, Homo sapiens
  CDR3 for beta chain variable domain of TCR clone 378627 (TRBV18, TRBJ1-2)
CASSPYRVVYGYTF

SEQ ID NO: 757255 - protein, 13 aa, Homo sapiens
  CDR3 for alpha chain variable domain of TCR clone 378628 (TRAV27, TRAJ3)
ASLRGSSASKIIF

SEQ ID NO: 757256 - protein, 15 aa, Homo sapiens
  CDR3 for beta chain variable domain of TCR clone 378628 (TRBV9, TRBJ2-3)
CASSVRGLAVDTQYF

SEQ ID NO: 757257 - protein, 11 aa, Homo sapiens
  CDR3 for alpha chain variable domain of TCR clone 378629 (TRAV12-3, TRAJ6)
CAMSGSYIPTF

SEQ ID NO: 757258 - protein, 15 aa, Homo sapiens
  CDR3 for beta chain variable domain of TCR clone 378629 (TRBV6-5, TRBJ2-1)
CASSYDAGAGNEQFF

SEQ ID NO: 757259 - protein, 13 aa, Homo sapiens
  CDR3 for alpha chain variable domain of TCR clone 378630 (TRAV12-2, TRAJ50)
CAVIVTSYDKVIF

SEQ ID NO: 757260 - protein, 16 aa, Homo sapiens
  CDR3 for beta chain variable domain of TCR clone 378630 (TRBV11-2, TRBJ1-1)
CASSLRQGGEHSKAFF

SEQ ID NO: 757261 - protein, 13 aa, Homo sapiens
  CDR3 for alpha chain variable domain of TCR clone 378631 (TRAV13-2, TRAJ48)
CAETDFGNEKLTF

SEQ ID NO: 757262 - protein, 12 aa, Homo sapiens
  CDR3 for beta chain variable domain of TCR clone 378631 (TRBV5-1, TRBJ1-2)
CASSQDTYGYTF

SEQ ID NO: 757263 - protein, 17 aa, Homo sapiens
  CDR3 for alpha chain variable domain of TCR clone 378632 (TRAV23/DV6, TRAJ58)
CAARLLRGETSGSRLNF

SEQ ID NO: 757264 - protein, 14 aa, Homo sapiens
  CDR3 for beta chain variable domain of TCR clone 378632 (TRBV2, TRBJ2-7)
CASSLTSGGYEQYF

SEQ ID NO: 757265 - protein, 15 aa, Homo sapiens
  CDR3 for alpha chain variable domain of TCR clone 378633 (TRAV30, TRAJ32)
CGTEILGGATNKLIF

SEQ ID NO: 757266 - protein, 17 aa, Homo sapiens
  CDR3 for beta chain variable domain of TCR clone 378633 (TRBV5-4, TRBJ2-1)
CASSAAGGREPYNEQFF

SEQ ID NO: 757267 - protein, 15 aa, Homo sapiens
  CDR3 for alpha chain variable domain of TCR clone 378634 (TRAV27, TRAJ38)
CAARRNAGNNRKLIW

SEQ ID NO: 757268 - protein, 15 aa, Homo sapiens
  CDR3 for beta chain variable domain of TCR clone 378634 (TRBV16, TRBJ1-5)
CASSQSGTADQPQHF

SEQ ID NO: 757269 - protein, 15 aa, Homo sapiens
  CDR3 for alpha chain variable domain of TCR clone 378635 (TRAV27, TRAJ33)
CAGADIMDSNYQLIW

SEQ ID NO: 757270 - protein, 13 aa, Homo sapiens
  CDR3 for beta chain variable domain of TCR clone 378635 (TRBV28, TRBJ1-2)
CASSLQGRGGYTL

SEQ ID NO: 757271 - protein, 11 aa, Homo sapiens
  CDR3 for alpha chain variable domain of TCR clone 378636 (TRAV9-2, TRAJ11)
CVPAGDSTLTF

SEQ ID NO: 757272 - protein, 14 aa, Homo sapiens
  CDR3 for beta chain variable domain of TCR clone 378636 (TRBV2, TRBJ2-7)
CASSLTSGGYEQYF

SEQ ID NO: 757273 - protein, 14 aa, Homo sapiens
  CDR3 for alpha chain variable domain of TCR clone 378637 (TRAV35, TRAJ40)
CAWSTTSGNYKYIF

SEQ ID NO: 757274 - protein, 15 aa, Homo sapiens
  CDR3 for beta chain variable domain of TCR clone 378637 (TRBV20-1, TRBJ2-7)
CSARDRVSGMDEQYF

SEQ ID NO: 757275 - protein, 12 aa, Homo sapiens
  CDR3 for alpha chain variable domain of TCR clone 378638 (TRAV38-1, TRAJ43)
CAFMTRLAAMRF

SEQ ID NO: 757276 - protein, 14 aa, Homo sapiens
  CDR3 for beta chain variable domain of TCR clone 378638 (TRBV27, TRBJ2-2)
CASSLSVVDGRMFF

SEQ ID NO: 757277 - protein, 14 aa, Homo sapiens
  CDR3 for alpha chain variable domain of TCR clone 378639 (TRAV12-2, TRAJ33)
CAVKRARSNYQLIW

SEQ ID NO: 757278 - protein, 13 aa, Homo sapiens
  CDR3 for beta chain variable domain of TCR clone 378639 (TRBV7-9, TRBJ2-1)
CASSLDVGNEQFF

SEQ ID NO: 757279 - protein, 14 aa, Homo sapiens
  CDR3 for alpha chain variable domain of TCR clone 378640 (TRAV12-2, TRAJ11)
CAVEGGSGYSTLTF

SEQ ID NO: 757280 - protein, 14 aa, Homo sapiens
  CDR3 for beta chain variable domain of TCR clone 378640 (TRBV11-2, TRBJ2-3)
CASSRLARTDTQYF

SEQ ID NO: 757281 - protein, 13 aa, Homo sapiens
  CDR3 for alpha chain variable domain of TCR clone 378641 (TRAV1-1, TRAJ9)
CAAKNTRVFKTIF

SEQ ID NO: 757282 - protein, 14 aa, Homo sapiens
  CDR3 for beta chain variable domain of TCR clone 378641 (TRBV20-1, TRBJ2-1)
CSAQIGGSANEQFF

SEQ ID NO: 757283 - protein, 13 aa, Homo sapiens
  CDR3 for alpha chain variable domain of TCR clone 378642 (TRAV30, TRAJ24)
CGTVTGSWGKLQF

SEQ ID NO: 757284 - protein, 22 aa, Homo sapiens
  CDR3 for beta chain variable domain of TCR clone 378642 (TRBV11-2, TRBJ1-4)
CASSLDITRRGIPRKDNEKLFF

SEQ ID NO: 757285 - protein, 14 aa, Homo sapiens
  CDR3 for alpha chain variable domain of TCR clone 378643 (TRAV17, TRAJ6)
CATDTSGGSYIPTF

SEQ ID NO: 757286 - protein, 15 aa, Homo sapiens
  CDR3 for beta chain variable domain of TCR clone 378643 (TRBV11-3, TRBJ2-7)
CASSPGPASSYEQYF

SEQ ID NO: 757287 - protein, 14 aa, Homo sapiens
  CDR3 for alpha chain variable domain of TCR clone 378644 (TRAV12-2, TRAJ48)
CAVNAFFGIEKLTF

SEQ ID NO: 757288 - protein, 13 aa, Homo sapiens
  CDR3 for beta chain variable domain of TCR clone 378644 (TRBV28, TRBJ2-7)
CAGAQQGLDEQYF

SEQ ID NO: 757289 - protein, 14 aa, Homo sapiens
  CDR3 for alpha chain variable domain of TCR clone 378645 (TRAV12-3, TRAJ10)
SHLPLTGGGNKLTF

SEQ ID NO: 757290 - protein, 17 aa, Homo sapiens
  CDR3 for beta chain variable domain of TCR clone 378645 (TRBV18, TRBJ2-1)
CASSKGLSGGADNEQFF

SEQ ID NO: 757291 - protein, 11 aa, Homo sapiens
  CDR3 for alpha chain variable domain of TCR clone 378646 (TRAV1-1, TRAJ23)
CAVRQGGKLIF

SEQ ID NO: 757292 - protein, 13 aa, Homo sapiens
  CDR3 for beta chain variable domain of TCR clone 378646 (TRBV7-8, TRBJ2-2)
CASSHLFPGPTTI

SEQ ID NO: 757293 - protein, 14 aa, Homo sapiens
  CDR3 for alpha chain variable domain of TCR clone 378647 (TRAV12-2, TRAJ36)
CAVNPPTGANNLFF

SEQ ID NO: 757294 - protein, 11 aa, Homo sapiens
  CDR3 for beta chain variable domain of TCR clone 378647 (TRBV29-1, TRBJ2-5)
CSEDRTGTQYF

SEQ ID NO: 757295 - protein, 14 aa, Homo sapiens
  CDR3 for alpha chain variable domain of TCR clone 378648 (TRAV17, TRAJ12)
CAILPMDSSYKLIF

SEQ ID NO: 757296 - protein, 13 aa, Homo sapiens
  CDR3 for beta chain variable domain of TCR clone 378648 (TRBV11-2, TRBJ2-5)
CASSSTGEETQYF

SEQ ID NO: 757297 - protein, 10 aa, Homo sapiens
  CDR3 for alpha chain variable domain of TCR clone 378649 (TRAV2, TRAJ13)
CIRGYQKVTF

SEQ ID NO: 757298 - protein, 15 aa, Homo sapiens
  CDR3 for beta chain variable domain of TCR clone 378649 (TRBV6-3, TRBJ2-7)
CASSSPGTVFYEQYF

SEQ ID NO: 757299 - protein, 13 aa, Homo sapiens
  CDR3 for alpha chain variable domain of TCR clone 378650 (TRAV27, TRAJ17)
CAGAATAGNKLTF

SEQ ID NO: 757300 - protein, 15 aa, Homo sapiens
  CDR3 for beta chain variable domain of TCR clone 378650 (TRBV25-1, TRBJ1-4)
CASSPGDSTNEKLFF

SEQ ID NO: 757301 - protein, 17 aa, Homo sapiens
  CDR3 for alpha chain variable domain of TCR clone 378651 (TRAV8-6, TRAJ8)
CAVKEGIENTGFQKLVF

SEQ ID NO: 757302 - protein, 17 aa, Homo sapiens
  CDR3 for beta chain variable domain of TCR clone 378651 (TRBV19, TRBJ2-6)
CASSTGQVFSGANVLTF

SEQ ID NO: 757303 - protein, 14 aa, Homo sapiens
  CDR3 for alpha chain variable domain of TCR clone 378652 (TRAV9-2, TRAJ39)
CALYFYNAGNMLTF

SEQ ID NO: 757304 - protein, 15 aa, Homo sapiens
  CDR3 for beta chain variable domain of TCR clone 378652 (TRBV3-1, TRBJ2-7)
CASSQVRQGAYEQYF

SEQ ID NO: 757305 - protein, 12 aa, Homo sapiens
  CDR3 for alpha chain variable domain of TCR clone 378653 (TRAV2, TRAJ29)
CAVDSGNTPLVF

SEQ ID NO: 757306 - protein, 15 aa, Homo sapiens
  CDR3 for beta chain variable domain of TCR clone 378653 (TRBV7-9, TRBJ1-5)
CASSLAQGPNQPQHF

SEQ ID NO: 757307 - protein, 15 aa, Homo sapiens
  CDR3 for alpha chain variable domain of TCR clone 378654 (TRAV12-3, TRAJ18)
CAMSGGGSTLGRLYF

SEQ ID NO: 757308 - protein, 12 aa, Homo sapiens
  CDR3 for beta chain variable domain of TCR clone 378654 (TRBV3-1, TRBJ2-7)
CASSQPLGTQYF

SEQ ID NO: 757309 - protein, 16 aa, Homo sapiens
  CDR3 for alpha chain variable domain of TCR clone 378655 (TRAV13-1, TRAJ37)
CAASSLGSSNTGKLIF

SEQ ID NO: 757310 - protein, 12 aa, Homo sapiens
  CDR3 for beta chain variable domain of TCR clone 378655 (TRBV11-2, TRBJ2-1)
CASSPGNNEQFF

SEQ ID NO: 757311 - protein, 12 aa, Homo sapiens
  CDR3 for alpha chain variable domain of TCR clone 378656 (TRAV12-3, TRAJ17)
CAMTLTSNKLTF

SEQ ID NO: 757312 - protein, 15 aa, Homo sapiens
  CDR3 for beta chain variable domain of TCR clone 378656 (TRBV20-1, TRBJ2-7)
RSARDRVSGMDEQYF

SEQ ID NO: 757313 - protein, 14 aa, Homo sapiens
  CDR3 for alpha chain variable domain of TCR clone 378657 (TRAV8-6, TRAJ49)
CAGSVRYTGNQFYV

SEQ ID NO: 757314 - protein, 19 aa, Homo sapiens
  CDR3 for beta chain variable domain of TCR clone 378657 (TRBV28, TRBJ2-1)
CASSFSIRGSGRTRYEQFF

SEQ ID NO: 757315 - protein, 14 aa, Homo sapiens
  CDR3 for alpha chain variable domain of TCR clone 378658 (TRAV1-2, TRAJ10)
CAVRVTGGGNKLTL

SEQ ID NO: 757316 - protein, 12 aa, Homo sapiens
  CDR3 for beta chain variable domain of TCR clone 378658 (TRBV5-4, TRBJ1-1)
CASSFGQTEAFF

SEQ ID NO: 757317 - protein, 16 aa, Homo sapiens
  CDR3 for alpha chain variable domain of TCR clone 378659 (TRAV12-2, TRAJ52)
CRLANAGGTSYGKLTF

SEQ ID NO: 757318 - protein, 14 aa, Homo sapiens
  CDR3 for beta chain variable domain of TCR clone 378659 (TRBV7-2, TRBJ2-7)
CASSPKTSFYEQYF

SEQ ID NO: 757319 - protein, 14 aa, Homo sapiens
  CDR3 for alpha chain variable domain of TCR clone 378660 (TRAV12-2, TRAJ53)
CRERGGGSNYKLTF

SEQ ID NO: 757320 - protein, 20 aa, Homo sapiens
  CDR3 for beta chain variable domain of TCR clone 378660 (TRBV28, TRBJ2-1)
CASTPIGRSPGLAGGNEQFF

SEQ ID NO: 757321 - protein, 18 aa, Homo sapiens
  CDR3 for alpha chain variable domain of TCR clone 378661 (TRAV16, TRAJ26)
CALSGTEFCLWSRNQLVR

SEQ ID NO: 757322 - protein, 12 aa, Homo sapiens
  CDR3 for beta chain variable domain of TCR clone 378661 (TRBV11-2, TRBJ2-1)
CASSPGNNEQFF

SEQ ID NO: 757323 - protein, 14 aa, Homo sapiens
  CDR3 for alpha chain variable domain of TCR clone 378662 (TRAV12-2, TRAJ40)
CAVKIPPGTYKYIF

SEQ ID NO: 757324 - protein, 14 aa, Homo sapiens
  CDR3 for beta chain variable domain of TCR clone 378662 (TRBV25-1, TRBJ1-1)
CASTHLGGNTEAFF

SEQ ID NO: 757325 - protein, 14 aa, Homo sapiens
  CDR3 for alpha chain variable domain of TCR clone 378663 (TRAV26-1, TRAJ38)
CIGDNAGNNRKLIW

SEQ ID NO: 757326 - protein, 13 aa, Homo sapiens
  CDR3 for beta chain variable domain of TCR clone 378663 (TRBV20-1, TRBJ1-1)
CSARGGGNTEAFF

SEQ ID NO: 757327 - protein, 13 aa, Homo sapiens
  CDR3 for alpha chain variable domain of TCR clone 378664 (TRAV36/DV7, TRAJ54)
CAVCTQGDQKLVF

SEQ ID NO: 757328 - protein, 13 aa, Homo sapiens
  CDR3 for beta chain variable domain of TCR clone 378664 (TRBV7-6, TRBJ2-7)
CASSLDHTHKQYF

SEQ ID NO: 757329 - protein, 14 aa, Homo sapiens
  CDR3 for alpha chain variable domain of TCR clone 378665 (TRAV26-1, TRAJ34)
CIVRVAYNTAKLIF

SEQ ID NO: 757330 - protein, 11 aa, Homo sapiens
  CDR3 for beta chain variable domain of TCR clone 378665 (TRBV11-2, TRBJ2-2)
CASSLPGELFF

SEQ ID NO: 757331 - protein, 13 aa, Homo sapiens
  CDR3 for alpha chain variable domain of TCR clone 378666 (TRAV27, TRAJ54)
CAGAGQGGQKLVF

SEQ ID NO: 757332 - protein, 15 aa, Homo sapiens
  CDR3 for beta chain variable domain of TCR clone 378666 (TRBV18, TRBJ2-6)
CASSPSYAGANVLTF

SEQ ID NO: 757333 - protein, 16 aa, Homo sapiens
  CDR3 for alpha chain variable domain of TCR clone 378667 (TRAV21, TRAJ17)
CAVRPGEEAAGNMLTF

SEQ ID NO: 757334 - protein, 16 aa, Homo sapiens
  CDR3 for beta chain variable domain of TCR clone 378667 (TRBV2, TRBJ2-7)
CASSEPWTGPSYEQYF

SEQ ID NO: 757335 - protein, 14 aa, Homo sapiens
  CDR3 for alpha chain variable domain of TCR clone 378668 (TRAV2, TRAJ3)
CAVDRYSSASKIIF

SEQ ID NO: 757336 - protein, 16 aa, Homo sapiens
  CDR3 for beta chain variable domain of TCR clone 378668 (TRBV20-1, TRBJ1-5)
CSAELTGQQTNQPQHF

SEQ ID NO: 757337 - protein, 14 aa, Homo sapiens
  CDR3 for alpha chain variable domain of TCR clone 378669 (TRAV12-3, TRAJ10)
SHLPLTGGGNQLTF

SEQ ID NO: 757338 - protein, 13 aa, Homo sapiens
  CDR3 for beta chain variable domain of TCR clone 378669 (TRBV7-7, TRBJ2-5)
CASSRSGKETQYF

SEQ ID NO: 757339 - protein, 15 aa, Homo sapiens
  CDR3 for alpha chain variable domain of TCR clone 378670 (TRAV21, TRAJ13)
CAVPRSFWGLPESYL

SEQ ID NO: 757340 - protein, 14 aa, Homo sapiens
  CDR3 for beta chain variable domain of TCR clone 378670 (TRBV4-2, TRBJ2-1)
CASGLDRAYNEQFF

SEQ ID NO: 757341 - protein, 14 aa, Homo sapiens
  CDR3 for alpha chain variable domain of TCR clone 378671 (TRAV1-2, TRAJ8)
CAVREDTGFQKLVF

SEQ ID NO: 757342 - protein, 15 aa, Homo sapiens
  CDR3 for beta chain variable domain of TCR clone 378671 (TRBV7-2, TRBJ2-1)
CASSPLAGEHNEQFF

SEQ ID NO: 757343 - protein, 14 aa, Homo sapiens
  CDR3 for alpha chain variable domain of TCR clone 378672 (TRAV8-3, TRAJ4)
WSVGAAGGYNKLIF

SEQ ID NO: 757344 - protein, 15 aa, Homo sapiens
  CDR3 for beta chain variable domain of TCR clone 378672 (TRBV6-5, TRBJ2-1)
CASSYDAGAGNEQFF

SEQ ID NO: 757345 - protein, 17 aa, Homo sapiens
  CDR3 for alpha chain variable domain of TCR clone 378673 (TRAV4, TRAJ18)
CLVGERPVGSTLGRLYF

SEQ ID NO: 757346 - protein, 16 aa, Homo sapiens
  CDR3 for beta chain variable domain of TCR clone 378673 (TRBV28, TRBJ2-7)
CASSPWVATGDLSQYF

SEQ ID NO: 757347 - protein, 16 aa, Homo sapiens
  CDR3 for alpha chain variable domain of TCR clone 378674 (TRAV30, TRAJ24)
CGTEIVDADSWGKFQF

SEQ ID NO: 757348 - protein, 16 aa, Homo sapiens
  CDR3 for beta chain variable domain of TCR clone 378674 (TRBV20-1, TRBJ1-1)
CSARALTQVMNTEAFF

SEQ ID NO: 757349 - protein, 15 aa, Homo sapiens
  CDR3 for alpha chain variable domain of TCR clone 378675 (TRAV3, TRAJ22)
CAVRDRGGSARQLTF

SEQ ID NO: 757350 - protein, 17 aa, Homo sapiens
  CDR3 for beta chain variable domain of TCR clone 378675 (TRBV7-3, TRBJ2-2)
CASSLSGASGGTGELFF

SEQ ID NO: 757351 - protein, 15 aa, Homo sapiens
  CDR3 for alpha chain variable domain of TCR clone 378676 (TRAV3, TRAJ33)
CPYERLLLWNYQLIW

SEQ ID NO: 757352 - protein, 14 aa, Homo sapiens
  CDR3 for beta chain variable domain of TCR clone 378676 (TRBV6-1, TRBJ1-3)
CASVQGGGGNTIYF

SEQ ID NO: 757353 - protein, 14 aa, Homo sapiens
  CDR3 for alpha chain variable domain of TCR clone 378677 (TRAV2, TRAJ9)
CAVEDQSGGFKTIF

SEQ ID NO: 757354 - protein, 17 aa, Homo sapiens
  CDR3 for beta chain variable domain of TCR clone 378677 (TRBV11-2, TRBJ2-1)
CASSLYPPGVEYNEQFF

SEQ ID NO: 757355 - protein, 14 aa, Homo sapiens
  CDR3 for alpha chain variable domain of TCR clone 378678 (TRAV1-2, TRAJ8)
CAVREDTGFQKLVF

SEQ ID NO: 757356 - protein, 19 aa, Homo sapiens
  CDR3 for beta chain variable domain of TCR clone 378678 (TRBV7-2, TRBJ2-3)
WASSFLSRNWGGGTDTQYF

SEQ ID NO: 757357 - protein, 12 aa, Homo sapiens
  CDR3 for alpha chain variable domain of TCR clone 378679 (TRAV21, TRAJ58)
CTAETSGSRLTF

SEQ ID NO: 757358 - protein, 15 aa, Homo sapiens
  CDR3 for beta chain variable domain of TCR clone 378679 (TRBV20-1, TRBJ2-7)
CSARDPVKGEGEQYF

SEQ ID NO: 757359 - protein, 14 aa, Homo sapiens
  CDR3 for alpha chain variable domain of TCR clone 378680 (TRAV13-2, TRAJ15)
CAENPNQAGTALIF

SEQ ID NO: 757360 - protein, 16 aa, Homo sapiens
  CDR3 for beta chain variable domain of TCR clone 378680 (TRBV12-4, TRBJ1-2)
CASSPTATGRTRGYTF

SEQ ID NO: 757361 - protein, 14 aa, Homo sapiens
  CDR3 for alpha chain variable domain of TCR clone 378681 (TRAV9-2, TRAJ39)
CALYIYNAGNMLTF

SEQ ID NO: 757362 - protein, 15 aa, Homo sapiens
  CDR3 for beta chain variable domain of TCR clone 378681 (TRBV4-2, TRBJ2-1)
CASSQDVGLAGEQFF

SEQ ID NO: 757363 - protein, 15 aa, Homo sapiens
  CDR3 for alpha chain variable domain of TCR clone 378682 (TRAV12-2, TRAJ56)
CAVNPFTGANSKLTF

SEQ ID NO: 757364 - protein, 13 aa, Homo sapiens
  CDR3 for beta chain variable domain of TCR clone 378682 (TRBV20-1, TRBJ1-2)
CSARERVYGGYTF

SEQ ID NO: 757365 - protein, 15 aa, Homo sapiens
  CDR3 for alpha chain variable domain of TCR clone 378683 (TRAV8-4, TRAJ37)
CAVSTSSGNTGKLIF

SEQ ID NO: 757366 - protein, 12 aa, Homo sapiens
  CDR3 for beta chain variable domain of TCR clone 378683 (TRBV7-8, TRBJ2-7)
CASEGGPHEQYF

SEQ ID NO: 757367 - protein, 16 aa, Homo sapiens
  CDR3 for alpha chain variable domain of TCR clone 378684 (TRAV8-2, TRAJ7)
CVVSEGPYYGNYRLAF

SEQ ID NO: 757368 - protein, 15 aa, Homo sapiens
  CDR3 for beta chain variable domain of TCR clone 378684 (TRBV27, TRBJ2-3)
CASSLGLAATDTQYF

SEQ ID NO: 757369 - protein, 16 aa, Homo sapiens
  CDR3 for alpha chain variable domain of TCR clone 378685 (TRAV8-3, TRAJ52)
CAVQPAGGTSYAKLTF

SEQ ID NO: 757370 - protein, 15 aa, Homo sapiens
  CDR3 for beta chain variable domain of TCR clone 378685 (TRBV11-2, TRBJ2-7)
CASSLAGGVATEQYF

SEQ ID NO: 757371 - protein, 12 aa, Homo sapiens
  CDR3 for alpha chain variable domain of TCR clone 378686 (TRAV23/DV6, TRAJ53)
CAASKLGSGGRN

SEQ ID NO: 757372 - protein, 18 aa, Homo sapiens
  CDR3 for beta chain variable domain of TCR clone 378686 (TRBV11-2, TRBJ2-3)
CASSLGGASRGAPNTQYF

SEQ ID NO: 757373 - protein, 12 aa, Homo sapiens
  CDR3 for alpha chain variable domain of TCR clone 378687 (TRAV17, TRAJ12)
CATLRSSYKLIF

SEQ ID NO: 757374 - protein, 18 aa, Homo sapiens
  CDR3 for beta chain variable domain of TCR clone 378687 (TRBV7-2, TRBJ2-3)
CASSLKREGSGITDTQYF

SEQ ID NO: 757375 - protein, 16 aa, Homo sapiens
  CDR3 for alpha chain variable domain of TCR clone 378688 (TRAV30, TRAJ24)
CGTEIVDADSWGKFQF

SEQ ID NO: 757376 - protein, 14 aa, Homo sapiens
  CDR3 for beta chain variable domain of TCR clone 378688 (TRBV19, TRBJ2-1)
CASKDPGLANEQFF

SEQ ID NO: 757377 - protein, 12 aa, Homo sapiens
  CDR3 for alpha chain variable domain of TCR clone 378689 (TRAV8-3, TRAJ26)
CAGDNYGQNFVF

SEQ ID NO: 757378 - protein, 15 aa, Homo sapiens
  CDR3 for beta chain variable domain of TCR clone 378689 (TRBV7-3, TRBJ2-1)
CASSLGQGPFGEQFF

SEQ ID NO: 757379 - protein, 12 aa, Homo sapiens
  CDR3 for alpha chain variable domain of TCR clone 378690 (TRAV12-1, TRAJ40)
CVVYSGTYKYIF

SEQ ID NO: 757380 - protein, 11 aa, Homo sapiens
  CDR3 for beta chain variable domain of TCR clone 378690 (TRBV7-2, TRBJ2-7)
CASSSGLWQYF

SEQ ID NO: 757381 - protein, 13 aa, Homo sapiens
  CDR3 for alpha chain variable domain of TCR clone 378691 (TRAV16, TRAJ54)
CALKVRGAQKLVF

SEQ ID NO: 757382 - protein, 13 aa, Homo sapiens
  CDR3 for beta chain variable domain of TCR clone 378691 (TRBV20-1, TRBJ1-1)
CSARGGGKTEDFF

SEQ ID NO: 757383 - protein, 14 aa, Homo sapiens
  CDR3 for alpha chain variable domain of TCR clone 378692 (TRAV16, TRAJ57)
FALSGQGGSEKLVF

SEQ ID NO: 757384 - protein, 13 aa, Homo sapiens
  CDR3 for beta chain variable domain of TCR clone 378692 (TRBV5-4, TRBJ2-1)
CASSLQGPREQFF

SEQ ID NO: 757385 - protein, 11 aa, Homo sapiens
  CDR3 for alpha chain variable domain of TCR clone 378693 (TRAV21, TRAJ34)
CAVTNTDKLIF

SEQ ID NO: 757386 - protein, 16 aa, Homo sapiens
  CDR3 for beta chain variable domain of TCR clone 378693 (TRBV19, TRBJ2-1)
CASSMGGGSSYNEQFF

SEQ ID NO: 757387 - protein, 13 aa, Homo sapiens
  CDR3 for alpha chain variable domain of TCR clone 378694 (TRAV2, TRAJ40)
RAVVTSGTYQYIF

SEQ ID NO: 757388 - protein, 14 aa, Homo sapiens
  CDR3 for beta chain variable domain of TCR clone 378694 (TRBV19, TRBJ2-1)
CASPTFVLSGEQFF

SEQ ID NO: 757389 - protein, 14 aa, Homo sapiens
  CDR3 for alpha chain variable domain of TCR clone 378695 (TRAV26-1, TRAJ21)
CIVRPPYNFNKFYF

SEQ ID NO: 757390 - protein, 11 aa, Homo sapiens
  CDR3 for beta chain variable domain of TCR clone 378695 (TRBV20-1, TRBJ2-7)
CSARLSYEQYF

SEQ ID NO: 757391 - protein, 13 aa, Homo sapiens
  CDR3 for alpha chain variable domain of TCR clone 378696 (TRAV16, TRAJ9)
CALRATGGFNTIF

SEQ ID NO: 757392 - protein, 16 aa, Homo sapiens
  CDR3 for beta chain variable domain of TCR clone 378696 (TRBV5-1, TRBJ1-3)
CASSRSGEDSGNTIYF

SEQ ID NO: 757393 - protein, 15 aa, Homo sapiens
  CDR3 for alpha chain variable domain of TCR clone 378697 (TRAV3, TRAJ5)
CAVRDRKTGRRPLTF

SEQ ID NO: 757394 - protein, 15 aa, Homo sapiens
  CDR3 for beta chain variable domain of TCR clone 378697 (TRBV7-8, TRBJ2-1)
CASSLADSLYNEQFF

SEQ ID NO: 757395 - protein, 11 aa, Homo sapiens
  CDR3 for alpha chain variable domain of TCR clone 378698 (TRAV26-1, TRAJ37)
CIVRIGRKLIF

SEQ ID NO: 757396 - protein, 13 aa, Homo sapiens
  CDR3 for beta chain variable domain of TCR clone 378698 (TRBV14, TRBJ1-2)
CASSEDRRYGYTF

SEQ ID NO: 757397 - protein, 15 aa, Homo sapiens
  CDR3 for alpha chain variable domain of TCR clone 378699 (TRAV3, TRAJ22)
CAVRDRGGSARQLTL

SEQ ID NO: 757398 - protein, 16 aa, Homo sapiens
  CDR3 for beta chain variable domain of TCR clone 378699 (TRBV5-4, TRBJ2-3)
CASQQPGAGGSDTQYF

SEQ ID NO: 757399 - protein, 14 aa, Homo sapiens
  CDR3 for alpha chain variable domain of TCR clone 378700 (TRAV29/DV5, TRAJ49)
CAASAQNTGIPFDF

SEQ ID NO: 757400 - protein, 16 aa, Homo sapiens
  CDR3 for beta chain variable domain of TCR clone 378700 (TRBV12-4, TRBJ1-5)
CASRQPVEGSNQPQHF

SEQ ID NO: 757401 - protein, 12 aa, Homo sapiens
  CDR3 for alpha chain variable domain of TCR clone 378701 (TRAV26-1, TRAJ48)
CIAVFGNEKLTF

SEQ ID NO: 757402 - protein, 12 aa, Homo sapiens
  CDR3 for beta chain variable domain of TCR clone 378701 (TRBV11-2, TRBJ2-2)
CASSLPTGELFF

SEQ ID NO: 757403 - protein, 14 aa, Homo sapiens
  CDR3 for alpha chain variable domain of TCR clone 378702 (TRAV20, TRAJ42)
CAVQAGGSQGNLIF

SEQ ID NO: 757404 - protein, 17 aa, Homo sapiens
  CDR3 for beta chain variable domain of TCR clone 378702 (TRBV13, TRBJ2-3)
CASSLSRVAGGRNTQYF

SEQ ID NO: 757405 - protein, 15 aa, Homo sapiens
  CDR3 for alpha chain variable domain of TCR clone 378703 (TRAV12-3, TRAJ6)
CAMSAASGGSYIPTF

SEQ ID NO: 757406 - protein, 13 aa, Homo sapiens
  CDR3 for beta chain variable domain of TCR clone 378703 (TRBV20-1, TRBJ1-2)
CSASPESNYGYTF

SEQ ID NO: 757407 - protein, 18 aa, Homo sapiens
  CDR3 for alpha chain variable domain of TCR clone 378704 (TRAV13-1, TRAJ41)
CAASGPRRTQIPDIQNPY

SEQ ID NO: 757408 - protein, 16 aa, Homo sapiens
  CDR3 for beta chain variable domain of TCR clone 378704 (TRBV18, TRBJ2-3)
CASSPPAGGPRKYAAF

SEQ ID NO: 757409 - protein, 15 aa, Homo sapiens
  CDR3 for alpha chain variable domain of TCR clone 378705 (TRAV3, TRAJ5)
CAVKDLDTGRRALTF

SEQ ID NO: 757410 - protein, 13 aa, Homo sapiens
  CDR3 for beta chain variable domain of TCR clone 378705 (TRBV9, TRBJ2-7)
CASSASDSYEQYF

SEQ ID NO: 757411 - protein, 14 aa, Homo sapiens
  CDR3 for alpha chain variable domain of TCR clone 378706 (TRAV10, TRAJ32)
CGEPRGGATNKLIF

SEQ ID NO: 757412 - protein, 14 aa, Homo sapiens
  CDR3 for beta chain variable domain of TCR clone 378706 (TRBV5-4, TRBJ2-2)
CASRLDGGTGELFV

SEQ ID NO: 757413 - protein, 11 aa, Homo sapiens
  CDR3 for alpha chain variable domain of TCR clone 378707 (TRAV2, TRAJ13)
CASGGYQKVTF

SEQ ID NO: 757414 - protein, 14 aa, Homo sapiens
  CDR3 for beta chain variable domain of TCR clone 378707 (TRBV10-3, TRBJ2-5)
CAISERDYQETQYF

SEQ ID NO: 757415 - protein, 13 aa, Homo sapiens
  CDR3 for alpha chain variable domain of TCR clone 378708 (TRAV1-2, TRAJ9)
CAALNTGGFKTIF

SEQ ID NO: 757416 - protein, 14 aa, Homo sapiens
  CDR3 for beta chain variable domain of TCR clone 378708 (TRBV11-2, TRBJ2-7)
CASSSTGEGSEQYF

SEQ ID NO: 757417 - protein, 12 aa, Homo sapiens
  CDR3 for alpha chain variable domain of TCR clone 378709 (TRAV10, TRAJ43)
CVVVRVGNDMRF

SEQ ID NO: 757418 - protein, 15 aa, Homo sapiens
  CDR3 for beta chain variable domain of TCR clone 378709 (TRBV2, TRBJ2-7)
CASSDGLARSYEQYF

SEQ ID NO: 757419 - protein, 18 aa, Homo sapiens
  CDR3 for alpha chain variable domain of TCR clone 378710 (TRAV21, TRAJ52)
CAVRPSPAGGTSYGKLTF

SEQ ID NO: 757420 - protein, 14 aa, Homo sapiens
  CDR3 for beta chain variable domain of TCR clone 378710 (TRBV12-4, TRBJ1-6)
CASNLQGKGSPLHF

SEQ ID NO: 757421 - protein, 13 aa, Homo sapiens
  CDR3 for alpha chain variable domain of TCR clone 378711 (TRAV12-3, TRAJ16)
CAVQLSDGQKLRF

SEQ ID NO: 757422 - protein, 14 aa, Homo sapiens
  CDR3 for beta chain variable domain of TCR clone 378711 (TRBV5-1, TRBJ2-1)
CASSLDGDWNEQFF

SEQ ID NO: 757423 - protein, 19 aa, Homo sapiens
  CDR3 for alpha chain variable domain of TCR clone 378712 (TRAV2, TRAJ20)
ILQVREADAAVYRDCKLSF

SEQ ID NO: 757424 - protein, 17 aa, Homo sapiens
  CDR3 for beta chain variable domain of TCR clone 378712 (TRBV11-2, TRBJ2-1)
CTSSLYPPGVEYNEQFF

SEQ ID NO: 757425 - protein, 16 aa, Homo sapiens
  CDR3 for alpha chain variable domain of TCR clone 378713 (TRAV27, TRAJ56)
CAGVSCKDGANSKLTF

SEQ ID NO: 757426 - protein, 15 aa, Homo sapiens
  CDR3 for beta chain variable domain of TCR clone 378713 (TRBV4-1, TRBJ2-5)
CASSQLAGGQETQYF

SEQ ID NO: 757427 - protein, 14 aa, Homo sapiens
  CDR3 for alpha chain variable domain of TCR clone 378714 (TRAV8-4, TRAJ16)
CAVSPVGRWPEAAL

SEQ ID NO: 757428 - protein, 15 aa, Homo sapiens
  CDR3 for beta chain variable domain of TCR clone 378714 (TRBV5-1, TRBJ2-3)
CASSVTSGSTDTQYF

SEQ ID NO: 757429 - protein, 15 aa, Homo sapiens
  CDR3 for alpha chain variable domain of TCR clone 378715 (TRAV3, TRAJ22)
CAVRDRGGSARQLTF

SEQ ID NO: 757430 - protein, 13 aa, Homo sapiens
  CDR3 for beta chain variable domain of TCR clone 378715 (TRBV12-4, TRBJ1-2)
CASSLRQGKVYTF

SEQ ID NO: 757431 - protein, 16 aa, Homo sapiens
  CDR3 for alpha chain variable domain of TCR clone 378716 (TRAV3, TRAJ37)
CAVRGKGSGNTGKLIF

SEQ ID NO: 757432 - protein, 13 aa, Homo sapiens
  CDR3 for beta chain variable domain of TCR clone 378716 (TRBV19, TRBJ1-2)
CASSVPGQYGYTF

SEQ ID NO: 757433 - protein, 14 aa, Homo sapiens
  CDR3 for alpha chain variable domain of TCR clone 378717 (TRAV12-3, TRAJ10)
SHLPLTGGGNKLTF

SEQ ID NO: 757434 - protein, 17 aa, Homo sapiens
  CDR3 for beta chain variable domain of TCR clone 378717 (TRBV11-2, TRBJ2-1)
CASSLCPPGVEYNEQFF

SEQ ID NO: 757435 - protein, 17 aa, Homo sapiens
  CDR3 for alpha chain variable domain of TCR clone 378718 (TRAV26-2, TRAJ42)
CILRDVGYGGSQGNLII

SEQ ID NO: 757436 - protein, 16 aa, Homo sapiens
  CDR3 for beta chain variable domain of TCR clone 378718 (TRBV12-4, TRBJ2-7)
CASSLIGGTGTYEQYF

SEQ ID NO: 757437 - protein, 14 aa, Homo sapiens
  CDR3 for alpha chain variable domain of TCR clone 378719 (TRAV12-3, TRAJ10)
SHLPLTGGGNKLTF

SEQ ID NO: 757438 - protein, 16 aa, Homo sapiens
  CDR3 for beta chain variable domain of TCR clone 378719 (TRBV2, TRBJ2-5)
CASSETQGVGEETQYF

SEQ ID NO: 757439 - protein, 14 aa, Homo sapiens
  CDR3 for alpha chain variable domain of TCR clone 378720 (TRAV29/DV5, TRAJ44)
CAAFLVGTASKLTF

SEQ ID NO: 757440 - protein, 14 aa, Homo sapiens
  CDR3 for beta chain variable domain of TCR clone 378720 (TRBV18, TRBJ2-7)
CASSPRGGAYEQYF

SEQ ID NO: 757441 - protein, 14 aa, Homo sapiens
  CDR3 for alpha chain variable domain of TCR clone 378721 (TRAV12-1, TRAJ23)
CVVIVYNQGGKLIF

SEQ ID NO: 757442 - protein, 15 aa, Homo sapiens
  CDR3 for beta chain variable domain of TCR clone 378721 (TRBV20-1, TRBJ1-5)
CSAKPPGQGSQHQHF

SEQ ID NO: 757443 - protein, 13 aa, Homo sapiens
  CDR3 for alpha chain variable domain of TCR clone 378722 (TRAV12-3, TRAJ33)
CAMSVNSNYQLIW

SEQ ID NO: 757444 - protein, 15 aa, Homo sapiens
  CDR3 for beta chain variable domain of TCR clone 378722 (TRBV28, TRBJ2-1)
CASRTGAGVIARQFF

SEQ ID NO: 757445 - protein, 15 aa, Homo sapiens
  CDR3 for alpha chain variable domain of TCR clone 378723 (TRAV21, TRAJ45)
CAVSYSGGGADGLTF

SEQ ID NO: 757446 - protein, 14 aa, Homo sapiens
  CDR3 for beta chain variable domain of TCR clone 378723 (TRBV5-5, TRBJ1-2)
CASSLGSLDGKAKA

SEQ ID NO: 757447 - protein, 16 aa, Homo sapiens
  CDR3 for alpha chain variable domain of TCR clone 378724 (TRAV12-2, TRAJ47)
CAVNREKEEYGNKLVF

SEQ ID NO: 757448 - protein, 14 aa, Homo sapiens
  CDR3 for beta chain variable domain of TCR clone 378724 (TRBV7-2, TRBJ2-7)
CASSPKTSFYEQYF

SEQ ID NO: 757449 - protein, 15 aa, Homo sapiens
  CDR3 for alpha chain variable domain of TCR clone 378725 (TRAV12-1, TRAJ8)
CVVNVENTGFQKLVF

SEQ ID NO: 757450 - protein, 13 aa, Homo sapiens
  CDR3 for beta chain variable domain of TCR clone 378725 (TRBV7-2, TRBJ2-2)
CASSLAVTGELFF

SEQ ID NO: 757451 - protein, 12 aa, Homo sapiens
  CDR3 for alpha chain variable domain of TCR clone 378726 (TRAV13-1, TRAJ27)
CAAHTNGGKSTF

SEQ ID NO: 757452 - protein, 14 aa, Homo sapiens
  CDR3 for beta chain variable domain of TCR clone 378726 (TRBV19, TRBJ2-2)
CASSGQGIAGELFF

SEQ ID NO: 757453 - protein, 12 aa, Homo sapiens
  CDR3 for alpha chain variable domain of TCR clone 378727 (TRAV27, TRAJ38)
CAAGLMLATTIS

SEQ ID NO: 757454 - protein, 13 aa, Homo sapiens
  CDR3 for beta chain variable domain of TCR clone 378727 (TRBV20-1, TRBJ1-1)
CSARVGGNTEAFF

SEQ ID NO: 757455 - protein, 14 aa, Homo sapiens
  CDR3 for alpha chain variable domain of TCR clone 378728 (TRAV29/DV5, TRAJ22)
CAASATGSARQLTF

SEQ ID NO: 757456 - protein, 15 aa, Homo sapiens
  CDR3 for beta chain variable domain of TCR clone 378728 (TRBV18, TRBJ2-1)
CASSPPGASYNEQFF

SEQ ID NO: 757457 - protein, 13 aa, Homo sapiens
  CDR3 for alpha chain variable domain of TCR clone 378729 (TRAV12-1, TRAJ40)
CVVPTSGTYKYIF

SEQ ID NO: 757458 - protein, 13 aa, Homo sapiens
  CDR3 for beta chain variable domain of TCR clone 378729 (TRBV4-2, TRBJ1-1)
CASSQAGSTEAFF

SEQ ID NO: 757459 - protein, 13 aa, Homo sapiens
  CDR3 for alpha chain variable domain of TCR clone 378730 (TRAV35, TRAJ36)
CAGPRIGANNLFF

SEQ ID NO: 757460 - protein, 16 aa, Homo sapiens
  CDR3 for beta chain variable domain of TCR clone 378730 (TRBV20-1, TRBJ2-3)
CSAVRDRGPIADTQYF

SEQ ID NO: 757461 - protein, 12 aa, Homo sapiens
  CDR3 for alpha chain variable domain of TCR clone 378731 (TRAV3, TRAJ20)
CAVRDPDYKLSF

SEQ ID NO: 757462 - protein, 13 aa, Homo sapiens
  CDR3 for beta chain variable domain of TCR clone 378731 (TRBV9, TRBJ2-1)
CASSVGQGGELFF

SEQ ID NO: 757463 - protein, 16 aa, Homo sapiens
  CDR3 for alpha chain variable domain of TCR clone 378732 (TRAV30, TRAJ24)
CGTEMVDADSWVKFQF

SEQ ID NO: 757464 - protein, 14 aa, Homo sapiens
  CDR3 for beta chain variable domain of TCR clone 378732 (TRBV12-5, TRBJ2-5)
CASGSRTHQETQYF

SEQ ID NO: 757465 - protein, 14 aa, Homo sapiens
  CDR3 for alpha chain variable domain of TCR clone 378733 (TRAV13-1, TRAJ44)
CEAKATGTASKLTF

SEQ ID NO: 757466 - protein, 13 aa, Homo sapiens
  CDR3 for beta chain variable domain of TCR clone 378733 (TRBV27, TRBJ1-1)
CASSLSIGAEAFF

SEQ ID NO: 757467 - protein, 14 aa, Homo sapiens
  CDR3 for alpha chain variable domain of TCR clone 378734 (TRAV38-1, TRAJ40)
CALRPTSGTYKYIF

SEQ ID NO: 757468 - protein, 16 aa, Homo sapiens
  CDR3 for beta chain variable domain of TCR clone 378734 (TRBV3-1, TRBJ1-2)
CASSQGQGVQRDGYTF

SEQ ID NO: 757469 - protein, 15 aa, Homo sapiens
  CDR3 for alpha chain variable domain of TCR clone 378735 (TRAV25, TRAJ10)
CAGPLLTGGGNKLTF

SEQ ID NO: 757470 - protein, 15 aa, Homo sapiens
  CDR3 for beta chain variable domain of TCR clone 378735 (TRBV12-5, TRBJ2-2)
CGSGRLGGNTGELFF

SEQ ID NO: 757471 - protein, 14 aa, Homo sapiens
  CDR3 for alpha chain variable domain of TCR clone 378736 (TRAV23/DV6, TRAJ37)
CAASTSSNTGKLIF

SEQ ID NO: 757472 - protein, 14 aa, Homo sapiens
  CDR3 for beta chain variable domain of TCR clone 378736 (TRBV28, TRBJ1-2)
CTSRIQGANYGYTF

SEQ ID NO: 757473 - protein, 16 aa, Homo sapiens
  CDR3 for alpha chain variable domain of TCR clone 378737 (TRAV3, TRAJ37)
CAVRGKGSGNTGKLIV

SEQ ID NO: 757474 - protein, 15 aa, Homo sapiens
  CDR3 for beta chain variable domain of TCR clone 378737 (TRBV7-3, TRBJ2-2)
CASSETGQGTGELFF

SEQ ID NO: 757475 - protein, 11 aa, Homo sapiens
  CDR3 for alpha chain variable domain of TCR clone 378738 (TRAV1-2, TRAJ40)
CAVPGTYKYIF

SEQ ID NO: 757476 - protein, 16 aa, Homo sapiens
  CDR3 for beta chain variable domain of TCR clone 378738 (TRBV7-3, TRBJ2-2)
CASILKRGTLSGELFF

SEQ ID NO: 757477 - protein, 14 aa, Homo sapiens
  CDR3 for alpha chain variable domain of TCR clone 378739 (TRAV12-2, TRAJ13)
CAVKQTGGYQKVTF

SEQ ID NO: 757478 - protein, 13 aa, Homo sapiens
  CDR3 for beta chain variable domain of TCR clone 378739 (TRBV4-2, TRBJ1-1)
CASSQAGNTEAFF

SEQ ID NO: 757479 - protein, 14 aa, Homo sapiens
  CDR3 for alpha chain variable domain of TCR clone 378740 (TRAV26-1, TRAJ48)
CIARTNFGNEKLTF

SEQ ID NO: 757480 - protein, 12 aa, Homo sapiens
  CDR3 for beta chain variable domain of TCR clone 378740 (TRBV20-1, TRBJ2-7)
CSASSGANEQYF

SEQ ID NO: 757481 - protein, 14 aa, Homo sapiens
  CDR3 for alpha chain variable domain of TCR clone 378741 (TRAV17, TRAJ56)
CATVPAGAKSKLTF

SEQ ID NO: 757482 - protein, 13 aa, Homo sapiens
  CDR3 for beta chain variable domain of TCR clone 378741 (TRBV12-4, TRBJ2-2)
CASSITGSGELFF

SEQ ID NO: 757483 - protein, 14 aa, Homo sapiens
  CDR3 for alpha chain variable domain of TCR clone 378742 (TRAV9-2, TRAJ38)
RALSNAGNNRKLIW

SEQ ID NO: 757484 - protein, 15 aa, Homo sapiens
  CDR3 for beta chain variable domain of TCR clone 378742 (TRBV6-5, TRBJ2-1)
CASSYDAGAGNEQFF

SEQ ID NO: 757485 - protein, 15 aa, Homo sapiens
  CDR3 for alpha chain variable domain of TCR clone 378743 (TRAV17, TRAJ54)
CATTRSEQGAQKLVF

SEQ ID NO: 757486 - protein, 16 aa, Homo sapiens
  CDR3 for beta chain variable domain of TCR clone 378743 (TRBV12-4, TRBJ2-3)
CASSLRLAETTDTQYL

SEQ ID NO: 757487 - protein, 14 aa, Homo sapiens
  CDR3 for alpha chain variable domain of TCR clone 378744 (TRAV17, TRAJ48)
CATEGNFGNEKLTF

SEQ ID NO: 757488 - protein, 14 aa, Homo sapiens
  CDR3 for beta chain variable domain of TCR clone 378744 (TRBV7-9, TRBJ2-2)
CASSGLADTGELFF

SEQ ID NO: 757489 - protein, 12 aa, Homo sapiens
  CDR3 for alpha chain variable domain of TCR clone 378745 (TRAV13-2, TRAJ8)
CAPWLGFQKLVF

SEQ ID NO: 757490 - protein, 18 aa, Homo sapiens
  CDR3 for beta chain variable domain of TCR clone 378745 (TRBV11-2, TRBJ2-3)
CASSLGGASRGAPNTQYF

SEQ ID NO: 757491 - protein, 16 aa, Homo sapiens
  CDR3 for alpha chain variable domain of TCR clone 378746 (TRAV1-2, TRAJ10)
CAVRGVLRGGGNKLTF

SEQ ID NO: 757492 - protein, 12 aa, Homo sapiens
  CDR3 for beta chain variable domain of TCR clone 378746 (TRBV7-8, TRBJ2-7)
CASSLGDREQYF

SEQ ID NO: 757493 - protein, 20 aa, Homo sapiens
  CDR3 for alpha chain variable domain of TCR clone 378747 (TRAV26-1, TRAJ42)
CCVLLHRQTYYGGSQGNLFF

SEQ ID NO: 757494 - protein, 16 aa, Homo sapiens
  CDR3 for beta chain variable domain of TCR clone 378747 (TRBV7-3, TRBJ2-2)
CASSLKRGTLSGELFF

SEQ ID NO: 757495 - protein, 19 aa, Homo sapiens
  CDR3 for alpha chain variable domain of TCR clone 378748 (TRAV27, TRAJ44)
ASTSVQDGINTGTASKLTF

SEQ ID NO: 757496 - protein, 14 aa, Homo sapiens
  CDR3 for beta chain variable domain of TCR clone 378748 (TRBV7-9, TRBJ2-2)
CASSGLADTGELFF

SEQ ID NO: 757497 - protein, 15 aa, Homo sapiens
  CDR3 for alpha chain variable domain of TCR clone 378749 (TRAV8-3, TRAJ21)
CALGALPPRGYKFYF

SEQ ID NO: 757498 - protein, 15 aa, Homo sapiens
  CDR3 for beta chain variable domain of TCR clone 378749 (TRBV7-8, TRBJ1-5)
CASSLERRGLEPQHF

SEQ ID NO: 757499 - protein, 11 aa, Homo sapiens
  CDR3 for alpha chain variable domain of TCR clone 378750 (TRAV2, TRAJ13)
CASGGYQKVTF

SEQ ID NO: 757500 - protein, 18 aa, Homo sapiens
  CDR3 for beta chain variable domain of TCR clone 378750 (TRBV11-2, TRBJ2-3)
CASSLEGASRGAPNTQYF

SEQ ID NO: 757501 - protein, 13 aa, Homo sapiens
  CDR3 for alpha chain variable domain of TCR clone 378751 (TRAV27, TRAJ41)
CAGEGNSGYALNF

SEQ ID NO: 757502 - protein, 15 aa, Homo sapiens
  CDR3 for beta chain variable domain of TCR clone 378751 (TRBV19, TRBJ1-5)
CASSIVWADNQPQHF

SEQ ID NO: 757503 - protein, 13 aa, Homo sapiens
  CDR3 for alpha chain variable domain of TCR clone 378752 (TRAV3, TRAJ21)
CAVREPDFNKFYF

SEQ ID NO: 757504 - protein, 14 aa, Homo sapiens
  CDR3 for beta chain variable domain of TCR clone 378752 (TRBV4-1, TRBJ2-2)
CASSQAVNTGKLFF

SEQ ID NO: 757505 - protein, 13 aa, Homo sapiens
  CDR3 for alpha chain variable domain of TCR clone 378753 (TRAV13-2, TRAJ13)
CAERPGGYQKVTF

SEQ ID NO: 757506 - protein, 16 aa, Homo sapiens
  CDR3 for beta chain variable domain of TCR clone 378753 (TRBV18, TRBJ2-5)
CASSPPSSGGEKTQYF

SEQ ID NO: 757507 - protein, 14 aa, Homo sapiens
  CDR3 for alpha chain variable domain of TCR clone 378754 (TRAV12-3, TRAJ57)
CAMSAWGGSEKLVL

SEQ ID NO: 757508 - protein, 16 aa, Homo sapiens
  CDR3 for beta chain variable domain of TCR clone 378754 (TRBV7-3, TRBJ2-2)
CASSLKRGTLSGELFF

SEQ ID NO: 757509 - protein, 12 aa, Homo sapiens
  CDR3 for alpha chain variable domain of TCR clone 378755 (TRAV2, TRAJ31)
CAVEDNNARLMF

SEQ ID NO: 757510 - protein, 15 aa, Homo sapiens
  CDR3 for beta chain variable domain of TCR clone 378755 (TRBV7-2, TRBJ2-7)
CASSLSSGRTYEQYF

SEQ ID NO: 757511 - protein, 11 aa, Homo sapiens
  CDR3 for alpha chain variable domain of TCR clone 378756 (TRAV21, TRAJ11)
CAVNGYSTLTF

SEQ ID NO: 757512 - protein, 18 aa, Homo sapiens
  CDR3 for beta chain variable domain of TCR clone 378756 (TRBV7-9, TRBJ2-6)
CASSFPGAGISGANVLTF

SEQ ID NO: 757513 - protein, 13 aa, Homo sapiens
  CDR3 for alpha chain variable domain of TCR clone 378757 (TRAV38-2/DV8, TRAJ34)
CAYRTWNTDKLIF

SEQ ID NO: 757514 - protein, 18 aa, Homo sapiens
  CDR3 for beta chain variable domain of TCR clone 378757 (TRBV11-2, TRBJ2-3)
CASSLGGASRGAPNTQYF

SEQ ID NO: 757515 - protein, 12 aa, Homo sapiens
  CDR3 for alpha chain variable domain of TCR clone 378758 (TRAV21, TRAJ39)
CAADNAGNMLTF

SEQ ID NO: 757516 - protein, 18 aa, Homo sapiens
  CDR3 for beta chain variable domain of TCR clone 378758 (TRBV12-4, TRBJ2-2)
CASSLVAGTRGRTGELFF

SEQ ID NO: 757517 - protein, 12 aa, Homo sapiens
  CDR3 for alpha chain variable domain of TCR clone 378759 (TRAV35, TRAJ39)
LAPNNAGNMLTF

SEQ ID NO: 757518 - protein, 15 aa, Homo sapiens
  CDR3 for beta chain variable domain of TCR clone 378759 (TRBV2, TRBJ2-3)
CQQHLGEGVTDTQYF

SEQ ID NO: 757519 - protein, 14 aa, Homo sapiens
  CDR3 for alpha chain variable domain of TCR clone 378760 (TRAV26-1, TRAJ38)
CIAANAGNNRKLIW

SEQ ID NO: 757520 - protein, 15 aa, Homo sapiens
  CDR3 for beta chain variable domain of TCR clone 378760 (TRBV18, TRBJ2-1)
CASSPPSASYNEQFF

SEQ ID NO: 757521 - protein, 16 aa, Homo sapiens
  CDR3 for alpha chain variable domain of TCR clone 378761 (TRAV3, TRAJ18)
CAVRDGRGSTLGRLYF

SEQ ID NO: 757522 - protein, 14 aa, Homo sapiens
  CDR3 for beta chain variable domain of TCR clone 378761 (TRBV2, TRBJ2-5)
CASKRDGTTETQYF

SEQ ID NO: 757523 - protein, 13 aa, Homo sapiens
  CDR3 for alpha chain variable domain of TCR clone 378762 (TRAV3, TRAJ27)
CAVRPLGLGKSTF

SEQ ID NO: 757524 - protein, 13 aa, Homo sapiens
  CDR3 for beta chain variable domain of TCR clone 378762 (TRBV7-9, TRBJ2-3)
CASSPGSTDTQYF

SEQ ID NO: 757525 - protein, 16 aa, Homo sapiens
  CDR3 for alpha chain variable domain of TCR clone 378763 (TRAV30, TRAJ24)
CGTEIVGADSWGKSQF

SEQ ID NO: 757526 - protein, 15 aa, Homo sapiens
  CDR3 for beta chain variable domain of TCR clone 378763 (TRBV7-9, TRBJ1-4)
CASSARTGGNEKLFF

SEQ ID NO: 757527 - protein, 14 aa, Homo sapiens
  CDR3 for alpha chain variable domain of TCR clone 378764 (TRAV2, TRAJ29)
CAVTPPSGNTPLVI

SEQ ID NO: 757528 - protein, 13 aa, Homo sapiens
  CDR3 for beta chain variable domain of TCR clone 378764 (TRBV11-2, TRBJ2-1)
CASSLGLAGGRFF

SEQ ID NO: 757529 - protein, 12 aa, Homo sapiens
  CDR3 for alpha chain variable domain of TCR clone 378765 (TRAV29/DV5, TRAJ34)
CAASGNTDKLIF

SEQ ID NO: 757530 - protein, 12 aa, Homo sapiens
  CDR3 for beta chain variable domain of TCR clone 378765 (TRBV19, TRBJ2-7)
PKWLRRVYEQYF

SEQ ID NO: 757531 - protein, 11 aa, Homo sapiens
  CDR3 for alpha chain variable domain of TCR clone 378766 (TRAV21, TRAJ11)
CAVNGYSTLPF

SEQ ID NO: 757532 - protein, 11 aa, Homo sapiens
  CDR3 for beta chain variable domain of TCR clone 378766 (TRBV11-2, TRBJ2-7)
CASSSDYEQYF

SEQ ID NO: 757533 - protein, 13 aa, Homo sapiens
  CDR3 for alpha chain variable domain of TCR clone 378767 (TRAV29/DV5, TRAJ31)
CAASRNNNARLMF

SEQ ID NO: 757534 - protein, 12 aa, Homo sapiens
  CDR3 for beta chain variable domain of TCR clone 378767 (TRBV14, TRBJ1-1)
CASSQLKVLAFF

SEQ ID NO: 757535 - protein, 13 aa, Homo sapiens
  CDR3 for alpha chain variable domain of TCR clone 378768 (TRAV12-2, TRAJ42)
CALKRGSQGNLIF

SEQ ID NO: 757536 - protein, 16 aa, Homo sapiens
  CDR3 for beta chain variable domain of TCR clone 378768 (TRBV9, TRBJ2-2)
CASSAMGKGNTGELFF

SEQ ID NO: 757537 - protein, 14 aa, Homo sapiens
  CDR3 for alpha chain variable domain of TCR clone 378769 (TRAV13-2, TRAJ43)
CAEIPTYNNNDMRF

SEQ ID NO: 757538 - protein, 15 aa, Homo sapiens
  CDR3 for beta chain variable domain of TCR clone 378769 (TRBV7-9, TRBJ2-2)
CASGPLDTFPGKLFF

SEQ ID NO: 757539 - protein, 13 aa, Homo sapiens
  CDR3 for alpha chain variable domain of TCR clone 378770 (TRAV17, TRAJ5)
CAPMDTGWRALTF

SEQ ID NO: 757540 - protein, 13 aa, Homo sapiens
  CDR3 for beta chain variable domain of TCR clone 378770 (TRBV7-9, TRBJ1-2)
CASSLKQNYGYTF

SEQ ID NO: 757541 - protein, 12 aa, Homo sapiens
  CDR3 for alpha chain variable domain of TCR clone 378771 (TRAV2, TRAJ31)
CAVDDNNARLMF

SEQ ID NO: 757542 - protein, 14 aa, Homo sapiens
  CDR3 for beta chain variable domain of TCR clone 378771 (TRBV19, TRBJ2-1)
CASSRLASINEQFF

SEQ ID NO: 757543 - protein, 16 aa, Homo sapiens
  CDR3 for alpha chain variable domain of TCR clone 378772 (TRAV8-1, TRAJ42)
CAVTSRSGGSQGNLIF

SEQ ID NO: 757544 - protein, 12 aa, Homo sapiens
  CDR3 for beta chain variable domain of TCR clone 378772 (TRBV6-3, TRBJ2-7)
CASSLGRRGLYF

SEQ ID NO: 757545 - protein, 12 aa, Homo sapiens
  CDR3 for alpha chain variable domain of TCR clone 378773 (TRAV27, TRAJ35)
CAGADFANVLHC

SEQ ID NO: 757546 - protein, 16 aa, Homo sapiens
  CDR3 for beta chain variable domain of TCR clone 378773 (TRBV6-1, TRBJ2-1)
CASILRQGSSYNEQFF

SEQ ID NO: 757547 - protein, 16 aa, Homo sapiens
  CDR3 for alpha chain variable domain of TCR clone 378774 (TRAV30, TRAJ24)
CGIEIWDADSWGKFQF

SEQ ID NO: 757548 - protein, 14 aa, Homo sapiens
  CDR3 for beta chain variable domain of TCR clone 378774 (TRBV12-5, TRBJ2-5)
CASGSRTHQETQYF

SEQ ID NO: 757549 - protein, 16 aa, Homo sapiens
  CDR3 for alpha chain variable domain of TCR clone 378775 (TRAV20, TRAJ52)
CAVPPDGGTSYGKLTF

SEQ ID NO: 757550 - protein, 12 aa, Homo sapiens
  CDR3 for beta chain variable domain of TCR clone 378775 (TRBV19, TRBJ2-7)
CASTDRGYEQYF

SEQ ID NO: 757551 - protein, 11 aa, Homo sapiens
  CDR3 for alpha chain variable domain of TCR clone 378776 (TRAV3, TRAJ21)
CAVGNFNKFYF

SEQ ID NO: 757552 - protein, 14 aa, Homo sapiens
  CDR3 for beta chain variable domain of TCR clone 378776 (TRBV6-1, TRBJ1-3)
CASVPGGGGNTIYF

SEQ ID NO: 757553 - protein, 12 aa, Homo sapiens
  CDR3 for alpha chain variable domain of TCR clone 378777 (TRAV3, TRAJ7)
CADLLWEQQTRF

SEQ ID NO: 757554 - protein, 15 aa, Homo sapiens
  CDR3 for beta chain variable domain of TCR clone 378777 (TRBV27, TRBJ2-5)
CASSLYPRGGETQYF

SEQ ID NO: 757555 - protein, 13 aa, Homo sapiens
  CDR3 for alpha chain variable domain of TCR clone 378778 (TRAV13-2, TRAJ48)
CAEMDFGNEKLTF

SEQ ID NO: 757556 - protein, 15 aa, Homo sapiens
  CDR3 for beta chain variable domain of TCR clone 378778 (TRBV6-3, TRBJ2-7)
CASSSPGTVFYEQYF

SEQ ID NO: 757557 - protein, 14 aa, Homo sapiens
  CDR3 for alpha chain variable domain of TCR clone 378779 (TRAV12-2, TRAJ9)
CAVNLNTGGFKTIF

SEQ ID NO: 757558 - protein, 17 aa, Homo sapiens
  CDR3 for beta chain variable domain of TCR clone 378779 (TRBV20-1, TRBJ2-2)
CSASRQVGQGYTVELFF

SEQ ID NO: 757559 - protein, 13 aa, Homo sapiens
  CDR3 for alpha chain variable domain of TCR clone 378780 (TRAV25, TRAJ30)
CAGRVDRDDKIIF

SEQ ID NO: 757560 - protein, 17 aa, Homo sapiens
  CDR3 for beta chain variable domain of TCR clone 378780 (TRBV7-9, TRBJ2-6)
CASSFGAGYSGANFLTF

SEQ ID NO: 757561 - protein, 14 aa, Homo sapiens
  CDR3 for alpha chain variable domain of TCR clone 378781 (TRAV13-1, TRAJ23)
CAASRLGRGGKLIF

SEQ ID NO: 757562 - protein, 13 aa, Homo sapiens
  CDR3 for beta chain variable domain of TCR clone 378781 (TRBV20-1, TRBJ1-1)
CSAPLGGVTEAFF

SEQ ID NO: 757563 - protein, 17 aa, Homo sapiens
  CDR3 for alpha chain variable domain of TCR clone 378782 (TRAV36/DV7, TRAJ52)
CAVAQRAGGTSYGKLTF

SEQ ID NO: 757564 - protein, 14 aa, Homo sapiens
  CDR3 for beta chain variable domain of TCR clone 378782 (TRBV12-4, TRBJ2-5)
CASSLWQKQETQYF

SEQ ID NO: 757565 - protein, 15 aa, Homo sapiens
  CDR3 for alpha chain variable domain of TCR clone 378783 (TRAV13-1, TRAJ57)
CEASNNQGGSEKLVF

SEQ ID NO: 757566 - protein, 16 aa, Homo sapiens
  CDR3 for beta chain variable domain of TCR clone 378783 (TRBV19, TRBJ2-1)
CASSKAGPSSYNEQFF

SEQ ID NO: 757567 - protein, 12 aa, Homo sapiens
  CDR3 for alpha chain variable domain of TCR clone 378784 (TRAV26-1, TRAJ43)
CIVRPRGDDVRF

SEQ ID NO: 757568 - protein, 20 aa, Homo sapiens
  CDR3 for beta chain variable domain of TCR clone 378784 (TRBV7-8, TRBJ2-2)
CASSHLFPGPTIHITGELFF

SEQ ID NO: 757569 - protein, 14 aa, Homo sapiens
  CDR3 for alpha chain variable domain of TCR clone 378785 (TRAV17, TRAJ53)
CATDAGGSNYQLTF

SEQ ID NO: 757570 - protein, 16 aa, Homo sapiens
  CDR3 for beta chain variable domain of TCR clone 378785 (TRBV4-1, TRBJ1-1)
CASSQDAGMGNTEAFF

SEQ ID NO: 757571 - protein, 15 aa, Homo sapiens
  CDR3 for alpha chain variable domain of TCR clone 378786 (TRAV8-3, TRAJ23)
CAVGDRYNQGGKLIF

SEQ ID NO: 757572 - protein, 13 aa, Homo sapiens
  CDR3 for beta chain variable domain of TCR clone 378786 (TRBV4-2, TRBJ1-1)
CASSQAGDTEAFF

SEQ ID NO: 757573 - protein, 15 aa, Homo sapiens
  CDR3 for alpha chain variable domain of TCR clone 378787 (TRAV3, TRAJ3)
CAVRDGHSRASKIIF

SEQ ID NO: 757574 - protein, 16 aa, Homo sapiens
  CDR3 for beta chain variable domain of TCR clone 378787 (TRBV28, TRBJ2-7)
CASSLFFETGGPEQYF

SEQ ID NO: 757575 - protein, 14 aa, Homo sapiens
  CDR3 for alpha chain variable domain of TCR clone 378788 (TRAV12-2, TRAJ53)
CAVKGGGSNYKLTL

SEQ ID NO: 757576 - protein, 15 aa, Homo sapiens
  CDR3 for beta chain variable domain of TCR clone 378788 (TRBV11-2, TRBJ2-2)
CASSLDTGNTGELFF

SEQ ID NO: 757577 - protein, 14 aa, Homo sapiens
  CDR3 for alpha chain variable domain of TCR clone 378789 (TRAV1-1, TRAJ27)
CALIYNTKAGKSTF

SEQ ID NO: 757578 - protein, 15 aa, Homo sapiens
  CDR3 for beta chain variable domain of TCR clone 378789 (TRBV7-2, TRBJ2-1)
CASSSGLAGGNEQFF

SEQ ID NO: 757579 - protein, 21 aa, Homo sapiens
  CDR3 for alpha chain variable domain of TCR clone 378790 (TRAV12-1, TRAJ32)
SSVIQPPTSMNYGGATNKLIF

SEQ ID NO: 757580 - protein, 15 aa, Homo sapiens
  CDR3 for beta chain variable domain of TCR clone 378790 (TRBV7-9, TRBJ2-2)
CASGPLDTFPGELFS

SEQ ID NO: 757581 - protein, 14 aa, Homo sapiens
  CDR3 for alpha chain variable domain of TCR clone 378791 (TRAV17, TRAJ57)
CATDPQGGTEKLVF

SEQ ID NO: 757582 - protein, 14 aa, Homo sapiens
  CDR3 for beta chain variable domain of TCR clone 378791 (TRBV7-8, TRBJ2-7)
CASSPRDRVYEQYF

SEQ ID NO: 757583 - protein, 16 aa, Homo sapiens
  CDR3 for alpha chain variable domain of TCR clone 378792 (TRAV17, TRAJ28)
CASYAYSGAGSYQLTF

SEQ ID NO: 757584 - protein, 15 aa, Homo sapiens
  CDR3 for beta chain variable domain of TCR clone 378792 (TRBV4-2, TRBJ2-1)
CASGPSGGLYNEQFF

SEQ ID NO: 757585 - protein, 16 aa, Homo sapiens
  CDR3 for alpha chain variable domain of TCR clone 378793 (TRAV20, TRAJ22)
CAVQASSSGSARQLTF

SEQ ID NO: 757586 - protein, 13 aa, Homo sapiens
  CDR3 for beta chain variable domain of TCR clone 378793 (TRBV2, TRBJ1-1)
CARNPTGGFHAFF

SEQ ID NO: 757587 - protein, 18 aa, Homo sapiens
  CDR3 for alpha chain variable domain of TCR clone 378794 (TRAV26-1, TRAJ23)
CIVRVGLGVWNQGGKPIF

SEQ ID NO: 757588 - protein, 16 aa, Homo sapiens
  CDR3 for beta chain variable domain of TCR clone 378794 (TRBV12-4, TRBJ2-5)
CASSFFVRGRQETQYF

SEQ ID NO: 757589 - protein, 19 aa, Homo sapiens
  CDR3 for alpha chain variable domain of TCR clone 378795 (TRAV25, TRAJ20)
TATQTTDVGILPHDYKLSF

SEQ ID NO: 757590 - protein, 14 aa, Homo sapiens
  CDR3 for beta chain variable domain of TCR clone 378795 (TRBV7-9, TRBJ2-2)
CASSGLADTGELFF

SEQ ID NO: 757591 - protein, 15 aa, Homo sapiens
  CDR3 for alpha chain variable domain of TCR clone 378796 (TRAV26-1, TRAJ40)
CIVRAVPSGTYKYIF

SEQ ID NO: 757592 - protein, 14 aa, Homo sapiens
  CDR3 for beta chain variable domain of TCR clone 378796 (TRBV19, TRBJ2-1)
CASKDPGLDNEQFF

SEQ ID NO: 757593 - protein, 18 aa, Homo sapiens
  CDR3 for alpha chain variable domain of TCR clone 378797 (TRAV12-3, TRAJ52)
CAMSVGGAGGTSYGKPTF

SEQ ID NO: 757594 - protein, 17 aa, Homo sapiens
  CDR3 for beta chain variable domain of TCR clone 378797 (TRBV13, TRBJ2-3)
CASSLSRVAGGRNTQYF

SEQ ID NO: 757595 - protein, 11 aa, Homo sapiens
  CDR3 for alpha chain variable domain of TCR clone 378798 (TRAV2, TRAJ13)
CASGGYQKVTF

SEQ ID NO: 757596 - protein, 16 aa, Homo sapiens
  CDR3 for beta chain variable domain of TCR clone 378798 (TRBV6-1, TRBJ2-5)
LASSETLDRGAETQYF

SEQ ID NO: 757597 - protein, 10 aa, Homo sapiens
  CDR3 for alpha chain variable domain of TCR clone 378799 (TRAV12-2, TRAJ52)
RSTSYGELTF

SEQ ID NO: 757598 - protein, 11 aa, Homo sapiens
  CDR3 for beta chain variable domain of TCR clone 378799 (TRBV11-2, TRBJ2-2)
CASSLPGELFF

SEQ ID NO: 757599 - protein, 15 aa, Homo sapiens
  CDR3 for alpha chain variable domain of TCR clone 378800 (TRAV25, TRAJ52)
CAGRPGGTSYGKRTF

SEQ ID NO: 757600 - protein, 14 aa, Homo sapiens
  CDR3 for beta chain variable domain of TCR clone 378800 (TRBV7-8, TRBJ2-3)
CASSLEAGTDTQYF

SEQ ID NO: 757601 - protein, 14 aa, Homo sapiens
  CDR3 for alpha chain variable domain of TCR clone 378801 (TRAV14/DV4, TRAJ15)
CAMRRDQAGTALIF

SEQ ID NO: 757602 - protein, 14 aa, Homo sapiens
  CDR3 for beta chain variable domain of TCR clone 378801 (TRBV4-2, TRBJ2-1)
CASGLDRAYNEQFF

SEQ ID NO: 757603 - protein, 16 aa, Homo sapiens
  CDR3 for alpha chain variable domain of TCR clone 378802 (TRAV4, TRAJ22)
CLVGDLYSGSARQLTF

SEQ ID NO: 757604 - protein, 14 aa, Homo sapiens
  CDR3 for beta chain variable domain of TCR clone 378802 (TRBV28, TRBJ2-3)
CASSWRGRADTRYF

SEQ ID NO: 757605 - protein, 12 aa, Homo sapiens
  CDR3 for alpha chain variable domain of TCR clone 378803 (TRAV27, TRAJ35)
CAGADFGNVLHC

SEQ ID NO: 757606 - protein, 14 aa, Homo sapiens
  CDR3 for beta chain variable domain of TCR clone 378803 (TRBV7-2, TRBJ2-7)
CASRSQGAAYEQYF

SEQ ID NO: 757607 - protein, 12 aa, Homo sapiens
  CDR3 for alpha chain variable domain of TCR clone 378804 (TRAV1-2, TRAJ24)
CAVGGSWGKFQF

SEQ ID NO: 757608 - protein, 15 aa, Homo sapiens
  CDR3 for beta chain variable domain of TCR clone 378804 (TRBV6-1, TRBJ2-7)
CASSEGVGDPYEQYF

SEQ ID NO: 757609 - protein, 14 aa, Homo sapiens
  CDR3 for alpha chain variable domain of TCR clone 378805 (TRAV1-2, TRAJ8)
CAVRVDTGFQKLVF

SEQ ID NO: 757610 - protein, 14 aa, Homo sapiens
  CDR3 for beta chain variable domain of TCR clone 378805 (TRBV25-1, TRBJ1-1)
CASTHLGGNTEAFF

SEQ ID NO: 757611 - protein, 15 aa, Homo sapiens
  CDR3 for alpha chain variable domain of TCR clone 378806 (TRAV13-1, TRAJ17)
CAASIERAAGNKLTF

SEQ ID NO: 757612 - protein, 17 aa, Homo sapiens
  CDR3 for beta chain variable domain of TCR clone 378806 (TRBV11-2, TRBJ2-1)
CASSLCPPGVEYNEQFF

SEQ ID NO: 757613 - protein, 15 aa, Homo sapiens
  CDR3 for alpha chain variable domain of TCR clone 378807 (TRAV12-2, TRAJ43)
CAFEMRFGAGTRLTV

SEQ ID NO: 757614 - protein, 17 aa, Homo sapiens
  CDR3 for beta chain variable domain of TCR clone 378807 (TRBV13, TRBJ2-3)
CASSLSRVAGGRNTQYF

SEQ ID NO: 757615 - protein, 17 aa, Homo sapiens
  CDR3 for alpha chain variable domain of TCR clone 378808 (TRAV13-1, TRAJ28)
CASSPPYSGAGSYQLTF

SEQ ID NO: 757616 - protein, 15 aa, Homo sapiens
  CDR3 for beta chain variable domain of TCR clone 378808 (TRBV6-3, TRBJ2-2)
CASSFLATLTGELFF

SEQ ID NO: 757617 - protein, 11 aa, Homo sapiens
  CDR3 for alpha chain variable domain of TCR clone 378809 (TRAV2, TRAJ33)
CAVESSYQLIW

SEQ ID NO: 757618 - protein, 15 aa, Homo sapiens
  CDR3 for beta chain variable domain of TCR clone 378809 (TRBV7-9, TRBJ1-4)
CASSARTGGNEKLFF

SEQ ID NO: 757619 - protein, 12 aa, Homo sapiens
  CDR3 for alpha chain variable domain of TCR clone 378810 (TRAV12-3, TRAJ17)
CAMTLTGNELTF

SEQ ID NO: 757620 - protein, 16 aa, Homo sapiens
  CDR3 for beta chain variable domain of TCR clone 378810 (TRBV4-3, TRBJ2-2)
CASSHLQGSGTGELFF

SEQ ID NO: 757621 - protein, 16 aa, Homo sapiens
  CDR3 for alpha chain variable domain of TCR clone 378811 (TRAV3, TRAJ6)
CAVRDGMGRRKLHTYI

SEQ ID NO: 757622 - protein, 13 aa, Homo sapiens
  CDR3 for beta chain variable domain of TCR clone 378811 (TRBV18, TRBJ1-1)
CASSPETKPEAFF

SEQ ID NO: 757623 - protein, 14 aa, Homo sapiens
  CDR3 for alpha chain variable domain of TCR clone 378812 (TRAV23/DV6, TRAJ5)
CAAKRPAGRRALTF

SEQ ID NO: 757624 - protein, 15 aa, Homo sapiens
  CDR3 for beta chain variable domain of TCR clone 378812 (TRBV10-3, TRBJ2-1)
CAISESASGRKEQFF

SEQ ID NO: 757625 - protein, 14 aa, Homo sapiens
  CDR3 for alpha chain variable domain of TCR clone 378813 (TRAV1-2, TRAJ8)
CAVREDTGFQKLVF

SEQ ID NO: 757626 - protein, 16 aa, Homo sapiens
  CDR3 for beta chain variable domain of TCR clone 378813 (TRBV4-2, TRBJ2-7)
CASSQDRGTSSYEQYF

SEQ ID NO: 757627 - protein, 13 aa, Homo sapiens
  CDR3 for alpha chain variable domain of TCR clone 378814 (TRAV8-3, TRAJ21)
CAVGAYNFNKFCF

SEQ ID NO: 757628 - protein, 16 aa, Homo sapiens
  CDR3 for beta chain variable domain of TCR clone 378814 (TRBV19, TRBJ2-1)
CASSMGGGSSYNEQFF

SEQ ID NO: 757629 - protein, 13 aa, Homo sapiens
  CDR3 for alpha chain variable domain of TCR clone 378815 (TRAV12-3, TRAJ50)
CARGGTSYDKVIF

SEQ ID NO: 757630 - protein, 14 aa, Homo sapiens
  CDR3 for beta chain variable domain of TCR clone 378815 (TRBV7-2, TRBJ2-7)
CASSPKTSFYEQYF

SEQ ID NO: 757631 - protein, 14 aa, Homo sapiens
  CDR3 for alpha chain variable domain of TCR clone 378816 (TRAV20, TRAJ42)
CAVQAGGRQGKSLF

SEQ ID NO: 757632 - protein, 14 aa, Homo sapiens
  CDR3 for beta chain variable domain of TCR clone 378816 (TRBV28, TRBJ1-2)
CASRIQGANYGYTF

SEQ ID NO: 757633 - protein, 10 aa, Homo sapiens
  CDR3 for alpha chain variable domain of TCR clone 378817 (TRAV1-2, TRAJ23)
CAGQGGKLIF

SEQ ID NO: 757634 - protein, 13 aa, Homo sapiens
  CDR3 for beta chain variable domain of TCR clone 378817 (TRBV20-1, TRBJ2-2)
CSALSGGAGELFF

SEQ ID NO: 757635 - protein, 11 aa, Homo sapiens
  CDR3 for alpha chain variable domain of TCR clone 378818 (TRAV3, TRAJ21)
CAVGNFNKFYF

SEQ ID NO: 757636 - protein, 14 aa, Homo sapiens
  CDR3 for beta chain variable domain of TCR clone 378818 (TRBV6-3, TRBJ1-1)
CASSYHSKNTEAFC

SEQ ID NO: 757637 - protein, 11 aa, Homo sapiens
  CDR3 for alpha chain variable domain of TCR clone 378819 (TRAV21, TRAJ11)
CCDLGYSTLTF

SEQ ID NO: 757638 - protein, 14 aa, Homo sapiens
  CDR3 for beta chain variable domain of TCR clone 378819 (TRBV20-1, TRBJ2-7)
CSAPELAGVGEQYF

SEQ ID NO: 757639 - protein, 13 aa, Homo sapiens
  CDR3 for alpha chain variable domain of TCR clone 378820 (TRAV1-1, TRAJ9)
CAAKNTGGFKNIF

SEQ ID NO: 757640 - protein, 14 aa, Homo sapiens
  CDR3 for beta chain variable domain of TCR clone 378820 (TRBV20-1, TRBJ2-1)
CSAQIGGSANEQSF

SEQ ID NO: 757641 - protein, 14 aa, Homo sapiens
  CDR3 for alpha chain variable domain of TCR clone 378821 (TRAV30, TRAJ26)
CGIEIVSYGQNFVF

SEQ ID NO: 757642 - protein, 13 aa, Homo sapiens
  CDR3 for beta chain variable domain of TCR clone 378821 (TRBV19, TRBJ1-3)
CASRLSLGNTIYF

SEQ ID NO: 757643 - protein, 16 aa, Homo sapiens
  CDR3 for alpha chain variable domain of TCR clone 378822 (TRAV30, TRAJ24)
CGTEIVDADSWGKFQF

SEQ ID NO: 757644 - protein, 15 aa, Homo sapiens
  CDR3 for beta chain variable domain of TCR clone 378822 (TRBV4-3, TRBJ1-5)
CASGQEAVGGQPQHF

SEQ ID NO: 757645 - protein, 14 aa, Homo sapiens
  CDR3 for alpha chain variable domain of TCR clone 378823 (TRAV8-4, TRAJ9)
CAVRINTGGFKTIF

SEQ ID NO: 757646 - protein, 17 aa, Homo sapiens
  CDR3 for beta chain variable domain of TCR clone 378823 (TRBV7-8, TRBJ1-2)
CASSLRPLQGHLYGYTF

SEQ ID NO: 757647 - protein, 18 aa, Homo sapiens
  CDR3 for alpha chain variable domain of TCR clone 378824 (TRAV16, TRAJ45)
CAQASYPSSGGGAEGLTF

SEQ ID NO: 757648 - protein, 12 aa, Homo sapiens
  CDR3 for beta chain variable domain of TCR clone 378824 (TRBV11-3, TRBJ2-4)
CASSAGRVIQYF

SEQ ID NO: 757649 - protein, 15 aa, Homo sapiens
  CDR3 for alpha chain variable domain of TCR clone 378825 (TRAV3, TRAJ3)
CAVGDRDSSASKIIF

SEQ ID NO: 757650 - protein, 18 aa, Homo sapiens
  CDR3 for beta chain variable domain of TCR clone 378825 (TRBV25-1, TRBJ1-2)
CASSGLQNGQGLIFGYTF

SEQ ID NO: 757651 - protein, 15 aa, Homo sapiens
  CDR3 for alpha chain variable domain of TCR clone 378826 (TRAV23/DV6, TRAJ37)
CAAGEGSSNTGKLIF

SEQ ID NO: 757652 - protein, 17 aa, Homo sapiens
  CDR3 for beta chain variable domain of TCR clone 378826 (TRBV20-1, TRBJ2-7)
CSATRAAGVAGVEEQYF

SEQ ID NO: 757653 - protein, 16 aa, Homo sapiens
  CDR3 for alpha chain variable domain of TCR clone 378827 (TRAV17, TRAJ35)
CATAEGGIGFGNVLHC

SEQ ID NO: 757654 - protein, 16 aa, Homo sapiens
  CDR3 for beta chain variable domain of TCR clone 378827 (TRBV6-5, TRBJ2-7)
CASSSDPTSGFYEQYF

SEQ ID NO: 757655 - protein, 11 aa, Homo sapiens
  CDR3 for alpha chain variable domain of TCR clone 378828 (TRAV26-2, TRAJ8)
CILTGSQKLVF

SEQ ID NO: 757656 - protein, 17 aa, Homo sapiens
  CDR3 for beta chain variable domain of TCR clone 378828 (TRBV7-3, TRBJ2-3)
CASSLMKRMRGADTQYF

SEQ ID NO: 757657 - protein, 12 aa, Homo sapiens
  CDR3 for alpha chain variable domain of TCR clone 378829 (TRAV1-2, TRAJ9)
CAGYTGGFKTIF

SEQ ID NO: 757658 - protein, 15 aa, Homo sapiens
  CDR3 for beta chain variable domain of TCR clone 378829 (TRBV11-2, TRBJ2-1)
CASSPAGQSLNEHFF

SEQ ID NO: 757659 - protein, 17 aa, Homo sapiens
  CDR3 for alpha chain variable domain of TCR clone 378830 (TRAV1-2, TRAJ33)
CLLPLCCAGDSNYQLIW

SEQ ID NO: 757660 - protein, 16 aa, Homo sapiens
  CDR3 for beta chain variable domain of TCR clone 378830 (TRBV28, TRBJ2-1)
CASSSPGLAKGDEQFF

SEQ ID NO: 757661 - protein, 16 aa, Homo sapiens
  CDR3 for alpha chain variable domain of TCR clone 378831 (TRAV3, TRAJ37)
CAVRVRGSGNTGKLIF

SEQ ID NO: 757662 - protein, 13 aa, Homo sapiens
  CDR3 for beta chain variable domain of TCR clone 378831 (TRBV7-9, TRBJ1-2)
CARSLKQNYGYTF

SEQ ID NO: 757663 - protein, 11 aa, Homo sapiens
  CDR3 for alpha chain variable domain of TCR clone 378832 (TRAV1-1, TRAJ23)
CAVRQGGKLTF

SEQ ID NO: 757664 - protein, 20 aa, Homo sapiens
  CDR3 for beta chain variable domain of TCR clone 378832 (TRBV7-8, TRBJ2-2)
CASSHLFPGPTSHITGELFF

SEQ ID NO: 757665 - protein, 13 aa, Homo sapiens
  CDR3 for alpha chain variable domain of TCR clone 378833 (TRAV2, TRAJ40)
CAVVTSGTYKHIF

SEQ ID NO: 757666 - protein, 14 aa, Homo sapiens
  CDR3 for beta chain variable domain of TCR clone 378833 (TRBV19, TRBJ2-1)
CASPTFVLGGEQFF

SEQ ID NO: 757667 - protein, 15 aa, Homo sapiens
  CDR3 for alpha chain variable domain of TCR clone 378834 (TRAV12-1, TRAJ44)
CVADLPTGIASKLTF

SEQ ID NO: 757668 - protein, 12 aa, Homo sapiens
  CDR3 for beta chain variable domain of TCR clone 378834 (TRBV12-4, TRBJ2-7)
CASSLGGYEQYF

SEQ ID NO: 757669 - protein, 13 aa, Homo sapiens
  CDR3 for alpha chain variable domain of TCR clone 378835 (TRAV12-1, TRAJ9)
CVVRNTGGFKTIF

SEQ ID NO: 757670 - protein, 14 aa, Homo sapiens
  CDR3 for beta chain variable domain of TCR clone 378835 (TRBV20-1, TRBJ2-1)
CSAQIDGSANEQFF

SEQ ID NO: 757671 - protein, 12 aa, Homo sapiens
  CDR3 for alpha chain variable domain of TCR clone 378836 (TRAV13-1, TRAJ43)
CAAGRFNNDMRF

SEQ ID NO: 757672 - protein, 11 aa, Homo sapiens
  CDR3 for beta chain variable domain of TCR clone 378836 (TRBV29-1, TRBJ2-5)
CSEDRAGTQYF

SEQ ID NO: 757673 - protein, 10 aa, Homo sapiens
  CDR3 for alpha chain variable domain of TCR clone 378837 (TRAV30, TRAJ48)
CGLGNEKLTF

SEQ ID NO: 757674 - protein, 12 aa, Homo sapiens
  CDR3 for beta chain variable domain of TCR clone 378837 (TRBV11-3, TRBJ1-1)
CASSHRQGEAFF

SEQ ID NO: 757675 - protein, 14 aa, Homo sapiens
  CDR3 for alpha chain variable domain of TCR clone 378838 (TRAV12-1, TRAJ30)
CVPTGTNRDDKIIF

SEQ ID NO: 757676 - protein, 11 aa, Homo sapiens
  CDR3 for beta chain variable domain of TCR clone 378838 (TRBV4-1, TRBJ2-2)
CASEHTGERFF

SEQ ID NO: 757677 - protein, 15 aa, Homo sapiens
  CDR3 for alpha chain variable domain of TCR clone 378839 (TRAV27, TRAJ53)
CRAINSGGSNYKLTF

SEQ ID NO: 757678 - protein, 14 aa, Homo sapiens
  CDR3 for beta chain variable domain of TCR clone 378839 (TRBV6-1, TRBJ1-3)
CASVQGGGGNTIYF

SEQ ID NO: 757679 - protein, 10 aa, Homo sapiens
  CDR3 for alpha chain variable domain of TCR clone 378840 (TRAV26-1, TRAJ40)
CIAGTYKYIF

SEQ ID NO: 757680 - protein, 15 aa, Homo sapiens
  CDR3 for beta chain variable domain of TCR clone 378840 (TRBV6-3, TRBJ2-7)
CASSSPVTVFYEQYF

SEQ ID NO: 757681 - protein, 14 aa, Homo sapiens
  CDR3 for alpha chain variable domain of TCR clone 378841 (TRAV12-3, TRAJ10)
SATYLTGGGNKLTF

SEQ ID NO: 757682 - protein, 14 aa, Homo sapiens
  CDR3 for beta chain variable domain of TCR clone 378841 (TRBV28, TRBJ1-4)
CASSLSRTNEKLFF

SEQ ID NO: 757683 - protein, 16 aa, Homo sapiens
  CDR3 for alpha chain variable domain of TCR clone 378842 (TRAV13-1, TRAJ18)
CAASRMRGSTLGRLYF

SEQ ID NO: 757684 - protein, 14 aa, Homo sapiens
  CDR3 for beta chain variable domain of TCR clone 378842 (TRBV4-2, TRBJ2-1)
CASGLDRAYNEQFF

SEQ ID NO: 757685 - protein, 14 aa, Homo sapiens
  CDR3 for alpha chain variable domain of TCR clone 378843 (TRAV35, TRAJ22)
CAGLRPGSARQLTS

SEQ ID NO: 757686 - protein, 13 aa, Homo sapiens
  CDR3 for beta chain variable domain of TCR clone 378843 (TRBV20-1, TRBJ2-7)
CSATHTSGYEQFF

SEQ ID NO: 757687 - protein, 12 aa, Homo sapiens
  CDR3 for alpha chain variable domain of TCR clone 378844 (TRAV13-1, TRAJ15)
CAASQAGTALIF

SEQ ID NO: 757688 - protein, 12 aa, Homo sapiens
  CDR3 for beta chain variable domain of TCR clone 378844 (TRBV7-2, TRBJ1-5)
CASSLWSQPQHF

SEQ ID NO: 757689 - protein, 13 aa, Homo sapiens
  CDR3 for alpha chain variable domain of TCR clone 378845 (TRAV21, TRAJ56)
CAVRLGANSKLTF

SEQ ID NO: 757690 - protein, 13 aa, Homo sapiens
  CDR3 for beta chain variable domain of TCR clone 378845 (TRBV2, TRBJ1-5)
CATAGPGNQPQHF

SEQ ID NO: 757691 - protein, 14 aa, Homo sapiens
  CDR3 for alpha chain variable domain of TCR clone 378846 (TRAV2, TRAJ9)
CAVEDRSGGVKTIF

SEQ ID NO: 757692 - protein, 13 aa, Homo sapiens
  CDR3 for beta chain variable domain of TCR clone 378846 (TRBV12-4, TRBJ1-5)
CASSPDRAQPQHF

SEQ ID NO: 757693 - protein, 13 aa, Homo sapiens
  CDR3 for alpha chain variable domain of TCR clone 378847 (TRAV12-3, TRAJ42)
CNNYGGSQGNLIF

SEQ ID NO: 757694 - protein, 15 aa, Homo sapiens
  CDR3 for beta chain variable domain of TCR clone 378847 (TRBV5-7, TRBJ1-5)
CASSYGKLWDQPQHF

SEQ ID NO: 757695 - protein, 14 aa, Homo sapiens
  CDR3 for alpha chain variable domain of TCR clone 378848 (TRAV21, TRAJ15)
CAVSLNQAGTALIF

SEQ ID NO: 757696 - protein, 11 aa, Homo sapiens
  CDR3 for beta chain variable domain of TCR clone 378848 (TRBV20-1, TRBJ2-7)
CSARTSYEQYV

SEQ ID NO: 757697 - protein, 18 aa, Homo sapiens
  CDR3 for alpha chain variable domain of TCR clone 378849 (TRAV21, TRAJ52)
CAVRPSLAGGTSYGKLTF

SEQ ID NO: 757698 - protein, 13 aa, Homo sapiens
  CDR3 for beta chain variable domain of TCR clone 378849 (TRBV7-3, TRBJ1-1)
CASSQDWGAEAFF

SEQ ID NO: 757699 - protein, 12 aa, Homo sapiens
  CDR3 for alpha chain variable domain of TCR clone 378850 (TRAV20, TRAJ24)
CAVYNSWGKLQF

SEQ ID NO: 757700 - protein, 14 aa, Homo sapiens
  CDR3 for beta chain variable domain of TCR clone 378850 (TRBV18, TRBJ1-2)
CASSPDRVVYGYTF

SEQ ID NO: 757701 - protein, 15 aa, Homo sapiens
  CDR3 for alpha chain variable domain of TCR clone 378851 (TRAV3, TRAJ32)
CAVSSYGGATNKLIF

SEQ ID NO: 757702 - protein, 13 aa, Homo sapiens
  CDR3 for beta chain variable domain of TCR clone 378851 (TRBV20-1, TRBJ2-7)
RSARPSTNYEQYF

SEQ ID NO: 757703 - protein, 17 aa, Homo sapiens
  CDR3 for alpha chain variable domain of TCR clone 378852 (TRAV4, TRAJ13)
CLVGVQGSSGGYQKVTF

SEQ ID NO: 757704 - protein, 15 aa, Homo sapiens
  CDR3 for beta chain variable domain of TCR clone 378852 (TRBV7-8, TRBJ2-3)
CASSPRTGSTDTQYF

SEQ ID NO: 757705 - protein, 15 aa, Homo sapiens
  CDR3 for alpha chain variable domain of TCR clone 378853 (TRAV13-1, TRAJ17)
CAASIARAAGNKLTF

SEQ ID NO: 757706 - protein, 14 aa, Homo sapiens
  CDR3 for beta chain variable domain of TCR clone 378853 (TRBV4-1, TRBJ2-2)
CASSQAVNTGELFF

SEQ ID NO: 757707 - protein, 14 aa, Homo sapiens
  CDR3 for alpha chain variable domain of TCR clone 378854 (TRAV10, TRAJ34)
FVVSRGGDTDKLIF

SEQ ID NO: 757708 - protein, 17 aa, Homo sapiens
  CDR3 for beta chain variable domain of TCR clone 378854 (TRBV6-3, TRBJ2-3)
CASRRPLGGGSTDTQYF

SEQ ID NO: 757709 - protein, 14 aa, Homo sapiens
  CDR3 for alpha chain variable domain of TCR clone 378855 (TRAV8-1, TRAJ5)
CAVSMDTGRRALTF

SEQ ID NO: 757710 - protein, 15 aa, Homo sapiens
  CDR3 for beta chain variable domain of TCR clone 378855 (TRBV20-1, TRBJ2-7)
CSARDRVSGMDEQYF

SEQ ID NO: 757711 - protein, 14 aa, Homo sapiens
  CDR3 for alpha chain variable domain of TCR clone 378856 (TRAV1-2, TRAJ8)
CAVREDTGFQKLVF

SEQ ID NO: 757712 - protein, 15 aa, Homo sapiens
  CDR3 for beta chain variable domain of TCR clone 378856 (TRBV10-2, TRBJ2-6)
CASSEQGPGANVLTF

SEQ ID NO: 757713 - protein, 11 aa, Homo sapiens
  CDR3 for alpha chain variable domain of TCR clone 378857 (TRAV1-1, TRAJ23)
CAVRQGGKLPF

SEQ ID NO: 757714 - protein, 20 aa, Homo sapiens
  CDR3 for beta chain variable domain of TCR clone 378857 (TRBV7-8, TRBJ2-2)
CASSHLFPGPTIHITGELFF

SEQ ID NO: 757715 - protein, 12 aa, Homo sapiens
  CDR3 for alpha chain variable domain of TCR clone 378858 (TRAV29/DV5, TRAJ41)
CAAISSGHALNF

SEQ ID NO: 757716 - protein, 17 aa, Homo sapiens
  CDR3 for beta chain variable domain of TCR clone 378858 (TRBV18, TRBJ2-1)
CASSKGLSGGADNEQFF

SEQ ID NO: 757717 - protein, 13 aa, Homo sapiens
  CDR3 for alpha chain variable domain of TCR clone 378859 (TRAV3, TRAJ21)
CAVREPDFNKFYF

SEQ ID NO: 757718 - protein, 13 aa, Homo sapiens
  CDR3 for beta chain variable domain of TCR clone 378859 (TRBV12-4, TRBJ1-2)
CASSYRVNYGYIF

SEQ ID NO: 757719 - protein, 13 aa, Homo sapiens
  CDR3 for alpha chain variable domain of TCR clone 378860 (TRAV13-1, TRAJ5)
CAASDTGRRALTF

SEQ ID NO: 757720 - protein, 12 aa, Homo sapiens
  CDR3 for beta chain variable domain of TCR clone 378860 (TRBV28, TRBJ2-3)
CASSLYRDSQYF

SEQ ID NO: 757721 - protein, 16 aa, Homo sapiens
  CDR3 for alpha chain variable domain of TCR clone 378861 (TRAV12-3, TRAJ53)
CAMSPGSGGSNYKLTF

SEQ ID NO: 757722 - protein, 15 aa, Homo sapiens
  CDR3 for beta chain variable domain of TCR clone 378861 (TRBV27, TRBJ2-1)
CASSNGGGSSNGQFF

SEQ ID NO: 757723 - protein, 17 aa, Homo sapiens
  CDR3 for alpha chain variable domain of TCR clone 378862 (TRAV4, TRAJ20)
CTTASCVKGNNDYKLSF

SEQ ID NO: 757724 - protein, 17 aa, Homo sapiens
  CDR3 for beta chain variable domain of TCR clone 378862 (TRBV11-2, TRBJ2-1)
CASSLYPPGVEYNEQFF

SEQ ID NO: 757725 - protein, 18 aa, Homo sapiens
  CDR3 for alpha chain variable domain of TCR clone 378863 (TRAV36/DV7, TRAJ13)
CAVGLGIRGEWGLPESYL

SEQ ID NO: 757726 - protein, 15 aa, Homo sapiens
  CDR3 for beta chain variable domain of TCR clone 378863 (TRBV19, TRBJ2-1)
CASSTGTSSYNEQFF

SEQ ID NO: 757727 - protein, 15 aa, Homo sapiens
  CDR3 for alpha chain variable domain of TCR clone 378864 (TRAV12-1, TRAJ40)
CVVNMHFPGTYKYIF

SEQ ID NO: 757728 - protein, 14 aa, Homo sapiens
  CDR3 for beta chain variable domain of TCR clone 378864 (TRBV7-6, TRBJ2-3)
CASSLGTVTDTQYF

SEQ ID NO: 757729 - protein, 15 aa, Homo sapiens
  CDR3 for alpha chain variable domain of TCR clone 378865 (TRAV38-1, TRAJ37)
CAFIFGSGNTGKLIF

SEQ ID NO: 757730 - protein, 17 aa, Homo sapiens
  CDR3 for beta chain variable domain of TCR clone 378865 (TRBV7-9, TRBJ2-6)
CASSAGTGGAGANVLTF

SEQ ID NO: 757731 - protein, 16 aa, Homo sapiens
  CDR3 for alpha chain variable domain of TCR clone 378866 (TRAV17, TRAJ36)
CFLLLCYFNWGKNLFF

SEQ ID NO: 757732 - protein, 15 aa, Homo sapiens
  CDR3 for beta chain variable domain of TCR clone 378866 (TRBV19, TRBJ1-2)
CASSTKTDTNYGYTF

SEQ ID NO: 757733 - protein, 14 aa, Homo sapiens
  CDR3 for alpha chain variable domain of TCR clone 378867 (TRAV8-2, TRAJ4)
CVVSPSGGYTKLIF

SEQ ID NO: 757734 - protein, 13 aa, Homo sapiens
  CDR3 for beta chain variable domain of TCR clone 378867 (TRBV11-3, TRBJ1-1)
CASTGSLNTEAFF

SEQ ID NO: 757735 - protein, 17 aa, Homo sapiens
  CDR3 for alpha chain variable domain of TCR clone 378868 (TRAV3, TRAJ6)
CAVRDGPRAGGSYIPTF

SEQ ID NO: 757736 - protein, 16 aa, Homo sapiens
  CDR3 for beta chain variable domain of TCR clone 378868 (TRBV15, TRBJ2-7)
CATSRDGGIPSYEQYF

SEQ ID NO: 757737 - protein, 13 aa, Homo sapiens
  CDR3 for alpha chain variable domain of TCR clone 378869 (TRAV1-2, TRAJ13)
CAVNSGGYQKVTL

SEQ ID NO: 757738 - protein, 14 aa, Homo sapiens
  CDR3 for beta chain variable domain of TCR clone 378869 (TRBV4-1, TRBJ1-5)
CASSPKGDNQPQHF

SEQ ID NO: 757739 - protein, 16 aa, Homo sapiens
  CDR3 for alpha chain variable domain of TCR clone 378870 (TRAV30, TRAJ24)
CGTEIVDADSWGQFQF

SEQ ID NO: 757740 - protein, 14 aa, Homo sapiens
  CDR3 for beta chain variable domain of TCR clone 378870 (TRBV12-5, TRBJ2-5)
CASGSRTHQGTQYF

SEQ ID NO: 757741 - protein, 12 aa, Homo sapiens
  CDR3 for alpha chain variable domain of TCR clone 378871 (TRAV12-3, TRAJ17)
CAMTLTGNKLTF

SEQ ID NO: 757742 - protein, 11 aa, Homo sapiens
  CDR3 for beta chain variable domain of TCR clone 378871 (TRBV5-6, TRBJ1-2)
CASSRGGGYTF

SEQ ID NO: 757743 - protein, 11 aa, Homo sapiens
  CDR3 for alpha chain variable domain of TCR clone 378872 (TRAV1-1, TRAJ23)
CAVRQGGKLIF

SEQ ID NO: 757744 - protein, 14 aa, Homo sapiens
  CDR3 for beta chain variable domain of TCR clone 378872 (TRBV19, TRBJ1-5)
CASSLGPGGEPQHF

SEQ ID NO: 757745 - protein, 11 aa, Homo sapiens
  CDR3 for alpha chain variable domain of TCR clone 378873 (TRAV17, TRAJ49)
CATNTGNQFYL

SEQ ID NO: 757746 - protein, 14 aa, Homo sapiens
  CDR3 for beta chain variable domain of TCR clone 378873 (TRBV28, TRBJ1-3)
CASSFRDRVNTIYF

SEQ ID NO: 757747 - protein, 14 aa, Homo sapiens
  CDR3 for alpha chain variable domain of TCR clone 378874 (TRAV12-2, TRAJ40)
YAVKIPSGTDKYIF

SEQ ID NO: 757748 - protein, 13 aa, Homo sapiens
  CDR3 for beta chain variable domain of TCR clone 378874 (TRBV7-9, TRBJ1-2)
CASSLKQNYGYTF

SEQ ID NO: 757749 - protein, 12 aa, Homo sapiens
  CDR3 for alpha chain variable domain of TCR clone 378875 (TRAV13-1, TRAJ49)
CAAPNTGNQFYF

SEQ ID NO: 757750 - protein, 17 aa, Homo sapiens
  CDR3 for beta chain variable domain of TCR clone 378875 (TRBV25-1, TRBJ2-7)
CASSDARAVFSSYEQYF

SEQ ID NO: 757751 - protein, 13 aa, Homo sapiens
  CDR3 for alpha chain variable domain of TCR clone 378876 (TRAV12-2, TRAJ42)
CAVKRGSQGNLIF

SEQ ID NO: 757752 - protein, 12 aa, Homo sapiens
  CDR3 for beta chain variable domain of TCR clone 378876 (TRBV5-7, TRBJ1-2)
CASSLVQNGYTC

SEQ ID NO: 757753 - protein, 15 aa, Homo sapiens
  CDR3 for alpha chain variable domain of TCR clone 378877 (TRAV8-3, TRAJ45)
CASSYSGGGGDGLTI

SEQ ID NO: 757754 - protein, 13 aa, Homo sapiens
  CDR3 for beta chain variable domain of TCR clone 378877 (TRBV10-3, TRBJ2-7)
CASKLAVNYEQYF

SEQ ID NO: 757755 - protein, 12 aa, Homo sapiens
  CDR3 for alpha chain variable domain of TCR clone 378878 (TRAV30, TRAJ39)
CGRGNAGNMLTF

SEQ ID NO: 757756 - protein, 17 aa, Homo sapiens
  CDR3 for beta chain variable domain of TCR clone 378878 (TRBV20-1, TRBJ2-2)
CSASGSGQGGLTGELFF

SEQ ID NO: 757757 - protein, 16 aa, Homo sapiens
  CDR3 for alpha chain variable domain of TCR clone 378879 (TRAV21, TRAJ17)
CAVRPGEEAAGNKLTF

SEQ ID NO: 757758 - protein, 13 aa, Homo sapiens
  CDR3 for beta chain variable domain of TCR clone 378879 (TRBV7-3, TRBJ1-1)
CAGSQDWGAEAFF

SEQ ID NO: 757759 - protein, 16 aa, Homo sapiens
  CDR3 for alpha chain variable domain of TCR clone 378880 (TRAV26-1, TRAJ56)
CIGRARERGANSKRTF

SEQ ID NO: 757760 - protein, 13 aa, Homo sapiens
  CDR3 for beta chain variable domain of TCR clone 378880 (TRBV7-2, TRBJ1-1)
CASSLRANTEAFF

SEQ ID NO: 757761 - protein, 14 aa, Homo sapiens
  CDR3 for alpha chain variable domain of TCR clone 378881 (TRAV12-2, TRAJ11)
CAVEGGSGYSTLTF

SEQ ID NO: 757762 - protein, 14 aa, Homo sapiens
  CDR3 for beta chain variable domain of TCR clone 378881 (TRBV18, TRBJ2-7)
CASSPRGGAYEQYF

SEQ ID NO: 757763 - protein, 14 aa, Homo sapiens
  CDR3 for alpha chain variable domain of TCR clone 378882 (TRAV12-1, TRAJ12)
CVVNGRDSSYKLIL

SEQ ID NO: 757764 - protein, 13 aa, Homo sapiens
  CDR3 for beta chain variable domain of TCR clone 378882 (TRBV28, TRBJ2-2)
CASIRESTGELFF

SEQ ID NO: 757765 - protein, 16 aa, Homo sapiens
  CDR3 for alpha chain variable domain of TCR clone 378883 (TRAV1-2, TRAJ10)
CAVRGVLTGGGNKLTF

SEQ ID NO: 757766 - protein, 14 aa, Homo sapiens
  CDR3 for beta chain variable domain of TCR clone 378883 (TRBV19, TRBJ2-7)
CASSIFAGTYEQYF

SEQ ID NO: 757767 - protein, 14 aa, Homo sapiens
  CDR3 for alpha chain variable domain of TCR clone 378884 (TRAV2, TRAJ10)
CLLLVTGGGNKLTF

SEQ ID NO: 757768 - protein, 18 aa, Homo sapiens
  CDR3 for beta chain variable domain of TCR clone 378884 (TRBV20-1, TRBJ2-3)
CSASGLAGGPGTTDTQYF

SEQ ID NO: 757769 - protein, 17 aa, Homo sapiens
  CDR3 for alpha chain variable domain of TCR clone 378885 (TRAV12-1, TRAJ32)
CVVNMQGYGGPTNKLIF

SEQ ID NO: 757770 - protein, 13 aa, Homo sapiens
  CDR3 for beta chain variable domain of TCR clone 378885 (TRBV6-6, TRBJ2-1)
CASSLHQGDEQFF

SEQ ID NO: 757771 - protein, 14 aa, Homo sapiens
  CDR3 for alpha chain variable domain of TCR clone 378886 (TRAV12-2, TRAJ13)
CAVKTTGGYQKVTF

SEQ ID NO: 757772 - protein, 11 aa, Homo sapiens
  CDR3 for beta chain variable domain of TCR clone 378886 (TRBV12-4, TRBJ2-2)
CASSSAGELFF

SEQ ID NO: 757773 - protein, 13 aa, Homo sapiens
  CDR3 for alpha chain variable domain of TCR clone 378887 (TRAV26-1, TRAJ41)
CIVRINSGYALNF

SEQ ID NO: 757774 - protein, 13 aa, Homo sapiens
  CDR3 for beta chain variable domain of TCR clone 378887 (TRBV20-1, TRBJ1-5)
CGATAAGGQPQHF

SEQ ID NO: 757775 - protein, 15 aa, Homo sapiens
  CDR3 for alpha chain variable domain of TCR clone 378888 (TRAV3, TRAJ22)
CAVRDRGGFARQLTF

SEQ ID NO: 757776 - protein, 16 aa, Homo sapiens
  CDR3 for beta chain variable domain of TCR clone 378888 (TRBV4-2, TRBJ2-4)
CASSQELRRAKNIQYF

SEQ ID NO: 757777 - protein, 14 aa, Homo sapiens
  CDR3 for alpha chain variable domain of TCR clone 378889 (TRAV8-3, TRAJ16)
CAVDRFSDGQKLLL

SEQ ID NO: 757778 - protein, 15 aa, Homo sapiens
  CDR3 for beta chain variable domain of TCR clone 378889 (TRBV7-6, TRBJ2-1)
CASSPGQGPYNEQFF

SEQ ID NO: 757779 - protein, 12 aa, Homo sapiens
  CDR3 for alpha chain variable domain of TCR clone 378890 (TRAV3, TRAJ20)
CAVRDPDYKLSV

SEQ ID NO: 757780 - protein, 13 aa, Homo sapiens
  CDR3 for beta chain variable domain of TCR clone 378890 (TRBV18, TRBJ1-1)
CASSPETKPEAFF

SEQ ID NO: 757781 - protein, 11 aa, Homo sapiens
  CDR3 for alpha chain variable domain of TCR clone 378891 (TRAV3, TRAJ21)
CAVGNFNKFYF

SEQ ID NO: 757782 - protein, 13 aa, Homo sapiens
  CDR3 for beta chain variable domain of TCR clone 378891 (TRBV4-1, TRBJ2-1)
CASSQAGGDEQFF

SEQ ID NO: 757783 - protein, 14 aa, Homo sapiens
  CDR3 for alpha chain variable domain of TCR clone 378892 (TRAV3, TRAJ9)
CAVRLNTGGFKTIF

SEQ ID NO: 757784 - protein, 12 aa, Homo sapiens
  CDR3 for beta chain variable domain of TCR clone 378892 (TRBV19, TRBJ1-5)
CASSIAQQTQHF

SEQ ID NO: 757785 - protein, 16 aa, Homo sapiens
  CDR3 for alpha chain variable domain of TCR clone 378893 (TRAV12-2, TRAJ10)
CAVNRVHTGGGNKLTF

SEQ ID NO: 757786 - protein, 12 aa, Homo sapiens
  CDR3 for beta chain variable domain of TCR clone 378893 (TRBV28, TRBJ2-7)
CASSFSSYQQYF

SEQ ID NO: 757787 - protein, 14 aa, Homo sapiens
  CDR3 for alpha chain variable domain of TCR clone 378894 (TRAV1-2, TRAJ16)
CAVNRFSDGQKLLL

SEQ ID NO: 757788 - protein, 13 aa, Homo sapiens
  CDR3 for beta chain variable domain of TCR clone 378894 (TRBV10-3, TRBJ2-1)
CATGLADNNEQFF

SEQ ID NO: 757789 - protein, 15 aa, Homo sapiens
  CDR3 for alpha chain variable domain of TCR clone 378895 (TRAV23/DV6, TRAJ27)
CAASKPMQANQPLVM

SEQ ID NO: 757790 - protein, 14 aa, Homo sapiens
  CDR3 for beta chain variable domain of TCR clone 378895 (TRBV5-4, TRBJ1-1)
CASSLDSRRDEAFF

SEQ ID NO: 757791 - protein, 15 aa, Homo sapiens
  CDR3 for alpha chain variable domain of TCR clone 378896 (TRAV17, TRAJ52)
CATEAGGTSYGKLTF

SEQ ID NO: 757792 - protein, 14 aa, Homo sapiens
  CDR3 for beta chain variable domain of TCR clone 378896 (TRBV28, TRBJ1-5)
RASSLGVLVKAQHF

SEQ ID NO: 757793 - protein, 13 aa, Homo sapiens
  CDR3 for alpha chain variable domain of TCR clone 378897 (TRAV19, TRAJ57)
CALLQGGSEKLVF

SEQ ID NO: 757794 - protein, 16 aa, Homo sapiens
  CDR3 for beta chain variable domain of TCR clone 378897 (TRBV4-2, TRBJ2-1)
CASSQETATPYNEQFF

SEQ ID NO: 757795 - protein, 17 aa, Homo sapiens
  CDR3 for alpha chain variable domain of TCR clone 378898 (TRAV3, TRAJ6)
CAVRDGPRAGGSYIPTF

SEQ ID NO: 757796 - protein, 13 aa, Homo sapiens
  CDR3 for beta chain variable domain of TCR clone 378898 (TRBV7-2, TRBJ2-3)
CASSPGSTDTQYF

SEQ ID NO: 757797 - protein, 14 aa, Homo sapiens
  CDR3 for alpha chain variable domain of TCR clone 378899 (TRAV2, TRAJ9)
CAVEDRSGGFNTIF

SEQ ID NO: 757798 - protein, 14 aa, Homo sapiens
  CDR3 for beta chain variable domain of TCR clone 378899 (TRBV7-3, TRBJ2-1)
CASSLAGGTNEQFF

SEQ ID NO: 757799 - protein, 10 aa, Homo sapiens
  CDR3 for alpha chain variable domain of TCR clone 378900 (TRAV1-2, TRAJ31)
CVSEDARLMF

SEQ ID NO: 757800 - protein, 14 aa, Homo sapiens
  CDR3 for beta chain variable domain of TCR clone 378900 (TRBV19, TRBJ2-1)
CASLTFVLSGEQFF

SEQ ID NO: 757801 - protein, 17 aa, Homo sapiens
  CDR3 for alpha chain variable domain of TCR clone 378901 (TRAV38-2/DV8, TRAJ45)
CAYRSRFSGGGADGRTC

SEQ ID NO: 757802 - protein, 15 aa, Homo sapiens
  CDR3 for beta chain variable domain of TCR clone 378901 (TRBV19, TRBJ2-1)
CASIKGRGPYNEQFF

SEQ ID NO: 757803 - protein, 15 aa, Homo sapiens
  CDR3 for alpha chain variable domain of TCR clone 378902 (TRAV8-3, TRAJ45)
CASSYSGGGADGLTF

SEQ ID NO: 757804 - protein, 13 aa, Homo sapiens
  CDR3 for beta chain variable domain of TCR clone 378902 (TRBV3-1, TRBJ1-1)
CASSQLQGAEAFF

SEQ ID NO: 757805 - protein, 16 aa, Homo sapiens
  CDR3 for alpha chain variable domain of TCR clone 378903 (TRAV30, TRAJ24)
CGTETVDADSWGKFQF

SEQ ID NO: 757806 - protein, 17 aa, Homo sapiens
  CDR3 for beta chain variable domain of TCR clone 378903 (TRBV20-1, TRBJ2-1)
CSARDRRRASSYNEQFF

SEQ ID NO: 757807 - protein, 15 aa, Homo sapiens
  CDR3 for alpha chain variable domain of TCR clone 378904 (TRAV17, TRAJ57)
CATGPSQGVSEKLVF

SEQ ID NO: 757808 - protein, 13 aa, Homo sapiens
  CDR3 for beta chain variable domain of TCR clone 378904 (TRBV11-2, TRBJ2-5)
CASSSTGEETQYF

SEQ ID NO: 757809 - protein, 14 aa, Homo sapiens
  CDR3 for alpha chain variable domain of TCR clone 378905 (TRAV12-2, TRAJ44)
CAVNKAGTASKLTF

SEQ ID NO: 757810 - protein, 12 aa, Homo sapiens
  CDR3 for beta chain variable domain of TCR clone 378905 (TRBV19, TRBJ1-4)
CASKDWTRGLFF

SEQ ID NO: 757811 - protein, 17 aa, Homo sapiens
  CDR3 for alpha chain variable domain of TCR clone 378906 (TRAV3, TRAJ6)
CAVRDGPRAGGSYIPTF

SEQ ID NO: 757812 - protein, 12 aa, Homo sapiens
  CDR3 for beta chain variable domain of TCR clone 378906 (TRBV7-2, TRBJ2-1)
CASSPQDIEQFF

SEQ ID NO: 757813 - protein, 11 aa, Homo sapiens
  CDR3 for alpha chain variable domain of TCR clone 378907 (TRAV26-2, TRAJ8)
CILTGFQKLVF

SEQ ID NO: 757814 - protein, 19 aa, Homo sapiens
  CDR3 for beta chain variable domain of TCR clone 378907 (TRBV20-1, TRBJ2-1)
CSARVETSGNSPQIDEQFF

SEQ ID NO: 757815 - protein, 15 aa, Homo sapiens
  CDR3 for alpha chain variable domain of TCR clone 378908 (TRAV8-3, TRAJ27)
CAVGPAKTNAGKSTF

SEQ ID NO: 757816 - protein, 13 aa, Homo sapiens
  CDR3 for beta chain variable domain of TCR clone 378908 (TRBV12-5, TRBJ1-2)
CASGVRTGNGYTF

SEQ ID NO: 757817 - protein, 13 aa, Homo sapiens
  CDR3 for alpha chain variable domain of TCR clone 378909 (TRAV35, TRAJ42)
CAGFPGSQGNLIF

SEQ ID NO: 757818 - protein, 13 aa, Homo sapiens
  CDR3 for beta chain variable domain of TCR clone 378909 (TRBV2, TRBJ1-6)
CASGRGGISPLHF

SEQ ID NO: 757819 - protein, 14 aa, Homo sapiens
  CDR3 for alpha chain variable domain of TCR clone 378910 (TRAV21, TRAJ35)
CAVMPIGFGDVLHC

SEQ ID NO: 757820 - protein, 15 aa, Homo sapiens
  CDR3 for beta chain variable domain of TCR clone 378910 (TRBV11-3, TRBJ2-3)
CASLKDGREGDTQYF

SEQ ID NO: 757821 - protein, 14 aa, Homo sapiens
  CDR3 for alpha chain variable domain of TCR clone 378911 (TRAV12-2, TRAJ3)
CAVKGYSSASKIIF

SEQ ID NO: 757822 - protein, 14 aa, Homo sapiens
  CDR3 for beta chain variable domain of TCR clone 378911 (TRBV6-3, TRBJ1-2)
CASSEGGGSHGYTF

SEQ ID NO: 757823 - protein, 15 aa, Homo sapiens
  CDR3 for alpha chain variable domain of TCR clone 378912 (TRAV8-4, TRAJ6)
CAVSAPSGGSYIPTL

SEQ ID NO: 757824 - protein, 15 aa, Homo sapiens
  CDR3 for beta chain variable domain of TCR clone 378912 (TRBV2, TRBJ2-1)
CASSEARSAYNEQFF

SEQ ID NO: 757825 - protein, 14 aa, Homo sapiens
  CDR3 for alpha chain variable domain of TCR clone 378913 (TRAV1-2, TRAJ8)
CAVRADTGFQKLVF

SEQ ID NO: 757826 - protein, 12 aa, Homo sapiens
  CDR3 for beta chain variable domain of TCR clone 378913 (TRBV11-2, TRBJ2-2)
CASSLPTGELVF

SEQ ID NO: 757827 - protein, 14 aa, Homo sapiens
  CDR3 for alpha chain variable domain of TCR clone 378914 (TRAV14/DV4, TRAJ54)
CAMREAPGAQKLVF

SEQ ID NO: 757828 - protein, 15 aa, Homo sapiens
  CDR3 for beta chain variable domain of TCR clone 378914 (TRBV5-1, TRBJ2-7)
CASSLNGGPGREQYF

SEQ ID NO: 757829 - protein, 17 aa, Homo sapiens
  CDR3 for alpha chain variable domain of TCR clone 378915 (TRAV26-1, TRAJ11)
CIVRVDQSNSGYSTLTF

SEQ ID NO: 757830 - protein, 15 aa, Homo sapiens
  CDR3 for beta chain variable domain of TCR clone 378915 (TRBV27, TRBJ2-5)
CASSLIPSGGETKYF

SEQ ID NO: 757831 - protein, 13 aa, Homo sapiens
  CDR3 for alpha chain variable domain of TCR clone 378916 (TRAV22, TRAJ57)
CAVLQGGSEKLVF

SEQ ID NO: 757832 - protein, 17 aa, Homo sapiens
  CDR3 for beta chain variable domain of TCR clone 378916 (TRBV24-1, TRBJ2-1)
CATSDVSTSGTYNEQFF

SEQ ID NO: 757833 - protein, 11 aa, Homo sapiens
  CDR3 for alpha chain variable domain of TCR clone 378917 (TRAV12-3, TRAJ27)
CAMANAGKSTS

SEQ ID NO: 757834 - protein, 17 aa, Homo sapiens
  CDR3 for beta chain variable domain of TCR clone 378917 (TRBV13, TRBJ2-3)
CASSRSRVAGGRNTQYF

SEQ ID NO: 757835 - protein, 11 aa, Homo sapiens
  CDR3 for alpha chain variable domain of TCR clone 378918 (TRAV1-2, TRAJ40)
CAVPGTYKYIF

SEQ ID NO: 757836 - protein, 13 aa, Homo sapiens
  CDR3 for beta chain variable domain of TCR clone 378918 (TRBV19, TRBJ2-5)
CASRDSRRETQYF

SEQ ID NO: 757837 - protein, 14 aa, Homo sapiens
  CDR3 for alpha chain variable domain of TCR clone 378919 (TRAV17, TRAJ6)
CATNPAGGSYMPTF

SEQ ID NO: 757838 - protein, 15 aa, Homo sapiens
  CDR3 for beta chain variable domain of TCR clone 378919 (TRBV2, TRBJ2-5)
CASSGTVAAGETQCF

SEQ ID NO: 757839 - protein, 14 aa, Homo sapiens
  CDR3 for alpha chain variable domain of TCR clone 378920 (TRAV16, TRAJ32)
CALKSGGATNKLIF

SEQ ID NO: 757840 - protein, 13 aa, Homo sapiens
  CDR3 for beta chain variable domain of TCR clone 378920 (TRBV10-2, TRBJ2-7)
CASGASGGYEQYF

SEQ ID NO: 757841 - protein, 14 aa, Homo sapiens
  CDR3 for alpha chain variable domain of TCR clone 378921 (TRAV1-2, TRAJ16)
CAVNRFSDGQKLLF

SEQ ID NO: 757842 - protein, 13 aa, Homo sapiens
  CDR3 for beta chain variable domain of TCR clone 378921 (TRBV6-1, TRBJ2-7)
CAGSRDREYEQYF

SEQ ID NO: 757843 - protein, 15 aa, Homo sapiens
  CDR3 for alpha chain variable domain of TCR clone 378922 (TRAV27, TRAJ38)
CAARRNAGNNRKLIW

SEQ ID NO: 757844 - protein, 14 aa, Homo sapiens
  CDR3 for beta chain variable domain of TCR clone 378922 (TRBV11-2, TRBJ2-5)
CASSRTGGIETQYF

SEQ ID NO: 757845 - protein, 14 aa, Homo sapiens
  CDR3 for alpha chain variable domain of TCR clone 378923 (TRAV12-2, TRAJ13)
CAVKKTGGYQKVTF

SEQ ID NO: 757846 - protein, 15 aa, Homo sapiens
  CDR3 for beta chain variable domain of TCR clone 378923 (TRBV5-1, TRBJ2-3)
FASSVTSGSTDTQYF

SEQ ID NO: 757847 - protein, 16 aa, Homo sapiens
  CDR3 for alpha chain variable domain of TCR clone 378924 (TRAV3, TRAJ37)
CAVRPHGSGNTGKLIF

SEQ ID NO: 757848 - protein, 16 aa, Homo sapiens
  CDR3 for beta chain variable domain of TCR clone 378924 (TRBV2, TRBJ2-3)
CASSTSVEGVTDTQYF

SEQ ID NO: 757849 - protein, 16 aa, Homo sapiens
  CDR3 for alpha chain variable domain of TCR clone 378925 (TRAV30, TRAJ24)
CGTEIVDADSWGKFQF

SEQ ID NO: 757850 - protein, 15 aa, Homo sapiens
  CDR3 for beta chain variable domain of TCR clone 378925 (TRBV10-3, TRBJ2-1)
CAIRNGTSGHNEQFF

SEQ ID NO: 757851 - protein, 11 aa, Homo sapiens
  CDR3 for alpha chain variable domain of TCR clone 378926 (TRAV3, TRAJ21)
CAVGNFNKFYF

SEQ ID NO: 757852 - protein, 12 aa, Homo sapiens
  CDR3 for beta chain variable domain of TCR clone 378926 (TRBV7-9, TRBJ1-4)
CASSTDREKLFF

SEQ ID NO: 757853 - protein, 15 aa, Homo sapiens
  CDR3 for alpha chain variable domain of TCR clone 378927 (TRAV25, TRAJ52)
CAGRPGGTSYGELTF

SEQ ID NO: 757854 - protein, 17 aa, Homo sapiens
  CDR3 for beta chain variable domain of TCR clone 378927 (TRBV7-8, TRBJ2-6)
CARSAGTGGAGANVLPF

SEQ ID NO: 757855 - protein, 15 aa, Homo sapiens
  CDR3 for alpha chain variable domain of TCR clone 378928 (TRAV14/DV4, TRAJ46)
CAMREKKSSGDKLTF

SEQ ID NO: 757856 - protein, 14 aa, Homo sapiens
  CDR3 for beta chain variable domain of TCR clone 378928 (TRBV12-5, TRBJ2-5)
CASGSRTHQETQYF

SEQ ID NO: 757857 - protein, 13 aa, Homo sapiens
  CDR3 for alpha chain variable domain of TCR clone 378929 (TRAV26-1, TRAJ34)
CIVRPWITAKLIF

SEQ ID NO: 757858 - protein, 14 aa, Homo sapiens
  CDR3 for beta chain variable domain of TCR clone 378929 (TRBV12-4, TRBJ1-4)
CASSRQGANEKLFF

SEQ ID NO: 757859 - protein, 14 aa, Homo sapiens
  CDR3 for alpha chain variable domain of TCR clone 378930 (TRAV1-2, TRAJ24)
CAVLTTDSWGKFQF

SEQ ID NO: 757860 - protein, 15 aa, Homo sapiens
  CDR3 for beta chain variable domain of TCR clone 378930 (TRBV6-6, TRBJ2-7)
CASSYSDGGSYEQYF

SEQ ID NO: 757861 - protein, 16 aa, Homo sapiens
  CDR3 for alpha chain variable domain of TCR clone 378931 (TRAV8-3, TRAJ44)
CTVGASNTGTASKLTF

SEQ ID NO: 757862 - protein, 15 aa, Homo sapiens
  CDR3 for beta chain variable domain of TCR clone 378931 (TRBV27, TRBJ1-5)
CASTFNRGSNQPQHF

SEQ ID NO: 757863 - protein, 14 aa, Homo sapiens
  CDR3 for alpha chain variable domain of TCR clone 378932 (TRAV12-3, TRAJ9)
CAMSPNTGGFKTIF

SEQ ID NO: 757864 - protein, 11 aa, Homo sapiens
  CDR3 for beta chain variable domain of TCR clone 378932 (TRBV19, TRBJ1-5)
CSSIAQQPQHF

SEQ ID NO: 757865 - protein, 16 aa, Homo sapiens
  CDR3 for alpha chain variable domain of TCR clone 378933 (TRAV3, TRAJ32)
CAVRDMGGGATNKLIF

SEQ ID NO: 757866 - protein, 11 aa, Homo sapiens
  CDR3 for beta chain variable domain of TCR clone 378933 (TRBV11-2, TRBJ2-2)
CASSLPGELFF

SEQ ID NO: 757867 - protein, 13 aa, Homo sapiens
  CDR3 for alpha chain variable domain of TCR clone 378934 (TRAV13-1, TRAJ12)
CAASPDSSYKLIF

SEQ ID NO: 757868 - protein, 16 aa, Homo sapiens
  CDR3 for beta chain variable domain of TCR clone 378934 (TRBV15, TRBJ2-1)
GATSRERLAGAYEQFF

SEQ ID NO: 757869 - protein, 14 aa, Homo sapiens
  CDR3 for alpha chain variable domain of TCR clone 378935 (TRAV12-1, TRAJ45)
CVVNVGGGADGLTF

SEQ ID NO: 757870 - protein, 14 aa, Homo sapiens
  CDR3 for beta chain variable domain of TCR clone 378935 (TRBV29-1, TRBJ2-3)
CSVEPGTRTDTQYF

SEQ ID NO: 757871 - protein, 17 aa, Homo sapiens
  CDR3 for alpha chain variable domain of TCR clone 378936 (TRAV3, TRAJ6)
CAVRDGPRAGGSDIPTF

SEQ ID NO: 757872 - protein, 14 aa, Homo sapiens
  CDR3 for beta chain variable domain of TCR clone 378936 (TRBV7-2, TRBJ2-7)
CASSPKTSFYELYF

SEQ ID NO: 757873 - protein, 14 aa, Homo sapiens
  CDR3 for alpha chain variable domain of TCR clone 378937 (TRAV1-2, TRAJ16)
CAVNRFSYGPKLLF

SEQ ID NO: 757874 - protein, 13 aa, Homo sapiens
  CDR3 for beta chain variable domain of TCR clone 378937 (TRBV19, TRBJ2-7)
CASSTSGSYEQYF

SEQ ID NO: 757875 - protein, 13 aa, Homo sapiens
  CDR3 for alpha chain variable domain of TCR clone 378938 (TRAV3, TRAJ20)
CAVRDTPRYQLSF

SEQ ID NO: 757876 - protein, 16 aa, Homo sapiens
  CDR3 for beta chain variable domain of TCR clone 378938 (TRBV20-1, TRBJ2-7)
CSARAPGLALSYEQYF

SEQ ID NO: 757877 - protein, 14 aa, Homo sapiens
  CDR3 for alpha chain variable domain of TCR clone 378939 (TRAV12-3, TRAJ6)
CAMSATGGSYIPTF

SEQ ID NO: 757878 - protein, 14 aa, Homo sapiens
  CDR3 for beta chain variable domain of TCR clone 378939 (TRBV7-3, TRBJ2-1)
CASSLGTSANEQFF

SEQ ID NO: 757879 - protein, 16 aa, Homo sapiens
  CDR3 for alpha chain variable domain of TCR clone 378940 (TRAV17, TRAJ35)
CATAEGVIGFGSVLHC

SEQ ID NO: 757880 - protein, 12 aa, Homo sapiens
  CDR3 for beta chain variable domain of TCR clone 378940 (TRBV11-2, TRBJ2-2)
CASSLGGGELFF

SEQ ID NO: 757881 - protein, 14 aa, Homo sapiens
  CDR3 for alpha chain variable domain of TCR clone 378941 (TRAV1-2, TRAJ16)
CAFNRFSDVQKLLF

SEQ ID NO: 757882 - protein, 13 aa, Homo sapiens
  CDR3 for beta chain variable domain of TCR clone 378941 (TRBV20-1, TRBJ1-1)
CSARGGGNTEAFF

SEQ ID NO: 757883 - protein, 12 aa, Homo sapiens
  CDR3 for alpha chain variable domain of TCR clone 378942 (TRAV29/DV5, TRAJ15)
CASNQAGTALIF

SEQ ID NO: 757884 - protein, 15 aa, Homo sapiens
  CDR3 for beta chain variable domain of TCR clone 378942 (TRBV20-1, TRBJ1-1)
CSASREVTGNTEAFF

SEQ ID NO: 757885 - protein, 15 aa, Homo sapiens
  CDR3 for alpha chain variable domain of TCR clone 378943 (TRAV21, TRAJ53)
CATLNSGGSNYKLTF

SEQ ID NO: 757886 - protein, 14 aa, Homo sapiens
  CDR3 for beta chain variable domain of TCR clone 378943 (TRBV19, TRBJ2-1)
CASPAFVLSGEQFF

SEQ ID NO: 757887 - protein, 16 aa, Homo sapiens
  CDR3 for alpha chain variable domain of TCR clone 378944 (TRAV26-1, TRAJ38)
CIVIVELGGNNRKLIW

SEQ ID NO: 757888 - protein, 14 aa, Homo sapiens
  CDR3 for beta chain variable domain of TCR clone 378944 (TRBV5-1, TRBJ2-3)
CASSPGLAADTQYF

SEQ ID NO: 757889 - protein, 12 aa, Homo sapiens
  CDR3 for alpha chain variable domain of TCR clone 378945 (TRAV38-2/DV8, TRAJ57)
CAWKGGSEKLIF

SEQ ID NO: 757890 - protein, 13 aa, Homo sapiens
  CDR3 for beta chain variable domain of TCR clone 378945 (TRBV5-1, TRBJ1-5)
CASSLAQDQPQHF

SEQ ID NO: 757891 - protein, 17 aa, Homo sapiens
  CDR3 for alpha chain variable domain of TCR clone 378946 (TRAV3, TRAJ42)
CAVRDRDYGGSLGNLIF

SEQ ID NO: 757892 - protein, 15 aa, Homo sapiens
  CDR3 for beta chain variable domain of TCR clone 378946 (TRBV6-6, TRBJ2-7)
CASSYSYGGSYEQYF

SEQ ID NO: 757893 - protein, 15 aa, Homo sapiens
  CDR3 for alpha chain variable domain of TCR clone 378947 (TRAV1-2, TRAJ26)
CAVRDLITMVRILSF

SEQ ID NO: 757894 - protein, 15 aa, Homo sapiens
  CDR3 for beta chain variable domain of TCR clone 378947 (TRBV9, TRBJ1-6)
CASGVAGTGDSPLHF

SEQ ID NO: 757895 - protein, 13 aa, Homo sapiens
  CDR3 for alpha chain variable domain of TCR clone 378948 (TRAV22, TRAJ29)
CAVGGSGNTPVVF

SEQ ID NO: 757896 - protein, 13 aa, Homo sapiens
  CDR3 for beta chain variable domain of TCR clone 378948 (TRBV19, TRBJ2-7)
CASRKAGGSEQYF

SEQ ID NO: 757897 - protein, 15 aa, Homo sapiens
  CDR3 for alpha chain variable domain of TCR clone 378949 (TRAV21, TRAJ45)
CAVSYSGGGADGLTF

SEQ ID NO: 757898 - protein, 13 aa, Homo sapiens
  CDR3 for beta chain variable domain of TCR clone 378949 (TRBV20-1, TRBJ2-5)
CSAATDLQEAQYF

SEQ ID NO: 757899 - protein, 13 aa, Homo sapiens
  CDR3 for alpha chain variable domain of TCR clone 378950 (TRAV1-2, TRAJ9)
CAALNHGGFKTIF

SEQ ID NO: 757900 - protein, 13 aa, Homo sapiens
  CDR3 for beta chain variable domain of TCR clone 378950 (TRBV19, TRBJ1-2)
CASSVPGQDGYTF

SEQ ID NO: 757901 - protein, 14 aa, Homo sapiens
  CDR3 for alpha chain variable domain of TCR clone 378951 (TRAV8-4, TRAJ48)
CAVRETFGIEKLTF

SEQ ID NO: 757902 - protein, 14 aa, Homo sapiens
  CDR3 for beta chain variable domain of TCR clone 378951 (TRBV13, TRBJ2-7)
CASSLKGASYEQYF

SEQ ID NO: 757903 - protein, 13 aa, Homo sapiens
  CDR3 for alpha chain variable domain of TCR clone 378952 (TRAV17, TRAJ9)
CATDGTGRFKTIF

SEQ ID NO: 757904 - protein, 17 aa, Homo sapiens
  CDR3 for beta chain variable domain of TCR clone 378952 (TRBV6-5, TRBJ2-7)
CASSYSFWGQCSYEQYF

SEQ ID NO: 757905 - protein, 15 aa, Homo sapiens
  CDR3 for alpha chain variable domain of TCR clone 378953 (TRAV38-1, TRAJ58)
CAFMKHGTSGSRLTF

SEQ ID NO: 757906 - protein, 15 aa, Homo sapiens
  CDR3 for beta chain variable domain of TCR clone 378953 (TRBV14, TRBJ2-3)
CASSQEMLAGATQYF

SEQ ID NO: 757907 - protein, 14 aa, Homo sapiens
  CDR3 for alpha chain variable domain of TCR clone 378954 (TRAV4, TRAJ17)
FLVGDMAAGNKLTF

SEQ ID NO: 757908 - protein, 15 aa, Homo sapiens
  CDR3 for beta chain variable domain of TCR clone 378954 (TRBV10-3, TRBJ2-1)
CAISEALADYNEQFF

SEQ ID NO: 757909 - protein, 14 aa, Homo sapiens
  CDR3 for alpha chain variable domain of TCR clone 378955 (TRAV1-2, TRAJ16)
CAVNRFSDGQKLLF

SEQ ID NO: 757910 - protein, 16 aa, Homo sapiens
  CDR3 for beta chain variable domain of TCR clone 378955 (TRBV5-1, TRBJ2-7)
CASSPMTGALSYEQYF

SEQ ID NO: 757911 - protein, 13 aa, Homo sapiens
  CDR3 for alpha chain variable domain of TCR clone 378956 (TRAV12-1, TRAJ39)
CVALNNAGNMLTF

SEQ ID NO: 757912 - protein, 17 aa, Homo sapiens
  CDR3 for beta chain variable domain of TCR clone 378956 (TRBV7-8, TRBJ2-6)
CASSAGTGGAGANVLTF

SEQ ID NO: 757913 - protein, 13 aa, Homo sapiens
  CDR3 for alpha chain variable domain of TCR clone 378957 (TRAV3, TRAJ9)
CAFWNTGGFKTVF

SEQ ID NO: 757914 - protein, 13 aa, Homo sapiens
  CDR3 for beta chain variable domain of TCR clone 378957 (TRBV20-1, TRBJ1-1)
CSARGGGNTEAFF

SEQ ID NO: 757915 - protein, 14 aa, Homo sapiens
  CDR3 for alpha chain variable domain of TCR clone 378958 (TRAV12-2, TRAJ13)
CAVKKTGGYQKVTF

SEQ ID NO: 757916 - protein, 16 aa, Homo sapiens
  CDR3 for beta chain variable domain of TCR clone 378958 (TRBV24-1, TRBJ2-1)
CATSGVAGANYNEQFF

SEQ ID NO: 757917 - protein, 12 aa, Homo sapiens
  CDR3 for alpha chain variable domain of TCR clone 378959 (TRAV12-3, TRAJ17)
CAMTLTGNKLTF

SEQ ID NO: 757918 - protein, 16 aa, Homo sapiens
  CDR3 for beta chain variable domain of TCR clone 378959 (TRBV9, TRBJ2-3)
CASSGASGKDTDTQYF

SEQ ID NO: 757919 - protein, 12 aa, Homo sapiens
  CDR3 for alpha chain variable domain of TCR clone 378960 (TRAV12-1, TRAJ40)
CVVYSGTYKYIF

SEQ ID NO: 757920 - protein, 17 aa, Homo sapiens
  CDR3 for beta chain variable domain of TCR clone 378960 (TRBV13, TRBJ2-3)
WASSLSRVAGGRNTQYF

SEQ ID NO: 757921 - protein, 12 aa, Homo sapiens
  CDR3 for alpha chain variable domain of TCR clone 378961 (TRAV13-1, TRAJ21)
CAAFFNFNKFYF

SEQ ID NO: 757922 - protein, 15 aa, Homo sapiens
  CDR3 for beta chain variable domain of TCR clone 378961 (TRBV5-1, TRBJ2-5)
CASSFKGGDQETQYF

SEQ ID NO: 757923 - protein, 16 aa, Homo sapiens
  CDR3 for alpha chain variable domain of TCR clone 378962 (TRAV3, TRAJ37)
CAVRVRGSGNTGKLIF

SEQ ID NO: 757924 - protein, 11 aa, Homo sapiens
  CDR3 for beta chain variable domain of TCR clone 378962 (TRBV11-2, TRBJ2-2)
CASSLPGELFY

SEQ ID NO: 757925 - protein, 23 aa, Homo sapiens
  CDR3 for alpha chain variable domain of TCR clone 378963 (TRAV1-2, TRAJ18)
CAVRGEAQPWGGYTLEEELSCLF

SEQ ID NO: 757926 - protein, 19 aa, Homo sapiens
  CDR3 for beta chain variable domain of TCR clone 378963 (TRBV6-3, TRBJ1-2)
CASSYSKGRTGPPNYGYTF

SEQ ID NO: 757927 - protein, 13 aa, Homo sapiens
  CDR3 for alpha chain variable domain of TCR clone 378964 (TRAV12-1, TRAJ39)
CVALNNAGNMLTF

SEQ ID NO: 757928 - protein, 17 aa, Homo sapiens
  CDR3 for beta chain variable domain of TCR clone 378964 (TRBV6-1, TRBJ2-3)
CASSEFVTGGPTETQYF

SEQ ID NO: 757929 - protein, 15 aa, Homo sapiens
  CDR3 for alpha chain variable domain of TCR clone 378965 (TRAV26-1, TRAJ17)
CIVSSFKAAGKKLTF

SEQ ID NO: 757930 - protein, 14 aa, Homo sapiens
  CDR3 for beta chain variable domain of TCR clone 378965 (TRBV6-1, TRBJ2-2)
CASTWQGNTGELFF

SEQ ID NO: 757931 - protein, 15 aa, Homo sapiens
  CDR3 for alpha chain variable domain of TCR clone 378966 (TRAV8-3, TRAJ45)
CASSFSGGGSDGLTF

SEQ ID NO: 757932 - protein, 13 aa, Homo sapiens
  CDR3 for beta chain variable domain of TCR clone 378966 (TRBV10-3, TRBJ2-7)
CASKLAVNYEQYF

SEQ ID NO: 757933 - protein, 16 aa, Homo sapiens
  CDR3 for alpha chain variable domain of TCR clone 378967 (TRAV30, TRAJ24)
CGTEIVDADSWGKFQF

SEQ ID NO: 757934 - protein, 14 aa, Homo sapiens
  CDR3 for beta chain variable domain of TCR clone 378967 (TRBV7-2, TRBJ2-7)
CASSPTTSFYEQYF

SEQ ID NO: 757935 - protein, 15 aa, Homo sapiens
  CDR3 for alpha chain variable domain of TCR clone 378968 (TRAV3, TRAJ10)
CCERHEGGGGNKLTF

SEQ ID NO: 757936 - protein, 15 aa, Homo sapiens
  CDR3 for beta chain variable domain of TCR clone 378968 (TRBV7-2, TRBJ1-5)
CASSRGQGDNQPQHF

SEQ ID NO: 757937 - protein, 15 aa, Homo sapiens
  CDR3 for alpha chain variable domain of TCR clone 378969 (TRAV8-4, TRAJ56)
CAVSGGTGANSKLTF

SEQ ID NO: 757938 - protein, 14 aa, Homo sapiens
  CDR3 for beta chain variable domain of TCR clone 378969 (TRBV7-9, TRBJ2-1)
CTSSPKGGADEQFF

SEQ ID NO: 757939 - protein, 12 aa, Homo sapiens
  CDR3 for alpha chain variable domain of TCR clone 378970 (TRAV3, TRAJ31)
CAVRDGNARLMF

SEQ ID NO: 757940 - protein, 17 aa, Homo sapiens
  CDR3 for beta chain variable domain of TCR clone 378970 (TRBV20-1, TRBJ2-1)
CSASSSGLAGSYNEQFF

SEQ ID NO: 757941 - protein, 15 aa, Homo sapiens
  CDR3 for alpha chain variable domain of TCR clone 378971 (TRAV2, TRAJ37)
CAVEDGSSNTGKLIF

SEQ ID NO: 757942 - protein, 13 aa, Homo sapiens
  CDR3 for beta chain variable domain of TCR clone 378971 (TRBV20-1, TRBJ1-6)
SSTFREGNSPLHF

SEQ ID NO: 757943 - protein, 16 aa, Homo sapiens
  CDR3 for alpha chain variable domain of TCR clone 378972 (TRAV14/DV4, TRAJ15)
CAMREVPAQAGTALIF

SEQ ID NO: 757944 - protein, 12 aa, Homo sapiens
  CDR3 for beta chain variable domain of TCR clone 378972 (TRBV28, TRBJ2-6)
CAIQAGANVLTF

SEQ ID NO: 757945 - protein, 10 aa, Homo sapiens
  CDR3 for alpha chain variable domain of TCR clone 378973 (TRAV13-1, TRAJ26)
CAPYGQNFVF

SEQ ID NO: 757946 - protein, 12 aa, Homo sapiens
  CDR3 for beta chain variable domain of TCR clone 378973 (TRBV18, TRBJ2-7)
CASSPRSWEQYF

SEQ ID NO: 757947 - protein, 10 aa, Homo sapiens
  CDR3 for alpha chain variable domain of TCR clone 378974 (TRAV23/DV6, TRAJ57)
CAASSTLSQG

SEQ ID NO: 757948 - protein, 16 aa, Homo sapiens
  CDR3 for beta chain variable domain of TCR clone 378974 (TRBV7-2, TRBJ2-3)
CASSAPWGRIADTQYF

SEQ ID NO: 757949 - protein, 15 aa, Homo sapiens
  CDR3 for alpha chain variable domain of TCR clone 378975 (TRAV2, TRAJ13)
CAPFLGVTRKLPLEL

SEQ ID NO: 757950 - protein, 17 aa, Homo sapiens
  CDR3 for beta chain variable domain of TCR clone 378975 (TRBV13, TRBJ2-3)
CASSLSRVAGGGNTQYF

SEQ ID NO: 757951 - protein, 12 aa, Homo sapiens
  CDR3 for alpha chain variable domain of TCR clone 378976 (TRAV1-1, TRAJ39)
CAVPVVGNMLTF

SEQ ID NO: 757952 - protein, 14 aa, Homo sapiens
  CDR3 for beta chain variable domain of TCR clone 378976 (TRBV2, TRBJ2-1)
CASRTGSSYNEQFF

SEQ ID NO: 757953 - protein, 15 aa, Homo sapiens
  CDR3 for alpha chain variable domain of TCR clone 378977 (TRAV20, TRAJ4)
CAVEGSSGGYNKLIF

SEQ ID NO: 757954 - protein, 14 aa, Homo sapiens
  CDR3 for beta chain variable domain of TCR clone 378977 (TRBV7-8, TRBJ2-7)
CASTLGGALGGQYF

SEQ ID NO: 757955 - protein, 14 aa, Homo sapiens
  CDR3 for alpha chain variable domain of TCR clone 378978 (TRAV9-2, TRAJ39)
CALYIYNAGNMLTF

SEQ ID NO: 757956 - protein, 13 aa, Homo sapiens
  CDR3 for beta chain variable domain of TCR clone 378978 (TRBV7-3, TRBJ2-7)
CASSKRRGGEQYF

SEQ ID NO: 757957 - protein, 17 aa, Homo sapiens
  CDR3 for alpha chain variable domain of TCR clone 378979 (TRAV3, TRAJ6)
FAVRDGPRSGGSYIPTF

SEQ ID NO: 757958 - protein, 14 aa, Homo sapiens
  CDR3 for beta chain variable domain of TCR clone 378979 (TRBV7-2, TRBJ2-7)
CASSPKTSFYEQYF

SEQ ID NO: 757959 - protein, 13 aa, Homo sapiens
  CDR3 for alpha chain variable domain of TCR clone 378980 (TRAV35, TRAJ42)
SAGFPGSQGNLIF

SEQ ID NO: 757960 - protein, 17 aa, Homo sapiens
  CDR3 for beta chain variable domain of TCR clone 378980 (TRBV11-2, TRBJ2-1)
CASSLYPPGVEYNEQFF

SEQ ID NO: 757961 - protein, 14 aa, Homo sapiens
  CDR3 for alpha chain variable domain of TCR clone 378981 (TRAV12-1, TRAJ17)
CVVTYKAAGNKLTF

SEQ ID NO: 757962 - protein, 14 aa, Homo sapiens
  CDR3 for beta chain variable domain of TCR clone 378981 (TRBV20-1, TRBJ1-1)
CSAQTRIGGTEAFF

SEQ ID NO: 757963 - protein, 12 aa, Homo sapiens
  CDR3 for alpha chain variable domain of TCR clone 378982 (TRAV13-1, TRAJ49)
CAASIRSNQFHF

SEQ ID NO: 757964 - protein, 13 aa, Homo sapiens
  CDR3 for beta chain variable domain of TCR clone 378982 (TRBV7-2, TRBJ2-4)
CASSREHANIQYF

SEQ ID NO: 757965 - protein, 13 aa, Homo sapiens
  CDR3 for alpha chain variable domain of TCR clone 378983 (TRAV12-1, TRAJ26)
CVVRRNYGQNFDF

SEQ ID NO: 757966 - protein, 14 aa, Homo sapiens
  CDR3 for beta chain variable domain of TCR clone 378983 (TRBV6-3, TRBJ1-1)
CASRYTGESTEAFF

SEQ ID NO: 757967 - protein, 16 aa, Homo sapiens
  CDR3 for alpha chain variable domain of TCR clone 378984 (TRAV1-2, TRAJ42)
CAVRGNYGGSQGNLIF

SEQ ID NO: 757968 - protein, 14 aa, Homo sapiens
  CDR3 for beta chain variable domain of TCR clone 378984 (TRBV25-1, TRBJ1-1)
CASTHLGGNTEAFF

SEQ ID NO: 757969 - protein, 11 aa, Homo sapiens
  CDR3 for alpha chain variable domain of TCR clone 378985 (TRAV12-1, TRAJ40)
CVVPGTYKYIF

SEQ ID NO: 757970 - protein, 18 aa, Homo sapiens
  CDR3 for beta chain variable domain of TCR clone 378985 (TRBV18, TRBJ2-2)
CASSPRRASGLNTGELFF

SEQ ID NO: 757971 - protein, 14 aa, Homo sapiens
  CDR3 for alpha chain variable domain of TCR clone 378986 (TRAV26-1, TRAJ38)
CIADNAGHNRKLIW

SEQ ID NO: 757972 - protein, 15 aa, Homo sapiens
  CDR3 for beta chain variable domain of TCR clone 378986 (TRBV20-1, TRBJ1-1)
CSARGGGTLKLSLDK

SEQ ID NO: 757973 - protein, 13 aa, Homo sapiens
  CDR3 for alpha chain variable domain of TCR clone 378987 (TRAV27, TRAJ6)
CAGGTRGSYIPTF

SEQ ID NO: 757974 - protein, 14 aa, Homo sapiens
  CDR3 for beta chain variable domain of TCR clone 378987 (TRBV20-1, TRBJ2-4)
CSASGRVGENIQYC

SEQ ID NO: 757975 - protein, 14 aa, Homo sapiens
  CDR3 for alpha chain variable domain of TCR clone 378988 (TRAV8-1, TRAJ36)
CAVNSPTGANKLFF

SEQ ID NO: 757976 - protein, 15 aa, Homo sapiens
  CDR3 for beta chain variable domain of TCR clone 378988 (TRBV7-2, TRBJ2-3)
CASSLEQGGTDTQYF

SEQ ID NO: 757977 - protein, 12 aa, Homo sapiens
  CDR3 for alpha chain variable domain of TCR clone 378989 (TRAV25, TRAJ30)
CAGKSRDDKIIF

SEQ ID NO: 757978 - protein, 11 aa, Homo sapiens
  CDR3 for beta chain variable domain of TCR clone 378989 (TRBV12-4, TRBJ2-7)
CATPEKGEQYF

SEQ ID NO: 757979 - protein, 13 aa, Homo sapiens
  CDR3 for alpha chain variable domain of TCR clone 378990 (TRAV20, TRAJ48)
CAVHLFGNEKLTF

SEQ ID NO: 757980 - protein, 15 aa, Homo sapiens
  CDR3 for beta chain variable domain of TCR clone 378990 (TRBV6-5, TRBJ2-6)
CASSQWEARANVLTF

SEQ ID NO: 757981 - protein, 10 aa, Homo sapiens
  CDR3 for alpha chain variable domain of TCR clone 378991 (TRAV23/DV6, TRAJ31)
CARDGARLMF

SEQ ID NO: 757982 - protein, 14 aa, Homo sapiens
  CDR3 for beta chain variable domain of TCR clone 378991 (TRBV7-8, TRBJ1-2)
CASSPDSLSYGYTF

SEQ ID NO: 757983 - protein, 16 aa, Homo sapiens
  CDR3 for alpha chain variable domain of TCR clone 378992 (TRAV14/DV4, TRAJ53)
CAMREGGGGSNYKLTF

SEQ ID NO: 757984 - protein, 13 aa, Homo sapiens
  CDR3 for beta chain variable domain of TCR clone 378992 (TRBV12-4, TRBJ1-1)
CASSPGTGFEAFF

SEQ ID NO: 757985 - protein, 16 aa, Homo sapiens
  CDR3 for alpha chain variable domain of TCR clone 378993 (TRAV12-2, TRAJ48)
CAVNPTSIFGNEKLTF

SEQ ID NO: 757986 - protein, 12 aa, Homo sapiens
  CDR3 for beta chain variable domain of TCR clone 378993 (TRBV9, TRBJ2-3)
CASSLRAGTQYF

SEQ ID NO: 757987 - protein, 15 aa, Homo sapiens
  CDR3 for alpha chain variable domain of TCR clone 378994 (TRAV13-1, TRAJ36)
CAASIRQTGANNLFF

SEQ ID NO: 757988 - protein, 22 aa, Homo sapiens
  CDR3 for beta chain variable domain of TCR clone 378994 (TRBV6-1, TRBJ1-3)
CASVQGGGWKHHIVWRGKLAHC

SEQ ID NO: 757989 - protein, 15 aa, Homo sapiens
  CDR3 for alpha chain variable domain of TCR clone 378995 (TRAV12-1, TRAJ44)
CVVNINTGTASKLTF

SEQ ID NO: 757990 - protein, 14 aa, Homo sapiens
  CDR3 for beta chain variable domain of TCR clone 378995 (TRBV19, TRBJ2-1)
CASPTFVLSGEQFF

SEQ ID NO: 757991 - protein, 11 aa, Homo sapiens
  CDR3 for alpha chain variable domain of TCR clone 378996 (TRAV2, TRAJ21)
CAVFNFNTFYF

SEQ ID NO: 757992 - protein, 13 aa, Homo sapiens
  CDR3 for beta chain variable domain of TCR clone 378996 (TRBV7-3, TRBJ1-1)
CASSQDWGAEVFF

SEQ ID NO: 757993 - protein, 14 aa, Homo sapiens
  CDR3 for alpha chain variable domain of TCR clone 378997 (TRAV12-3, TRAJ42)
CAINYGGSQGNLIF

SEQ ID NO: 757994 - protein, 15 aa, Homo sapiens
  CDR3 for beta chain variable domain of TCR clone 378997 (TRBV5-7, TRBJ1-5)
CASSYGKLCDQPQHF

SEQ ID NO: 757995 - protein, 13 aa, Homo sapiens
  CDR3 for alpha chain variable domain of TCR clone 378998 (TRAV12-2, TRAJ52)
YAVGGTSYGKLAF

SEQ ID NO: 757996 - protein, 14 aa, Homo sapiens
  CDR3 for beta chain variable domain of TCR clone 378998 (TRBV19, TRBJ2-1)
CASPTFVLSGEQFF

SEQ ID NO: 757997 - protein, 14 aa, Homo sapiens
  CDR3 for alpha chain variable domain of TCR clone 378999 (TRAV1-2, TRAJ16)
CAVNRFSDGQKLLF

SEQ ID NO: 757998 - protein, 15 aa, Homo sapiens
  CDR3 for beta chain variable domain of TCR clone 378999 (TRBV5-1, TRBJ2-1)
CASSPRRAPYSEQFF

SEQ ID NO: 757999 - protein, 15 aa, Homo sapiens
  CDR3 for alpha chain variable domain of TCR clone 379000 (TRAV3, TRAJ15)
CAVRPANQAGTALIF

SEQ ID NO: 758000 - protein, 15 aa, Homo sapiens
  CDR3 for beta chain variable domain of TCR clone 379000 (TRBV7-7, TRBJ1-3)
CASSQGEHFGNTIYF

SEQ ID NO: 758001 - protein, 14 aa, Homo sapiens
  CDR3 for alpha chain variable domain of TCR clone 379001 (TRAV13-1, TRAJ53)
CAASISGSNYKLTF

SEQ ID NO: 758002 - protein, 16 aa, Homo sapiens
  CDR3 for beta chain variable domain of TCR clone 379001 (TRBV4-1, TRBJ2-2)
CASSTARASNTGELFF

SEQ ID NO: 758003 - protein, 14 aa, Homo sapiens
  CDR3 for alpha chain variable domain of TCR clone 379002 (TRAV8-4, TRAJ15)
CAVTIREAGTARIF

SEQ ID NO: 758004 - protein, 16 aa, Homo sapiens
  CDR3 for beta chain variable domain of TCR clone 379002 (TRBV29-1, TRBJ2-6)
CSVEDITYSGANVLTF

SEQ ID NO: 758005 - protein, 14 aa, Homo sapiens
  CDR3 for alpha chain variable domain of TCR clone 379003 (TRAV12-3, TRAJ10)
SHLPLTGGGNKLTF

SEQ ID NO: 758006 - protein, 14 aa, Homo sapiens
  CDR3 for beta chain variable domain of TCR clone 379003 (TRBV19, TRBJ2-1)
CASQTFVLRGEQFF

SEQ ID NO: 758007 - protein, 16 aa, Homo sapiens
  CDR3 for alpha chain variable domain of TCR clone 379004 (TRAV12-2, TRAJ32)
CAVNLGQGGATNKLIF

SEQ ID NO: 758008 - protein, 16 aa, Homo sapiens
  CDR3 for beta chain variable domain of TCR clone 379004 (TRBV7-2, TRBJ2-6)
CAILSGVSSGANVLTF

SEQ ID NO: 758009 - protein, 12 aa, Homo sapiens
  CDR3 for alpha chain variable domain of TCR clone 379005 (TRAV21, TRAJ58)
CALSASGSRLTF

SEQ ID NO: 758010 - protein, 19 aa, Homo sapiens
  CDR3 for beta chain variable domain of TCR clone 379005 (TRBV7-9, TRBJ2-6)
CASSLESATVLPGANVLTF

SEQ ID NO: 758011 - protein, 15 aa, Homo sapiens
  CDR3 for alpha chain variable domain of TCR clone 379006 (TRAV9-2, TRAJ52)
CASNAGGTSYGKLTF

SEQ ID NO: 758012 - protein, 11 aa, Homo sapiens
  CDR3 for beta chain variable domain of TCR clone 379006 (TRBV12-4, TRBJ2-3)
CASTATDTQYF

SEQ ID NO: 758013 - protein, 12 aa, Homo sapiens
  CDR3 for alpha chain variable domain of TCR clone 379007 (TRAV12-3, TRAJ17)
CAMTLTGNKLTF

SEQ ID NO: 758014 - protein, 14 aa, Homo sapiens
  CDR3 for beta chain variable domain of TCR clone 379007 (TRBV10-2, TRBJ2-1)
CTSSEGTSEDEQFF

SEQ ID NO: 758015 - protein, 14 aa, Homo sapiens
  CDR3 for alpha chain variable domain of TCR clone 379008 (TRAV26-1, TRAJ38)
CIANNAGTNRKLIW

SEQ ID NO: 758016 - protein, 13 aa, Homo sapiens
  CDR3 for beta chain variable domain of TCR clone 379008 (TRBV20-1, TRBJ1-1)
CSARGGGNTEAFF

SEQ ID NO: 758017 - protein, 17 aa, Homo sapiens
  CDR3 for alpha chain variable domain of TCR clone 379009 (TRAV3, TRAJ6)
CAVRDGPRAGGSYIPTF

SEQ ID NO: 758018 - protein, 20 aa, Homo sapiens
  CDR3 for beta chain variable domain of TCR clone 379009 (TRBV28, TRBJ2-1)
CASTPFGRSPGLAGGNEQFF

SEQ ID NO: 758019 - protein, 14 aa, Homo sapiens
  CDR3 for alpha chain variable domain of TCR clone 379010 (TRAV13-1, TRAJ3)
CAAEGYSSASKIIF

SEQ ID NO: 758020 - protein, 20 aa, Homo sapiens
  CDR3 for beta chain variable domain of TCR clone 379010 (TRBV7-8, TRBJ2-2)
CASSHLFPGPTIHITGELFF

SEQ ID NO: 758021 - protein, 14 aa, Homo sapiens
  CDR3 for alpha chain variable domain of TCR clone 379011 (TRAV38-2/DV8, TRAJ54)
AAMYPIQGAQKLVF

SEQ ID NO: 758022 - protein, 17 aa, Homo sapiens
  CDR3 for beta chain variable domain of TCR clone 379011 (TRBV6-1, TRBJ2-3)
CASSEALRLISTDTQYF

SEQ ID NO: 758023 - protein, 14 aa, Homo sapiens
  CDR3 for alpha chain variable domain of TCR clone 379012 (TRAV8-3, TRAJ4)
CAVGASSGYNKLIF

SEQ ID NO: 758024 - protein, 16 aa, Homo sapiens
  CDR3 for beta chain variable domain of TCR clone 379012 (TRBV4-3, TRBJ2-2)
CASSHLQGSGTGELFF

SEQ ID NO: 758025 - protein, 11 aa, Homo sapiens
  CDR3 for alpha chain variable domain of TCR clone 379013 (TRAV8-3, TRAJ47)
CAVVRRDVETN

SEQ ID NO: 758026 - protein, 14 aa, Homo sapiens
  CDR3 for beta chain variable domain of TCR clone 379013 (TRBV5-1, TRBJ2-7)
CASSRGESLYEQYF

SEQ ID NO: 758027 - protein, 13 aa, Homo sapiens
  CDR3 for alpha chain variable domain of TCR clone 379014 (TRAV2, TRAJ40)
CAVVTSGTHNYIF

SEQ ID NO: 758028 - protein, 14 aa, Homo sapiens
  CDR3 for beta chain variable domain of TCR clone 379014 (TRBV19, TRBJ2-1)
CASPTFVLSGEQFF

SEQ ID NO: 758029 - protein, 12 aa, Homo sapiens
  CDR3 for alpha chain variable domain of TCR clone 379015 (TRAV12-3, TRAJ17)
CAMTLTVNKLTF

SEQ ID NO: 758030 - protein, 15 aa, Homo sapiens
  CDR3 for beta chain variable domain of TCR clone 379015 (TRBV20-1, TRBJ2-7)
CSASDRVSGMDEQYF

SEQ ID NO: 758031 - protein, 13 aa, Homo sapiens
  CDR3 for alpha chain variable domain of TCR clone 379016 (TRAV38-2/DV8, TRAJ34)
CAYRTWNTDKPIF

SEQ ID NO: 758032 - protein, 13 aa, Homo sapiens
  CDR3 for beta chain variable domain of TCR clone 379016 (TRBV7-2, TRBJ2-2)
CASSLAVTGELFF

SEQ ID NO: 758033 - protein, 14 aa, Homo sapiens
  CDR3 for alpha chain variable domain of TCR clone 379017 (TRAV17, TRAJ12)
CATDGVDSSYKLIF

SEQ ID NO: 758034 - protein, 14 aa, Homo sapiens
  CDR3 for beta chain variable domain of TCR clone 379017 (TRBV18, TRBJ2-7)
CASSPTSGGYEQYF

SEQ ID NO: 758035 - protein, 15 aa, Homo sapiens
  CDR3 for alpha chain variable domain of TCR clone 379018 (TRAV2, TRAJ15)
CAVEDRGQAGTALIF

SEQ ID NO: 758036 - protein, 13 aa, Homo sapiens
  CDR3 for beta chain variable domain of TCR clone 379018 (TRBV10-2, TRBJ2-7)
CASAASGGYEQYF

SEQ ID NO: 758037 - protein, 15 aa, Homo sapiens
  CDR3 for alpha chain variable domain of TCR clone 379019 (TRAV21, TRAJ53)
CATLNSGGSNYKLTF

SEQ ID NO: 758038 - protein, 16 aa, Homo sapiens
  CDR3 for beta chain variable domain of TCR clone 379019 (TRBV20-1, TRBJ1-2)
CSASMGQGVANYGYTS

SEQ ID NO: 758039 - protein, 16 aa, Homo sapiens
  CDR3 for alpha chain variable domain of TCR clone 379020 (TRAV30, TRAJ24)
CGTEIVDADSWGKFQF

SEQ ID NO: 758040 - protein, 14 aa, Homo sapiens
  CDR3 for beta chain variable domain of TCR clone 379020 (TRBV7-9, TRBJ2-4)
CASSLALGGNIQYF

SEQ ID NO: 758041 - protein, 15 aa, Homo sapiens
  CDR3 for alpha chain variable domain of TCR clone 379021 (TRAV8-4, TRAJ7)
CAVSGGNYGNNRLAF

SEQ ID NO: 758042 - protein, 11 aa, Homo sapiens
  CDR3 for beta chain variable domain of TCR clone 379021 (TRBV20-1, TRBJ2-1)
CSLSSGSEHFF

SEQ ID NO: 758043 - protein, 11 aa, Homo sapiens
  CDR3 for alpha chain variable domain of TCR clone 379022 (TRAV27, TRAJ47)
SIVEYGNKLVF

SEQ ID NO: 758044 - protein, 13 aa, Homo sapiens
  CDR3 for beta chain variable domain of TCR clone 379022 (TRBV7-3, TRBJ1-1)
CASMQDWGAEAFF

SEQ ID NO: 758045 - protein, 14 aa, Homo sapiens
  CDR3 for alpha chain variable domain of TCR clone 379023 (TRAV35, TRAJ33)
CAGSSQDSNYQVIW

SEQ ID NO: 758046 - protein, 15 aa, Homo sapiens
  CDR3 for beta chain variable domain of TCR clone 379023 (TRBV20-1, TRBJ2-7)
CSAVSGTSGAYEQYF

SEQ ID NO: 758047 - protein, 14 aa, Homo sapiens
  CDR3 for alpha chain variable domain of TCR clone 379024 (TRAV20, TRAJ56)
CAVQFGGANSKLTF

SEQ ID NO: 758048 - protein, 15 aa, Homo sapiens
  CDR3 for beta chain variable domain of TCR clone 379024 (TRBV18, TRBJ2-1)
CASSPPSASYNEQFF

SEQ ID NO: 758049 - protein, 13 aa, Homo sapiens
  CDR3 for alpha chain variable domain of TCR clone 379025 (TRAV8-6, TRAJ8)
CAVSNTGFQKLVF

SEQ ID NO: 758050 - protein, 15 aa, Homo sapiens
  CDR3 for beta chain variable domain of TCR clone 379025 (TRBV28, TRBJ2-5)
CASSAGRTIQETQYF

SEQ ID NO: 758051 - protein, 15 aa, Homo sapiens
  CDR3 for alpha chain variable domain of TCR clone 379026 (TRAV21, TRAJ53)
CATFNSGGSNYKLTF

SEQ ID NO: 758052 - protein, 16 aa, Homo sapiens
  CDR3 for beta chain variable domain of TCR clone 379026 (TRBV12-4, TRBJ1-5)
CASSRPVGGSNQPQHF

SEQ ID NO: 758053 - protein, 16 aa, Homo sapiens
  CDR3 for alpha chain variable domain of TCR clone 379027 (TRAV26-1, TRAJ46)
CIVRVGKEKQLRQADF

SEQ ID NO: 758054 - protein, 16 aa, Homo sapiens
  CDR3 for beta chain variable domain of TCR clone 379027 (TRBV27, TRBJ2-2)
CASSFRGLVRTGELFF

SEQ ID NO: 758055 - protein, 13 aa, Homo sapiens
  CDR3 for alpha chain variable domain of TCR clone 379028 (TRAV17, TRAJ33)
CATDADSNYQLIW

SEQ ID NO: 758056 - protein, 17 aa, Homo sapiens
  CDR3 for beta chain variable domain of TCR clone 379028 (TRBV20-1, TRBJ2-3)
CSAVSPGLAGGQDMQYF

SEQ ID NO: 758057 - protein, 12 aa, Homo sapiens
  CDR3 for alpha chain variable domain of TCR clone 379029 (TRAV38-2/DV8, TRAJ48)
CALLSGNEKLTF

SEQ ID NO: 758058 - protein, 15 aa, Homo sapiens
  CDR3 for beta chain variable domain of TCR clone 379029 (TRBV6-1, TRBJ2-1)
CASSELRGQYNAQFF

SEQ ID NO: 758059 - protein, 17 aa, Homo sapiens
  CDR3 for alpha chain variable domain of TCR clone 379030 (TRAV20, TRAJ4)
CAVQLVLFSGGYNKLIF

SEQ ID NO: 758060 - protein, 15 aa, Homo sapiens
  CDR3 for beta chain variable domain of TCR clone 379030 (TRBV6-3, TRBJ2-7)
CASSSPGTAFYEQYF

SEQ ID NO: 758061 - protein, 14 aa, Homo sapiens
  CDR3 for alpha chain variable domain of TCR clone 379031 (TRAV26-1, TRAJ38)
CIADNAGNNRKLIL

SEQ ID NO: 758062 - protein, 13 aa, Homo sapiens
  CDR3 for beta chain variable domain of TCR clone 379031 (TRBV20-1, TRBJ1-1)
CIARGGGNTEAFF

SEQ ID NO: 758063 - protein, 17 aa, Homo sapiens
  CDR3 for alpha chain variable domain of TCR clone 379032 (TRAV8-6, TRAJ58)
CAVSSWVGETSGARLPL

SEQ ID NO: 758064 - protein, 14 aa, Homo sapiens
  CDR3 for beta chain variable domain of TCR clone 379032 (TRBV4-2, TRBJ2-1)
CASGLDRAYNEQFF

SEQ ID NO: 758065 - protein, 14 aa, Homo sapiens
  CDR3 for alpha chain variable domain of TCR clone 379033 (TRAV3, TRAJ28)
CAVRRGAGSYQLTF

SEQ ID NO: 758066 - protein, 16 aa, Homo sapiens
  CDR3 for beta chain variable domain of TCR clone 379033 (TRBV4-1, TRBJ2-7)
CASSQEWTSGPLEQCF

SEQ ID NO: 758067 - protein, 14 aa, Homo sapiens
  CDR3 for alpha chain variable domain of TCR clone 379034 (TRAV12-3, TRAJ9)
CAMSPNTGGFKTIF

SEQ ID NO: 758068 - protein, 18 aa, Homo sapiens
  CDR3 for beta chain variable domain of TCR clone 379034 (TRBV28, TRBJ2-1)
CASSSTSGRANSYNEPFF

SEQ ID NO: 758069 - protein, 14 aa, Homo sapiens
  CDR3 for alpha chain variable domain of TCR clone 379035 (TRAV26-1, TRAJ38)
CIADHAGNNRKLIW

SEQ ID NO: 758070 - protein, 14 aa, Homo sapiens
  CDR3 for beta chain variable domain of TCR clone 379035 (TRBV4-1, TRBJ2-2)
CASSQAVNTGELFF

SEQ ID NO: 758071 - protein, 13 aa, Homo sapiens
  CDR3 for alpha chain variable domain of TCR clone 379036 (TRAV2, TRAJ40)
CAVVTSGTYKYIF

SEQ ID NO: 758072 - protein, 14 aa, Homo sapiens
  CDR3 for beta chain variable domain of TCR clone 379036 (TRBV19, TRBJ2-1)
CASPTFVASGEQFF

SEQ ID NO: 758073 - protein, 13 aa, Homo sapiens
  CDR3 for alpha chain variable domain of TCR clone 379037 (TRAV17, TRAJ42)
CATSRGSQGNLIF

SEQ ID NO: 758074 - protein, 13 aa, Homo sapiens
  CDR3 for beta chain variable domain of TCR clone 379037 (TRBV19, TRBJ1-2)
CASSQGQVYGYTF

SEQ ID NO: 758075 - protein, 11 aa, Homo sapiens
  CDR3 for alpha chain variable domain of TCR clone 379038 (TRAV3, TRAJ21)
CAVGNLNKFYF

SEQ ID NO: 758076 - protein, 13 aa, Homo sapiens
  CDR3 for beta chain variable domain of TCR clone 379038 (TRBV7-9, TRBJ1-2)
CASSLKQNYGYTF

SEQ ID NO: 758077 - protein, 10 aa, Homo sapiens
  CDR3 for alpha chain variable domain of TCR clone 379039 (TRAV1-2, TRAJ31)
CAFFDARLMF

SEQ ID NO: 758078 - protein, 15 aa, Homo sapiens
  CDR3 for beta chain variable domain of TCR clone 379039 (TRBV4-1, TRBJ1-4)
CASSNTGGTNEKLFL

SEQ ID NO: 758079 - protein, 13 aa, Homo sapiens
  CDR3 for alpha chain variable domain of TCR clone 379040 (TRAV21, TRAJ27)
CAARPGNAGKSTF

SEQ ID NO: 758080 - protein, 14 aa, Homo sapiens
  CDR3 for beta chain variable domain of TCR clone 379040 (TRBV6-6, TRBJ2-7)
CASSDSGAGYEQYF

SEQ ID NO: 758081 - protein, 13 aa, Homo sapiens
  CDR3 for alpha chain variable domain of TCR clone 379041 (TRAV17, TRAJ54)
CATSWGGAQKLVF

SEQ ID NO: 758082 - protein, 15 aa, Homo sapiens
  CDR3 for beta chain variable domain of TCR clone 379041 (TRBV4-3, TRBJ2-3)
CASSPSRLATDTQYF

SEQ ID NO: 758083 - protein, 14 aa, Homo sapiens
  CDR3 for alpha chain variable domain of TCR clone 379042 (TRAV13-1, TRAJ44)
CAAKATGTASKLTF

SEQ ID NO: 758084 - protein, 17 aa, Homo sapiens
  CDR3 for beta chain variable domain of TCR clone 379042 (TRBV7-3, TRBJ2-3)
CASSLMKRMRGADTQYI

SEQ ID NO: 758085 - protein, 13 aa, Homo sapiens
  CDR3 for alpha chain variable domain of TCR clone 379043 (TRAV2, TRAJ21)
CAVEDLNFNKFYF

SEQ ID NO: 758086 - protein, 15 aa, Homo sapiens
  CDR3 for beta chain variable domain of TCR clone 379043 (TRBV28, TRBJ2-5)
CASSPGQGSIETQYC

SEQ ID NO: 758087 - protein, 15 aa, Homo sapiens
  CDR3 for alpha chain variable domain of TCR clone 379044 (TRAV23/DV6, TRAJ38)
CAARSNAGNNRKLIW

SEQ ID NO: 758088 - protein, 16 aa, Homo sapiens
  CDR3 for beta chain variable domain of TCR clone 379044 (TRBV10-2, TRBJ1-5)
CASSRDRDYSNQPQHC

SEQ ID NO: 758089 - protein, 14 aa, Homo sapiens
  CDR3 for alpha chain variable domain of TCR clone 379045 (TRAV34, TRAJ22)
CGADTSGSARQLTF

SEQ ID NO: 758090 - protein, 17 aa, Homo sapiens
  CDR3 for beta chain variable domain of TCR clone 379045 (TRBV11-2, TRBJ2-1)
CASSLYPPGVEYNEQFF

SEQ ID NO: 758091 - protein, 12 aa, Homo sapiens
  CDR3 for alpha chain variable domain of TCR clone 379046 (TRAV26-1, TRAJ48)
YIVSGGNEKLTF

SEQ ID NO: 758092 - protein, 13 aa, Homo sapiens
  CDR3 for beta chain variable domain of TCR clone 379046 (TRBV18, TRBJ2-7)
CASFRDSAYEQYF

SEQ ID NO: 758093 - protein, 18 aa, Homo sapiens
  CDR3 for alpha chain variable domain of TCR clone 379047 (TRAV13-1, TRAJ52)
CAASKRSAGGTSYGKLTF

SEQ ID NO: 758094 - protein, 13 aa, Homo sapiens
  CDR3 for beta chain variable domain of TCR clone 379047 (TRBV12-4, TRBJ1-1)
CASSPGTGFEAFF

SEQ ID NO: 758095 - protein, 16 aa, Homo sapiens
  CDR3 for alpha chain variable domain of TCR clone 379048 (TRAV30, TRAJ24)
CGTEMVDADSWGNFQF

SEQ ID NO: 758096 - protein, 14 aa, Homo sapiens
  CDR3 for beta chain variable domain of TCR clone 379048 (TRBV12-5, TRBJ2-5)
CASGSRTHQETQYF

SEQ ID NO: 758097 - protein, 13 aa, Homo sapiens
  CDR3 for alpha chain variable domain of TCR clone 379049 (TRAV3, TRAJ20)
CCEAFCNDYKLSF

SEQ ID NO: 758098 - protein, 16 aa, Homo sapiens
  CDR3 for beta chain variable domain of TCR clone 379049 (TRBV18, TRBJ1-1)
CASSPGVGGRGGEAFF

SEQ ID NO: 758099 - protein, 13 aa, Homo sapiens
  CDR3 for alpha chain variable domain of TCR clone 379050 (TRAV12-3, TRAJ4)
CNEQAGGYNKLIF

SEQ ID NO: 758100 - protein, 15 aa, Homo sapiens
  CDR3 for beta chain variable domain of TCR clone 379050 (TRBV5-1, TRBJ1-1)
CASSFSDLGGTEAFF

SEQ ID NO: 758101 - protein, 13 aa, Homo sapiens
  CDR3 for alpha chain variable domain of TCR clone 379051 (TRAV12-3, TRAJ33)
CAMSVNSNYQLIW

SEQ ID NO: 758102 - protein, 17 aa, Homo sapiens
  CDR3 for beta chain variable domain of TCR clone 379051 (TRBV7-3, TRBJ2-2)
CASSLSGTSGGTGELFF

SEQ ID NO: 758103 - protein, 11 aa, Homo sapiens
  CDR3 for alpha chain variable domain of TCR clone 379052 (TRAV12-1, TRAJ21)
CVVYNFNKFYF

SEQ ID NO: 758104 - protein, 15 aa, Homo sapiens
  CDR3 for beta chain variable domain of TCR clone 379052 (TRBV7-2, TRBJ1-4)
CASSLGGASPEKLFF

SEQ ID NO: 758105 - protein, 15 aa, Homo sapiens
  CDR3 for alpha chain variable domain of TCR clone 379053 (TRAV35, TRAJ52)
CAGPRGGTSYGELTF

SEQ ID NO: 758106 - protein, 14 aa, Homo sapiens
  CDR3 for beta chain variable domain of TCR clone 379053 (TRBV20-1, TRBJ2-7)
CSAWTALGSYEQYF

SEQ ID NO: 758107 - protein, 16 aa, Homo sapiens
  CDR3 for alpha chain variable domain of TCR clone 379054 (TRAV20, TRAJ22)
CAVQASSSSSVRQLTF

SEQ ID NO: 758108 - protein, 16 aa, Homo sapiens
  CDR3 for beta chain variable domain of TCR clone 379054 (TRBV20-1, TRBJ1-5)
CSASRGTGYSNQPQHF

SEQ ID NO: 758109 - protein, 16 aa, Homo sapiens
  CDR3 for alpha chain variable domain of TCR clone 379055 (TRAV3, TRAJ10)
CAVRDMRAGGGDKLTF

SEQ ID NO: 758110 - protein, 15 aa, Homo sapiens
  CDR3 for beta chain variable domain of TCR clone 379055 (TRBV9, TRBJ1-6)
CASSVAGTGDSPLHF

SEQ ID NO: 758111 - protein, 14 aa, Homo sapiens
  CDR3 for alpha chain variable domain of TCR clone 379056 (TRAV12-3, TRAJ33)
CAMSVPGGNYQLIW

SEQ ID NO: 758112 - protein, 13 aa, Homo sapiens
  CDR3 for beta chain variable domain of TCR clone 379056 (TRBV28, TRBJ1-1)
CASSDFTLPEAFF

SEQ ID NO: 758113 - protein, 14 aa, Homo sapiens
  CDR3 for alpha chain variable domain of TCR clone 379057 (TRAV8-3, TRAJ17)
CAVGAQTAGNKLTF

SEQ ID NO: 758114 - protein, 15 aa, Homo sapiens
  CDR3 for beta chain variable domain of TCR clone 379057 (TRBV6-1, TRBJ2-5)
CASSEGWGIQETQYF

SEQ ID NO: 758115 - protein, 10 aa, Homo sapiens
  CDR3 for alpha chain variable domain of TCR clone 379058 (TRAV21, TRAJ31)
CAVDNARLMF

SEQ ID NO: 758116 - protein, 14 aa, Homo sapiens
  CDR3 for beta chain variable domain of TCR clone 379058 (TRBV19, TRBJ2-1)
CASPTFVLSGGQFF

SEQ ID NO: 758117 - protein, 12 aa, Homo sapiens
  CDR3 for alpha chain variable domain of TCR clone 379059 (TRAV20, TRAJ49)
CAVNKDGNQFYF

SEQ ID NO: 758118 - protein, 13 aa, Homo sapiens
  CDR3 for beta chain variable domain of TCR clone 379059 (TRBV20-1, TRBJ1-1)
CSAPLGGGTEAFF

SEQ ID NO: 758119 - protein, 13 aa, Homo sapiens
  CDR3 for alpha chain variable domain of TCR clone 379060 (TRAV2, TRAJ40)
CAVVTSGTYKYIF

SEQ ID NO: 758120 - protein, 15 aa, Homo sapiens
  CDR3 for beta chain variable domain of TCR clone 379060 (TRBV11-3, TRBJ2-3)
CARMKEGREGDKKYF

SEQ ID NO: 758121 - protein, 14 aa, Homo sapiens
  CDR3 for alpha chain variable domain of TCR clone 379061 (TRAV12-3, TRAJ42)
CAMNYGGSQGNHIF

SEQ ID NO: 758122 - protein, 15 aa, Homo sapiens
  CDR3 for beta chain variable domain of TCR clone 379061 (TRBV5-7, TRBJ1-5)
CASSYGKLWDQPQHF

SEQ ID NO: 758123 - protein, 15 aa, Homo sapiens
  CDR3 for alpha chain variable domain of TCR clone 379062 (TRAV2, TRAJ9)
CAVEDRGTGGFKTIF

SEQ ID NO: 758124 - protein, 16 aa, Homo sapiens
  CDR3 for beta chain variable domain of TCR clone 379062 (TRBV24-1, TRBJ2-3)
CATSDPGTGATDTQFF

SEQ ID NO: 758125 - protein, 10 aa, Homo sapiens
  CDR3 for alpha chain variable domain of TCR clone 379063 (TRAV38-1, TRAJ26)
CAFMHTYFVF

SEQ ID NO: 758126 - protein, 14 aa, Homo sapiens
  CDR3 for beta chain variable domain of TCR clone 379063 (TRBV19, TRBJ2-1)
CASPTFVLSGEQFF

SEQ ID NO: 758127 - protein, 12 aa, Homo sapiens
  CDR3 for alpha chain variable domain of TCR clone 379064 (TRAV12-3, TRAJ17)
CAMTLTGNQLTF

SEQ ID NO: 758128 - protein, 16 aa, Homo sapiens
  CDR3 for beta chain variable domain of TCR clone 379064 (TRBV7-2, TRBJ2-3)
CASSLAGAGSGDTQYF

SEQ ID NO: 758129 - protein, 11 aa, Homo sapiens
  CDR3 for alpha chain variable domain of TCR clone 379065 (TRAV8-4, TRAJ20)
CAVTNVLTTTS

SEQ ID NO: 758130 - protein, 15 aa, Homo sapiens
  CDR3 for beta chain variable domain of TCR clone 379065 (TRBV7-9, TRBJ1-2)
CASSLGREPNYGYTF

SEQ ID NO: 758131 - protein, 14 aa, Homo sapiens
  CDR3 for alpha chain variable domain of TCR clone 379066 (TRAV16, TRAJ54)
CALNLIQGAQKLVS

SEQ ID NO: 758132 - protein, 17 aa, Homo sapiens
  CDR3 for beta chain variable domain of TCR clone 379066 (TRBV11-2, TRBJ2-4)
CASSSVGPGGHRNIQYF

SEQ ID NO: 758133 - protein, 14 aa, Homo sapiens
  CDR3 for alpha chain variable domain of TCR clone 379067 (TRAV1-2, TRAJ16)
CAVNRFSDGQKLLL

SEQ ID NO: 758134 - protein, 15 aa, Homo sapiens
  CDR3 for beta chain variable domain of TCR clone 379067 (TRBV5-8, TRBJ2-2)
CASSLDRGATGELFF

SEQ ID NO: 758135 - protein, 12 aa, Homo sapiens
  CDR3 for alpha chain variable domain of TCR clone 379068 (TRAV8-3, TRAJ26)
CDGDNYGQNFVF

SEQ ID NO: 758136 - protein, 15 aa, Homo sapiens
  CDR3 for beta chain variable domain of TCR clone 379068 (TRBV9, TRBJ2-1)
CASSLAGSSYNEQFF

SEQ ID NO: 758137 - protein, 14 aa, Homo sapiens
  CDR3 for alpha chain variable domain of TCR clone 379069 (TRAV29/DV5, TRAJ45)
CAASFRGGADGLTF

SEQ ID NO: 758138 - protein, 12 aa, Homo sapiens
  CDR3 for beta chain variable domain of TCR clone 379069 (TRBV7-9, TRBJ2-7)
CASSLEGYEQYF

SEQ ID NO: 758139 - protein, 12 aa, Homo sapiens
  CDR3 for alpha chain variable domain of TCR clone 379070 (TRAV3, TRAJ31)
CAVRDGNARLMF

SEQ ID NO: 758140 - protein, 15 aa, Homo sapiens
  CDR3 for beta chain variable domain of TCR clone 379070 (TRBV28, TRBJ2-5)
CASSSGRTKQETQYF

SEQ ID NO: 758141 - protein, 13 aa, Homo sapiens
  CDR3 for alpha chain variable domain of TCR clone 379071 (TRAV8-4, TRAJ9)
CAVSETGGFKTIF

SEQ ID NO: 758142 - protein, 17 aa, Homo sapiens
  CDR3 for beta chain variable domain of TCR clone 379071 (TRBV25-1, TRBJ2-1)
CASSAYGQGRGVYEQFF

SEQ ID NO: 758143 - protein, 11 aa, Homo sapiens
  CDR3 for alpha chain variable domain of TCR clone 379072 (TRAV3, TRAJ21)
CAVGNLNQFYF

SEQ ID NO: 758144 - protein, 16 aa, Homo sapiens
  CDR3 for beta chain variable domain of TCR clone 379072 (TRBV19, TRBJ2-1)
CASSKAGPSSYNEQFF

SEQ ID NO: 758145 - protein, 13 aa, Homo sapiens
  CDR3 for alpha chain variable domain of TCR clone 379073 (TRAV8-3, TRAJ36)
CAVGATGANNLFF

SEQ ID NO: 758146 - protein, 13 aa, Homo sapiens
  CDR3 for beta chain variable domain of TCR clone 379073 (TRBV12-4, TRBJ2-7)
CASSPTETYEQYF

SEQ ID NO: 758147 - protein, 14 aa, Homo sapiens
  CDR3 for alpha chain variable domain of TCR clone 379074 (TRAV1-1, TRAJ27)
FAVIYNTNAGKSTF

SEQ ID NO: 758148 - protein, 14 aa, Homo sapiens
  CDR3 for beta chain variable domain of TCR clone 379074 (TRBV25-1, TRBJ1-1)
CASTHLGGNTEAFF

SEQ ID NO: 758149 - protein, 13 aa, Homo sapiens
  CDR3 for alpha chain variable domain of TCR clone 379075 (TRAV27, TRAJ29)
CAGAHSGNTPLVF

SEQ ID NO: 758150 - protein, 14 aa, Homo sapiens
  CDR3 for beta chain variable domain of TCR clone 379075 (TRBV7-9, TRBJ2-7)
CSSSIGQGAGEQYF

SEQ ID NO: 758151 - protein, 23 aa, Homo sapiens
  CDR3 for alpha chain variable domain of TCR clone 379076 (TRAV26-1, TRAJ38)
CIADNAGNNHIQNPDPAVYQLRD

SEQ ID NO: 758152 - protein, 14 aa, Homo sapiens
  CDR3 for beta chain variable domain of TCR clone 379076 (TRBV7-2, TRBJ1-1)
CASSFLTGTTEAFF

SEQ ID NO: 758153 - protein, 12 aa, Homo sapiens
  CDR3 for alpha chain variable domain of TCR clone 379077 (TRAV1-1, TRAJ39)
CAVPLVGNMLTF

SEQ ID NO: 758154 - protein, 18 aa, Homo sapiens
  CDR3 for beta chain variable domain of TCR clone 379077 (TRBV7-9, TRBJ2-7)
CASSLTTRGSRTWYEQYF

SEQ ID NO: 758155 - protein, 13 aa, Homo sapiens
  CDR3 for alpha chain variable domain of TCR clone 379078 (TRAV12-1, TRAJ39)
CVVPQRAGNMLTF

SEQ ID NO: 758156 - protein, 12 aa, Homo sapiens
  CDR3 for beta chain variable domain of TCR clone 379078 (TRBV11-2, TRBJ2-1)
CASSPGNNEQFF

SEQ ID NO: 758157 - protein, 15 aa, Homo sapiens
  CDR3 for alpha chain variable domain of TCR clone 379079 (TRAV26-1, TRAJ29)
CIVRVEGSGNTPLVF

SEQ ID NO: 758158 - protein, 13 aa, Homo sapiens
  CDR3 for beta chain variable domain of TCR clone 379079 (TRBV10-3, TRBJ2-7)
CAIRAGGPHEQYF

SEQ ID NO: 758159 - protein, 17 aa, Homo sapiens
  CDR3 for alpha chain variable domain of TCR clone 379080 (TRAV8-6, TRAJ58)
CAVSSWVGETNGSRLTF

SEQ ID NO: 758160 - protein, 14 aa, Homo sapiens
  CDR3 for beta chain variable domain of TCR clone 379080 (TRBV20-1, TRBJ2-1)
CRAQIGGSANERFS

SEQ ID NO: 758161 - protein, 14 aa, Homo sapiens
  CDR3 for alpha chain variable domain of TCR clone 379081 (TRAV12-3, TRAJ56)
CAMSVTGANSKLTL

SEQ ID NO: 758162 - protein, 17 aa, Homo sapiens
  CDR3 for beta chain variable domain of TCR clone 379081 (TRBV20-1, TRBJ2-3)
GSASLLGRGGSADTQYF

SEQ ID NO: 758163 - protein, 16 aa, Homo sapiens
  CDR3 for alpha chain variable domain of TCR clone 379082 (TRAV26-1, TRAJ36)
FIVRVPDQTGANNLFF

SEQ ID NO: 758164 - protein, 14 aa, Homo sapiens
  CDR3 for beta chain variable domain of TCR clone 379082 (TRBV7-2, TRBJ2-7)
CASSLYPGRYEQYF

SEQ ID NO: 758165 - protein, 16 aa, Homo sapiens
  CDR3 for alpha chain variable domain of TCR clone 379083 (TRAV30, TRAJ24)
CGTEIVDADSWGKFQF

SEQ ID NO: 758166 - protein, 14 aa, Homo sapiens
  CDR3 for beta chain variable domain of TCR clone 379083 (TRBV12-5, TRBJ2-5)
CASGSRTHQGTQYC

SEQ ID NO: 758167 - protein, 11 aa, Homo sapiens
  CDR3 for alpha chain variable domain of TCR clone 379084 (TRAV12-3, TRAJ43)
CAMSVSNDMRF

SEQ ID NO: 758168 - protein, 15 aa, Homo sapiens
  CDR3 for beta chain variable domain of TCR clone 379084 (TRBV19, TRBJ1-5)
CASSIVWADNQPQHF

SEQ ID NO: 758169 - protein, 10 aa, Homo sapiens
  CDR3 for alpha chain variable domain of TCR clone 379085 (TRAV1-2, TRAJ20)
CACNDYKLSF

SEQ ID NO: 758170 - protein, 16 aa, Homo sapiens
  CDR3 for beta chain variable domain of TCR clone 379085 (TRBV20-1, TRBJ2-1)
CSARGLKQGMNNGQFF

SEQ ID NO: 758171 - protein, 13 aa, Homo sapiens
  CDR3 for alpha chain variable domain of TCR clone 379086 (TRAV3, TRAJ21)
CAVREPDFNKFYF

SEQ ID NO: 758172 - protein, 16 aa, Homo sapiens
  CDR3 for beta chain variable domain of TCR clone 379086 (TRBV18, TRBJ2-2)
CASSPGDRGDTGELFF

SEQ ID NO: 758173 - protein, 12 aa, Homo sapiens
  CDR3 for alpha chain variable domain of TCR clone 379087 (TRAV12-1, TRAJ40)
CVVYSGTYKYIF

SEQ ID NO: 758174 - protein, 13 aa, Homo sapiens
  CDR3 for beta chain variable domain of TCR clone 379087 (TRBV11-2, TRBJ2-1)
CASSSEAYNEQFF

SEQ ID NO: 758175 - protein, 16 aa, Homo sapiens
  CDR3 for alpha chain variable domain of TCR clone 379088 (TRAV16, TRAJ52)
CALSAAGGTSYGKLTF

SEQ ID NO: 758176 - protein, 19 aa, Homo sapiens
  CDR3 for beta chain variable domain of TCR clone 379088 (TRBV12-4, TRBJ1-3)
CASSFWKHHIFWRGKLAHC

SEQ ID NO: 758177 - protein, 13 aa, Homo sapiens
  CDR3 for alpha chain variable domain of TCR clone 379089 (TRAV38-1, TRAJ42)
CARWGGSQGNLIF

SEQ ID NO: 758178 - protein, 15 aa, Homo sapiens
  CDR3 for beta chain variable domain of TCR clone 379089 (TRBV7-9, TRBJ1-6)
CASSSPGRGNSPLHF

SEQ ID NO: 758179 - protein, 15 aa, Homo sapiens
  CDR3 for alpha chain variable domain of TCR clone 379090 (TRAV4, TRAJ36)
CLVGDRQTGANNLFF

SEQ ID NO: 758180 - protein, 15 aa, Homo sapiens
  CDR3 for beta chain variable domain of TCR clone 379090 (TRBV7-6, TRBJ2-1)
CASSSIAGEGNEQFF

SEQ ID NO: 758181 - protein, 14 aa, Homo sapiens
  CDR3 for alpha chain variable domain of TCR clone 379091 (TRAV13-1, TRAJ35)
CAASKGGFGNVLHG

SEQ ID NO: 758182 - protein, 13 aa, Homo sapiens
  CDR3 for beta chain variable domain of TCR clone 379091 (TRBV7-3, TRBJ1-1)
CAISQDWGAEAFF

SEQ ID NO: 758183 - protein, 13 aa, Homo sapiens
  CDR3 for alpha chain variable domain of TCR clone 379092 (TRAV12-2, TRAJ18)
CAVRGSTPGRLYF

SEQ ID NO: 758184 - protein, 18 aa, Homo sapiens
  CDR3 for beta chain variable domain of TCR clone 379092 (TRBV27, TRBJ2-3)
CASSLSGTSGRGTDTQYF

SEQ ID NO: 758185 - protein, 14 aa, Homo sapiens
  CDR3 for alpha chain variable domain of TCR clone 379093 (TRAV12-2, TRAJ13)
CAVKKTGGYQKVTV

SEQ ID NO: 758186 - protein, 13 aa, Homo sapiens
  CDR3 for beta chain variable domain of TCR clone 379093 (TRBV20-1, TRBJ2-3)
CSARLAGTDTQYF

SEQ ID NO: 758187 - protein, 13 aa, Homo sapiens
  CDR3 for alpha chain variable domain of TCR clone 379094 (TRAV23/DV6, TRAJ47)
CAASSQYGNKLIF

SEQ ID NO: 758188 - protein, 15 aa, Homo sapiens
  CDR3 for beta chain variable domain of TCR clone 379094 (TRBV7-3, TRBJ2-1)
CASSLDGNSYNEQFF

SEQ ID NO: 758189 - protein, 13 aa, Homo sapiens
  CDR3 for alpha chain variable domain of TCR clone 379095 (TRAV26-1, TRAJ33)
CIVRVEGNYQLIW

SEQ ID NO: 758190 - protein, 16 aa, Homo sapiens
  CDR3 for beta chain variable domain of TCR clone 379095 (TRBV15, TRBJ2-7)
CATRRDRGRRRGEQYF

SEQ ID NO: 758191 - protein, 18 aa, Homo sapiens
  CDR3 for alpha chain variable domain of TCR clone 379096 (TRAV13-1, TRAJ52)
CAAKNPNAGGTSYGKLTF

SEQ ID NO: 758192 - protein, 17 aa, Homo sapiens
  CDR3 for beta chain variable domain of TCR clone 379096 (TRBV4-1, TRBJ2-3)
CASSQSATGGPVDTQYF

SEQ ID NO: 758193 - protein, 12 aa, Homo sapiens
  CDR3 for alpha chain variable domain of TCR clone 379097 (TRAV2, TRAJ10)
CASTGGGNKLTF

SEQ ID NO: 758194 - protein, 15 aa, Homo sapiens
  CDR3 for beta chain variable domain of TCR clone 379097 (TRBV7-2, TRBJ2-1)
CASSSGLAGGNEQFF

SEQ ID NO: 758195 - protein, 11 aa, Homo sapiens
  CDR3 for alpha chain variable domain of TCR clone 379098 (TRAV2, TRAJ33)
CAVESNYQLIW

SEQ ID NO: 758196 - protein, 15 aa, Homo sapiens
  CDR3 for beta chain variable domain of TCR clone 379098 (TRBV19, TRBJ1-1)
CASTSRQIQDTEAFF

SEQ ID NO: 758197 - protein, 16 aa, Homo sapiens
  CDR3 for alpha chain variable domain of TCR clone 379099 (TRAV17, TRAJ53)
CATDALSGGSNYKLTL

SEQ ID NO: 758198 - protein, 12 aa, Homo sapiens
  CDR3 for beta chain variable domain of TCR clone 379099 (TRBV5-1, TRBJ2-7)
CAGSFRGYEQYF

SEQ ID NO: 758199 - protein, 15 aa, Homo sapiens
  CDR3 for alpha chain variable domain of TCR clone 379100 (TRAV3, TRAJ4)
CAVRDGTGGYNKLIF

SEQ ID NO: 758200 - protein, 17 aa, Homo sapiens
  CDR3 for beta chain variable domain of TCR clone 379100 (TRBV7-3, TRBJ2-2)
CASSLSGTSGGTGELFF

SEQ ID NO: 758201 - protein, 12 aa, Homo sapiens
  CDR3 for alpha chain variable domain of TCR clone 379101 (TRAV12-3, TRAJ20)
CAMVRGDYKLSF

SEQ ID NO: 758202 - protein, 13 aa, Homo sapiens
  CDR3 for beta chain variable domain of TCR clone 379101 (TRBV6-1, TRBJ1-1)
CASSRQGNTEAFF

SEQ ID NO: 758203 - protein, 12 aa, Homo sapiens
  CDR3 for alpha chain variable domain of TCR clone 379102 (TRAV12-3, TRAJ20)
CAMVRGGYKLSF

SEQ ID NO: 758204 - protein, 19 aa, Homo sapiens
  CDR3 for beta chain variable domain of TCR clone 379102 (TRBV25-1, TRBJ2-2)
CAILVYRVDRGRKTGELFF

SEQ ID NO: 758205 - protein, 13 aa, Homo sapiens
  CDR3 for alpha chain variable domain of TCR clone 379103 (TRAV13-2, TRAJ53)
CAGNMGSNYKLTF

SEQ ID NO: 758206 - protein, 13 aa, Homo sapiens
  CDR3 for beta chain variable domain of TCR clone 379103 (TRBV4-1, TRBJ2-2)
CASSQENTGELFF

SEQ ID NO: 758207 - protein, 14 aa, Homo sapiens
  CDR3 for alpha chain variable domain of TCR clone 379104 (TRAV13-1, TRAJ44)
CAAKATGTASKLTF

SEQ ID NO: 758208 - protein, 15 aa, Homo sapiens
  CDR3 for beta chain variable domain of TCR clone 379104 (TRBV3-1, TRBJ2-7)
CASSQVAGAQYEQYF

SEQ ID NO: 758209 - protein, 16 aa, Homo sapiens
  CDR3 for alpha chain variable domain of TCR clone 379105 (TRAV20, TRAJ38)
CAVQASNAGNNRKPIW

SEQ ID NO: 758210 - protein, 16 aa, Homo sapiens
  CDR3 for beta chain variable domain of TCR clone 379105 (TRBV7-8, TRBJ2-6)
CASRVVDSSGANVLTF

SEQ ID NO: 758211 - protein, 14 aa, Homo sapiens
  CDR3 for alpha chain variable domain of TCR clone 379106 (TRAV2, TRAJ37)
CAVDFTSNTGKLIF

SEQ ID NO: 758212 - protein, 14 aa, Homo sapiens
  CDR3 for beta chain variable domain of TCR clone 379106 (TRBV20-1, TRBJ2-7)
CSAKTGTGGYEQYF

SEQ ID NO: 758213 - protein, 15 aa, Homo sapiens
  CDR3 for alpha chain variable domain of TCR clone 379107 (TRAV17, TRAJ37)
CATDHGSSNTGKLIF

SEQ ID NO: 758214 - protein, 14 aa, Homo sapiens
  CDR3 for beta chain variable domain of TCR clone 379107 (TRBV7-2, TRBJ2-3)
CASGRTSGADTQYF

SEQ ID NO: 758215 - protein, 15 aa, Homo sapiens
  CDR3 for alpha chain variable domain of TCR clone 379108 (TRAV12-2, TRAJ9)
CAVNNERTGGFKPIF

SEQ ID NO: 758216 - protein, 14 aa, Homo sapiens
  CDR3 for beta chain variable domain of TCR clone 379108 (TRBV4-1, TRBJ1-4)
CASSQERKNEKLFF

SEQ ID NO: 758217 - protein, 14 aa, Homo sapiens
  CDR3 for alpha chain variable domain of TCR clone 379109 (TRAV13-1, TRAJ40)
CAARSTSGTYKYIF

SEQ ID NO: 758218 - protein, 14 aa, Homo sapiens
  CDR3 for beta chain variable domain of TCR clone 379109 (TRBV19, TRBJ2-1)
CASPTFVLSGEQFF

SEQ ID NO: 758219 - protein, 16 aa, Homo sapiens
  CDR3 for alpha chain variable domain of TCR clone 379110 (TRAV41, TRAJ45)
CAVPLYSGGGADGLTF

SEQ ID NO: 758220 - protein, 14 aa, Homo sapiens
  CDR3 for beta chain variable domain of TCR clone 379110 (TRBV7-2, TRBJ1-2)
CASSQTGSTYGYTF

SEQ ID NO: 758221 - protein, 13 aa, Homo sapiens
  CDR3 for alpha chain variable domain of TCR clone 379111 (TRAV36/DV7, TRAJ49)
CAVEANTGNQFCF

SEQ ID NO: 758222 - protein, 14 aa, Homo sapiens
  CDR3 for beta chain variable domain of TCR clone 379111 (TRBV20-1, TRBJ2-5)
CSASSGRAAETQYF

SEQ ID NO: 758223 - protein, 15 aa, Homo sapiens
  CDR3 for alpha chain variable domain of TCR clone 379112 (TRAV21, TRAJ24)
CAARSSTDSWGKLRV

SEQ ID NO: 758224 - protein, 13 aa, Homo sapiens
  CDR3 for beta chain variable domain of TCR clone 379112 (TRBV11-2, TRBJ2-5)
CASSSTGEETQYF

SEQ ID NO: 758225 - protein, 14 aa, Homo sapiens
  CDR3 for alpha chain variable domain of TCR clone 379113 (TRAV8-1, TRAJ34)
CAVNPSYNTDKLIF

SEQ ID NO: 758226 - protein, 15 aa, Homo sapiens
  CDR3 for beta chain variable domain of TCR clone 379113 (TRBV7-2, TRBJ2-3)
CASSLNLRDTDTQYF

SEQ ID NO: 758227 - protein, 14 aa, Homo sapiens
  CDR3 for alpha chain variable domain of TCR clone 379114 (TRAV12-3, TRAJ10)
SHLPLTGGGNKLTF

SEQ ID NO: 758228 - protein, 13 aa, Homo sapiens
  CDR3 for beta chain variable domain of TCR clone 379114 (TRBV7-9, TRBJ1-2)
CASSLNQNYGYTF

SEQ ID NO: 758229 - protein, 15 aa, Homo sapiens
  CDR3 for alpha chain variable domain of TCR clone 379115 (TRAV3, TRAJ22)
CAVRDRGGSARKLTF

SEQ ID NO: 758230 - protein, 18 aa, Homo sapiens
  CDR3 for beta chain variable domain of TCR clone 379115 (TRBV28, TRBJ2-1)
CTSRSTSGRANSYNEQFF

SEQ ID NO: 758231 - protein, 12 aa, Homo sapiens
  CDR3 for alpha chain variable domain of TCR clone 379116 (TRAV12-3, TRAJ42)
CAPGGSQGNLIF

SEQ ID NO: 758232 - protein, 13 aa, Homo sapiens
  CDR3 for beta chain variable domain of TCR clone 379116 (TRBV5-7, TRBJ2-6)
CASTSSGANVLTF

SEQ ID NO: 758233 - protein, 13 aa, Homo sapiens
  CDR3 for alpha chain variable domain of TCR clone 379117 (TRAV17, TRAJ54)
CATVIQGAQKLVF

SEQ ID NO: 758234 - protein, 15 aa, Homo sapiens
  CDR3 for beta chain variable domain of TCR clone 379117 (TRBV5-1, TRBJ2-7)
CASSPQGRPLDEQYF

SEQ ID NO: 758235 - protein, 14 aa, Homo sapiens
  CDR3 for alpha chain variable domain of TCR clone 379118 (TRAV12-3, TRAJ9)
CAMSPNTGGFKPIF

SEQ ID NO: 758236 - protein, 12 aa, Homo sapiens
  CDR3 for beta chain variable domain of TCR clone 379118 (TRBV19, TRBJ1-5)
CASRIAQQPQHF

SEQ ID NO: 758237 - protein, 12 aa, Homo sapiens
  CDR3 for alpha chain variable domain of TCR clone 379119 (TRAV1-1, TRAJ9)
CAVDTGGFKTIF

SEQ ID NO: 758238 - protein, 15 aa, Homo sapiens
  CDR3 for beta chain variable domain of TCR clone 379119 (TRBV6-1, TRBJ2-3)
CASSERGGITDKQYF

SEQ ID NO: 758239 - protein, 14 aa, Homo sapiens
  CDR3 for alpha chain variable domain of TCR clone 379120 (TRAV1-2, TRAJ8)
CAVIEDTGFQKLVF

SEQ ID NO: 758240 - protein, 14 aa, Homo sapiens
  CDR3 for beta chain variable domain of TCR clone 379120 (TRBV23-1, TRBJ2-5)
CASSFLRSQETQYF

SEQ ID NO: 758241 - protein, 14 aa, Homo sapiens
  CDR3 for alpha chain variable domain of TCR clone 379121 (TRAV4, TRAJ12)
CLVGDADSSYKLIF

SEQ ID NO: 758242 - protein, 13 aa, Homo sapiens
  CDR3 for beta chain variable domain of TCR clone 379121 (TRBV7-3, TRBJ1-1)
CASSQDWGAEAFF

SEQ ID NO: 758243 - protein, 14 aa, Homo sapiens
  CDR3 for alpha chain variable domain of TCR clone 379122 (TRAV8-3, TRAJ9)
CAVVHNTGGFKTIF

SEQ ID NO: 758244 - protein, 14 aa, Homo sapiens
  CDR3 for beta chain variable domain of TCR clone 379122 (TRBV7-3, TRBJ2-2)
CASSAGGYTGELFF

SEQ ID NO: 758245 - protein, 11 aa, Homo sapiens
  CDR3 for alpha chain variable domain of TCR clone 379123 (TRAV12-1, TRAJ21)
CVVNNFNKFYF

SEQ ID NO: 758246 - protein, 17 aa, Homo sapiens
  CDR3 for beta chain variable domain of TCR clone 379123 (TRBV7-8, TRBJ2-1)
CASSPPTGTLAYKEQFF

SEQ ID NO: 758247 - protein, 15 aa, Homo sapiens
  CDR3 for alpha chain variable domain of TCR clone 379124 (TRAV27, TRAJ38)
CAARRNAGNNRKLIW

SEQ ID NO: 758248 - protein, 17 aa, Homo sapiens
  CDR3 for beta chain variable domain of TCR clone 379124 (TRBV7-3, TRBJ2-3)
CASSLMKGMRGADTQYF

SEQ ID NO: 758249 - protein, 13 aa, Homo sapiens
  CDR3 for alpha chain variable domain of TCR clone 379125 (TRAV21, TRAJ37)
CAVSSGNTGKLIF

SEQ ID NO: 758250 - protein, 15 aa, Homo sapiens
  CDR3 for beta chain variable domain of TCR clone 379125 (TRBV12-4, TRBJ1-2)
CVSSFVDRGNYGYTF

SEQ ID NO: 758251 - protein, 16 aa, Homo sapiens
  CDR3 for alpha chain variable domain of TCR clone 379126 (TRAV8-2, TRAJ48)
CVVSDVSNFGNEKLTF

SEQ ID NO: 758252 - protein, 17 aa, Homo sapiens
  CDR3 for beta chain variable domain of TCR clone 379126 (TRBV7-9, TRBJ2-3)
CASSPTVAGDLTDTQYF

SEQ ID NO: 758253 - protein, 15 aa, Homo sapiens
  CDR3 for alpha chain variable domain of TCR clone 379127 (TRAV17, TRAJ23)
CATDAEDNQGGKLIF

SEQ ID NO: 758254 - protein, 17 aa, Homo sapiens
  CDR3 for beta chain variable domain of TCR clone 379127 (TRBV13, TRBJ2-3)
CASSLSRVAGERNTQYF

SEQ ID NO: 758255 - protein, 12 aa, Homo sapiens
  CDR3 for alpha chain variable domain of TCR clone 379128 (TRAV13-2, TRAJ23)
CAERNRGGKLIF

SEQ ID NO: 758256 - protein, 14 aa, Homo sapiens
  CDR3 for beta chain variable domain of TCR clone 379128 (TRBV20-1, TRBJ1-1)
CSAQTRIGGTEAFF

SEQ ID NO: 758257 - protein, 15 aa, Homo sapiens
  CDR3 for alpha chain variable domain of TCR clone 379129 (TRAV36/DV7, TRAJ53)
CAVEGSGGCNYKLTF

SEQ ID NO: 758258 - protein, 16 aa, Homo sapiens
  CDR3 for beta chain variable domain of TCR clone 379129 (TRBV27, TRBJ2-2)
CASSLSGFWVTGELFF

SEQ ID NO: 758259 - protein, 14 aa, Homo sapiens
  CDR3 for alpha chain variable domain of TCR clone 379130 (TRAV8-6, TRAJ12)
CAVKAADSSYKLIF

SEQ ID NO: 758260 - protein, 14 aa, Homo sapiens
  CDR3 for beta chain variable domain of TCR clone 379130 (TRBV11-2, TRBJ2-3)
CASSLGRGTDTQYF

SEQ ID NO: 758261 - protein, 15 aa, Homo sapiens
  CDR3 for alpha chain variable domain of TCR clone 379131 (TRAV8-6, TRAJ10)
CAVSDQVGGGNKLTF

SEQ ID NO: 758262 - protein, 14 aa, Homo sapiens
  CDR3 for beta chain variable domain of TCR clone 379131 (TRBV4-1, TRBJ2-2)
CASSQAVNTGELFF

SEQ ID NO: 758263 - protein, 15 aa, Homo sapiens
  CDR3 for alpha chain variable domain of TCR clone 379132 (TRAV8-1, TRAJ6)
CAVNTPPGGSYIPTF

SEQ ID NO: 758264 - protein, 14 aa, Homo sapiens
  CDR3 for beta chain variable domain of TCR clone 379132 (TRBV12-4, TRBJ2-1)
CASSFGQGASEQFF

SEQ ID NO: 758265 - protein, 15 aa, Homo sapiens
  CDR3 for alpha chain variable domain of TCR clone 379133 (TRAV17, TRAJ57)
CATGPSQGGSEKLVF

SEQ ID NO: 758266 - protein, 18 aa, Homo sapiens
  CDR3 for beta chain variable domain of TCR clone 379133 (TRBV7-9, TRBJ2-7)
CASSLTTSGSRTWHEQYF

SEQ ID NO: 758267 - protein, 13 aa, Homo sapiens
  CDR3 for alpha chain variable domain of TCR clone 379134 (TRAV12-2, TRAJ39)
CAVNNNAGNMLTF

SEQ ID NO: 758268 - protein, 13 aa, Homo sapiens
  CDR3 for beta chain variable domain of TCR clone 379134 (TRBV20-1, TRBJ2-2)
CSASAAGTGELFF

SEQ ID NO: 758269 - protein, 16 aa, Homo sapiens
  CDR3 for alpha chain variable domain of TCR clone 379135 (TRAV3, TRAJ6)
CAVRDGMGRRKRHTYI

SEQ ID NO: 758270 - protein, 15 aa, Homo sapiens
  CDR3 for beta chain variable domain of TCR clone 379135 (TRBV5-1, TRBJ2-7)
CASSLGDFTTYEQYF

SEQ ID NO: 758271 - protein, 18 aa, Homo sapiens
  CDR3 for alpha chain variable domain of TCR clone 379136 (TRAV13-1, TRAJ52)
CAAKNPNAGGTRYGKLTF

SEQ ID NO: 758272 - protein, 15 aa, Homo sapiens
  CDR3 for beta chain variable domain of TCR clone 379136 (TRBV28, TRBJ2-3)
CASSPDRQGANTQYF

SEQ ID NO: 758273 - protein, 11 aa, Homo sapiens
  CDR3 for alpha chain variable domain of TCR clone 379137 (TRAV2, TRAJ13)
CASGGYQKVTF

SEQ ID NO: 758274 - protein, 15 aa, Homo sapiens
  CDR3 for beta chain variable domain of TCR clone 379137 (TRBV6-1, TRBJ2-2)
CASSRLRGYTGELFF

SEQ ID NO: 758275 - protein, 13 aa, Homo sapiens
  CDR3 for alpha chain variable domain of TCR clone 379138 (TRAV12-1, TRAJ11)
CVVNRAGYSTLTF

SEQ ID NO: 758276 - protein, 13 aa, Homo sapiens
  CDR3 for beta chain variable domain of TCR clone 379138 (TRBV23-1, TRBJ1-4)
CASRGKFNEKLFF

SEQ ID NO: 758277 - protein, 15 aa, Homo sapiens
  CDR3 for alpha chain variable domain of TCR clone 379139 (TRAV3, TRAJ45)
CAVRTPWGGADGLTF

SEQ ID NO: 758278 - protein, 12 aa, Homo sapiens
  CDR3 for beta chain variable domain of TCR clone 379139 (TRBV6-3, TRBJ2-7)
CASSEPGFEQYF

SEQ ID NO: 758279 - protein, 14 aa, Homo sapiens
  CDR3 for alpha chain variable domain of TCR clone 379140 (TRAV26-1, TRAJ31)
CIALPPNNNARLTF

SEQ ID NO: 758280 - protein, 16 aa, Homo sapiens
  CDR3 for beta chain variable domain of TCR clone 379140 (TRBV10-2, TRBJ2-7)
CASSESPGSSGSEQYF

SEQ ID NO: 758281 - protein, 11 aa, Homo sapiens
  CDR3 for alpha chain variable domain of TCR clone 379141 (TRAV2, TRAJ33)
CAVDSNYQLIC

SEQ ID NO: 758282 - protein, 13 aa, Homo sapiens
  CDR3 for beta chain variable domain of TCR clone 379141 (TRBV4-1, TRBJ2-2)
CASSQENTGELFF

SEQ ID NO: 758283 - protein, 14 aa, Homo sapiens
  CDR3 for alpha chain variable domain of TCR clone 379142 (TRAV12-3, TRAJ12)
CAMSEVDSSYKLNF

SEQ ID NO: 758284 - protein, 12 aa, Homo sapiens
  CDR3 for beta chain variable domain of TCR clone 379142 (TRBV18, TRBJ1-4)
CASSPSREKLFF

SEQ ID NO: 758285 - protein, 13 aa, Homo sapiens
  CDR3 for alpha chain variable domain of TCR clone 379143 (TRAV14/DV4, TRAJ23)
CAMREVKGGKLIF

SEQ ID NO: 758286 - protein, 12 aa, Homo sapiens
  CDR3 for beta chain variable domain of TCR clone 379143 (TRBV11-2, TRBJ2-1)
CASSPGNNEQFF

SEQ ID NO: 758287 - protein, 16 aa, Homo sapiens
  CDR3 for alpha chain variable domain of TCR clone 379144 (TRAV14/DV4, TRAJ39)
CAMRGAYNNAGNMLTF

SEQ ID NO: 758288 - protein, 14 aa, Homo sapiens
  CDR3 for beta chain variable domain of TCR clone 379144 (TRBV7-9, TRBJ2-5)
CASSPAQDQETQYF

SEQ ID NO: 758289 - protein, 14 aa, Homo sapiens
  CDR3 for alpha chain variable domain of TCR clone 379145 (TRAV17, TRAJ57)
CATDPQGGSENLVF

SEQ ID NO: 758290 - protein, 14 aa, Homo sapiens
  CDR3 for beta chain variable domain of TCR clone 379145 (TRBV25-1, TRBJ1-1)
CASTHRGGNTEAFF

SEQ ID NO: 758291 - protein, 16 aa, Homo sapiens
  CDR3 for alpha chain variable domain of TCR clone 379146 (TRAV3, TRAJ37)
CAVRGKGSGNTGKLIF

SEQ ID NO: 758292 - protein, 14 aa, Homo sapiens
  CDR3 for beta chain variable domain of TCR clone 379146 (TRBV18, TRBJ2-7)
CASSPRGGAYEQYF

SEQ ID NO: 758293 - protein, 16 aa, Homo sapiens
  CDR3 for alpha chain variable domain of TCR clone 379147 (TRAV21, TRAJ33)
CAVSPASMDSNYQLIW

SEQ ID NO: 758294 - protein, 17 aa, Homo sapiens
  CDR3 for beta chain variable domain of TCR clone 379147 (TRBV2, TRBJ1-4)
CASSKRELTQGEEELFF

SEQ ID NO: 758295 - protein, 13 aa, Homo sapiens
  CDR3 for alpha chain variable domain of TCR clone 379148 (TRAV29/DV5, TRAJ58)
CAGEETSGSRLTF

SEQ ID NO: 758296 - protein, 15 aa, Homo sapiens
  CDR3 for beta chain variable domain of TCR clone 379148 (TRBV11-2, TRBJ1-6)
CASTGVGTAVSPLHF

SEQ ID NO: 758297 - protein, 13 aa, Homo sapiens
  CDR3 for alpha chain variable domain of TCR clone 379149 (TRAV12-3, TRAJ40)
CAMSARGTYKYIF

SEQ ID NO: 758298 - protein, 16 aa, Homo sapiens
  CDR3 for beta chain variable domain of TCR clone 379149 (TRBV7-6, TRBJ2-3)
CASSPLAGGSTDTQYF

SEQ ID NO: 758299 - protein, 14 aa, Homo sapiens
  CDR3 for alpha chain variable domain of TCR clone 379150 (TRAV12-2, TRAJ9)
CAVNLNTGGFKTIF

SEQ ID NO: 758300 - protein, 17 aa, Homo sapiens
  CDR3 for beta chain variable domain of TCR clone 379150 (TRBV20-1, TRBJ2-2)
SSASRQVGQGYTGELFS

SEQ ID NO: 758301 - protein, 16 aa, Homo sapiens
  CDR3 for alpha chain variable domain of TCR clone 379151 (TRAV3, TRAJ10)
CAVRDMRAGGGNKLTF

SEQ ID NO: 758302 - protein, 16 aa, Homo sapiens
  CDR3 for beta chain variable domain of TCR clone 379151 (TRBV4-1, TRBJ2-5)
CASSQEGTSGGRTQYF

SEQ ID NO: 758303 - protein, 13 aa, Homo sapiens
  CDR3 for alpha chain variable domain of TCR clone 379152 (TRAV22, TRAJ29)
CAVGGSGNTPLVF

SEQ ID NO: 758304 - protein, 13 aa, Homo sapiens
  CDR3 for beta chain variable domain of TCR clone 379152 (TRBV19, TRBJ2-7)
CANRKAGGSEQYF

SEQ ID NO: 758305 - protein, 14 aa, Homo sapiens
  CDR3 for alpha chain variable domain of TCR clone 379153 (TRAV1-2, TRAJ39)
CAVRAPQAGNMLTF

SEQ ID NO: 758306 - protein, 15 aa, Homo sapiens
  CDR3 for beta chain variable domain of TCR clone 379153 (TRBV6-1, TRBJ2-3)
CASSERGGITDTQYF

SEQ ID NO: 758307 - protein, 14 aa, Homo sapiens
  CDR3 for alpha chain variable domain of TCR clone 379154 (TRAV35, TRAJ22)
CAGLRPGSARQLTF

SEQ ID NO: 758308 - protein, 14 aa, Homo sapiens
  CDR3 for beta chain variable domain of TCR clone 379154 (TRBV12-4, TRBJ1-1)
CASRPGQGRTEAFF

SEQ ID NO: 758309 - protein, 13 aa, Homo sapiens
  CDR3 for alpha chain variable domain of TCR clone 379155 (TRAV2, TRAJ40)
CAVVTSGTYKYIF

SEQ ID NO: 758310 - protein, 14 aa, Homo sapiens
  CDR3 for beta chain variable domain of TCR clone 379155 (TRBV19, TRBJ1-5)
CASSAPDSFLSQHF

SEQ ID NO: 758311 - protein, 11 aa, Homo sapiens
  CDR3 for alpha chain variable domain of TCR clone 379156 (TRAV1-2, TRAJ20)
CAVSNDYKLSF

SEQ ID NO: 758312 - protein, 18 aa, Homo sapiens
  CDR3 for beta chain variable domain of TCR clone 379156 (TRBV7-8, TRBJ2-1)
CASSPAEGLAGGLNEQFF

SEQ ID NO: 758313 - protein, 14 aa, Homo sapiens
  CDR3 for alpha chain variable domain of TCR clone 379157 (TRAV14/DV4, TRAJ54)
CAMREAPGAQKLVF

SEQ ID NO: 758314 - protein, 15 aa, Homo sapiens
  CDR3 for beta chain variable domain of TCR clone 379157 (TRBV7-3, TRBJ2-1)
CQQLQTSGRYNEQFF

SEQ ID NO: 758315 - protein, 15 aa, Homo sapiens
  CDR3 for alpha chain variable domain of TCR clone 379158 (TRAV2, TRAJ29)
CAVDLARSGNTPLVF

SEQ ID NO: 758316 - protein, 16 aa, Homo sapiens
  CDR3 for beta chain variable domain of TCR clone 379158 (TRBV12-5, TRBJ2-5)
CASGPRTSGNQETQYF

SEQ ID NO: 758317 - protein, 14 aa, Homo sapiens
  CDR3 for alpha chain variable domain of TCR clone 379159 (TRAV3, TRAJ9)
CAVRLTTGGFKTIF

SEQ ID NO: 758318 - protein, 14 aa, Homo sapiens
  CDR3 for beta chain variable domain of TCR clone 379159 (TRBV20-1, TRBJ1-1)
CSAQTRIGGTEAFF

SEQ ID NO: 758319 - protein, 14 aa, Homo sapiens
  CDR3 for alpha chain variable domain of TCR clone 379160 (TRAV12-2, TRAJ13)
CAVKKTGGYQKVTF

SEQ ID NO: 758320 - protein, 14 aa, Homo sapiens
  CDR3 for beta chain variable domain of TCR clone 379160 (TRBV6-1, TRBJ1-3)
CASVKGGGGNTIYF

SEQ ID NO: 758321 - protein, 16 aa, Homo sapiens
  CDR3 for alpha chain variable domain of TCR clone 379161 (TRAV30, TRAJ24)
CGTEIVDADSCGKFQF

SEQ ID NO: 758322 - protein, 13 aa, Homo sapiens
  CDR3 for beta chain variable domain of TCR clone 379161 (TRBV20-1, TRBJ1-1)
CSARVGGNTEAFF

SEQ ID NO: 758323 - protein, 14 aa, Homo sapiens
  CDR3 for alpha chain variable domain of TCR clone 379162 (TRAV13-1, TRAJ16)
CAAAYFFRWPEAAL

SEQ ID NO: 758324 - protein, 16 aa, Homo sapiens
  CDR3 for beta chain variable domain of TCR clone 379162 (TRBV19, TRBJ2-3)
CASSPGAASRTDTQYF

SEQ ID NO: 758325 - protein, 14 aa, Homo sapiens
  CDR3 for alpha chain variable domain of TCR clone 379163 (TRAV8-6, TRAJ53)
CAALVLGSNYKLTF

SEQ ID NO: 758326 - protein, 15 aa, Homo sapiens
  CDR3 for beta chain variable domain of TCR clone 379163 (TRBV11-3, TRBJ1-3)
CASSLSGTSGNTIYF

SEQ ID NO: 758327 - protein, 14 aa, Homo sapiens
  CDR3 for alpha chain variable domain of TCR clone 379164 (TRAV12-2, TRAJ13)
CAVKTTGGYQKVTF

SEQ ID NO: 758328 - protein, 23 aa, Homo sapiens
  CDR3 for beta chain variable domain of TCR clone 379164 (TRBV4-2, TRBJ2-3)
CASSQDPPRASSISGGRGDTQYF

SEQ ID NO: 758329 - protein, 16 aa, Homo sapiens
  CDR3 for alpha chain variable domain of TCR clone 379165 (TRAV2, TRAJ26)
STVLGPPGDYGQNFVF

SEQ ID NO: 758330 - protein, 13 aa, Homo sapiens
  CDR3 for beta chain variable domain of TCR clone 379165 (TRBV7-9, TRBJ1-2)
CASSLKQNYGYTF

SEQ ID NO: 758331 - protein, 14 aa, Homo sapiens
  CDR3 for alpha chain variable domain of TCR clone 379166 (TRAV1-2, TRAJ8)
CAVREDTGFQNLVF

SEQ ID NO: 758332 - protein, 16 aa, Homo sapiens
  CDR3 for beta chain variable domain of TCR clone 379166 (TRBV7-3, TRBJ2-2)
CASSLKRGTLSGELFF

SEQ ID NO: 758333 - protein, 11 aa, Homo sapiens
  CDR3 for alpha chain variable domain of TCR clone 379167 (TRAV13-1, TRAJ30)
CAASRDDKIIF

SEQ ID NO: 758334 - protein, 21 aa, Homo sapiens
  CDR3 for beta chain variable domain of TCR clone 379167 (TRBV15, TRBJ2-1)
AWGTQPCTCVPPAEVDTARFF

SEQ ID NO: 758335 - protein, 14 aa, Homo sapiens
  CDR3 for alpha chain variable domain of TCR clone 379168 (TRAV1-2, TRAJ16)
CAVNRYSDGQKLLF

SEQ ID NO: 758336 - protein, 14 aa, Homo sapiens
  CDR3 for beta chain variable domain of TCR clone 379168 (TRBV7-9, TRBJ1-4)
CAITEGEANEKLFF

SEQ ID NO: 758337 - protein, 16 aa, Homo sapiens
  CDR3 for alpha chain variable domain of TCR clone 379169 (TRAV1-2, TRAJ10)
CAVRGVLTGGGNKLTF

SEQ ID NO: 758338 - protein, 14 aa, Homo sapiens
  CDR3 for beta chain variable domain of TCR clone 379169 (TRBV7-8, TRBJ1-2)
CASSPDSLPYGYTF

SEQ ID NO: 758339 - protein, 12 aa, Homo sapiens
  CDR3 for alpha chain variable domain of TCR clone 379170 (TRAV16, TRAJ9)
YALSSGGFKTIF

SEQ ID NO: 758340 - protein, 14 aa, Homo sapiens
  CDR3 for beta chain variable domain of TCR clone 379170 (TRBV7-9, TRBJ2-1)
CASSSAGPYNEQFF

SEQ ID NO: 758341 - protein, 16 aa, Homo sapiens
  CDR3 for alpha chain variable domain of TCR clone 379171 (TRAV12-3, TRAJ53)
CAMSPGRGGINYKLTF

SEQ ID NO: 758342 - protein, 16 aa, Homo sapiens
  CDR3 for beta chain variable domain of TCR clone 379171 (TRBV4-2, TRBJ1-1)
CASSQAGFGMNTEAFF

SEQ ID NO: 758343 - protein, 14 aa, Homo sapiens
  CDR3 for alpha chain variable domain of TCR clone 379172 (TRAV1-2, TRAJ33)
CAVRAPDSNYQLIW

SEQ ID NO: 758344 - protein, 20 aa, Homo sapiens
  CDR3 for beta chain variable domain of TCR clone 379172 (TRBV7-8, TRBJ2-2)
CASSHLFPGPTIHITGELFF

SEQ ID NO: 758345 - protein, 15 aa, Homo sapiens
  CDR3 for alpha chain variable domain of TCR clone 379173 (TRAV1-1, TRAJ23)
CAVREGDNQGGKLIF

SEQ ID NO: 758346 - protein, 18 aa, Homo sapiens
  CDR3 for beta chain variable domain of TCR clone 379173 (TRBV11-2, TRBJ2-6)
CASSLNPFLGTGANVLTF

SEQ ID NO: 758347 - protein, 14 aa, Homo sapiens
  CDR3 for alpha chain variable domain of TCR clone 379174 (TRAV38-2/DV8, TRAJ32)
CAYRSGRATNNLIF

SEQ ID NO: 758348 - protein, 18 aa, Homo sapiens
  CDR3 for beta chain variable domain of TCR clone 379174 (TRBV23-1, TRBJ2-3)
CASSHTSGTRRSTDTQYF

SEQ ID NO: 758349 - protein, 14 aa, Homo sapiens
  CDR3 for alpha chain variable domain of TCR clone 379175 (TRAV38-1, TRAJ43)
CAFMKHNNNNDMRF

SEQ ID NO: 758350 - protein, 16 aa, Homo sapiens
  CDR3 for beta chain variable domain of TCR clone 379175 (TRBV4-1, TRBJ2-7)
CASSQEWTSGPLEQYF

SEQ ID NO: 758351 - protein, 15 aa, Homo sapiens
  CDR3 for alpha chain variable domain of TCR clone 379176 (TRAV27, TRAJ38)
CAARRNAGHNRKLIW

SEQ ID NO: 758352 - protein, 13 aa, Homo sapiens
  CDR3 for beta chain variable domain of TCR clone 379176 (TRBV7-3, TRBJ2-1)
CASSLDSYNEQFF

SEQ ID NO: 758353 - protein, 13 aa, Homo sapiens
  CDR3 for alpha chain variable domain of TCR clone 379177 (TRAV21, TRAJ15)
CAMANQAGTALIF

SEQ ID NO: 758354 - protein, 14 aa, Homo sapiens
  CDR3 for beta chain variable domain of TCR clone 379177 (TRBV27, TRBJ2-2)
CASSLGAATGELFF

SEQ ID NO: 758355 - protein, 13 aa, Homo sapiens
  CDR3 for alpha chain variable domain of TCR clone 379178 (TRAV27, TRAJ56)
CAGLTGANRKLTF

SEQ ID NO: 758356 - protein, 12 aa, Homo sapiens
  CDR3 for beta chain variable domain of TCR clone 379178 (TRBV11-2, TRBJ2-2)
CASSLPTGELFF

SEQ ID NO: 758357 - protein, 12 aa, Homo sapiens
  CDR3 for alpha chain variable domain of TCR clone 379179 (TRAV13-1, TRAJ21)
CAAKEGFNKFYF

SEQ ID NO: 758358 - protein, 14 aa, Homo sapiens
  CDR3 for beta chain variable domain of TCR clone 379179 (TRBV25-1, TRBJ2-4)
CASSRNSAKNIQYF

SEQ ID NO: 758359 - protein, 16 aa, Homo sapiens
  CDR3 for alpha chain variable domain of TCR clone 379180 (TRAV38-1, TRAJ37)
CAFKGDGPSNTGKLIF

SEQ ID NO: 758360 - protein, 16 aa, Homo sapiens
  CDR3 for beta chain variable domain of TCR clone 379180 (TRBV6-4, TRBJ1-4)
CASSETGQDPNEKLFF

SEQ ID NO: 758361 - protein, 15 aa, Homo sapiens
  CDR3 for alpha chain variable domain of TCR clone 379181 (TRAV13-1, TRAJ32)
CAASIYGGATNKIIF

SEQ ID NO: 758362 - protein, 14 aa, Homo sapiens
  CDR3 for beta chain variable domain of TCR clone 379181 (TRBV7-9, TRBJ2-1)
CASSLASGSNEQFF

SEQ ID NO: 758363 - protein, 15 aa, Homo sapiens
  CDR3 for alpha chain variable domain of TCR clone 379182 (TRAV20, TRAJ6)
CAVRLQSGGSYIPAF

SEQ ID NO: 758364 - protein, 14 aa, Homo sapiens
  CDR3 for beta chain variable domain of TCR clone 379182 (TRBV12-4, TRBJ2-7)
CASSASGGWYEQYF

SEQ ID NO: 758365 - protein, 14 aa, Homo sapiens
  CDR3 for alpha chain variable domain of TCR clone 379183 (TRAV12-1, TRAJ12)
CVVNGRDSSYKLIF

SEQ ID NO: 758366 - protein, 16 aa, Homo sapiens
  CDR3 for beta chain variable domain of TCR clone 379183 (TRBV19, TRBJ2-1)
CASSIQAGGSYNEQFF

SEQ ID NO: 758367 - protein, 12 aa, Homo sapiens
  CDR3 for alpha chain variable domain of TCR clone 379184 (TRAV38-2/DV8, TRAJ40)
CAHTSGTYKYIF

SEQ ID NO: 758368 - protein, 15 aa, Homo sapiens
  CDR3 for beta chain variable domain of TCR clone 379184 (TRBV7-3, TRBJ2-1)
CASSPTGGGEVEQFF

SEQ ID NO: 758369 - protein, 11 aa, Homo sapiens
  CDR3 for alpha chain variable domain of TCR clone 379185 (TRAV12-2, TRAJ43)
CASPIGNDMRF

SEQ ID NO: 758370 - protein, 12 aa, Homo sapiens
  CDR3 for beta chain variable domain of TCR clone 379185 (TRBV20-1, TRBJ2-7)
CSAGRKVGEQYF

SEQ ID NO: 758371 - protein, 13 aa, Homo sapiens
  CDR3 for alpha chain variable domain of TCR clone 379186 (TRAV3, TRAJ27)
CAVRPLGAGKSTF

SEQ ID NO: 758372 - protein, 15 aa, Homo sapiens
  CDR3 for beta chain variable domain of TCR clone 379186 (TRBV27, TRBJ1-5)
CASSLGTGFDQPQHF

SEQ ID NO: 758373 - protein, 16 aa, Homo sapiens
  CDR3 for alpha chain variable domain of TCR clone 379187 (TRAV38-2/DV8, TRAJ47)
CAYRSAIMAYGNKLVF

SEQ ID NO: 758374 - protein, 14 aa, Homo sapiens
  CDR3 for beta chain variable domain of TCR clone 379187 (TRBV19, TRBJ2-7)
CASSIFAGTYEQYF

SEQ ID NO: 758375 - protein, 14 aa, Homo sapiens
  CDR3 for alpha chain variable domain of TCR clone 379188 (TRAV26-1, TRAJ48)
CIVRVPFGNEKLTF

SEQ ID NO: 758376 - protein, 16 aa, Homo sapiens
  CDR3 for beta chain variable domain of TCR clone 379188 (TRBV18, TRBJ2-1)
CASSPYISIRGDEQFF

SEQ ID NO: 758377 - protein, 13 aa, Homo sapiens
  CDR3 for alpha chain variable domain of TCR clone 379189 (TRAV13-1, TRAJ40)
CAARTSGTYKYIF

SEQ ID NO: 758378 - protein, 13 aa, Homo sapiens
  CDR3 for beta chain variable domain of TCR clone 379189 (TRBV7-3, TRBJ1-1)
CASSQDWGAEAFF

SEQ ID NO: 758379 - protein, 16 aa, Homo sapiens
  CDR3 for alpha chain variable domain of TCR clone 379190 (TRAV30, TRAJ24)
CGTEIVDADSWGNSSL

SEQ ID NO: 758380 - protein, 19 aa, Homo sapiens
  CDR3 for beta chain variable domain of TCR clone 379190 (TRBV19, TRBJ2-5)
CASSIGQVTDFFLGETQYF

SEQ ID NO: 758381 - protein, 14 aa, Homo sapiens
  CDR3 for alpha chain variable domain of TCR clone 379191 (TRAV29/DV5, TRAJ44)
CAAFLVGTASKLTF

SEQ ID NO: 758382 - protein, 16 aa, Homo sapiens
  CDR3 for beta chain variable domain of TCR clone 379191 (TRBV19, TRBJ1-5)
CASSIQGGYSNQLQHF

SEQ ID NO: 758383 - protein, 18 aa, Homo sapiens
  CDR3 for alpha chain variable domain of TCR clone 379192 (TRAV29/DV5, TRAJ52)
CAAGFRGAGGTSYGKLTF

SEQ ID NO: 758384 - protein, 16 aa, Homo sapiens
  CDR3 for beta chain variable domain of TCR clone 379192 (TRBV7-3, TRBJ2-2)
CASSLKRGTLSGELFV

SEQ ID NO: 758385 - protein, 14 aa, Homo sapiens
  CDR3 for alpha chain variable domain of TCR clone 379193 (TRAV2, TRAJ37)
RAVDFTSNTGTLIF

SEQ ID NO: 758386 - protein, 15 aa, Homo sapiens
  CDR3 for beta chain variable domain of TCR clone 379193 (TRBV20-1, TRBJ1-1)
CSASRGVTGNTEAFF

SEQ ID NO: 758387 - protein, 14 aa, Homo sapiens
  CDR3 for alpha chain variable domain of TCR clone 379194 (TRAV12-1, TRAJ42)
CVVIYGGSQVNLIF

SEQ ID NO: 758388 - protein, 13 aa, Homo sapiens
  CDR3 for beta chain variable domain of TCR clone 379194 (TRBV18, TRBJ2-5)
CASSPPGKETQYF

SEQ ID NO: 758389 - protein, 14 aa, Homo sapiens
  CDR3 for alpha chain variable domain of TCR clone 379195 (TRAV2, TRAJ9)
CAVEDRSGGFKTIF

SEQ ID NO: 758390 - protein, 13 aa, Homo sapiens
  CDR3 for beta chain variable domain of TCR clone 379195 (TRBV7-3, TRBJ2-5)
CARSFRGGETPYF

SEQ ID NO: 758391 - protein, 14 aa, Homo sapiens
  CDR3 for alpha chain variable domain of TCR clone 379196 (TRAV12-3, TRAJ10)
SHLPLTGGGNKLTF

SEQ ID NO: 758392 - protein, 13 aa, Homo sapiens
  CDR3 for beta chain variable domain of TCR clone 379196 (TRBV12-4, TRBJ1-1)
CASSPGTGFEALF

SEQ ID NO: 758393 - protein, 14 aa, Homo sapiens
  CDR3 for alpha chain variable domain of TCR clone 379197 (TRAV12-2, TRAJ13)
CAVKKTGCYQKVTF

SEQ ID NO: 758394 - protein, 15 aa, Homo sapiens
  CDR3 for beta chain variable domain of TCR clone 379197 (TRBV3-1, TRBJ2-7)
CASSQVRQGAYEQYF

SEQ ID NO: 758395 - protein, 12 aa, Homo sapiens
  CDR3 for alpha chain variable domain of TCR clone 379198 (TRAV2, TRAJ33)
CAFMDSNYQLIW

SEQ ID NO: 758396 - protein, 14 aa, Homo sapiens
  CDR3 for beta chain variable domain of TCR clone 379198 (TRBV7-3, TRBJ2-1)
CASSLAGGTNEQFF

SEQ ID NO: 758397 - protein, 15 aa, Homo sapiens
  CDR3 for alpha chain variable domain of TCR clone 379199 (TRAV34, TRAJ38)
CGADFTPGNNRKMIW

SEQ ID NO: 758398 - protein, 16 aa, Homo sapiens
  CDR3 for beta chain variable domain of TCR clone 379199 (TRBV12-5, TRBJ2-5)
CASGPRTSGNQETQYF

SEQ ID NO: 758399 - protein, 18 aa, Homo sapiens
  CDR3 for alpha chain variable domain of TCR clone 379200 (TRAV21, TRAJ52)
CAVRPSPAGGTSYGKLTF

SEQ ID NO: 758400 - protein, 12 aa, Homo sapiens
  CDR3 for beta chain variable domain of TCR clone 379200 (TRBV5-1, TRBJ1-2)
CASGQDTYGYTF

SEQ ID NO: 758401 - protein, 11 aa, Homo sapiens
  CDR3 for alpha chain variable domain of TCR clone 379201 (TRAV8-3, TRAJ4)
CAVGARPDFKR

SEQ ID NO: 758402 - protein, 13 aa, Homo sapiens
  CDR3 for beta chain variable domain of TCR clone 379201 (TRBV20-1, TRBJ1-2)
CSATGILGSGYTF

SEQ ID NO: 758403 - protein, 14 aa, Homo sapiens
  CDR3 for alpha chain variable domain of TCR clone 379202 (TRAV1-2, TRAJ16)
CAVNRFSDGQKLLF

SEQ ID NO: 758404 - protein, 15 aa, Homo sapiens
  CDR3 for beta chain variable domain of TCR clone 379202 (TRBV9, TRBJ1-6)
CASSVTGTGDPPLHF

SEQ ID NO: 758405 - protein, 15 aa, Homo sapiens
  CDR3 for alpha chain variable domain of TCR clone 379203 (TRAV13-1, TRAJ11)
CAASNRNSGYSTLTF

SEQ ID NO: 758406 - protein, 13 aa, Homo sapiens
  CDR3 for beta chain variable domain of TCR clone 379203 (TRBV7-9, TRBJ1-2)
CASSLKQNYGYTF

SEQ ID NO: 758407 - protein, 12 aa, Homo sapiens
  CDR3 for alpha chain variable domain of TCR clone 379204 (TRAV21, TRAJ58)
CALSASGSRLTF

SEQ ID NO: 758408 - protein, 13 aa, Homo sapiens
  CDR3 for beta chain variable domain of TCR clone 379204 (TRBV5-7, TRBJ1-2)
CASSLGGFNGYAF

SEQ ID NO: 758409 - protein, 15 aa, Homo sapiens
  CDR3 for alpha chain variable domain of TCR clone 379205 (TRAV26-1, TRAJ29)
CIVRVEGSGNTPLVF

SEQ ID NO: 758410 - protein, 16 aa, Homo sapiens
  CDR3 for beta chain variable domain of TCR clone 379205 (TRBV29-1, TRBJ2-7)
CSVEDAEDCTAYEQYF

SEQ ID NO: 758411 - protein, 18 aa, Homo sapiens
  CDR3 for alpha chain variable domain of TCR clone 379206 (TRAV26-1, TRAJ5)
CIVRVVPPRDTGRRALTF

SEQ ID NO: 758412 - protein, 15 aa, Homo sapiens
  CDR3 for beta chain variable domain of TCR clone 379206 (TRBV20-1, TRBJ2-7)
CSARDRVSGMDEQYF

SEQ ID NO: 758413 - protein, 11 aa, Homo sapiens
  CDR3 for alpha chain variable domain of TCR clone 379207 (TRAV23/DV6, TRAJ58)
CAARLLRGETR

SEQ ID NO: 758414 - protein, 13 aa, Homo sapiens
  CDR3 for beta chain variable domain of TCR clone 379207 (TRBV6-4, TRBJ1-5)
CASSADLNKPQHF

SEQ ID NO: 758415 - protein, 14 aa, Homo sapiens
  CDR3 for alpha chain variable domain of TCR clone 379208 (TRAV12-2, TRAJ17)
CAVLFKAAGNKLTF

SEQ ID NO: 758416 - protein, 12 aa, Homo sapiens
  CDR3 for beta chain variable domain of TCR clone 379208 (TRBV19, TRBJ2-1)
CASSIQYNEQFF

SEQ ID NO: 758417 - protein, 16 aa, Homo sapiens
  CDR3 for alpha chain variable domain of TCR clone 379209 (TRAV12-3, TRAJ53)
CAMSPGSGGSNHNLTF

SEQ ID NO: 758418 - protein, 11 aa, Homo sapiens
  CDR3 for beta chain variable domain of TCR clone 379209 (TRBV29-1, TRBJ2-5)
CSEDRTGTQYF

SEQ ID NO: 758419 - protein, 14 aa, Homo sapiens
  CDR3 for alpha chain variable domain of TCR clone 379210 (TRAV8-3, TRAJ44)
CAVGLTGTASKLTF

SEQ ID NO: 758420 - protein, 16 aa, Homo sapiens
  CDR3 for beta chain variable domain of TCR clone 379210 (TRBV2, TRBJ2-1)
CASSVGGSLSYNEQFF

SEQ ID NO: 758421 - protein, 12 aa, Homo sapiens
  CDR3 for alpha chain variable domain of TCR clone 379211 (TRAV13-1, TRAJ15)
CAASQAGTALIF

SEQ ID NO: 758422 - protein, 18 aa, Homo sapiens
  CDR3 for beta chain variable domain of TCR clone 379211 (TRBV7-9, TRBJ2-3)
CASSLPIKGQISTDTQYF

SEQ ID NO: 758423 - protein, 12 aa, Homo sapiens
  CDR3 for alpha chain variable domain of TCR clone 379212 (TRAV13-1, TRAJ21)
CAAKEGFSKFYF

SEQ ID NO: 758424 - protein, 14 aa, Homo sapiens
  CDR3 for beta chain variable domain of TCR clone 379212 (TRBV19, TRBJ2-1)
CASPTFVLSGEQFF

SEQ ID NO: 758425 - protein, 14 aa, Homo sapiens
  CDR3 for alpha chain variable domain of TCR clone 379213 (TRAV1-2, TRAJ8)
CAVREDTGFQKIVF

SEQ ID NO: 758426 - protein, 17 aa, Homo sapiens
  CDR3 for beta chain variable domain of TCR clone 379213 (TRBV11-2, TRBJ2-1)
CASSLYPPGVEYNEQFF

SEQ ID NO: 758427 - protein, 13 aa, Homo sapiens
  CDR3 for alpha chain variable domain of TCR clone 379214 (TRAV23/DV6, TRAJ20)
CAAGGFHDSKLSF

SEQ ID NO: 758428 - protein, 14 aa, Homo sapiens
  CDR3 for beta chain variable domain of TCR clone 379214 (TRBV3-1, TRBJ2-7)
CASSQSGAHYEQYF

SEQ ID NO: 758429 - protein, 12 aa, Homo sapiens
  CDR3 for alpha chain variable domain of TCR clone 379215 (TRAV23/DV6, TRAJ32)
CSMPGATTKLIF

SEQ ID NO: 758430 - protein, 17 aa, Homo sapiens
  CDR3 for beta chain variable domain of TCR clone 379215 (TRBV13, TRBJ2-3)
CASSSLGTSGLTDTQYF

SEQ ID NO: 758431 - protein, 14 aa, Homo sapiens
  CDR3 for alpha chain variable domain of TCR clone 379216 (TRAV1-2, TRAJ16)
CAVNRFSDGQKLLF

SEQ ID NO: 758432 - protein, 13 aa, Homo sapiens
  CDR3 for beta chain variable domain of TCR clone 379216 (TRBV4-1, TRBJ2-7)
CASSHGQAYEQYF

SEQ ID NO: 758433 - protein, 14 aa, Homo sapiens
  CDR3 for alpha chain variable domain of TCR clone 379217 (TRAV1-2, TRAJ8)
CAVREDTGLQKLVF

SEQ ID NO: 758434 - protein, 17 aa, Homo sapiens
  CDR3 for beta chain variable domain of TCR clone 379217 (TRBV11-2, TRBJ2-1)
CASSLYPPGGEYNEQFF

SEQ ID NO: 758435 - protein, 14 aa, Homo sapiens
  CDR3 for alpha chain variable domain of TCR clone 379218 (TRAV12-2, TRAJ17)
CAVLFKAAGNKLTF

SEQ ID NO: 758436 - protein, 13 aa, Homo sapiens
  CDR3 for beta chain variable domain of TCR clone 379218 (TRBV20-1, TRBJ2-2)
CSALSGGAGELFF

SEQ ID NO: 758437 - protein, 14 aa, Homo sapiens
  CDR3 for alpha chain variable domain of TCR clone 379219 (TRAV16, TRAJ57)
CALPTQGGSKKLVF

SEQ ID NO: 758438 - protein, 15 aa, Homo sapiens
  CDR3 for beta chain variable domain of TCR clone 379219 (TRBV28, TRBJ1-3)
CASWGGHLSGNTIYF

SEQ ID NO: 758439 - protein, 13 aa, Homo sapiens
  CDR3 for alpha chain variable domain of TCR clone 379220 (TRAV13-1, TRAJ11)
CAAVLAGYSTLTF

SEQ ID NO: 758440 - protein, 16 aa, Homo sapiens
  CDR3 for beta chain variable domain of TCR clone 379220 (TRBV7-3, TRBJ2-2)
CASSLKRGTLSGELFF

SEQ ID NO: 758441 - protein, 12 aa, Homo sapiens
  CDR3 for alpha chain variable domain of TCR clone 379221 (TRAV17, TRAJ20)
CATYSNDYKLSF

SEQ ID NO: 758442 - protein, 11 aa, Homo sapiens
  CDR3 for beta chain variable domain of TCR clone 379221 (TRBV4-1, TRBJ2-2)
CASEHTWELFF

SEQ ID NO: 758443 - protein, 12 aa, Homo sapiens
  CDR3 for alpha chain variable domain of TCR clone 379222 (TRAV12-3, TRAJ4)
CAMTGTGTRLAV

SEQ ID NO: 758444 - protein, 14 aa, Homo sapiens
  CDR3 for beta chain variable domain of TCR clone 379222 (TRBV10-3, TRBJ1-1)
CAISDTDRGVEAFF

SEQ ID NO: 758445 - protein, 13 aa, Homo sapiens
  CDR3 for alpha chain variable domain of TCR clone 379223 (TRAV36/DV7, TRAJ34)
CAVGEVNTDKLIF

SEQ ID NO: 758446 - protein, 14 aa, Homo sapiens
  CDR3 for beta chain variable domain of TCR clone 379223 (TRBV2, TRBJ2-7)
CASSLTSGGYEQYF

SEQ ID NO: 758447 - protein, 12 aa, Homo sapiens
  CDR3 for alpha chain variable domain of TCR clone 379224 (TRAV2, TRAJ9)
CAVGAGGFKTIF

SEQ ID NO: 758448 - protein, 16 aa, Homo sapiens
  CDR3 for beta chain variable domain of TCR clone 379224 (TRBV13, TRBJ2-2)
CASSRRTGEHTGELFL

SEQ ID NO: 758449 - protein, 14 aa, Homo sapiens
  CDR3 for alpha chain variable domain of TCR clone 379225 (TRAV17, TRAJ49)
CATDARDTGNQFYF

SEQ ID NO: 758450 - protein, 14 aa, Homo sapiens
  CDR3 for beta chain variable domain of TCR clone 379225 (TRBV5-5, TRBJ1-2)
CASSFGQINYGYTV

SEQ ID NO: 758451 - protein, 14 aa, Homo sapiens
  CDR3 for alpha chain variable domain of TCR clone 379226 (TRAV12-2, TRAJ6)
CASKWGGGSYIPTF

SEQ ID NO: 758452 - protein, 15 aa, Homo sapiens
  CDR3 for beta chain variable domain of TCR clone 379226 (TRBV7-3, TRBJ2-1)
CASSPTGGGEVEQFF

SEQ ID NO: 758453 - protein, 13 aa, Homo sapiens
  CDR3 for alpha chain variable domain of TCR clone 379227 (TRAV20, TRAJ21)
CAVEGYNFNKFYF

SEQ ID NO: 758454 - protein, 14 aa, Homo sapiens
  CDR3 for beta chain variable domain of TCR clone 379227 (TRBV4-2, TRBJ2-7)
CASSQGQTAYEQYF

SEQ ID NO: 758455 - protein, 17 aa, Homo sapiens
  CDR3 for alpha chain variable domain of TCR clone 379228 (TRAV12-2, TRAJ52)
CAVNKGAGGTSYGKLTF

SEQ ID NO: 758456 - protein, 17 aa, Homo sapiens
  CDR3 for beta chain variable domain of TCR clone 379228 (TRBV11-2, TRBJ2-1)
CASSLYPPGVEYNEQFF

SEQ ID NO: 758457 - protein, 16 aa, Homo sapiens
  CDR3 for alpha chain variable domain of TCR clone 379229 (TRAV12-1, TRAJ53)
SVVTSVAGGSNYKLTF

SEQ ID NO: 758458 - protein, 16 aa, Homo sapiens
  CDR3 for beta chain variable domain of TCR clone 379229 (TRBV6-6, TRBJ2-3)
CASSYSHAGSTDTQYF

SEQ ID NO: 758459 - protein, 14 aa, Homo sapiens
  CDR3 for alpha chain variable domain of TCR clone 379230 (TRAV12-3, TRAJ57)
CAMSAWGGSEKLVF

SEQ ID NO: 758460 - protein, 12 aa, Homo sapiens
  CDR3 for beta chain variable domain of TCR clone 379230 (TRBV24-1, TRBJ2-3)
CATSDSTDTQYF

SEQ ID NO: 758461 - protein, 16 aa, Homo sapiens
  CDR3 for alpha chain variable domain of TCR clone 379231 (TRAV30, TRAJ24)
CGTEIVDADSWGKFQF

SEQ ID NO: 758462 - protein, 16 aa, Homo sapiens
  CDR3 for beta chain variable domain of TCR clone 379231 (TRBV12-5, TRBJ2-5)
CASGSQTSGNQETQYF

SEQ ID NO: 758463 - protein, 11 aa, Homo sapiens
  CDR3 for alpha chain variable domain of TCR clone 379232 (TRAV2, TRAJ13)
CASGGYQKVTF

SEQ ID NO: 758464 - protein, 13 aa, Homo sapiens
  CDR3 for beta chain variable domain of TCR clone 379232 (TRBV4-1, TRBJ1-1)
CASSQLGTGEAFF

SEQ ID NO: 758465 - protein, 12 aa, Homo sapiens
  CDR3 for alpha chain variable domain of TCR clone 379233 (TRAV2, TRAJ9)
CAVGAGGFKTIF

SEQ ID NO: 758466 - protein, 15 aa, Homo sapiens
  CDR3 for beta chain variable domain of TCR clone 379233 (TRBV11-2, TRBJ2-1)
CASSLTSGGYNEQFF

SEQ ID NO: 758467 - protein, 13 aa, Homo sapiens
  CDR3 for alpha chain variable domain of TCR clone 379234 (TRAV16, TRAJ27)
CALRRTNAGKSTF

SEQ ID NO: 758468 - protein, 17 aa, Homo sapiens
  CDR3 for beta chain variable domain of TCR clone 379234 (TRBV7-2, TRBJ2-2)
CASSPRGAGEGTGELFF

SEQ ID NO: 758469 - protein, 12 aa, Homo sapiens
  CDR3 for alpha chain variable domain of TCR clone 379235 (TRAV20, TRAJ4)
CSASGGYNKLIF

SEQ ID NO: 758470 - protein, 13 aa, Homo sapiens
  CDR3 for beta chain variable domain of TCR clone 379235 (TRBV9, TRBJ2-1)
CASSHSGGNEQFF

SEQ ID NO: 758471 - protein, 14 aa, Homo sapiens
  CDR3 for alpha chain variable domain of TCR clone 379236 (TRAV1-2, TRAJ4)
CAVRSPGGYNKLIF

SEQ ID NO: 758472 - protein, 16 aa, Homo sapiens
  CDR3 for beta chain variable domain of TCR clone 379236 (TRBV20-1, TRBJ2-3)
GSAASGRGVSTDTQYF

SEQ ID NO: 758473 - protein, 15 aa, Homo sapiens
  CDR3 for alpha chain variable domain of TCR clone 379237 (TRAV12-3, TRAJ6)
CAMSAASGGSYIPTF

SEQ ID NO: 758474 - protein, 13 aa, Homo sapiens
  CDR3 for beta chain variable domain of TCR clone 379237 (TRBV20-1, TRBJ1-2)
CSASTERIYGDTF

SEQ ID NO: 758475 - protein, 14 aa, Homo sapiens
  CDR3 for alpha chain variable domain of TCR clone 379238 (TRAV16, TRAJ4)
CALHFSGGYNKLIF

SEQ ID NO: 758476 - protein, 15 aa, Homo sapiens
  CDR3 for beta chain variable domain of TCR clone 379238 (TRBV7-2, TRBJ2-7)
CASSTRLAGVDEHYF

SEQ ID NO: 758477 - protein, 14 aa, Homo sapiens
  CDR3 for alpha chain variable domain of TCR clone 379239 (TRAV3, TRAJ7)
CAVREEEREQQTRF

SEQ ID NO: 758478 - protein, 14 aa, Homo sapiens
  CDR3 for beta chain variable domain of TCR clone 379239 (TRBV7-2, TRBJ1-4)
CASSVVEGGEKLFF

SEQ ID NO: 758479 - protein, 16 aa, Homo sapiens
  CDR3 for alpha chain variable domain of TCR clone 379240 (TRAV14/DV4, TRAJ54)
CAMREGRIQGAQQLVF

SEQ ID NO: 758480 - protein, 15 aa, Homo sapiens
  CDR3 for beta chain variable domain of TCR clone 379240 (TRBV20-1, TRBJ2-7)
CSARDRVSGMDEQYF

SEQ ID NO: 758481 - protein, 14 aa, Homo sapiens
  CDR3 for alpha chain variable domain of TCR clone 379241 (TRAV1-2, TRAJ16)
CAVNRFSDGQKLLF

SEQ ID NO: 758482 - protein, 12 aa, Homo sapiens
  CDR3 for beta chain variable domain of TCR clone 379241 (TRBV11-2, TRBJ2-2)
CASSLGGGEPFF

SEQ ID NO: 758483 - protein, 14 aa, Homo sapiens
  CDR3 for alpha chain variable domain of TCR clone 379242 (TRAV8-4, TRAJ15)
CAVTIREAGTALIF

SEQ ID NO: 758484 - protein, 16 aa, Homo sapiens
  CDR3 for beta chain variable domain of TCR clone 379242 (TRBV29-1, TRBJ2-6)
CSVEDITYSRANVLTF

SEQ ID NO: 758485 - protein, 13 aa, Homo sapiens
  CDR3 for alpha chain variable domain of TCR clone 379243 (TRAV12-3, TRAJ29)
CAMTLSGNTPLVF

SEQ ID NO: 758486 - protein, 14 aa, Homo sapiens
  CDR3 for beta chain variable domain of TCR clone 379243 (TRBV12-5, TRBJ2-5)
CASGSRTHQETQYF

SEQ ID NO: 758487 - protein, 11 aa, Homo sapiens
  CDR3 for alpha chain variable domain of TCR clone 379244 (TRAV12-1, TRAJ8)
CVVTGFQKLVF

SEQ ID NO: 758488 - protein, 14 aa, Homo sapiens
  CDR3 for beta chain variable domain of TCR clone 379244 (TRBV9, TRBJ2-7)
CASSVGVGSYEQYF

SEQ ID NO: 758489 - protein, 16 aa, Homo sapiens
  CDR3 for alpha chain variable domain of TCR clone 379245 (TRAV12-3, TRAJ45)
CAMGWGSGGGADGLTF

SEQ ID NO: 758490 - protein, 16 aa, Homo sapiens
  CDR3 for beta chain variable domain of TCR clone 379245 (TRBV7-3, TRBJ2-1)
CASSLEGYRSYNEQFF

SEQ ID NO: 758491 - protein, 11 aa, Homo sapiens
  CDR3 for alpha chain variable domain of TCR clone 379246 (TRAV13-1, TRAJ6)
CATLGSYIPTF

SEQ ID NO: 758492 - protein, 12 aa, Homo sapiens
  CDR3 for beta chain variable domain of TCR clone 379246 (TRBV11-2, TRBJ2-1)
CASSPGNSEQFF

SEQ ID NO: 758493 - protein, 15 aa, Homo sapiens
  CDR3 for alpha chain variable domain of TCR clone 379247 (TRAV3, TRAJ5)
CAVRDLDTVRRALTF

SEQ ID NO: 758494 - protein, 14 aa, Homo sapiens
  CDR3 for beta chain variable domain of TCR clone 379247 (TRBV25-1, TRBJ1-1)
CASTHLGGNTEAFF

SEQ ID NO: 758495 - protein, 11 aa, Homo sapiens
  CDR3 for alpha chain variable domain of TCR clone 379248 (TRAV23/DV6, TRAJ49)
CAVAPVTSSIL

SEQ ID NO: 758496 - protein, 13 aa, Homo sapiens
  CDR3 for beta chain variable domain of TCR clone 379248 (TRBV6-1, TRBJ1-1)
CASSRQVNTEAFF

SEQ ID NO: 758497 - protein, 15 aa, Homo sapiens
  CDR3 for alpha chain variable domain of TCR clone 379249 (TRAV17, TRAJ57)
CATGPSQGGPEKLVS

SEQ ID NO: 758498 - protein, 14 aa, Homo sapiens
  CDR3 for beta chain variable domain of TCR clone 379249 (TRBV12-5, TRBJ2-5)
CASGSRTHQETQYF

SEQ ID NO: 758499 - protein, 14 aa, Homo sapiens
  CDR3 for alpha chain variable domain of TCR clone 379250 (TRAV23/DV6, TRAJ8)
CAASKNTGFQKLGF

SEQ ID NO: 758500 - protein, 16 aa, Homo sapiens
  CDR3 for beta chain variable domain of TCR clone 379250 (TRBV4-1, TRBJ2-6)
CASSQVGDPGANVLTF

SEQ ID NO: 758501 - protein, 12 aa, Homo sapiens
  CDR3 for alpha chain variable domain of TCR clone 379251 (TRAV21, TRAJ52)
NAGGTSYGKLTF

SEQ ID NO: 758502 - protein, 13 aa, Homo sapiens
  CDR3 for beta chain variable domain of TCR clone 379251 (TRBV20-1, TRBJ2-3)
CSARLAGTDTQYF

SEQ ID NO: 758503 - protein, 15 aa, Homo sapiens
  CDR3 for alpha chain variable domain of TCR clone 379252 (TRAV8-3, TRAJ11)
CAVGLLNSGYSTLTF

SEQ ID NO: 758504 - protein, 12 aa, Homo sapiens
  CDR3 for beta chain variable domain of TCR clone 379252 (TRBV5-1, TRBJ1-2)
CASSQDTYGYTF

SEQ ID NO: 758505 - protein, 13 aa, Homo sapiens
  CDR3 for alpha chain variable domain of TCR clone 379253 (TRAV12-2, TRAJ10)
CAVPTGGGNKLTF

SEQ ID NO: 758506 - protein, 11 aa, Homo sapiens
  CDR3 for beta chain variable domain of TCR clone 379253 (TRBV25-1, TRBJ1-1)
PTWGGNTEAFF

SEQ ID NO: 758507 - protein, 15 aa, Homo sapiens
  CDR3 for alpha chain variable domain of TCR clone 379254 (TRAV8-3, TRAJ45)
CASSYSGGGADGLTF

SEQ ID NO: 758508 - protein, 16 aa, Homo sapiens
  CDR3 for beta chain variable domain of TCR clone 379254 (TRBV7-9, TRBJ2-2)
CDSSGFGGANTGELFF

SEQ ID NO: 758509 - protein, 15 aa, Homo sapiens
  CDR3 for alpha chain variable domain of TCR clone 379255 (TRAV26-1, TRAJ29)
CIARVEGSGKTPLVF

SEQ ID NO: 758510 - protein, 15 aa, Homo sapiens
  CDR3 for beta chain variable domain of TCR clone 379255 (TRBV7-9, TRBJ1-5)
CASSQGHQPNQPQHF

SEQ ID NO: 758511 - protein, 17 aa, Homo sapiens
  CDR3 for alpha chain variable domain of TCR clone 379256 (TRAV3, TRAJ6)
CAVRDGPRAGGSYIPTF

SEQ ID NO: 758512 - protein, 15 aa, Homo sapiens
  CDR3 for beta chain variable domain of TCR clone 379256 (TRBV3-1, TRBJ2-5)
CASSANLGGPETQYF

SEQ ID NO: 758513 - protein, 13 aa, Homo sapiens
  CDR3 for alpha chain variable domain of TCR clone 379257 (TRAV29/DV5, TRAJ31)
CAASRNNNARLMF

SEQ ID NO: 758514 - protein, 13 aa, Homo sapiens
  CDR3 for beta chain variable domain of TCR clone 379257 (TRBV7-2, TRBJ1-3)
CASSLDRGNTIYF

SEQ ID NO: 758515 - protein, 21 aa, Homo sapiens
  CDR3 for alpha chain variable domain of TCR clone 379258 (TRAV3, TRAJ17)
CAVRARRGGRSCRQQANVWRR

SEQ ID NO: 758516 - protein, 14 aa, Homo sapiens
  CDR3 for beta chain variable domain of TCR clone 379258 (TRBV4-1, TRBJ2-2)
CASSQAVNTGELFL

SEQ ID NO: 758517 - protein, 14 aa, Homo sapiens
  CDR3 for alpha chain variable domain of TCR clone 379259 (TRAV12-2, TRAJ24)
CAVTPADSWGKLQF

SEQ ID NO: 758518 - protein, 12 aa, Homo sapiens
  CDR3 for beta chain variable domain of TCR clone 379259 (TRBV5-5, TRBJ2-5)
CASSYFGETQYF

SEQ ID NO: 758519 - protein, 12 aa, Homo sapiens
  CDR3 for alpha chain variable domain of TCR clone 379260 (TRAV12-3, TRAJ17)
CAMTLTGNKLTF

SEQ ID NO: 758520 - protein, 14 aa, Homo sapiens
  CDR3 for beta chain variable domain of TCR clone 379260 (TRBV19, TRBJ2-2)
CASSIAGAFGELFF

SEQ ID NO: 758521 - protein, 16 aa, Homo sapiens
  CDR3 for alpha chain variable domain of TCR clone 379261 (TRAV16, TRAJ4)
CALCRMFSGGYNKLIF

SEQ ID NO: 758522 - protein, 12 aa, Homo sapiens
  CDR3 for beta chain variable domain of TCR clone 379261 (TRBV29-1, TRBJ2-3)
CSVTGGADTQYF

SEQ ID NO: 758523 - protein, 15 aa, Homo sapiens
  CDR3 for alpha chain variable domain of TCR clone 379262 (TRAV36/DV7, TRAJ54)
CAVEKPVQGAQKLVF

SEQ ID NO: 758524 - protein, 14 aa, Homo sapiens
  CDR3 for beta chain variable domain of TCR clone 379262 (TRBV19, TRBJ2-1)
CASPTFVLSGEQFF

SEQ ID NO: 758525 - protein, 16 aa, Homo sapiens
  CDR3 for alpha chain variable domain of TCR clone 379263 (TRAV12-2, TRAJ43)
CAGADMRFGAGTRLTV

SEQ ID NO: 758526 - protein, 16 aa, Homo sapiens
  CDR3 for beta chain variable domain of TCR clone 379263 (TRBV2, TRBJ2-4)
CASSEAPGGEQNSQYF

SEQ ID NO: 758527 - protein, 14 aa, Homo sapiens
  CDR3 for alpha chain variable domain of TCR clone 379264 (TRAV12-2, TRAJ13)
CAVKKTGCYQKVTF

SEQ ID NO: 758528 - protein, 12 aa, Homo sapiens
  CDR3 for beta chain variable domain of TCR clone 379264 (TRBV12-4, TRBJ1-2)
CASSFIWLHLRF

SEQ ID NO: 758529 - protein, 14 aa, Homo sapiens
  CDR3 for alpha chain variable domain of TCR clone 379265 (TRAV29/DV5, TRAJ36)
CAARRKTGANNLFF

SEQ ID NO: 758530 - protein, 15 aa, Homo sapiens
  CDR3 for beta chain variable domain of TCR clone 379265 (TRBV20-1, TRBJ2-7)
CGARDRVSGMDEQYF

SEQ ID NO: 758531 - protein, 14 aa, Homo sapiens
  CDR3 for alpha chain variable domain of TCR clone 379266 (TRAV1-2, TRAJ8)
CAVREETGFQKLVF

SEQ ID NO: 758532 - protein, 14 aa, Homo sapiens
  CDR3 for beta chain variable domain of TCR clone 379266 (TRBV5-8, TRBJ2-3)
CASSLGQGTDTQYF

SEQ ID NO: 758533 - protein, 15 aa, Homo sapiens
  CDR3 for alpha chain variable domain of TCR clone 379267 (TRAV14/DV4, TRAJ48)
CAMREGNAGNEKLTF

SEQ ID NO: 758534 - protein, 12 aa, Homo sapiens
  CDR3 for beta chain variable domain of TCR clone 379267 (TRBV6-3, TRBJ2-7)
CASSRQGYEQYF

SEQ ID NO: 758535 - protein, 10 aa, Homo sapiens
  CDR3 for alpha chain variable domain of TCR clone 379268 (TRAV30, TRAJ48)
CGIGNEKLTF

SEQ ID NO: 758536 - protein, 13 aa, Homo sapiens
  CDR3 for beta chain variable domain of TCR clone 379268 (TRBV6-3, TRBJ2-5)
CASRDTRQETQYF

SEQ ID NO: 758537 - protein, 14 aa, Homo sapiens
  CDR3 for alpha chain variable domain of TCR clone 379269 (TRAV2, TRAJ37)
CAVEGSSNTGKLIF

SEQ ID NO: 758538 - protein, 15 aa, Homo sapiens
  CDR3 for beta chain variable domain of TCR clone 379269 (TRBV24-1, TRBJ2-4)
CATSDPRVRANIQYF

SEQ ID NO: 758539 - protein, 15 aa, Homo sapiens
  CDR3 for alpha chain variable domain of TCR clone 379270 (TRAV8-3, TRAJ45)
CASSYSGGGADGLTF

SEQ ID NO: 758540 - protein, 14 aa, Homo sapiens
  CDR3 for beta chain variable domain of TCR clone 379270 (TRBV13, TRBJ2-7)
CASSLKGASYEQYF

SEQ ID NO: 758541 - protein, 10 aa, Homo sapiens
  CDR3 for alpha chain variable domain of TCR clone 379271 (TRAV2, TRAJ34)
CAVVNDKLIF

SEQ ID NO: 758542 - protein, 12 aa, Homo sapiens
  CDR3 for beta chain variable domain of TCR clone 379271 (TRBV11-2, TRBJ2-2)
CASSLGGGELFF

SEQ ID NO: 758543 - protein, 12 aa, Homo sapiens
  CDR3 for alpha chain variable domain of TCR clone 379272 (TRAV13-2, TRAJ8)
CAPWLGFEKLVF

SEQ ID NO: 758544 - protein, 15 aa, Homo sapiens
  CDR3 for beta chain variable domain of TCR clone 379272 (TRBV2, TRBJ2-1)
CASSEARSAYNEQFF

SEQ ID NO: 758545 - protein, 14 aa, Homo sapiens
  CDR3 for alpha chain variable domain of TCR clone 379273 (TRAV12-2, TRAJ13)
CAVKKTGGYQKVTF

SEQ ID NO: 758546 - protein, 12 aa, Homo sapiens
  CDR3 for beta chain variable domain of TCR clone 379273 (TRBV12-4, TRBJ2-7)
CASSVGGYEQYF

SEQ ID NO: 758547 - protein, 17 aa, Homo sapiens
  CDR3 for alpha chain variable domain of TCR clone 379274 (TRAV3, TRAJ6)
CAVRDGPRAGGSYIPTF

SEQ ID NO: 758548 - protein, 11 aa, Homo sapiens
  CDR3 for beta chain variable domain of TCR clone 379274 (TRBV20-1, TRBJ1-2)
CSVQGAGGYTF

SEQ ID NO: 758549 - protein, 14 aa, Homo sapiens
  CDR3 for alpha chain variable domain of TCR clone 379275 (TRAV13-2, TRAJ15)
VAENPNQAGTALIF

SEQ ID NO: 758550 - protein, 16 aa, Homo sapiens
  CDR3 for beta chain variable domain of TCR clone 379275 (TRBV12-4, TRBJ1-2)
CASSPTATGKTRGYTF

SEQ ID NO: 758551 - protein, 14 aa, Homo sapiens
  CDR3 for alpha chain variable domain of TCR clone 379276 (TRAV1-2, TRAJ16)
CAANRFSDGQKLLF

SEQ ID NO: 758552 - protein, 16 aa, Homo sapiens
  CDR3 for beta chain variable domain of TCR clone 379276 (TRBV18, TRBJ1-4)
CASSLQTVATNEKLFF

SEQ ID NO: 758553 - protein, 14 aa, Homo sapiens
  CDR3 for alpha chain variable domain of TCR clone 379277 (TRAV1-2, TRAJ16)
CAVNRFSDGQKLLF

SEQ ID NO: 758554 - protein, 16 aa, Homo sapiens
  CDR3 for beta chain variable domain of TCR clone 379277 (TRBV5-5, TRBJ1-2)
CASSPTWGRGLYGYTF

SEQ ID NO: 758555 - protein, 12 aa, Homo sapiens
  CDR3 for alpha chain variable domain of TCR clone 379278 (TRAV13-2, TRAJ8)
CAPWLGFQKLLF

SEQ ID NO: 758556 - protein, 14 aa, Homo sapiens
  CDR3 for beta chain variable domain of TCR clone 379278 (TRBV18, TRBJ1-5)
CASSRRQRNQPQHF

SEQ ID NO: 758557 - protein, 14 aa, Homo sapiens
  CDR3 for alpha chain variable domain of TCR clone 379279 (TRAV16, TRAJ15)
CALRPNQAGTALIF

SEQ ID NO: 758558 - protein, 12 aa, Homo sapiens
  CDR3 for beta chain variable domain of TCR clone 379279 (TRBV7-8, TRBJ2-7)
CASSLGDREQYF

SEQ ID NO: 758559 - protein, 12 aa, Homo sapiens
  CDR3 for alpha chain variable domain of TCR clone 379280 (TRAV35, TRAJ36)
CWASDRGNNLFF

SEQ ID NO: 758560 - protein, 15 aa, Homo sapiens
  CDR3 for beta chain variable domain of TCR clone 379280 (TRBV28, TRBJ2-5)
CASSPPWSYQETQYF

SEQ ID NO: 758561 - protein, 14 aa, Homo sapiens
  CDR3 for alpha chain variable domain of TCR clone 379281 (TRAV17, TRAJ31)
CATDAEDNNARLMF

SEQ ID NO: 758562 - protein, 15 aa, Homo sapiens
  CDR3 for beta chain variable domain of TCR clone 379281 (TRBV20-1, TRBJ2-7)
CSARGPLAGGREQYF

SEQ ID NO: 758563 - protein, 13 aa, Homo sapiens
  CDR3 for alpha chain variable domain of TCR clone 379282 (TRAV12-1, TRAJ43)
CVVSPHNNNDMRF

SEQ ID NO: 758564 - protein, 14 aa, Homo sapiens
  CDR3 for beta chain variable domain of TCR clone 379282 (TRBV5-5, TRBJ2-2)
CASSLLGDTGELFF

SEQ ID NO: 758565 - protein, 12 aa, Homo sapiens
  CDR3 for alpha chain variable domain of TCR clone 379283 (TRAV27, TRAJ20)
CAGASNDYKLSF

SEQ ID NO: 758566 - protein, 12 aa, Homo sapiens
  CDR3 for beta chain variable domain of TCR clone 379283 (TRBV11-2, TRBJ2-2)
CASSLPTGELFF

SEQ ID NO: 758567 - protein, 11 aa, Homo sapiens
  CDR3 for alpha chain variable domain of TCR clone 379284 (TRAV1-1, TRAJ23)
CAVRQGGKLIF

SEQ ID NO: 758568 - protein, 15 aa, Homo sapiens
  CDR3 for beta chain variable domain of TCR clone 379284 (TRBV7-2, TRBJ2-3)
CASSLEQGGTDTQYF

SEQ ID NO: 758569 - protein, 23 aa, Homo sapiens
  CDR3 for alpha chain variable domain of TCR clone 379285 (TRAV12-2, TRAJ36)
SLLIRDSQPSDSATLERANNLFF

SEQ ID NO: 758570 - protein, 13 aa, Homo sapiens
  CDR3 for beta chain variable domain of TCR clone 379285 (TRBV12-4, TRBJ1-2)
CASSLDSNYGYTF

SEQ ID NO: 758571 - protein, 15 aa, Homo sapiens
  CDR3 for alpha chain variable domain of TCR clone 379286 (TRAV3, TRAJ3)
CAVRDRNSSASKIIF

SEQ ID NO: 758572 - protein, 12 aa, Homo sapiens
  CDR3 for beta chain variable domain of TCR clone 379286 (TRBV29-1, TRBJ2-3)
CSVTGGADTQYF

SEQ ID NO: 758573 - protein, 12 aa, Homo sapiens
  CDR3 for alpha chain variable domain of TCR clone 379287 (TRAV24, TRAJ37)
CASSSNTVKLIF

SEQ ID NO: 758574 - protein, 11 aa, Homo sapiens
  CDR3 for beta chain variable domain of TCR clone 379287 (TRBV29-1, TRBJ2-5)
CSEDRTGTQYF

SEQ ID NO: 758575 - protein, 13 aa, Homo sapiens
  CDR3 for alpha chain variable domain of TCR clone 379288 (TRAV35, TRAJ40)
CAVQLSGTYKYIF

SEQ ID NO: 758576 - protein, 14 aa, Homo sapiens
  CDR3 for beta chain variable domain of TCR clone 379288 (TRBV3-1, TRBJ2-5)
CASSLQLAGETQYF

SEQ ID NO: 758577 - protein, 14 aa, Homo sapiens
  CDR3 for alpha chain variable domain of TCR clone 379289 (TRAV1-2, TRAJ16)
CAVNRFSDGQKLLF

SEQ ID NO: 758578 - protein, 15 aa, Homo sapiens
  CDR3 for beta chain variable domain of TCR clone 379289 (TRBV11-2, TRBJ1-1)
CASSPSGRLNTEAFF

SEQ ID NO: 758579 - protein, 15 aa, Homo sapiens
  CDR3 for alpha chain variable domain of TCR clone 379290 (TRAV12-3, TRAJ6)
CAMSATTGGSYIPTF

SEQ ID NO: 758580 - protein, 16 aa, Homo sapiens
  CDR3 for beta chain variable domain of TCR clone 379290 (TRBV20-1, TRBJ1-2)
CSASMGQGVAKYGYTF

SEQ ID NO: 758581 - protein, 17 aa, Homo sapiens
  CDR3 for alpha chain variable domain of TCR clone 379291 (TRAV4, TRAJ18)
CLVGERSVGSTLGRLYF

SEQ ID NO: 758582 - protein, 13 aa, Homo sapiens
  CDR3 for beta chain variable domain of TCR clone 379291 (TRBV7-2, TRBJ2-2)
CASSLAVTGELFF

SEQ ID NO: 758583 - protein, 12 aa, Homo sapiens
  CDR3 for alpha chain variable domain of TCR clone 379292 (TRAV13-1, TRAJ21)
CAAKEGFNKFYF

SEQ ID NO: 758584 - protein, 12 aa, Homo sapiens
  CDR3 for beta chain variable domain of TCR clone 379292 (TRBV27, TRBJ2-5)
CASSQTGETQYF

SEQ ID NO: 758585 - protein, 14 aa, Homo sapiens
  CDR3 for alpha chain variable domain of TCR clone 379293 (TRAV16, TRAJ32)
CALKSGGATNRLIF

SEQ ID NO: 758586 - protein, 13 aa, Homo sapiens
  CDR3 for beta chain variable domain of TCR clone 379293 (TRBV15, TRBJ1-6)
CATSGGLNSPLHV

SEQ ID NO: 758587 - protein, 13 aa, Homo sapiens
  CDR3 for alpha chain variable domain of TCR clone 379294 (TRAV3, TRAJ27)
CAVRPLGAGKSTF

SEQ ID NO: 758588 - protein, 13 aa, Homo sapiens
  CDR3 for beta chain variable domain of TCR clone 379294 (TRBV9, TRBJ2-2)
CASSPRPAGELFF

SEQ ID NO: 758589 - protein, 22 aa, Homo sapiens
  CDR3 for alpha chain variable domain of TCR clone 379295 (TRAV8-3, TRAJ6)
CAVAYQEEATYLHLEEEPALLF

SEQ ID NO: 758590 - protein, 15 aa, Homo sapiens
  CDR3 for beta chain variable domain of TCR clone 379295 (TRBV19, TRBJ1-1)
CASTSGQIQNTEAFF

SEQ ID NO: 758591 - protein, 11 aa, Homo sapiens
  CDR3 for alpha chain variable domain of TCR clone 379296 (TRAV3, TRAJ21)
RAVGNFNKFYL

SEQ ID NO: 758592 - protein, 16 aa, Homo sapiens
  CDR3 for beta chain variable domain of TCR clone 379296 (TRBV19, TRBJ2-1)
CASSKAGPSSYNEQLF

SEQ ID NO: 758593 - protein, 17 aa, Homo sapiens
  CDR3 for alpha chain variable domain of TCR clone 379297 (TRAV4, TRAJ18)
CLVGERSVGSTLGRVYF

SEQ ID NO: 758594 - protein, 16 aa, Homo sapiens
  CDR3 for beta chain variable domain of TCR clone 379297 (TRBV4-2, TRBJ1-1)
CASSPSPGRAAPEAFF

SEQ ID NO: 758595 - protein, 12 aa, Homo sapiens
  CDR3 for alpha chain variable domain of TCR clone 379298 (TRAV20, TRAJ56)
CAVTGADSKLTF

SEQ ID NO: 758596 - protein, 14 aa, Homo sapiens
  CDR3 for beta chain variable domain of TCR clone 379298 (TRBV20-1, TRBJ2-5)
CSALVPGYQETQYF

SEQ ID NO: 758597 - protein, 13 aa, Homo sapiens
  CDR3 for alpha chain variable domain of TCR clone 379299 (TRAV4, TRAJ34)
CLVGDYNTDKLIY

SEQ ID NO: 758598 - protein, 23 aa, Homo sapiens
  CDR3 for beta chain variable domain of TCR clone 379299 (TRBV4-2, TRBJ2-3)
CASSQDPPRASSISGGRGDTQYF

SEQ ID NO: 758599 - protein, 14 aa, Homo sapiens
  CDR3 for alpha chain variable domain of TCR clone 379300 (TRAV26-1, TRAJ38)
CIADNAGNNRKLIW

SEQ ID NO: 758600 - protein, 16 aa, Homo sapiens
  CDR3 for beta chain variable domain of TCR clone 379300 (TRBV7-7, TRBJ2-3)
CASSPGTSGSTDTQYF

SEQ ID NO: 758601 - protein, 14 aa, Homo sapiens
  CDR3 for alpha chain variable domain of TCR clone 379301 (TRAV26-1, TRAJ38)
CIADNAGNNRQMIW

SEQ ID NO: 758602 - protein, 13 aa, Homo sapiens
  CDR3 for beta chain variable domain of TCR clone 379301 (TRBV20-1, TRBJ1-1)
RSARGGGNTEAFF

SEQ ID NO: 758603 - protein, 13 aa, Homo sapiens
  CDR3 for alpha chain variable domain of TCR clone 379302 (TRAV3, TRAJ21)
CAVREPDFNKFYF

SEQ ID NO: 758604 - protein, 17 aa, Homo sapiens
  CDR3 for beta chain variable domain of TCR clone 379302 (TRBV13, TRBJ2-7)
CASSLKPGASGTYEQYF

SEQ ID NO: 758605 - protein, 15 aa, Homo sapiens
  CDR3 for alpha chain variable domain of TCR clone 379303 (TRAV12-3, TRAJ6)
CAMSATTGGSYIPTF

SEQ ID NO: 758606 - protein, 16 aa, Homo sapiens
  CDR3 for beta chain variable domain of TCR clone 379303 (TRBV12-4, TRBJ2-3)
CASSLRLAETTDTQYF

SEQ ID NO: 758607 - protein, 12 aa, Homo sapiens
  CDR3 for alpha chain variable domain of TCR clone 379304 (TRAV20, TRAJ37)
CALPSNTGKLIC

SEQ ID NO: 758608 - protein, 14 aa, Homo sapiens
  CDR3 for beta chain variable domain of TCR clone 379304 (TRBV19, TRBJ2-1)
CASPTFVLSGEQFF

SEQ ID NO: 758609 - protein, 15 aa, Homo sapiens
  CDR3 for alpha chain variable domain of TCR clone 379305 (TRAV17, TRAJ23)
CATDAEDNQGGKLIF

SEQ ID NO: 758610 - protein, 12 aa, Homo sapiens
  CDR3 for beta chain variable domain of TCR clone 379305 (TRBV2, TRBJ2-1)
CAKRESYNEQFF

SEQ ID NO: 758611 - protein, 13 aa, Homo sapiens
  CDR3 for alpha chain variable domain of TCR clone 379306 (TRAV2, TRAJ15)
SAVASRAGTALIF

SEQ ID NO: 758612 - protein, 16 aa, Homo sapiens
  CDR3 for beta chain variable domain of TCR clone 379306 (TRBV5-1, TRBJ1-1)
CASSSGGNSLNTEAFF

SEQ ID NO: 758613 - protein, 14 aa, Homo sapiens
  CDR3 for alpha chain variable domain of TCR clone 379307 (TRAV1-2, TRAJ16)
CAVRGFSDGQKRLF

SEQ ID NO: 758614 - protein, 12 aa, Homo sapiens
  CDR3 for beta chain variable domain of TCR clone 379307 (TRBV14, TRBJ2-7)
CASSRLKGEKYF

SEQ ID NO: 758615 - protein, 15 aa, Homo sapiens
  CDR3 for alpha chain variable domain of TCR clone 379308 (TRAV2, TRAJ9)
CAVAALNTGGFKTIF

SEQ ID NO: 758616 - protein, 14 aa, Homo sapiens
  CDR3 for beta chain variable domain of TCR clone 379308 (TRBV12-4, TRBJ1-1)
CASTWTGHDTEAFF

SEQ ID NO: 758617 - protein, 15 aa, Homo sapiens
  CDR3 for alpha chain variable domain of TCR clone 379309 (TRAV6, TRAJ4)
CALDLRRGGYNKLIF

SEQ ID NO: 758618 - protein, 12 aa, Homo sapiens
  CDR3 for beta chain variable domain of TCR clone 379309 (TRBV11-2, TRBJ2-2)
CASSLGGGELFF

SEQ ID NO: 758619 - protein, 13 aa, Homo sapiens
  CDR3 for alpha chain variable domain of TCR clone 379310 (TRAV38-1, TRAJ42)
CALWGGSQGNLIF

SEQ ID NO: 758620 - protein, 17 aa, Homo sapiens
  CDR3 for beta chain variable domain of TCR clone 379310 (TRBV20-1, TRBJ2-1)
CSARDPLAGVWDNEQFF

SEQ ID NO: 758621 - protein, 16 aa, Homo sapiens
  CDR3 for alpha chain variable domain of TCR clone 379311 (TRAV17, TRAJ52)
CATSNAGGTSYGKLTF

SEQ ID NO: 758622 - protein, 14 aa, Homo sapiens
  CDR3 for beta chain variable domain of TCR clone 379311 (TRBV7-6, TRBJ2-3)
CASSLGTVTDTQYF

SEQ ID NO: 758623 - protein, 14 aa, Homo sapiens
  CDR3 for alpha chain variable domain of TCR clone 379312 (TRAV8-4, TRAJ15)
CAVTIREAGTALIF

SEQ ID NO: 758624 - protein, 14 aa, Homo sapiens
  CDR3 for beta chain variable domain of TCR clone 379312 (TRBV11-2, TRBJ2-3)
CASSRLARTDTQYF

SEQ ID NO: 758625 - protein, 14 aa, Homo sapiens
  CDR3 for alpha chain variable domain of TCR clone 379313 (TRAV26-1, TRAJ38)
CIAENAGNNPKLIW

SEQ ID NO: 758626 - protein, 15 aa, Homo sapiens
  CDR3 for beta chain variable domain of TCR clone 379313 (TRBV7-6, TRBJ1-4)
CASSLGAGAGEKLFF

SEQ ID NO: 758627 - protein, 13 aa, Homo sapiens
  CDR3 for alpha chain variable domain of TCR clone 379314 (TRAV8-6, TRAJ49)
CAVITNTVHQFYF

SEQ ID NO: 758628 - protein, 14 aa, Homo sapiens
  CDR3 for beta chain variable domain of TCR clone 379314 (TRBV5-1, TRBJ2-7)
CASSRGESLYEQYF

SEQ ID NO: 758629 - protein, 15 aa, Homo sapiens
  CDR3 for alpha chain variable domain of TCR clone 379315 (TRAV20, TRAJ43)
CAVQAGKSSNNDMRF

SEQ ID NO: 758630 - protein, 18 aa, Homo sapiens
  CDR3 for beta chain variable domain of TCR clone 379315 (TRBV5-1, TRBJ2-7)
CASGLAGFGGMSSYEQYF

SEQ ID NO: 758631 - protein, 13 aa, Homo sapiens
  CDR3 for alpha chain variable domain of TCR clone 379316 (TRAV12-1, TRAJ49)
CVVGANTGNQFYF

SEQ ID NO: 758632 - protein, 13 aa, Homo sapiens
  CDR3 for beta chain variable domain of TCR clone 379316 (TRBV12-5, TRBJ2-3)
CASGDRQSDTQYF

SEQ ID NO: 758633 - protein, 14 aa, Homo sapiens
  CDR3 for alpha chain variable domain of TCR clone 379317 (TRAV12-3, TRAJ12)
CSMSEVDSSYKLIF

SEQ ID NO: 758634 - protein, 12 aa, Homo sapiens
  CDR3 for beta chain variable domain of TCR clone 379317 (TRBV18, TRBJ1-4)
CASSPSREKLFF

SEQ ID NO: 758635 - protein, 13 aa, Homo sapiens
  CDR3 for alpha chain variable domain of TCR clone 379318 (TRAV8-4, TRAJ9)
CAVSETGGFKTIF

SEQ ID NO: 758636 - protein, 14 aa, Homo sapiens
  CDR3 for beta chain variable domain of TCR clone 379318 (TRBV4-2, TRBJ1-4)
CASSQGATNEKLFF

SEQ ID NO: 758637 - protein, 15 aa, Homo sapiens
  CDR3 for alpha chain variable domain of TCR clone 379319 (TRAV20, TRAJ50)
CAVRQMKTYYDKVIF

SEQ ID NO: 758638 - protein, 16 aa, Homo sapiens
  CDR3 for beta chain variable domain of TCR clone 379319 (TRBV15, TRBJ1-2)
CATSRGPRTGGGGYTF

SEQ ID NO: 758639 - protein, 14 aa, Homo sapiens
  CDR3 for alpha chain variable domain of TCR clone 379320 (TRAV12-2, TRAJ32)
CAHPESGATNKLIF

SEQ ID NO: 758640 - protein, 14 aa, Homo sapiens
  CDR3 for beta chain variable domain of TCR clone 379320 (TRBV4-2, TRBJ2-3)
CTSRETRAPGMQYF

SEQ ID NO: 758641 - protein, 14 aa, Homo sapiens
  CDR3 for alpha chain variable domain of TCR clone 379321 (TRAV38-1, TRAJ54)
CALMSPSGAQKLVF

SEQ ID NO: 758642 - protein, 16 aa, Homo sapiens
  CDR3 for beta chain variable domain of TCR clone 379321 (TRBV28, TRBJ2-1)
CASSLGGSGSYNEQFF

SEQ ID NO: 758643 - protein, 16 aa, Homo sapiens
  CDR3 for alpha chain variable domain of TCR clone 379322 (TRAV25, TRAJ53)
CAGPKGSGGSNYKLTF

SEQ ID NO: 758644 - protein, 14 aa, Homo sapiens
  CDR3 for beta chain variable domain of TCR clone 379322 (TRBV7-8, TRBJ2-3)
CASSSRDSTDTQYF

SEQ ID NO: 758645 - protein, 11 aa, Homo sapiens
  CDR3 for alpha chain variable domain of TCR clone 379323 (TRAV3, TRAJ21)
CAVGNFNKFYF

SEQ ID NO: 758646 - protein, 17 aa, Homo sapiens
  CDR3 for beta chain variable domain of TCR clone 379323 (TRBV7-3, TRBJ2-3)
CASSPRGQGYGTDTQYF

SEQ ID NO: 758647 - protein, 12 aa, Homo sapiens
  CDR3 for alpha chain variable domain of TCR clone 379324 (TRAV25, TRAJ11)
CAGASGYSTLTF

SEQ ID NO: 758648 - protein, 12 aa, Homo sapiens
  CDR3 for beta chain variable domain of TCR clone 379324 (TRBV28, TRBJ2-3)
CASSLYRDTQYF

SEQ ID NO: 758649 - protein, 15 aa, Homo sapiens
  CDR3 for alpha chain variable domain of TCR clone 379325 (TRAV29/DV5, TRAJ29)
CSASERSSGNTPLVF

SEQ ID NO: 758650 - protein, 17 aa, Homo sapiens
  CDR3 for beta chain variable domain of TCR clone 379325 (TRBV4-1, TRBJ1-4)
CASSQEGPRGVEEELFF

SEQ ID NO: 758651 - protein, 15 aa, Homo sapiens
  CDR3 for alpha chain variable domain of TCR clone 379326 (TRAV13-1, TRAJ15)
CAASIERQAGTALIF

SEQ ID NO: 758652 - protein, 17 aa, Homo sapiens
  CDR3 for beta chain variable domain of TCR clone 379326 (TRBV11-2, TRBJ2-1)
CASSLYPPGVEYNEQFF

SEQ ID NO: 758653 - protein, 16 aa, Homo sapiens
  CDR3 for alpha chain variable domain of TCR clone 379327 (TRAV21, TRAJ45)
CAVSWGSGGGADGRTF

SEQ ID NO: 758654 - protein, 14 aa, Homo sapiens
  CDR3 for beta chain variable domain of TCR clone 379327 (TRBV4-2, TRBJ1-2)
CASSPGGSNYGCTF

SEQ ID NO: 758655 - protein, 14 aa, Homo sapiens
  CDR3 for alpha chain variable domain of TCR clone 379328 (TRAV8-3, TRAJ44)
CAVGAGGTASKLTF

SEQ ID NO: 758656 - protein, 15 aa, Homo sapiens
  CDR3 for beta chain variable domain of TCR clone 379328 (TRBV13, TRBJ2-1)
CASSLLSGLNNEQFF

SEQ ID NO: 758657 - protein, 11 aa, Homo sapiens
  CDR3 for alpha chain variable domain of TCR clone 379329 (TRAV3, TRAJ17)
CAEAAGNKLTF

SEQ ID NO: 758658 - protein, 15 aa, Homo sapiens
  CDR3 for beta chain variable domain of TCR clone 379329 (TRBV12-4, TRBJ2-7)
CASSLGSGGPDEQYF

SEQ ID NO: 758659 - protein, 15 aa, Homo sapiens
  CDR3 for alpha chain variable domain of TCR clone 379330 (TRAV3, TRAJ20)
CPVRDIKLSDYKLSF

SEQ ID NO: 758660 - protein, 15 aa, Homo sapiens
  CDR3 for beta chain variable domain of TCR clone 379330 (TRBV7-9, TRBJ1-6)
CASSSPGRGNSPLHF

SEQ ID NO: 758661 - protein, 17 aa, Homo sapiens
  CDR3 for alpha chain variable domain of TCR clone 379331 (TRAV12-3, TRAJ6)
CAMSARGGAGGSYIPAF

SEQ ID NO: 758662 - protein, 12 aa, Homo sapiens
  CDR3 for beta chain variable domain of TCR clone 379331 (TRBV12-4, TRBJ2-3)
CASSTLPDTQYF

SEQ ID NO: 758663 - protein, 15 aa, Homo sapiens
  CDR3 for alpha chain variable domain of TCR clone 379332 (TRAV8-4, TRAJ15)
CAVSDPVQAGTALIF

SEQ ID NO: 758664 - protein, 16 aa, Homo sapiens
  CDR3 for beta chain variable domain of TCR clone 379332 (TRBV7-9, TRBJ1-2)
CASSLGFSSGEDGYTF

SEQ ID NO: 758665 - protein, 14 aa, Homo sapiens
  CDR3 for alpha chain variable domain of TCR clone 379333 (TRAV12-2, TRAJ13)
CAVKKTGGYPKVTF

SEQ ID NO: 758666 - protein, 17 aa, Homo sapiens
  CDR3 for beta chain variable domain of TCR clone 379333 (TRBV7-8, TRBJ2-6)
CASSAGTGGAGANVLTF

SEQ ID NO: 758667 - protein, 13 aa, Homo sapiens
  CDR3 for alpha chain variable domain of TCR clone 379334 (TRAV3, TRAJ13)
CAVSKGGYQKVTF

SEQ ID NO: 758668 - protein, 15 aa, Homo sapiens
  CDR3 for beta chain variable domain of TCR clone 379334 (TRBV7-2, TRBJ2-1)
CASSSGLAGGNEQFF

SEQ ID NO: 758669 - protein, 14 aa, Homo sapiens
  CDR3 for alpha chain variable domain of TCR clone 379335 (TRAV1-2, TRAJ29)
CAVRELTSATPLVF

SEQ ID NO: 758670 - protein, 13 aa, Homo sapiens
  CDR3 for beta chain variable domain of TCR clone 379335 (TRBV6-3, TRBJ2-1)
CASSCGVANEQFF

SEQ ID NO: 758671 - protein, 13 aa, Homo sapiens
  CDR3 for alpha chain variable domain of TCR clone 379336 (TRAV13-2, TRAJ40)
CAEFTSGTYKYIF

SEQ ID NO: 758672 - protein, 13 aa, Homo sapiens
  CDR3 for beta chain variable domain of TCR clone 379336 (TRBV12-4, TRBJ2-7)
CASSPTETYEQYF

SEQ ID NO: 758673 - protein, 14 aa, Homo sapiens
  CDR3 for alpha chain variable domain of TCR clone 379337 (TRAV13-1, TRAJ35)
CAASKGGFGNVLHC

SEQ ID NO: 758674 - protein, 13 aa, Homo sapiens
  CDR3 for beta chain variable domain of TCR clone 379337 (TRBV4-1, TRBJ1-1)
CASSRKMNTEAFF

SEQ ID NO: 758675 - protein, 14 aa, Homo sapiens
  CDR3 for alpha chain variable domain of TCR clone 379338 (TRAV12-2, TRAJ45)
RAVYSGGGADGLTF

SEQ ID NO: 758676 - protein, 14 aa, Homo sapiens
  CDR3 for beta chain variable domain of TCR clone 379338 (TRBV6-5, TRBJ1-2)
CASTRGGGSDGYTF

SEQ ID NO: 758677 - protein, 15 aa, Homo sapiens
  CDR3 for alpha chain variable domain of TCR clone 379339 (TRAV21, TRAJ53)
CATLNSGGSNYKLTF

SEQ ID NO: 758678 - protein, 20 aa, Homo sapiens
  CDR3 for beta chain variable domain of TCR clone 379339 (TRBV6-4, TRBJ2-7)
CASSDSSVSGQVPTSYEQYF

SEQ ID NO: 758679 - protein, 15 aa, Homo sapiens
  CDR3 for alpha chain variable domain of TCR clone 379340 (TRAV21, TRAJ53)
CATLNSGGSNYKLTF

SEQ ID NO: 758680 - protein, 14 aa, Homo sapiens
  CDR3 for beta chain variable domain of TCR clone 379340 (TRBV6-6, TRBJ2-7)
CASSDSGAGYEQYF

SEQ ID NO: 758681 - protein, 11 aa, Homo sapiens
  CDR3 for alpha chain variable domain of TCR clone 379341 (TRAV2, TRAJ21)
CAVFNFNKFYF

SEQ ID NO: 758682 - protein, 14 aa, Homo sapiens
  CDR3 for beta chain variable domain of TCR clone 379341 (TRBV15, TRBJ2-3)
CATMSGTSTDTQYF

SEQ ID NO: 758683 - protein, 12 aa, Homo sapiens
  CDR3 for alpha chain variable domain of TCR clone 379342 (TRAV21, TRAJ13)
PGPSGGYQKVTF

SEQ ID NO: 758684 - protein, 13 aa, Homo sapiens
  CDR3 for beta chain variable domain of TCR clone 379342 (TRBV2, TRBJ1-1)
CASNLLRNTEAFF

SEQ ID NO: 758685 - protein, 10 aa, Homo sapiens
  CDR3 for alpha chain variable domain of TCR clone 379343 (TRAV23/DV6, TRAJ3)
CAATTFALGG

SEQ ID NO: 758686 - protein, 15 aa, Homo sapiens
  CDR3 for beta chain variable domain of TCR clone 379343 (TRBV19, TRBJ1-6)
CASSTQGAVGSPLLF

SEQ ID NO: 758687 - protein, 19 aa, Homo sapiens
  CDR3 for alpha chain variable domain of TCR clone 379344 (TRAV9-2, TRAJ52)
CALSFSLLSGGTSYGKLTF

SEQ ID NO: 758688 - protein, 14 aa, Homo sapiens
  CDR3 for beta chain variable domain of TCR clone 379344 (TRBV7-6, TRBJ2-7)
CASSLVQDSYEQYF

SEQ ID NO: 758689 - protein, 15 aa, Homo sapiens
  CDR3 for alpha chain variable domain of TCR clone 379345 (TRAV8-3, TRAJ6)
CAVGPLGGVSYIPTF

SEQ ID NO: 758690 - protein, 14 aa, Homo sapiens
  CDR3 for beta chain variable domain of TCR clone 379345 (TRBV19, TRBJ2-2)
CASSTGQGAGELFF

SEQ ID NO: 758691 - protein, 14 aa, Homo sapiens
  CDR3 for alpha chain variable domain of TCR clone 379346 (TRAV12-1, TRAJ37)
WVVTGSSNTGKLIF

SEQ ID NO: 758692 - protein, 20 aa, Homo sapiens
  CDR3 for beta chain variable domain of TCR clone 379346 (TRBV23-1, TRBJ2-5)
CISAPAVPERVLLIQETQYF

SEQ ID NO: 758693 - protein, 14 aa, Homo sapiens
  CDR3 for alpha chain variable domain of TCR clone 379347 (TRAV8-1, TRAJ15)
CAVNGQQAGTALIF

SEQ ID NO: 758694 - protein, 12 aa, Homo sapiens
  CDR3 for beta chain variable domain of TCR clone 379347 (TRBV12-4, TRBJ1-2)
CASSFIWLHLRF

SEQ ID NO: 758695 - protein, 14 aa, Homo sapiens
  CDR3 for alpha chain variable domain of TCR clone 379348 (TRAV13-1, TRAJ20)
CAVRPGSNDYKLSF

SEQ ID NO: 758696 - protein, 15 aa, Homo sapiens
  CDR3 for beta chain variable domain of TCR clone 379348 (TRBV4-1, TRBJ2-7)
CASSQQGQGFDEQYF

SEQ ID NO: 758697 - protein, 14 aa, Homo sapiens
  CDR3 for alpha chain variable domain of TCR clone 379349 (TRAV21, TRAJ6)
CAVKWLVGSYIPTF

SEQ ID NO: 758698 - protein, 16 aa, Homo sapiens
  CDR3 for beta chain variable domain of TCR clone 379349 (TRBV5-1, TRBJ2-5)
CASSLRRTSGQETQYF

SEQ ID NO: 758699 - protein, 17 aa, Homo sapiens
  CDR3 for alpha chain variable domain of TCR clone 379350 (TRAV26-1, TRAJ37)
CIVRVITVSSSTGKLIF

SEQ ID NO: 758700 - protein, 15 aa, Homo sapiens
  CDR3 for beta chain variable domain of TCR clone 379350 (TRBV2, TRBJ2-1)
CASSEARSAYNEQFF

SEQ ID NO: 758701 - protein, 13 aa, Homo sapiens
  CDR3 for alpha chain variable domain of TCR clone 379351 (TRAV8-3, TRAJ44)
CAVVPGTASKLTF

SEQ ID NO: 758702 - protein, 14 aa, Homo sapiens
  CDR3 for beta chain variable domain of TCR clone 379351 (TRBV11-2, TRBJ2-3)
CASSRLARTDTQYC

SEQ ID NO: 758703 - protein, 17 aa, Homo sapiens
  CDR3 for alpha chain variable domain of TCR clone 379352 (TRAV23/DV6, TRAJ57)
CATSSTLSRGGSEKLVF

SEQ ID NO: 758704 - protein, 14 aa, Homo sapiens
  CDR3 for beta chain variable domain of TCR clone 379352 (TRBV25-1, TRBJ1-1)
CASTHLGGNTEAFF

SEQ ID NO: 758705 - protein, 16 aa, Homo sapiens
  CDR3 for alpha chain variable domain of TCR clone 379353 (TRAV12-3, TRAJ53)
CAMSPGSGGSNYKLTF

SEQ ID NO: 758706 - protein, 15 aa, Homo sapiens
  CDR3 for beta chain variable domain of TCR clone 379353 (TRBV10-3, TRBJ2-1)
CAIRNGTSGHNEQFF

SEQ ID NO: 758707 - protein, 13 aa, Homo sapiens
  CDR3 for alpha chain variable domain of TCR clone 379354 (TRAV17, TRAJ22)
CAHHSGSARQLTF

SEQ ID NO: 758708 - protein, 12 aa, Homo sapiens
  CDR3 for beta chain variable domain of TCR clone 379354 (TRBV5-5, TRBJ1-2)
CASSALNYGYTF

SEQ ID NO: 758709 - protein, 14 aa, Homo sapiens
  CDR3 for alpha chain variable domain of TCR clone 379355 (TRAV12-3, TRAJ10)
SHLPLTGGGNKLTF

SEQ ID NO: 758710 - protein, 13 aa, Homo sapiens
  CDR3 for beta chain variable domain of TCR clone 379355 (TRBV19, TRBJ2-7)
CASRKAGGSEQYF

SEQ ID NO: 758711 - protein, 13 aa, Homo sapiens
  CDR3 for alpha chain variable domain of TCR clone 379356 (TRAV8-3, TRAJ44)
CAVVPGTASKLTF

SEQ ID NO: 758712 - protein, 15 aa, Homo sapiens
  CDR3 for beta chain variable domain of TCR clone 379356 (TRBV27, TRBJ2-3)
CASSSLAGVIDTQYF

SEQ ID NO: 758713 - protein, 14 aa, Homo sapiens
  CDR3 for alpha chain variable domain of TCR clone 379357 (TRAV17, TRAJ31)
CATAPLSGNARLMF

SEQ ID NO: 758714 - protein, 15 aa, Homo sapiens
  CDR3 for beta chain variable domain of TCR clone 379357 (TRBV15, TRBJ2-2)
CATSGTGGRVGELFV

SEQ ID NO: 758715 - protein, 18 aa, Homo sapiens
  CDR3 for alpha chain variable domain of TCR clone 379358 (TRAV21, TRAJ52)
CAVRPSPAGGTSYRKLTF

SEQ ID NO: 758716 - protein, 17 aa, Homo sapiens
  CDR3 for beta chain variable domain of TCR clone 379358 (TRBV13, TRBJ2-3)
CASSPSRVAGGRNTQYF

SEQ ID NO: 758717 - protein, 16 aa, Homo sapiens
  CDR3 for alpha chain variable domain of TCR clone 379359 (TRAV8-3, TRAJ10)
CAVGPGVTGGGNKLTY

SEQ ID NO: 758718 - protein, 13 aa, Homo sapiens
  CDR3 for beta chain variable domain of TCR clone 379359 (TRBV18, TRBJ1-1)
CASSPGPSGEAFF

SEQ ID NO: 758719 - protein, 13 aa, Homo sapiens
  CDR3 for alpha chain variable domain of TCR clone 379360 (TRAV35, TRAJ32)
CAGVGGAKNKLIF

SEQ ID NO: 758720 - protein, 17 aa, Homo sapiens
  CDR3 for beta chain variable domain of TCR clone 379360 (TRBV4-3, TRBJ2-1)
CASSQFSSGRASGEQFF

SEQ ID NO: 758721 - protein, 13 aa, Homo sapiens
  CDR3 for alpha chain variable domain of TCR clone 379361 (TRAV8-6, TRAJ41)
CAVSENSGYALNF

SEQ ID NO: 758722 - protein, 17 aa, Homo sapiens
  CDR3 for beta chain variable domain of TCR clone 379361 (TRBV7-2, TRBJ2-3)
CASSLEARGTSTNTQYF

SEQ ID NO: 758723 - protein, 14 aa, Homo sapiens
  CDR3 for alpha chain variable domain of TCR clone 379362 (TRAV8-1, TRAJ6)
CAVNASGVSYISTF

SEQ ID NO: 758724 - protein, 16 aa, Homo sapiens
  CDR3 for beta chain variable domain of TCR clone 379362 (TRBV5-7, TRBJ2-7)
CASSSPGGRTPYEQYF

SEQ ID NO: 758725 - protein, 14 aa, Homo sapiens
  CDR3 for alpha chain variable domain of TCR clone 379363 (TRAV1-2, TRAJ16)
CAVNRFSDGQKLLL

SEQ ID NO: 758726 - protein, 13 aa, Homo sapiens
  CDR3 for beta chain variable domain of TCR clone 379363 (TRBV4-1, TRBJ2-1)
CASSQAGGDGQFF

SEQ ID NO: 758727 - protein, 14 aa, Homo sapiens
  CDR3 for alpha chain variable domain of TCR clone 379364 (TRAV38-1, TRAJ45)
CAYYSGGGADGLTF

SEQ ID NO: 758728 - protein, 16 aa, Homo sapiens
  CDR3 for beta chain variable domain of TCR clone 379364 (TRBV5-1, TRBJ2-2)
CASSLWDTTNTGELFF

SEQ ID NO: 758729 - protein, 14 aa, Homo sapiens
  CDR3 for alpha chain variable domain of TCR clone 379365 (TRAV12-1, TRAJ43)
CVVNGRSNNNDMHF

SEQ ID NO: 758730 - protein, 13 aa, Homo sapiens
  CDR3 for beta chain variable domain of TCR clone 379365 (TRBV10-3, TRBJ2-7)
CASKLAVNYEQYF

SEQ ID NO: 758731 - protein, 13 aa, Homo sapiens
  CDR3 for alpha chain variable domain of TCR clone 379366 (TRAV34, TRAJ33)
CGADMNSNYQLIW

SEQ ID NO: 758732 - protein, 16 aa, Homo sapiens
  CDR3 for beta chain variable domain of TCR clone 379366 (TRBV20-1, TRBJ2-1)
CSASIAGGSGYNEQFF

SEQ ID NO: 758733 - protein, 18 aa, Homo sapiens
  CDR3 for alpha chain variable domain of TCR clone 379367 (TRAV26-1, TRAJ27)
CIVRPSFNYNTNAGKSTF

SEQ ID NO: 758734 - protein, 15 aa, Homo sapiens
  CDR3 for beta chain variable domain of TCR clone 379367 (TRBV6-3, TRBJ2-7)
CASSSPGTVFYEQYF

SEQ ID NO: 758735 - protein, 14 aa, Homo sapiens
  CDR3 for alpha chain variable domain of TCR clone 379368 (TRAV4, TRAJ26)
CIVGPHNYGQNFVF

SEQ ID NO: 758736 - protein, 17 aa, Homo sapiens
  CDR3 for beta chain variable domain of TCR clone 379368 (TRBV24-1, TRBJ2-1)
CATSDVSTSGTYNEQFF

SEQ ID NO: 758737 - protein, 13 aa, Homo sapiens
  CDR3 for alpha chain variable domain of TCR clone 379369 (TRAV9-2, TRAJ9)
CALSDTGGFKTIF

SEQ ID NO: 758738 - protein, 14 aa, Homo sapiens
  CDR3 for beta chain variable domain of TCR clone 379369 (TRBV19, TRBJ2-1)
CASPTFVLSGEQFF

SEQ ID NO: 758739 - protein, 15 aa, Homo sapiens
  CDR3 for alpha chain variable domain of TCR clone 379370 (TRAV2, TRAJ15)
CAVEDRKKAGTALIF

SEQ ID NO: 758740 - protein, 13 aa, Homo sapiens
  CDR3 for beta chain variable domain of TCR clone 379370 (TRBV10-3, TRBJ2-7)
CASKLAVNYEQYF

SEQ ID NO: 758741 - protein, 15 aa, Homo sapiens
  CDR3 for alpha chain variable domain of TCR clone 379371 (TRAV34, TRAJ38)
CGADFTPGNNRKLIW

SEQ ID NO: 758742 - protein, 15 aa, Homo sapiens
  CDR3 for beta chain variable domain of TCR clone 379371 (TRBV2, TRBJ2-4)
CASSGTNLAKNIQYF

SEQ ID NO: 758743 - protein, 14 aa, Homo sapiens
  CDR3 for alpha chain variable domain of TCR clone 379372 (TRAV8-3, TRAJ44)
CAVGLTGTASKLTF

SEQ ID NO: 758744 - protein, 13 aa, Homo sapiens
  CDR3 for beta chain variable domain of TCR clone 379372 (TRBV11-2, TRBJ2-5)
CASSRGPSETQYF

SEQ ID NO: 758745 - protein, 14 aa, Homo sapiens
  CDR3 for alpha chain variable domain of TCR clone 379373 (TRAV9-2, TRAJ39)
CALYIYNVGNMLTF

SEQ ID NO: 758746 - protein, 13 aa, Homo sapiens
  CDR3 for beta chain variable domain of TCR clone 379373 (TRBV7-9, TRBJ1-2)
CASSLKQNYGYTF

SEQ ID NO: 758747 - protein, 12 aa, Homo sapiens
  CDR3 for alpha chain variable domain of TCR clone 379374 (TRAV3, TRAJ26)
CAVRDYGQNLVF

SEQ ID NO: 758748 - protein, 16 aa, Homo sapiens
  CDR3 for beta chain variable domain of TCR clone 379374 (TRBV11-2, TRBJ1-2)
CASSPSGREANYGYTF

SEQ ID NO: 758749 - protein, 13 aa, Homo sapiens
  CDR3 for alpha chain variable domain of TCR clone 379375 (TRAV12-3, TRAJ13)
CSMSSGGYQEVTF

SEQ ID NO: 758750 - protein, 13 aa, Homo sapiens
  CDR3 for beta chain variable domain of TCR clone 379375 (TRBV20-1, TRBJ1-1)
CSAPPGGHTEAFC

SEQ ID NO: 758751 - protein, 14 aa, Homo sapiens
  CDR3 for alpha chain variable domain of TCR clone 379376 (TRAV35, TRAJ10)
CAGILTGGGNKLTF

SEQ ID NO: 758752 - protein, 16 aa, Homo sapiens
  CDR3 for beta chain variable domain of TCR clone 379376 (TRBV6-1, TRBJ2-5)
CASSETLDRGAETQYF

SEQ ID NO: 758753 - protein, 15 aa, Homo sapiens
  CDR3 for alpha chain variable domain of TCR clone 379377 (TRAV3, TRAJ22)
CAVRDRGGSARQLTF

SEQ ID NO: 758754 - protein, 17 aa, Homo sapiens
  CDR3 for beta chain variable domain of TCR clone 379377 (TRBV11-2, TRBJ2-1)
CASSLSPPGVEYNEQFF

SEQ ID NO: 758755 - protein, 12 aa, Homo sapiens
  CDR3 for alpha chain variable domain of TCR clone 379378 (TRAV16, TRAJ10)
CSRTGGGNKLTF

SEQ ID NO: 758756 - protein, 13 aa, Homo sapiens
  CDR3 for beta chain variable domain of TCR clone 379378 (TRBV2, TRBJ1-1)
CARNPTGGFHAFL

SEQ ID NO: 758757 - protein, 11 aa, Homo sapiens
  CDR3 for alpha chain variable domain of TCR clone 379379 (TRAV3, TRAJ21)
CAVGNFNKFYF

SEQ ID NO: 758758 - protein, 16 aa, Homo sapiens
  CDR3 for beta chain variable domain of TCR clone 379379 (TRBV15, TRBJ2-1)
CATSRERLAGAYEQFF

SEQ ID NO: 758759 - protein, 16 aa, Homo sapiens
  CDR3 for alpha chain variable domain of TCR clone 379380 (TRAV3, TRAJ37)
CAVIGRGSGNTGKLIF

SEQ ID NO: 758760 - protein, 13 aa, Homo sapiens
  CDR3 for beta chain variable domain of TCR clone 379380 (TRBV14, TRBJ2-7)
CASSQDRRGEQYF

SEQ ID NO: 758761 - protein, 13 aa, Homo sapiens
  CDR3 for alpha chain variable domain of TCR clone 379381 (TRAV8-3, TRAJ38)
CARNTGNNRKLIW

SEQ ID NO: 758762 - protein, 13 aa, Homo sapiens
  CDR3 for beta chain variable domain of TCR clone 379381 (TRBV12-4, TRBJ2-2)
CASSITGSGELFF

SEQ ID NO: 758763 - protein, 14 aa, Homo sapiens
  CDR3 for alpha chain variable domain of TCR clone 379382 (TRAV1-1, TRAJ27)
CAVIYNNNAGKSTF

SEQ ID NO: 758764 - protein, 13 aa, Homo sapiens
  CDR3 for beta chain variable domain of TCR clone 379382 (TRBV7-9, TRBJ1-2)
CASSLKQNYGYTF

SEQ ID NO: 758765 - protein, 23 aa, Homo sapiens
  CDR3 for alpha chain variable domain of TCR clone 379383 (TRAV26-1, )
CIADNAGNDHIQNPDPAVYQLRD

SEQ ID NO: 758766 - protein, 15 aa, Homo sapiens
  CDR3 for beta chain variable domain of TCR clone 379383 (TRBV4-1, TRBJ2-3)
CASSRGQGIPDTQYF

SEQ ID NO: 758767 - protein, 14 aa, Homo sapiens
  CDR3 for alpha chain variable domain of TCR clone 379384 (TRAV20, TRAJ42)
CAVQAGGSLGNLIF

SEQ ID NO: 758768 - protein, 14 aa, Homo sapiens
  CDR3 for beta chain variable domain of TCR clone 379384 (TRBV28, TRBJ1-2)
CASRIQGANYGYTF

SEQ ID NO: 758769 - protein, 19 aa, Homo sapiens
  CDR3 for alpha chain variable domain of TCR clone 379385 (TRAV38-1, TRAJ53)
CAFMKHGLENGGSNYKLTF

SEQ ID NO: 758770 - protein, 13 aa, Homo sapiens
  CDR3 for beta chain variable domain of TCR clone 379385 (TRBV19, TRBJ2-7)
CASSPRQSYEQYF

SEQ ID NO: 758771 - protein, 14 aa, Homo sapiens
  CDR3 for alpha chain variable domain of TCR clone 379386 (TRAV17, TRAJ36)
CATVSLNWGKQPLF

SEQ ID NO: 758772 - protein, 13 aa, Homo sapiens
  CDR3 for beta chain variable domain of TCR clone 379386 (TRBV4-1, TRBJ1-1)
CASSQLGTGEAFF

SEQ ID NO: 758773 - protein, 12 aa, Homo sapiens
  CDR3 for alpha chain variable domain of TCR clone 379387 (TRAV17, TRAJ4)
CATRGGYNKLIF

SEQ ID NO: 758774 - protein, 15 aa, Homo sapiens
  CDR3 for beta chain variable domain of TCR clone 379387 (TRBV5-1, TRBJ2-1)
CASSPPRAPYNEQFF

SEQ ID NO: 758775 - protein, 16 aa, Homo sapiens
  CDR3 for alpha chain variable domain of TCR clone 379388 (TRAV35, TRAJ28)
CAGQKYSGAGSYQLTF

SEQ ID NO: 758776 - protein, 16 aa, Homo sapiens
  CDR3 for beta chain variable domain of TCR clone 379388 (TRBV7-3, TRBJ2-2)
WASSLKRGTLSGELFF

SEQ ID NO: 758777 - protein, 13 aa, Homo sapiens
  CDR3 for alpha chain variable domain of TCR clone 379389 (TRAV9-2, TRAJ53)
CALSGGSNYKLTF

SEQ ID NO: 758778 - protein, 12 aa, Homo sapiens
  CDR3 for beta chain variable domain of TCR clone 379389 (TRBV11-2, TRBJ2-1)
CASSPGNNEQFF

SEQ ID NO: 758779 - protein, 14 aa, Homo sapiens
  CDR3 for alpha chain variable domain of TCR clone 379390 (TRAV12-3, TRAJ10)
SHLPLTGGGNKLTF

SEQ ID NO: 758780 - protein, 17 aa, Homo sapiens
  CDR3 for beta chain variable domain of TCR clone 379390 (TRBV4-1, TRBJ1-4)
CASSDTGGTNEKRFLAV

SEQ ID NO: 758781 - protein, 10 aa, Homo sapiens
  CDR3 for alpha chain variable domain of TCR clone 379391 (TRAV12-1, TRAJ41)
CVVPELKFRV

SEQ ID NO: 758782 - protein, 13 aa, Homo sapiens
  CDR3 for beta chain variable domain of TCR clone 379391 (TRBV6-1, TRBJ1-1)
CASSRQGNTEAFF

SEQ ID NO: 758783 - protein, 15 aa, Homo sapiens
  CDR3 for alpha chain variable domain of TCR clone 379392 (TRAV1-2, TRAJ8)
CAVRPMNTGFQKLVF

SEQ ID NO: 758784 - protein, 14 aa, Homo sapiens
  CDR3 for beta chain variable domain of TCR clone 379392 (TRBV7-8, TRBJ1-2)
CASSPDSLSYGYTF

SEQ ID NO: 758785 - protein, 15 aa, Homo sapiens
  CDR3 for alpha chain variable domain of TCR clone 379393 (TRAV25, TRAJ52)
CAGTSGGTSYGKLTF

SEQ ID NO: 758786 - protein, 16 aa, Homo sapiens
  CDR3 for beta chain variable domain of TCR clone 379393 (TRBV15, TRBJ1-2)
CATSRGARTGGGDYTF

SEQ ID NO: 758787 - protein, 14 aa, Homo sapiens
  CDR3 for alpha chain variable domain of TCR clone 379394 (TRAV23/DV6, TRAJ37)
CAASTSSNTGKLIF

SEQ ID NO: 758788 - protein, 13 aa, Homo sapiens
  CDR3 for beta chain variable domain of TCR clone 379394 (TRBV5-1, TRBJ2-7)
CASIGTDSYEQYF

SEQ ID NO: 758789 - protein, 14 aa, Homo sapiens
  CDR3 for alpha chain variable domain of TCR clone 379395 (TRAV23/DV6, TRAJ24)
CAASLSDSWGKLQF

SEQ ID NO: 758790 - protein, 15 aa, Homo sapiens
  CDR3 for beta chain variable domain of TCR clone 379395 (TRBV9, TRBJ1-6)
CASSVAGTGDSPLYF

SEQ ID NO: 758791 - protein, 13 aa, Homo sapiens
  CDR3 for alpha chain variable domain of TCR clone 379396 (TRAV3, TRAJ20)
CAVRDTGDYKLSF

SEQ ID NO: 758792 - protein, 16 aa, Homo sapiens
  CDR3 for beta chain variable domain of TCR clone 379396 (TRBV7-9, TRBJ2-6)
CASSLKGPLRANVLTF

SEQ ID NO: 758793 - protein, 13 aa, Homo sapiens
  CDR3 for alpha chain variable domain of TCR clone 379397 (TRAV8-4, TRAJ48)
CAVSLFGNEKLTF

SEQ ID NO: 758794 - protein, 14 aa, Homo sapiens
  CDR3 for beta chain variable domain of TCR clone 379397 (TRBV28, TRBJ2-1)
CASKMTGQGNEQFF

SEQ ID NO: 758795 - protein, 15 aa, Homo sapiens
  CDR3 for alpha chain variable domain of TCR clone 379398 (TRAV25, TRAJ52)
CAGRPGGTCYGKLTF

SEQ ID NO: 758796 - protein, 17 aa, Homo sapiens
  CDR3 for beta chain variable domain of TCR clone 379398 (TRBV7-8, TRBJ2-6)
CASSAGTGGAGDNDLTF

SEQ ID NO: 758797 - protein, 13 aa, Homo sapiens
  CDR3 for alpha chain variable domain of TCR clone 379399 (TRAV8-6, TRAJ49)
CAVITNTGNQFYF

SEQ ID NO: 758798 - protein, 16 aa, Homo sapiens
  CDR3 for beta chain variable domain of TCR clone 379399 (TRBV15, TRBJ1-2)
CATSRGPRTGGGGYTF

SEQ ID NO: 758799 - protein, 14 aa, Homo sapiens
  CDR3 for alpha chain variable domain of TCR clone 379400 (TRAV4, TRAJ26)
CLVGPHNYGQNFVF

SEQ ID NO: 758800 - protein, 12 aa, Homo sapiens
  CDR3 for beta chain variable domain of TCR clone 379400 (TRBV7-9, TRBJ2-7)
CASSLEGYEQYF

SEQ ID NO: 758801 - protein, 16 aa, Homo sapiens
  CDR3 for alpha chain variable domain of TCR clone 379401 (TRAV8-3, TRAJ48)
CAVGHISNFGNVKLTF

SEQ ID NO: 758802 - protein, 13 aa, Homo sapiens
  CDR3 for beta chain variable domain of TCR clone 379401 (TRBV20-1, TRBJ1-5)
CSASWGRSQPQHF

SEQ ID NO: 758803 - protein, 12 aa, Homo sapiens
  CDR3 for alpha chain variable domain of TCR clone 379402 (TRAV13-1, TRAJ20)
CAASRGDYKLSF

SEQ ID NO: 758804 - protein, 16 aa, Homo sapiens
  CDR3 for beta chain variable domain of TCR clone 379402 (TRBV24-1, TRBJ2-3)
CATSDRRQDLTDTQYF

SEQ ID NO: 758805 - protein, 13 aa, Homo sapiens
  CDR3 for alpha chain variable domain of TCR clone 379403 (TRAV2, TRAJ24)
CAVSTDSWGKLQF

SEQ ID NO: 758806 - protein, 14 aa, Homo sapiens
  CDR3 for beta chain variable domain of TCR clone 379403 (TRBV13, TRBJ2-5)
CTSSLGTAQETQYF

SEQ ID NO: 758807 - protein, 16 aa, Homo sapiens
  CDR3 for alpha chain variable domain of TCR clone 379404 (TRAV3, TRAJ37)
CAVRPPGSGNTGKLIF

SEQ ID NO: 758808 - protein, 14 aa, Homo sapiens
  CDR3 for beta chain variable domain of TCR clone 379404 (TRBV25-1, TRBJ1-1)
CASTHLGGNTEAFF

SEQ ID NO: 758809 - protein, 17 aa, Homo sapiens
  CDR3 for alpha chain variable domain of TCR clone 379405 (TRAV13-1, TRAJ28)
CAASPPYSGAVSYQLTF

SEQ ID NO: 758810 - protein, 19 aa, Homo sapiens
  CDR3 for beta chain variable domain of TCR clone 379405 (TRBV25-1, TRBJ2-2)
CAILVYRVDRGRKTGELFF

SEQ ID NO: 758811 - protein, 12 aa, Homo sapiens
  CDR3 for alpha chain variable domain of TCR clone 379406 (TRAV1-1, TRAJ39)
CAVPVVGNMLTF

SEQ ID NO: 758812 - protein, 14 aa, Homo sapiens
  CDR3 for beta chain variable domain of TCR clone 379406 (TRBV11-2, TRBJ2-3)
CANSRLARTDTQYF

SEQ ID NO: 758813 - protein, 12 aa, Homo sapiens
  CDR3 for alpha chain variable domain of TCR clone 379407 (TRAV13-2, TRAJ23)
CAERHRGGKLIF

SEQ ID NO: 758814 - protein, 16 aa, Homo sapiens
  CDR3 for beta chain variable domain of TCR clone 379407 (TRBV20-1, TRBJ1-4)
CSAPGQGLLTNENLFF

SEQ ID NO: 758815 - protein, 11 aa, Homo sapiens
  CDR3 for alpha chain variable domain of TCR clone 379408 (TRAV2, TRAJ13)
CASGGYQKVTF

SEQ ID NO: 758816 - protein, 18 aa, Homo sapiens
  CDR3 for beta chain variable domain of TCR clone 379408 (TRBV20-1, TRBJ2-6)
RSAETTPTHGSGANVLTF

SEQ ID NO: 758817 - protein, 14 aa, Homo sapiens
  CDR3 for alpha chain variable domain of TCR clone 379409 (TRAV3, TRAJ34)
CAVRDINNTDNLIF

SEQ ID NO: 758818 - protein, 14 aa, Homo sapiens
  CDR3 for beta chain variable domain of TCR clone 379409 (TRBV7-2, TRBJ2-2)
CASSLGQNTGELFF

SEQ ID NO: 758819 - protein, 13 aa, Homo sapiens
  CDR3 for alpha chain variable domain of TCR clone 379410 (TRAV12-1, TRAJ12)
CVVNIESSYKLIF

SEQ ID NO: 758820 - protein, 13 aa, Homo sapiens
  CDR3 for beta chain variable domain of TCR clone 379410 (TRBV7-9, TRBJ2-3)
CASSPGSTDTQYF

SEQ ID NO: 758821 - protein, 19 aa, Homo sapiens
  CDR3 for alpha chain variable domain of TCR clone 379411 (TRAV2, TRAJ32)
TTVHSTPPSQGGATNKLIF

SEQ ID NO: 758822 - protein, 12 aa, Homo sapiens
  CDR3 for beta chain variable domain of TCR clone 379411 (TRBV20-1, TRBJ2-7)
CSAITPTKEQYF

SEQ ID NO: 758823 - protein, 12 aa, Homo sapiens
  CDR3 for alpha chain variable domain of TCR clone 379412 (TRAV27, TRAJ35)
CAGAGFGNVLHF

SEQ ID NO: 758824 - protein, 16 aa, Homo sapiens
  CDR3 for beta chain variable domain of TCR clone 379412 (TRBV6-1, TRBJ2-1)
CASILRQGSSYNEQFF

SEQ ID NO: 758825 - protein, 13 aa, Homo sapiens
  CDR3 for alpha chain variable domain of TCR clone 379413 (TRAV2, TRAJ40)
CAVVTSGTYKYIF

SEQ ID NO: 758826 - protein, 15 aa, Homo sapiens
  CDR3 for beta chain variable domain of TCR clone 379413 (TRBV28, TRBJ2-1)
CASSGLAEVENEQFF

SEQ ID NO: 758827 - protein, 11 aa, Homo sapiens
  CDR3 for alpha chain variable domain of TCR clone 379414 (TRAV8-2, TRAJ26)
CVVTLLLGSEF

SEQ ID NO: 758828 - protein, 15 aa, Homo sapiens
  CDR3 for beta chain variable domain of TCR clone 379414 (TRBV11-2, TRBJ2-2)
CASSSVRVNAGELFF

SEQ ID NO: 758829 - protein, 12 aa, Homo sapiens
  CDR3 for alpha chain variable domain of TCR clone 379415 (TRAV6, TRAJ10)
CALERGGNKLTF

SEQ ID NO: 758830 - protein, 15 aa, Homo sapiens
  CDR3 for beta chain variable domain of TCR clone 379415 (TRBV12-4, TRBJ1-5)
CASSSPGRSNQPQHF

SEQ ID NO: 758831 - protein, 14 aa, Homo sapiens
  CDR3 for alpha chain variable domain of TCR clone 379416 (TRAV12-3, TRAJ6)
CAMSATGGSYIPTF

SEQ ID NO: 758832 - protein, 16 aa, Homo sapiens
  CDR3 for beta chain variable domain of TCR clone 379416 (TRBV4-2, TRBJ2-1)
CASSTRAGQGANEQFF

SEQ ID NO: 758833 - protein, 13 aa, Homo sapiens
  CDR3 for alpha chain variable domain of TCR clone 379417 (TRAV27, TRAJ54)
SAGAGQGAQKLVF

SEQ ID NO: 758834 - protein, 15 aa, Homo sapiens
  CDR3 for beta chain variable domain of TCR clone 379417 (TRBV18, TRBJ2-6)
CASSPSYAGANVLTF

SEQ ID NO: 758835 - protein, 12 aa, Homo sapiens
  CDR3 for alpha chain variable domain of TCR clone 379418 (TRAV13-1, TRAJ21)
CAAKEGFNKFYC

SEQ ID NO: 758836 - protein, 14 aa, Homo sapiens
  CDR3 for beta chain variable domain of TCR clone 379418 (TRBV5-4, TRBJ1-1)
CASSLDSRRDEAFF

SEQ ID NO: 758837 - protein, 14 aa, Homo sapiens
  CDR3 for alpha chain variable domain of TCR clone 379419 (TRAV2, TRAJ9)
CAVEDRSGGFKPIF

SEQ ID NO: 758838 - protein, 14 aa, Homo sapiens
  CDR3 for beta chain variable domain of TCR clone 379419 (TRBV19, TRBJ2-1)
CASPTFVLSGEQFF

SEQ ID NO: 758839 - protein, 11 aa, Homo sapiens
  CDR3 for alpha chain variable domain of TCR clone 379420 (TRAV29/DV5, TRAJ47)
CAATYGNKLVF

SEQ ID NO: 758840 - protein, 17 aa, Homo sapiens
  CDR3 for beta chain variable domain of TCR clone 379420 (TRBV7-9, TRBJ2-1)
RASSLVASYPSYNEQFF

SEQ ID NO: 758841 - protein, 14 aa, Homo sapiens
  CDR3 for alpha chain variable domain of TCR clone 379421 (TRAV12-2, TRAJ17)
CAALFKAAGNRLTF

SEQ ID NO: 758842 - protein, 16 aa, Homo sapiens
  CDR3 for beta chain variable domain of TCR clone 379421 (TRBV20-1, TRBJ2-2)
CSASASGIPGAGELFF

SEQ ID NO: 758843 - protein, 17 aa, Homo sapiens
  CDR3 for alpha chain variable domain of TCR clone 379422 (TRAV12-1, TRAJ27)
CVVNMSAAGTNAGKSTF

SEQ ID NO: 758844 - protein, 15 aa, Homo sapiens
  CDR3 for beta chain variable domain of TCR clone 379422 (TRBV4-3, TRBJ1-2)
CASSQNCGVMDGYTF

SEQ ID NO: 758845 - protein, 14 aa, Homo sapiens
  CDR3 for alpha chain variable domain of TCR clone 379423 (TRAV12-1, TRAJ38)
CGELKAGNNRKLLW

SEQ ID NO: 758846 - protein, 12 aa, Homo sapiens
  CDR3 for beta chain variable domain of TCR clone 379423 (TRBV24-1, TRBJ1-1)
CATLYPDTEAFF

SEQ ID NO: 758847 - protein, 17 aa, Homo sapiens
  CDR3 for alpha chain variable domain of TCR clone 379424 (TRAV3, TRAJ6)
CAVRDGPRAGGSSIPTF

SEQ ID NO: 758848 - protein, 16 aa, Homo sapiens
  CDR3 for beta chain variable domain of TCR clone 379424 (TRBV15, TRBJ2-3)
CATSRDLGIVTDTQYF

SEQ ID NO: 758849 - protein, 17 aa, Homo sapiens
  CDR3 for alpha chain variable domain of TCR clone 379425 (TRAV3, TRAJ6)
CAVRDGPRAGGSYIPTF

SEQ ID NO: 758850 - protein, 15 aa, Homo sapiens
  CDR3 for beta chain variable domain of TCR clone 379425 (TRBV7-3, TRBJ2-1)
CQQLQTSGRYNEQFF

SEQ ID NO: 758851 - protein, 14 aa, Homo sapiens
  CDR3 for alpha chain variable domain of TCR clone 379426 (TRAV12-2, TRAJ15)
CAPHTGQAGTALLF

SEQ ID NO: 758852 - protein, 14 aa, Homo sapiens
  CDR3 for beta chain variable domain of TCR clone 379426 (TRBV7-2, TRBJ2-7)
CASSPKTSFYEQYF

SEQ ID NO: 758853 - protein, 12 aa, Homo sapiens
  CDR3 for alpha chain variable domain of TCR clone 379427 (TRAV12-3, TRAJ17)
CAMTLTGNKLTF

SEQ ID NO: 758854 - protein, 16 aa, Homo sapiens
  CDR3 for beta chain variable domain of TCR clone 379427 (TRBV6-1, TRBJ2-5)
CASSERTGGTWETQYF

SEQ ID NO: 758855 - protein, 16 aa, Homo sapiens
  CDR3 for alpha chain variable domain of TCR clone 379428 (TRAV20, TRAJ38)
CAVQASNAGNNGKLIW

SEQ ID NO: 758856 - protein, 16 aa, Homo sapiens
  CDR3 for beta chain variable domain of TCR clone 379428 (TRBV7-8, TRBJ2-6)
CASSVGDSSGANVLTF

SEQ ID NO: 758857 - protein, 14 aa, Homo sapiens
  CDR3 for alpha chain variable domain of TCR clone 379429 (TRAV2, TRAJ37)
CAVAFTSNTGKLIF

SEQ ID NO: 758858 - protein, 15 aa, Homo sapiens
  CDR3 for beta chain variable domain of TCR clone 379429 (TRBV20-1, TRBJ1-1)
CSASRGVTGNTEAVF

SEQ ID NO: 758859 - protein, 16 aa, Homo sapiens
  CDR3 for alpha chain variable domain of TCR clone 379430 (TRAV26-1, TRAJ40)
CIVRGYPTSGTYKYNF

SEQ ID NO: 758860 - protein, 14 aa, Homo sapiens
  CDR3 for beta chain variable domain of TCR clone 379430 (TRBV5-1, TRBJ1-4)
CASSSGQGGEKLFF

SEQ ID NO: 758861 - protein, 16 aa, Homo sapiens
  CDR3 for alpha chain variable domain of TCR clone 379431 (TRAV12-1, TRAJ12)
CVVNTLLMDSRYKLIF

SEQ ID NO: 758862 - protein, 13 aa, Homo sapiens
  CDR3 for beta chain variable domain of TCR clone 379431 (TRBV11-2, TRBJ2-1)
CASSSEAYNEQFF

SEQ ID NO: 758863 - protein, 12 aa, Homo sapiens
  CDR3 for alpha chain variable domain of TCR clone 379432 (TRAV1-1, TRAJ39)
CAVPVVGNLLTF

SEQ ID NO: 758864 - protein, 15 aa, Homo sapiens
  CDR3 for beta chain variable domain of TCR clone 379432 (TRBV19, TRBJ1-6)
CASSTQGAVGSPLHF

SEQ ID NO: 758865 - protein, 11 aa, Homo sapiens
  CDR3 for alpha chain variable domain of TCR clone 379433 (TRAV26-1, TRAJ27)
CIVPNAGKSTF

SEQ ID NO: 758866 - protein, 18 aa, Homo sapiens
  CDR3 for beta chain variable domain of TCR clone 379433 (TRBV7-9, TRBJ2-6)
CASSFPGAGISGANVLTF

SEQ ID NO: 758867 - protein, 13 aa, Homo sapiens
  CDR3 for alpha chain variable domain of TCR clone 379434 (TRAV17, TRAJ5)
CAPMDTGRRALTF

SEQ ID NO: 758868 - protein, 15 aa, Homo sapiens
  CDR3 for beta chain variable domain of TCR clone 379434 (TRBV6-6, TRBJ2-5)
CASSPGGGLEEDQYF

SEQ ID NO: 758869 - protein, 19 aa, Homo sapiens
  CDR3 for alpha chain variable domain of TCR clone 379435 (TRAV2, TRAJ20)
ILQVREADAAVYRDCKLSF

SEQ ID NO: 758870 - protein, 13 aa, Homo sapiens
  CDR3 for beta chain variable domain of TCR clone 379435 (TRBV15, TRBJ1-6)
CATSGGLNSPVHF

SEQ ID NO: 758871 - protein, 15 aa, Homo sapiens
  CDR3 for alpha chain variable domain of TCR clone 379436 (TRAV13-1, TRAJ10)
CAATILTGAGNKLTF

SEQ ID NO: 758872 - protein, 15 aa, Homo sapiens
  CDR3 for beta chain variable domain of TCR clone 379436 (TRBV2, TRBJ2-7)
CASTLLGSGATEQYF

SEQ ID NO: 758873 - protein, 17 aa, Homo sapiens
  CDR3 for alpha chain variable domain of TCR clone 379437 (TRAV26-1, TRAJ28)
CIVRVPDFGAGSYQLTF

SEQ ID NO: 758874 - protein, 17 aa, Homo sapiens
  CDR3 for beta chain variable domain of TCR clone 379437 (TRBV28, TRBJ2-7)
CASSPLPAGGKSYEQYF

SEQ ID NO: 758875 - protein, 14 aa, Homo sapiens
  CDR3 for alpha chain variable domain of TCR clone 379438 (TRAV12-1, TRAJ15)
CVVNRNQAGSALIF

SEQ ID NO: 758876 - protein, 14 aa, Homo sapiens
  CDR3 for beta chain variable domain of TCR clone 379438 (TRBV19, TRBJ1-1)
CATTSGTRGTEAFF

SEQ ID NO: 758877 - protein, 13 aa, Homo sapiens
  CDR3 for alpha chain variable domain of TCR clone 379439 (TRAV23/DV6, TRAJ12)
CAPRVVSSYKLIF

SEQ ID NO: 758878 - protein, 12 aa, Homo sapiens
  CDR3 for beta chain variable domain of TCR clone 379439 (TRBV7-8, TRBJ2-7)
CASSLGDREQYF

SEQ ID NO: 758879 - protein, 12 aa, Homo sapiens
  CDR3 for alpha chain variable domain of TCR clone 379440 (TRAV12-1, TRAJ23)
CVVNIRGGKLIF

SEQ ID NO: 758880 - protein, 15 aa, Homo sapiens
  CDR3 for beta chain variable domain of TCR clone 379440 (TRBV6-3, TRBJ2-7)
CASSSPGTVFYEQYF

SEQ ID NO: 758881 - protein, 13 aa, Homo sapiens
  CDR3 for alpha chain variable domain of TCR clone 379441 (TRAV36/DV7, TRAJ38)
CVANAGNNRKLIW

SEQ ID NO: 758882 - protein, 14 aa, Homo sapiens
  CDR3 for beta chain variable domain of TCR clone 379441 (TRBV7-2, TRBJ2-7)
CASSRRWGVNEQYF

SEQ ID NO: 758883 - protein, 13 aa, Homo sapiens
  CDR3 for alpha chain variable domain of TCR clone 379442 (TRAV12-2, TRAJ7)
CAVNLYGNNSLAF

SEQ ID NO: 758884 - protein, 14 aa, Homo sapiens
  CDR3 for beta chain variable domain of TCR clone 379442 (TRBV25-1, TRBJ1-2)
CASSEATGPYGYTF

SEQ ID NO: 758885 - protein, 14 aa, Homo sapiens
  CDR3 for alpha chain variable domain of TCR clone 379443 (TRAV8-3, TRAJ4)
CAVGAAGGYNKLIF

SEQ ID NO: 758886 - protein, 12 aa, Homo sapiens
  CDR3 for beta chain variable domain of TCR clone 379443 (TRBV5-1, TRBJ2-7)
CASSSDSYEQYF

SEQ ID NO: 758887 - protein, 17 aa, Homo sapiens
  CDR3 for alpha chain variable domain of TCR clone 379444 (TRAV29/DV5, TRAJ45)
CAADGPFSVGGADGLTF

SEQ ID NO: 758888 - protein, 13 aa, Homo sapiens
  CDR3 for beta chain variable domain of TCR clone 379444 (TRBV19, TRBJ1-5)
CASSMRGYQHQHF

SEQ ID NO: 758889 - protein, 14 aa, Homo sapiens
  CDR3 for alpha chain variable domain of TCR clone 379445 (TRAV8-4, TRAJ16)
CAVSPVGRWPEAAL

SEQ ID NO: 758890 - protein, 16 aa, Homo sapiens
  CDR3 for beta chain variable domain of TCR clone 379445 (TRBV19, TRBJ2-2)
CASRSPGTGATGELFF

SEQ ID NO: 758891 - protein, 14 aa, Homo sapiens
  CDR3 for alpha chain variable domain of TCR clone 379446 (TRAV38-2/DV8, TRAJ30)
CAYLDGLGGDKIIF

SEQ ID NO: 758892 - protein, 15 aa, Homo sapiens
  CDR3 for beta chain variable domain of TCR clone 379446 (TRBV7-9, TRBJ2-2)
CASRPADRDTGELFF

SEQ ID NO: 758893 - protein, 14 aa, Homo sapiens
  CDR3 for alpha chain variable domain of TCR clone 379447 (TRAV38-1, TRAJ54)
CAFLRIQGAQKLVF

SEQ ID NO: 758894 - protein, 16 aa, Homo sapiens
  CDR3 for beta chain variable domain of TCR clone 379447 (TRBV11-2, TRBJ2-7)
CASSPTTGGVSYEQYF

SEQ ID NO: 758895 - protein, 13 aa, Homo sapiens
  CDR3 for alpha chain variable domain of TCR clone 379448 (TRAV36/DV7, TRAJ37)
CAVFSSNTGKLIF

SEQ ID NO: 758896 - protein, 16 aa, Homo sapiens
  CDR3 for beta chain variable domain of TCR clone 379448 (TRBV3-1, TRBJ2-5)
FASSPGQFNGFGTQYF

SEQ ID NO: 758897 - protein, 15 aa, Homo sapiens
  CDR3 for alpha chain variable domain of TCR clone 379449 (TRAV3, TRAJ22)
CAVRDRGGSARQLTF

SEQ ID NO: 758898 - protein, 16 aa, Homo sapiens
  CDR3 for beta chain variable domain of TCR clone 379449 (TRBV4-2, TRBJ2-4)
CDSSQELRRAKNIQYF

SEQ ID NO: 758899 - protein, 11 aa, Homo sapiens
  CDR3 for alpha chain variable domain of TCR clone 379450 (TRAV35, TRAJ30)
CAPGGDDKIIF

SEQ ID NO: 758900 - protein, 13 aa, Homo sapiens
  CDR3 for beta chain variable domain of TCR clone 379450 (TRBV2, TRBJ2-2)
CASSKKNTGELFF

SEQ ID NO: 758901 - protein, 12 aa, Homo sapiens
  CDR3 for alpha chain variable domain of TCR clone 379451 (TRAV2, TRAJ9)
CAVGAGGFKTIF

SEQ ID NO: 758902 - protein, 14 aa, Homo sapiens
  CDR3 for beta chain variable domain of TCR clone 379451 (TRBV2, TRBJ2-5)
CASTWGRAQETQYF

SEQ ID NO: 758903 - protein, 12 aa, Homo sapiens
  CDR3 for alpha chain variable domain of TCR clone 379452 (TRAV29/DV5, TRAJ15)
CASNQAGTALIF

SEQ ID NO: 758904 - protein, 14 aa, Homo sapiens
  CDR3 for beta chain variable domain of TCR clone 379452 (TRBV2, TRBJ2-7)
CASSLTSGGYEQYF

SEQ ID NO: 758905 - protein, 17 aa, Homo sapiens
  CDR3 for alpha chain variable domain of TCR clone 379453 (TRAV12-3, TRAJ26)
CAMSGGRWYNYGQNFVF

SEQ ID NO: 758906 - protein, 12 aa, Homo sapiens
  CDR3 for beta chain variable domain of TCR clone 379453 (TRBV19, TRBJ1-1)
CASSTTGIEAFF

SEQ ID NO: 758907 - protein, 15 aa, Homo sapiens
  CDR3 for alpha chain variable domain of TCR clone 379454 (TRAV3, TRAJ4)
CAVRDGTDGYNKLIF

SEQ ID NO: 758908 - protein, 13 aa, Homo sapiens
  CDR3 for beta chain variable domain of TCR clone 379454 (TRBV12-5, TRBJ1-2)
CASGVRTGNGYTF

SEQ ID NO: 758909 - protein, 12 aa, Homo sapiens
  CDR3 for alpha chain variable domain of TCR clone 379455 (TRAV26-1, TRAJ23)
CIVTPQGGKLIF

SEQ ID NO: 758910 - protein, 13 aa, Homo sapiens
  CDR3 for beta chain variable domain of TCR clone 379455 (TRBV6-6, TRBJ1-5)
CASSRGSKQPQHF

SEQ ID NO: 758911 - protein, 13 aa, Homo sapiens
  CDR3 for alpha chain variable domain of TCR clone 379456 (TRAV21, TRAJ27)
CAARPGYAGKSTF

SEQ ID NO: 758912 - protein, 16 aa, Homo sapiens
  CDR3 for beta chain variable domain of TCR clone 379456 (TRBV20-1, TRBJ1-2)
CSASMGQGVANYGYTF

SEQ ID NO: 758913 - protein, 11 aa, Homo sapiens
  CDR3 for alpha chain variable domain of TCR clone 379457 (TRAV21, TRAJ48)
CAVDGNEKLTF

SEQ ID NO: 758914 - protein, 15 aa, Homo sapiens
  CDR3 for beta chain variable domain of TCR clone 379457 (TRBV12-4, TRBJ2-5)
CASSPPTGLQETQYF

SEQ ID NO: 758915 - protein, 15 aa, Homo sapiens
  CDR3 for alpha chain variable domain of TCR clone 379458 (TRAV17, TRAJ23)
CATDAEDNQGGKLIF

SEQ ID NO: 758916 - protein, 15 aa, Homo sapiens
  CDR3 for beta chain variable domain of TCR clone 379458 (TRBV2, TRBJ2-7)
CASSEGLARSYEQYF

SEQ ID NO: 758917 - protein, 14 aa, Homo sapiens
  CDR3 for alpha chain variable domain of TCR clone 379459 (TRAV27, TRAJ45)
CAGAQEEVLTDLPL

SEQ ID NO: 758918 - protein, 15 aa, Homo sapiens
  CDR3 for beta chain variable domain of TCR clone 379459 (TRBV20-1, TRBJ2-7)
CSARDRVSGMDEQYF

SEQ ID NO: 758919 - protein, 14 aa, Homo sapiens
  CDR3 for alpha chain variable domain of TCR clone 379460 (TRAV12-3, TRAJ10)
RHLPLTGGGNKLTF

SEQ ID NO: 758920 - protein, 12 aa, Homo sapiens
  CDR3 for beta chain variable domain of TCR clone 379460 (TRBV7-8, TRBJ2-7)
CASNLGDREQYF

SEQ ID NO: 758921 - protein, 14 aa, Homo sapiens
  CDR3 for alpha chain variable domain of TCR clone 379461 (TRAV16, TRAJ17)
CALSEGAAGNKLTF

SEQ ID NO: 758922 - protein, 11 aa, Homo sapiens
  CDR3 for beta chain variable domain of TCR clone 379461 (TRBV11-2, TRBJ2-2)
CQQPPYRELFF

SEQ ID NO: 758923 - protein, 14 aa, Homo sapiens
  CDR3 for alpha chain variable domain of TCR clone 379462 (TRAV9-2, TRAJ15)
CALSESQAGTALLF

SEQ ID NO: 758924 - protein, 13 aa, Homo sapiens
  CDR3 for beta chain variable domain of TCR clone 379462 (TRBV7-9, TRBJ1-2)
CASSLKQNYGYTF

SEQ ID NO: 758925 - protein, 17 aa, Homo sapiens
  CDR3 for alpha chain variable domain of TCR clone 379463 (TRAV8-6, TRAJ58)
CAVSSWVGETSGARLSF

SEQ ID NO: 758926 - protein, 14 aa, Homo sapiens
  CDR3 for beta chain variable domain of TCR clone 379463 (TRBV4-2, TRBJ2-1)
CASGLDRAYNEQFF

SEQ ID NO: 758927 - protein, 12 aa, Homo sapiens
  CDR3 for alpha chain variable domain of TCR clone 379464 (TRAV12-3, TRAJ17)
CAMTLTGNKLTF

SEQ ID NO: 758928 - protein, 16 aa, Homo sapiens
  CDR3 for beta chain variable domain of TCR clone 379464 (TRBV11-2, TRBJ1-2)
CASSLDRGGNNYGYTF

SEQ ID NO: 758929 - protein, 15 aa, Homo sapiens
  CDR3 for alpha chain variable domain of TCR clone 379465 (TRAV21, TRAJ36)
CAVRRKQTGANNLFF

SEQ ID NO: 758930 - protein, 17 aa, Homo sapiens
  CDR3 for beta chain variable domain of TCR clone 379465 (TRBV11-2, TRBJ2-1)
CASNLYPPGVEYNEQFF

SEQ ID NO: 758931 - protein, 12 aa, Homo sapiens
  CDR3 for alpha chain variable domain of TCR clone 379466 (TRAV21, TRAJ39)
CAADNAGNMLTF

SEQ ID NO: 758932 - protein, 16 aa, Homo sapiens
  CDR3 for beta chain variable domain of TCR clone 379466 (TRBV2, TRBJ2-7)
CASRKGSVGLVYEQYF

SEQ ID NO: 758933 - protein, 14 aa, Homo sapiens
  CDR3 for alpha chain variable domain of TCR clone 379467 (TRAV16, TRAJ39)
CALSKNNAGNMLTF

SEQ ID NO: 758934 - protein, 15 aa, Homo sapiens
  CDR3 for beta chain variable domain of TCR clone 379467 (TRBV6-1, TRBJ2-1)
CASSELRGQYNEQFF

SEQ ID NO: 758935 - protein, 14 aa, Homo sapiens
  CDR3 for alpha chain variable domain of TCR clone 379468 (TRAV1-1, TRAJ27)
CAVIYNPNAGKSNF

SEQ ID NO: 758936 - protein, 15 aa, Homo sapiens
  CDR3 for beta chain variable domain of TCR clone 379468 (TRBV7-2, TRBJ2-1)
CASSSGLAGGNEQFF

SEQ ID NO: 758937 - protein, 15 aa, Homo sapiens
  CDR3 for alpha chain variable domain of TCR clone 379469 (TRAV36/DV7, TRAJ54)
CAVEKPVQGAQKLVF

SEQ ID NO: 758938 - protein, 14 aa, Homo sapiens
  CDR3 for beta chain variable domain of TCR clone 379469 (TRBV4-3, TRBJ2-2)
CTSSQGHVTGELFF

SEQ ID NO: 758939 - protein, 14 aa, Homo sapiens
  CDR3 for alpha chain variable domain of TCR clone 379470 (TRAV12-1, TRAJ12)
CVVYGRDSSYKLIF

SEQ ID NO: 758940 - protein, 13 aa, Homo sapiens
  CDR3 for beta chain variable domain of TCR clone 379470 (TRBV28, TRBJ2-2)
CASIRESTGELFF

SEQ ID NO: 758941 - protein, 16 aa, Homo sapiens
  CDR3 for alpha chain variable domain of TCR clone 379471 (TRAV38-1, TRAJ56)
CAFMKRQTGANSKLKF

SEQ ID NO: 758942 - protein, 13 aa, Homo sapiens
  CDR3 for beta chain variable domain of TCR clone 379471 (TRBV7-2, TRBJ2-2)
CASSLAVTGELFF

SEQ ID NO: 758943 - protein, 15 aa, Homo sapiens
  CDR3 for alpha chain variable domain of TCR clone 379472 (TRAV23/DV6, TRAJ4)
CAASPLRVGYNKLIF

SEQ ID NO: 758944 - protein, 15 aa, Homo sapiens
  CDR3 for beta chain variable domain of TCR clone 379472 (TRBV7-9, TRBJ1-6)
CASSSPGRGNSPPHF

SEQ ID NO: 758945 - protein, 14 aa, Homo sapiens
  CDR3 for alpha chain variable domain of TCR clone 379473 (TRAV9-2, TRAJ39)
FALYIYNAGNMLTF

SEQ ID NO: 758946 - protein, 13 aa, Homo sapiens
  CDR3 for beta chain variable domain of TCR clone 379473 (TRBV11-3, TRBJ1-1)
CASSRQPNTEAFF

SEQ ID NO: 758947 - protein, 17 aa, Homo sapiens
  CDR3 for alpha chain variable domain of TCR clone 379474 (TRAV3, TRAJ6)
CAVRDGPRAGGSYIPTF

SEQ ID NO: 758948 - protein, 14 aa, Homo sapiens
  CDR3 for beta chain variable domain of TCR clone 379474 (TRBV18, TRBJ2-3)
CASSPRTSTDTQYF

SEQ ID NO: 758949 - protein, 12 aa, Homo sapiens
  CDR3 for alpha chain variable domain of TCR clone 379475 (TRAV8-3, TRAJ6)
CAVAGGGYIPTF

SEQ ID NO: 758950 - protein, 14 aa, Homo sapiens
  CDR3 for beta chain variable domain of TCR clone 379475 (TRBV27, TRBJ2-7)
CASATGTERREQYF

SEQ ID NO: 758951 - protein, 14 aa, Homo sapiens
  CDR3 for alpha chain variable domain of TCR clone 379476 (TRAV8-3, TRAJ30)
CAVGDMNRDDKIIF

SEQ ID NO: 758952 - protein, 13 aa, Homo sapiens
  CDR3 for beta chain variable domain of TCR clone 379476 (TRBV19, TRBJ2-2)
CASSRNPGGVWYR

SEQ ID NO: 758953 - protein, 12 aa, Homo sapiens
  CDR3 for alpha chain variable domain of TCR clone 379477 (TRAV2, TRAJ9)
CAVGAGGFKTIF

SEQ ID NO: 758954 - protein, 12 aa, Homo sapiens
  CDR3 for beta chain variable domain of TCR clone 379477 (TRBV12-5, TRBJ2-5)
CASGQGVETQYF

SEQ ID NO: 758955 - protein, 13 aa, Homo sapiens
  CDR3 for alpha chain variable domain of TCR clone 379478 (TRAV12-3, TRAJ29)
CAMTLSGNTPLVF

SEQ ID NO: 758956 - protein, 15 aa, Homo sapiens
  CDR3 for beta chain variable domain of TCR clone 379478 (TRBV5-1, TRBJ2-6)
CASSLEPSGANVLTF

SEQ ID NO: 758957 - protein, 15 aa, Homo sapiens
  CDR3 for alpha chain variable domain of TCR clone 379479 (TRAV36/DV7, TRAJ54)
CAVEKPVQGAQKLVF

SEQ ID NO: 758958 - protein, 17 aa, Homo sapiens
  CDR3 for beta chain variable domain of TCR clone 379479 (TRBV6-5, TRBJ1-2)
CASSSPWEGAFDYGFTF

SEQ ID NO: 758959 - protein, 10 aa, Homo sapiens
  CDR3 for alpha chain variable domain of TCR clone 379480 (TRAV39, TRAJ49)
CAVAGNKFYF

SEQ ID NO: 758960 - protein, 14 aa, Homo sapiens
  CDR3 for beta chain variable domain of TCR clone 379480 (TRBV7-8, TRBJ2-7)
CASSPRDRVYEQYF

SEQ ID NO: 758961 - protein, 15 aa, Homo sapiens
  CDR3 for alpha chain variable domain of TCR clone 379481 (TRAV35, TRAJ23)
CAGPLGNNQGGKLIF

SEQ ID NO: 758962 - protein, 14 aa, Homo sapiens
  CDR3 for beta chain variable domain of TCR clone 379481 (TRBV7-9, TRBJ1-1)
CASTPRQSYTEAFF

SEQ ID NO: 758963 - protein, 13 aa, Homo sapiens
  CDR3 for alpha chain variable domain of TCR clone 379482 (TRAV20, TRAJ48)
CAVQGVGNEKITF

SEQ ID NO: 758964 - protein, 14 aa, Homo sapiens
  CDR3 for beta chain variable domain of TCR clone 379482 (TRBV27, TRBJ2-7)
CASSFRDGPYEQYF

SEQ ID NO: 758965 - protein, 14 aa, Homo sapiens
  CDR3 for alpha chain variable domain of TCR clone 379483 (TRAV38-2/DV8, TRAJ54)
AAMYQIQGAQELVF

SEQ ID NO: 758966 - protein, 17 aa, Homo sapiens
  CDR3 for beta chain variable domain of TCR clone 379483 (TRBV6-1, TRBJ2-3)
CASSEALRLISTDTQYF

SEQ ID NO: 758967 - protein, 12 aa, Homo sapiens
  CDR3 for alpha chain variable domain of TCR clone 379484 (TRAV12-3, TRAJ17)
CAMTLTGNKLTF

SEQ ID NO: 758968 - protein, 14 aa, Homo sapiens
  CDR3 for beta chain variable domain of TCR clone 379484 (TRBV19, TRBJ2-2)
CASSTLHRSAELFF

SEQ ID NO: 758969 - protein, 13 aa, Homo sapiens
  CDR3 for alpha chain variable domain of TCR clone 379485 (TRAV20, TRAJ6)
CAVSAGGSYIPTF

SEQ ID NO: 758970 - protein, 15 aa, Homo sapiens
  CDR3 for beta chain variable domain of TCR clone 379485 (TRBV7-9, TRBJ2-2)
CASGPLDTFPGELFF

SEQ ID NO: 758971 - protein, 15 aa, Homo sapiens
  CDR3 for alpha chain variable domain of TCR clone 379486 (TRAV27, TRAJ38)
CAARRNAGNNRKLIW

SEQ ID NO: 758972 - protein, 16 aa, Homo sapiens
  CDR3 for beta chain variable domain of TCR clone 379486 (TRBV7-9, TRBJ2-1)
CASSLVSGPSYNEQFF

SEQ ID NO: 758973 - protein, 15 aa, Homo sapiens
  CDR3 for alpha chain variable domain of TCR clone 379487 (TRAV3, TRAJ42)
CAVRGGTGSQGNLIF

SEQ ID NO: 758974 - protein, 16 aa, Homo sapiens
  CDR3 for beta chain variable domain of TCR clone 379487 (TRBV7-9, TRBJ1-2)
CASSLGFSSGEDGDTF

SEQ ID NO: 758975 - protein, 14 aa, Homo sapiens
  CDR3 for alpha chain variable domain of TCR clone 379488 (TRAV16, TRAJ26)
CALTRWSEFCLLSR

SEQ ID NO: 758976 - protein, 13 aa, Homo sapiens
  CDR3 for beta chain variable domain of TCR clone 379488 (TRBV4-2, TRBJ1-1)
CASSQAGNTEAFF

SEQ ID NO: 758977 - protein, 14 aa, Homo sapiens
  CDR3 for alpha chain variable domain of TCR clone 379489 (TRAV1-2, TRAJ8)
CALREDTGFQKLVF

SEQ ID NO: 758978 - protein, 14 aa, Homo sapiens
  CDR3 for beta chain variable domain of TCR clone 379489 (TRBV7-9, TRBJ1-6)
CASRPGTVNSPLHF

SEQ ID NO: 758979 - protein, 17 aa, Homo sapiens
  CDR3 for alpha chain variable domain of TCR clone 379490 (TRAV3, TRAJ6)
CAVRDGPRAGGSYIPTF

SEQ ID NO: 758980 - protein, 17 aa, Homo sapiens
  CDR3 for beta chain variable domain of TCR clone 379490 (TRBV20-1, TRBJ2-1)
CSAPPRLAGSRYNEQFF

SEQ ID NO: 758981 - protein, 14 aa, Homo sapiens
  CDR3 for alpha chain variable domain of TCR clone 379491 (TRAV29/DV5, TRAJ32)
CAAAYGGAANKLIF

SEQ ID NO: 758982 - protein, 15 aa, Homo sapiens
  CDR3 for beta chain variable domain of TCR clone 379491 (TRBV27, TRBJ2-7)
CASSTAGTGSYEQYF

SEQ ID NO: 758983 - protein, 13 aa, Homo sapiens
  CDR3 for alpha chain variable domain of TCR clone 379492 (TRAV12-3, TRAJ9)
CAMSADGGFKTIF

SEQ ID NO: 758984 - protein, 14 aa, Homo sapiens
  CDR3 for beta chain variable domain of TCR clone 379492 (TRBV6-1, TRBJ2-7)
CASSERVNPYEQYF

SEQ ID NO: 758985 - protein, 18 aa, Homo sapiens
  CDR3 for alpha chain variable domain of TCR clone 379493 (TRAV3, TRAJ21)
CAVRDIERGTSTNFTLDL

SEQ ID NO: 758986 - protein, 13 aa, Homo sapiens
  CDR3 for beta chain variable domain of TCR clone 379493 (TRBV27, TRBJ2-7)
CASSLTTGYGQYF

SEQ ID NO: 758987 - protein, 12 aa, Homo sapiens
  CDR3 for alpha chain variable domain of TCR clone 379494 (TRAV1-1, TRAJ9)
CAVDTGGFKTIF

SEQ ID NO: 758988 - protein, 15 aa, Homo sapiens
  CDR3 for beta chain variable domain of TCR clone 379494 (TRBV7-9, TRBJ1-5)
CASSQGHQPNQPQHF

SEQ ID NO: 758989 - protein, 11 aa, Homo sapiens
  CDR3 for alpha chain variable domain of TCR clone 379495 (TRAV2, TRAJ13)
CASGGYQKVTF

SEQ ID NO: 758990 - protein, 17 aa, Homo sapiens
  CDR3 for beta chain variable domain of TCR clone 379495 (TRBV15, TRBJ1-4)
CATSRYGTGDPDEKLFF

SEQ ID NO: 758991 - protein, 11 aa, Homo sapiens
  CDR3 for alpha chain variable domain of TCR clone 379496 (TRAV13-1, TRAJ39)
CASHVGNMLTF

SEQ ID NO: 758992 - protein, 14 aa, Homo sapiens
  CDR3 for beta chain variable domain of TCR clone 379496 (TRBV11-2, TRBJ1-5)
CASSLDRGRQPQHF

SEQ ID NO: 758993 - protein, 13 aa, Homo sapiens
  CDR3 for alpha chain variable domain of TCR clone 379497 (TRAV35, TRAJ42)
CAGSPGSQGNLIF

SEQ ID NO: 758994 - protein, 12 aa, Homo sapiens
  CDR3 for beta chain variable domain of TCR clone 379497 (TRBV7-9, TRBJ2-7)
CASSIKREEQYF

SEQ ID NO: 758995 - protein, 18 aa, Homo sapiens
  CDR3 for alpha chain variable domain of TCR clone 379498 (TRAV13-1, TRAJ52)
CAAGKRSAGGTSYGKLTF

SEQ ID NO: 758996 - protein, 12 aa, Homo sapiens
  CDR3 for beta chain variable domain of TCR clone 379498 (TRBV12-4, TRBJ1-2)
CAILGRNYGYTF

SEQ ID NO: 758997 - protein, 12 aa, Homo sapiens
  CDR3 for alpha chain variable domain of TCR clone 379499 (TRAV8-3, TRAJ4)
PAFSGGYNKLSF

SEQ ID NO: 758998 - protein, 13 aa, Homo sapiens
  CDR3 for beta chain variable domain of TCR clone 379499 (TRBV20-1, TRBJ1-3)
CSAGAYSGNTIYF

SEQ ID NO: 758999 - protein, 16 aa, Homo sapiens
  CDR3 for alpha chain variable domain of TCR clone 379500 (TRAV1-2, TRAJ6)
CAVRDQGTGGSYIPTF

SEQ ID NO: 759000 - protein, 12 aa, Homo sapiens
  CDR3 for beta chain variable domain of TCR clone 379500 (TRBV11-2, TRBJ2-2)
CASSLGGGELFC

SEQ ID NO: 759001 - protein, 13 aa, Homo sapiens
  CDR3 for alpha chain variable domain of TCR clone 379501 (TRAV20, TRAJ21)
CAVEGYNFNKFYF

SEQ ID NO: 759002 - protein, 14 aa, Homo sapiens
  CDR3 for beta chain variable domain of TCR clone 379501 (TRBV3-1, TRBJ2-5)
CASSQGPDQETKYF

SEQ ID NO: 759003 - protein, 12 aa, Homo sapiens
  CDR3 for alpha chain variable domain of TCR clone 379502 (TRAV17, TRAJ4)
CATDGGYNKLIF

SEQ ID NO: 759004 - protein, 15 aa, Homo sapiens
  CDR3 for beta chain variable domain of TCR clone 379502 (TRBV4-1, TRBJ1-4)
CASSDTGGTNEKLFF

SEQ ID NO: 759005 - protein, 14 aa, Homo sapiens
  CDR3 for alpha chain variable domain of TCR clone 379503 (TRAV12-2, TRAJ53)
CAVKGGGSDYKLTF

SEQ ID NO: 759006 - protein, 14 aa, Homo sapiens
  CDR3 for beta chain variable domain of TCR clone 379503 (TRBV19, TRBJ2-1)
CASPTFVLSGEQFF

SEQ ID NO: 759007 - protein, 14 aa, Homo sapiens
  CDR3 for alpha chain variable domain of TCR clone 379504 (TRAV8-1, TRAJ3)
CAVRGYSSASKIIF

SEQ ID NO: 759008 - protein, 14 aa, Homo sapiens
  CDR3 for beta chain variable domain of TCR clone 379504 (TRBV6-4, TRBJ2-1)
CASSEAGEGNEQFF

SEQ ID NO: 759009 - protein, 17 aa, Homo sapiens
  CDR3 for alpha chain variable domain of TCR clone 379505 (TRAV3, TRAJ6)
CAVRDGPRAGGSYIPTF

SEQ ID NO: 759010 - protein, 16 aa, Homo sapiens
  CDR3 for beta chain variable domain of TCR clone 379505 (TRBV4-1, TRBJ1-1)
CASSQDAGMGNTEAFF

SEQ ID NO: 759011 - protein, 13 aa, Homo sapiens
  CDR3 for alpha chain variable domain of TCR clone 379506 (TRAV12-1, TRAJ13)
CVVGTGGYQKVTF

SEQ ID NO: 759012 - protein, 14 aa, Homo sapiens
  CDR3 for beta chain variable domain of TCR clone 379506 (TRBV19, TRBJ2-1)
CASPTFVLSGEQFF

SEQ ID NO: 759013 - protein, 13 aa, Homo sapiens
  CDR3 for alpha chain variable domain of TCR clone 379507 (TRAV20, TRAJ21)
CAVEGYNCNKFYF

SEQ ID NO: 759014 - protein, 14 aa, Homo sapiens
  CDR3 for beta chain variable domain of TCR clone 379507 (TRBV3-1, TRBJ2-5)
CASSQGPDQETQYF

SEQ ID NO: 759015 - protein, 13 aa, Homo sapiens
  CDR3 for alpha chain variable domain of TCR clone 379508 (TRAV3, TRAJ27)
CAVRPLGAGKSTF

SEQ ID NO: 759016 - protein, 16 aa, Homo sapiens
  CDR3 for beta chain variable domain of TCR clone 379508 (TRBV12-5, TRBJ2-5)
CASGTRTSGNQETQYF

SEQ ID NO: 759017 - protein, 16 aa, Homo sapiens
  CDR3 for alpha chain variable domain of TCR clone 379509 (TRAV22, TRAJ45)
CAVERGKRGGADGLTF

SEQ ID NO: 759018 - protein, 13 aa, Homo sapiens
  CDR3 for beta chain variable domain of TCR clone 379509 (TRBV27, TRBJ1-1)
CASSLSIGAEAFF

SEQ ID NO: 759019 - protein, 16 aa, Homo sapiens
  CDR3 for alpha chain variable domain of TCR clone 379510 (TRAV8-6, TRAJ53)
CAVRENSGGSNYKLTF

SEQ ID NO: 759020 - protein, 16 aa, Homo sapiens
  CDR3 for beta chain variable domain of TCR clone 379510 (TRBV7-8, TRBJ2-6)
CASRVGDSSGANVLTF

SEQ ID NO: 759021 - protein, 15 aa, Homo sapiens
  CDR3 for alpha chain variable domain of TCR clone 379511 (TRAV26-1, TRAJ29)
CIVRVGGSGNTPLVF

SEQ ID NO: 759022 - protein, 16 aa, Homo sapiens
  CDR3 for beta chain variable domain of TCR clone 379511 (TRBV7-3, TRBJ2-2)
CASSLKRGTLSGELFF

SEQ ID NO: 759023 - protein, 21 aa, Homo sapiens
  CDR3 for alpha chain variable domain of TCR clone 379512 (TRAV13-1, TRAJ37)
CAATPKEIKHSQTNLWARDNF

SEQ ID NO: 759024 - protein, 13 aa, Homo sapiens
  CDR3 for beta chain variable domain of TCR clone 379512 (TRBV20-1, TRBJ2-7)
CSATSEDSCEQYF

SEQ ID NO: 759025 - protein, 15 aa, Homo sapiens
  CDR3 for alpha chain variable domain of TCR clone 379513 (TRAV12-2, TRAJ9)
CAVNNERTGGFKTIF

SEQ ID NO: 759026 - protein, 14 aa, Homo sapiens
  CDR3 for beta chain variable domain of TCR clone 379513 (TRBV4-1, TRBJ1-4)
CASSQERKNDKLFF

SEQ ID NO: 759027 - protein, 15 aa, Homo sapiens
  CDR3 for alpha chain variable domain of TCR clone 379514 (TRAV26-1, TRAJ40)
CIDRYATSGTYKYIF

SEQ ID NO: 759028 - protein, 14 aa, Homo sapiens
  CDR3 for beta chain variable domain of TCR clone 379514 (TRBV19, TRBJ2-1)
CASPTFVVSGEQFF

SEQ ID NO: 759029 - protein, 13 aa, Homo sapiens
  CDR3 for alpha chain variable domain of TCR clone 379515 (TRAV13-1, TRAJ39)
CSKYSNAGNMLTF

SEQ ID NO: 759030 - protein, 13 aa, Homo sapiens
  CDR3 for beta chain variable domain of TCR clone 379515 (TRBV19, TRBJ2-7)
CASSPRQSYEQYF

SEQ ID NO: 759031 - protein, 12 aa, Homo sapiens
  CDR3 for alpha chain variable domain of TCR clone 379516 (TRAV12-1, TRAJ40)
CVVYSGTNKYIF

SEQ ID NO: 759032 - protein, 18 aa, Homo sapiens
  CDR3 for beta chain variable domain of TCR clone 379516 (TRBV11-2, TRBJ2-3)
CDSSLGGASRGAPNTQYF

SEQ ID NO: 759033 - protein, 16 aa, Homo sapiens
  CDR3 for alpha chain variable domain of TCR clone 379517 (TRAV4, TRAJ22)
CLVSDLYSGSARQLTF

SEQ ID NO: 759034 - protein, 14 aa, Homo sapiens
  CDR3 for beta chain variable domain of TCR clone 379517 (TRBV28, TRBJ2-3)
CASSWRGRADTQYF

SEQ ID NO: 759035 - protein, 14 aa, Homo sapiens
  CDR3 for alpha chain variable domain of TCR clone 379518 (TRAV6, TRAJ17)
CALDLKAAGNKLTF

SEQ ID NO: 759036 - protein, 17 aa, Homo sapiens
  CDR3 for beta chain variable domain of TCR clone 379518 (TRBV7-8, TRBJ2-7)
WASSFTSGRPPSYEQYF

SEQ ID NO: 759037 - protein, 18 aa, Homo sapiens
  CDR3 for alpha chain variable domain of TCR clone 379519 (TRAV21, TRAJ52)
CAVRPCPAGGTSYGKLTF

SEQ ID NO: 759038 - protein, 13 aa, Homo sapiens
  CDR3 for beta chain variable domain of TCR clone 379519 (TRBV4-2, TRBJ1-1)
CASSQAGNTEAFF

SEQ ID NO: 759039 - protein, 18 aa, Homo sapiens
  CDR3 for alpha chain variable domain of TCR clone 379520 (TRAV21, TRAJ52)
CAVRPSPAGGTSYGKLTF

SEQ ID NO: 759040 - protein, 12 aa, Homo sapiens
  CDR3 for beta chain variable domain of TCR clone 379520 (TRBV11-2, TRBJ2-5)
CASSLGQETQYF

SEQ ID NO: 759041 - protein, 16 aa, Homo sapiens
  CDR3 for alpha chain variable domain of TCR clone 379521 (TRAV2, TRAJ20)
TTVLWSFRSNAYKLSF

SEQ ID NO: 759042 - protein, 12 aa, Homo sapiens
  CDR3 for beta chain variable domain of TCR clone 379521 (TRBV7-6, TRBJ2-3)
CASSTGTDTQYF

SEQ ID NO: 759043 - protein, 14 aa, Homo sapiens
  CDR3 for alpha chain variable domain of TCR clone 379522 (TRAV38-2/DV8, TRAJ23)
CAYRKPNQGGKLIF

SEQ ID NO: 759044 - protein, 15 aa, Homo sapiens
  CDR3 for beta chain variable domain of TCR clone 379522 (TRBV9, TRBJ1-6)
CASSVAGTGDSPLHF

SEQ ID NO: 759045 - protein, 13 aa, Homo sapiens
  CDR3 for alpha chain variable domain of TCR clone 379523 (TRAV12-3, TRAJ13)
CAMGTGGYQKVTF

SEQ ID NO: 759046 - protein, 14 aa, Homo sapiens
  CDR3 for beta chain variable domain of TCR clone 379523 (TRBV19, TRBJ2-1)
CASPTFVLSGEQFF

SEQ ID NO: 759047 - protein, 14 aa, Homo sapiens
  CDR3 for alpha chain variable domain of TCR clone 379524 (TRAV4, TRAJ9)
CLVGSGTGGFKTIF

SEQ ID NO: 759048 - protein, 14 aa, Homo sapiens
  CDR3 for beta chain variable domain of TCR clone 379524 (TRBV7-9, TRBJ2-4)
CASSLAMGGNIQFF

SEQ ID NO: 759049 - protein, 15 aa, Homo sapiens
  CDR3 for alpha chain variable domain of TCR clone 379525 (TRAV40, TRAJ45)
CLLGDLGGGADGLTF

SEQ ID NO: 759050 - protein, 13 aa, Homo sapiens
  CDR3 for beta chain variable domain of TCR clone 379525 (TRBV7-9, TRBJ1-2)
CASSLKKNYGYTF

SEQ ID NO: 759051 - protein, 18 aa, Homo sapiens
  CDR3 for alpha chain variable domain of TCR clone 379526 (TRAV12-3, TRAJ52)
CAMSVGGAGGTSYGKLTF

SEQ ID NO: 759052 - protein, 17 aa, Homo sapiens
  CDR3 for beta chain variable domain of TCR clone 379526 (TRBV20-1, TRBJ2-1)
CSARDPLAGVWDNEQFF

SEQ ID NO: 759053 - protein, 13 aa, Homo sapiens
  CDR3 for alpha chain variable domain of TCR clone 379527 (TRAV8-6, TRAJ9)
CAVWDTGGFKTIF

SEQ ID NO: 759054 - protein, 14 aa, Homo sapiens
  CDR3 for beta chain variable domain of TCR clone 379527 (TRBV2, TRBJ2-1)
CASSEALIYNQQFF

SEQ ID NO: 759055 - protein, 14 aa, Homo sapiens
  CDR3 for alpha chain variable domain of TCR clone 379528 (TRAV1-2, TRAJ8)
CAVSEDTGFQKLVF

SEQ ID NO: 759056 - protein, 15 aa, Homo sapiens
  CDR3 for beta chain variable domain of TCR clone 379528 (TRBV6-6, TRBJ2-7)
CASSYSYGGSYEQYF

SEQ ID NO: 759057 - protein, 13 aa, Homo sapiens
  CDR3 for alpha chain variable domain of TCR clone 379529 (TRAV8-3, TRAJ44)
CAVVPGTASKLTF

SEQ ID NO: 759058 - protein, 14 aa, Homo sapiens
  CDR3 for beta chain variable domain of TCR clone 379529 (TRBV11-2, TRBJ2-3)
CASSRLAGTDTQYF

SEQ ID NO: 759059 - protein, 13 aa, Homo sapiens
  CDR3 for alpha chain variable domain of TCR clone 379530 (TRAV2, TRAJ20)
CAVEDPSEYKLSF

SEQ ID NO: 759060 - protein, 15 aa, Homo sapiens
  CDR3 for beta chain variable domain of TCR clone 379530 (TRBV7-9, TRBJ1-5)
CASSQGHQPNQPQHF

SEQ ID NO: 759061 - protein, 12 aa, Homo sapiens
  CDR3 for alpha chain variable domain of TCR clone 379531 (TRAV17, TRAJ31)
CATEQGNARLMF

SEQ ID NO: 759062 - protein, 16 aa, Homo sapiens
  CDR3 for beta chain variable domain of TCR clone 379531 (TRBV7-7, TRBJ2-1)
CASSLASGTSYNEQFF

SEQ ID NO: 759063 - protein, 12 aa, Homo sapiens
  CDR3 for alpha chain variable domain of TCR clone 379532 (TRAV13-2, TRAJ39)
CAENNAGNMLTF

SEQ ID NO: 759064 - protein, 13 aa, Homo sapiens
  CDR3 for beta chain variable domain of TCR clone 379532 (TRBV7-6, TRBJ1-1)
CASSLKLGTEAVF

SEQ ID NO: 759065 - protein, 23 aa, Homo sapiens
  CDR3 for alpha chain variable domain of TCR clone 379533 (TRAV26-1, )
CIADYAGNNHIQNPDPAVYQLRD

SEQ ID NO: 759066 - protein, 13 aa, Homo sapiens
  CDR3 for beta chain variable domain of TCR clone 379533 (TRBV20-1, TRBJ1-1)
CSARGGGNTEAFF

SEQ ID NO: 759067 - protein, 16 aa, Homo sapiens
  CDR3 for alpha chain variable domain of TCR clone 379534 (TRAV38-1, TRAJ45)
CAFIKGSEGGADGLTF

SEQ ID NO: 759068 - protein, 15 aa, Homo sapiens
  CDR3 for beta chain variable domain of TCR clone 379534 (TRBV20-1, TRBJ2-7)
CSAREGRDSVYEQYF

SEQ ID NO: 759069 - protein, 15 aa, Homo sapiens
  CDR3 for alpha chain variable domain of TCR clone 379535 (TRAV4, TRAJ36)
CLVGDRQTGANNLFF

SEQ ID NO: 759070 - protein, 13 aa, Homo sapiens
  CDR3 for beta chain variable domain of TCR clone 379535 (TRBV5-1, TRBJ1-2)
CASSFQGNYGYTF

SEQ ID NO: 759071 - protein, 20 aa, Homo sapiens
  CDR3 for alpha chain variable domain of TCR clone 379536 (TRAV13-1, TRAJ8)
CAASEDTLSETCIWNWHPTS

SEQ ID NO: 759072 - protein, 13 aa, Homo sapiens
  CDR3 for beta chain variable domain of TCR clone 379536 (TRBV19, TRBJ1-5)
CASSTRRDQPQHF

SEQ ID NO: 759073 - protein, 13 aa, Homo sapiens
  CDR3 for alpha chain variable domain of TCR clone 379537 (TRAV12-3, TRAJ7)
CAMTPYGNNRLAF

SEQ ID NO: 759074 - protein, 12 aa, Homo sapiens
  CDR3 for beta chain variable domain of TCR clone 379537 (TRBV7-8, TRBJ2-7)
CASSLGDREQYF

SEQ ID NO: 759075 - protein, 18 aa, Homo sapiens
  CDR3 for alpha chain variable domain of TCR clone 379538 (TRAV8-4, TRAJ52)
CAVTRANAGGTSFGKLTF

SEQ ID NO: 759076 - protein, 20 aa, Homo sapiens
  CDR3 for beta chain variable domain of TCR clone 379538 (TRBV19, TRBJ2-1)
CASSISRTVTSTRLNNEQFF

SEQ ID NO: 759077 - protein, 12 aa, Homo sapiens
  CDR3 for alpha chain variable domain of TCR clone 379539 (TRAV1-1, TRAJ12)
CAVGDSSHKLIF

SEQ ID NO: 759078 - protein, 14 aa, Homo sapiens
  CDR3 for beta chain variable domain of TCR clone 379539 (TRBV20-1, TRBJ2-7)
CSAPELAGVGEQYF

SEQ ID NO: 759079 - protein, 14 aa, Homo sapiens
  CDR3 for alpha chain variable domain of TCR clone 379540 (TRAV26-1, TRAJ38)
CIADNAVDNRKLIW

SEQ ID NO: 759080 - protein, 13 aa, Homo sapiens
  CDR3 for beta chain variable domain of TCR clone 379540 (TRBV20-1, TRBJ1-1)
CSARGGGNTEAFF

SEQ ID NO: 759081 - protein, 16 aa, Homo sapiens
  CDR3 for alpha chain variable domain of TCR clone 379541 (TRAV8-3, TRAJ10)
CAVGPILTGGGNKLTF

SEQ ID NO: 759082 - protein, 17 aa, Homo sapiens
  CDR3 for beta chain variable domain of TCR clone 379541 (TRBV20-1, TRBJ2-2)
CSASGSGQGGLTGELFF

SEQ ID NO: 759083 - protein, 11 aa, Homo sapiens
  CDR3 for alpha chain variable domain of TCR clone 379542 (TRAV1-1, TRAJ23)
CAVRQGGKLIF

SEQ ID NO: 759084 - protein, 15 aa, Homo sapiens
  CDR3 for beta chain variable domain of TCR clone 379542 (TRBV28, TRBJ2-1)
CASRKRGALRNEQFF

SEQ ID NO: 759085 - protein, 15 aa, Homo sapiens
  CDR3 for alpha chain variable domain of TCR clone 379543 (TRAV3, TRAJ22)
CAVRDRGGSARQLTF

SEQ ID NO: 759086 - protein, 15 aa, Homo sapiens
  CDR3 for beta chain variable domain of TCR clone 379543 (TRBV6-1, TRBJ2-7)
CASSESMGDFYEQYF

SEQ ID NO: 759087 - protein, 17 aa, Homo sapiens
  CDR3 for alpha chain variable domain of TCR clone 379544 (TRAV13-1, TRAJ52)
CAASSGAGGTSYGKLRF

SEQ ID NO: 759088 - protein, 17 aa, Homo sapiens
  CDR3 for beta chain variable domain of TCR clone 379544 (TRBV11-2, TRBJ2-1)
CASSLYPPGVEYNEQFF

SEQ ID NO: 759089 - protein, 14 aa, Homo sapiens
  CDR3 for alpha chain variable domain of TCR clone 379545 (TRAV1-2, TRAJ8)
CAVREDTGFQKLVF

SEQ ID NO: 759090 - protein, 15 aa, Homo sapiens
  CDR3 for beta chain variable domain of TCR clone 379545 (TRBV5-1, TRBJ2-1)
CACSPPRAPYNEQFF

SEQ ID NO: 759091 - protein, 15 aa, Homo sapiens
  CDR3 for alpha chain variable domain of TCR clone 379546 (TRAV8-2, TRAJ16)
CVVSDGFADGQKLLF

SEQ ID NO: 759092 - protein, 14 aa, Homo sapiens
  CDR3 for beta chain variable domain of TCR clone 379546 (TRBV7-3, TRBJ1-1)
CASSLGTGYTEAFF

SEQ ID NO: 759093 - protein, 13 aa, Homo sapiens
  CDR3 for alpha chain variable domain of TCR clone 379547 (TRAV3, TRAJ30)
CAVRDRGDDKIIF

SEQ ID NO: 759094 - protein, 16 aa, Homo sapiens
  CDR3 for beta chain variable domain of TCR clone 379547 (TRBV7-3, TRBJ2-2)
CASSVKRGTLSGELFF

SEQ ID NO: 759095 - protein, 16 aa, Homo sapiens
  CDR3 for alpha chain variable domain of TCR clone 379548 (TRAV16, TRAJ42)
CALSGLLRGSQGNLIF

SEQ ID NO: 759096 - protein, 15 aa, Homo sapiens
  CDR3 for beta chain variable domain of TCR clone 379548 (TRBV5-1, TRBJ2-1)
CASSPGGLAGNEQFF

SEQ ID NO: 759097 - protein, 14 aa, Homo sapiens
  CDR3 for alpha chain variable domain of TCR clone 379549 (TRAV27, TRAJ36)
CAGPPKRGANNLFF

SEQ ID NO: 759098 - protein, 15 aa, Homo sapiens
  CDR3 for beta chain variable domain of TCR clone 379549 (TRBV18, TRBJ2-7)
FPSSPASTPNYEQYF

SEQ ID NO: 759099 - protein, 14 aa, Homo sapiens
  CDR3 for alpha chain variable domain of TCR clone 379550 (TRAV13-1, TRAJ40)
CAARSTSGTYKYIF

SEQ ID NO: 759100 - protein, 15 aa, Homo sapiens
  CDR3 for beta chain variable domain of TCR clone 379550 (TRBV18, TRBJ1-5)
CASSETGGNNKPQHF

SEQ ID NO: 759101 - protein, 14 aa, Homo sapiens
  CDR3 for alpha chain variable domain of TCR clone 379551 (TRAV26-1, TRAJ21)
CIVRPPYNFDKFYF

SEQ ID NO: 759102 - protein, 11 aa, Homo sapiens
  CDR3 for beta chain variable domain of TCR clone 379551 (TRBV10-3, TRBJ2-7)
CAISEGLEQYF

SEQ ID NO: 759103 - protein, 15 aa, Homo sapiens
  CDR3 for alpha chain variable domain of TCR clone 379552 (TRAV2, TRAJ40)
CAVVTSGTYKYILEH

SEQ ID NO: 759104 - protein, 14 aa, Homo sapiens
  CDR3 for beta chain variable domain of TCR clone 379552 (TRBV19, TRBJ2-1)
CASPTFVLSGEQFF

SEQ ID NO: 759105 - protein, 14 aa, Homo sapiens
  CDR3 for alpha chain variable domain of TCR clone 379553 (TRAV34, TRAJ44)
CGADGTGTASKLTF

SEQ ID NO: 759106 - protein, 16 aa, Homo sapiens
  CDR3 for beta chain variable domain of TCR clone 379553 (TRBV12-4, TRBJ1-5)
CQQCRDREYSNQPQHF

SEQ ID NO: 759107 - protein, 13 aa, Homo sapiens
  CDR3 for alpha chain variable domain of TCR clone 379554 (TRAV21, TRAJ27)
CAARPGNAGKSTF

SEQ ID NO: 759108 - protein, 15 aa, Homo sapiens
  CDR3 for beta chain variable domain of TCR clone 379554 (TRBV11-2, TRBJ1-3)
CASSIWGSYGNTIYF

SEQ ID NO: 759109 - protein, 12 aa, Homo sapiens
  CDR3 for alpha chain variable domain of TCR clone 379555 (TRAV17, TRAJ12)
CATLRSSYKLIF

SEQ ID NO: 759110 - protein, 14 aa, Homo sapiens
  CDR3 for beta chain variable domain of TCR clone 379555 (TRBV19, TRBJ2-1)
CARGARSFQCEQFF

SEQ ID NO: 759111 - protein, 14 aa, Homo sapiens
  CDR3 for alpha chain variable domain of TCR clone 379556 (TRAV9-2, TRAJ39)
CALYIYNAGNMLTF

SEQ ID NO: 759112 - protein, 13 aa, Homo sapiens
  CDR3 for beta chain variable domain of TCR clone 379556 (TRBV7-9, TRBJ2-5)
CASTQRGGETQYF

SEQ ID NO: 759113 - protein, 15 aa, Homo sapiens
  CDR3 for alpha chain variable domain of TCR clone 379557 (TRAV26-1, TRAJ39)
CTVRVARNAGNMLTF

SEQ ID NO: 759114 - protein, 15 aa, Homo sapiens
  CDR3 for beta chain variable domain of TCR clone 379557 (TRBV5-4, TRBJ2-1)
CASSPTSGGDVGQFF

SEQ ID NO: 759115 - protein, 14 aa, Homo sapiens
  CDR3 for alpha chain variable domain of TCR clone 379558 (TRAV9-2, TRAJ24)
CALNPRGSWGKFQF

SEQ ID NO: 759116 - protein, 15 aa, Homo sapiens
  CDR3 for beta chain variable domain of TCR clone 379558 (TRBV7-2, TRBJ2-3)
CASSSTGLETDTQYF

SEQ ID NO: 759117 - protein, 14 aa, Homo sapiens
  CDR3 for alpha chain variable domain of TCR clone 379559 (TRAV8-3, TRAJ4)
CAVGAAGGYNKLIF

SEQ ID NO: 759118 - protein, 15 aa, Homo sapiens
  CDR3 for beta chain variable domain of TCR clone 379559 (TRBV20-1, TRBJ2-2)
CSARDTRLNTGELFF

SEQ ID NO: 759119 - protein, 16 aa, Homo sapiens
  CDR3 for alpha chain variable domain of TCR clone 379560 (TRAV16, TRAJ42)
CARKMNYGGSKGNLIF

SEQ ID NO: 759120 - protein, 15 aa, Homo sapiens
  CDR3 for beta chain variable domain of TCR clone 379560 (TRBV20-1, TRBJ2-7)
CSAREGRDSLYEQYF

SEQ ID NO: 759121 - protein, 11 aa, Homo sapiens
  CDR3 for alpha chain variable domain of TCR clone 379561 (TRAV17, TRAJ39)
CATGAGNMLTF

SEQ ID NO: 759122 - protein, 16 aa, Homo sapiens
  CDR3 for beta chain variable domain of TCR clone 379561 (TRBV5-1, TRBJ2-1)
CASSFGVSGSYSEQFF

SEQ ID NO: 759123 - protein, 13 aa, Homo sapiens
  CDR3 for alpha chain variable domain of TCR clone 379562 (TRAV12-3, TRAJ21)
CAPGPHNFNKFYF

SEQ ID NO: 759124 - protein, 14 aa, Homo sapiens
  CDR3 for beta chain variable domain of TCR clone 379562 (TRBV25-1, TRBJ1-1)
CASTHLGGNTEAFF

SEQ ID NO: 759125 - protein, 14 aa, Homo sapiens
  CDR3 for alpha chain variable domain of TCR clone 379563 (TRAV30, TRAJ33)
CGTERRFSNYQLIW

SEQ ID NO: 759126 - protein, 16 aa, Homo sapiens
  CDR3 for beta chain variable domain of TCR clone 379563 (TRBV7-3, TRBJ2-2)
CASSLKRGTLSGELLF

SEQ ID NO: 759127 - protein, 14 aa, Homo sapiens
  CDR3 for alpha chain variable domain of TCR clone 379564 (TRAV21, TRAJ28)
CAVGSGAGSDQLTF

SEQ ID NO: 759128 - protein, 14 aa, Homo sapiens
  CDR3 for beta chain variable domain of TCR clone 379564 (TRBV18, TRBJ1-4)
CASSPGPNGETLFF

SEQ ID NO: 759129 - protein, 11 aa, Homo sapiens
  CDR3 for alpha chain variable domain of TCR clone 379565 (TRAV3, TRAJ21)
CAVGNFNKFYF

SEQ ID NO: 759130 - protein, 14 aa, Homo sapiens
  CDR3 for beta chain variable domain of TCR clone 379565 (TRBV29-1, TRBJ2-2)
CSGKGSGNTGELFF

SEQ ID NO: 759131 - protein, 12 aa, Homo sapiens
  CDR3 for alpha chain variable domain of TCR clone 379566 (TRAV13-1, TRAJ49)
CAASPMGNQFYF

SEQ ID NO: 759132 - protein, 16 aa, Homo sapiens
  CDR3 for beta chain variable domain of TCR clone 379566 (TRBV11-2, TRBJ1-1)
CASSLRQGGEHSKAFF

SEQ ID NO: 759133 - protein, 14 aa, Homo sapiens
  CDR3 for alpha chain variable domain of TCR clone 379567 (TRAV34, TRAJ44)
CGADGTGTASKLTF

SEQ ID NO: 759134 - protein, 16 aa, Homo sapiens
  CDR3 for beta chain variable domain of TCR clone 379567 (TRBV19, TRBJ2-1)
CASSKAGPSSYNEQFF

SEQ ID NO: 759135 - protein, 14 aa, Homo sapiens
  CDR3 for alpha chain variable domain of TCR clone 379568 (TRAV35, TRAJ42)
CAGPHGGSQGNLIF

SEQ ID NO: 759136 - protein, 14 aa, Homo sapiens
  CDR3 for beta chain variable domain of TCR clone 379568 (TRBV7-2, TRBJ2-7)
CASSPKTSFYEQYF

SEQ ID NO: 759137 - protein, 13 aa, Homo sapiens
  CDR3 for alpha chain variable domain of TCR clone 379569 (TRAV17, TRAJ5)
CATMDTGRRALTF

SEQ ID NO: 759138 - protein, 15 aa, Homo sapiens
  CDR3 for beta chain variable domain of TCR clone 379569 (TRBV20-1, TRBJ2-5)
CNATRTSGSLETQYF

SEQ ID NO: 759139 - protein, 12 aa, Homo sapiens
  CDR3 for alpha chain variable domain of TCR clone 379570 (TRAV17, TRAJ20)
CATDSNDYKLSF

SEQ ID NO: 759140 - protein, 13 aa, Homo sapiens
  CDR3 for beta chain variable domain of TCR clone 379570 (TRBV29-1, TRBJ2-2)
CSTTGVNTGELFF

SEQ ID NO: 759141 - protein, 14 aa, Homo sapiens
  CDR3 for alpha chain variable domain of TCR clone 379571 (TRAV12-2, TRAJ44)
CAVNPAGTASKLTF

SEQ ID NO: 759142 - protein, 15 aa, Homo sapiens
  CDR3 for beta chain variable domain of TCR clone 379571 (TRBV11-3, TRBJ2-2)
CASSLSGRPTGELFF

SEQ ID NO: 759143 - protein, 15 aa, Homo sapiens
  CDR3 for alpha chain variable domain of TCR clone 379572 (TRAV17, TRAJ22)
CATVAPSGSARQLTF

SEQ ID NO: 759144 - protein, 16 aa, Homo sapiens
  CDR3 for beta chain variable domain of TCR clone 379572 (TRBV10-3, TRBJ2-7)
CAISADFAVRPYEQYF

SEQ ID NO: 759145 - protein, 16 aa, Homo sapiens
  CDR3 for alpha chain variable domain of TCR clone 379573 (TRAV3, TRAJ5)
CAVRNLMDTGRRPLTF

SEQ ID NO: 759146 - protein, 16 aa, Homo sapiens
  CDR3 for beta chain variable domain of TCR clone 379573 (TRBV4-2, TRBJ2-7)
CASSQEGLAISYEQYF

SEQ ID NO: 759147 - protein, 15 aa, Homo sapiens
  CDR3 for alpha chain variable domain of TCR clone 379574 (TRAV35, TRAJ40)
CAGQLGTSGTYNYIS

SEQ ID NO: 759148 - protein, 14 aa, Homo sapiens
  CDR3 for beta chain variable domain of TCR clone 379574 (TRBV7-3, TRBJ2-1)
CASSLAGGTNEQFF

SEQ ID NO: 759149 - protein, 13 aa, Homo sapiens
  CDR3 for alpha chain variable domain of TCR clone 379575 (TRAV2, TRAJ40)
CAVVTLGTYKYIF

SEQ ID NO: 759150 - protein, 14 aa, Homo sapiens
  CDR3 for beta chain variable domain of TCR clone 379575 (TRBV19, TRBJ2-1)
CASPTFVLSGELFF

SEQ ID NO: 759151 - protein, 12 aa, Homo sapiens
  CDR3 for alpha chain variable domain of TCR clone 379576 (TRAV13-2, TRAJ23)
CAERHRGGKLIF

SEQ ID NO: 759152 - protein, 15 aa, Homo sapiens
  CDR3 for beta chain variable domain of TCR clone 379576 (TRBV7-9, TRBJ1-6)
RASSSPGRGNSPLHF

SEQ ID NO: 759153 - protein, 15 aa, Homo sapiens
  CDR3 for alpha chain variable domain of TCR clone 379577 (TRAV12-3, TRAJ6)
CAMSATTGGSYKPTF

SEQ ID NO: 759154 - protein, 16 aa, Homo sapiens
  CDR3 for beta chain variable domain of TCR clone 379577 (TRBV20-1, TRBJ1-2)
RSASMGQGVANYGYTF

SEQ ID NO: 759155 - protein, 13 aa, Homo sapiens
  CDR3 for alpha chain variable domain of TCR clone 379578 (TRAV27, TRAJ56)
CAGKPRANSKLTF

SEQ ID NO: 759156 - protein, 18 aa, Homo sapiens
  CDR3 for beta chain variable domain of TCR clone 379578 (TRBV11-2, TRBJ2-3)
CASSLGGASRGAPNTQYF

SEQ ID NO: 759157 - protein, 16 aa, Homo sapiens
  CDR3 for alpha chain variable domain of TCR clone 379579 (TRAV3, TRAJ3)
CAVRDRAKSSASKIVF

SEQ ID NO: 759158 - protein, 16 aa, Homo sapiens
  CDR3 for beta chain variable domain of TCR clone 379579 (TRBV20-1, TRBJ2-4)
CSATSLAELAKNIQYF

SEQ ID NO: 759159 - protein, 14 aa, Homo sapiens
  CDR3 for alpha chain variable domain of TCR clone 379580 (TRAV13-1, TRAJ26)
CAAPKGPDGQNFVF

SEQ ID NO: 759160 - protein, 14 aa, Homo sapiens
  CDR3 for beta chain variable domain of TCR clone 379580 (TRBV7-2, TRBJ2-1)
CASSLVAGRNEQFF

SEQ ID NO: 759161 - protein, 14 aa, Homo sapiens
  CDR3 for alpha chain variable domain of TCR clone 379581 (TRAV26-1, TRAJ8)
CIVRVDTGSQKLVF

SEQ ID NO: 759162 - protein, 16 aa, Homo sapiens
  CDR3 for beta chain variable domain of TCR clone 379581 (TRBV3-1, TRBJ2-5)
CASSQDWASGQETQYF

SEQ ID NO: 759163 - protein, 12 aa, Homo sapiens
  CDR3 for alpha chain variable domain of TCR clone 379582 (TRAV20, TRAJ33)
CAVRGSNYQLIW

SEQ ID NO: 759164 - protein, 15 aa, Homo sapiens
  CDR3 for beta chain variable domain of TCR clone 379582 (TRBV11-3, TRBJ2-3)
CTSLKDGREGDTQYF

SEQ ID NO: 759165 - protein, 15 aa, Homo sapiens
  CDR3 for alpha chain variable domain of TCR clone 379583 (TRAV3, TRAJ22)
CAVRDRGGSARQLTF

SEQ ID NO: 759166 - protein, 13 aa, Homo sapiens
  CDR3 for beta chain variable domain of TCR clone 379583 (TRBV24-1, TRBJ2-7)
CHQPWDSSYEQYF

SEQ ID NO: 759167 - protein, 14 aa, Homo sapiens
  CDR3 for alpha chain variable domain of TCR clone 379584 (TRAV12-3, TRAJ5)
CAVNRSTGRRALTF

SEQ ID NO: 759168 - protein, 12 aa, Homo sapiens
  CDR3 for beta chain variable domain of TCR clone 379584 (TRBV19, TRBJ1-5)
CASSIAQQPQQF

SEQ ID NO: 759169 - protein, 12 aa, Homo sapiens
  CDR3 for alpha chain variable domain of TCR clone 379585 (TRAV12-1, TRAJ41)
CVVGNSGYALNF

SEQ ID NO: 759170 - protein, 13 aa, Homo sapiens
  CDR3 for beta chain variable domain of TCR clone 379585 (TRBV9, TRBJ2-1)
CASSPSGGNEQFF

SEQ ID NO: 759171 - protein, 13 aa, Homo sapiens
  CDR3 for alpha chain variable domain of TCR clone 379586 (TRAV27, TRAJ53)
CAGQGGSNYKLTF

SEQ ID NO: 759172 - protein, 13 aa, Homo sapiens
  CDR3 for beta chain variable domain of TCR clone 379586 (TRBV29-1, TRBJ1-1)
CSVESGLGTEAFF

SEQ ID NO: 759173 - protein, 14 aa, Homo sapiens
  CDR3 for alpha chain variable domain of TCR clone 379587 (TRAV23/DV6, TRAJ11)
CAASLESGYSTLTF

SEQ ID NO: 759174 - protein, 17 aa, Homo sapiens
  CDR3 for beta chain variable domain of TCR clone 379587 (TRBV13, TRBJ2-3)
CASSLSRVAGGRNTQYF

SEQ ID NO: 759175 - protein, 14 aa, Homo sapiens
  CDR3 for alpha chain variable domain of TCR clone 379588 (TRAV17, TRAJ54)
CATDANLGAQKLVF

SEQ ID NO: 759176 - protein, 12 aa, Homo sapiens
  CDR3 for beta chain variable domain of TCR clone 379588 (TRBV6-3, TRBJ2-1)
CASSGSYNEQFF

SEQ ID NO: 759177 - protein, 15 aa, Homo sapiens
  CDR3 for alpha chain variable domain of TCR clone 379589 (TRAV12-3, TRAJ11)
WAMSEENSGYSTLTF

SEQ ID NO: 759178 - protein, 14 aa, Homo sapiens
  CDR3 for beta chain variable domain of TCR clone 379589 (TRBV18, TRBJ2-5)
CVSSPGVSQETQYF

SEQ ID NO: 759179 - protein, 13 aa, Homo sapiens
  CDR3 for alpha chain variable domain of TCR clone 379590 (TRAV23/DV6, TRAJ45)
CAARRGGADGLTF

SEQ ID NO: 759180 - protein, 11 aa, Homo sapiens
  CDR3 for beta chain variable domain of TCR clone 379590 (TRBV24-1, TRBJ1-2)
CATSDGIGDTF

SEQ ID NO: 759181 - protein, 13 aa, Homo sapiens
  CDR3 for alpha chain variable domain of TCR clone 379591 (TRAV23/DV6, TRAJ15)
CAALPAGRNCSVL

SEQ ID NO: 759182 - protein, 14 aa, Homo sapiens
  CDR3 for beta chain variable domain of TCR clone 379591 (TRBV7-9, TRBJ1-2)
CASSRQGANYGYSF

SEQ ID NO: 759183 - protein, 11 aa, Homo sapiens
  CDR3 for alpha chain variable domain of TCR clone 379592 (TRAV4, TRAJ31)
CLVGDNARLMF

SEQ ID NO: 759184 - protein, 15 aa, Homo sapiens
  CDR3 for beta chain variable domain of TCR clone 379592 (TRBV6-5, TRBJ2-1)
CASSYDAGAGNEQFF

SEQ ID NO: 759185 - protein, 11 aa, Homo sapiens
  CDR3 for alpha chain variable domain of TCR clone 379593 (TRAV23/DV6, TRAJ49)
CAVAPVTSSIL

SEQ ID NO: 759186 - protein, 13 aa, Homo sapiens
  CDR3 for beta chain variable domain of TCR clone 379593 (TRBV7-9, TRBJ2-5)
CASTPVGQETQYF

SEQ ID NO: 759187 - protein, 14 aa, Homo sapiens
  CDR3 for alpha chain variable domain of TCR clone 379594 (TRAV13-1, TRAJ35)
CAASKGGFGNVLHC

SEQ ID NO: 759188 - protein, 13 aa, Homo sapiens
  CDR3 for beta chain variable domain of TCR clone 379594 (TRBV7-3, TRBJ1-1)
CASSQDRGAVAFF

SEQ ID NO: 759189 - protein, 16 aa, Homo sapiens
  CDR3 for alpha chain variable domain of TCR clone 379595 (TRAV3, TRAJ21)
CAVRDIERGNFNKLYS

SEQ ID NO: 759190 - protein, 13 aa, Homo sapiens
  CDR3 for beta chain variable domain of TCR clone 379595 (TRBV27, TRBJ2-7)
CASSLTTGYEQYF

SEQ ID NO: 759191 - protein, 12 aa, Homo sapiens
  CDR3 for alpha chain variable domain of TCR clone 379596 (TRAV8-3, TRAJ5)
CAVGGGLRALTF

SEQ ID NO: 759192 - protein, 14 aa, Homo sapiens
  CDR3 for beta chain variable domain of TCR clone 379596 (TRBV7-9, TRBJ1-4)
CAITEGEANEKLFF

SEQ ID NO: 759193 - protein, 14 aa, Homo sapiens
  CDR3 for alpha chain variable domain of TCR clone 379597 (TRAV13-1, TRAJ44)
CAAKATGTASKLTF

SEQ ID NO: 759194 - protein, 14 aa, Homo sapiens
  CDR3 for beta chain variable domain of TCR clone 379597 (TRBV19, TRBJ2-2)
CASSTLRRSGGLFF

SEQ ID NO: 759195 - protein, 16 aa, Homo sapiens
  CDR3 for alpha chain variable domain of TCR clone 379598 (TRAV30, TRAJ24)
CVTEIVDADSWGKFQC

SEQ ID NO: 759196 - protein, 12 aa, Homo sapiens
  CDR3 for beta chain variable domain of TCR clone 379598 (TRBV7-8, TRBJ2-7)
CASSLGDREQYF

SEQ ID NO: 759197 - protein, 13 aa, Homo sapiens
  CDR3 for alpha chain variable domain of TCR clone 379599 (TRAV21, TRAJ57)
CAVTQGGSEQLAF

SEQ ID NO: 759198 - protein, 16 aa, Homo sapiens
  CDR3 for beta chain variable domain of TCR clone 379599 (TRBV29-1, TRBJ2-7)
CSVEDAEDGTAYEQYF

SEQ ID NO: 759199 - protein, 10 aa, Homo sapiens
  CDR3 for alpha chain variable domain of TCR clone 379600 (TRAV23/DV6, TRAJ57)
CAASSTLSQG

SEQ ID NO: 759200 - protein, 14 aa, Homo sapiens
  CDR3 for beta chain variable domain of TCR clone 379600 (TRBV25-1, TRBJ1-1)
CASNHLGGNTGAFF

SEQ ID NO: 759201 - protein, 14 aa, Homo sapiens
  CDR3 for alpha chain variable domain of TCR clone 379601 (TRAV12-2, TRAJ13)
CAVKKTGGYQKVTF

SEQ ID NO: 759202 - protein, 15 aa, Homo sapiens
  CDR3 for beta chain variable domain of TCR clone 379601 (TRBV7-3, TRBJ2-1)
CASSNGGGSSNEQFF

SEQ ID NO: 759203 - protein, 14 aa, Homo sapiens
  CDR3 for alpha chain variable domain of TCR clone 379602 (TRAV20, TRAJ40)
CAVSLTSGTYKYIF

SEQ ID NO: 759204 - protein, 13 aa, Homo sapiens
  CDR3 for beta chain variable domain of TCR clone 379602 (TRBV5-7, TRBJ2-6)
CASTSSGANVLTF

SEQ ID NO: 759205 - protein, 14 aa, Homo sapiens
  CDR3 for alpha chain variable domain of TCR clone 379603 (TRAV12-2, TRAJ17)
CAVPFKAAGNKLTF

SEQ ID NO: 759206 - protein, 16 aa, Homo sapiens
  CDR3 for beta chain variable domain of TCR clone 379603 (TRBV5-1, TRBJ1-1)
CASSSGGNSLNTEAFF

SEQ ID NO: 759207 - protein, 12 aa, Homo sapiens
  CDR3 for alpha chain variable domain of TCR clone 379604 (TRAV20, TRAJ54)
CAVQEGAQKLVF

SEQ ID NO: 759208 - protein, 17 aa, Homo sapiens
  CDR3 for beta chain variable domain of TCR clone 379604 (TRBV13, TRBJ2-3)
CASSLSRVAGGRNTLYF

SEQ ID NO: 759209 - protein, 15 aa, Homo sapiens
  CDR3 for alpha chain variable domain of TCR clone 379605 (TRAV26-1, TRAJ56)
CIARVATGANSNLTF

SEQ ID NO: 759210 - protein, 15 aa, Homo sapiens
  CDR3 for beta chain variable domain of TCR clone 379605 (TRBV27, TRBJ2-7)
CASSPQREGQREQYF

SEQ ID NO: 759211 - protein, 18 aa, Homo sapiens
  CDR3 for alpha chain variable domain of TCR clone 379606 (TRAV13-1, TRAJ45)
CAASNGGYSGGGADGLTF

SEQ ID NO: 759212 - protein, 13 aa, Homo sapiens
  CDR3 for beta chain variable domain of TCR clone 379606 (TRBV27, TRBJ1-1)
CASSYATNTEAFF

SEQ ID NO: 759213 - protein, 14 aa, Homo sapiens
  CDR3 for alpha chain variable domain of TCR clone 379607 (TRAV12-1, TRAJ12)
CVVTRMDSSYKLIF

SEQ ID NO: 759214 - protein, 11 aa, Homo sapiens
  CDR3 for beta chain variable domain of TCR clone 379607 (TRBV19, TRBJ1-1)
CASSIGSEAFF

SEQ ID NO: 759215 - protein, 16 aa, Homo sapiens
  CDR3 for alpha chain variable domain of TCR clone 379608 (TRAV12-2, TRAJ6)
CAAPLAGSGGSYIPTF

SEQ ID NO: 759216 - protein, 10 aa, Homo sapiens
  CDR3 for beta chain variable domain of TCR clone 379608 (TRBV28, TRBJ1-2)
CASSSDRTDF

SEQ ID NO: 759217 - protein, 13 aa, Homo sapiens
  CDR3 for alpha chain variable domain of TCR clone 379609 (TRAV17, TRAJ9)
CATGSTGGFKTIV

SEQ ID NO: 759218 - protein, 14 aa, Homo sapiens
  CDR3 for beta chain variable domain of TCR clone 379609 (TRBV7-8, TRBJ2-7)
CASTFRGGPNEQYF

SEQ ID NO: 759219 - protein, 15 aa, Homo sapiens
  CDR3 for alpha chain variable domain of TCR clone 379610 (TRAV34, TRAJ38)
CGADFTPGNNRNPIW

SEQ ID NO: 759220 - protein, 16 aa, Homo sapiens
  CDR3 for beta chain variable domain of TCR clone 379610 (TRBV12-5, TRBJ2-5)
CASGPRTSGNQETQYF

SEQ ID NO: 759221 - protein, 17 aa, Homo sapiens
  CDR3 for alpha chain variable domain of TCR clone 379611 (TRAV3, TRAJ42)
CAVRDRDYGGSQGNSLF

SEQ ID NO: 759222 - protein, 15 aa, Homo sapiens
  CDR3 for beta chain variable domain of TCR clone 379611 (TRBV6-6, TRBJ2-7)
CASSYSYGGSYEQYF

SEQ ID NO: 759223 - protein, 14 aa, Homo sapiens
  CDR3 for alpha chain variable domain of TCR clone 379612 (TRAV12-2, TRAJ13)
CAVKKTGGYQKVTF

SEQ ID NO: 759224 - protein, 17 aa, Homo sapiens
  CDR3 for beta chain variable domain of TCR clone 379612 (TRBV13, TRBJ2-3)
CASSLARVAGGRNTQYF

SEQ ID NO: 759225 - protein, 15 aa, Homo sapiens
  CDR3 for alpha chain variable domain of TCR clone 379613 (TRAV13-2, TRAJ5)
CAENPHWTGRRALTF

SEQ ID NO: 759226 - protein, 15 aa, Homo sapiens
  CDR3 for beta chain variable domain of TCR clone 379613 (TRBV7-3, TRBJ2-1)
CASSLSSGSFDEQFF

SEQ ID NO: 759227 - protein, 15 aa, Homo sapiens
  CDR3 for alpha chain variable domain of TCR clone 379614 (TRAV29/DV5, TRAJ40)
CAASAQGSGTYQYIL

SEQ ID NO: 759228 - protein, 11 aa, Homo sapiens
  CDR3 for beta chain variable domain of TCR clone 379614 (TRBV29-1, TRBJ2-5)
CSEDRTGTQYF

SEQ ID NO: 759229 - protein, 15 aa, Homo sapiens
  CDR3 for alpha chain variable domain of TCR clone 379615 (TRAV3, TRAJ5)
CAVRDLDTGRRALTF

SEQ ID NO: 759230 - protein, 14 aa, Homo sapiens
  CDR3 for beta chain variable domain of TCR clone 379615 (TRBV12-4, TRBJ2-7)
CASSLFPGGYEQYF

SEQ ID NO: 759231 - protein, 14 aa, Homo sapiens
  CDR3 for alpha chain variable domain of TCR clone 379616 (TRAV1-2, TRAJ16)
CAVNRFSDGQKLLF

SEQ ID NO: 759232 - protein, 16 aa, Homo sapiens
  CDR3 for beta chain variable domain of TCR clone 379616 (TRBV11-3, TRBJ1-2)
CASSLDTGGADYGYAF

SEQ ID NO: 759233 - protein, 13 aa, Homo sapiens
  CDR3 for alpha chain variable domain of TCR clone 379617 (TRAV8-4, TRAJ30)
CAVSVNRDDKIIF

SEQ ID NO: 759234 - protein, 13 aa, Homo sapiens
  CDR3 for beta chain variable domain of TCR clone 379617 (TRBV3-1, TRBJ2-2)
CASLARGAGELFF

SEQ ID NO: 759235 - protein, 14 aa, Homo sapiens
  CDR3 for alpha chain variable domain of TCR clone 379618 (TRAV14/DV4, TRAJ20)
CAMRESLNDYKLSV

SEQ ID NO: 759236 - protein, 15 aa, Homo sapiens
  CDR3 for beta chain variable domain of TCR clone 379618 (TRBV7-9, TRBJ2-7)
CASSLALAEAYEQYF

SEQ ID NO: 759237 - protein, 12 aa, Homo sapiens
  CDR3 for alpha chain variable domain of TCR clone 379619 (TRAV26-1, TRAJ48)
CIAVFGNEKLTF

SEQ ID NO: 759238 - protein, 13 aa, Homo sapiens
  CDR3 for beta chain variable domain of TCR clone 379619 (TRBV7-8, TRBJ2-7)
CASSFAGLYEQYF

SEQ ID NO: 759239 - protein, 13 aa, Homo sapiens
  CDR3 for alpha chain variable domain of TCR clone 379620 (TRAV21, TRAJ44)
CAAHTGTASKLTC

SEQ ID NO: 759240 - protein, 18 aa, Homo sapiens
  CDR3 for beta chain variable domain of TCR clone 379620 (TRBV25-1, TRBJ1-2)
CASSGLQNGQGLIFGYTF

SEQ ID NO: 759241 - protein, 13 aa, Homo sapiens
  CDR3 for alpha chain variable domain of TCR clone 379621 (TRAV8-3, TRAJ48)
CAVVPFGNEKLTF

SEQ ID NO: 759242 - protein, 15 aa, Homo sapiens
  CDR3 for beta chain variable domain of TCR clone 379621 (TRBV11-2, TRBJ2-1)
CASSSPSTLYNEQFF

SEQ ID NO: 759243 - protein, 11 aa, Homo sapiens
  CDR3 for alpha chain variable domain of TCR clone 379622 (TRAV21, TRAJ34)
CAVTNTDKLIF

SEQ ID NO: 759244 - protein, 15 aa, Homo sapiens
  CDR3 for beta chain variable domain of TCR clone 379622 (TRBV12-4, TRBJ1-2)
CASSPITGSGYGYTF

SEQ ID NO: 759245 - protein, 10 aa, Homo sapiens
  CDR3 for alpha chain variable domain of TCR clone 379623 (TRAV13-1, TRAJ27)
CAPLTRQINL

SEQ ID NO: 759246 - protein, 13 aa, Homo sapiens
  CDR3 for beta chain variable domain of TCR clone 379623 (TRBV7-3, TRBJ1-1)
CASSQDWGAEAFF

SEQ ID NO: 759247 - protein, 14 aa, Homo sapiens
  CDR3 for alpha chain variable domain of TCR clone 379624 (TRAV13-2, TRAJ29)
CAENIEPGNTPLVF

SEQ ID NO: 759248 - protein, 13 aa, Homo sapiens
  CDR3 for beta chain variable domain of TCR clone 379624 (TRBV12-4, TRBJ1-2)
CASSLRQGEGYTF

SEQ ID NO: 759249 - protein, 12 aa, Homo sapiens
  CDR3 for alpha chain variable domain of TCR clone 379625 (TRAV8-3, TRAJ20)
CAVGANDYKLSF

SEQ ID NO: 759250 - protein, 15 aa, Homo sapiens
  CDR3 for beta chain variable domain of TCR clone 379625 (TRBV7-2, TRBJ2-1)
CASSFQADEYNEQFF

SEQ ID NO: 759251 - protein, 17 aa, Homo sapiens
  CDR3 for alpha chain variable domain of TCR clone 379626 (TRAV23/DV6, TRAJ57)
CAASSTLSQGGSEKLVL

SEQ ID NO: 759252 - protein, 13 aa, Homo sapiens
  CDR3 for beta chain variable domain of TCR clone 379626 (TRBV5-1, TRBJ1-1)
CASSLGTDAEAFF

SEQ ID NO: 759253 - protein, 12 aa, Homo sapiens
  CDR3 for alpha chain variable domain of TCR clone 379627 (TRAV13-1, TRAJ48)
CAANFGNEKLNF

SEQ ID NO: 759254 - protein, 13 aa, Homo sapiens
  CDR3 for beta chain variable domain of TCR clone 379627 (TRBV27, TRBJ1-1)
CASSLSIGAEAFF

SEQ ID NO: 759255 - protein, 18 aa, Homo sapiens
  CDR3 for alpha chain variable domain of TCR clone 379628 (TRAV21, TRAJ52)
CAVRPSPAGGTSYGKLTF

SEQ ID NO: 759256 - protein, 13 aa, Homo sapiens
  CDR3 for beta chain variable domain of TCR clone 379628 (TRBV13, TRBJ1-1)
CASSQDWGAEAFF

SEQ ID NO: 759257 - protein, 14 aa, Homo sapiens
  CDR3 for alpha chain variable domain of TCR clone 379629 (TRAV2, TRAJ9)
CAVEDRSGGFKTIF

SEQ ID NO: 759258 - protein, 12 aa, Homo sapiens
  CDR3 for beta chain variable domain of TCR clone 379629 (TRBV19, TRBJ1-5)
CASSIAQQPQHF

SEQ ID NO: 759259 - protein, 13 aa, Homo sapiens
  CDR3 for alpha chain variable domain of TCR clone 379630 (TRAV12-3, TRAJ33)
CAMSVNSNYQLIW

SEQ ID NO: 759260 - protein, 14 aa, Homo sapiens
  CDR3 for beta chain variable domain of TCR clone 379630 (TRBV19, TRBJ2-1)
CASPTCVWSGEQFF

SEQ ID NO: 759261 - protein, 12 aa, Homo sapiens
  CDR3 for alpha chain variable domain of TCR clone 379631 (TRAV12-3, TRAJ17)
CAMTLTANKLTF

SEQ ID NO: 759262 - protein, 15 aa, Homo sapiens
  CDR3 for beta chain variable domain of TCR clone 379631 (TRBV5-1, TRBJ2-1)
CASSPPRAPYNEQFF

SEQ ID NO: 759263 - protein, 15 aa, Homo sapiens
  CDR3 for alpha chain variable domain of TCR clone 379632 (TRAV13-1, TRAJ44)
CAASRGGGTASKLTF

SEQ ID NO: 759264 - protein, 14 aa, Homo sapiens
  CDR3 for beta chain variable domain of TCR clone 379632 (TRBV7-2, TRBJ2-5)
CASSPRGSSETQSF

SEQ ID NO: 759265 - protein, 13 aa, Homo sapiens
  CDR3 for alpha chain variable domain of TCR clone 379633 (TRAV12-2, TRAJ4)
CAGFSGGYNKLIF

SEQ ID NO: 759266 - protein, 16 aa, Homo sapiens
  CDR3 for beta chain variable domain of TCR clone 379633 (TRBV24-1, TRBJ1-1)
CATSIPRGDTELSLDK

SEQ ID NO: 759267 - protein, 12 aa, Homo sapiens
  CDR3 for alpha chain variable domain of TCR clone 379634 (TRAV36/DV7, TRAJ37)
CACYGNTGKLIF

SEQ ID NO: 759268 - protein, 16 aa, Homo sapiens
  CDR3 for beta chain variable domain of TCR clone 379634 (TRBV7-3, TRBJ2-1)
CASSLEGYRSYNEQFF

SEQ ID NO: 759269 - protein, 13 aa, Homo sapiens
  CDR3 for alpha chain variable domain of TCR clone 379635 (TRAV12-1, TRAJ37)
CVVNAGNTGKLIF

SEQ ID NO: 759270 - protein, 14 aa, Homo sapiens
  CDR3 for beta chain variable domain of TCR clone 379635 (TRBV7-2, TRBJ2-3)
CASRRGLAADAQYF

SEQ ID NO: 759271 - protein, 14 aa, Homo sapiens
  CDR3 for alpha chain variable domain of TCR clone 379636 (TRAV9-2, TRAJ39)
CALYIYNAGNMLTF

SEQ ID NO: 759272 - protein, 14 aa, Homo sapiens
  CDR3 for beta chain variable domain of TCR clone 379636 (TRBV5-1, TRBJ2-1)
CASSALWAGNEQFF

SEQ ID NO: 759273 - protein, 12 aa, Homo sapiens
  CDR3 for alpha chain variable domain of TCR clone 379637 (TRAV12-1, TRAJ32)
CVVKGATNKHIF

SEQ ID NO: 759274 - protein, 15 aa, Homo sapiens
  CDR3 for beta chain variable domain of TCR clone 379637 (TRBV20-1, TRBJ2-3)
CSASGTSGYTDTQYF

SEQ ID NO: 759275 - protein, 12 aa, Homo sapiens
  CDR3 for alpha chain variable domain of TCR clone 379638 (TRAV4, TRAJ6)
CLAPGGSYMPTF

SEQ ID NO: 759276 - protein, 18 aa, Homo sapiens
  CDR3 for beta chain variable domain of TCR clone 379638 (TRBV20-1, TRBJ2-3)
CSASGLAGGPGTTDTQYF

SEQ ID NO: 759277 - protein, 14 aa, Homo sapiens
  CDR3 for alpha chain variable domain of TCR clone 379639 (TRAV12-3, TRAJ7)
CAMSEIGGNNRLAF

SEQ ID NO: 759278 - protein, 13 aa, Homo sapiens
  CDR3 for beta chain variable domain of TCR clone 379639 (TRBV9, TRBJ1-1)
GASSVARNPEAFF

SEQ ID NO: 759279 - protein, 17 aa, Homo sapiens
  CDR3 for alpha chain variable domain of TCR clone 379640 (TRAV3, TRAJ42)
CAVRDRDYGGSQGNLIF

SEQ ID NO: 759280 - protein, 15 aa, Homo sapiens
  CDR3 for beta chain variable domain of TCR clone 379640 (TRBV18, TRBJ2-1)
CASSPPSASYNEQFF

SEQ ID NO: 759281 - protein, 12 aa, Homo sapiens
  CDR3 for alpha chain variable domain of TCR clone 379641 (TRAV8-3, TRAJ26)
CAGDNYGQNFVF

SEQ ID NO: 759282 - protein, 15 aa, Homo sapiens
  CDR3 for beta chain variable domain of TCR clone 379641 (TRBV20-1, TRBJ2-3)
CSARHGEAITDTQYF

SEQ ID NO: 759283 - protein, 13 aa, Homo sapiens
  CDR3 for alpha chain variable domain of TCR clone 379642 (TRAV8-6, TRAJ54)
CAVSDQGAQKLVF

SEQ ID NO: 759284 - protein, 15 aa, Homo sapiens
  CDR3 for beta chain variable domain of TCR clone 379642 (TRBV7-2, TRBJ2-3)
CASSSTGLETDTQYF

SEQ ID NO: 759285 - protein, 12 aa, Homo sapiens
  CDR3 for alpha chain variable domain of TCR clone 379643 (TRAV1-2, TRAJ33)
CAALDSNYQLIW

SEQ ID NO: 759286 - protein, 16 aa, Homo sapiens
  CDR3 for beta chain variable domain of TCR clone 379643 (TRBV6-6, TRBJ1-5)
CASSYSTLVGNQPQHF

SEQ ID NO: 759287 - protein, 13 aa, Homo sapiens
  CDR3 for alpha chain variable domain of TCR clone 379644 (TRAV2, TRAJ40)
CAVVTSGTYKYIF

SEQ ID NO: 759288 - protein, 17 aa, Homo sapiens
  CDR3 for beta chain variable domain of TCR clone 379644 (TRBV11-2, TRBJ2-1)
CASSLYTPGVEYNEQFF

SEQ ID NO: 759289 - protein, 15 aa, Homo sapiens
  CDR3 for alpha chain variable domain of TCR clone 379645 (TRAV26-1, TRAJ29)
CIVRVEGSGNTPLVF

SEQ ID NO: 759290 - protein, 12 aa, Homo sapiens
  CDR3 for beta chain variable domain of TCR clone 379645 (TRBV18, TRBJ2-5)
CASSPNQETQYF

SEQ ID NO: 759291 - protein, 14 aa, Homo sapiens
  CDR3 for alpha chain variable domain of TCR clone 379646 (TRAV8-1, TRAJ15)
CAVNGQLAGTALIF

SEQ ID NO: 759292 - protein, 16 aa, Homo sapiens
  CDR3 for beta chain variable domain of TCR clone 379646 (TRBV11-3, TRBJ2-5)
CASSSVVAGSTETQYF

SEQ ID NO: 759293 - protein, 16 aa, Homo sapiens
  CDR3 for alpha chain variable domain of TCR clone 379647 (TRAV30, TRAJ24)
CGTEIVDADSWGNFQF

SEQ ID NO: 759294 - protein, 13 aa, Homo sapiens
  CDR3 for beta chain variable domain of TCR clone 379647 (TRBV7-3, TRBJ1-1)
CASSQDWGAEAFF

SEQ ID NO: 759295 - protein, 10 aa, Homo sapiens
  CDR3 for alpha chain variable domain of TCR clone 379648 (TRAV12-1, TRAJ41)
CVVPELKFRV

SEQ ID NO: 759296 - protein, 12 aa, Homo sapiens
  CDR3 for beta chain variable domain of TCR clone 379648 (TRBV14, TRBJ2-5)
CASSQLRETQYF

SEQ ID NO: 759297 - protein, 14 aa, Homo sapiens
  CDR3 for alpha chain variable domain of TCR clone 379649 (TRAV38-1, TRAJ45)
CAYYSGGGADGLTF

SEQ ID NO: 759298 - protein, 15 aa, Homo sapiens
  CDR3 for beta chain variable domain of TCR clone 379649 (TRBV11-2, TRBJ2-1)
CASSKNRGLIDEQFF

SEQ ID NO: 759299 - protein, 14 aa, Homo sapiens
  CDR3 for alpha chain variable domain of TCR clone 379650 (TRAV1-2, TRAJ16)
CAVNRFSDGQKLLL

SEQ ID NO: 759300 - protein, 13 aa, Homo sapiens
  CDR3 for beta chain variable domain of TCR clone 379650 (TRBV12-4, TRBJ2-5)
CASSPGTEETQYF

SEQ ID NO: 759301 - protein, 16 aa, Homo sapiens
  CDR3 for alpha chain variable domain of TCR clone 379651 (TRAV30, TRAJ24)
CGTEIVDADSWGKFQF

SEQ ID NO: 759302 - protein, 14 aa, Homo sapiens
  CDR3 for beta chain variable domain of TCR clone 379651 (TRBV13, TRBJ2-7)
CASSVKGASYEQYF

SEQ ID NO: 759303 - protein, 14 aa, Homo sapiens
  CDR3 for alpha chain variable domain of TCR clone 379652 (TRAV12-2, TRAJ13)
CAVKKTGGYQKVTF

SEQ ID NO: 759304 - protein, 15 aa, Homo sapiens
  CDR3 for beta chain variable domain of TCR clone 379652 (TRBV6-5, TRBJ2-7)
CASSRTSGFSYEQYF

SEQ ID NO: 759305 - protein, 12 aa, Homo sapiens
  CDR3 for alpha chain variable domain of TCR clone 379653 (TRAV27, TRAJ9)
CAGESGGFKTIF

SEQ ID NO: 759306 - protein, 16 aa, Homo sapiens
  CDR3 for beta chain variable domain of TCR clone 379653 (TRBV5-1, TRBJ1-1)
CASSSGGNSLNTEAFF

SEQ ID NO: 759307 - protein, 15 aa, Homo sapiens
  CDR3 for alpha chain variable domain of TCR clone 379654 (TRAV26-1, TRAJ29)
CIVRVEGSGNTPIVF

SEQ ID NO: 759308 - protein, 14 aa, Homo sapiens
  CDR3 for beta chain variable domain of TCR clone 379654 (TRBV18, TRBJ2-5)
CASSPGVSHETQYF

SEQ ID NO: 759309 - protein, 14 aa, Homo sapiens
  CDR3 for alpha chain variable domain of TCR clone 379655 (TRAV1-2, TRAJ8)
CAVREDTGFQKLVV

SEQ ID NO: 759310 - protein, 15 aa, Homo sapiens
  CDR3 for beta chain variable domain of TCR clone 379655 (TRBV7-3, TRBJ2-2)
CASSETGQGTGELFF

SEQ ID NO: 759311 - protein, 13 aa, Homo sapiens
  CDR3 for alpha chain variable domain of TCR clone 379656 (TRAV17, TRAJ9)
CATDYTGGFKTFF

SEQ ID NO: 759312 - protein, 16 aa, Homo sapiens
  CDR3 for beta chain variable domain of TCR clone 379656 (TRBV7-7, TRBJ2-1)
CASSLASGTSYNEQFF

SEQ ID NO: 759313 - protein, 12 aa, Homo sapiens
  CDR3 for alpha chain variable domain of TCR clone 379657 (TRAV3, TRAJ27)
CAVRDGAGKSTY

SEQ ID NO: 759314 - protein, 13 aa, Homo sapiens
  CDR3 for beta chain variable domain of TCR clone 379657 (TRBV10-3, TRBJ1-2)
CAINADLNYGYTF

SEQ ID NO: 759315 - protein, 12 aa, Homo sapiens
  CDR3 for alpha chain variable domain of TCR clone 379658 (TRAV8-4, TRAJ43)
CVVSVDNNDMRF

SEQ ID NO: 759316 - protein, 14 aa, Homo sapiens
  CDR3 for beta chain variable domain of TCR clone 379658 (TRBV11-2, TRBJ1-2)
CASRLGTANYGYTF

SEQ ID NO: 759317 - protein, 15 aa, Homo sapiens
  CDR3 for alpha chain variable domain of TCR clone 379659 (TRAV8-3, TRAJ45)
CASSYSGGGADGLTF

SEQ ID NO: 759318 - protein, 14 aa, Homo sapiens
  CDR3 for beta chain variable domain of TCR clone 379659 (TRBV12-4, TRBJ2-2)
CASNQGANTGELFF

SEQ ID NO: 759319 - protein, 15 aa, Homo sapiens
  CDR3 for alpha chain variable domain of TCR clone 379660 (TRAV3, TRAJ9)
CAVRAGNTGGFKTIF

SEQ ID NO: 759320 - protein, 12 aa, Homo sapiens
  CDR3 for beta chain variable domain of TCR clone 379660 (TRBV11-2, TRBJ2-7)
CASSLPTYEQYF

SEQ ID NO: 759321 - protein, 15 aa, Homo sapiens
  CDR3 for alpha chain variable domain of TCR clone 379661 (TRAV35, TRAJ40)
CAGQLGTSGTYKYIF

SEQ ID NO: 759322 - protein, 15 aa, Homo sapiens
  CDR3 for beta chain variable domain of TCR clone 379661 (TRBV7-2, TRBJ2-7)
CASSLKGALTYEQYF

SEQ ID NO: 759323 - protein, 15 aa, Homo sapiens
  CDR3 for alpha chain variable domain of TCR clone 379662 (TRAV27, TRAJ45)
CGPVDSGGGADGLTF

SEQ ID NO: 759324 - protein, 15 aa, Homo sapiens
  CDR3 for beta chain variable domain of TCR clone 379662 (TRBV5-1, TRBJ1-1)
CASSVDRLGNTEAFF

SEQ ID NO: 759325 - protein, 14 aa, Homo sapiens
  CDR3 for alpha chain variable domain of TCR clone 379663 (TRAV3, TRAJ7)
CAVREEQREQQTRF

SEQ ID NO: 759326 - protein, 15 aa, Homo sapiens
  CDR3 for beta chain variable domain of TCR clone 379663 (TRBV20-1, TRBJ1-5)
CSAFKNGQRNQPQHF

SEQ ID NO: 759327 - protein, 15 aa, Homo sapiens
  CDR3 for alpha chain variable domain of TCR clone 379664 (TRAV8-3, TRAJ28)
CAVPYSGAGSYQLTF

SEQ ID NO: 759328 - protein, 17 aa, Homo sapiens
  CDR3 for beta chain variable domain of TCR clone 379664 (TRBV20-1, TRBJ2-4)
CSARDWASGGRENIQYF

SEQ ID NO: 759329 - protein, 17 aa, Homo sapiens
  CDR3 for alpha chain variable domain of TCR clone 379665 (TRAV12-2, TRAJ53)
CAPLTDSQAGSNYKLTF

SEQ ID NO: 759330 - protein, 12 aa, Homo sapiens
  CDR3 for beta chain variable domain of TCR clone 379665 (TRBV11-2, TRBJ2-2)
CASSLGGGELFF

SEQ ID NO: 759331 - protein, 14 aa, Homo sapiens
  CDR3 for alpha chain variable domain of TCR clone 379666 (TRAV12-1, TRAJ13)
CVVIDSGGYQKVTF

SEQ ID NO: 759332 - protein, 15 aa, Homo sapiens
  CDR3 for beta chain variable domain of TCR clone 379666 (TRBV19, TRBJ1-1)
CASTSGQIQNTEAFF

SEQ ID NO: 759333 - protein, 16 aa, Homo sapiens
  CDR3 for alpha chain variable domain of TCR clone 379667 (TRAV4, TRAJ42)
CLVGDHYGGSQGNLIF

SEQ ID NO: 759334 - protein, 14 aa, Homo sapiens
  CDR3 for beta chain variable domain of TCR clone 379667 (TRBV18, TRBJ2-7)
CASSPTSGGYEQYF

SEQ ID NO: 759335 - protein, 14 aa, Homo sapiens
  CDR3 for alpha chain variable domain of TCR clone 379668 (TRAV8-3, TRAJ4)
CAVGAAGGYNKLIF

SEQ ID NO: 759336 - protein, 16 aa, Homo sapiens
  CDR3 for beta chain variable domain of TCR clone 379668 (TRBV19, TRBJ2-2)
CASPSPGTGATGELFF

SEQ ID NO: 759337 - protein, 10 aa, Homo sapiens
  CDR3 for alpha chain variable domain of TCR clone 379669 (TRAV23/DV6, TRAJ31)
CARGGARLMF

SEQ ID NO: 759338 - protein, 14 aa, Homo sapiens
  CDR3 for beta chain variable domain of TCR clone 379669 (TRBV5-7, TRBJ1-2)
CASSLVSANYGYTF

SEQ ID NO: 759339 - protein, 18 aa, Homo sapiens
  CDR3 for alpha chain variable domain of TCR clone 379670 (TRAV16, TRAJ52)
CALSGVDAGGTCYGKLTF

SEQ ID NO: 759340 - protein, 15 aa, Homo sapiens
  CDR3 for beta chain variable domain of TCR clone 379670 (TRBV11-3, TRBJ2-3)
CASSAGTVVTNTQYF

SEQ ID NO: 759341 - protein, 13 aa, Homo sapiens
  CDR3 for alpha chain variable domain of TCR clone 379671 (TRAV20, TRAJ37)
CAGRFSNTGKLIF

SEQ ID NO: 759342 - protein, 15 aa, Homo sapiens
  CDR3 for beta chain variable domain of TCR clone 379671 (TRBV7-2, TRBJ2-1)
CASSFQADEYNEQFF

SEQ ID NO: 759343 - protein, 16 aa, Homo sapiens
  CDR3 for alpha chain variable domain of TCR clone 379672 (TRAV17, TRAJ28)
CATASVSGAGGYQLTL

SEQ ID NO: 759344 - protein, 11 aa, Homo sapiens
  CDR3 for beta chain variable domain of TCR clone 379672 (TRBV7-9, TRBJ2-5)
CASSLGETQYF

SEQ ID NO: 759345 - protein, 14 aa, Homo sapiens
  CDR3 for alpha chain variable domain of TCR clone 379673 (TRAV17, TRAJ16)
CATADFSDGQKLLF

SEQ ID NO: 759346 - protein, 15 aa, Homo sapiens
  CDR3 for beta chain variable domain of TCR clone 379673 (TRBV18, TRBJ2-1)
CASSPPSASYNEQSC

SEQ ID NO: 759347 - protein, 17 aa, Homo sapiens
  CDR3 for alpha chain variable domain of TCR clone 379674 (TRAV3, TRAJ42)
CAVRDRDYGGTQGNLIF

SEQ ID NO: 759348 - protein, 15 aa, Homo sapiens
  CDR3 for beta chain variable domain of TCR clone 379674 (TRBV6-6, TRBJ2-7)
CASSYSYGGSYEQYF

SEQ ID NO: 759349 - protein, 15 aa, Homo sapiens
  CDR3 for alpha chain variable domain of TCR clone 379675 (TRAV12-3, TRAJ10)
CASYILTGGGNKLTF

SEQ ID NO: 759350 - protein, 15 aa, Homo sapiens
  CDR3 for beta chain variable domain of TCR clone 379675 (TRBV7-2, TRBJ1-6)
CASSLGPDRGMPLHV

SEQ ID NO: 759351 - protein, 13 aa, Homo sapiens
  CDR3 for alpha chain variable domain of TCR clone 379676 (TRAV2, TRAJ40)
CAVVTSGTYKYIF

SEQ ID NO: 759352 - protein, 15 aa, Homo sapiens
  CDR3 for beta chain variable domain of TCR clone 379676 (TRBV11-3, TRBJ2-3)
CASMRDGREGDTQYF

SEQ ID NO: 759353 - protein, 11 aa, Homo sapiens
  CDR3 for alpha chain variable domain of TCR clone 379677 (TRAV3, TRAJ21)
CAVGNFNKFYF

SEQ ID NO: 759354 - protein, 13 aa, Homo sapiens
  CDR3 for beta chain variable domain of TCR clone 379677 (TRBV20-1, TRBJ2-2)
CSASAACTGELFF

SEQ ID NO: 759355 - protein, 15 aa, Homo sapiens
  CDR3 for alpha chain variable domain of TCR clone 379678 (TRAV12-1, TRAJ44)
CVVFVNTGTASKLTF

SEQ ID NO: 759356 - protein, 16 aa, Homo sapiens
  CDR3 for beta chain variable domain of TCR clone 379678 (TRBV20-1, TRBJ2-5)
CSPGGTSGGYMETQYL

SEQ ID NO: 759357 - protein, 15 aa, Homo sapiens
  CDR3 for alpha chain variable domain of TCR clone 379679 (TRAV25, TRAJ52)
CAGRPGGTSYGKLTF

SEQ ID NO: 759358 - protein, 15 aa, Homo sapiens
  CDR3 for beta chain variable domain of TCR clone 379679 (TRBV18, TRBJ2-1)
CASSPPSASYNEQFF

SEQ ID NO: 759359 - protein, 14 aa, Homo sapiens
  CDR3 for alpha chain variable domain of TCR clone 379680 (TRAV1-2, TRAJ8)
CAVREDTGFQKLVF

SEQ ID NO: 759360 - protein, 16 aa, Homo sapiens
  CDR3 for beta chain variable domain of TCR clone 379680 (TRBV5-1, TRBJ2-3)
CASSLALAVVSDTQYF

SEQ ID NO: 759361 - protein, 15 aa, Homo sapiens
  CDR3 for alpha chain variable domain of TCR clone 379681 (TRAV14/DV4, TRAJ46)
CAMREKKSSGDKLTF

SEQ ID NO: 759362 - protein, 13 aa, Homo sapiens
  CDR3 for beta chain variable domain of TCR clone 379681 (TRBV20-1, TRBJ2-5)
CSARDAFQETQYF

SEQ ID NO: 759363 - protein, 14 aa, Homo sapiens
  CDR3 for alpha chain variable domain of TCR clone 379682 (TRAV13-2, TRAJ17)
CAENSKAAGNKLTF

SEQ ID NO: 759364 - protein, 11 aa, Homo sapiens
  CDR3 for beta chain variable domain of TCR clone 379682 (TRBV7-8, TRBJ2-7)
CASSLSLEQYF

SEQ ID NO: 759365 - protein, 15 aa, Homo sapiens
  CDR3 for alpha chain variable domain of TCR clone 379683 (TRAV16, TRAJ17)
CALSGQEAAGNKLTF

SEQ ID NO: 759366 - protein, 15 aa, Homo sapiens
  CDR3 for beta chain variable domain of TCR clone 379683 (TRBV12-4, TRBJ1-5)
CASTQGTGQLQPQHF

SEQ ID NO: 759367 - protein, 16 aa, Homo sapiens
  CDR3 for alpha chain variable domain of TCR clone 379684 (TRAV21, TRAJ17)
CAVRPGEEAAGNKLTF

SEQ ID NO: 759368 - protein, 16 aa, Homo sapiens
  CDR3 for beta chain variable domain of TCR clone 379684 (TRBV2, TRBJ2-1)
CASSEPWTGPSYEQFF

SEQ ID NO: 759369 - protein, 14 aa, Homo sapiens
  CDR3 for alpha chain variable domain of TCR clone 379685 (TRAV29/DV5, TRAJ32)
CAAAYGGATNKLIF

SEQ ID NO: 759370 - protein, 11 aa, Homo sapiens
  CDR3 for beta chain variable domain of TCR clone 379685 (TRBV11-2, TRBJ2-2)
CASSLPGGLFF

SEQ ID NO: 759371 - protein, 16 aa, Homo sapiens
  CDR3 for alpha chain variable domain of TCR clone 379686 (TRAV30, TRAJ24)
CGTEIVDADSWGKFQF

SEQ ID NO: 759372 - protein, 11 aa, Homo sapiens
  CDR3 for beta chain variable domain of TCR clone 379686 (TRBV18, TRBJ1-2)
CASSPLNGYTF

SEQ ID NO: 759373 - protein, 12 aa, Homo sapiens
  CDR3 for alpha chain variable domain of TCR clone 379687 (TRAV12-3, TRAJ5)
CAMETGRRALTF

SEQ ID NO: 759374 - protein, 14 aa, Homo sapiens
  CDR3 for beta chain variable domain of TCR clone 379687 (TRBV20-1, TRBJ2-1)
CSAQIGGSANEQFF

SEQ ID NO: 759375 - protein, 12 aa, Homo sapiens
  CDR3 for alpha chain variable domain of TCR clone 379688 (TRAV26-1, TRAJ35)
CIGLSFGNVLHC

SEQ ID NO: 759376 - protein, 17 aa, Homo sapiens
  CDR3 for beta chain variable domain of TCR clone 379688 (TRBV11-3, TRBJ2-5)
CASSLTGVRGGKETQYF

SEQ ID NO: 759377 - protein, 16 aa, Homo sapiens
  CDR3 for alpha chain variable domain of TCR clone 379689 (TRAV12-1, TRAJ43)
CVVNPHRFGSGTRLTV

SEQ ID NO: 759378 - protein, 14 aa, Homo sapiens
  CDR3 for beta chain variable domain of TCR clone 379689 (TRBV7-2, TRBJ2-7)
CASRSQGAAYEQYF

SEQ ID NO: 759379 - protein, 17 aa, Homo sapiens
  CDR3 for alpha chain variable domain of TCR clone 379690 (TRAV1-1, TRAJ4)
CALYNKLSFGAGTRLAV

SEQ ID NO: 759380 - protein, 16 aa, Homo sapiens
  CDR3 for beta chain variable domain of TCR clone 379690 (TRBV7-3, TRBJ2-2)
CASSLKRGTLSGELFF

SEQ ID NO: 759381 - protein, 15 aa, Homo sapiens
  CDR3 for alpha chain variable domain of TCR clone 379691 (TRAV3, TRAJ22)
CAVIDRGGSARQLTF

SEQ ID NO: 759382 - protein, 13 aa, Homo sapiens
  CDR3 for beta chain variable domain of TCR clone 379691 (TRBV7-3, TRBJ2-1)
CASSPVAYNEQFF

SEQ ID NO: 759383 - protein, 15 aa, Homo sapiens
  CDR3 for alpha chain variable domain of TCR clone 379692 (TRAV8-3, TRAJ40)
CAVGPYTSGTYNYIF

SEQ ID NO: 759384 - protein, 16 aa, Homo sapiens
  CDR3 for beta chain variable domain of TCR clone 379692 (TRBV7-2, TRBJ2-7)
CASSLDPGGGSGGQYL

SEQ ID NO: 759385 - protein, 14 aa, Homo sapiens
  CDR3 for alpha chain variable domain of TCR clone 379693 (TRAV12-3, TRAJ41)
CAMSAGNSGYALNF

SEQ ID NO: 759386 - protein, 14 aa, Homo sapiens
  CDR3 for beta chain variable domain of TCR clone 379693 (TRBV7-2, TRBJ1-2)
CASSRGGTNYGYTF

SEQ ID NO: 759387 - protein, 14 aa, Homo sapiens
  CDR3 for alpha chain variable domain of TCR clone 379694 (TRAV29/DV5, TRAJ36)
CAARRKTGANNLFF

SEQ ID NO: 759388 - protein, 15 aa, Homo sapiens
  CDR3 for beta chain variable domain of TCR clone 379694 (TRBV19, TRBJ1-6)
CASSTQGAGGSPLHF

SEQ ID NO: 759389 - protein, 14 aa, Homo sapiens
  CDR3 for alpha chain variable domain of TCR clone 379695 (TRAV12-1, TRAJ23)
CVVIVYNQGGKLIF

SEQ ID NO: 759390 - protein, 15 aa, Homo sapiens
  CDR3 for beta chain variable domain of TCR clone 379695 (TRBV7-9, TRBJ1-4)
CASSARKGGNEKLFF

SEQ ID NO: 759391 - protein, 14 aa, Homo sapiens
  CDR3 for alpha chain variable domain of TCR clone 379696 (TRAV12-3, TRAJ10)
SHLPLTGEGNKLTF

SEQ ID NO: 759392 - protein, 15 aa, Homo sapiens
  CDR3 for beta chain variable domain of TCR clone 379696 (TRBV4-3, TRBJ2-7)
CASSQGDWGDYEQYF

SEQ ID NO: 759393 - protein, 11 aa, Homo sapiens
  CDR3 for alpha chain variable domain of TCR clone 379697 (TRAV17, TRAJ9)
CGFTGGFKTIS

SEQ ID NO: 759394 - protein, 14 aa, Homo sapiens
  CDR3 for beta chain variable domain of TCR clone 379697 (TRBV7-9, TRBJ2-2)
CASSLVQDTRELFF

SEQ ID NO: 759395 - protein, 14 aa, Homo sapiens
  CDR3 for alpha chain variable domain of TCR clone 379698 (TRAV12-1, TRAJ6)
CVVPTSGGSYIPPF

SEQ ID NO: 759396 - protein, 16 aa, Homo sapiens
  CDR3 for beta chain variable domain of TCR clone 379698 (TRBV2, TRBJ2-7)
CASSEPWTGPSYEQYF

SEQ ID NO: 759397 - protein, 15 aa, Homo sapiens
  CDR3 for alpha chain variable domain of TCR clone 379699 (TRAV4, TRAJ10)
CLVGDEEGGGNKLTF

SEQ ID NO: 759398 - protein, 17 aa, Homo sapiens
  CDR3 for beta chain variable domain of TCR clone 379699 (TRBV4-2, TRBJ1-1)
CASTQFGGGSGNTEAFF

SEQ ID NO: 759399 - protein, 14 aa, Homo sapiens
  CDR3 for alpha chain variable domain of TCR clone 379700 (TRAV4, TRAJ26)
CTTASWVTMVNFVF

SEQ ID NO: 759400 - protein, 16 aa, Homo sapiens
  CDR3 for beta chain variable domain of TCR clone 379700 (TRBV7-2, TRBJ1-2)
CASSSNQDRRGHGYTF

SEQ ID NO: 759401 - protein, 10 aa, Homo sapiens
  CDR3 for alpha chain variable domain of TCR clone 379701 (TRAV23/DV6, TRAJ18)
CAARYRGSTL

SEQ ID NO: 759402 - protein, 14 aa, Homo sapiens
  CDR3 for beta chain variable domain of TCR clone 379701 (TRBV28, TRBJ1-2)
CASRIQGANYGYTF

SEQ ID NO: 759403 - protein, 15 aa, Homo sapiens
  CDR3 for alpha chain variable domain of TCR clone 379702 (TRAV13-1, TRAJ8)
CAASIPNTGFQKLVF

SEQ ID NO: 759404 - protein, 16 aa, Homo sapiens
  CDR3 for beta chain variable domain of TCR clone 379702 (TRBV10-3, TRBJ2-1)
RAISGVGDGGGGEQFF

SEQ ID NO: 759405 - protein, 13 aa, Homo sapiens
  CDR3 for alpha chain variable domain of TCR clone 379703 (TRAV12-3, TRAJ9)
CAMRNTGGFKTIF

SEQ ID NO: 759406 - protein, 14 aa, Homo sapiens
  CDR3 for beta chain variable domain of TCR clone 379703 (TRBV18, TRBJ2-7)
CASSPRGGAYEQYF

SEQ ID NO: 759407 - protein, 14 aa, Homo sapiens
  CDR3 for alpha chain variable domain of TCR clone 379704 (TRAV17, TRAJ48)
CATEGNFGNEKLTF

SEQ ID NO: 759408 - protein, 16 aa, Homo sapiens
  CDR3 for beta chain variable domain of TCR clone 379704 (TRBV28, TRBJ2-1)
CASSTRTSGRRNEQFF

SEQ ID NO: 759409 - protein, 12 aa, Homo sapiens
  CDR3 for alpha chain variable domain of TCR clone 379705 (TRAV13-1, TRAJ49)
CAASPMGNQFYF

SEQ ID NO: 759410 - protein, 15 aa, Homo sapiens
  CDR3 for beta chain variable domain of TCR clone 379705 (TRBV4-3, TRBJ1-1)
CASSQELGRGTEAFF

SEQ ID NO: 759411 - protein, 12 aa, Homo sapiens
  CDR3 for alpha chain variable domain of TCR clone 379706 (TRAV12-3, TRAJ17)
CAMTLTGNKLTF

SEQ ID NO: 759412 - protein, 15 aa, Homo sapiens
  CDR3 for beta chain variable domain of TCR clone 379706 (TRBV4-1, TRBJ1-4)
CASSDTRGTNEKLFF

SEQ ID NO: 759413 - protein, 14 aa, Homo sapiens
  CDR3 for alpha chain variable domain of TCR clone 379707 (TRAV16, TRAJ39)
CALSKNNAGNMLTF

SEQ ID NO: 759414 - protein, 16 aa, Homo sapiens
  CDR3 for beta chain variable domain of TCR clone 379707 (TRBV11-2, TRBJ2-7)
CASSPTTGGVSYEQYF

SEQ ID NO: 759415 - protein, 10 aa, Homo sapiens
  CDR3 for alpha chain variable domain of TCR clone 379708 (TRAV1-2, TRAJ20)
CACSDYKLSF

SEQ ID NO: 759416 - protein, 16 aa, Homo sapiens
  CDR3 for beta chain variable domain of TCR clone 379708 (TRBV20-1, TRBJ2-1)
CSSRDLKQGMNNEQFF

SEQ ID NO: 759417 - protein, 11 aa, Homo sapiens
  CDR3 for alpha chain variable domain of TCR clone 379709 (TRAV2, TRAJ13)
CASGGYQKVTF

SEQ ID NO: 759418 - protein, 16 aa, Homo sapiens
  CDR3 for beta chain variable domain of TCR clone 379709 (TRBV11-2, TRBJ1-2)
CASSPSGREANYGYTF

SEQ ID NO: 759419 - protein, 14 aa, Homo sapiens
  CDR3 for alpha chain variable domain of TCR clone 379710 (TRAV8-6, TRAJ48)
CAVISNFGNEKLTF

SEQ ID NO: 759420 - protein, 14 aa, Homo sapiens
  CDR3 for beta chain variable domain of TCR clone 379710 (TRBV4-1, TRBJ1-5)
CASSQGPTNKPQHF

SEQ ID NO: 759421 - protein, 12 aa, Homo sapiens
  CDR3 for alpha chain variable domain of TCR clone 379711 (TRAV12-3, TRAJ20)
CAMVRGDYKLSF

SEQ ID NO: 759422 - protein, 14 aa, Homo sapiens
  CDR3 for beta chain variable domain of TCR clone 379711 (TRBV20-1, TRBJ2-1)
CSAQIGGSANEQFF

SEQ ID NO: 759423 - protein, 14 aa, Homo sapiens
  CDR3 for alpha chain variable domain of TCR clone 379712 (TRAV38-1, TRAJ40)
CALRPTSGTYKYIF

SEQ ID NO: 759424 - protein, 14 aa, Homo sapiens
  CDR3 for beta chain variable domain of TCR clone 379712 (TRBV19, TRBJ2-1)
CASPTVVLSGEQFF

SEQ ID NO: 759425 - protein, 18 aa, Homo sapiens
  CDR3 for alpha chain variable domain of TCR clone 379713 (TRAV21, TRAJ52)
CAVRPSPAGGTSYGKLTF

SEQ ID NO: 759426 - protein, 17 aa, Homo sapiens
  CDR3 for beta chain variable domain of TCR clone 379713 (TRBV13, TRBJ2-3)
GASSRSRVAGGRNTQYF

SEQ ID NO: 759427 - protein, 16 aa, Homo sapiens
  CDR3 for alpha chain variable domain of TCR clone 379714 (TRAV17, TRAJ35)
CATAEGGIGFGNVLHW

SEQ ID NO: 759428 - protein, 16 aa, Homo sapiens
  CDR3 for beta chain variable domain of TCR clone 379714 (TRBV6-5, TRBJ2-7)
CASSSDPTSGFYEQYF

SEQ ID NO: 759429 - protein, 16 aa, Homo sapiens
  CDR3 for alpha chain variable domain of TCR clone 379715 (TRAV12-2, TRAJ32)
CAVNLGQGGSTNKLIF

SEQ ID NO: 759430 - protein, 13 aa, Homo sapiens
  CDR3 for beta chain variable domain of TCR clone 379715 (TRBV9, TRBJ2-2)
CASSPRPAGELFF

SEQ ID NO: 759431 - protein, 16 aa, Homo sapiens
  CDR3 for alpha chain variable domain of TCR clone 379716 (TRAV1-2, TRAJ10)
CAVRGVLTGGGNKPTF

SEQ ID NO: 759432 - protein, 16 aa, Homo sapiens
  CDR3 for beta chain variable domain of TCR clone 379716 (TRBV27, TRBJ2-2)
CASSFRGLVRTGELFF

SEQ ID NO: 759433 - protein, 11 aa, Homo sapiens
  CDR3 for alpha chain variable domain of TCR clone 379717 (TRAV27, TRAJ47)
CRSNQGNKLVF

SEQ ID NO: 759434 - protein, 16 aa, Homo sapiens
  CDR3 for beta chain variable domain of TCR clone 379717 (TRBV7-9, TRBJ2-1)
CASSDAAGGSYNEQLF

SEQ ID NO: 759435 - protein, 14 aa, Homo sapiens
  CDR3 for alpha chain variable domain of TCR clone 379718 (TRAV1-2, TRAJ8)
CAVREDTGFQKIVF

SEQ ID NO: 759436 - protein, 13 aa, Homo sapiens
  CDR3 for beta chain variable domain of TCR clone 379718 (TRBV27, TRBJ2-1)
CASRTLGVGEQFF

SEQ ID NO: 759437 - protein, 15 aa, Homo sapiens
  CDR3 for alpha chain variable domain of TCR clone 379719 (TRAV3, TRAJ45)
CAVRTPWGGADGLTF

SEQ ID NO: 759438 - protein, 14 aa, Homo sapiens
  CDR3 for beta chain variable domain of TCR clone 379719 (TRBV7-2, TRBJ2-7)
CASSLYPGRYEQYF

SEQ ID NO: 759439 - protein, 15 aa, Homo sapiens
  CDR3 for alpha chain variable domain of TCR clone 379720 (TRAV3, TRAJ29)
CAVRAPLSGNTPLVF

SEQ ID NO: 759440 - protein, 15 aa, Homo sapiens
  CDR3 for beta chain variable domain of TCR clone 379720 (TRBV20-1, TRBJ2-7)
CSARDRVSGMDEQYF

SEQ ID NO: 759441 - protein, 15 aa, Homo sapiens
  CDR3 for alpha chain variable domain of TCR clone 379721 (TRAV12-2, TRAJ43)
CAFDMRFGAGPRLIV

SEQ ID NO: 759442 - protein, 18 aa, Homo sapiens
  CDR3 for beta chain variable domain of TCR clone 379721 (TRBV20-1, TRBJ2-3)
CSASGLAGGPGTTDTQYF

SEQ ID NO: 759443 - protein, 13 aa, Homo sapiens
  CDR3 for alpha chain variable domain of TCR clone 379722 (TRAV16, TRAJ11)
CVLTQSGYSTLTF

SEQ ID NO: 759444 - protein, 17 aa, Homo sapiens
  CDR3 for beta chain variable domain of TCR clone 379722 (TRBV5-1, TRBJ1-5)
CASSLAFLTRGNQPQHF

SEQ ID NO: 759445 - protein, 14 aa, Homo sapiens
  CDR3 for alpha chain variable domain of TCR clone 379723 (TRAV26-1, TRAJ48)
CIVRVPFGNEKLNF

SEQ ID NO: 759446 - protein, 16 aa, Homo sapiens
  CDR3 for beta chain variable domain of TCR clone 379723 (TRBV18, TRBJ2-1)
CASSPYLSIGGDEQFF

SEQ ID NO: 759447 - protein, 14 aa, Homo sapiens
  CDR3 for alpha chain variable domain of TCR clone 379724 (TRAV1-2, TRAJ16)
CDVNRFSDGQKLLF

SEQ ID NO: 759448 - protein, 15 aa, Homo sapiens
  CDR3 for beta chain variable domain of TCR clone 379724 (TRBV20-1, TRBJ1-1)
CSASRGVTGNTEAFF

SEQ ID NO: 759449 - protein, 15 aa, Homo sapiens
  CDR3 for alpha chain variable domain of TCR clone 379725 (TRAV12-1, TRAJ36)
CVVNEHQTGANNLLF

SEQ ID NO: 759450 - protein, 12 aa, Homo sapiens
  CDR3 for beta chain variable domain of TCR clone 379725 (TRBV29-1, TRBJ2-3)
CSVTGGADTQYF

SEQ ID NO: 759451 - protein, 14 aa, Homo sapiens
  CDR3 for alpha chain variable domain of TCR clone 379726 (TRAV17, TRAJ15)
CATTTNQAGTALIF

SEQ ID NO: 759452 - protein, 16 aa, Homo sapiens
  CDR3 for beta chain variable domain of TCR clone 379726 (TRBV4-1, TRBJ2-7)
CASSRGDILNSYEEYF

SEQ ID NO: 759453 - protein, 13 aa, Homo sapiens
  CDR3 for alpha chain variable domain of TCR clone 379727 (TRAV1-2, TRAJ9)
CAALNTGGFKTIF

SEQ ID NO: 759454 - protein, 13 aa, Homo sapiens
  CDR3 for beta chain variable domain of TCR clone 379727 (TRBV28, TRBJ2-5)
CAGVSRGEETQYF

SEQ ID NO: 759455 - protein, 14 aa, Homo sapiens
  CDR3 for alpha chain variable domain of TCR clone 379728 (TRAV23/DV6, TRAJ22)
CAADPSGSARQLTF

SEQ ID NO: 759456 - protein, 14 aa, Homo sapiens
  CDR3 for beta chain variable domain of TCR clone 379728 (TRBV5-1, TRBJ2-7)
CASSLWGAQDELYF

SEQ ID NO: 759457 - protein, 13 aa, Homo sapiens
  CDR3 for alpha chain variable domain of TCR clone 379729 (TRAV27, TRAJ3)
ASLRGSSASKIIF

SEQ ID NO: 759458 - protein, 15 aa, Homo sapiens
  CDR3 for beta chain variable domain of TCR clone 379729 (TRBV28, TRBJ1-3)
CASSMGWVSGNTIYF

SEQ ID NO: 759459 - protein, 16 aa, Homo sapiens
  CDR3 for alpha chain variable domain of TCR clone 379730 (TRAV3, TRAJ10)
CAVRAMRAGGGNKLTF

SEQ ID NO: 759460 - protein, 17 aa, Homo sapiens
  CDR3 for beta chain variable domain of TCR clone 379730 (TRBV20-1, TRBJ2-2)
CSASGSGQGGLTGELFF

SEQ ID NO: 759461 - protein, 15 aa, Homo sapiens
  CDR3 for alpha chain variable domain of TCR clone 379731 (TRAV35, TRAJ41)
CAGQLFSNSGYSLNF

SEQ ID NO: 759462 - protein, 14 aa, Homo sapiens
  CDR3 for beta chain variable domain of TCR clone 379731 (TRBV7-2, TRBJ1-2)
CASSRGGTNYGYTF

SEQ ID NO: 759463 - protein, 13 aa, Homo sapiens
  CDR3 for alpha chain variable domain of TCR clone 379732 (TRAV12-2, TRAJ13)
CAVTAGGYQKVTF

SEQ ID NO: 759464 - protein, 15 aa, Homo sapiens
  CDR3 for beta chain variable domain of TCR clone 379732 (TRBV9, TRBJ1-6)
CASSVAGTGDSPLHF

SEQ ID NO: 759465 - protein, 13 aa, Homo sapiens
  CDR3 for alpha chain variable domain of TCR clone 379733 (TRAV3, TRAJ15)
CAVRDQAGTALIF

SEQ ID NO: 759466 - protein, 15 aa, Homo sapiens
  CDR3 for beta chain variable domain of TCR clone 379733 (TRBV7-8, TRBJ2-1)
CASSLADSLYNEQFF

SEQ ID NO: 759467 - protein, 13 aa, Homo sapiens
  CDR3 for alpha chain variable domain of TCR clone 379734 (TRAV26-1, TRAJ39)
CIVRGSRAGNMLT

SEQ ID NO: 759468 - protein, 15 aa, Homo sapiens
  CDR3 for beta chain variable domain of TCR clone 379734 (TRBV7-9, TRBJ1-5)
RASSQGHQPNQPQHF

SEQ ID NO: 759469 - protein, 16 aa, Homo sapiens
  CDR3 for alpha chain variable domain of TCR clone 379735 (TRAV8-4, TRAJ13)
CAVSAKGVTRKLPLEL

SEQ ID NO: 759470 - protein, 12 aa, Homo sapiens
  CDR3 for beta chain variable domain of TCR clone 379735 (TRBV11-2, TRBJ1-5)
CASSLESEPQHF

SEQ ID NO: 759471 - protein, 14 aa, Homo sapiens
  CDR3 for alpha chain variable domain of TCR clone 379736 (TRAV17, TRAJ31)
CATVLRNNTATLMF

SEQ ID NO: 759472 - protein, 14 aa, Homo sapiens
  CDR3 for beta chain variable domain of TCR clone 379736 (TRBV12-4, TRBJ2-5)
CASSLWQKQETQYF

SEQ ID NO: 759473 - protein, 12 aa, Homo sapiens
  CDR3 for alpha chain variable domain of TCR clone 379737 (TRAV13-1, TRAJ15)
CAASQAGTALIF

SEQ ID NO: 759474 - protein, 14 aa, Homo sapiens
  CDR3 for beta chain variable domain of TCR clone 379737 (TRBV19, TRBJ2-2)
CPSSTLHRSGELFF

SEQ ID NO: 759475 - protein, 15 aa, Homo sapiens
  CDR3 for alpha chain variable domain of TCR clone 379738 (TRAV3, TRAJ5)
CAVRELDTGRRALTF

SEQ ID NO: 759476 - protein, 15 aa, Homo sapiens
  CDR3 for beta chain variable domain of TCR clone 379738 (TRBV20-1, TRBJ2-1)
CSARSPGGPGNEQFF

SEQ ID NO: 759477 - protein, 14 aa, Homo sapiens
  CDR3 for alpha chain variable domain of TCR clone 379739 (TRAV13-1, TRAJ44)
CAAKATATASKLTF

SEQ ID NO: 759478 - protein, 15 aa, Homo sapiens
  CDR3 for beta chain variable domain of TCR clone 379739 (TRBV10-3, TRBJ2-1)
CAISDVQDRAYEQFF

SEQ ID NO: 759479 - protein, 13 aa, Homo sapiens
  CDR3 for alpha chain variable domain of TCR clone 379740 (TRAV27, TRAJ49)
CAPRPYTGNQFYF

SEQ ID NO: 759480 - protein, 16 aa, Homo sapiens
  CDR3 for beta chain variable domain of TCR clone 379740 (TRBV4-1, TRBJ1-2)
YASSQDAGQVLYGYTF

SEQ ID NO: 759481 - protein, 14 aa, Homo sapiens
  CDR3 for alpha chain variable domain of TCR clone 379741 (TRAV12-2, TRAJ13)
CAVRKTGGYQKITF

SEQ ID NO: 759482 - protein, 15 aa, Homo sapiens
  CDR3 for beta chain variable domain of TCR clone 379741 (TRBV27, TRBJ2-1)
CASSNGGGSSNEQFF

SEQ ID NO: 759483 - protein, 15 aa, Homo sapiens
  CDR3 for alpha chain variable domain of TCR clone 379742 (TRAV3, TRAJ3)
CAVRDRDSSASKIIF

SEQ ID NO: 759484 - protein, 19 aa, Homo sapiens
  CDR3 for beta chain variable domain of TCR clone 379742 (TRBV2, TRBJ2-2)
CASSQPGLAGGGNTGELFF

SEQ ID NO: 759485 - protein, 14 aa, Homo sapiens
  CDR3 for alpha chain variable domain of TCR clone 379743 (TRAV12-3, TRAJ57)
CAMSAWGGSEKLVF

SEQ ID NO: 759486 - protein, 14 aa, Homo sapiens
  CDR3 for beta chain variable domain of TCR clone 379743 (TRBV18, TRBJ2-5)
CASSLGVSQETQYF

SEQ ID NO: 759487 - protein, 16 aa, Homo sapiens
  CDR3 for alpha chain variable domain of TCR clone 379744 (TRAV8-3, TRAJ44)
CAVGASNTGTASRLPF

SEQ ID NO: 759488 - protein, 15 aa, Homo sapiens
  CDR3 for beta chain variable domain of TCR clone 379744 (TRBV27, TRBJ1-5)
CASTFNRGSNQPQHF

SEQ ID NO: 759489 - protein, 12 aa, Homo sapiens
  CDR3 for alpha chain variable domain of TCR clone 379745 (TRAV21, TRAJ11)
CAATSGSSTLTF

SEQ ID NO: 759490 - protein, 14 aa, Homo sapiens
  CDR3 for beta chain variable domain of TCR clone 379745 (TRBV20-1, TRBJ2-7)
CSAPELAGVGEQYF

SEQ ID NO: 759491 - protein, 14 aa, Homo sapiens
  CDR3 for alpha chain variable domain of TCR clone 379746 (TRAV8-4, TRAJ12)
CAGSPMDSSYKLIF

SEQ ID NO: 759492 - protein, 15 aa, Homo sapiens
  CDR3 for beta chain variable domain of TCR clone 379746 (TRBV5-5, TRBJ2-1)
CASSPEAETYNEQFF

SEQ ID NO: 759493 - protein, 15 aa, Homo sapiens
  CDR3 for alpha chain variable domain of TCR clone 379747 (TRAV8-4, TRAJ3)
CAVTGENLVQQCFQD

SEQ ID NO: 759494 - protein, 16 aa, Homo sapiens
  CDR3 for beta chain variable domain of TCR clone 379747 (TRBV4-2, TRBJ1-1)
CASSQAGFGMNPEAFF

SEQ ID NO: 759495 - protein, 11 aa, Homo sapiens
  CDR3 for alpha chain variable domain of TCR clone 379748 (TRAV1-1, TRAJ30)
CAQNRDDKIIF

SEQ ID NO: 759496 - protein, 14 aa, Homo sapiens
  CDR3 for beta chain variable domain of TCR clone 379748 (TRBV19, TRBJ2-1)
CASPTFVLSGEQFF

SEQ ID NO: 759497 - protein, 19 aa, Homo sapiens
  CDR3 for alpha chain variable domain of TCR clone 379749 (TRAV12-1, TRAJ45)
CVVTHDVGYSGGGADGLTF

SEQ ID NO: 759498 - protein, 15 aa, Homo sapiens
  CDR3 for beta chain variable domain of TCR clone 379749 (TRBV12-4, TRBJ2-1)
CASSLLATGNNEQFF

SEQ ID NO: 759499 - protein, 12 aa, Homo sapiens
  CDR3 for alpha chain variable domain of TCR clone 379750 (TRAV26-1, TRAJ13)
CIVSRGYQKVTF

SEQ ID NO: 759500 - protein, 15 aa, Homo sapiens
  CDR3 for beta chain variable domain of TCR clone 379750 (TRBV7-3, TRBJ2-2)
CASSETGQGTGELFF

SEQ ID NO: 759501 - protein, 14 aa, Homo sapiens
  CDR3 for alpha chain variable domain of TCR clone 379751 (TRAV1-1, TRAJ27)
CAVIYNTNAGKSTF

SEQ ID NO: 759502 - protein, 15 aa, Homo sapiens
  CDR3 for beta chain variable domain of TCR clone 379751 (TRBV6-3, TRBJ2-7)
CVSSSPGTVFYEQYF

SEQ ID NO: 759503 - protein, 11 aa, Homo sapiens
  CDR3 for alpha chain variable domain of TCR clone 379752 (TRAV2, TRAJ40)
CAVEGTYKYIF

SEQ ID NO: 759504 - protein, 12 aa, Homo sapiens
  CDR3 for beta chain variable domain of TCR clone 379752 (TRBV7-8, TRBJ2-7)
CASSLGDREQYF

SEQ ID NO: 759505 - protein, 15 aa, Homo sapiens
  CDR3 for alpha chain variable domain of TCR clone 379753 (TRAV21, TRAJ32)
CAVNSYGGATNKLIF

SEQ ID NO: 759506 - protein, 14 aa, Homo sapiens
  CDR3 for beta chain variable domain of TCR clone 379753 (TRBV7-8, TRBJ2-3)
CASSLEAGTDTQYF

SEQ ID NO: 759507 - protein, 16 aa, Homo sapiens
  CDR3 for alpha chain variable domain of TCR clone 379754 (TRAV16, TRAJ4)
CALSRMFSGGYNKPIF

SEQ ID NO: 759508 - protein, 16 aa, Homo sapiens
  CDR3 for beta chain variable domain of TCR clone 379754 (TRBV12-4, TRBJ1-5)
CASSRPVGGSNQPQHF

SEQ ID NO: 759509 - protein, 16 aa, Homo sapiens
  CDR3 for alpha chain variable domain of TCR clone 379755 (TRAV30, TRAJ24)
CGTVIVDADSWGKFQF

SEQ ID NO: 759510 - protein, 15 aa, Homo sapiens
  CDR3 for beta chain variable domain of TCR clone 379755 (TRBV4-1, TRBJ1-4)
CASSDTGGTNEKLFF

SEQ ID NO: 759511 - protein, 15 aa, Homo sapiens
  CDR3 for alpha chain variable domain of TCR clone 379756 (TRAV13-1, TRAJ16)
CAARYQMARSCSLQG

SEQ ID NO: 759512 - protein, 13 aa, Homo sapiens
  CDR3 for beta chain variable domain of TCR clone 379756 (TRBV4-1, TRBJ2-1)
CASSQAGGDEQFL

SEQ ID NO: 759513 - protein, 13 aa, Homo sapiens
  CDR3 for alpha chain variable domain of TCR clone 379757 (TRAV8-4, TRAJ9)
CAVSGAGGFKTFF

SEQ ID NO: 759514 - protein, 16 aa, Homo sapiens
  CDR3 for beta chain variable domain of TCR clone 379757 (TRBV5-1, TRBJ2-7)
CASSVTSGSSTYEQYF

SEQ ID NO: 759515 - protein, 16 aa, Homo sapiens
  CDR3 for alpha chain variable domain of TCR clone 379758 (TRAV12-2, )
CAVEDIQNPDPAVSQL

SEQ ID NO: 759516 - protein, 20 aa, Homo sapiens
  CDR3 for beta chain variable domain of TCR clone 379758 (TRBV11-3, TRBJ2-7)
CASSQRTSGSLRAVLRAGHQ

SEQ ID NO: 759517 - protein, 22 aa, Homo sapiens
  CDR3 for alpha chain variable domain of TCR clone 379759 (TRAV8-6, TRAJ6)
CAVTLGEEATYLHLEKGPALLF

SEQ ID NO: 759518 - protein, 15 aa, Homo sapiens
  CDR3 for beta chain variable domain of TCR clone 379759 (TRBV7-2, TRBJ1-1)
CASSTQGGANTEAFF

SEQ ID NO: 759519 - protein, 15 aa, Homo sapiens
  CDR3 for alpha chain variable domain of TCR clone 379760 (TRAV4, TRAJ26)
CLVGAWDNYGQNFVF

SEQ ID NO: 759520 - protein, 15 aa, Homo sapiens
  CDR3 for beta chain variable domain of TCR clone 379760 (TRBV6-1, TRBJ2-1)
CASRNIKDNGNEQFF

SEQ ID NO: 759521 - protein, 15 aa, Homo sapiens
  CDR3 for alpha chain variable domain of TCR clone 379761 (TRAV25, TRAJ52)
CAGTSGGTSYRKLTF

SEQ ID NO: 759522 - protein, 16 aa, Homo sapiens
  CDR3 for beta chain variable domain of TCR clone 379761 (TRBV15, TRBJ1-2)
CATSRGPRTGGGGDTF

SEQ ID NO: 759523 - protein, 14 aa, Homo sapiens
  CDR3 for alpha chain variable domain of TCR clone 379762 (TRAV12-1, TRAJ12)
CVVTRMDSSYKLIF

SEQ ID NO: 759524 - protein, 13 aa, Homo sapiens
  CDR3 for beta chain variable domain of TCR clone 379762 (TRBV20-1, TRBJ1-1)
CSARGLGNTEAFF

SEQ ID NO: 759525 - protein, 12 aa, Homo sapiens
  CDR3 for alpha chain variable domain of TCR clone 379763 (TRAV17, TRAJ4)
CATDGGYNKLIF

SEQ ID NO: 759526 - protein, 14 aa, Homo sapiens
  CDR3 for beta chain variable domain of TCR clone 379763 (TRBV19, TRBJ2-1)
CASPTFVLSGEQFF

SEQ ID NO: 759527 - protein, 14 aa, Homo sapiens
  CDR3 for alpha chain variable domain of TCR clone 379764 (TRAV16, TRAJ32)
CSLKSGGATNKLIF

SEQ ID NO: 759528 - protein, 13 aa, Homo sapiens
  CDR3 for beta chain variable domain of TCR clone 379764 (TRBV15, TRBJ1-6)
CATSGGLNSPLHF

SEQ ID NO: 759529 - protein, 15 aa, Homo sapiens
  CDR3 for alpha chain variable domain of TCR clone 379765 (TRAV8-3, TRAJ45)
CASSYSGGGADGLTF

SEQ ID NO: 759530 - protein, 16 aa, Homo sapiens
  CDR3 for beta chain variable domain of TCR clone 379765 (TRBV20-1, TRBJ2-2)
CSASASGILGAGELFF

SEQ ID NO: 759531 - protein, 14 aa, Homo sapiens
  CDR3 for alpha chain variable domain of TCR clone 379766 (TRAV12-1, TRAJ17)
CVLNYKAAGNKLTF

SEQ ID NO: 759532 - protein, 16 aa, Homo sapiens
  CDR3 for beta chain variable domain of TCR clone 379766 (TRBV20-1, TRBJ2-7)
CSASTSGRLSSYEQYF

SEQ ID NO: 759533 - protein, 14 aa, Homo sapiens
  CDR3 for alpha chain variable domain of TCR clone 379767 (TRAV23/DV6, TRAJ24)
CAASLSDSWGKLQF

SEQ ID NO: 759534 - protein, 16 aa, Homo sapiens
  CDR3 for beta chain variable domain of TCR clone 379767 (TRBV7-9, TRBJ2-6)
GASSLKGPLGANVLTF

SEQ ID NO: 759535 - protein, 14 aa, Homo sapiens
  CDR3 for alpha chain variable domain of TCR clone 379768 (TRAV20, TRAJ29)
CAVQAWVGNTPLVF

SEQ ID NO: 759536 - protein, 15 aa, Homo sapiens
  CDR3 for beta chain variable domain of TCR clone 379768 (TRBV5-1, TRBJ2-1)
CASSPPRAPYNEQFF

SEQ ID NO: 759537 - protein, 11 aa, Homo sapiens
  CDR3 for alpha chain variable domain of TCR clone 379769 (TRAV3, TRAJ21)
CAVGNFNKFYF

SEQ ID NO: 759538 - protein, 15 aa, Homo sapiens
  CDR3 for beta chain variable domain of TCR clone 379769 (TRBV10-3, TRBJ2-1)
CAIRNGTSGHNEQFF

SEQ ID NO: 759539 - protein, 11 aa, Homo sapiens
  CDR3 for alpha chain variable domain of TCR clone 379770 (TRAV36/DV7, TRAJ52)
CASTSYGKLTF

SEQ ID NO: 759540 - protein, 14 aa, Homo sapiens
  CDR3 for beta chain variable domain of TCR clone 379770 (TRBV28, TRBJ2-5)
CASSLTGGWETQYF

SEQ ID NO: 759541 - protein, 15 aa, Homo sapiens
  CDR3 for alpha chain variable domain of TCR clone 379771 (TRAV13-1, TRAJ17)
CAASIERAAGNKLIF

SEQ ID NO: 759542 - protein, 12 aa, Homo sapiens
  CDR3 for beta chain variable domain of TCR clone 379771 (TRBV5-7, TRBJ1-1)
CASSLGRGKAFF

SEQ ID NO: 759543 - protein, 16 aa, Homo sapiens
  CDR3 for alpha chain variable domain of TCR clone 379772 (TRAV2, TRAJ4)
CAVEDRFPGGYNKLIF

SEQ ID NO: 759544 - protein, 13 aa, Homo sapiens
  CDR3 for beta chain variable domain of TCR clone 379772 (TRBV7-7, TRBJ2-5)
CASSRSGQETQYF

SEQ ID NO: 759545 - protein, 13 aa, Homo sapiens
  CDR3 for alpha chain variable domain of TCR clone 379773 (TRAV12-3, TRAJ54)
CALVPQGAQKLVF

SEQ ID NO: 759546 - protein, 15 aa, Homo sapiens
  CDR3 for beta chain variable domain of TCR clone 379773 (TRBV4-1, TRBJ2-2)
CASSQDSRVTGELFF

SEQ ID NO: 759547 - protein, 15 aa, Homo sapiens
  CDR3 for alpha chain variable domain of TCR clone 379774 (TRAV1-2, TRAJ10)
CAVRGFTGGGNKLTF

SEQ ID NO: 759548 - protein, 18 aa, Homo sapiens
  CDR3 for beta chain variable domain of TCR clone 379774 (TRBV12-4, TRBJ2-4)
CASSRTGAVDVAKNIQYF

SEQ ID NO: 759549 - protein, 15 aa, Homo sapiens
  CDR3 for alpha chain variable domain of TCR clone 379775 (TRAV2, TRAJ15)
SAVEDRGQAGTALIF

SEQ ID NO: 759550 - protein, 13 aa, Homo sapiens
  CDR3 for beta chain variable domain of TCR clone 379775 (TRBV10-2, TRBJ2-7)
CASGASGGYEQYF

SEQ ID NO: 759551 - protein, 13 aa, Homo sapiens
  CDR3 for alpha chain variable domain of TCR clone 379776 (TRAV21, TRAJ57)
CAVTQGGSEKPVF

SEQ ID NO: 759552 - protein, 16 aa, Homo sapiens
  CDR3 for beta chain variable domain of TCR clone 379776 (TRBV7-3, TRBJ2-1)
CASSLEGYRSYNEQFF

SEQ ID NO: 759553 - protein, 17 aa, Homo sapiens
  CDR3 for alpha chain variable domain of TCR clone 379777 (TRAV27, TRAJ17)
CAGGGMIIKAAGNKLTF

SEQ ID NO: 759554 - protein, 16 aa, Homo sapiens
  CDR3 for beta chain variable domain of TCR clone 379777 (TRBV12-5, TRBJ2-5)
CASGPRTSGNQETQYF

SEQ ID NO: 759555 - protein, 15 aa, Homo sapiens
  CDR3 for alpha chain variable domain of TCR clone 379778 (TRAV34, TRAJ38)
CGADFTPGNNRKLIW

SEQ ID NO: 759556 - protein, 14 aa, Homo sapiens
  CDR3 for beta chain variable domain of TCR clone 379778 (TRBV7-3, TRBJ2-2)
CASSSGGYTGELFF

SEQ ID NO: 759557 - protein, 15 aa, Homo sapiens
  CDR3 for alpha chain variable domain of TCR clone 379779 (TRAV8-3, TRAJ41)
CAVGSNSNSGYALNF

SEQ ID NO: 759558 - protein, 17 aa, Homo sapiens
  CDR3 for beta chain variable domain of TCR clone 379779 (TRBV25-1, TRBJ2-1)
CASSAYGQGRGVYKQFF

SEQ ID NO: 759559 - protein, 17 aa, Homo sapiens
  CDR3 for alpha chain variable domain of TCR clone 379780 (TRAV8-2, )
CVVNIQSPDPAVYQLRD

SEQ ID NO: 759560 - protein, 15 aa, Homo sapiens
  CDR3 for beta chain variable domain of TCR clone 379780 (TRBV6-3, TRBJ2-7)
CASSSPGTVFYEQYF

SEQ ID NO: 759561 - protein, 16 aa, Homo sapiens
  CDR3 for alpha chain variable domain of TCR clone 379781 (TRAV3, TRAJ10)
CAVRDMRAGGGHKITF

SEQ ID NO: 759562 - protein, 13 aa, Homo sapiens
  CDR3 for beta chain variable domain of TCR clone 379781 (TRBV6-1, TRBJ1-1)
CASSRQGNTEAFF

SEQ ID NO: 759563 - protein, 16 aa, Homo sapiens
  CDR3 for alpha chain variable domain of TCR clone 379782 (TRAV3, TRAJ10)
CAVRDMRAGGENKLTF

SEQ ID NO: 759564 - protein, 16 aa, Homo sapiens
  CDR3 for beta chain variable domain of TCR clone 379782 (TRBV12-5, TRBJ2-5)
CASGPRTSGNQETQYF

SEQ ID NO: 759565 - protein, 10 aa, Homo sapiens
  CDR3 for alpha chain variable domain of TCR clone 379783 (TRAV8-3, TRAJ43)
CAVALADMRF

SEQ ID NO: 759566 - protein, 17 aa, Homo sapiens
  CDR3 for beta chain variable domain of TCR clone 379783 (TRBV10-1, TRBJ2-1)
CASSPRRAGGPFNEQFF

SEQ ID NO: 759567 - protein, 13 aa, Homo sapiens
  CDR3 for alpha chain variable domain of TCR clone 379784 (TRAV27, TRAJ29)
CAGAHSGNTPLVF

SEQ ID NO: 759568 - protein, 19 aa, Homo sapiens
  CDR3 for beta chain variable domain of TCR clone 379784 (TRBV4-3, TRBJ2-7)
CASSQEFIGWQVTPYEQYF

SEQ ID NO: 759569 - protein, 14 aa, Homo sapiens
  CDR3 for alpha chain variable domain of TCR clone 379785 (TRAV12-2, TRAJ53)
CAVKGGGSNYKLTF

SEQ ID NO: 759570 - protein, 14 aa, Homo sapiens
  CDR3 for beta chain variable domain of TCR clone 379785 (TRBV7-7, TRBJ2-2)
CATRQESDTGELFF

SEQ ID NO: 759571 - protein, 15 aa, Homo sapiens
  CDR3 for alpha chain variable domain of TCR clone 379786 (TRAV26-1, TRAJ29)
CIVRVEGSGNTPLVF

SEQ ID NO: 759572 - protein, 15 aa, Homo sapiens
  CDR3 for beta chain variable domain of TCR clone 379786 (TRBV7-9, TRBJ1-5)
CASSHGHQPNQHQHF

SEQ ID NO: 759573 - protein, 13 aa, Homo sapiens
  CDR3 for alpha chain variable domain of TCR clone 379787 (TRAV27, TRAJ49)
CAPRPYTGNQLYF

SEQ ID NO: 759574 - protein, 17 aa, Homo sapiens
  CDR3 for beta chain variable domain of TCR clone 379787 (TRBV20-1, TRBJ2-2)
CSASGSGQGGLTGELFF

SEQ ID NO: 759575 - protein, 13 aa, Homo sapiens
  CDR3 for alpha chain variable domain of TCR clone 379788 (TRAV13-2, TRAJ22)
CLGLISSARQLTF

SEQ ID NO: 759576 - protein, 15 aa, Homo sapiens
  CDR3 for beta chain variable domain of TCR clone 379788 (TRBV7-2, TRBJ2-3)
CASSSTGLETDTQYF

SEQ ID NO: 759577 - protein, 19 aa, Homo sapiens
  CDR3 for alpha chain variable domain of TCR clone 379789 (TRAV3, TRAJ6)
CAVRDRNPSRSGASYIPTF

SEQ ID NO: 759578 - protein, 15 aa, Homo sapiens
  CDR3 for beta chain variable domain of TCR clone 379789 (TRBV18, TRBJ2-7)
CASSPTFMDSYEQYF

SEQ ID NO: 759579 - protein, 14 aa, Homo sapiens
  CDR3 for alpha chain variable domain of TCR clone 379790 (TRAV12-1, TRAJ36)
CVVNYWGKQPLLWD

SEQ ID NO: 759580 - protein, 14 aa, Homo sapiens
  CDR3 for beta chain variable domain of TCR clone 379790 (TRBV5-1, TRBJ1-4)
CASSPLSLNEKLFF

SEQ ID NO: 759581 - protein, 16 aa, Homo sapiens
  CDR3 for alpha chain variable domain of TCR clone 379791 (TRAV30, TRAJ24)
CGTGIVDADSWGKFQL

SEQ ID NO: 759582 - protein, 14 aa, Homo sapiens
  CDR3 for beta chain variable domain of TCR clone 379791 (TRBV12-5, TRBJ2-5)
CASGSRTHQETQYF

SEQ ID NO: 759583 - protein, 10 aa, Homo sapiens
  CDR3 for alpha chain variable domain of TCR clone 379792 (TRAV26-1, TRAJ40)
CIAGTYKYIF

SEQ ID NO: 759584 - protein, 13 aa, Homo sapiens
  CDR3 for beta chain variable domain of TCR clone 379792 (TRBV11-2, TRBJ2-5)
CASSRGPSETQYF

SEQ ID NO: 759585 - protein, 16 aa, Homo sapiens
  CDR3 for alpha chain variable domain of TCR clone 379793 (TRAV3, TRAJ37)
CAVRPHGSGNAGKLIF

SEQ ID NO: 759586 - protein, 16 aa, Homo sapiens
  CDR3 for beta chain variable domain of TCR clone 379793 (TRBV20-1, TRBJ1-4)
CSAPGQGLLTNEKLFF

SEQ ID NO: 759587 - protein, 10 aa, Homo sapiens
  CDR3 for alpha chain variable domain of TCR clone 379794 (TRAV21, TRAJ43)
CAVRIGDMRF

SEQ ID NO: 759588 - protein, 13 aa, Homo sapiens
  CDR3 for beta chain variable domain of TCR clone 379794 (TRBV20-1, TRBJ2-7)
CSAPGLADYDQYF

SEQ ID NO: 759589 - protein, 15 aa, Homo sapiens
  CDR3 for alpha chain variable domain of TCR clone 379795 (TRAV13-1, TRAJ17)
CAASIERAAGNKLTF

SEQ ID NO: 759590 - protein, 12 aa, Homo sapiens
  CDR3 for beta chain variable domain of TCR clone 379795 (TRBV5-7, TRBJ1-1)
CASSLGRGKACF

SEQ ID NO: 759591 - protein, 13 aa, Homo sapiens
  CDR3 for alpha chain variable domain of TCR clone 379796 (TRAV27, TRAJ48)
CAETNFGNEKLTF

SEQ ID NO: 759592 - protein, 13 aa, Homo sapiens
  CDR3 for beta chain variable domain of TCR clone 379796 (TRBV7-2, TRBJ1-2)
CASSLDGIYGYTF

SEQ ID NO: 759593 - protein, 18 aa, Homo sapiens
  CDR3 for alpha chain variable domain of TCR clone 379797 (TRAV26-2, TRAJ45)
CILRVDKYSGGGADVLTF

SEQ ID NO: 759594 - protein, 18 aa, Homo sapiens
  CDR3 for beta chain variable domain of TCR clone 379797 (TRBV20-1, TRBJ2-3)
CSASGLAGGPGTTDTQYF

SEQ ID NO: 759595 - protein, 15 aa, Homo sapiens
  CDR3 for alpha chain variable domain of TCR clone 379798 (TRAV17, TRAJ57)
CATGPSQGGSEKLVL

SEQ ID NO: 759596 - protein, 13 aa, Homo sapiens
  CDR3 for beta chain variable domain of TCR clone 379798 (TRBV11-2, TRBJ2-5)
CASSSTGEETQYF

SEQ ID NO: 759597 - protein, 14 aa, Homo sapiens
  CDR3 for alpha chain variable domain of TCR clone 379799 (TRAV12-2, TRAJ40)
CAVKIPSGTYKYIF

SEQ ID NO: 759598 - protein, 14 aa, Homo sapiens
  CDR3 for beta chain variable domain of TCR clone 379799 (TRBV19, TRBJ2-7)
CASSLRDRGYEQYF

SEQ ID NO: 759599 - protein, 14 aa, Homo sapiens
  CDR3 for alpha chain variable domain of TCR clone 379800 (TRAV13-1, TRAJ44)
CAAKATGTASKLTF

SEQ ID NO: 759600 - protein, 15 aa, Homo sapiens
  CDR3 for beta chain variable domain of TCR clone 379800 (TRBV9, TRBJ2-1)
CASSLAGRSYNEQFF

SEQ ID NO: 759601 - protein, 15 aa, Homo sapiens
  CDR3 for alpha chain variable domain of TCR clone 379801 (TRAV3, TRAJ9)
CAERDSNTGGFKTIF

SEQ ID NO: 759602 - protein, 16 aa, Homo sapiens
  CDR3 for beta chain variable domain of TCR clone 379801 (TRBV15, TRBJ2-5)
CATSPTTGQGMETQYF

SEQ ID NO: 759603 - protein, 14 aa, Homo sapiens
  CDR3 for alpha chain variable domain of TCR clone 379802 (TRAV1-2, TRAJ8)
CAVREDTGFQKLVF

SEQ ID NO: 759604 - protein, 16 aa, Homo sapiens
  CDR3 for beta chain variable domain of TCR clone 379802 (TRBV7-2, TRBJ2-1)
CASSLVGGPELNEQFF

SEQ ID NO: 759605 - protein, 13 aa, Homo sapiens
  CDR3 for alpha chain variable domain of TCR clone 379803 (TRAV2, TRAJ40)
CAVVTSGTYKYIF

SEQ ID NO: 759606 - protein, 17 aa, Homo sapiens
  CDR3 for beta chain variable domain of TCR clone 379803 (TRBV11-2, TRBJ2-1)
CASSLYPPGVEYNEQSF

SEQ ID NO: 759607 - protein, 16 aa, Homo sapiens
  CDR3 for alpha chain variable domain of TCR clone 379804 (TRAV3, TRAJ37)
CAVRGKGSCNTGKLIF

SEQ ID NO: 759608 - protein, 14 aa, Homo sapiens
  CDR3 for beta chain variable domain of TCR clone 379804 (TRBV11-1, TRBJ2-7)
CASSFRQGSYEQYF

SEQ ID NO: 759609 - protein, 14 aa, Homo sapiens
  CDR3 for alpha chain variable domain of TCR clone 379805 (TRAV1-2, TRAJ16)
CAVSRFSDGQKLLF

SEQ ID NO: 759610 - protein, 14 aa, Homo sapiens
  CDR3 for beta chain variable domain of TCR clone 379805 (TRBV7-9, TRBJ2-3)
CASSLEDGTDTQYF

SEQ ID NO: 759611 - protein, 13 aa, Homo sapiens
  CDR3 for alpha chain variable domain of TCR clone 379806 (TRAV3, TRAJ27)
CAVRPLGAGKSPF

SEQ ID NO: 759612 - protein, 16 aa, Homo sapiens
  CDR3 for beta chain variable domain of TCR clone 379806 (TRBV12-5, TRBJ2-5)
CASGPRTSGNQETQYF

SEQ ID NO: 759613 - protein, 11 aa, Homo sapiens
  CDR3 for alpha chain variable domain of TCR clone 379807 (TRAV21, TRAJ31)
CAVRNNARLMF

SEQ ID NO: 759614 - protein, 15 aa, Homo sapiens
  CDR3 for beta chain variable domain of TCR clone 379807 (TRBV28, TRBJ2-4)
CAAGSGTLLMGIQYF

SEQ ID NO: 759615 - protein, 14 aa, Homo sapiens
  CDR3 for alpha chain variable domain of TCR clone 379808 (TRAV12-3, TRAJ10)
SHLPLTGGGNKFTF

SEQ ID NO: 759616 - protein, 14 aa, Homo sapiens
  CDR3 for beta chain variable domain of TCR clone 379808 (TRBV2, TRBJ2-7)
CASSLTSGGYEQYF

SEQ ID NO: 759617 - protein, 18 aa, Homo sapiens
  CDR3 for alpha chain variable domain of TCR clone 379809 (TRAV8-4, TRAJ52)
CAVTRANACGTSYGKLTF

SEQ ID NO: 759618 - protein, 20 aa, Homo sapiens
  CDR3 for beta chain variable domain of TCR clone 379809 (TRBV19, TRBJ2-1)
CASSISRTVTSTRLNNEQFF

SEQ ID NO: 759619 - protein, 23 aa, Homo sapiens
  CDR3 for alpha chain variable domain of TCR clone 379810 (TRAV12-2, TRAJ4)
PVVQPPTSVPLGWPEGGYNKLIF

SEQ ID NO: 759620 - protein, 16 aa, Homo sapiens
  CDR3 for beta chain variable domain of TCR clone 379810 (TRBV6-1, TRBJ2-5)
CASSETLDRGAETQYF

SEQ ID NO: 759621 - protein, 15 aa, Homo sapiens
  CDR3 for alpha chain variable domain of TCR clone 379811 (TRAV3, TRAJ7)
CAVRDKDNGNNRLAF

SEQ ID NO: 759622 - protein, 20 aa, Homo sapiens
  CDR3 for beta chain variable domain of TCR clone 379811 (TRBV4-2, TRBJ2-7)
CASSQASGGNLRAVLRAGHQ

SEQ ID NO: 759623 - protein, 18 aa, Homo sapiens
  CDR3 for alpha chain variable domain of TCR clone 379812 (TRAV12-3, TRAJ52)
CAMSRTNAGGTSYGKLTF

SEQ ID NO: 759624 - protein, 12 aa, Homo sapiens
  CDR3 for beta chain variable domain of TCR clone 379812 (TRBV7-9, TRBJ2-1)
CASSLSPNEQFF

SEQ ID NO: 759625 - protein, 18 aa, Homo sapiens
  CDR3 for alpha chain variable domain of TCR clone 379813 (TRAV29/DV5, TRAJ52)
RAAGFRGAGGTSHGKLTF

SEQ ID NO: 759626 - protein, 16 aa, Homo sapiens
  CDR3 for beta chain variable domain of TCR clone 379813 (TRBV7-3, TRBJ2-2)
CASSLKRGTLSGELFF

SEQ ID NO: 759627 - protein, 14 aa, Homo sapiens
  CDR3 for alpha chain variable domain of TCR clone 379814 (TRAV3, TRAJ44)
CAVNNTGTASKLPF

SEQ ID NO: 759628 - protein, 14 aa, Homo sapiens
  CDR3 for beta chain variable domain of TCR clone 379814 (TRBV11-2, TRBJ2-3)
CASSLGGGTDTQYF

SEQ ID NO: 759629 - protein, 19 aa, Homo sapiens
  CDR3 for alpha chain variable domain of TCR clone 379815 (TRAV21, TRAJ20)
SLVTPPPTSVLPNDYKLSF

SEQ ID NO: 759630 - protein, 14 aa, Homo sapiens
  CDR3 for beta chain variable domain of TCR clone 379815 (TRBV7-2, TRBJ1-3)
CASSRLRSGNTIYF

SEQ ID NO: 759631 - protein, 15 aa, Homo sapiens
  CDR3 for alpha chain variable domain of TCR clone 379816 (TRAV12-2, TRAJ9)
CAVNGGYTGGFKTIF

SEQ ID NO: 759632 - protein, 16 aa, Homo sapiens
  CDR3 for beta chain variable domain of TCR clone 379816 (TRBV7-2, TRBJ2-3)
CASSLARASGISTQYF

SEQ ID NO: 759633 - protein, 13 aa, Homo sapiens
  CDR3 for alpha chain variable domain of TCR clone 379817 (TRAV17, TRAJ9)
CATDYTGGFKTIF

SEQ ID NO: 759634 - protein, 16 aa, Homo sapiens
  CDR3 for beta chain variable domain of TCR clone 379817 (TRBV7-7, TRBJ2-1)
CASSLASGTSYYEQFF

SEQ ID NO: 759635 - protein, 15 aa, Homo sapiens
  CDR3 for alpha chain variable domain of TCR clone 379818 (TRAV26-1, TRAJ29)
CIVRVEGSGNTPLVF

SEQ ID NO: 759636 - protein, 11 aa, Homo sapiens
  CDR3 for beta chain variable domain of TCR clone 379818 (TRBV7-9, TRBJ2-3)
CASSYTDTQYF

SEQ ID NO: 759637 - protein, 14 aa, Homo sapiens
  CDR3 for alpha chain variable domain of TCR clone 379819 (TRAV38-1, TRAJ27)
FAFIHNTNAGKSTF

SEQ ID NO: 759638 - protein, 12 aa, Homo sapiens
  CDR3 for beta chain variable domain of TCR clone 379819 (TRBV7-8, TRBJ2-7)
CASSLGDREQYF

SEQ ID NO: 759639 - protein, 13 aa, Homo sapiens
  CDR3 for alpha chain variable domain of TCR clone 379820 (TRAV8-6, TRAJ49)
CAVITNTGNQFYF

SEQ ID NO: 759640 - protein, 14 aa, Homo sapiens
  CDR3 for beta chain variable domain of TCR clone 379820 (TRBV5-1, TRBJ2-7)
CASSSGESLYEQYF

SEQ ID NO: 759641 - protein, 13 aa, Homo sapiens
  CDR3 for alpha chain variable domain of TCR clone 379821 (TRAV8-2, TRAJ13)
CVVSDLRYQKVPF

SEQ ID NO: 759642 - protein, 14 aa, Homo sapiens
  CDR3 for beta chain variable domain of TCR clone 379821 (TRBV25-1, TRBJ1-1)
CASTHLGGNTEAFF

SEQ ID NO: 759643 - protein, 13 aa, Homo sapiens
  CDR3 for alpha chain variable domain of TCR clone 379822 (TRAV21, TRAJ27)
CAARPGNAGKSTF

SEQ ID NO: 759644 - protein, 14 aa, Homo sapiens
  CDR3 for beta chain variable domain of TCR clone 379822 (TRBV5-1, TRBJ2-1)
CASSLDDRFDEQFF

SEQ ID NO: 759645 - protein, 16 aa, Homo sapiens
  CDR3 for alpha chain variable domain of TCR clone 379823 (TRAV17, TRAJ28)
CATASFSGAGRYQLTF

SEQ ID NO: 759646 - protein, 11 aa, Homo sapiens
  CDR3 for beta chain variable domain of TCR clone 379823 (TRBV7-9, TRBJ2-5)
CASSLGETQYF

SEQ ID NO: 759647 - protein, 15 aa, Homo sapiens
  CDR3 for alpha chain variable domain of TCR clone 379824 (TRAV3, TRAJ15)
FAVRPANQAGTALIF

SEQ ID NO: 759648 - protein, 14 aa, Homo sapiens
  CDR3 for beta chain variable domain of TCR clone 379824 (TRBV4-1, TRBJ2-2)
CASSQAVNTGELFF

SEQ ID NO: 759649 - protein, 18 aa, Homo sapiens
  CDR3 for alpha chain variable domain of TCR clone 379825 (TRAV8-3, TRAJ4)
WVRDPTSNDPGGYNKLIF

SEQ ID NO: 759650 - protein, 15 aa, Homo sapiens
  CDR3 for beta chain variable domain of TCR clone 379825 (TRBV7-2, TRBJ2-1)
CASSSGLAGGNEQFF

SEQ ID NO: 759651 - protein, 16 aa, Homo sapiens
  CDR3 for alpha chain variable domain of TCR clone 379826 (TRAV3, TRAJ8)
CAVRDYPNTGFQKLVF

SEQ ID NO: 759652 - protein, 14 aa, Homo sapiens
  CDR3 for beta chain variable domain of TCR clone 379826 (TRBV7-2, TRBJ2-7)
CASSLYPGRYEQYF

SEQ ID NO: 759653 - protein, 15 aa, Homo sapiens
  CDR3 for alpha chain variable domain of TCR clone 379827 (TRAV12-1, TRAJ52)
CVGNAGGTSYGKLTF

SEQ ID NO: 759654 - protein, 13 aa, Homo sapiens
  CDR3 for beta chain variable domain of TCR clone 379827 (TRBV7-3, TRBJ1-2)
CASSLKQNYGYTF

SEQ ID NO: 759655 - protein, 12 aa, Homo sapiens
  CDR3 for alpha chain variable domain of TCR clone 379828 (TRAV16, TRAJ10)
CSRTGGGNKLNF

SEQ ID NO: 759656 - protein, 13 aa, Homo sapiens
  CDR3 for beta chain variable domain of TCR clone 379828 (TRBV19, TRBJ1-2)
CASSVPGQDGYTF

SEQ ID NO: 759657 - protein, 14 aa, Homo sapiens
  CDR3 for alpha chain variable domain of TCR clone 379829 (TRAV35, TRAJ54)
CAGYLIRGAQKLVF

SEQ ID NO: 759658 - protein, 14 aa, Homo sapiens
  CDR3 for beta chain variable domain of TCR clone 379829 (TRBV7-2, TRBJ2-5)
CASSVGWAEETQYF

SEQ ID NO: 759659 - protein, 23 aa, Homo sapiens
  CDR3 for alpha chain variable domain of TCR clone 379830 (TRAV26-1, TRAJ38)
CVADNAGNNHIQNPDPAVYQLRD

SEQ ID NO: 759660 - protein, 15 aa, Homo sapiens
  CDR3 for beta chain variable domain of TCR clone 379830 (TRBV27, TRBJ2-1)
CASSNGGGSSNEQFF

SEQ ID NO: 759661 - protein, 14 aa, Homo sapiens
  CDR3 for alpha chain variable domain of TCR clone 379831 (TRAV17, TRAJ57)
CATDPQGGSEKLVF

SEQ ID NO: 759662 - protein, 16 aa, Homo sapiens
  CDR3 for beta chain variable domain of TCR clone 379831 (TRBV7-2, TRBJ2-5)
CQQPRQGRKSRETQYF

SEQ ID NO: 759663 - protein, 14 aa, Homo sapiens
  CDR3 for alpha chain variable domain of TCR clone 379832 (TRAV13-2, TRAJ22)
CADGTLGSARQLTF

SEQ ID NO: 759664 - protein, 16 aa, Homo sapiens
  CDR3 for beta chain variable domain of TCR clone 379832 (TRBV19, TRBJ2-1)
CASSSKGTMSYNEQFF

SEQ ID NO: 759665 - protein, 12 aa, Homo sapiens
  CDR3 for alpha chain variable domain of TCR clone 379833 (TRAV4, TRAJ21)
CLVGDNFNKFYF

SEQ ID NO: 759666 - protein, 17 aa, Homo sapiens
  CDR3 for beta chain variable domain of TCR clone 379833 (TRBV3-1, TRBJ2-7)
CASSEDLTGLSSYEQYF

SEQ ID NO: 759667 - protein, 10 aa, Homo sapiens
  CDR3 for alpha chain variable domain of TCR clone 379834 (TRAV13-1, TRAJ30)
CVARDDNIIF

SEQ ID NO: 759668 - protein, 15 aa, Homo sapiens
  CDR3 for beta chain variable domain of TCR clone 379834 (TRBV7-9, TRBJ1-2)
CASSLDREPNYGYTF

SEQ ID NO: 759669 - protein, 18 aa, Homo sapiens
  CDR3 for alpha chain variable domain of TCR clone 379835 (TRAV13-1, TRAJ10)
CAASKGRAGTGGGNKPTF

SEQ ID NO: 759670 - protein, 14 aa, Homo sapiens
  CDR3 for beta chain variable domain of TCR clone 379835 (TRBV27, TRBJ2-2)
CASSLGAATGELFF

SEQ ID NO: 759671 - protein, 13 aa, Homo sapiens
  CDR3 for alpha chain variable domain of TCR clone 379836 (TRAV26-2, TRAJ54)
CIPRAGGAQKLVF

SEQ ID NO: 759672 - protein, 16 aa, Homo sapiens
  CDR3 for beta chain variable domain of TCR clone 379836 (TRBV4-1, TRBJ1-1)
CASSSMSERPNTEAFF

SEQ ID NO: 759673 - protein, 12 aa, Homo sapiens
  CDR3 for alpha chain variable domain of TCR clone 379837 (TRAV1-1, TRAJ8)
CAGGTGFQKLVF

SEQ ID NO: 759674 - protein, 11 aa, Homo sapiens
  CDR3 for beta chain variable domain of TCR clone 379837 (TRBV20-1, TRBJ2-7)
CSARLSYEQYF

SEQ ID NO: 759675 - protein, 14 aa, Homo sapiens
  CDR3 for alpha chain variable domain of TCR clone 379838 (TRAV1-2, TRAJ8)
CAVREDTGFKKLEF

SEQ ID NO: 759676 - protein, 16 aa, Homo sapiens
  CDR3 for beta chain variable domain of TCR clone 379838 (TRBV19, TRBJ2-1)
CASSSKGTRSYNEQFF

SEQ ID NO: 759677 - protein, 14 aa, Homo sapiens
  CDR3 for alpha chain variable domain of TCR clone 379839 (TRAV1-2, TRAJ16)
CAVNRFSDCQKLLF

SEQ ID NO: 759678 - protein, 12 aa, Homo sapiens
  CDR3 for beta chain variable domain of TCR clone 379839 (TRBV11-2, TRBJ2-2)
CDSSLGGGELFF

SEQ ID NO: 759679 - protein, 15 aa, Homo sapiens
  CDR3 for alpha chain variable domain of TCR clone 379840 (TRAV12-3, TRAJ17)
CAISPSLAAGNKLTF

SEQ ID NO: 759680 - protein, 15 aa, Homo sapiens
  CDR3 for beta chain variable domain of TCR clone 379840 (TRBV9, TRBJ1-6)
CASSVAGTGDSPLHF

SEQ ID NO: 759681 - protein, 15 aa, Homo sapiens
  CDR3 for alpha chain variable domain of TCR clone 379841 (TRAV8-3, TRAJ45)
CASSYSGRGADGLTF

SEQ ID NO: 759682 - protein, 15 aa, Homo sapiens
  CDR3 for beta chain variable domain of TCR clone 379841 (TRBV7-9, TRBJ1-4)
CASSARTGGNEKLFF

SEQ ID NO: 759683 - protein, 10 aa, Homo sapiens
  CDR3 for alpha chain variable domain of TCR clone 379842 (TRAV16, TRAJ22)
SAMYLRQLTF

SEQ ID NO: 759684 - protein, 17 aa, Homo sapiens
  CDR3 for beta chain variable domain of TCR clone 379842 (TRBV25-1, TRBJ2-7)
CASSDARVVFSSYEQYF

SEQ ID NO: 759685 - protein, 12 aa, Homo sapiens
  CDR3 for alpha chain variable domain of TCR clone 379843 (TRAV17, TRAJ12)
CATLRSSYKLIF

SEQ ID NO: 759686 - protein, 13 aa, Homo sapiens
  CDR3 for beta chain variable domain of TCR clone 379843 (TRBV11-2, TRBJ1-6)
CASSLAGTSPLHF

SEQ ID NO: 759687 - protein, 15 aa, Homo sapiens
  CDR3 for alpha chain variable domain of TCR clone 379844 (TRAV16, TRAJ53)
CALIDSGGSNYKLTF

SEQ ID NO: 759688 - protein, 15 aa, Homo sapiens
  CDR3 for beta chain variable domain of TCR clone 379844 (TRBV7-2, TRBJ1-2)
CASSPRAGWNYGYIF

SEQ ID NO: 759689 - protein, 12 aa, Homo sapiens
  CDR3 for alpha chain variable domain of TCR clone 379845 (TRAV16, TRAJ10)
CSRTGGGNKLTF

SEQ ID NO: 759690 - protein, 15 aa, Homo sapiens
  CDR3 for beta chain variable domain of TCR clone 379845 (TRBV6-3, TRBJ2-7)
CASSSHGSVFYEQYF

SEQ ID NO: 759691 - protein, 17 aa, Homo sapiens
  CDR3 for alpha chain variable domain of TCR clone 379846 (TRAV3, TRAJ6)
CAVRDGPRAGGSDIHTF

SEQ ID NO: 759692 - protein, 20 aa, Homo sapiens
  CDR3 for beta chain variable domain of TCR clone 379846 (TRBV28, TRBJ2-1)
CASTPIGRSPGLAGGNEQFF

SEQ ID NO: 759693 - protein, 14 aa, Homo sapiens
  CDR3 for alpha chain variable domain of TCR clone 379847 (TRAV35, TRAJ22)
CAGLRPGSARQLTF

SEQ ID NO: 759694 - protein, 12 aa, Homo sapiens
  CDR3 for beta chain variable domain of TCR clone 379847 (TRBV7-9, TRBJ2-7)
CASSIKWEEQYF

SEQ ID NO: 759695 - protein, 16 aa, Homo sapiens
  CDR3 for alpha chain variable domain of TCR clone 379848 (TRAV13-2, TRAJ32)
CAEMENYGGATNKLIF

SEQ ID NO: 759696 - protein, 13 aa, Homo sapiens
  CDR3 for beta chain variable domain of TCR clone 379848 (TRBV10-3, TRBJ2-7)
CASKLAVNYEQYF

SEQ ID NO: 759697 - protein, 14 aa, Homo sapiens
  CDR3 for alpha chain variable domain of TCR clone 379849 (TRAV35, TRAJ50)
CAGHRNTSYDKVIF

SEQ ID NO: 759698 - protein, 13 aa, Homo sapiens
  CDR3 for beta chain variable domain of TCR clone 379849 (TRBV7-7, TRBJ2-3)
CASSLSRADTQYF

SEQ ID NO: 759699 - protein, 13 aa, Homo sapiens
  CDR3 for alpha chain variable domain of TCR clone 379850 (TRAV12-2, TRAJ6)
CAARGGGSNIPPF

SEQ ID NO: 759700 - protein, 12 aa, Homo sapiens
  CDR3 for beta chain variable domain of TCR clone 379850 (TRBV11-2, TRBJ2-1)
CASSPGNNEQFF

SEQ ID NO: 759701 - protein, 11 aa, Homo sapiens
  CDR3 for alpha chain variable domain of TCR clone 379851 (TRAV26-1, TRAJ37)
CIVRVGRKLIF

SEQ ID NO: 759702 - protein, 16 aa, Homo sapiens
  CDR3 for beta chain variable domain of TCR clone 379851 (TRBV7-3, TRBJ2-1)
CASSLEGYRSYNEQFF

SEQ ID NO: 759703 - protein, 14 aa, Homo sapiens
  CDR3 for alpha chain variable domain of TCR clone 379852 (TRAV38-1, TRAJ45)
CAYYSGGGADGLPF

SEQ ID NO: 759704 - protein, 15 aa, Homo sapiens
  CDR3 for beta chain variable domain of TCR clone 379852 (TRBV7-3, TRBJ2-1)
CASSPTGGGEVEQFF

SEQ ID NO: 759705 - protein, 15 aa, Homo sapiens
  CDR3 for alpha chain variable domain of TCR clone 379853 (TRAV3, TRAJ7)
CAVRDKDNGNNRLAF

SEQ ID NO: 759706 - protein, 19 aa, Homo sapiens
  CDR3 for beta chain variable domain of TCR clone 379853 (TRBV5-8, TRBJ2-3)
WASSFLGTSGSHRTDTQYF

SEQ ID NO: 759707 - protein, 13 aa, Homo sapiens
  CDR3 for alpha chain variable domain of TCR clone 379854 (TRAV13-2, TRAJ48)
CAEMDFGDEKLTF

SEQ ID NO: 759708 - protein, 13 aa, Homo sapiens
  CDR3 for beta chain variable domain of TCR clone 379854 (TRBV13, TRBJ2-5)
CASSPEVGETQYF

SEQ ID NO: 759709 - protein, 13 aa, Homo sapiens
  CDR3 for alpha chain variable domain of TCR clone 379855 (TRAV12-2, TRAJ52)
CAVSATSYGKLTF

SEQ ID NO: 759710 - protein, 17 aa, Homo sapiens
  CDR3 for beta chain variable domain of TCR clone 379855 (TRBV11-2, TRBJ2-1)
CASSLYPPGVEYNEQFF

SEQ ID NO: 759711 - protein, 20 aa, Homo sapiens
  CDR3 for alpha chain variable domain of TCR clone 379856 (TRAV24, TRAJ42)
CAFNGAKEISSLEKALNFLL

SEQ ID NO: 759712 - protein, 15 aa, Homo sapiens
  CDR3 for beta chain variable domain of TCR clone 379856 (TRBV5-5, TRBJ1-5)
CASSSTPGSNQPQHF

SEQ ID NO: 759713 - protein, 10 aa, Homo sapiens
  CDR3 for alpha chain variable domain of TCR clone 379857 (TRAV1-2, TRAJ18)
CAVRGEAQPW

SEQ ID NO: 759714 - protein, 19 aa, Homo sapiens
  CDR3 for beta chain variable domain of TCR clone 379857 (TRBV6-3, TRBJ1-2)
CASSYSKGRAGPPNYGYTF

SEQ ID NO: 759715 - protein, 16 aa, Homo sapiens
  CDR3 for alpha chain variable domain of TCR clone 379858 (TRAV12-2, TRAJ45)
CAVKRNPGGGADGLTF

SEQ ID NO: 759716 - protein, 12 aa, Homo sapiens
  CDR3 for beta chain variable domain of TCR clone 379858 (TRBV6-1, TRBJ2-5)
CASREGREAQYF

SEQ ID NO: 759717 - protein, 14 aa, Homo sapiens
  CDR3 for alpha chain variable domain of TCR clone 379859 (TRAV12-2, TRAJ40)
CDVKIPSGTYKYIF

SEQ ID NO: 759718 - protein, 12 aa, Homo sapiens
  CDR3 for beta chain variable domain of TCR clone 379859 (TRBV11-2, TRBJ2-2)
CASSLGGGELFF

SEQ ID NO: 759719 - protein, 11 aa, Homo sapiens
  CDR3 for alpha chain variable domain of TCR clone 379860 (TRAV3, TRAJ21)
CAVGNFNNFYF

SEQ ID NO: 759720 - protein, 12 aa, Homo sapiens
  CDR3 for beta chain variable domain of TCR clone 379860 (TRBV14, TRBJ2-5)
CASSHLKETQYF

SEQ ID NO: 759721 - protein, 13 aa, Homo sapiens
  CDR3 for alpha chain variable domain of TCR clone 379861 (TRAV26-2, TRAJ43)
CILRAVNNNDMRF

SEQ ID NO: 759722 - protein, 13 aa, Homo sapiens
  CDR3 for beta chain variable domain of TCR clone 379861 (TRBV28, TRBJ2-7)
CASKAGGVYEQYF

SEQ ID NO: 759723 - protein, 16 aa, Homo sapiens
  CDR3 for alpha chain variable domain of TCR clone 379862 (TRAV30, TRAJ24)
CGTEIGDADSWVKFQF

SEQ ID NO: 759724 - protein, 14 aa, Homo sapiens
  CDR3 for beta chain variable domain of TCR clone 379862 (TRBV12-5, TRBJ2-5)
CASGSRTHQETQYF

SEQ ID NO: 759725 - protein, 10 aa, Homo sapiens
  CDR3 for alpha chain variable domain of TCR clone 379863 (TRAV23/DV6, TRAJ57)
CAASSTRSQG

SEQ ID NO: 759726 - protein, 14 aa, Homo sapiens
  CDR3 for beta chain variable domain of TCR clone 379863 (TRBV25-1, TRBJ1-1)
CASTHLGGNTEAFF

SEQ ID NO: 759727 - protein, 10 aa, Homo sapiens
  CDR3 for alpha chain variable domain of TCR clone 379864 (TRAV13-1, TRAJ8)
CAAPFQKHVF

SEQ ID NO: 759728 - protein, 17 aa, Homo sapiens
  CDR3 for beta chain variable domain of TCR clone 379864 (TRBV11-2, TRBJ2-1)
CASSLYPPGVEYNEQFF

SEQ ID NO: 759729 - protein, 14 aa, Homo sapiens
  CDR3 for alpha chain variable domain of TCR clone 379865 (TRAV26-1, TRAJ34)
CIVRVAYNTDKLIF

SEQ ID NO: 759730 - protein, 15 aa, Homo sapiens
  CDR3 for beta chain variable domain of TCR clone 379865 (TRBV20-1, TRBJ2-7)
CSARVPTAYFYEQYF

SEQ ID NO: 759731 - protein, 15 aa, Homo sapiens
  CDR3 for alpha chain variable domain of TCR clone 379866 (TRAV23/DV6, TRAJ13)
CAAWPGGGGYQKVTF

SEQ ID NO: 759732 - protein, 13 aa, Homo sapiens
  CDR3 for beta chain variable domain of TCR clone 379866 (TRBV7-9, TRBJ1-2)
CASSLKQNYGYTF

SEQ ID NO: 759733 - protein, 22 aa, Homo sapiens
  CDR3 for alpha chain variable domain of TCR clone 379867 (TRAV8-2, TRAJ45)
HLTKPSAHMSDAAEYSADGLTF

SEQ ID NO: 759734 - protein, 16 aa, Homo sapiens
  CDR3 for beta chain variable domain of TCR clone 379867 (TRBV20-1, TRBJ1-4)
CSAPGQGLLTNEKLFF

SEQ ID NO: 759735 - protein, 11 aa, Homo sapiens
  CDR3 for alpha chain variable domain of TCR clone 379868 (TRAV20, TRAJ34)
CRTKGTDKLIF

SEQ ID NO: 759736 - protein, 14 aa, Homo sapiens
  CDR3 for beta chain variable domain of TCR clone 379868 (TRBV7-3, TRBJ1-1)
CASSLGTGYTEAFF

SEQ ID NO: 759737 - protein, 14 aa, Homo sapiens
  CDR3 for alpha chain variable domain of TCR clone 379869 (TRAV29/DV5, TRAJ45)
CAASFRGGADGLTF

SEQ ID NO: 759738 - protein, 17 aa, Homo sapiens
  CDR3 for beta chain variable domain of TCR clone 379869 (TRBV4-1, TRBJ1-4)
CASSQEGPRGVEEKLFF

SEQ ID NO: 759739 - protein, 16 aa, Homo sapiens
  CDR3 for alpha chain variable domain of TCR clone 379870 (TRAV3, TRAJ37)
CAVRPHCSGNTGKLIF

SEQ ID NO: 759740 - protein, 16 aa, Homo sapiens
  CDR3 for beta chain variable domain of TCR clone 379870 (TRBV9, TRBJ1-2)
CASSVEEKVSPYGHTF

SEQ ID NO: 759741 - protein, 15 aa, Homo sapiens
  CDR3 for alpha chain variable domain of TCR clone 379871 (TRAV13-1, TRAJ5)
CAASKSDTGRRALTF

SEQ ID NO: 759742 - protein, 16 aa, Homo sapiens
  CDR3 for beta chain variable domain of TCR clone 379871 (TRBV7-2, TRBJ2-1)
CASSLGRTSGDNEQFF

SEQ ID NO: 759743 - protein, 13 aa, Homo sapiens
  CDR3 for alpha chain variable domain of TCR clone 379872 (TRAV1-2, TRAJ9)
VAALNTGGFKTIF

SEQ ID NO: 759744 - protein, 13 aa, Homo sapiens
  CDR3 for beta chain variable domain of TCR clone 379872 (TRBV19, TRBJ1-2)
CASSVPGQDGYTF

SEQ ID NO: 759745 - protein, 14 aa, Homo sapiens
  CDR3 for alpha chain variable domain of TCR clone 379873 (TRAV16, TRAJ42)
CALLAGGRQGNLIF

SEQ ID NO: 759746 - protein, 13 aa, Homo sapiens
  CDR3 for beta chain variable domain of TCR clone 379873 (TRBV7-9, TRBJ1-2)
CASSLKQNYGYIF

SEQ ID NO: 759747 - protein, 18 aa, Homo sapiens
  CDR3 for alpha chain variable domain of TCR clone 379874 (TRAV21, TRAJ52)
CAVRPSPAGGTSYGKLTF

SEQ ID NO: 759748 - protein, 13 aa, Homo sapiens
  CDR3 for beta chain variable domain of TCR clone 379874 (TRBV7-3, TRBJ1-1)
CASSQDWGAETFF

SEQ ID NO: 759749 - protein, 14 aa, Homo sapiens
  CDR3 for alpha chain variable domain of TCR clone 379875 (TRAV1-2, TRAJ8)
CAVREDTGFQKLVL

SEQ ID NO: 759750 - protein, 13 aa, Homo sapiens
  CDR3 for beta chain variable domain of TCR clone 379875 (TRBV5-1, TRBJ2-1)
CASSLGSYNEQFF

SEQ ID NO: 759751 - protein, 14 aa, Homo sapiens
  CDR3 for alpha chain variable domain of TCR clone 379876 (TRAV12-1, TRAJ4)
CGEQRSGGYNKLIF

SEQ ID NO: 759752 - protein, 14 aa, Homo sapiens
  CDR3 for beta chain variable domain of TCR clone 379876 (TRBV20-1, TRBJ2-1)
CSAQIGGSANEQFF

SEQ ID NO: 759753 - protein, 15 aa, Homo sapiens
  CDR3 for alpha chain variable domain of TCR clone 379877 (TRAV1-1, TRAJ20)
CAVRDNVANDYKLSF

SEQ ID NO: 759754 - protein, 12 aa, Homo sapiens
  CDR3 for beta chain variable domain of TCR clone 379877 (TRBV7-8, TRBJ2-7)
CASSLGDREQYF

SEQ ID NO: 759755 - protein, 12 aa, Homo sapiens
  CDR3 for alpha chain variable domain of TCR clone 379878 (TRAV26-1, TRAJ54)
CIGGWGAQKLVF

SEQ ID NO: 759756 - protein, 16 aa, Homo sapiens
  CDR3 for beta chain variable domain of TCR clone 379878 (TRBV7-3, TRBJ2-5)
CASSLMGGASQETQYF

SEQ ID NO: 759757 - protein, 12 aa, Homo sapiens
  CDR3 for alpha chain variable domain of TCR clone 379879 (TRAV3, TRAJ20)
CAVRDPDYKLSF

SEQ ID NO: 759758 - protein, 13 aa, Homo sapiens
  CDR3 for beta chain variable domain of TCR clone 379879 (TRBV28, TRBJ2-7)
CASTPGLAGEQYF

SEQ ID NO: 759759 - protein, 14 aa, Homo sapiens
  CDR3 for alpha chain variable domain of TCR clone 379880 (TRAV26-1, TRAJ34)
CIVRVAYNTDKLIF

SEQ ID NO: 759760 - protein, 17 aa, Homo sapiens
  CDR3 for beta chain variable domain of TCR clone 379880 (TRBV20-1, TRBJ2-2)
CSASGSGQGGLTGELFF

SEQ ID NO: 759761 - protein, 11 aa, Homo sapiens
  CDR3 for alpha chain variable domain of TCR clone 379881 (TRAV12-3, TRAJ43)
CAMSVSNDMRF

SEQ ID NO: 759762 - protein, 12 aa, Homo sapiens
  CDR3 for beta chain variable domain of TCR clone 379881 (TRBV12-4, TRBJ2-7)
CASSASPYEQYF

SEQ ID NO: 759763 - protein, 11 aa, Homo sapiens
  CDR3 for alpha chain variable domain of TCR clone 379882 (TRAV21, TRAJ31)
CAVRNNARHMF

SEQ ID NO: 759764 - protein, 12 aa, Homo sapiens
  CDR3 for beta chain variable domain of TCR clone 379882 (TRBV6-3, TRBJ2-7)
CASSRQGYEQYF

SEQ ID NO: 759765 - protein, 17 aa, Homo sapiens
  CDR3 for alpha chain variable domain of TCR clone 379883 (TRAV3, TRAJ6)
CAVSRRTDTGGSYIPTF

SEQ ID NO: 759766 - protein, 18 aa, Homo sapiens
  CDR3 for beta chain variable domain of TCR clone 379883 (TRBV7-8, TRBJ2-3)
CASSLETSRGRKADTQYF

SEQ ID NO: 759767 - protein, 13 aa, Homo sapiens
  CDR3 for alpha chain variable domain of TCR clone 379884 (TRAV27, TRAJ56)
CAGKPGANSKLTF

SEQ ID NO: 759768 - protein, 18 aa, Homo sapiens
  CDR3 for beta chain variable domain of TCR clone 379884 (TRBV11-2, TRBJ2-3)
CASSLGGASRGAPNTQYC

SEQ ID NO: 759769 - protein, 14 aa, Homo sapiens
  CDR3 for alpha chain variable domain of TCR clone 379885 (TRAV17, TRAJ34)
CATDSLEGTDKLIF

SEQ ID NO: 759770 - protein, 13 aa, Homo sapiens
  CDR3 for beta chain variable domain of TCR clone 379885 (TRBV11-2, TRBJ2-7)
CASSGTRHYEQYF

SEQ ID NO: 759771 - protein, 14 aa, Homo sapiens
  CDR3 for alpha chain variable domain of TCR clone 379886 (TRAV17, TRAJ57)
CATDPQGGSEKLVF

SEQ ID NO: 759772 - protein, 16 aa, Homo sapiens
  CDR3 for beta chain variable domain of TCR clone 379886 (TRBV7-2, TRBJ2-3)
CASSLVGDASTDTQYF

SEQ ID NO: 759773 - protein, 11 aa, Homo sapiens
  CDR3 for alpha chain variable domain of TCR clone 379887 (TRAV3, TRAJ21)
CAVGNFNNFYF

SEQ ID NO: 759774 - protein, 16 aa, Homo sapiens
  CDR3 for beta chain variable domain of TCR clone 379887 (TRBV19, TRBJ2-1)
CASSKAGPGSYNEQFF

SEQ ID NO: 759775 - protein, 11 aa, Homo sapiens
  CDR3 for alpha chain variable domain of TCR clone 379888 (TRAV3, TRAJ31)
CAVRPDARLMF

SEQ ID NO: 759776 - protein, 14 aa, Homo sapiens
  CDR3 for beta chain variable domain of TCR clone 379888 (TRBV5-5, TRBJ1-5)
CASSGQGVDQPQHF

SEQ ID NO: 759777 - protein, 14 aa, Homo sapiens
  CDR3 for alpha chain variable domain of TCR clone 379889 (TRAV8-1, TRAJ34)
CAVITTYNTDKLLL

SEQ ID NO: 759778 - protein, 14 aa, Homo sapiens
  CDR3 for beta chain variable domain of TCR clone 379889 (TRBV11-3, TRBJ1-3)
CASSHNGQGNTIYF

SEQ ID NO: 759779 - protein, 10 aa, Homo sapiens
  CDR3 for alpha chain variable domain of TCR clone 379890 (TRAV12-1, TRAJ37)
ARGNTGKLIF

SEQ ID NO: 759780 - protein, 19 aa, Homo sapiens
  CDR3 for beta chain variable domain of TCR clone 379890 (TRBV7-2, TRBJ2-3)
CASSFLSRNWGGGTDTQYF

SEQ ID NO: 759781 - protein, 13 aa, Homo sapiens
  CDR3 for alpha chain variable domain of TCR clone 379891 (TRAV4, TRAJ42)
CLVGGGSQGNLLF

SEQ ID NO: 759782 - protein, 16 aa, Homo sapiens
  CDR3 for beta chain variable domain of TCR clone 379891 (TRBV5-1, TRBJ2-3)
CASSLQGRVGADTQYF

SEQ ID NO: 759783 - protein, 12 aa, Homo sapiens
  CDR3 for alpha chain variable domain of TCR clone 379892 (TRAV12-3, TRAJ17)
CAMTLTGNTLTF

SEQ ID NO: 759784 - protein, 13 aa, Homo sapiens
  CDR3 for beta chain variable domain of TCR clone 379892 (TRBV19, TRBJ1-2)
CASSVPGQDGYTF

SEQ ID NO: 759785 - protein, 14 aa, Homo sapiens
  CDR3 for alpha chain variable domain of TCR clone 379893 (TRAV8-4, TRAJ13)
CAVTLSGGYQKVTF

SEQ ID NO: 759786 - protein, 16 aa, Homo sapiens
  CDR3 for beta chain variable domain of TCR clone 379893 (TRBV19, TRBJ2-2)
CASRSPGTGATEELFF

SEQ ID NO: 759787 - protein, 12 aa, Homo sapiens
  CDR3 for alpha chain variable domain of TCR clone 379894 (TRAV1-1, TRAJ8)
CAGGTGFQKLVF

SEQ ID NO: 759788 - protein, 15 aa, Homo sapiens
  CDR3 for beta chain variable domain of TCR clone 379894 (TRBV7-9, TRBJ1-4)
CTSSRTGGFNEKLFF

SEQ ID NO: 759789 - protein, 11 aa, Homo sapiens
  CDR3 for alpha chain variable domain of TCR clone 379895 (TRAV21, TRAJ34)
CAHYNTDKLIF

SEQ ID NO: 759790 - protein, 13 aa, Homo sapiens
  CDR3 for beta chain variable domain of TCR clone 379895 (TRBV7-3, TRBJ1-1)
CASSQDWGAEAFF

SEQ ID NO: 759791 - protein, 16 aa, Homo sapiens
  CDR3 for alpha chain variable domain of TCR clone 379896 (TRAV12-2, TRAJ28)
CAVITDSGAGSSKITF

SEQ ID NO: 759792 - protein, 14 aa, Homo sapiens
  CDR3 for beta chain variable domain of TCR clone 379896 (TRBV25-1, TRBJ1-1)
CASTHLGGNTEAFF

SEQ ID NO: 759793 - protein, 11 aa, Homo sapiens
  CDR3 for alpha chain variable domain of TCR clone 379897 (TRAV12-3, TRAJ43)
CAMSVSNDMRF

SEQ ID NO: 759794 - protein, 13 aa, Homo sapiens
  CDR3 for beta chain variable domain of TCR clone 379897 (TRBV20-1, TRBJ1-1)
CSAPLGGGTNAFF

SEQ ID NO: 759795 - protein, 11 aa, Homo sapiens
  CDR3 for alpha chain variable domain of TCR clone 379898 (TRAV1-2, TRAJ20)
CAVANDYKLSI

SEQ ID NO: 759796 - protein, 18 aa, Homo sapiens
  CDR3 for beta chain variable domain of TCR clone 379898 (TRBV20-1, TRBJ2-6)
CSAETTPTHGSGANVLTF

SEQ ID NO: 759797 - protein, 13 aa, Homo sapiens
  CDR3 for alpha chain variable domain of TCR clone 379899 (TRAV2, TRAJ39)
TTVHNNAGNMLTF

SEQ ID NO: 759798 - protein, 15 aa, Homo sapiens
  CDR3 for beta chain variable domain of TCR clone 379899 (TRBV9, TRBJ1-6)
CASSVAGTGDSPLHF

SEQ ID NO: 759799 - protein, 16 aa, Homo sapiens
  CDR3 for alpha chain variable domain of TCR clone 379900 (TRAV14/DV4, TRAJ54)
CAMREGRIQGAQKLVF

SEQ ID NO: 759800 - protein, 16 aa, Homo sapiens
  CDR3 for beta chain variable domain of TCR clone 379900 (TRBV7-6, TRBJ1-6)
CASSLSSRIGDSPLHF

SEQ ID NO: 759801 - protein, 12 aa, Homo sapiens
  CDR3 for alpha chain variable domain of TCR clone 379901 (TRAV25, TRAJ48)
CAGDFGNEKLTF

SEQ ID NO: 759802 - protein, 15 aa, Homo sapiens
  CDR3 for beta chain variable domain of TCR clone 379901 (TRBV27, TRBJ2-1)
CASSNGGGSSNEQFF

SEQ ID NO: 759803 - protein, 13 aa, Homo sapiens
  CDR3 for alpha chain variable domain of TCR clone 379902 (TRAV8-6, TRAJ50)
CAVIKTSYDKVIF

SEQ ID NO: 759804 - protein, 15 aa, Homo sapiens
  CDR3 for beta chain variable domain of TCR clone 379902 (TRBV7-2, TRBJ2-2)
CASRRPGQNTGDLFF

SEQ ID NO: 759805 - protein, 14 aa, Homo sapiens
  CDR3 for alpha chain variable domain of TCR clone 379903 (TRAV6, TRAJ6)
CALPASGGSYIPTS

SEQ ID NO: 759806 - protein, 16 aa, Homo sapiens
  CDR3 for beta chain variable domain of TCR clone 379903 (TRBV5-8, TRBJ2-3)
CASSLGVSALTDTQYF

SEQ ID NO: 759807 - protein, 16 aa, Homo sapiens
  CDR3 for alpha chain variable domain of TCR clone 379904 (TRAV12-1, TRAJ43)
CVVNPHRFGAWTRLTV

SEQ ID NO: 759808 - protein, 13 aa, Homo sapiens
  CDR3 for beta chain variable domain of TCR clone 379904 (TRBV20-1, TRBJ1-1)
CSARGGGNTEAFF

SEQ ID NO: 759809 - protein, 21 aa, Homo sapiens
  CDR3 for alpha chain variable domain of TCR clone 379905 (TRAV25, TRAJ53)
TATQTTDVGTGSGGSNYKLTF

SEQ ID NO: 759810 - protein, 16 aa, Homo sapiens
  CDR3 for beta chain variable domain of TCR clone 379905 (TRBV4-2, TRBJ2-3)
CPSSLSSGGHTDTQYF

SEQ ID NO: 759811 - protein, 16 aa, Homo sapiens
  CDR3 for alpha chain variable domain of TCR clone 379906 (TRAV25, TRAJ53)
CAGPNGSGGSNYKLTF

SEQ ID NO: 759812 - protein, 17 aa, Homo sapiens
  CDR3 for beta chain variable domain of TCR clone 379906 (TRBV11-3, TRBJ2-6)
CASKWGQGLSGANVLTF

SEQ ID NO: 759813 - protein, 17 aa, Homo sapiens
  CDR3 for alpha chain variable domain of TCR clone 379907 (TRAV3, TRAJ28)
FAVGEAYSGAGSYQLTF

SEQ ID NO: 759814 - protein, 18 aa, Homo sapiens
  CDR3 for beta chain variable domain of TCR clone 379907 (TRBV27, TRBJ2-1)
CASGNRAVGVGSKNEQFF

SEQ ID NO: 759815 - protein, 15 aa, Homo sapiens
  CDR3 for alpha chain variable domain of TCR clone 379908 (TRAV21, TRAJ53)
CAVRQSGGSNYKLTF

SEQ ID NO: 759816 - protein, 15 aa, Homo sapiens
  CDR3 for beta chain variable domain of TCR clone 379908 (TRBV12-4, TRBJ2-5)
CASSPPTGLQETQYF

SEQ ID NO: 759817 - protein, 23 aa, Homo sapiens
  CDR3 for alpha chain variable domain of TCR clone 379909 (TRAV1-1, TRAJ29)
LLQELQMKDPASYFLGGNTPLVF

SEQ ID NO: 759818 - protein, 13 aa, Homo sapiens
  CDR3 for beta chain variable domain of TCR clone 379909 (TRBV25-1, TRBJ2-7)
CASSEDGDYEQYF

SEQ ID NO: 759819 - protein, 16 aa, Homo sapiens
  CDR3 for alpha chain variable domain of TCR clone 379910 (TRAV21, TRAJ37)
CAVRTAGSSNTGKLIF

SEQ ID NO: 759820 - protein, 14 aa, Homo sapiens
  CDR3 for beta chain variable domain of TCR clone 379910 (TRBV6-1, TRBJ1-3)
CASVQGGGGNTMYF

SEQ ID NO: 759821 - protein, 15 aa, Homo sapiens
  CDR3 for alpha chain variable domain of TCR clone 379911 (TRAV26-1, TRAJ29)
CIVRVEGSGNTPLVF

SEQ ID NO: 759822 - protein, 15 aa, Homo sapiens
  CDR3 for beta chain variable domain of TCR clone 379911 (TRBV7-9, TRBJ1-6)
CASSSPGRGSSPLHF

SEQ ID NO: 759823 - protein, 14 aa, Homo sapiens
  CDR3 for alpha chain variable domain of TCR clone 379912 (TRAV12-3, TRAJ6)
CAMSATGGSYIPTF

SEQ ID NO: 759824 - protein, 16 aa, Homo sapiens
  CDR3 for beta chain variable domain of TCR clone 379912 (TRBV4-2, TRBJ2-7)
CASSPRAGQGANEQFF

SEQ ID NO: 759825 - protein, 14 aa, Homo sapiens
  CDR3 for alpha chain variable domain of TCR clone 379913 (TRAV1-2, TRAJ16)
CAVNRVSDGQKLLF

SEQ ID NO: 759826 - protein, 14 aa, Homo sapiens
  CDR3 for beta chain variable domain of TCR clone 379913 (TRBV12-4, TRBJ2-3)
CASSLGQGTDTQYF

SEQ ID NO: 759827 - protein, 17 aa, Homo sapiens
  CDR3 for alpha chain variable domain of TCR clone 379914 (TRAV3, TRAJ6)
CAVRDGPRAGGSYIPTF

SEQ ID NO: 759828 - protein, 13 aa, Homo sapiens
  CDR3 for beta chain variable domain of TCR clone 379914 (TRBV7-2, TRBJ1-1)
CASSQDWGAEAFF

SEQ ID NO: 759829 - protein, 17 aa, Homo sapiens
  CDR3 for alpha chain variable domain of TCR clone 379915 (TRAV3, TRAJ6)
CAVRDGPRAGGSYIPSF

SEQ ID NO: 759830 - protein, 18 aa, Homo sapiens
  CDR3 for beta chain variable domain of TCR clone 379915 (TRBV7-3, TRBJ2-3)
CASSSTGTYPGSTDTQYF

SEQ ID NO: 759831 - protein, 14 aa, Homo sapiens
  CDR3 for alpha chain variable domain of TCR clone 379916 (TRAV26-1, TRAJ34)
CIVRVAYNTDKLIF

SEQ ID NO: 759832 - protein, 16 aa, Homo sapiens
  CDR3 for beta chain variable domain of TCR clone 379916 (TRBV10-3, TRBJ2-1)
CAISGGGDGGGGEQFF

SEQ ID NO: 759833 - protein, 13 aa, Homo sapiens
  CDR3 for alpha chain variable domain of TCR clone 379917 (TRAV8-1, TRAJ7)
CAVMPYGNNRLAF

SEQ ID NO: 759834 - protein, 14 aa, Homo sapiens
  CDR3 for beta chain variable domain of TCR clone 379917 (TRBV7-2, TRBJ1-1)
CASSFLTGTTEAFF

SEQ ID NO: 759835 - protein, 11 aa, Homo sapiens
  CDR3 for alpha chain variable domain of TCR clone 379918 (TRAV21, TRAJ34)
CAVTNTDKPIF

SEQ ID NO: 759836 - protein, 16 aa, Homo sapiens
  CDR3 for beta chain variable domain of TCR clone 379918 (TRBV18, TRBJ1-1)
CASSTGVGGRGGEAFF

SEQ ID NO: 759837 - protein, 13 aa, Homo sapiens
  CDR3 for alpha chain variable domain of TCR clone 379919 (TRAV21, TRAJ27)
CDARPGNSGKSTF

SEQ ID NO: 759838 - protein, 14 aa, Homo sapiens
  CDR3 for beta chain variable domain of TCR clone 379919 (TRBV7-6, TRBJ2-3)
CASSLGTVTDTQYF

SEQ ID NO: 759839 - protein, 15 aa, Homo sapiens
  CDR3 for alpha chain variable domain of TCR clone 379920 (TRAV35, TRAJ30)
CAGQPEMNRDDKIIF

SEQ ID NO: 759840 - protein, 14 aa, Homo sapiens
  CDR3 for beta chain variable domain of TCR clone 379920 (TRBV6-6, TRBJ2-7)
CASSDSGAGYEQYF

SEQ ID NO: 759841 - protein, 14 aa, Homo sapiens
  CDR3 for alpha chain variable domain of TCR clone 379921 (TRAV12-2, TRAJ13)
CAVKKTGGYQKVIF

SEQ ID NO: 759842 - protein, 15 aa, Homo sapiens
  CDR3 for beta chain variable domain of TCR clone 379921 (TRBV27, TRBJ2-1)
CASSNEGGSSNEQFF

SEQ ID NO: 759843 - protein, 12 aa, Homo sapiens
  CDR3 for alpha chain variable domain of TCR clone 379922 (TRAV12-3, TRAJ17)
CAMTLTGNKLTF

SEQ ID NO: 759844 - protein, 16 aa, Homo sapiens
  CDR3 for beta chain variable domain of TCR clone 379922 (TRBV28, TRBJ1-2)
CASSHGQGVYKDGYTF

SEQ ID NO: 759845 - protein, 14 aa, Homo sapiens
  CDR3 for alpha chain variable domain of TCR clone 379923 (TRAV23/DV6, TRAJ17)
CAARGRAAGNKLTF

SEQ ID NO: 759846 - protein, 12 aa, Homo sapiens
  CDR3 for beta chain variable domain of TCR clone 379923 (TRBV7-9, TRBJ2-3)
CASSFITDTQYC

SEQ ID NO: 759847 - protein, 19 aa, Homo sapiens
  CDR3 for alpha chain variable domain of TCR clone 379924 (TRAV26-1, TRAJ52)
CIVRAHRNAGGTSYGKLTF

SEQ ID NO: 759848 - protein, 15 aa, Homo sapiens
  CDR3 for beta chain variable domain of TCR clone 379924 (TRBV12-4, TRBJ2-5)
CAISPPTGLQETQYS

SEQ ID NO: 759849 - protein, 15 aa, Homo sapiens
  CDR3 for alpha chain variable domain of TCR clone 379925 (TRAV12-1, TRAJ42)
CVVKTGGGSQGNLIF

SEQ ID NO: 759850 - protein, 14 aa, Homo sapiens
  CDR3 for beta chain variable domain of TCR clone 379925 (TRBV7-2, TRBJ2-7)
CASSPKTSFYEQYF

SEQ ID NO: 759851 - protein, 12 aa, Homo sapiens
  CDR3 for alpha chain variable domain of TCR clone 379926 (TRAV1-2, TRAJ29)
CAVTSGNTPLVF

SEQ ID NO: 759852 - protein, 12 aa, Homo sapiens
  CDR3 for beta chain variable domain of TCR clone 379926 (TRBV7-9, TRBJ2-7)
CASSFGSYEQYF

SEQ ID NO: 759853 - protein, 14 aa, Homo sapiens
  CDR3 for alpha chain variable domain of TCR clone 379927 (TRAV13-1, TRAJ21)
CAAKEGFNKFYFDL

SEQ ID NO: 759854 - protein, 20 aa, Homo sapiens
  CDR3 for beta chain variable domain of TCR clone 379927 (TRBV28, TRBJ2-1)
CASTPIGRSPGLAGGNEQFF

SEQ ID NO: 759855 - protein, 12 aa, Homo sapiens
  CDR3 for alpha chain variable domain of TCR clone 379928 (TRAV9-2, TRAJ26)
CALRGYGQNFVF

SEQ ID NO: 759856 - protein, 15 aa, Homo sapiens
  CDR3 for beta chain variable domain of TCR clone 379928 (TRBV28, TRBJ2-7)
CASSLISGGSYEQYF

SEQ ID NO: 759857 - protein, 14 aa, Homo sapiens
  CDR3 for alpha chain variable domain of TCR clone 379929 (TRAV12-1, TRAJ23)
CVVNAAGRKAYLRT

SEQ ID NO: 759858 - protein, 16 aa, Homo sapiens
  CDR3 for beta chain variable domain of TCR clone 379929 (TRBV12-5, TRBJ2-5)
CASGPRTSGNQETQYF

SEQ ID NO: 759859 - protein, 13 aa, Homo sapiens
  CDR3 for alpha chain variable domain of TCR clone 379930 (TRAV2, TRAJ26)
CAVVGNYGQNFVF

SEQ ID NO: 759860 - protein, 17 aa, Homo sapiens
  CDR3 for beta chain variable domain of TCR clone 379930 (TRBV13, TRBJ2-3)
CASSLSRVAGGRNTQYF

SEQ ID NO: 759861 - protein, 13 aa, Homo sapiens
  CDR3 for alpha chain variable domain of TCR clone 379931 (TRAV16, TRAJ48)
CSPLNFGNEKLTF

SEQ ID NO: 759862 - protein, 14 aa, Homo sapiens
  CDR3 for beta chain variable domain of TCR clone 379931 (TRBV18, TRBJ1-2)
CASSPEGDLYGYTF

SEQ ID NO: 759863 - protein, 14 aa, Homo sapiens
  CDR3 for alpha chain variable domain of TCR clone 379932 (TRAV13-2, TRAJ45)
CAEMSGGGADGITF

SEQ ID NO: 759864 - protein, 11 aa, Homo sapiens
  CDR3 for beta chain variable domain of TCR clone 379932 (TRBV7-3, TRBJ2-5)
CASSLSETQYF

SEQ ID NO: 759865 - protein, 13 aa, Homo sapiens
  CDR3 for alpha chain variable domain of TCR clone 379933 (TRAV38-2/DV8, TRAJ34)
CAYRNYNTDKLIF

SEQ ID NO: 759866 - protein, 14 aa, Homo sapiens
  CDR3 for beta chain variable domain of TCR clone 379933 (TRBV4-2, TRBJ2-1)
CASGLDRAYNEQFF

SEQ ID NO: 759867 - protein, 13 aa, Homo sapiens
  CDR3 for alpha chain variable domain of TCR clone 379934 (TRAV13-1, TRAJ39)
CSKYSNAGNMLTF

SEQ ID NO: 759868 - protein, 16 aa, Homo sapiens
  CDR3 for beta chain variable domain of TCR clone 379934 (TRBV20-1, TRBJ1-4)
CSVPGQGLVTNEKLFF

SEQ ID NO: 759869 - protein, 13 aa, Homo sapiens
  CDR3 for alpha chain variable domain of TCR clone 379935 (TRAV21, TRAJ57)
CAVTQGGSETLVF

SEQ ID NO: 759870 - protein, 15 aa, Homo sapiens
  CDR3 for beta chain variable domain of TCR clone 379935 (TRBV5-1, TRBJ1-1)
CASSSTTGTNTEAFF

SEQ ID NO: 759871 - protein, 15 aa, Homo sapiens
  CDR3 for alpha chain variable domain of TCR clone 379936 (TRAV34, TRAJ38)
YGADFTPGNNRKLIW

SEQ ID NO: 759872 - protein, 12 aa, Homo sapiens
  CDR3 for beta chain variable domain of TCR clone 379936 (TRBV7-9, TRBJ2-7)
CATRTDAYEQYF

SEQ ID NO: 759873 - protein, 15 aa, Homo sapiens
  CDR3 for alpha chain variable domain of TCR clone 379937 (TRAV3, TRAJ20)
CAVRAIKLSDYKLSF

SEQ ID NO: 759874 - protein, 13 aa, Homo sapiens
  CDR3 for beta chain variable domain of TCR clone 379937 (TRBV20-1, TRBJ1-1)
CSARVGGNTEAFF

SEQ ID NO: 759875 - protein, 14 aa, Homo sapiens
  CDR3 for alpha chain variable domain of TCR clone 379938 (TRAV1-2, TRAJ8)
CAMREDTVFQKLVF

SEQ ID NO: 759876 - protein, 12 aa, Homo sapiens
  CDR3 for beta chain variable domain of TCR clone 379938 (TRBV2, TRBJ2-1)
CAYGPPGNEQFF

SEQ ID NO: 759877 - protein, 14 aa, Homo sapiens
  CDR3 for alpha chain variable domain of TCR clone 379939 (TRAV12-1, TRAJ46)
CVVTAKSSGDKLTF

SEQ ID NO: 759878 - protein, 16 aa, Homo sapiens
  CDR3 for beta chain variable domain of TCR clone 379939 (TRBV15, TRBJ1-2)
CATSRGPRTGGGGYTF

SEQ ID NO: 759879 - protein, 13 aa, Homo sapiens
  CDR3 for alpha chain variable domain of TCR clone 379940 (TRAV13-1, TRAJ13)
CAASKGGYQKVTF

SEQ ID NO: 759880 - protein, 13 aa, Homo sapiens
  CDR3 for beta chain variable domain of TCR clone 379940 (TRBV6-5, TRBJ2-5)
CASSPQGGETQYF

SEQ ID NO: 759881 - protein, 15 aa, Homo sapiens
  CDR3 for alpha chain variable domain of TCR clone 379941 (TRAV8-3, TRAJ11)
CAVGLLNSGYSTLTF

SEQ ID NO: 759882 - protein, 15 aa, Homo sapiens
  CDR3 for beta chain variable domain of TCR clone 379941 (TRBV27, TRBJ2-1)
CASSNGGGSSNEQFF

SEQ ID NO: 759883 - protein, 15 aa, Homo sapiens
  CDR3 for alpha chain variable domain of TCR clone 379942 (TRAV26-1, TRAJ52)
CIFGEGGTSYGKLTF

SEQ ID NO: 759884 - protein, 16 aa, Homo sapiens
  CDR3 for beta chain variable domain of TCR clone 379942 (TRBV6-5, TRBJ2-7)
CASSSLAGTFSYEQYF

SEQ ID NO: 759885 - protein, 16 aa, Homo sapiens
  CDR3 for alpha chain variable domain of TCR clone 379943 (TRAV23/DV6, TRAJ9)
CAASIGGITGGFKTIF

SEQ ID NO: 759886 - protein, 13 aa, Homo sapiens
  CDR3 for beta chain variable domain of TCR clone 379943 (TRBV9, TRBJ2-7)
CQQRRRGSYEQYF

SEQ ID NO: 759887 - protein, 15 aa, Homo sapiens
  CDR3 for alpha chain variable domain of TCR clone 379944 (TRAV26-1, TRAJ29)
CLVRVEGSGNNPLVF

SEQ ID NO: 759888 - protein, 14 aa, Homo sapiens
  CDR3 for beta chain variable domain of TCR clone 379944 (TRBV18, TRBJ2-5)
CASSPGVSQETQYF

SEQ ID NO: 759889 - protein, 15 aa, Homo sapiens
  CDR3 for alpha chain variable domain of TCR clone 379945 (TRAV35, TRAJ20)
CAGQLVGSNDYKLSF

SEQ ID NO: 759890 - protein, 16 aa, Homo sapiens
  CDR3 for beta chain variable domain of TCR clone 379945 (TRBV7-3, TRBJ2-2)
CASSLKRGTLSGELFF

SEQ ID NO: 759891 - protein, 14 aa, Homo sapiens
  CDR3 for alpha chain variable domain of TCR clone 379946 (TRAV35, TRAJ38)
CAGSNAGNNRKLIW

SEQ ID NO: 759892 - protein, 12 aa, Homo sapiens
  CDR3 for beta chain variable domain of TCR clone 379946 (TRBV28, TRBJ2-3)
CASSLYRDTQYF

SEQ ID NO: 759893 - protein, 18 aa, Homo sapiens
  CDR3 for alpha chain variable domain of TCR clone 379947 (TRAV13-1, TRAJ52)
CAASKRSAGGTSYGKLTF

SEQ ID NO: 759894 - protein, 13 aa, Homo sapiens
  CDR3 for beta chain variable domain of TCR clone 379947 (TRBV20-1, TRBJ1-6)
CSAPLGVGSPLHF

SEQ ID NO: 759895 - protein, 23 aa, Homo sapiens
  CDR3 for alpha chain variable domain of TCR clone 379948 (TRAV12-2, TRAJ43)
SLLIRDSQPSDSATFLCAFDMRF

SEQ ID NO: 759896 - protein, 17 aa, Homo sapiens
  CDR3 for beta chain variable domain of TCR clone 379948 (TRBV5-1, TRBJ2-5)
CASSLLGLAANQETQYF

SEQ ID NO: 759897 - protein, 12 aa, Homo sapiens
  CDR3 for alpha chain variable domain of TCR clone 379949 (TRAV9-2, TRAJ9)
CAMNTGGFKTIF

SEQ ID NO: 759898 - protein, 13 aa, Homo sapiens
  CDR3 for beta chain variable domain of TCR clone 379949 (TRBV11-2, TRBJ2-5)
CASSRGPSETQYF

SEQ ID NO: 759899 - protein, 14 aa, Homo sapiens
  CDR3 for alpha chain variable domain of TCR clone 379950 (TRAV38-1, TRAJ45)
CASHSGGGADELTF

SEQ ID NO: 759900 - protein, 13 aa, Homo sapiens
  CDR3 for beta chain variable domain of TCR clone 379950 (TRBV10-3, TRBJ1-2)
CAISERDSYGYTF

SEQ ID NO: 759901 - protein, 16 aa, Homo sapiens
  CDR3 for alpha chain variable domain of TCR clone 379951 (TRAV12-3, TRAJ53)
CAMSVGSGGSNYKLTF

SEQ ID NO: 759902 - protein, 13 aa, Homo sapiens
  CDR3 for beta chain variable domain of TCR clone 379951 (TRBV7-6, TRBJ1-2)
CASSLVADYGYSF

SEQ ID NO: 759903 - protein, 15 aa, Homo sapiens
  CDR3 for alpha chain variable domain of TCR clone 379952 (TRAV12-2, TRAJ52)
CAVTSGGTSYGKLTF

SEQ ID NO: 759904 - protein, 15 aa, Homo sapiens
  CDR3 for beta chain variable domain of TCR clone 379952 (TRBV7-2, TRBJ2-1)
CASTPGFISGNEQFF

SEQ ID NO: 759905 - protein, 13 aa, Homo sapiens
  CDR3 for alpha chain variable domain of TCR clone 379953 (TRAV12-2, TRAJ48)
CAAPNFGNEKLTF

SEQ ID NO: 759906 - protein, 15 aa, Homo sapiens
  CDR3 for beta chain variable domain of TCR clone 379953 (TRBV20-1, TRBJ2-7)
CSAESGTSGAYEQYF

SEQ ID NO: 759907 - protein, 14 aa, Homo sapiens
  CDR3 for alpha chain variable domain of TCR clone 379954 (TRAV16, TRAJ17)
CALSGRAAGNNLTF

SEQ ID NO: 759908 - protein, 17 aa, Homo sapiens
  CDR3 for beta chain variable domain of TCR clone 379954 (TRBV18, TRBJ2-6)
CASSPRQGAVGANVLTF

SEQ ID NO: 759909 - protein, 15 aa, Homo sapiens
  CDR3 for alpha chain variable domain of TCR clone 379955 (TRAV9-2, TRAJ39)
CALSDRNNAANMLTF

SEQ ID NO: 759910 - protein, 15 aa, Homo sapiens
  CDR3 for beta chain variable domain of TCR clone 379955 (TRBV10-3, TRBJ2-2)
CAISPGRTNTGELFV

SEQ ID NO: 759911 - protein, 14 aa, Homo sapiens
  CDR3 for alpha chain variable domain of TCR clone 379956 (TRAV12-2, TRAJ44)
CAVNPAGTASKHTF

SEQ ID NO: 759912 - protein, 13 aa, Homo sapiens
  CDR3 for beta chain variable domain of TCR clone 379956 (TRBV20-1, TRBJ1-6)
CSDPLGVGSPLHF

SEQ ID NO: 759913 - protein, 18 aa, Homo sapiens
  CDR3 for alpha chain variable domain of TCR clone 379957 (TRAV29/DV5, TRAJ37)
CSVLLCSEGSGTTGKLIF

SEQ ID NO: 759914 - protein, 14 aa, Homo sapiens
  CDR3 for beta chain variable domain of TCR clone 379957 (TRBV5-1, TRBJ1-1)
CASSLAVGSGEAFF

SEQ ID NO: 759915 - protein, 14 aa, Homo sapiens
  CDR3 for alpha chain variable domain of TCR clone 379958 (TRAV26-1, TRAJ40)
CIVRVARGTDKYIF

SEQ ID NO: 759916 - protein, 14 aa, Homo sapiens
  CDR3 for beta chain variable domain of TCR clone 379958 (TRBV7-3, TRBJ2-7)
CASSLKADSYEQYF

SEQ ID NO: 759917 - protein, 13 aa, Homo sapiens
  CDR3 for alpha chain variable domain of TCR clone 379959 (TRAV2, TRAJ40)
YAVVTSGTYKYIF

SEQ ID NO: 759918 - protein, 14 aa, Homo sapiens
  CDR3 for beta chain variable domain of TCR clone 379959 (TRBV19, TRBJ2-1)
CASPTFVSSGEQFF

SEQ ID NO: 759919 - protein, 16 aa, Homo sapiens
  CDR3 for alpha chain variable domain of TCR clone 379960 (TRAV30, TRAJ24)
CGTEIVDADSWGKFQF

SEQ ID NO: 759920 - protein, 14 aa, Homo sapiens
  CDR3 for beta chain variable domain of TCR clone 379960 (TRBV11-2, TRBJ2-5)
CASSRTGGMETQYF

SEQ ID NO: 759921 - protein, 14 aa, Homo sapiens
  CDR3 for alpha chain variable domain of TCR clone 379961 (TRAV8-3, TRAJ35)
CAVVPQGFGNLLHC

SEQ ID NO: 759922 - protein, 15 aa, Homo sapiens
  CDR3 for beta chain variable domain of TCR clone 379961 (TRBV6-1, TRBJ2-2)
CASSAGQGYTGELFF

SEQ ID NO: 759923 - protein, 14 aa, Homo sapiens
  CDR3 for alpha chain variable domain of TCR clone 379962 (TRAV1-2, TRAJ16)
CAVNRFSDGQKRLF

SEQ ID NO: 759924 - protein, 16 aa, Homo sapiens
  CDR3 for beta chain variable domain of TCR clone 379962 (TRBV5-1, TRBJ2-5)
CASSLRRASGQETQYF

SEQ ID NO: 759925 - protein, 12 aa, Homo sapiens
  CDR3 for alpha chain variable domain of TCR clone 379963 (TRAV16, TRAJ10)
CSRTGGGNKLTF

SEQ ID NO: 759926 - protein, 18 aa, Homo sapiens
  CDR3 for beta chain variable domain of TCR clone 379963 (TRBV7-9, TRBJ2-1)
CASSLAVSGTSGRNEQFF

SEQ ID NO: 759927 - protein, 14 aa, Homo sapiens
  CDR3 for alpha chain variable domain of TCR clone 379964 (TRAV17, TRAJ56)
CATVPAGANSKLTF

SEQ ID NO: 759928 - protein, 12 aa, Homo sapiens
  CDR3 for beta chain variable domain of TCR clone 379964 (TRBV12-4, TRBJ2-2)
CQQYHRVRGAVF

SEQ ID NO: 759929 - protein, 12 aa, Homo sapiens
  CDR3 for alpha chain variable domain of TCR clone 379965 (TRAV8-2, TRAJ45)
CVQGGGADGLTF

SEQ ID NO: 759930 - protein, 13 aa, Homo sapiens
  CDR3 for beta chain variable domain of TCR clone 379965 (TRBV15, TRBJ1-6)
CSTSGGLNSPLHF

SEQ ID NO: 759931 - protein, 14 aa, Homo sapiens
  CDR3 for alpha chain variable domain of TCR clone 379966 (TRAV1-2, TRAJ16)
CAVNRFSDGQKLIF

SEQ ID NO: 759932 - protein, 13 aa, Homo sapiens
  CDR3 for beta chain variable domain of TCR clone 379966 (TRBV4-2, TRBJ1-1)
CASSQAGNTEAFF

SEQ ID NO: 759933 - protein, 13 aa, Homo sapiens
  CDR3 for alpha chain variable domain of TCR clone 379967 (TRAV21, TRAJ44)
CAAHTGTASKLTF

SEQ ID NO: 759934 - protein, 19 aa, Homo sapiens
  CDR3 for beta chain variable domain of TCR clone 379967 (TRBV3-1, TRBJ2-1)
CASSRMIVPGLAGKNEQIF

SEQ ID NO: 759935 - protein, 20 aa, Homo sapiens
  CDR3 for alpha chain variable domain of TCR clone 379968 (TRAV1-1, TRAJ39)
CLLLLLCESSAYNAGNMLTF

SEQ ID NO: 759936 - protein, 13 aa, Homo sapiens
  CDR3 for beta chain variable domain of TCR clone 379968 (TRBV12-4, TRBJ1-5)
CASSPDRAQPQHF

SEQ ID NO: 759937 - protein, 13 aa, Homo sapiens
  CDR3 for alpha chain variable domain of TCR clone 379969 (TRAV29/DV5, TRAJ31)
CAPSRNNNARLMF

SEQ ID NO: 759938 - protein, 15 aa, Homo sapiens
  CDR3 for beta chain variable domain of TCR clone 379969 (TRBV2, TRBJ2-1)
CASSELAGSYNEQFF

SEQ ID NO: 759939 - protein, 11 aa, Homo sapiens
  CDR3 for alpha chain variable domain of TCR clone 379970 (TRAV1-2, TRAJ20)
CAVANDYKLSF

SEQ ID NO: 759940 - protein, 13 aa, Homo sapiens
  CDR3 for beta chain variable domain of TCR clone 379970 (TRBV6-1, TRBJ1-1)
CASSRQGNTEAFF

SEQ ID NO: 759941 - protein, 13 aa, Homo sapiens
  CDR3 for alpha chain variable domain of TCR clone 379971 (TRAV29/DV5, TRAJ31)
CAASRNNNARLMF

SEQ ID NO: 759942 - protein, 14 aa, Homo sapiens
  CDR3 for beta chain variable domain of TCR clone 379971 (TRBV20-1, TRBJ1-5)
CSARDVTGFQTQHF

SEQ ID NO: 759943 - protein, 12 aa, Homo sapiens
  CDR3 for alpha chain variable domain of TCR clone 379972 (TRAV1-2, TRAJ24)
CAVGGSCGKFQF

SEQ ID NO: 759944 - protein, 15 aa, Homo sapiens
  CDR3 for beta chain variable domain of TCR clone 379972 (TRBV6-1, TRBJ2-7)
CASSEGVGNPYEQYF

SEQ ID NO: 759945 - protein, 14 aa, Homo sapiens
  CDR3 for alpha chain variable domain of TCR clone 379973 (TRAV12-1, TRAJ17)
CVVNYKAAGNKLTF

SEQ ID NO: 759946 - protein, 15 aa, Homo sapiens
  CDR3 for beta chain variable domain of TCR clone 379973 (TRBV20-1, TRBJ2-7)
CSAESGTSGAYEQYF

SEQ ID NO: 759947 - protein, 14 aa, Homo sapiens
  CDR3 for alpha chain variable domain of TCR clone 379974 (TRAV17, TRAJ39)
CATDLVRAGNMLTF

SEQ ID NO: 759948 - protein, 13 aa, Homo sapiens
  CDR3 for beta chain variable domain of TCR clone 379974 (TRBV19, TRBJ1-2)
CASSVPGQDGYTF

SEQ ID NO: 759949 - protein, 14 aa, Homo sapiens
  CDR3 for alpha chain variable domain of TCR clone 379975 (TRAV1-2, TRAJ16)
CAVNRFSDCQKLLF

SEQ ID NO: 759950 - protein, 15 aa, Homo sapiens
  CDR3 for beta chain variable domain of TCR clone 379975 (TRBV7-2, TRBJ2-1)
CASSSGLAGGNEQFF

SEQ ID NO: 759951 - protein, 14 aa, Homo sapiens
  CDR3 for alpha chain variable domain of TCR clone 379976 (TRAV12-2, TRAJ13)
CAVKKTGGYQKVTF

SEQ ID NO: 759952 - protein, 13 aa, Homo sapiens
  CDR3 for beta chain variable domain of TCR clone 379976 (TRBV20-1, TRBJ1-1)
CSARLGQGTEALF

SEQ ID NO: 759953 - protein, 12 aa, Homo sapiens
  CDR3 for alpha chain variable domain of TCR clone 379977 (TRAV1-2, TRAJ29)
CAVPSGNTPLVF

SEQ ID NO: 759954 - protein, 14 aa, Homo sapiens
  CDR3 for beta chain variable domain of TCR clone 379977 (TRBV7-3, TRBJ2-1)
CASSLAGGTNEQFF

SEQ ID NO: 759955 - protein, 16 aa, Homo sapiens
  CDR3 for alpha chain variable domain of TCR clone 379978 (TRAV3, TRAJ10)
CAVRDMRAGGGNKLTF

SEQ ID NO: 759956 - protein, 15 aa, Homo sapiens
  CDR3 for beta chain variable domain of TCR clone 379978 (TRBV7-2, TRBJ2-7)
CASSWGQGAIYEQYF

SEQ ID NO: 759957 - protein, 14 aa, Homo sapiens
  CDR3 for alpha chain variable domain of TCR clone 379979 (TRAV12-2, TRAJ13)
CAVKKTGGYQKVTF

SEQ ID NO: 759958 - protein, 16 aa, Homo sapiens
  CDR3 for beta chain variable domain of TCR clone 379979 (TRBV15, TRBJ2-7)
CATSRGRAGGTYEQYF

SEQ ID NO: 759959 - protein, 21 aa, Homo sapiens
  CDR3 for alpha chain variable domain of TCR clone 379980 (TRAV1-1, TRAJ22)
CLLLLRCERSGSSGSARQLTF

SEQ ID NO: 759960 - protein, 12 aa, Homo sapiens
  CDR3 for beta chain variable domain of TCR clone 379980 (TRBV7-8, TRBJ2-7)
CASSLGDREQYF

SEQ ID NO: 759961 - protein, 12 aa, Homo sapiens
  CDR3 for alpha chain variable domain of TCR clone 379981 (TRAV26-1, TRAJ35)
CIGLSFGNVLHC

SEQ ID NO: 759962 - protein, 14 aa, Homo sapiens
  CDR3 for beta chain variable domain of TCR clone 379981 (TRBV11-2, TRBJ2-3)
CASSRLARTDTQYF

SEQ ID NO: 759963 - protein, 22 aa, Homo sapiens
  CDR3 for alpha chain variable domain of TCR clone 379982 (TRAV3, )
CAVRDCLNASNNHIQNPDPAVY

SEQ ID NO: 759964 - protein, 19 aa, Homo sapiens
  CDR3 for beta chain variable domain of TCR clone 379982 (TRBV7-2, TRBJ2-3)
CASSFLSRNWGGGTDTQYF

SEQ ID NO: 759965 - protein, 13 aa, Homo sapiens
  CDR3 for alpha chain variable domain of TCR clone 379983 (TRAV35, TRAJ21)
CAGQLSNFNKFYF

SEQ ID NO: 759966 - protein, 16 aa, Homo sapiens
  CDR3 for beta chain variable domain of TCR clone 379983 (TRBV12-5, TRBJ2-5)
CASCPRTSGNQETQYF

SEQ ID NO: 759967 - protein, 15 aa, Homo sapiens
  CDR3 for alpha chain variable domain of TCR clone 379984 (TRAV3, TRAJ5)
CAVRDLDTGRRALTF

SEQ ID NO: 759968 - protein, 16 aa, Homo sapiens
  CDR3 for beta chain variable domain of TCR clone 379984 (TRBV5-1, TRBJ2-7)
CASSWGTGGRAWEQYF

SEQ ID NO: 759969 - protein, 14 aa, Homo sapiens
  CDR3 for alpha chain variable domain of TCR clone 379985 (TRAV16, TRAJ17)
FALSEGAAGNKLTF

SEQ ID NO: 759970 - protein, 14 aa, Homo sapiens
  CDR3 for beta chain variable domain of TCR clone 379985 (TRBV28, TRBJ2-2)
CASRIRSGTGELFF

SEQ ID NO: 759971 - protein, 12 aa, Homo sapiens
  CDR3 for alpha chain variable domain of TCR clone 379986 (TRAV17, TRAJ20)
CATLANDYKISF

SEQ ID NO: 759972 - protein, 14 aa, Homo sapiens
  CDR3 for beta chain variable domain of TCR clone 379986 (TRBV10-3, TRBJ1-2)
CAISEDTPYYGYTF

SEQ ID NO: 759973 - protein, 11 aa, Homo sapiens
  CDR3 for alpha chain variable domain of TCR clone 379987 (TRAV12-2, TRAJ43)
CAAYNNNYMRF

SEQ ID NO: 759974 - protein, 14 aa, Homo sapiens
  CDR3 for beta chain variable domain of TCR clone 379987 (TRBV7-8, TRBJ1-2)
CASSAGAAIYGYTF

SEQ ID NO: 759975 - protein, 14 aa, Homo sapiens
  CDR3 for alpha chain variable domain of TCR clone 379988 (TRAV8-6, TRAJ47)
CAVIRWEYGNKLVF

SEQ ID NO: 759976 - protein, 18 aa, Homo sapiens
  CDR3 for beta chain variable domain of TCR clone 379988 (TRBV7-9, TRBJ2-7)
CASSLTTSGSRTWYEQYF

SEQ ID NO: 759977 - protein, 14 aa, Homo sapiens
  CDR3 for alpha chain variable domain of TCR clone 379989 (TRAV38-1, TRAJ40)
CALRPTSGTYKYTF

SEQ ID NO: 759978 - protein, 14 aa, Homo sapiens
  CDR3 for beta chain variable domain of TCR clone 379989 (TRBV25-1, TRBJ1-1)
CASTHLGGSTEAFF

SEQ ID NO: 759979 - protein, 13 aa, Homo sapiens
  CDR3 for alpha chain variable domain of TCR clone 379990 (TRAV8-2, TRAJ43)
CVVSDQGDNDMRF

SEQ ID NO: 759980 - protein, 12 aa, Homo sapiens
  CDR3 for beta chain variable domain of TCR clone 379990 (TRBV7-9, TRBJ2-7)
CASRTGFDKQYF

SEQ ID NO: 759981 - protein, 16 aa, Homo sapiens
  CDR3 for alpha chain variable domain of TCR clone 379991 (TRAV30, TRAJ24)
CSTEIVDADSWGKFPF

SEQ ID NO: 759982 - protein, 14 aa, Homo sapiens
  CDR3 for beta chain variable domain of TCR clone 379991 (TRBV12-5, TRBJ2-5)
CASGSRTHQETQYF

SEQ ID NO: 759983 - protein, 14 aa, Homo sapiens
  CDR3 for alpha chain variable domain of TCR clone 379992 (TRAV26-1, TRAJ21)
CIVRVAHNFNKFYF

SEQ ID NO: 759984 - protein, 15 aa, Homo sapiens
  CDR3 for beta chain variable domain of TCR clone 379992 (TRBV2, TRBJ2-1)
CASSEARSAYNEQFF

SEQ ID NO: 759985 - protein, 13 aa, Homo sapiens
  CDR3 for alpha chain variable domain of TCR clone 379993 (TRAV17, TRAJ9)
CATDHTGCFKTIF

SEQ ID NO: 759986 - protein, 16 aa, Homo sapiens
  CDR3 for beta chain variable domain of TCR clone 379993 (TRBV7-7, TRBJ2-1)
CASSLASGTAYNEQFF

SEQ ID NO: 759987 - protein, 14 aa, Homo sapiens
  CDR3 for alpha chain variable domain of TCR clone 379994 (TRAV2, TRAJ37)
CAVDFTSNTGKLIV

SEQ ID NO: 759988 - protein, 13 aa, Homo sapiens
  CDR3 for beta chain variable domain of TCR clone 379994 (TRBV20-1, TRBJ1-1)
CSAPLGGGTEAFF

SEQ ID NO: 759989 - protein, 14 aa, Homo sapiens
  CDR3 for alpha chain variable domain of TCR clone 379995 (TRAV13-1, TRAJ35)
CAASKGGFGNVPHC

SEQ ID NO: 759990 - protein, 14 aa, Homo sapiens
  CDR3 for beta chain variable domain of TCR clone 379995 (TRBV20-1, TRBJ2-7)
CSAKTGTGGYEQYF

SEQ ID NO: 759991 - protein, 12 aa, Homo sapiens
  CDR3 for alpha chain variable domain of TCR clone 379996 (TRAV27, TRAJ41)
CAGSNSGYALNF

SEQ ID NO: 759992 - protein, 15 aa, Homo sapiens
  CDR3 for beta chain variable domain of TCR clone 379996 (TRBV20-1, TRBJ1-5)
CSATSDRGLGQPQHF

SEQ ID NO: 759993 - protein, 14 aa, Homo sapiens
  CDR3 for alpha chain variable domain of TCR clone 379997 (TRAV8-3, TRAJ21)
CAVDARDNFNKFYF

SEQ ID NO: 759994 - protein, 16 aa, Homo sapiens
  CDR3 for beta chain variable domain of TCR clone 379997 (TRBV20-1, TRBJ2-1)
CSARDLAGHSYNEQLF

SEQ ID NO: 759995 - protein, 15 aa, Homo sapiens
  CDR3 for alpha chain variable domain of TCR clone 379998 (TRAV21, TRAJ52)
CAVRGGGTSYGKLTF

SEQ ID NO: 759996 - protein, 15 aa, Homo sapiens
  CDR3 for beta chain variable domain of TCR clone 379998 (TRBV18, TRBJ1-5)
CASSLSDWSPSPQPF

SEQ ID NO: 759997 - protein, 15 aa, Homo sapiens
  CDR3 for alpha chain variable domain of TCR clone 379999 (TRAV27, TRAJ38)
CAARRNAGNNRKLIW

SEQ ID NO: 759998 - protein, 16 aa, Homo sapiens
  CDR3 for beta chain variable domain of TCR clone 379999 (TRBV7-9, TRBJ1-2)
CASSLGFSSGEDGYTF

SEQ ID NO: 759999 - protein, 15 aa, Homo sapiens
  CDR3 for alpha chain variable domain of TCR clone 380000 (TRAV21, TRAJ17)
CAVDEQKAAGNKLTF

SEQ ID NO: 760000 - protein, 16 aa, Homo sapiens
  CDR3 for beta chain variable domain of TCR clone 380000 (TRBV18, TRBJ2-4)
CASSPPYSGAKNSQYF

SEQ ID NO: 760001 - protein, 15 aa, Homo sapiens
  CDR3 for alpha chain variable domain of TCR clone 380001 (TRAV3, TRAJ20)
CAVRDIKLSDYKLSF

SEQ ID NO: 760002 - protein, 17 aa, Homo sapiens
  CDR3 for beta chain variable domain of TCR clone 380001 (TRBV15, TRBJ1-5)
CATSRAPPGTRNQPQHF

SEQ ID NO: 760003 - protein, 13 aa, Homo sapiens
  CDR3 for alpha chain variable domain of TCR clone 380002 (TRAV12-3, TRAJ49)
CAMSRTTGNQFYF

SEQ ID NO: 760004 - protein, 16 aa, Homo sapiens
  CDR3 for beta chain variable domain of TCR clone 380002 (TRBV5-8, TRBJ2-2)
CASSLINPGGAGELFF

SEQ ID NO: 760005 - protein, 15 aa, Homo sapiens
  CDR3 for alpha chain variable domain of TCR clone 380003 (TRAV35, TRAJ50)
CAGQLRKTSYDKVIF

SEQ ID NO: 760006 - protein, 16 aa, Homo sapiens
  CDR3 for beta chain variable domain of TCR clone 380003 (TRBV13, TRBJ2-2)
CASSPRTGEHTGELFF

SEQ ID NO: 760007 - protein, 14 aa, Homo sapiens
  CDR3 for alpha chain variable domain of TCR clone 380004 (TRAV9-2, TRAJ39)
CALYIYNEGNMPTF

SEQ ID NO: 760008 - protein, 13 aa, Homo sapiens
  CDR3 for beta chain variable domain of TCR clone 380004 (TRBV20-1, TRBJ2-7)
CSATHTSGYEQYF

SEQ ID NO: 760009 - protein, 15 aa, Homo sapiens
  CDR3 for alpha chain variable domain of TCR clone 380005 (TRAV12-3, TRAJ6)
CAMSATTGGSYIPTF

SEQ ID NO: 760010 - protein, 15 aa, Homo sapiens
  CDR3 for beta chain variable domain of TCR clone 380005 (TRBV2, TRBJ2-5)
CASSEQGGYRETQYF

SEQ ID NO: 760011 - protein, 15 aa, Homo sapiens
  CDR3 for alpha chain variable domain of TCR clone 380006 (TRAV12-3, TRAJ6)
CAMSSASGGSYIPTF

SEQ ID NO: 760012 - protein, 13 aa, Homo sapiens
  CDR3 for beta chain variable domain of TCR clone 380006 (TRBV20-1, TRBJ1-2)
CSASTERIYGYTF

SEQ ID NO: 760013 - protein, 13 aa, Homo sapiens
  CDR3 for alpha chain variable domain of TCR clone 380007 (TRAV8-3, TRAJ28)
CAVGAVGSYQLTF

SEQ ID NO: 760014 - protein, 14 aa, Homo sapiens
  CDR3 for beta chain variable domain of TCR clone 380007 (TRBV20-1, TRBJ2-3)
CSARDGGSTDTQYF

SEQ ID NO: 760015 - protein, 14 aa, Homo sapiens
  CDR3 for alpha chain variable domain of TCR clone 380008 (TRAV1-2, TRAJ8)
CAVREDTGFQNLVF

SEQ ID NO: 760016 - protein, 15 aa, Homo sapiens
  CDR3 for beta chain variable domain of TCR clone 380008 (TRBV11-3, TRBJ2-3)
CASLKDGREGDTQYF

SEQ ID NO: 760017 - protein, 15 aa, Homo sapiens
  CDR3 for alpha chain variable domain of TCR clone 380009 (TRAV27, TRAJ17)
CRSTMSKSAGNKLTF

SEQ ID NO: 760018 - protein, 13 aa, Homo sapiens
  CDR3 for beta chain variable domain of TCR clone 380009 (TRBV18, TRBJ2-7)
CASQSGGGYEQYC

SEQ ID NO: 760019 - protein, 13 aa, Homo sapiens
  CDR3 for alpha chain variable domain of TCR clone 380010 (TRAV8-6, TRAJ49)
CAVITNTGNQFYF

SEQ ID NO: 760020 - protein, 14 aa, Homo sapiens
  CDR3 for beta chain variable domain of TCR clone 380010 (TRBV5-1, TRBJ2-7)
CASSRGESLYDQYF

SEQ ID NO: 760021 - protein, 15 aa, Homo sapiens
  CDR3 for alpha chain variable domain of TCR clone 380011 (TRAV1-2, TRAJ17)
CAVRGYGAAGNKLTF

SEQ ID NO: 760022 - protein, 14 aa, Homo sapiens
  CDR3 for beta chain variable domain of TCR clone 380011 (TRBV6-1, TRBJ1-3)
CASVQGGGGNTIYF

SEQ ID NO: 760023 - protein, 13 aa, Homo sapiens
  CDR3 for alpha chain variable domain of TCR clone 380012 (TRAV21, TRAJ27)
CAARPGNAGKLTF

SEQ ID NO: 760024 - protein, 14 aa, Homo sapiens
  CDR3 for beta chain variable domain of TCR clone 380012 (TRBV7-6, TRBJ2-3)
CASSSGTVTDTQYF

SEQ ID NO: 760025 - protein, 17 aa, Homo sapiens
  CDR3 for alpha chain variable domain of TCR clone 380013 (TRAV26-1, TRAJ37)
CIVRVITVSSNTGKLIF

SEQ ID NO: 760026 - protein, 18 aa, Homo sapiens
  CDR3 for beta chain variable domain of TCR clone 380013 (TRBV25-1, TRBJ1-2)
CASSGLQNGQGLIFGYTF

SEQ ID NO: 760027 - protein, 16 aa, Homo sapiens
  CDR3 for alpha chain variable domain of TCR clone 380014 (TRAV14/DV4, TRAJ54)
CAMREGRIQGAQKLVF

SEQ ID NO: 760028 - protein, 14 aa, Homo sapiens
  CDR3 for beta chain variable domain of TCR clone 380014 (TRBV5-1, TRBJ1-1)
CASSLQGASTEAFF

SEQ ID NO: 760029 - protein, 16 aa, Homo sapiens
  CDR3 for alpha chain variable domain of TCR clone 380015 (TRAV8-6, TRAJ27)
CAVSASLTPMQAHQPL

SEQ ID NO: 760030 - protein, 16 aa, Homo sapiens
  CDR3 for beta chain variable domain of TCR clone 380015 (TRBV10-3, TRBJ2-5)
CAISDPSGGAWETQYF

SEQ ID NO: 760031 - protein, 17 aa, Homo sapiens
  CDR3 for alpha chain variable domain of TCR clone 380016 (TRAV3, TRAJ12)
CALRDGGRMDSSYKLIF

SEQ ID NO: 760032 - protein, 15 aa, Homo sapiens
  CDR3 for beta chain variable domain of TCR clone 380016 (TRBV4-1, TRBJ1-4)
CASSDTGGTNEKLFF

SEQ ID NO: 760033 - protein, 13 aa, Homo sapiens
  CDR3 for alpha chain variable domain of TCR clone 380017 (TRAV3, TRAJ21)
CAVREPDFNKFYF

SEQ ID NO: 760034 - protein, 14 aa, Homo sapiens
  CDR3 for beta chain variable domain of TCR clone 380017 (TRBV6-1, TRBJ1-3)
CASVQGEGGNTIYF

SEQ ID NO: 760035 - protein, 14 aa, Homo sapiens
  CDR3 for alpha chain variable domain of TCR clone 380018 (TRAV2, TRAJ22)
CAVGRGGSARQLTF

SEQ ID NO: 760036 - protein, 15 aa, Homo sapiens
  CDR3 for beta chain variable domain of TCR clone 380018 (TRBV7-9, TRBJ1-5)
CASSQGHQPNQPQHF

SEQ ID NO: 760037 - protein, 14 aa, Homo sapiens
  CDR3 for alpha chain variable domain of TCR clone 380019 (TRAV9-2, TRAJ39)
CALYIYNAGNMLTF

SEQ ID NO: 760038 - protein, 12 aa, Homo sapiens
  CDR3 for beta chain variable domain of TCR clone 380019 (TRBV4-1, TRBJ2-1)
CASSQPGQGQFF

SEQ ID NO: 760039 - protein, 14 aa, Homo sapiens
  CDR3 for alpha chain variable domain of TCR clone 380020 (TRAV3, TRAJ28)
CAVRRGAGSYQLTF

SEQ ID NO: 760040 - protein, 16 aa, Homo sapiens
  CDR3 for beta chain variable domain of TCR clone 380020 (TRBV4-1, TRBJ2-7)
CASSQEWTSRPLEQYF

SEQ ID NO: 760041 - protein, 12 aa, Homo sapiens
  CDR3 for alpha chain variable domain of TCR clone 380021 (TRAV3, TRAJ20)
CAVRDGDYKLSF

SEQ ID NO: 760042 - protein, 15 aa, Homo sapiens
  CDR3 for beta chain variable domain of TCR clone 380021 (TRBV27, TRBJ1-6)
CASSFDRGLGSPLHF

SEQ ID NO: 760043 - protein, 13 aa, Homo sapiens
  CDR3 for alpha chain variable domain of TCR clone 380022 (TRAV24, TRAJ23)
CASFLVQGGKLIF

SEQ ID NO: 760044 - protein, 15 aa, Homo sapiens
  CDR3 for beta chain variable domain of TCR clone 380022 (TRBV4-1, TRBJ2-7)
CASSQQGQGFDEQYF

SEQ ID NO: 760045 - protein, 16 aa, Homo sapiens
  CDR3 for alpha chain variable domain of TCR clone 380023 (TRAV3, TRAJ37)
CAVRVRASGNTGKLIF

SEQ ID NO: 760046 - protein, 16 aa, Homo sapiens
  CDR3 for beta chain variable domain of TCR clone 380023 (TRBV19, TRBJ2-1)
CASSKAGPSAYNEQSF

SEQ ID NO: 760047 - protein, 10 aa, Homo sapiens
  CDR3 for alpha chain variable domain of TCR clone 380024 (TRAV5, TRAJ34)
CAEDTDKLIF

SEQ ID NO: 760048 - protein, 14 aa, Homo sapiens
  CDR3 for beta chain variable domain of TCR clone 380024 (TRBV7-8, TRBJ2-3)
CASSLEAGTDTQYF

SEQ ID NO: 760049 - protein, 17 aa, Homo sapiens
  CDR3 for alpha chain variable domain of TCR clone 380025 (TRAV13-1, TRAJ52)
CAASSGAGGTSYGKLTF

SEQ ID NO: 760050 - protein, 15 aa, Homo sapiens
  CDR3 for beta chain variable domain of TCR clone 380025 (TRBV2, TRBJ2-1)
CASSELAGCYNEQFF

SEQ ID NO: 760051 - protein, 12 aa, Homo sapiens
  CDR3 for alpha chain variable domain of TCR clone 380026 (TRAV12-3, TRAJ17)
CAMTLTGNKLTF

SEQ ID NO: 760052 - protein, 16 aa, Homo sapiens
  CDR3 for beta chain variable domain of TCR clone 380026 (TRBV19, TRBJ2-1)
CASSKAGPSSYNEQFC

SEQ ID NO: 760053 - protein, 15 aa, Homo sapiens
  CDR3 for alpha chain variable domain of TCR clone 380027 (TRAV29/DV5, TRAJ53)
CAASASGGSNYKLTF

SEQ ID NO: 760054 - protein, 17 aa, Homo sapiens
  CDR3 for beta chain variable domain of TCR clone 380027 (TRBV7-8, TRBJ2-6)
CGSSAGTGGAGANVLTF

SEQ ID NO: 760055 - protein, 11 aa, Homo sapiens
  CDR3 for alpha chain variable domain of TCR clone 380028 (TRAV2, TRAJ13)
CASGGYQIVTF

SEQ ID NO: 760056 - protein, 16 aa, Homo sapiens
  CDR3 for beta chain variable domain of TCR clone 380028 (TRBV6-1, TRBJ2-5)
CASSETLDRGAETQYF

SEQ ID NO: 760057 - protein, 14 aa, Homo sapiens
  CDR3 for alpha chain variable domain of TCR clone 380029 (TRAV12-1, TRAJ12)
CVGTRMDSSYKLIF

SEQ ID NO: 760058 - protein, 14 aa, Homo sapiens
  CDR3 for beta chain variable domain of TCR clone 380029 (TRBV4-1, TRBJ2-7)
CASSPVAGGDEQYF

SEQ ID NO: 760059 - protein, 14 aa, Homo sapiens
  CDR3 for alpha chain variable domain of TCR clone 380030 (TRAV13-2, TRAJ9)
CAENLETGCFKTIF

SEQ ID NO: 760060 - protein, 16 aa, Homo sapiens
  CDR3 for beta chain variable domain of TCR clone 380030 (TRBV28, TRBJ2-5)
CASSFSPAGGWETQYF

SEQ ID NO: 760061 - protein, 18 aa, Homo sapiens
  CDR3 for alpha chain variable domain of TCR clone 380031 (TRAV17, TRAJ28)
CATDPPRGSGAGSYQLTF

SEQ ID NO: 760062 - protein, 13 aa, Homo sapiens
  CDR3 for beta chain variable domain of TCR clone 380031 (TRBV7-3, TRBJ2-1)
CASSPVAYNEQFF

SEQ ID NO: 760063 - protein, 15 aa, Homo sapiens
  CDR3 for alpha chain variable domain of TCR clone 380032 (TRAV27, TRAJ56)
CAGRDGTGANSKLTL

SEQ ID NO: 760064 - protein, 12 aa, Homo sapiens
  CDR3 for beta chain variable domain of TCR clone 380032 (TRBV27, TRBJ2-7)
CASSGGFYEQYF

SEQ ID NO: 760065 - protein, 10 aa, Homo sapiens
  CDR3 for alpha chain variable domain of TCR clone 380033 (TRAV8-4, TRAJ39)
CAVAGNMLTF

SEQ ID NO: 760066 - protein, 13 aa, Homo sapiens
  CDR3 for beta chain variable domain of TCR clone 380033 (TRBV6-9, TRBJ2-5)
CASKGDGRRTQYF

SEQ ID NO: 760067 - protein, 14 aa, Homo sapiens
  CDR3 for alpha chain variable domain of TCR clone 380034 (TRAV26-1, TRAJ48)
CIVIVGFGNEKLTF

SEQ ID NO: 760068 - protein, 13 aa, Homo sapiens
  CDR3 for beta chain variable domain of TCR clone 380034 (TRBV11-3, TRBJ2-3)
CASSHDTKDTQYF

SEQ ID NO: 760069 - protein, 13 aa, Homo sapiens
  CDR3 for alpha chain variable domain of TCR clone 380035 (TRAV20, TRAJ21)
CAVEGYNFNKFYF

SEQ ID NO: 760070 - protein, 14 aa, Homo sapiens
  CDR3 for beta chain variable domain of TCR clone 380035 (TRBV12-5, TRBJ2-5)
CASGSRTHQETQYL

SEQ ID NO: 760071 - protein, 15 aa, Homo sapiens
  CDR3 for alpha chain variable domain of TCR clone 380036 (TRAV20, TRAJ6)
CAVRLQSGGSYIPTF

SEQ ID NO: 760072 - protein, 14 aa, Homo sapiens
  CDR3 for beta chain variable domain of TCR clone 380036 (TRBV12-4, TRBJ2-7)
CACSASGGWNEQYF

SEQ ID NO: 760073 - protein, 16 aa, Homo sapiens
  CDR3 for alpha chain variable domain of TCR clone 380037 (TRAV14/DV4, TRAJ53)
CAMREGGGGSNYKLTF

SEQ ID NO: 760074 - protein, 14 aa, Homo sapiens
  CDR3 for beta chain variable domain of TCR clone 380037 (TRBV28, TRBJ2-4)
CASTQVTGVNIQYF

SEQ ID NO: 760075 - protein, 10 aa, Homo sapiens
  CDR3 for alpha chain variable domain of TCR clone 380038 (TRAV1-2, TRAJ34)
CAVNTDKLIF

SEQ ID NO: 760076 - protein, 13 aa, Homo sapiens
  CDR3 for beta chain variable domain of TCR clone 380038 (TRBV10-1, TRBJ2-1)
CASGAGPDNEQFF

SEQ ID NO: 760077 - protein, 14 aa, Homo sapiens
  CDR3 for alpha chain variable domain of TCR clone 380039 (TRAV12-3, TRAJ15)
CAMIPPQAGTALIF

SEQ ID NO: 760078 - protein, 12 aa, Homo sapiens
  CDR3 for beta chain variable domain of TCR clone 380039 (TRBV11-2, TRBJ2-2)
CASSVGGGELFF

SEQ ID NO: 760079 - protein, 19 aa, Homo sapiens
  CDR3 for alpha chain variable domain of TCR clone 380040 (TRAV3, TRAJ6)
CAVRDRNPSRSGGSYIPTF

SEQ ID NO: 760080 - protein, 15 aa, Homo sapiens
  CDR3 for beta chain variable domain of TCR clone 380040 (TRBV18, TRBJ2-7)
CASCPTFMDSYEQYF

SEQ ID NO: 760081 - protein, 14 aa, Homo sapiens
  CDR3 for alpha chain variable domain of TCR clone 380041 (TRAV8-3, TRAJ40)
CAVGVISGTYKYIF

SEQ ID NO: 760082 - protein, 16 aa, Homo sapiens
  CDR3 for beta chain variable domain of TCR clone 380041 (TRBV27, TRBJ2-2)
CASSFRGLVRTGELFF

SEQ ID NO: 760083 - protein, 14 aa, Homo sapiens
  CDR3 for alpha chain variable domain of TCR clone 380042 (TRAV9-2, TRAJ39)
CALYIYNAGNILPF

SEQ ID NO: 760084 - protein, 14 aa, Homo sapiens
  CDR3 for beta chain variable domain of TCR clone 380042 (TRBV6-1, TRBJ1-3)
CASVQGGGGNTIYF

SEQ ID NO: 760085 - protein, 10 aa, Homo sapiens
  CDR3 for alpha chain variable domain of TCR clone 380043 (TRAV30, TRAJ20)
CGTDDYKLSF

SEQ ID NO: 760086 - protein, 14 aa, Homo sapiens
  CDR3 for beta chain variable domain of TCR clone 380043 (TRBV20-1, TRBJ1-2)
CSASEQGAVYGYSF

SEQ ID NO: 760087 - protein, 17 aa, Homo sapiens
  CDR3 for alpha chain variable domain of TCR clone 380044 (TRAV3, TRAJ42)
CAVRDRDYGGSQGNLIL

SEQ ID NO: 760088 - protein, 12 aa, Homo sapiens
  CDR3 for beta chain variable domain of TCR clone 380044 (TRBV11-2, TRBJ2-1)
CASSHGNNEQFF

SEQ ID NO: 760089 - protein, 13 aa, Homo sapiens
  CDR3 for alpha chain variable domain of TCR clone 380045 (TRAV12-3, TRAJ13)
CAMTSGGYQKVTF

SEQ ID NO: 760090 - protein, 15 aa, Homo sapiens
  CDR3 for beta chain variable domain of TCR clone 380045 (TRBV19, TRBJ1-1)
CASTSGQIQNTEAFF

SEQ ID NO: 760091 - protein, 14 aa, Homo sapiens
  CDR3 for alpha chain variable domain of TCR clone 380046 (TRAV13-1, TRAJ35)
CAASKGGFGNVLHC

SEQ ID NO: 760092 - protein, 15 aa, Homo sapiens
  CDR3 for beta chain variable domain of TCR clone 380046 (TRBV7-9, TRBJ2-1)
CASSDVAGGYNEQFF

SEQ ID NO: 760093 - protein, 14 aa, Homo sapiens
  CDR3 for alpha chain variable domain of TCR clone 380047 (TRAV1-2, TRAJ27)
CAPAEYTNAGKSTF

SEQ ID NO: 760094 - protein, 18 aa, Homo sapiens
  CDR3 for beta chain variable domain of TCR clone 380047 (TRBV28, TRBJ1-2)
CASRQQQGKRGSNYVYTF

SEQ ID NO: 760095 - protein, 17 aa, Homo sapiens
  CDR3 for alpha chain variable domain of TCR clone 380048 (TRAV3, TRAJ6)
CAVRAGPRAGGSYTPTF

SEQ ID NO: 760096 - protein, 14 aa, Homo sapiens
  CDR3 for beta chain variable domain of TCR clone 380048 (TRBV7-2, TRBJ2-7)
CASSPKTSFYEQYF

SEQ ID NO: 760097 - protein, 14 aa, Homo sapiens
  CDR3 for alpha chain variable domain of TCR clone 380049 (TRAV8-2, TRAJ11)
CVVSEKSGYSTLAF

SEQ ID NO: 760098 - protein, 16 aa, Homo sapiens
  CDR3 for beta chain variable domain of TCR clone 380049 (TRBV28, TRBJ2-1)
CASSSPEYPRDNEQFF

SEQ ID NO: 760099 - protein, 14 aa, Homo sapiens
  CDR3 for alpha chain variable domain of TCR clone 380050 (TRAV8-3, TRAJ44)
CAVGNTGTASKLTF

SEQ ID NO: 760100 - protein, 15 aa, Homo sapiens
  CDR3 for beta chain variable domain of TCR clone 380050 (TRBV28, TRBJ2-7)
CGSSFRGQGRYEQYF

SEQ ID NO: 760101 - protein, 13 aa, Homo sapiens
  CDR3 for alpha chain variable domain of TCR clone 380051 (TRAV17, TRAJ9)
CATFLTGGFKTIF

SEQ ID NO: 760102 - protein, 16 aa, Homo sapiens
  CDR3 for beta chain variable domain of TCR clone 380051 (TRBV5-7, TRBJ2-3)
CASSPSGGLKTETLFF

SEQ ID NO: 760103 - protein, 15 aa, Homo sapiens
  CDR3 for alpha chain variable domain of TCR clone 380052 (TRAV26-1, TRAJ40)
CIVRVTTSGTYKYIF

SEQ ID NO: 760104 - protein, 18 aa, Homo sapiens
  CDR3 for beta chain variable domain of TCR clone 380052 (TRBV11-2, TRBJ2-3)
CASSLGGASRGAPNTQYF

SEQ ID NO: 760105 - protein, 13 aa, Homo sapiens
  CDR3 for alpha chain variable domain of TCR clone 380053 (TRAV21, TRAJ27)
CAASPGNPGKSTF

SEQ ID NO: 760106 - protein, 14 aa, Homo sapiens
  CDR3 for beta chain variable domain of TCR clone 380053 (TRBV7-6, TRBJ2-3)
CASSLGTVTDTQYF

SEQ ID NO: 760107 - protein, 11 aa, Homo sapiens
  CDR3 for alpha chain variable domain of TCR clone 380054 (TRAV35, TRAJ30)
CAGPGADKIIF

SEQ ID NO: 760108 - protein, 12 aa, Homo sapiens
  CDR3 for beta chain variable domain of TCR clone 380054 (TRBV27, TRBJ2-1)
CASRGFYNEQFF

SEQ ID NO: 760109 - protein, 13 aa, Homo sapiens
  CDR3 for alpha chain variable domain of TCR clone 380055 (TRAV27, TRAJ41)
CAGQGNSGNALNF

SEQ ID NO: 760110 - protein, 14 aa, Homo sapiens
  CDR3 for beta chain variable domain of TCR clone 380055 (TRBV7-2, TRBJ1-1)
CASSFLTGTTEAFF

SEQ ID NO: 760111 - protein, 15 aa, Homo sapiens
  CDR3 for alpha chain variable domain of TCR clone 380056 (TRAV26-2, TRAJ54)
CILRDVGQGAQKLAF

SEQ ID NO: 760112 - protein, 13 aa, Homo sapiens
  CDR3 for beta chain variable domain of TCR clone 380056 (TRBV7-9, TRBJ1-1)
CASSLAGVTEAFF

SEQ ID NO: 760113 - protein, 13 aa, Homo sapiens
  CDR3 for alpha chain variable domain of TCR clone 380057 (TRAV3, TRAJ27)
CAVRPLGAGKSTF

SEQ ID NO: 760114 - protein, 13 aa, Homo sapiens
  CDR3 for beta chain variable domain of TCR clone 380057 (TRBV7-9, TRBJ2-3)
CASSPESTDTQYF

SEQ ID NO: 760115 - protein, 18 aa, Homo sapiens
  CDR3 for alpha chain variable domain of TCR clone 380058 (TRAV26-2, TRAJ45)
CILRLWGYSGGGADGLTF

SEQ ID NO: 760116 - protein, 15 aa, Homo sapiens
  CDR3 for beta chain variable domain of TCR clone 380058 (TRBV4-3, TRBJ1-1)
CASSQELGRGTEAFF

SEQ ID NO: 760117 - protein, 12 aa, Homo sapiens
  CDR3 for alpha chain variable domain of TCR clone 380059 (TRAV8-3, TRAJ20)
CAVGANDYKLSF

SEQ ID NO: 760118 - protein, 13 aa, Homo sapiens
  CDR3 for beta chain variable domain of TCR clone 380059 (TRBV12-4, TRBJ2-5)
CASRLAVQETQYF

SEQ ID NO: 760119 - protein, 13 aa, Homo sapiens
  CDR3 for alpha chain variable domain of TCR clone 380060 (TRAV12-3, TRAJ21)
CAPGPHNFNKFYF

SEQ ID NO: 760120 - protein, 15 aa, Homo sapiens
  CDR3 for beta chain variable domain of TCR clone 380060 (TRBV27, TRBJ1-6)
CASSFDRGLGSPLHF

SEQ ID NO: 760121 - protein, 14 aa, Homo sapiens
  CDR3 for alpha chain variable domain of TCR clone 380061 (TRAV21, TRAJ45)
CAVSSGGGADGLTF

SEQ ID NO: 760122 - protein, 15 aa, Homo sapiens
  CDR3 for beta chain variable domain of TCR clone 380061 (TRBV6-1, TRBJ2-4)
CASSEAAWTINIRYF

SEQ ID NO: 760123 - protein, 14 aa, Homo sapiens
  CDR3 for alpha chain variable domain of TCR clone 380062 (TRAV17, TRAJ54)
CAADANQGAQKLVF

SEQ ID NO: 760124 - protein, 14 aa, Homo sapiens
  CDR3 for beta chain variable domain of TCR clone 380062 (TRBV12-5, TRBJ2-5)
CASGSRTHQETQYF

SEQ ID NO: 760125 - protein, 10 aa, Homo sapiens
  CDR3 for alpha chain variable domain of TCR clone 380063 (TRAV2, TRAJ34)
CAAVNDKLIF

SEQ ID NO: 760126 - protein, 15 aa, Homo sapiens
  CDR3 for beta chain variable domain of TCR clone 380063 (TRBV20-1, TRBJ2-3)
CSARPSGFYTDTQYF

SEQ ID NO: 760127 - protein, 16 aa, Homo sapiens
  CDR3 for alpha chain variable domain of TCR clone 380064 (TRAV30, TRAJ24)
CGPEIVDADSWGKFQF

SEQ ID NO: 760128 - protein, 15 aa, Homo sapiens
  CDR3 for beta chain variable domain of TCR clone 380064 (TRBV19, TRBJ1-2)
CASSVGQVLNYGYTF

SEQ ID NO: 760129 - protein, 13 aa, Homo sapiens
  CDR3 for alpha chain variable domain of TCR clone 380065 (TRAV12-1, TRAJ31)
CVVNMNNNARLMF

SEQ ID NO: 760130 - protein, 15 aa, Homo sapiens
  CDR3 for beta chain variable domain of TCR clone 380065 (TRBV4-1, TRBJ1-2)
CASSQGQRAAYGCTF

SEQ ID NO: 760131 - protein, 14 aa, Homo sapiens
  CDR3 for alpha chain variable domain of TCR clone 380066 (TRAV8-1, TRAJ32)
CAVNARGATNNLIF

SEQ ID NO: 760132 - protein, 14 aa, Homo sapiens
  CDR3 for beta chain variable domain of TCR clone 380066 (TRBV9, TRBJ2-7)
CASSVGVGSYEQYF

SEQ ID NO: 760133 - protein, 13 aa, Homo sapiens
  CDR3 for alpha chain variable domain of TCR clone 380067 (TRAV21, TRAJ20)
CAGGVFADYKLSF

SEQ ID NO: 760134 - protein, 14 aa, Homo sapiens
  CDR3 for beta chain variable domain of TCR clone 380067 (TRBV4-2, TRBJ1-4)
CASSPSSGNEKLFF

SEQ ID NO: 760135 - protein, 14 aa, Homo sapiens
  CDR3 for alpha chain variable domain of TCR clone 380068 (TRAV29/DV5, TRAJ20)
CAASAPIEDYKLSF

SEQ ID NO: 760136 - protein, 19 aa, Homo sapiens
  CDR3 for beta chain variable domain of TCR clone 380068 (TRBV19, TRBJ2-5)
CASSIGQVTDFFLGETQYF

SEQ ID NO: 760137 - protein, 14 aa, Homo sapiens
  CDR3 for alpha chain variable domain of TCR clone 380069 (TRAV1-2, TRAJ8)
CAVREVTGFQKLVF

SEQ ID NO: 760138 - protein, 16 aa, Homo sapiens
  CDR3 for beta chain variable domain of TCR clone 380069 (TRBV19, TRBJ2-1)
CASSKAGPSSYNEQFF

SEQ ID NO: 760139 - protein, 11 aa, Homo sapiens
  CDR3 for alpha chain variable domain of TCR clone 380070 (TRAV3, TRAJ21)
CAVGNVNKFYF

SEQ ID NO: 760140 - protein, 16 aa, Homo sapiens
  CDR3 for beta chain variable domain of TCR clone 380070 (TRBV19, TRBJ2-1)
CASSKAGPGSYNEQFF

SEQ ID NO: 760141 - protein, 13 aa, Homo sapiens
  CDR3 for alpha chain variable domain of TCR clone 380071 (TRAV8-1, TRAJ31)
CAVNLNNNARLMF

SEQ ID NO: 760142 - protein, 16 aa, Homo sapiens
  CDR3 for beta chain variable domain of TCR clone 380071 (TRBV19, TRBJ2-1)
CASSKAGPSSYNEQFF

SEQ ID NO: 760143 - protein, 11 aa, Homo sapiens
  CDR3 for alpha chain variable domain of TCR clone 380072 (TRAV12-2, TRAJ33)
CAVTSNYQLIW

SEQ ID NO: 760144 - protein, 13 aa, Homo sapiens
  CDR3 for beta chain variable domain of TCR clone 380072 (TRBV12-4, TRBJ2-2)
CQQPGGEHRGAVF

SEQ ID NO: 760145 - protein, 14 aa, Homo sapiens
  CDR3 for alpha chain variable domain of TCR clone 380073 (TRAV12-1, TRAJ17)
YVVNYKAAGNKLTF

SEQ ID NO: 760146 - protein, 14 aa, Homo sapiens
  CDR3 for beta chain variable domain of TCR clone 380073 (TRBV19, TRBJ2-1)
CASPTFVLSGEQFF

SEQ ID NO: 760147 - protein, 15 aa, Homo sapiens
  CDR3 for alpha chain variable domain of TCR clone 380074 (TRAV35, TRAJ52)
CAGPRGGTSDGKLTF

SEQ ID NO: 760148 - protein, 17 aa, Homo sapiens
  CDR3 for beta chain variable domain of TCR clone 380074 (TRBV11-2, TRBJ2-1)
CASSLYPPGVEYNEQFF

SEQ ID NO: 760149 - protein, 12 aa, Homo sapiens
  CDR3 for alpha chain variable domain of TCR clone 380075 (TRAV2, TRAJ10)
CASTGGGNKLTF

SEQ ID NO: 760150 - protein, 15 aa, Homo sapiens
  CDR3 for beta chain variable domain of TCR clone 380075 (TRBV19, TRBJ1-5)
CASSMRGYQRSILVM

SEQ ID NO: 760151 - protein, 16 aa, Homo sapiens
  CDR3 for alpha chain variable domain of TCR clone 380076 (TRAV30, TRAJ24)
CGKEIVDADSWGKFQF

SEQ ID NO: 760152 - protein, 14 aa, Homo sapiens
  CDR3 for beta chain variable domain of TCR clone 380076 (TRBV12-5, TRBJ2-5)
CASGSRTHQETQYC

SEQ ID NO: 760153 - protein, 13 aa, Homo sapiens
  CDR3 for alpha chain variable domain of TCR clone 380077 (TRAV21, TRAJ15)
CAVAYQAGTTLIF

SEQ ID NO: 760154 - protein, 14 aa, Homo sapiens
  CDR3 for beta chain variable domain of TCR clone 380077 (TRBV27, TRBJ2-2)
CASSLGAATGELFF

SEQ ID NO: 760155 - protein, 13 aa, Homo sapiens
  CDR3 for alpha chain variable domain of TCR clone 380078 (TRAV20, TRAJ20)
CAVQALNDYKLRF

SEQ ID NO: 760156 - protein, 13 aa, Homo sapiens
  CDR3 for beta chain variable domain of TCR clone 380078 (TRBV7-9, TRBJ1-4)
CASSLPGIEKLFF

SEQ ID NO: 760157 - protein, 14 aa, Homo sapiens
  CDR3 for alpha chain variable domain of TCR clone 380079 (TRAV12-3, TRAJ56)
CAMSVTGANSKLTF

SEQ ID NO: 760158 - protein, 17 aa, Homo sapiens
  CDR3 for beta chain variable domain of TCR clone 380079 (TRBV20-1, TRBJ2-3)
CSASLLGRGGSADKQYF

SEQ ID NO: 760159 - protein, 15 aa, Homo sapiens
  CDR3 for alpha chain variable domain of TCR clone 380080 (TRAV4, TRAJ26)
CLVGDMNNYGQNFVF

SEQ ID NO: 760160 - protein, 17 aa, Homo sapiens
  CDR3 for beta chain variable domain of TCR clone 380080 (TRBV11-2, TRBJ2-1)
CASSLYPPGVEYNEQFF

SEQ ID NO: 760161 - protein, 14 aa, Homo sapiens
  CDR3 for alpha chain variable domain of TCR clone 380081 (TRAV16, TRAJ48)
CALTPGFGNEKLTF

SEQ ID NO: 760162 - protein, 15 aa, Homo sapiens
  CDR3 for beta chain variable domain of TCR clone 380081 (TRBV28, TRBJ2-7)
CASSLISGGSYEQYF

SEQ ID NO: 760163 - protein, 14 aa, Homo sapiens
  CDR3 for alpha chain variable domain of TCR clone 380082 (TRAV1-2, TRAJ8)
CAVREDTGFQKLVF

SEQ ID NO: 760164 - protein, 16 aa, Homo sapiens
  CDR3 for beta chain variable domain of TCR clone 380082 (TRBV19, TRBJ2-2)
CASSTARASNTGELFF

SEQ ID NO: 760165 - protein, 13 aa, Homo sapiens
  CDR3 for alpha chain variable domain of TCR clone 380083 (TRAV20, TRAJ35)
CAVQASFGNVLHC

SEQ ID NO: 760166 - protein, 20 aa, Homo sapiens
  CDR3 for beta chain variable domain of TCR clone 380083 (TRBV28, TRBJ2-1)
CASTPIGRSPGLAGGNEQFF

SEQ ID NO: 760167 - protein, 14 aa, Homo sapiens
  CDR3 for alpha chain variable domain of TCR clone 380084 (TRAV12-3, TRAJ6)
CAMSATGGSYIPTF

SEQ ID NO: 760168 - protein, 15 aa, Homo sapiens
  CDR3 for beta chain variable domain of TCR clone 380084 (TRBV10-3, TRBJ2-3)
CAISLTSGGTDTQYF

SEQ ID NO: 760169 - protein, 14 aa, Homo sapiens
  CDR3 for alpha chain variable domain of TCR clone 380085 (TRAV20, TRAJ42)
CAVQAGGSQGNLIF

SEQ ID NO: 760170 - protein, 15 aa, Homo sapiens
  CDR3 for beta chain variable domain of TCR clone 380085 (TRBV20-1, TRBJ2-7)
CSARDRVSGMDEQYF

SEQ ID NO: 760171 - protein, 15 aa, Homo sapiens
  CDR3 for alpha chain variable domain of TCR clone 380086 (TRAV12-1, TRAJ41)
CVVNSRAGSGYALNF

SEQ ID NO: 760172 - protein, 12 aa, Homo sapiens
  CDR3 for beta chain variable domain of TCR clone 380086 (TRBV11-2, TRBJ2-2)
CASSLGGGELFF

SEQ ID NO: 760173 - protein, 17 aa, Homo sapiens
  CDR3 for alpha chain variable domain of TCR clone 380087 (TRAV3, TRAJ6)
CAVIDGPRAGGSYVPTF

SEQ ID NO: 760174 - protein, 14 aa, Homo sapiens
  CDR3 for beta chain variable domain of TCR clone 380087 (TRBV7-2, TRBJ2-7)
CASSPKTSFYEQYF

SEQ ID NO: 760175 - protein, 14 aa, Homo sapiens
  CDR3 for alpha chain variable domain of TCR clone 380088 (TRAV3, TRAJ27)
CAVRDDTNACKSNF

SEQ ID NO: 760176 - protein, 15 aa, Homo sapiens
  CDR3 for beta chain variable domain of TCR clone 380088 (TRBV7-7, TRBJ2-2)
CATSKLAKNTGELFF

SEQ ID NO: 760177 - protein, 13 aa, Homo sapiens
  CDR3 for alpha chain variable domain of TCR clone 380089 (TRAV22, TRAJ12)
CAGRMDSSYKLIF

SEQ ID NO: 760178 - protein, 16 aa, Homo sapiens
  CDR3 for beta chain variable domain of TCR clone 380089 (TRBV19, TRBJ2-2)
CASRSPGTGATGELFF

SEQ ID NO: 760179 - protein, 23 aa, Homo sapiens
  CDR3 for alpha chain variable domain of TCR clone 380090 (TRAV26-1, TRAJ38)
CIADNAGNNHIQNPDPAVYQLRD

SEQ ID NO: 760180 - protein, 15 aa, Homo sapiens
  CDR3 for beta chain variable domain of TCR clone 380090 (TRBV7-9, TRBJ2-7)
CASSSSGLAVYEQYF

SEQ ID NO: 760181 - protein, 15 aa, Homo sapiens
  CDR3 for alpha chain variable domain of TCR clone 380091 (TRAV36/DV7, TRAJ54)
CAVEKPVQGAQKLVL

SEQ ID NO: 760182 - protein, 14 aa, Homo sapiens
  CDR3 for beta chain variable domain of TCR clone 380091 (TRBV12-4, TRBJ1-1)
CASSSARGYTEAFF

SEQ ID NO: 760183 - protein, 14 aa, Homo sapiens
  CDR3 for alpha chain variable domain of TCR clone 380092 (TRAV1-2, TRAJ16)
FAVNRFSDGQKLRF

SEQ ID NO: 760184 - protein, 15 aa, Homo sapiens
  CDR3 for beta chain variable domain of TCR clone 380092 (TRBV6-6, TRBJ2-7)
CASSYSYGGSYEQYF

SEQ ID NO: 760185 - protein, 14 aa, Homo sapiens
  CDR3 for alpha chain variable domain of TCR clone 380093 (TRAV13-2, TRAJ11)
CAETGYSGYSTLTF

SEQ ID NO: 760186 - protein, 11 aa, Homo sapiens
  CDR3 for beta chain variable domain of TCR clone 380093 (TRBV10-3, TRBJ2-7)
CAISEGLEQYF

SEQ ID NO: 760187 - protein, 13 aa, Homo sapiens
  CDR3 for alpha chain variable domain of TCR clone 380094 (TRAV3, TRAJ43)
CAVRDTRGGDMRF

SEQ ID NO: 760188 - protein, 15 aa, Homo sapiens
  CDR3 for beta chain variable domain of TCR clone 380094 (TRBV6-5, TRBJ1-5)
CASSYSRRSNQHQHF

SEQ ID NO: 760189 - protein, 15 aa, Homo sapiens
  CDR3 for alpha chain variable domain of TCR clone 380095 (TRAV3, TRAJ3)
CAVRDGHSGASKIIF

SEQ ID NO: 760190 - protein, 17 aa, Homo sapiens
  CDR3 for beta chain variable domain of TCR clone 380095 (TRBV25-1, TRBJ2-7)
CASSDARVVFSSYEQYF

SEQ ID NO: 760191 - protein, 13 aa, Homo sapiens
  CDR3 for alpha chain variable domain of TCR clone 380096 (TRAV13-2, TRAJ49)
CAENTNTGNQFYF

SEQ ID NO: 760192 - protein, 16 aa, Homo sapiens
  CDR3 for beta chain variable domain of TCR clone 380096 (TRBV7-9, TRBJ2-3)
CASSPWREVGTDTQYF

SEQ ID NO: 760193 - protein, 20 aa, Homo sapiens
  CDR3 for alpha chain variable domain of TCR clone 380097 (TRAV12-3, TRAJ41)
SLFIRDSQPSDSATPEALNF

SEQ ID NO: 760194 - protein, 15 aa, Homo sapiens
  CDR3 for beta chain variable domain of TCR clone 380097 (TRBV6-3, TRBJ2-7)
CASSSPGTVFCEQYF

SEQ ID NO: 760195 - protein, 14 aa, Homo sapiens
  CDR3 for alpha chain variable domain of TCR clone 380098 (TRAV12-2, TRAJ13)
CAVKQTGGYQKVTF

SEQ ID NO: 760196 - protein, 16 aa, Homo sapiens
  CDR3 for beta chain variable domain of TCR clone 380098 (TRBV7-2, TRBJ2-1)
CASSLRWGRENNEQFF

SEQ ID NO: 760197 - protein, 15 aa, Homo sapiens
  CDR3 for alpha chain variable domain of TCR clone 380099 (TRAV8-3, TRAJ45)
CASSYSGGGADGPPF

SEQ ID NO: 760198 - protein, 13 aa, Homo sapiens
  CDR3 for beta chain variable domain of TCR clone 380099 (TRBV10-3, TRBJ2-7)
CASKLAVNYEQYF

SEQ ID NO: 760199 - protein, 14 aa, Homo sapiens
  CDR3 for alpha chain variable domain of TCR clone 380100 (TRAV12-1, TRAJ3)
CVVILYSSASKIIF

SEQ ID NO: 760200 - protein, 15 aa, Homo sapiens
  CDR3 for beta chain variable domain of TCR clone 380100 (TRBV28, TRBJ2-1)
CASSIIAGGRSEQFF

SEQ ID NO: 760201 - protein, 16 aa, Homo sapiens
  CDR3 for alpha chain variable domain of TCR clone 380101 (TRAV3, TRAJ10)
CAVRDMRAGGGNKITF

SEQ ID NO: 760202 - protein, 13 aa, Homo sapiens
  CDR3 for beta chain variable domain of TCR clone 380101 (TRBV12-4, TRBJ2-7)
CASSPTETYEQYF

SEQ ID NO: 760203 - protein, 12 aa, Homo sapiens
  CDR3 for alpha chain variable domain of TCR clone 380102 (TRAV27, TRAJ42)
CAGGGSQGNLIF

SEQ ID NO: 760204 - protein, 12 aa, Homo sapiens
  CDR3 for beta chain variable domain of TCR clone 380102 (TRBV7-8, TRBJ2-7)
CASSLGDREQYF

SEQ ID NO: 760205 - protein, 23 aa, Homo sapiens
  CDR3 for alpha chain variable domain of TCR clone 380103 (TRAV26-1, )
CIADSAGNNHTQNPDPAVYQLRD

SEQ ID NO: 760206 - protein, 13 aa, Homo sapiens
  CDR3 for beta chain variable domain of TCR clone 380103 (TRBV20-1, TRBJ2-1)
CSARPSPRDEQFF

SEQ ID NO: 760207 - protein, 15 aa, Homo sapiens
  CDR3 for alpha chain variable domain of TCR clone 380104 (TRAV8-3, TRAJ40)
CAAPSLGSGTYKYIF

SEQ ID NO: 760208 - protein, 16 aa, Homo sapiens
  CDR3 for beta chain variable domain of TCR clone 380104 (TRBV7-3, TRBJ2-3)
RASSLSGYRPEDTQYF

SEQ ID NO: 760209 - protein, 15 aa, Homo sapiens
  CDR3 for alpha chain variable domain of TCR clone 380105 (TRAV30, TRAJ32)
CGTEILGGAPNKLIF

SEQ ID NO: 760210 - protein, 13 aa, Homo sapiens
  CDR3 for beta chain variable domain of TCR clone 380105 (TRBV6-3, TRBJ2-7)
CASSFSGGYEQYF

SEQ ID NO: 760211 - protein, 15 aa, Homo sapiens
  CDR3 for alpha chain variable domain of TCR clone 380106 (TRAV12-1, TRAJ45)
CVVLSGGGGADGLTF

SEQ ID NO: 760212 - protein, 12 aa, Homo sapiens
  CDR3 for beta chain variable domain of TCR clone 380106 (TRBV12-5, TRBJ2-5)
CASGQGGETQYF

SEQ ID NO: 760213 - protein, 15 aa, Homo sapiens
  CDR3 for alpha chain variable domain of TCR clone 380107 (TRAV17, TRAJ57)
CATGPSQGGSEKLVF

SEQ ID NO: 760214 - protein, 16 aa, Homo sapiens
  CDR3 for beta chain variable domain of TCR clone 380107 (TRBV20-1, TRBJ1-1)
CSARALTQGMNTEAFF

SEQ ID NO: 760215 - protein, 13 aa, Homo sapiens
  CDR3 for alpha chain variable domain of TCR clone 380108 (TRAV27, TRAJ6)
CAGGTRGSYIPTF

SEQ ID NO: 760216 - protein, 12 aa, Homo sapiens
  CDR3 for beta chain variable domain of TCR clone 380108 (TRBV18, TRBJ2-1)
CASSSDEDEQFF

SEQ ID NO: 760217 - protein, 18 aa, Homo sapiens
  CDR3 for alpha chain variable domain of TCR clone 380109 (TRAV13-1, TRAJ52)
CAASKRSAGGTSYGKLTF

SEQ ID NO: 760218 - protein, 15 aa, Homo sapiens
  CDR3 for beta chain variable domain of TCR clone 380109 (TRBV11-3, TRBJ2-3)
CASNGGLDSTDTQYF

SEQ ID NO: 760219 - protein, 13 aa, Homo sapiens
  CDR3 for alpha chain variable domain of TCR clone 380110 (TRAV35, TRAJ47)
CAGQLQPGNKLVF

SEQ ID NO: 760220 - protein, 18 aa, Homo sapiens
  CDR3 for beta chain variable domain of TCR clone 380110 (TRBV2, TRBJ2-3)
CASRLGLAGSLSTDTQYF

SEQ ID NO: 760221 - protein, 16 aa, Homo sapiens
  CDR3 for alpha chain variable domain of TCR clone 380111 (TRAV23/DV6, TRAJ9)
CAASIGRNTGGFKTIF

SEQ ID NO: 760222 - protein, 15 aa, Homo sapiens
  CDR3 for beta chain variable domain of TCR clone 380111 (TRBV7-3, TRBJ2-1)
CASSPTGGGEVEQFF

SEQ ID NO: 760223 - protein, 14 aa, Homo sapiens
  CDR3 for alpha chain variable domain of TCR clone 380112 (TRAV3, TRAJ22)
CAVRDYGFARQLTF

SEQ ID NO: 760224 - protein, 13 aa, Homo sapiens
  CDR3 for beta chain variable domain of TCR clone 380112 (TRBV11-2, TRBJ2-5)
CASGHGAKETQYF

SEQ ID NO: 760225 - protein, 12 aa, Homo sapiens
  CDR3 for alpha chain variable domain of TCR clone 380113 (TRAV9-2, TRAJ26)
CALRGYGQNFVF

SEQ ID NO: 760226 - protein, 14 aa, Homo sapiens
  CDR3 for beta chain variable domain of TCR clone 380113 (TRBV28, TRBJ2-7)
CASSGLAEPAEQYF

SEQ ID NO: 760227 - protein, 13 aa, Homo sapiens
  CDR3 for alpha chain variable domain of TCR clone 380114 (TRAV27, TRAJ41)
CAGEGNSGYALNF

SEQ ID NO: 760228 - protein, 13 aa, Homo sapiens
  CDR3 for beta chain variable domain of TCR clone 380114 (TRBV24-1, TRBJ2-1)
CATSAGPYNEQLF

SEQ ID NO: 760229 - protein, 16 aa, Homo sapiens
  CDR3 for alpha chain variable domain of TCR clone 380115 (TRAV12-2, TRAJ37)
CAVKEKGSSNTGKQIF

SEQ ID NO: 760230 - protein, 12 aa, Homo sapiens
  CDR3 for beta chain variable domain of TCR clone 380115 (TRBV10-1, TRBJ1-5)
CASSDSNQPQHF

SEQ ID NO: 760231 - protein, 15 aa, Homo sapiens
  CDR3 for alpha chain variable domain of TCR clone 380116 (TRAV2, TRAJ9)
CAVEDRGTGGCKTIF

SEQ ID NO: 760232 - protein, 14 aa, Homo sapiens
  CDR3 for beta chain variable domain of TCR clone 380116 (TRBV12-5, TRBJ2-5)
CASGSRTHQDTQYF

SEQ ID NO: 760233 - protein, 13 aa, Homo sapiens
  CDR3 for alpha chain variable domain of TCR clone 380117 (TRAV12-1, TRAJ40)
CVVPTSGTYKYIF

SEQ ID NO: 760234 - protein, 18 aa, Homo sapiens
  CDR3 for beta chain variable domain of TCR clone 380117 (TRBV7-6, TRBJ2-1)
CASSPRTSRMSSYNEQFF

SEQ ID NO: 760235 - protein, 10 aa, Homo sapiens
  CDR3 for alpha chain variable domain of TCR clone 380118 (TRAV23/DV6, TRAJ57)
CAASSTLSQG

SEQ ID NO: 760236 - protein, 13 aa, Homo sapiens
  CDR3 for beta chain variable domain of TCR clone 380118 (TRBV25-1, TRBJ1-1)
CQHPPGGDTEAFF

SEQ ID NO: 760237 - protein, 12 aa, Homo sapiens
  CDR3 for alpha chain variable domain of TCR clone 380119 (TRAV4, TRAJ26)
CLVGDYGQNFVF

SEQ ID NO: 760238 - protein, 16 aa, Homo sapiens
  CDR3 for beta chain variable domain of TCR clone 380119 (TRBV12-4, TRBJ2-1)
CASSAVGQGNGDEQFF

SEQ ID NO: 760239 - protein, 14 aa, Homo sapiens
  CDR3 for alpha chain variable domain of TCR clone 380120 (TRAV12-1, TRAJ12)
CVVNPMDSSYKLIF

SEQ ID NO: 760240 - protein, 13 aa, Homo sapiens
  CDR3 for beta chain variable domain of TCR clone 380120 (TRBV28, TRBJ2-2)
CASVRESTWELFF

SEQ ID NO: 760241 - protein, 14 aa, Homo sapiens
  CDR3 for alpha chain variable domain of TCR clone 380121 (TRAV1-2, TRAJ33)
WAVRAPDSNYQLIW

SEQ ID NO: 760242 - protein, 14 aa, Homo sapiens
  CDR3 for beta chain variable domain of TCR clone 380121 (TRBV11-3, TRBJ1-6)
CASSFSGGDSPLHF

SEQ ID NO: 760243 - protein, 12 aa, Homo sapiens
  CDR3 for alpha chain variable domain of TCR clone 380122 (TRAV8-4, TRAJ43)
CAVSVNNNDMRF

SEQ ID NO: 760244 - protein, 12 aa, Homo sapiens
  CDR3 for beta chain variable domain of TCR clone 380122 (TRBV12-4, TRBJ2-1)
CASSPGRNEQFF

SEQ ID NO: 760245 - protein, 14 aa, Homo sapiens
  CDR3 for alpha chain variable domain of TCR clone 380123 (TRAV26-1, TRAJ45)
CIEVTGGGADGLTF

SEQ ID NO: 760246 - protein, 16 aa, Homo sapiens
  CDR3 for beta chain variable domain of TCR clone 380123 (TRBV11-2, TRBJ2-7)
CASSPLAGGPRYEQYF

SEQ ID NO: 760247 - protein, 15 aa, Homo sapiens
  CDR3 for alpha chain variable domain of TCR clone 380124 (TRAV26-2, TRAJ45)
CILRDRVDQEEVLTD

SEQ ID NO: 760248 - protein, 15 aa, Homo sapiens
  CDR3 for beta chain variable domain of TCR clone 380124 (TRBV7-6, TRBJ2-5)
CASSKPTGREETQYF

SEQ ID NO: 760249 - protein, 13 aa, Homo sapiens
  CDR3 for alpha chain variable domain of TCR clone 380125 (TRAV27, TRAJ3)
ASLRGSRASKLIF

SEQ ID NO: 760250 - protein, 15 aa, Homo sapiens
  CDR3 for beta chain variable domain of TCR clone 380125 (TRBV28, TRBJ1-3)
CASSMGWASGNTIYF

SEQ ID NO: 760251 - protein, 13 aa, Homo sapiens
  CDR3 for alpha chain variable domain of TCR clone 380126 (TRAV13-1, TRAJ5)
FAARVTGRRALTF

SEQ ID NO: 760252 - protein, 15 aa, Homo sapiens
  CDR3 for beta chain variable domain of TCR clone 380126 (TRBV28, TRBJ2-7)
CASSPGGRGFNEQYF

SEQ ID NO: 760253 - protein, 14 aa, Homo sapiens
  CDR3 for alpha chain variable domain of TCR clone 380127 (TRAV38-1, TRAJ29)
CAFITPSGNTPLVF

SEQ ID NO: 760254 - protein, 15 aa, Homo sapiens
  CDR3 for beta chain variable domain of TCR clone 380127 (TRBV5-1, TRBJ2-1)
CASSPPRALYNEQFF

SEQ ID NO: 760255 - protein, 13 aa, Homo sapiens
  CDR3 for alpha chain variable domain of TCR clone 380128 (TRAV8-6, TRAJ50)
CAVIKTSYDKVIF

SEQ ID NO: 760256 - protein, 15 aa, Homo sapiens
  CDR3 for beta chain variable domain of TCR clone 380128 (TRBV20-1, TRBJ2-7)
CSARDRVSGMDEQYF

SEQ ID NO: 760257 - protein, 17 aa, Homo sapiens
  CDR3 for alpha chain variable domain of TCR clone 380129 (TRAV3, TRAJ6)
CAVRDGPRAGGSYIPTF

SEQ ID NO: 760258 - protein, 16 aa, Homo sapiens
  CDR3 for beta chain variable domain of TCR clone 380129 (TRBV19, TRBJ1-5)
CASSTWTGGGNQPQHF

SEQ ID NO: 760259 - protein, 14 aa, Homo sapiens
  CDR3 for alpha chain variable domain of TCR clone 380130 (TRAV38-1, TRAJ40)
CALRPTSGTYKYIF

SEQ ID NO: 760260 - protein, 14 aa, Homo sapiens
  CDR3 for beta chain variable domain of TCR clone 380130 (TRBV19, TRBJ2-1)
CASPIFVLSGEQFF

SEQ ID NO: 760261 - protein, 12 aa, Homo sapiens
  CDR3 for alpha chain variable domain of TCR clone 380131 (TRAV6, TRAJ3)
CALYSSASKIIF

SEQ ID NO: 760262 - protein, 12 aa, Homo sapiens
  CDR3 for beta chain variable domain of TCR clone 380131 (TRBV7-2, TRBJ2-3)
CASSLIGETQYV

SEQ ID NO: 760263 - protein, 14 aa, Homo sapiens
  CDR3 for alpha chain variable domain of TCR clone 380132 (TRAV12-2, TRAJ17)
CAALFKVAGNKLTF

SEQ ID NO: 760264 - protein, 16 aa, Homo sapiens
  CDR3 for beta chain variable domain of TCR clone 380132 (TRBV20-1, TRBJ2-2)
CSASASGIPGAGELFF

SEQ ID NO: 760265 - protein, 12 aa, Homo sapiens
  CDR3 for alpha chain variable domain of TCR clone 380133 (TRAV12-2, TRAJ52)
IDGGTSYGKLTF

SEQ ID NO: 760266 - protein, 13 aa, Homo sapiens
  CDR3 for beta chain variable domain of TCR clone 380133 (TRBV15, TRBJ2-7)
CATSTTGHYEQYF

SEQ ID NO: 760267 - protein, 14 aa, Homo sapiens
  CDR3 for alpha chain variable domain of TCR clone 380134 (TRAV20, TRAJ34)
SVLSTRDNTDKLIF

SEQ ID NO: 760268 - protein, 15 aa, Homo sapiens
  CDR3 for beta chain variable domain of TCR clone 380134 (TRBV2, TRBJ2-1)
CASSVTSEGTDEQFF

SEQ ID NO: 760269 - protein, 14 aa, Homo sapiens
  CDR3 for alpha chain variable domain of TCR clone 380135 (TRAV26-1, TRAJ8)
CIVRVDTGFQRLVF

SEQ ID NO: 760270 - protein, 15 aa, Homo sapiens
  CDR3 for beta chain variable domain of TCR clone 380135 (TRBV10-2, TRBJ2-7)
CASWNRGQAIYEQYF

SEQ ID NO: 760271 - protein, 17 aa, Homo sapiens
  CDR3 for alpha chain variable domain of TCR clone 380136 (TRAV13-1, TRAJ52)
CAASSGAGGTSYGKPTF

SEQ ID NO: 760272 - protein, 15 aa, Homo sapiens
  CDR3 for beta chain variable domain of TCR clone 380136 (TRBV2, TRBJ2-1)
CASSELAGSYNEQFF

SEQ ID NO: 760273 - protein, 12 aa, Homo sapiens
  CDR3 for alpha chain variable domain of TCR clone 380137 (TRAV22, TRAJ36)
CAVGTGANNLFF

SEQ ID NO: 760274 - protein, 14 aa, Homo sapiens
  CDR3 for beta chain variable domain of TCR clone 380137 (TRBV27, TRBJ1-1)
CASSLLSGLSEAFF

SEQ ID NO: 760275 - protein, 15 aa, Homo sapiens
  CDR3 for alpha chain variable domain of TCR clone 380138 (TRAV23/DV6, TRAJ18)
RAARYRGSTLGRLYF

SEQ ID NO: 760276 - protein, 14 aa, Homo sapiens
  CDR3 for beta chain variable domain of TCR clone 380138 (TRBV4-1, TRBJ2-2)
CASSQAVNTGELFF

SEQ ID NO: 760277 - protein, 12 aa, Homo sapiens
  CDR3 for alpha chain variable domain of TCR clone 380139 (TRAV17, TRAJ4)
CATDGGYNKLIF

SEQ ID NO: 760278 - protein, 13 aa, Homo sapiens
  CDR3 for beta chain variable domain of TCR clone 380139 (TRBV29-1, TRBJ2-2)
YSTTGVNTGELFF

SEQ ID NO: 760279 - protein, 14 aa, Homo sapiens
  CDR3 for alpha chain variable domain of TCR clone 380140 (TRAV12-2, TRAJ13)
CAVKKTGGYQKVTF

SEQ ID NO: 760280 - protein, 16 aa, Homo sapiens
  CDR3 for beta chain variable domain of TCR clone 380140 (TRBV12-4, TRBJ2-7)
CASSLIGGTGTYEQYF

SEQ ID NO: 760281 - protein, 12 aa, Homo sapiens
  CDR3 for alpha chain variable domain of TCR clone 380141 (TRAV2, TRAJ9)
CAVGAVGFKTIF

SEQ ID NO: 760282 - protein, 16 aa, Homo sapiens
  CDR3 for beta chain variable domain of TCR clone 380141 (TRBV13, TRBJ2-2)
CASSPRTGEHAGELFF

SEQ ID NO: 760283 - protein, 14 aa, Homo sapiens
  CDR3 for alpha chain variable domain of TCR clone 380142 (TRAV35, TRAJ22)
CAGLSPGSARQLTF

SEQ ID NO: 760284 - protein, 15 aa, Homo sapiens
  CDR3 for beta chain variable domain of TCR clone 380142 (TRBV12-4, TRBJ2-5)
CASSPPTGLQENQYF

SEQ ID NO: 760285 - protein, 12 aa, Homo sapiens
  CDR3 for alpha chain variable domain of TCR clone 380143 (TRAV36/DV7, TRAJ54)
CAVVRGAQKLVF

SEQ ID NO: 760286 - protein, 13 aa, Homo sapiens
  CDR3 for beta chain variable domain of TCR clone 380143 (TRBV20-1, TRBJ1-1)
CSARGGGNTQAFF

SEQ ID NO: 760287 - protein, 16 aa, Homo sapiens
  CDR3 for alpha chain variable domain of TCR clone 380144 (TRAV8-3, TRAJ10)
CAVGPGVPGGGNKLTF

SEQ ID NO: 760288 - protein, 13 aa, Homo sapiens
  CDR3 for beta chain variable domain of TCR clone 380144 (TRBV18, TRBJ1-1)
CASSPGPSGEAFF

SEQ ID NO: 760289 - protein, 12 aa, Homo sapiens
  CDR3 for alpha chain variable domain of TCR clone 380145 (TRAV17, TRAJ20)
CATQSNDYKLSF

SEQ ID NO: 760290 - protein, 13 aa, Homo sapiens
  CDR3 for beta chain variable domain of TCR clone 380145 (TRBV18, TRBJ2-7)
CASSRSGSYEQYF

SEQ ID NO: 760291 - protein, 13 aa, Homo sapiens
  CDR3 for alpha chain variable domain of TCR clone 380146 (TRAV2, TRAJ40)
CAVVTSGTYKYIF

SEQ ID NO: 760292 - protein, 15 aa, Homo sapiens
  CDR3 for beta chain variable domain of TCR clone 380146 (TRBV11-3, TRBJ2-3)
CASLKGGREGGTQYF

SEQ ID NO: 760293 - protein, 14 aa, Homo sapiens
  CDR3 for alpha chain variable domain of TCR clone 380147 (TRAV1-2, TRAJ8)
CAVREDTGFQKLVF

SEQ ID NO: 760294 - protein, 14 aa, Homo sapiens
  CDR3 for beta chain variable domain of TCR clone 380147 (TRBV28, TRBJ2-1)
CASSFESVSDEQFF

SEQ ID NO: 760295 - protein, 17 aa, Homo sapiens
  CDR3 for alpha chain variable domain of TCR clone 380148 (TRAV1-1, TRAJ9)
CLLLLRCQNTGGFKTIF

SEQ ID NO: 760296 - protein, 15 aa, Homo sapiens
  CDR3 for beta chain variable domain of TCR clone 380148 (TRBV11-3, TRBJ2-7)
CASSPGPASSYEQYF

SEQ ID NO: 760297 - protein, 14 aa, Homo sapiens
  CDR3 for alpha chain variable domain of TCR clone 380149 (TRAV8-3, TRAJ4)
CAVGAAGGYNKLIF

SEQ ID NO: 760298 - protein, 15 aa, Homo sapiens
  CDR3 for beta chain variable domain of TCR clone 380149 (TRBV11-3, TRBJ2-3)
CASLKDVREGDTQYF

SEQ ID NO: 760299 - protein, 15 aa, Homo sapiens
  CDR3 for alpha chain variable domain of TCR clone 380150 (TRAV12-1, TRAJ45)
CVVLSRGGGADGLTF

SEQ ID NO: 760300 - protein, 15 aa, Homo sapiens
  CDR3 for beta chain variable domain of TCR clone 380150 (TRBV12-5, TRBJ2-5)
CASGSGLAERETQYF

SEQ ID NO: 760301 - protein, 14 aa, Homo sapiens
  CDR3 for alpha chain variable domain of TCR clone 380151 (TRAV12-3, TRAJ10)
SHLPLTGGGNKLTF

SEQ ID NO: 760302 - protein, 13 aa, Homo sapiens
  CDR3 for beta chain variable domain of TCR clone 380151 (TRBV12-4, TRBJ1-2)
CASSSGPNYGYTF

SEQ ID NO: 760303 - protein, 11 aa, Homo sapiens
  CDR3 for alpha chain variable domain of TCR clone 380152 (TRAV23/DV6, TRAJ9)
CAASLSTPNTG

SEQ ID NO: 760304 - protein, 14 aa, Homo sapiens
  CDR3 for beta chain variable domain of TCR clone 380152 (TRBV11-2, TRBJ2-5)
CASSRTGGIETQYF

SEQ ID NO: 760305 - protein, 15 aa, Homo sapiens
  CDR3 for alpha chain variable domain of TCR clone 380153 (TRAV16, TRAJ48)
CALFISNFGNEKLTF

SEQ ID NO: 760306 - protein, 17 aa, Homo sapiens
  CDR3 for beta chain variable domain of TCR clone 380153 (TRBV7-6, TRBJ2-5)
CASSSPQAGDPSETQYF

SEQ ID NO: 760307 - protein, 13 aa, Homo sapiens
  CDR3 for alpha chain variable domain of TCR clone 380154 (TRAV26-2, TRAJ54)
CIPRVGGAQKLVF

SEQ ID NO: 760308 - protein, 16 aa, Homo sapiens
  CDR3 for beta chain variable domain of TCR clone 380154 (TRBV4-1, TRBJ1-1)
CASSSMSERPNTQPFF

SEQ ID NO: 760309 - protein, 14 aa, Homo sapiens
  CDR3 for alpha chain variable domain of TCR clone 380155 (TRAV12-2, TRAJ13)
CAVKKTGGYKKVTF

SEQ ID NO: 760310 - protein, 16 aa, Homo sapiens
  CDR3 for beta chain variable domain of TCR clone 380155 (TRBV2, TRBJ2-1)
CASRSPAGGKYNEQFF

SEQ ID NO: 760311 - protein, 13 aa, Homo sapiens
  CDR3 for alpha chain variable domain of TCR clone 380156 (TRAV26-1, TRAJ48)
CIVRVVGDEKLTF

SEQ ID NO: 760312 - protein, 19 aa, Homo sapiens
  CDR3 for beta chain variable domain of TCR clone 380156 (TRBV11-3, TRBJ2-2)
CASSTRPGAKTSNTGELFF

SEQ ID NO: 760313 - protein, 14 aa, Homo sapiens
  CDR3 for alpha chain variable domain of TCR clone 380157 (TRAV26-1, TRAJ38)
CIADNAVNNRKLIW

SEQ ID NO: 760314 - protein, 14 aa, Homo sapiens
  CDR3 for beta chain variable domain of TCR clone 380157 (TRBV4-2, TRBJ2-1)
CASGLDRAYNEQFF

SEQ ID NO: 760315 - protein, 14 aa, Homo sapiens
  CDR3 for alpha chain variable domain of TCR clone 380158 (TRAV1-2, TRAJ8)
CAVREDTGSQKLVF

SEQ ID NO: 760316 - protein, 20 aa, Homo sapiens
  CDR3 for beta chain variable domain of TCR clone 380158 (TRBV7-8, TRBJ2-2)
CASSHLFPGPTIHITGELFF

SEQ ID NO: 760317 - protein, 18 aa, Homo sapiens
  CDR3 for alpha chain variable domain of TCR clone 380159 (TRAV16, TRAJ52)
CALSGGDAGGTSYGKLTF

SEQ ID NO: 760318 - protein, 14 aa, Homo sapiens
  CDR3 for beta chain variable domain of TCR clone 380159 (TRBV7-6, TRBJ2-7)
CASSFRQGADEQYF

SEQ ID NO: 760319 - protein, 12 aa, Homo sapiens
  CDR3 for alpha chain variable domain of TCR clone 380160 (TRAV17, TRAJ49)
CATVTTGNQFYF

SEQ ID NO: 760320 - protein, 12 aa, Homo sapiens
  CDR3 for beta chain variable domain of TCR clone 380160 (TRBV7-2, TRBJ2-2)
CASSLAVTGELF

SEQ ID NO: 760321 - protein, 16 aa, Homo sapiens
  CDR3 for alpha chain variable domain of TCR clone 380161 (TRAV3, TRAJ37)
CAVRVRGSGNTGKLIF

SEQ ID NO: 760322 - protein, 13 aa, Homo sapiens
  CDR3 for beta chain variable domain of TCR clone 380161 (TRBV14, TRBJ2-1)
CASSQDRRNKQFF

SEQ ID NO: 760323 - protein, 15 aa, Homo sapiens
  CDR3 for alpha chain variable domain of TCR clone 380162 (TRAV38-2/DV8, TRAJ45)
CAYWDSGGGADGLTF

SEQ ID NO: 760324 - protein, 14 aa, Homo sapiens
  CDR3 for beta chain variable domain of TCR clone 380162 (TRBV7-2, TRBJ2-7)
CASSSQGAAYEQYF

SEQ ID NO: 760325 - protein, 11 aa, Homo sapiens
  CDR3 for alpha chain variable domain of TCR clone 380163 (TRAV21, TRAJ48)
CAVDGNEKLTF

SEQ ID NO: 760326 - protein, 14 aa, Homo sapiens
  CDR3 for beta chain variable domain of TCR clone 380163 (TRBV11-2, TRBJ1-2)
CASSLGTANYGYTF

SEQ ID NO: 760327 - protein, 13 aa, Homo sapiens
  CDR3 for alpha chain variable domain of TCR clone 380164 (TRAV17, TRAJ22)
CAHHSGSARQLTF

SEQ ID NO: 760328 - protein, 13 aa, Homo sapiens
  CDR3 for beta chain variable domain of TCR clone 380164 (TRBV4-1, TRBJ2-1)
CASSQEVQYEQFF

SEQ ID NO: 760329 - protein, 16 aa, Homo sapiens
  CDR3 for alpha chain variable domain of TCR clone 380165 (TRAV1-2, TRAJ10)
CAVRGVLTGGGNKLTF

SEQ ID NO: 760330 - protein, 17 aa, Homo sapiens
  CDR3 for beta chain variable domain of TCR clone 380165 (TRBV6-5, TRBJ2-3)
CASSSGTGGFNTDTQYF

SEQ ID NO: 760331 - protein, 13 aa, Homo sapiens
  CDR3 for alpha chain variable domain of TCR clone 380166 (TRAV17, TRAJ5)
CALRGTGRRALTF

SEQ ID NO: 760332 - protein, 14 aa, Homo sapiens
  CDR3 for beta chain variable domain of TCR clone 380166 (TRBV19, TRBJ2-5)
CASSMTGQQETQYL

SEQ ID NO: 760333 - protein, 12 aa, Homo sapiens
  CDR3 for alpha chain variable domain of TCR clone 380167 (TRAV2, TRAJ9)
CAVVAGGFKTIF

SEQ ID NO: 760334 - protein, 17 aa, Homo sapiens
  CDR3 for beta chain variable domain of TCR clone 380167 (TRBV11-2, TRBJ2-1)
CASSLYPPGVEYNEQFF

SEQ ID NO: 760335 - protein, 14 aa, Homo sapiens
  CDR3 for alpha chain variable domain of TCR clone 380168 (TRAV12-2, TRAJ17)
CAVLFNAAGNKLTF

SEQ ID NO: 760336 - protein, 14 aa, Homo sapiens
  CDR3 for beta chain variable domain of TCR clone 380168 (TRBV4-1, TRBJ2-2)
CASSQAVNTGELFF

SEQ ID NO: 760337 - protein, 15 aa, Homo sapiens
  CDR3 for alpha chain variable domain of TCR clone 380169 (TRAV3, TRAJ3)
CAVRDRRSSASKIIF

SEQ ID NO: 760338 - protein, 13 aa, Homo sapiens
  CDR3 for beta chain variable domain of TCR clone 380169 (TRBV19, TRBJ2-7)
CASRKAGGSEQYF

SEQ ID NO: 760339 - protein, 14 aa, Homo sapiens
  CDR3 for alpha chain variable domain of TCR clone 380170 (TRAV38-1, TRAJ45)
CASHSGGGADGLTF

SEQ ID NO: 760340 - protein, 14 aa, Homo sapiens
  CDR3 for beta chain variable domain of TCR clone 380170 (TRBV12-4, TRBJ1-1)
CASSLRSSGTEAFS

SEQ ID NO: 760341 - protein, 15 aa, Homo sapiens
  CDR3 for alpha chain variable domain of TCR clone 380171 (TRAV3, TRAJ22)
CAVRDRGGSARQLPF

SEQ ID NO: 760342 - protein, 20 aa, Homo sapiens
  CDR3 for beta chain variable domain of TCR clone 380171 (TRBV11-2, TRBJ1-6)
CASSLVFATGGSVHPSTLGT

SEQ ID NO: 760343 - protein, 14 aa, Homo sapiens
  CDR3 for alpha chain variable domain of TCR clone 380172 (TRAV8-4, TRAJ38)
CAVSYAGNNRKMIW

SEQ ID NO: 760344 - protein, 15 aa, Homo sapiens
  CDR3 for beta chain variable domain of TCR clone 380172 (TRBV12-4, TRBJ2-1)
CASSLLATGNNEQFF

SEQ ID NO: 760345 - protein, 15 aa, Homo sapiens
  CDR3 for alpha chain variable domain of TCR clone 380173 (TRAV8-3, TRAJ45)
CASSYSGGGADGLTF

SEQ ID NO: 760346 - protein, 12 aa, Homo sapiens
  CDR3 for beta chain variable domain of TCR clone 380173 (TRBV7-9, TRBJ2-7)
SSSFAGAYEQYF

SEQ ID NO: 760347 - protein, 13 aa, Homo sapiens
  CDR3 for alpha chain variable domain of TCR clone 380174 (TRAV17, TRAJ9)
CATDYTGGFKTIF

SEQ ID NO: 760348 - protein, 15 aa, Homo sapiens
  CDR3 for beta chain variable domain of TCR clone 380174 (TRBV11-3, TRBJ2-3)
CASLKDGREGDTQYF

SEQ ID NO: 760349 - protein, 16 aa, Homo sapiens
  CDR3 for alpha chain variable domain of TCR clone 380175 (TRAV17, TRAJ52)
CATSNAGDTSYGKLTF

SEQ ID NO: 760350 - protein, 13 aa, Homo sapiens
  CDR3 for beta chain variable domain of TCR clone 380175 (TRBV27, TRBJ1-6)
CASSLVLVSPLHF

SEQ ID NO: 760351 - protein, 13 aa, Homo sapiens
  CDR3 for alpha chain variable domain of TCR clone 380176 (TRAV27, TRAJ45)
CMSSGGGADGLTF

SEQ ID NO: 760352 - protein, 17 aa, Homo sapiens
  CDR3 for beta chain variable domain of TCR clone 380176 (TRBV11-2, TRBJ2-1)
CASSLYPPGVECNEQFF

SEQ ID NO: 760353 - protein, 16 aa, Homo sapiens
  CDR3 for alpha chain variable domain of TCR clone 380177 (TRAV14/DV4, TRAJ54)
CAMREGRIQGAQKLEF

SEQ ID NO: 760354 - protein, 15 aa, Homo sapiens
  CDR3 for beta chain variable domain of TCR clone 380177 (TRBV20-1, TRBJ2-7)
CSARDRVSGMDEQYF

SEQ ID NO: 760355 - protein, 15 aa, Homo sapiens
  CDR3 for alpha chain variable domain of TCR clone 380178 (TRAV8-6, TRAJ38)
CAVSSNAGNNRKLIW

SEQ ID NO: 760356 - protein, 15 aa, Homo sapiens
  CDR3 for beta chain variable domain of TCR clone 380178 (TRBV6-3, TRBJ2-7)
CASSSPGTVFYEQYF

SEQ ID NO: 760357 - protein, 14 aa, Homo sapiens
  CDR3 for alpha chain variable domain of TCR clone 380179 (TRAV1-2, TRAJ16)
CAVNRFSDGQKLLF

SEQ ID NO: 760358 - protein, 14 aa, Homo sapiens
  CDR3 for beta chain variable domain of TCR clone 380179 (TRBV7-2, TRBJ1-1)
CASSCLTGTTEAFF

SEQ ID NO: 760359 - protein, 14 aa, Homo sapiens
  CDR3 for alpha chain variable domain of TCR clone 380180 (TRAV1-2, TRAJ13)
CAVKHSGGYQKVTF

SEQ ID NO: 760360 - protein, 12 aa, Homo sapiens
  CDR3 for beta chain variable domain of TCR clone 380180 (TRBV7-3, TRBJ2-5)
CASSSPGGTQYL

SEQ ID NO: 760361 - protein, 17 aa, Homo sapiens
  CDR3 for alpha chain variable domain of TCR clone 380181 (TRAV3, TRAJ6)
CAVRDGSRAGGSYIPTF

SEQ ID NO: 760362 - protein, 15 aa, Homo sapiens
  CDR3 for beta chain variable domain of TCR clone 380181 (TRBV7-9, TRBJ2-7)
CASSLALAEAYEQYF

SEQ ID NO: 760363 - protein, 15 aa, Homo sapiens
  CDR3 for alpha chain variable domain of TCR clone 380182 (TRAV4, TRAJ39)
CLVGPNNNAGNMLAF

SEQ ID NO: 760364 - protein, 13 aa, Homo sapiens
  CDR3 for beta chain variable domain of TCR clone 380182 (TRBV11-2, TRBJ2-5)
CASSATGEETQYF

SEQ ID NO: 760365 - protein, 17 aa, Homo sapiens
  CDR3 for alpha chain variable domain of TCR clone 380183 (TRAV23/DV6, TRAJ57)
CAASSTLSQGGSDKLVF

SEQ ID NO: 760366 - protein, 15 aa, Homo sapiens
  CDR3 for beta chain variable domain of TCR clone 380183 (TRBV11-2, TRBJ2-1)
CASSLGTSGLNEQFF

SEQ ID NO: 760367 - protein, 16 aa, Homo sapiens
  CDR3 for alpha chain variable domain of TCR clone 380184 (TRAV3, TRAJ18)
CAVRDGRGLTLGRLYF

SEQ ID NO: 760368 - protein, 15 aa, Homo sapiens
  CDR3 for beta chain variable domain of TCR clone 380184 (TRBV7-9, TRBJ1-6)
CASSSPGRGNSPLHF

SEQ ID NO: 760369 - protein, 13 aa, Homo sapiens
  CDR3 for alpha chain variable domain of TCR clone 380185 (TRAV8-1, TRAJ30)
CAVIMNRYDKISF

SEQ ID NO: 760370 - protein, 14 aa, Homo sapiens
  CDR3 for beta chain variable domain of TCR clone 380185 (TRBV7-2, TRBJ1-6)
CASSLQGANSPLHF

SEQ ID NO: 760371 - protein, 13 aa, Homo sapiens
  CDR3 for alpha chain variable domain of TCR clone 380186 (TRAV22, TRAJ29)
CAVGGSGNTPLVL

SEQ ID NO: 760372 - protein, 14 aa, Homo sapiens
  CDR3 for beta chain variable domain of TCR clone 380186 (TRBV5-1, TRBJ2-7)
CASSRGESLYEQYF

SEQ ID NO: 760373 - protein, 15 aa, Homo sapiens
  CDR3 for alpha chain variable domain of TCR clone 380187 (TRAV3, TRAJ23)
CAVRDSGNQGGKLIF

SEQ ID NO: 760374 - protein, 15 aa, Homo sapiens
  CDR3 for beta chain variable domain of TCR clone 380187 (TRBV7-3, TRBJ2-1)
CQQLAPSGSYNEQFF

SEQ ID NO: 760375 - protein, 14 aa, Homo sapiens
  CDR3 for alpha chain variable domain of TCR clone 380188 (TRAV1-2, TRAJ27)
CAPAEYTNAGKSTF

SEQ ID NO: 760376 - protein, 18 aa, Homo sapiens
  CDR3 for beta chain variable domain of TCR clone 380188 (TRBV28, TRBJ1-2)
CASRKQQGKRGSNYGYTF

SEQ ID NO: 760377 - protein, 15 aa, Homo sapiens
  CDR3 for alpha chain variable domain of TCR clone 380189 (TRAV12-2, TRAJ10)
GRGWRLTGGGNQLTF

SEQ ID NO: 760378 - protein, 17 aa, Homo sapiens
  CDR3 for beta chain variable domain of TCR clone 380189 (TRBV13, TRBJ2-3)
CASSLSRVAGGRNTQYF

SEQ ID NO: 760379 - protein, 21 aa, Homo sapiens
  CDR3 for alpha chain variable domain of TCR clone 380190 (TRAV34, TRAJ44)
PAMQASTSGEQTTGTASKLTF

SEQ ID NO: 760380 - protein, 15 aa, Homo sapiens
  CDR3 for beta chain variable domain of TCR clone 380190 (TRBV11-3, TRBJ2-3)
CASLKDGREGDTQYF

SEQ ID NO: 760381 - protein, 12 aa, Homo sapiens
  CDR3 for alpha chain variable domain of TCR clone 380191 (TRAV2, TRAJ10)
CASTGGGNKLTF

SEQ ID NO: 760382 - protein, 13 aa, Homo sapiens
  CDR3 for beta chain variable domain of TCR clone 380191 (TRBV7-8, TRBJ2-2)
PGRLSISPGSCFF

SEQ ID NO: 760383 - protein, 14 aa, Homo sapiens
  CDR3 for alpha chain variable domain of TCR clone 380192 (TRAV3, TRAJ34)
CAVRARGTPTSPSL

SEQ ID NO: 760384 - protein, 15 aa, Homo sapiens
  CDR3 for beta chain variable domain of TCR clone 380192 (TRBV6-3, TRBJ2-7)
CASSSPGTVFYEQYF

SEQ ID NO: 760385 - protein, 13 aa, Homo sapiens
  CDR3 for alpha chain variable domain of TCR clone 380193 (TRAV12-3, TRAJ35)
CAMAIGFGNVLHC

SEQ ID NO: 760386 - protein, 15 aa, Homo sapiens
  CDR3 for beta chain variable domain of TCR clone 380193 (TRBV20-1, TRBJ2-1)
CSARGSGPYYNEQFF

SEQ ID NO: 760387 - protein, 15 aa, Homo sapiens
  CDR3 for alpha chain variable domain of TCR clone 380194 (TRAV40, TRAJ45)
CLLGDLGGCADGLTF

SEQ ID NO: 760388 - protein, 13 aa, Homo sapiens
  CDR3 for beta chain variable domain of TCR clone 380194 (TRBV7-9, TRBJ1-2)
CASSLKQNYGYTF

SEQ ID NO: 760389 - protein, 14 aa, Homo sapiens
  CDR3 for alpha chain variable domain of TCR clone 380195 (TRAV3, TRAJ6)
CAVRDPRGRYIPTF

SEQ ID NO: 760390 - protein, 15 aa, Homo sapiens
  CDR3 for beta chain variable domain of TCR clone 380195 (TRBV19, TRBJ1-6)
CASSTQGAVGSPLHF

SEQ ID NO: 760391 - protein, 12 aa, Homo sapiens
  CDR3 for alpha chain variable domain of TCR clone 380196 (TRAV13-2, TRAJ8)
CAPWLGFQKLLF

SEQ ID NO: 760392 - protein, 13 aa, Homo sapiens
  CDR3 for beta chain variable domain of TCR clone 380196 (TRBV12-4, TRBJ1-5)
CASSPDRAQPQHF

SEQ ID NO: 760393 - protein, 11 aa, Homo sapiens
  CDR3 for alpha chain variable domain of TCR clone 380197 (TRAV35, TRAJ22)
CAGPGVGQLTF

SEQ ID NO: 760394 - protein, 12 aa, Homo sapiens
  CDR3 for beta chain variable domain of TCR clone 380197 (TRBV11-2, TRBJ2-2)
CASSLGGGELFF

SEQ ID NO: 760395 - protein, 14 aa, Homo sapiens
  CDR3 for alpha chain variable domain of TCR clone 380198 (TRAV1-2, TRAJ8)
CAVREDTGFQKLVF

SEQ ID NO: 760396 - protein, 15 aa, Homo sapiens
  CDR3 for beta chain variable domain of TCR clone 380198 (TRBV7-9, TRBJ1-6)
CASSSPGRGNSHPHF

SEQ ID NO: 760397 - protein, 12 aa, Homo sapiens
  CDR3 for alpha chain variable domain of TCR clone 380199 (TRAV21, TRAJ33)
CAKMDSSYQLIW

SEQ ID NO: 760398 - protein, 13 aa, Homo sapiens
  CDR3 for beta chain variable domain of TCR clone 380199 (TRBV3-1, TRBJ2-2)
CASLARGSGELFF

SEQ ID NO: 760399 - protein, 14 aa, Homo sapiens
  CDR3 for alpha chain variable domain of TCR clone 380200 (TRAV8-2, TRAJ33)
CVVGGMDSNYQLIW

SEQ ID NO: 760400 - protein, 15 aa, Homo sapiens
  CDR3 for beta chain variable domain of TCR clone 380200 (TRBV7-9, TRBJ1-6)
CASSSPGRGNSPLHF

SEQ ID NO: 760401 - protein, 13 aa, Homo sapiens
  CDR3 for alpha chain variable domain of TCR clone 380201 (TRAV20, TRAJ21)
CAVEGYDFNKFYF

SEQ ID NO: 760402 - protein, 14 aa, Homo sapiens
  CDR3 for beta chain variable domain of TCR clone 380201 (TRBV7-3, TRBJ1-1)
CASSRQGGDTEAFF

SEQ ID NO: 760403 - protein, 17 aa, Homo sapiens
  CDR3 for alpha chain variable domain of TCR clone 380202 (TRAV16, TRAJ58)
CITVLSTGETSGSRLTF

SEQ ID NO: 760404 - protein, 15 aa, Homo sapiens
  CDR3 for beta chain variable domain of TCR clone 380202 (TRBV11-3, TRBJ2-3)
CASLKDGREGDTQYF

SEQ ID NO: 760405 - protein, 15 aa, Homo sapiens
  CDR3 for alpha chain variable domain of TCR clone 380203 (TRAV3, TRAJ29)
CAVRAWNSGKTPLVF

SEQ ID NO: 760406 - protein, 14 aa, Homo sapiens
  CDR3 for beta chain variable domain of TCR clone 380203 (TRBV25-1, TRBJ1-1)
CASTHLGGNTEAFF

SEQ ID NO: 760407 - protein, 14 aa, Homo sapiens
  CDR3 for alpha chain variable domain of TCR clone 380204 (TRAV13-1, TRAJ35)
CAASKGGFGNVLHC

SEQ ID NO: 760408 - protein, 12 aa, Homo sapiens
  CDR3 for beta chain variable domain of TCR clone 380204 (TRBV7-9, TRBJ2-7)
CASSIKREEQYF

SEQ ID NO: 760409 - protein, 12 aa, Homo sapiens
  CDR3 for alpha chain variable domain of TCR clone 380205 (TRAV3, TRAJ26)
CAVRDYGQNFVF

SEQ ID NO: 760410 - protein, 16 aa, Homo sapiens
  CDR3 for beta chain variable domain of TCR clone 380205 (TRBV11-2, TRBJ1-2)
CASSPSGREANFGYTF

SEQ ID NO: 760411 - protein, 15 aa, Homo sapiens
  CDR3 for alpha chain variable domain of TCR clone 380206 (TRAV21, TRAJ53)
GATLNSGGSNYKLTF

SEQ ID NO: 760412 - protein, 15 aa, Homo sapiens
  CDR3 for beta chain variable domain of TCR clone 380206 (TRBV27, TRBJ2-1)
CASSNGGGSSNEQFF

SEQ ID NO: 760413 - protein, 14 aa, Homo sapiens
  CDR3 for alpha chain variable domain of TCR clone 380207 (TRAV8-3, TRAJ4)
CAVGASGGYNKLIF

SEQ ID NO: 760414 - protein, 14 aa, Homo sapiens
  CDR3 for beta chain variable domain of TCR clone 380207 (TRBV25-1, TRBJ1-1)
CASTHLGGNTEAFF

SEQ ID NO: 760415 - protein, 17 aa, Homo sapiens
  CDR3 for alpha chain variable domain of TCR clone 380208 (TRAV8-1, TRAJ42)
CAVKWGNDGGSQGNRIF

SEQ ID NO: 760416 - protein, 15 aa, Homo sapiens
  CDR3 for beta chain variable domain of TCR clone 380208 (TRBV9, TRBJ1-6)
CASSVAGTGDSPLHF

SEQ ID NO: 760417 - protein, 14 aa, Homo sapiens
  CDR3 for alpha chain variable domain of TCR clone 380209 (TRAV12-3, TRAJ22)
CAMSLFGSARQLTF

SEQ ID NO: 760418 - protein, 20 aa, Homo sapiens
  CDR3 for beta chain variable domain of TCR clone 380209 (TRBV28, TRBJ2-1)
CAGTPIGRSPGLAGGNEQFF

SEQ ID NO: 760419 - protein, 12 aa, Homo sapiens
  CDR3 for alpha chain variable domain of TCR clone 380210 (TRAV17, TRAJ20)
CATYSNDYKLSF

SEQ ID NO: 760420 - protein, 14 aa, Homo sapiens
  CDR3 for beta chain variable domain of TCR clone 380210 (TRBV25-1, TRBJ1-1)
CASTHLGGDTEAFF

SEQ ID NO: 760421 - protein, 13 aa, Homo sapiens
  CDR3 for alpha chain variable domain of TCR clone 380211 (TRAV35, TRAJ42)
CAPYGGSQGNLIF

SEQ ID NO: 760422 - protein, 18 aa, Homo sapiens
  CDR3 for beta chain variable domain of TCR clone 380211 (TRBV13, TRBJ2-6)
CASSPMTSGGSGANVLTF

SEQ ID NO: 760423 - protein, 20 aa, Homo sapiens
  CDR3 for alpha chain variable domain of TCR clone 380212 (TRAV30, TRAJ54)
SAAQSRSETQVVQGAQKLVF

SEQ ID NO: 760424 - protein, 14 aa, Homo sapiens
  CDR3 for beta chain variable domain of TCR clone 380212 (TRBV7-9, TRBJ1-2)
CASSFPLREYGYTF

SEQ ID NO: 760425 - protein, 15 aa, Homo sapiens
  CDR3 for alpha chain variable domain of TCR clone 380213 (TRAV1-2, TRAJ30)
CAVRPHGNRDDKIIF

SEQ ID NO: 760426 - protein, 15 aa, Homo sapiens
  CDR3 for beta chain variable domain of TCR clone 380213 (TRBV19, TRBJ1-1)
CASTSGQIQNTDAFF

SEQ ID NO: 760427 - protein, 16 aa, Homo sapiens
  CDR3 for alpha chain variable domain of TCR clone 380214 (TRAV3, TRAJ37)
CAVRGKGSGNTGKLNF

SEQ ID NO: 760428 - protein, 16 aa, Homo sapiens
  CDR3 for beta chain variable domain of TCR clone 380214 (TRBV12-4, TRBJ1-5)
CASSRPVGGSNQPQHF

SEQ ID NO: 760429 - protein, 15 aa, Homo sapiens
  CDR3 for alpha chain variable domain of TCR clone 380215 (TRAV12-3, TRAJ22)
CAMITISGSARQLTF

SEQ ID NO: 760430 - protein, 16 aa, Homo sapiens
  CDR3 for beta chain variable domain of TCR clone 380215 (TRBV20-1, TRBJ2-2)
CSARRPGTGNTGELFF

SEQ ID NO: 760431 - protein, 14 aa, Homo sapiens
  CDR3 for alpha chain variable domain of TCR clone 380216 (TRAV34, TRAJ44)
CGADGTGTASKLTF

SEQ ID NO: 760432 - protein, 14 aa, Homo sapiens
  CDR3 for beta chain variable domain of TCR clone 380216 (TRBV7-2, TRBJ2-7)
CASRSQGAAYEQYF

SEQ ID NO: 760433 - protein, 13 aa, Homo sapiens
  CDR3 for alpha chain variable domain of TCR clone 380217 (TRAV21, TRAJ57)
CAVTQGGSGKLVF

SEQ ID NO: 760434 - protein, 16 aa, Homo sapiens
  CDR3 for beta chain variable domain of TCR clone 380217 (TRBV29-1, TRBJ2-7)
CSVEDAEAGTAYEQYF

SEQ ID NO: 760435 - protein, 12 aa, Homo sapiens
  CDR3 for alpha chain variable domain of TCR clone 380218 (TRAV21, TRAJ39)
CAADNAGNMLTF

SEQ ID NO: 760436 - protein, 13 aa, Homo sapiens
  CDR3 for beta chain variable domain of TCR clone 380218 (TRBV12-4, TRBJ1-1)
CASSPGTGFEAFV

SEQ ID NO: 760437 - protein, 14 aa, Homo sapiens
  CDR3 for alpha chain variable domain of TCR clone 380219 (TRAV21, TRAJ35)
CAVMPIGFGNVPHC

SEQ ID NO: 760438 - protein, 12 aa, Homo sapiens
  CDR3 for beta chain variable domain of TCR clone 380219 (TRBV7-9, TRBJ2-7)
CASSTKREEQYF

SEQ ID NO: 760439 - protein, 15 aa, Homo sapiens
  CDR3 for alpha chain variable domain of TCR clone 380220 (TRAV26-1, TRAJ29)
CIVRVEGSGDTPLGF

SEQ ID NO: 760440 - protein, 14 aa, Homo sapiens
  CDR3 for beta chain variable domain of TCR clone 380220 (TRBV18, TRBJ2-5)
CASSPGVSQETQYF

SEQ ID NO: 760441 - protein, 14 aa, Homo sapiens
  CDR3 for alpha chain variable domain of TCR clone 380221 (TRAV9-2, TRAJ39)
CALYIYNAGNMLTF

SEQ ID NO: 760442 - protein, 15 aa, Homo sapiens
  CDR3 for beta chain variable domain of TCR clone 380221 (TRBV20-1, TRBJ2-1)
CSANSLAGEINEQFF

SEQ ID NO: 760443 - protein, 13 aa, Homo sapiens
  CDR3 for alpha chain variable domain of TCR clone 380222 (TRAV27, TRAJ29)
GAGAHSGNTPLVF

SEQ ID NO: 760444 - protein, 15 aa, Homo sapiens
  CDR3 for beta chain variable domain of TCR clone 380222 (TRBV15, TRBJ1-4)
CATSRDMGSYEKLFF

SEQ ID NO: 760445 - protein, 12 aa, Homo sapiens
  CDR3 for alpha chain variable domain of TCR clone 380223 (TRAV16, TRAJ27)
CALNHQFRQINL

SEQ ID NO: 760446 - protein, 14 aa, Homo sapiens
  CDR3 for beta chain variable domain of TCR clone 380223 (TRBV11-2, TRBJ1-5)
CASSLDRGRQPQHF

SEQ ID NO: 760447 - protein, 16 aa, Homo sapiens
  CDR3 for alpha chain variable domain of TCR clone 380224 (TRAV12-2, TRAJ40)
CAVIRGGTSGTYKYIF

SEQ ID NO: 760448 - protein, 13 aa, Homo sapiens
  CDR3 for beta chain variable domain of TCR clone 380224 (TRBV19, TRBJ2-7)
CASSPRQSYEQYF

SEQ ID NO: 760449 - protein, 12 aa, Homo sapiens
  CDR3 for alpha chain variable domain of TCR clone 380225 (TRAV12-2, TRAJ31)
CAVNTPAARLMF

SEQ ID NO: 760450 - protein, 17 aa, Homo sapiens
  CDR3 for beta chain variable domain of TCR clone 380225 (TRBV20-1, TRBJ1-6)
CSARGGYTLSYNSPLHF

SEQ ID NO: 760451 - protein, 12 aa, Homo sapiens
  CDR3 for alpha chain variable domain of TCR clone 380226 (TRAV1-2, TRAJ33)
CAALDSNYQLIW

SEQ ID NO: 760452 - protein, 17 aa, Homo sapiens
  CDR3 for beta chain variable domain of TCR clone 380226 (TRBV13, TRBJ2-3)
CASSLSRVAGGRNTQYF

SEQ ID NO: 760453 - protein, 17 aa, Homo sapiens
  CDR3 for alpha chain variable domain of TCR clone 380227 (TRAV21, TRAJ52)
CAVGANAGGTSYGKLTF

SEQ ID NO: 760454 - protein, 14 aa, Homo sapiens
  CDR3 for beta chain variable domain of TCR clone 380227 (TRBV7-3, TRBJ2-1)
CASSLAGGTNEQFF

SEQ ID NO: 760455 - protein, 13 aa, Homo sapiens
  CDR3 for alpha chain variable domain of TCR clone 380228 (TRAV12-3, TRAJ4)
CNEQAGGYNKLIF

SEQ ID NO: 760456 - protein, 15 aa, Homo sapiens
  CDR3 for beta chain variable domain of TCR clone 380228 (TRBV5-1, TRBJ1-1)
CASSRSDLGGTEAFF

SEQ ID NO: 760457 - protein, 16 aa, Homo sapiens
  CDR3 for alpha chain variable domain of TCR clone 380229 (TRAV21, TRAJ45)
CAVSWGSGGGVDGLTF

SEQ ID NO: 760458 - protein, 14 aa, Homo sapiens
  CDR3 for beta chain variable domain of TCR clone 380229 (TRBV4-2, TRBJ1-2)
CASSPGGSNYGYTF

SEQ ID NO: 760459 - protein, 16 aa, Homo sapiens
  CDR3 for alpha chain variable domain of TCR clone 380230 (TRAV30, TRAJ24)
CGTEIVDAYSWGKFQF

SEQ ID NO: 760460 - protein, 14 aa, Homo sapiens
  CDR3 for beta chain variable domain of TCR clone 380230 (TRBV12-5, TRBJ2-5)
CAGGSRTHQETQYF

SEQ ID NO: 760461 - protein, 13 aa, Homo sapiens
  CDR3 for alpha chain variable domain of TCR clone 380231 (TRAV25, TRAJ10)
CAGHTGRGNKLTF

SEQ ID NO: 760462 - protein, 15 aa, Homo sapiens
  CDR3 for beta chain variable domain of TCR clone 380231 (TRBV19, TRBJ2-1)
CASSSPGVPLDEQFF

SEQ ID NO: 760463 - protein, 14 aa, Homo sapiens
  CDR3 for alpha chain variable domain of TCR clone 380232 (TRAV17, TRAJ11)
CATDTSRGYSTLTF

SEQ ID NO: 760464 - protein, 13 aa, Homo sapiens
  CDR3 for beta chain variable domain of TCR clone 380232 (TRBV19, TRBJ2-5)
CASRDSRRETHYF

SEQ ID NO: 760465 - protein, 15 aa, Homo sapiens
  CDR3 for alpha chain variable domain of TCR clone 380233 (TRAV26-1, TRAJ22)
CIVRVSFWFCKATDL

SEQ ID NO: 760466 - protein, 14 aa, Homo sapiens
  CDR3 for beta chain variable domain of TCR clone 380233 (TRBV19, TRBJ2-5)
CASSMTGQQETQYF

SEQ ID NO: 760467 - protein, 11 aa, Homo sapiens
  CDR3 for alpha chain variable domain of TCR clone 380234 (TRAV3, TRAJ21)
CAVGNFNKFYF

SEQ ID NO: 760468 - protein, 14 aa, Homo sapiens
  CDR3 for beta chain variable domain of TCR clone 380234 (TRBV12-5, TRBJ2-5)
CASGSRTHQETQYY

SEQ ID NO: 760469 - protein, 13 aa, Homo sapiens
  CDR3 for alpha chain variable domain of TCR clone 380235 (TRAV8-3, TRAJ44)
CAVVPGTASKLTF

SEQ ID NO: 760470 - protein, 14 aa, Homo sapiens
  CDR3 for beta chain variable domain of TCR clone 380235 (TRBV11-2, TRBJ2-3)
CASSRLTRTDTQYF

SEQ ID NO: 760471 - protein, 11 aa, Homo sapiens
  CDR3 for alpha chain variable domain of TCR clone 380236 (TRAV27, TRAJ57)
SAQGGSEKLVF

SEQ ID NO: 760472 - protein, 16 aa, Homo sapiens
  CDR3 for beta chain variable domain of TCR clone 380236 (TRBV19, TRBJ2-1)
CASSKAGPSSYNEQFF

SEQ ID NO: 760473 - protein, 14 aa, Homo sapiens
  CDR3 for alpha chain variable domain of TCR clone 380237 (TRAV6, TRAJ39)
CALPNNNAGNMLTF

SEQ ID NO: 760474 - protein, 17 aa, Homo sapiens
  CDR3 for beta chain variable domain of TCR clone 380237 (TRBV18, TRBJ2-3)
CASASRGPASSTDTQYF

SEQ ID NO: 760475 - protein, 12 aa, Homo sapiens
  CDR3 for alpha chain variable domain of TCR clone 380238 (TRAV17, TRAJ34)
CAMDAKGDKLIF

SEQ ID NO: 760476 - protein, 12 aa, Homo sapiens
  CDR3 for beta chain variable domain of TCR clone 380238 (TRBV7-2, TRBJ2-7)
CASSSHSYEQYF

SEQ ID NO: 760477 - protein, 15 aa, Homo sapiens
  CDR3 for alpha chain variable domain of TCR clone 380239 (TRAV3, TRAJ5)
CAVRPLGHGQESTYS

SEQ ID NO: 760478 - protein, 16 aa, Homo sapiens
  CDR3 for beta chain variable domain of TCR clone 380239 (TRBV3-1, TRBJ2-7)
CASSQGVGKGSSEQYF

SEQ ID NO: 760479 - protein, 15 aa, Homo sapiens
  CDR3 for alpha chain variable domain of TCR clone 380240 (TRAV3, TRAJ40)
CAVRDVTSGTYKYIF

SEQ ID NO: 760480 - protein, 12 aa, Homo sapiens
  CDR3 for beta chain variable domain of TCR clone 380240 (TRBV11-2, TRBJ2-2)
CASSLGGGELFF

SEQ ID NO: 760481 - protein, 10 aa, Homo sapiens
  CDR3 for alpha chain variable domain of TCR clone 380241 (TRAV5, TRAJ34)
CAEDTDKLIF

SEQ ID NO: 760482 - protein, 17 aa, Homo sapiens
  CDR3 for beta chain variable domain of TCR clone 380241 (TRBV4-1, TRBJ1-4)
CASSQEGPRGVEEKLFF

SEQ ID NO: 760483 - protein, 12 aa, Homo sapiens
  CDR3 for alpha chain variable domain of TCR clone 380242 (TRAV12-3, TRAJ41)
CAMSYSGYALNF

SEQ ID NO: 760484 - protein, 13 aa, Homo sapiens
  CDR3 for beta chain variable domain of TCR clone 380242 (TRBV7-3, TRBJ2-1)
CASSVDSYNEQLF

SEQ ID NO: 760485 - protein, 12 aa, Homo sapiens
  CDR3 for alpha chain variable domain of TCR clone 380243 (TRAV21, TRAJ27)
CAPAGNAGKSTF

SEQ ID NO: 760486 - protein, 13 aa, Homo sapiens
  CDR3 for beta chain variable domain of TCR clone 380243 (TRBV2, TRBJ1-1)
CARNPTGGFHAFF

SEQ ID NO: 760487 - protein, 14 aa, Homo sapiens
  CDR3 for alpha chain variable domain of TCR clone 380244 (TRAV1-2, TRAJ8)
CAVREETGFQKLVF

SEQ ID NO: 760488 - protein, 15 aa, Homo sapiens
  CDR3 for beta chain variable domain of TCR clone 380244 (TRBV9, TRBJ1-6)
CASSVAGTGDSPLHF

SEQ ID NO: 760489 - protein, 12 aa, Homo sapiens
  CDR3 for alpha chain variable domain of TCR clone 380245 (TRAV8-3, TRAJ26)
CAGDNYGQHFVF

SEQ ID NO: 760490 - protein, 18 aa, Homo sapiens
  CDR3 for beta chain variable domain of TCR clone 380245 (TRBV12-4, TRBJ2-2)
CASSLVAGTRGRTGELFF

SEQ ID NO: 760491 - protein, 13 aa, Homo sapiens
  CDR3 for alpha chain variable domain of TCR clone 380246 (TRAV13-1, TRAJ37)
CAARSGNTGKIIF

SEQ ID NO: 760492 - protein, 15 aa, Homo sapiens
  CDR3 for beta chain variable domain of TCR clone 380246 (TRBV20-1, TRBJ2-7)
CSARDRVSGMDEQYF

SEQ ID NO: 760493 - protein, 15 aa, Homo sapiens
  CDR3 for alpha chain variable domain of TCR clone 380247 (TRAV8-3, TRAJ11)
CAVGLLNSGYSTLTF

SEQ ID NO: 760494 - protein, 11 aa, Homo sapiens
  CDR3 for beta chain variable domain of TCR clone 380247 (TRBV19, TRBJ1-1)
CPSSIGSEAFF

SEQ ID NO: 760495 - protein, 14 aa, Homo sapiens
  CDR3 for alpha chain variable domain of TCR clone 380248 (TRAV12-2, TRAJ40)
CAVKIPSGSYKYIF

SEQ ID NO: 760496 - protein, 14 aa, Homo sapiens
  CDR3 for beta chain variable domain of TCR clone 380248 (TRBV11-2, TRBJ1-5)
CASSLDRGRQPQHF

SEQ ID NO: 760497 - protein, 11 aa, Homo sapiens
  CDR3 for alpha chain variable domain of TCR clone 380249 (TRAV2, TRAJ21)
CAVFNFNKFYF

SEQ ID NO: 760498 - protein, 15 aa, Homo sapiens
  CDR3 for beta chain variable domain of TCR clone 380249 (TRBV11-2, TRBJ1-2)
CASSLEGVQRNGYTF

SEQ ID NO: 760499 - protein, 15 aa, Homo sapiens
  CDR3 for alpha chain variable domain of TCR clone 380250 (TRAV3, TRAJ13)
CAVSDWGGGYQKVTF

SEQ ID NO: 760500 - protein, 15 aa, Homo sapiens
  CDR3 for beta chain variable domain of TCR clone 380250 (TRBV25-1, TRBJ1-4)
CASSPGDSTNEKLFF

SEQ ID NO: 760501 - protein, 15 aa, Homo sapiens
  CDR3 for alpha chain variable domain of TCR clone 380251 (TRAV3, TRAJ13)
CAARVYSGGYQKVTF

SEQ ID NO: 760502 - protein, 15 aa, Homo sapiens
  CDR3 for beta chain variable domain of TCR clone 380251 (TRBV7-2, TRBJ2-1)
CASSSGLAGGNEQFF

SEQ ID NO: 760503 - protein, 15 aa, Homo sapiens
  CDR3 for alpha chain variable domain of TCR clone 380252 (TRAV26-1, TRAJ44)
CIVRANTGTAIKPTF

SEQ ID NO: 760504 - protein, 16 aa, Homo sapiens
  CDR3 for beta chain variable domain of TCR clone 380252 (TRBV7-7, TRBJ2-1)
CASSLASGTSYNEQFF

SEQ ID NO: 760505 - protein, 11 aa, Homo sapiens
  CDR3 for alpha chain variable domain of TCR clone 380253 (TRAV17, TRAJ43)
CATDNNNDMRF

SEQ ID NO: 760506 - protein, 16 aa, Homo sapiens
  CDR3 for beta chain variable domain of TCR clone 380253 (TRBV7-2, TRBJ2-3)
CASSLVALYSTDTQYF

SEQ ID NO: 760507 - protein, 13 aa, Homo sapiens
  CDR3 for alpha chain variable domain of TCR clone 380254 (TRAV21, TRAJ36)
CAVIKAGANNLFF

SEQ ID NO: 760508 - protein, 13 aa, Homo sapiens
  CDR3 for beta chain variable domain of TCR clone 380254 (TRBV29-1, TRBJ2-3)
CSATRGGRDTQYF

SEQ ID NO: 760509 - protein, 13 aa, Homo sapiens
  CDR3 for alpha chain variable domain of TCR clone 380255 (TRAV3, TRAJ21)
CAVREPDFNKFYF

SEQ ID NO: 760510 - protein, 15 aa, Homo sapiens
  CDR3 for beta chain variable domain of TCR clone 380255 (TRBV9, TRBJ1-6)
CAGSVAGTGDSPLHF

SEQ ID NO: 760511 - protein, 13 aa, Homo sapiens
  CDR3 for alpha chain variable domain of TCR clone 380256 (TRAV23/DV6, TRAJ26)
CAASPLSGQNFVF

SEQ ID NO: 760512 - protein, 13 aa, Homo sapiens
  CDR3 for beta chain variable domain of TCR clone 380256 (TRBV20-1, TRBJ2-2)
CSVRGQATGELFF

SEQ ID NO: 760513 - protein, 15 aa, Homo sapiens
  CDR3 for alpha chain variable domain of TCR clone 380257 (TRAV8-3, TRAJ6)
CAVGTLGGGSYIPTF

SEQ ID NO: 760514 - protein, 14 aa, Homo sapiens
  CDR3 for beta chain variable domain of TCR clone 380257 (TRBV19, TRBJ2-2)
CASSTGQGAGELFF

SEQ ID NO: 760515 - protein, 15 aa, Homo sapiens
  CDR3 for alpha chain variable domain of TCR clone 380258 (TRAV26-1, TRAJ23)
CIVRVAGYQGGKLIF

SEQ ID NO: 760516 - protein, 11 aa, Homo sapiens
  CDR3 for beta chain variable domain of TCR clone 380258 (TRBV11-2, TRBJ2-2)
CASSLPGELFF

SEQ ID NO: 760517 - protein, 14 aa, Homo sapiens
  CDR3 for alpha chain variable domain of TCR clone 380259 (TRAV26-1, TRAJ38)
CIVVGAGNNRKLIW

SEQ ID NO: 760518 - protein, 12 aa, Homo sapiens
  CDR3 for beta chain variable domain of TCR clone 380259 (TRBV5-1, TRBJ2-5)
CAGSWDQETQYF

SEQ ID NO: 760519 - protein, 14 aa, Homo sapiens
  CDR3 for alpha chain variable domain of TCR clone 380260 (TRAV12-2, TRAJ17)
CAVNIKAAGNKLTF

SEQ ID NO: 760520 - protein, 16 aa, Homo sapiens
  CDR3 for beta chain variable domain of TCR clone 380260 (TRBV20-1, TRBJ2-6)
CSASSQGDDGANDLSF

SEQ ID NO: 760521 - protein, 14 aa, Homo sapiens
  CDR3 for alpha chain variable domain of TCR clone 380261 (TRAV23/DV6, TRAJ11)
CAASFESGYSTLPF

SEQ ID NO: 760522 - protein, 15 aa, Homo sapiens
  CDR3 for beta chain variable domain of TCR clone 380261 (TRBV28, TRBJ2-7)
CASSSPGTEPFEQYF

SEQ ID NO: 760523 - protein, 18 aa, Homo sapiens
  CDR3 for alpha chain variable domain of TCR clone 380262 (TRAV12-3, TRAJ52)
CAMSRTNAGGTSNGKLTF

SEQ ID NO: 760524 - protein, 17 aa, Homo sapiens
  CDR3 for beta chain variable domain of TCR clone 380262 (TRBV7-3, TRBJ2-3)
CASSLMKRMRGADTQYF

SEQ ID NO: 760525 - protein, 14 aa, Homo sapiens
  CDR3 for alpha chain variable domain of TCR clone 380263 (TRAV36/DV7, TRAJ53)
CAVVDGGSNYKLTF

SEQ ID NO: 760526 - protein, 16 aa, Homo sapiens
  CDR3 for beta chain variable domain of TCR clone 380263 (TRBV5-1, TRBJ1-1)
CASSSGGNSLNTEAFF

SEQ ID NO: 760527 - protein, 14 aa, Homo sapiens
  CDR3 for alpha chain variable domain of TCR clone 380264 (TRAV13-1, TRAJ35)
CAASKGGFGNVLHC

SEQ ID NO: 760528 - protein, 15 aa, Homo sapiens
  CDR3 for beta chain variable domain of TCR clone 380264 (TRBV11-2, TRBJ2-2)
CASRGLAANTGELFF

SEQ ID NO: 760529 - protein, 14 aa, Homo sapiens
  CDR3 for alpha chain variable domain of TCR clone 380265 (TRAV23/DV6, TRAJ21)
CAAYKSGTRDKFYF

SEQ ID NO: 760530 - protein, 15 aa, Homo sapiens
  CDR3 for beta chain variable domain of TCR clone 380265 (TRBV5-4, TRBJ2-2)
CASSLASRGTGELFF

SEQ ID NO: 760531 - protein, 17 aa, Homo sapiens
  CDR3 for alpha chain variable domain of TCR clone 380266 (TRAV3, TRAJ6)
CAVRDGPRAGGSDIPTF

SEQ ID NO: 760532 - protein, 19 aa, Homo sapiens
  CDR3 for beta chain variable domain of TCR clone 380266 (TRBV25-1, TRBJ2-2)
CAILVYRVDRGRKTGELFF

SEQ ID NO: 760533 - protein, 16 aa, Homo sapiens
  CDR3 for alpha chain variable domain of TCR clone 380267 (TRAV26-1, TRAJ38)
CIVRVELGGNNRKLVW

SEQ ID NO: 760534 - protein, 14 aa, Homo sapiens
  CDR3 for beta chain variable domain of TCR clone 380267 (TRBV5-1, TRBJ2-3)
CASSPGLAADTQYF

SEQ ID NO: 760535 - protein, 14 aa, Homo sapiens
  CDR3 for alpha chain variable domain of TCR clone 380268 (TRAV12-3, TRAJ29)
CAMILLSGNTPLVF

SEQ ID NO: 760536 - protein, 15 aa, Homo sapiens
  CDR3 for beta chain variable domain of TCR clone 380268 (TRBV4-3, TRBJ2-7)
CASSQGDWGDYEQYF

SEQ ID NO: 760537 - protein, 13 aa, Homo sapiens
  CDR3 for alpha chain variable domain of TCR clone 380269 (TRAV12-2, TRAJ52)
CAAHGTSYGKLTF

SEQ ID NO: 760538 - protein, 15 aa, Homo sapiens
  CDR3 for beta chain variable domain of TCR clone 380269 (TRBV10-3, TRBJ2-7)
CAISTFSGVKGEQYV

SEQ ID NO: 760539 - protein, 15 aa, Homo sapiens
  CDR3 for alpha chain variable domain of TCR clone 380270 (TRAV3, TRAJ22)
CAVRDRGGSARQLTF

SEQ ID NO: 760540 - protein, 16 aa, Homo sapiens
  CDR3 for beta chain variable domain of TCR clone 380270 (TRBV4-2, TRBJ2-4)
FASSQELRRAKNIQYF

SEQ ID NO: 760541 - protein, 14 aa, Homo sapiens
  CDR3 for alpha chain variable domain of TCR clone 380271 (TRAV1-2, TRAJ16)
CAFNRFSDGQKLLF

SEQ ID NO: 760542 - protein, 13 aa, Homo sapiens
  CDR3 for beta chain variable domain of TCR clone 380271 (TRBV19, TRBJ1-5)
CASKVGPWEPQHF

SEQ ID NO: 760543 - protein, 16 aa, Homo sapiens
  CDR3 for alpha chain variable domain of TCR clone 380272 (TRAV30, TRAJ24)
CGTEIVDADSWGKFKF

SEQ ID NO: 760544 - protein, 16 aa, Homo sapiens
  CDR3 for beta chain variable domain of TCR clone 380272 (TRBV6-3, TRBJ1-1)
CASTDLGTVPNTEAFF

SEQ ID NO: 760545 - protein, 14 aa, Homo sapiens
  CDR3 for alpha chain variable domain of TCR clone 380273 (TRAV1-2, TRAJ16)
CAVNRFSDGPKLLF

SEQ ID NO: 760546 - protein, 13 aa, Homo sapiens
  CDR3 for beta chain variable domain of TCR clone 380273 (TRBV10-3, TRBJ1-2)
CAISERDSYGYTF

SEQ ID NO: 760547 - protein, 15 aa, Homo sapiens
  CDR3 for alpha chain variable domain of TCR clone 380274 (TRAV8-3, TRAJ27)
CAVGPSKTNVGKSTF

SEQ ID NO: 760548 - protein, 15 aa, Homo sapiens
  CDR3 for beta chain variable domain of TCR clone 380274 (TRBV7-2, TRBJ2-1)
CASSSGLAGVNEQFF

SEQ ID NO: 760549 - protein, 13 aa, Homo sapiens
  CDR3 for alpha chain variable domain of TCR clone 380275 (TRAV8-6, TRAJ21)
CSVSPSSLNKFYF

SEQ ID NO: 760550 - protein, 14 aa, Homo sapiens
  CDR3 for beta chain variable domain of TCR clone 380275 (TRBV7-9, TRBJ2-5)
CASSLDTAQETQYF

SEQ ID NO: 760551 - protein, 15 aa, Homo sapiens
  CDR3 for alpha chain variable domain of TCR clone 380276 (TRAV13-1, TRAJ27)
CAARELNTNAGKSTF

SEQ ID NO: 760552 - protein, 12 aa, Homo sapiens
  CDR3 for beta chain variable domain of TCR clone 380276 (TRBV6-1, TRBJ2-7)
CASSDYSYEQYF

SEQ ID NO: 760553 - protein, 13 aa, Homo sapiens
  CDR3 for alpha chain variable domain of TCR clone 380277 (TRAV12-3, TRAJ40)
CAMSDSGTYKYIF

SEQ ID NO: 760554 - protein, 14 aa, Homo sapiens
  CDR3 for beta chain variable domain of TCR clone 380277 (TRBV7-2, TRBJ1-5)
CASSTQGAGQTQYF

SEQ ID NO: 760555 - protein, 17 aa, Homo sapiens
  CDR3 for alpha chain variable domain of TCR clone 380278 (TRAV13-1, TRAJ53)
CAASWKSSGGSNYKLTF

SEQ ID NO: 760556 - protein, 15 aa, Homo sapiens
  CDR3 for beta chain variable domain of TCR clone 380278 (TRBV11-3, TRBJ2-3)
CASLKDGREGDTQYF

SEQ ID NO: 760557 - protein, 11 aa, Homo sapiens
  CDR3 for alpha chain variable domain of TCR clone 380279 (TRAV12-2, TRAJ26)
CAVNNGQNFVL

SEQ ID NO: 760558 - protein, 11 aa, Homo sapiens
  CDR3 for beta chain variable domain of TCR clone 380279 (TRBV12-4, TRBJ2-5)
CASSFQGAQYF

SEQ ID NO: 760559 - protein, 17 aa, Homo sapiens
  CDR3 for alpha chain variable domain of TCR clone 380280 (TRAV8-6, TRAJ58)
CAVSSWVGETSGSRLTF

SEQ ID NO: 760560 - protein, 17 aa, Homo sapiens
  CDR3 for beta chain variable domain of TCR clone 380280 (TRBV4-3, TRBJ1-2)
CSSSSRLQAGGSVGYTF

SEQ ID NO: 760561 - protein, 14 aa, Homo sapiens
  CDR3 for alpha chain variable domain of TCR clone 380281 (TRAV27, TRAJ42)
CAGEKVGSQGNLIF

SEQ ID NO: 760562 - protein, 15 aa, Homo sapiens
  CDR3 for beta chain variable domain of TCR clone 380281 (TRBV7-2, TRBJ2-2)
CAGSLVAGSAGELFF

SEQ ID NO: 760563 - protein, 14 aa, Homo sapiens
  CDR3 for alpha chain variable domain of TCR clone 380282 (TRAV12-2, TRAJ13)
CAVKKTGGDQKVTF

SEQ ID NO: 760564 - protein, 15 aa, Homo sapiens
  CDR3 for beta chain variable domain of TCR clone 380282 (TRBV7-6, TRBJ2-7)
CASSGRRDTFGEQYL

SEQ ID NO: 760565 - protein, 14 aa, Homo sapiens
  CDR3 for alpha chain variable domain of TCR clone 380283 (TRAV1-2, TRAJ16)
CAVNRVSDGQKLLF

SEQ ID NO: 760566 - protein, 13 aa, Homo sapiens
  CDR3 for beta chain variable domain of TCR clone 380283 (TRBV7-9, TRBJ1-2)
CAGSLKQNYGYTF

SEQ ID NO: 760567 - protein, 11 aa, Homo sapiens
  CDR3 for alpha chain variable domain of TCR clone 380284 (TRAV3, TRAJ21)
CAVGNFNKFYF

SEQ ID NO: 760568 - protein, 16 aa, Homo sapiens
  CDR3 for beta chain variable domain of TCR clone 380284 (TRBV19, TRBJ2-1)
CASSKAGPGSYNEQLF

SEQ ID NO: 760569 - protein, 16 aa, Homo sapiens
  CDR3 for alpha chain variable domain of TCR clone 380285 (TRAV30, TRAJ57)
CGTGWAPQGGSEKLVF

SEQ ID NO: 760570 - protein, 14 aa, Homo sapiens
  CDR3 for beta chain variable domain of TCR clone 380285 (TRBV18, TRBJ1-1)
CASSPGFQRVEAFF

SEQ ID NO: 760571 - protein, 13 aa, Homo sapiens
  CDR3 for alpha chain variable domain of TCR clone 380286 (TRAV26-1, TRAJ35)
CIVSRRVGEMLHR

SEQ ID NO: 760572 - protein, 17 aa, Homo sapiens
  CDR3 for beta chain variable domain of TCR clone 380286 (TRBV7-9, TRBJ2-7)
CASSFDGSRGGAYEQYF

SEQ ID NO: 760573 - protein, 11 aa, Homo sapiens
  CDR3 for alpha chain variable domain of TCR clone 380287 (TRAV2, TRAJ33)
CAVDSNYQLIG

SEQ ID NO: 760574 - protein, 15 aa, Homo sapiens
  CDR3 for beta chain variable domain of TCR clone 380287 (TRBV19, TRBJ1-2)
CASSVGQVLNYGYTL

SEQ ID NO: 760575 - protein, 15 aa, Homo sapiens
  CDR3 for alpha chain variable domain of TCR clone 380288 (TRAV34, TRAJ38)
CGADFTHGNNRKLIW

SEQ ID NO: 760576 - protein, 16 aa, Homo sapiens
  CDR3 for beta chain variable domain of TCR clone 380288 (TRBV6-1, TRBJ2-3)
CASSEVIGQGTDTQYF

SEQ ID NO: 760577 - protein, 14 aa, Homo sapiens
  CDR3 for alpha chain variable domain of TCR clone 380289 (TRAV17, TRAJ58)
CATDGETSGSRLTF

SEQ ID NO: 760578 - protein, 16 aa, Homo sapiens
  CDR3 for beta chain variable domain of TCR clone 380289 (TRBV12-5, TRBJ2-5)
CASGPRTSGNQETQYF

SEQ ID NO: 760579 - protein, 11 aa, Homo sapiens
  CDR3 for alpha chain variable domain of TCR clone 380290 (TRAV1-1, TRAJ23)
CAVRQGGKLIF

SEQ ID NO: 760580 - protein, 13 aa, Homo sapiens
  CDR3 for beta chain variable domain of TCR clone 380290 (TRBV7-3, TRBJ1-1)
CTSSQDWGAEAFF

SEQ ID NO: 760581 - protein, 11 aa, Homo sapiens
  CDR3 for alpha chain variable domain of TCR clone 380291 (TRAV4, TRAJ31)
CLVGDNARLMF

SEQ ID NO: 760582 - protein, 12 aa, Homo sapiens
  CDR3 for beta chain variable domain of TCR clone 380291 (TRBV11-2, TRBJ2-2)
CASSLPTGELFF

SEQ ID NO: 760583 - protein, 17 aa, Homo sapiens
  CDR3 for alpha chain variable domain of TCR clone 380292 (TRAV26-1, TRAJ28)
CIIRVPDSGAGSYQLTF

SEQ ID NO: 760584 - protein, 17 aa, Homo sapiens
  CDR3 for beta chain variable domain of TCR clone 380292 (TRBV28, TRBJ2-7)
CASSPLPAGGKSYEQYF

SEQ ID NO: 760585 - protein, 15 aa, Homo sapiens
  CDR3 for alpha chain variable domain of TCR clone 380293 (TRAV17, TRAJ57)
CATGPSQGGSEKLVF

SEQ ID NO: 760586 - protein, 15 aa, Homo sapiens
  CDR3 for beta chain variable domain of TCR clone 380293 (TRBV15, TRBJ2-1)
CATSRPGQGLHEQFF

SEQ ID NO: 760587 - protein, 14 aa, Homo sapiens
  CDR3 for alpha chain variable domain of TCR clone 380294 (TRAV1-2, TRAJ16)
CAVNRFSDGLKLLF

SEQ ID NO: 760588 - protein, 17 aa, Homo sapiens
  CDR3 for beta chain variable domain of TCR clone 380294 (TRBV28, TRBJ2-5)
CASSTPEGDALQETQYF

SEQ ID NO: 760589 - protein, 15 aa, Homo sapiens
  CDR3 for alpha chain variable domain of TCR clone 380295 (TRAV27, TRAJ38)
CAARRNTGNNRKLSW

SEQ ID NO: 760590 - protein, 13 aa, Homo sapiens
  CDR3 for beta chain variable domain of TCR clone 380295 (TRBV12-5, TRBJ2-3)
CASGDRQSDTQYF

SEQ ID NO: 760591 - protein, 14 aa, Homo sapiens
  CDR3 for alpha chain variable domain of TCR clone 380296 (TRAV13-1, TRAJ44)
CAAKATGTASKLTF

SEQ ID NO: 760592 - protein, 16 aa, Homo sapiens
  CDR3 for beta chain variable domain of TCR clone 380296 (TRBV7-9, TRBJ2-3)
CASSPWREVGTDTQYF

SEQ ID NO: 760593 - protein, 11 aa, Homo sapiens
  CDR3 for alpha chain variable domain of TCR clone 380297 (TRAV17, TRAJ9)
CATTGGFKTIF

SEQ ID NO: 760594 - protein, 14 aa, Homo sapiens
  CDR3 for beta chain variable domain of TCR clone 380297 (TRBV19, TRBJ2-7)
CASSIFAGTYEQYF

SEQ ID NO: 760595 - protein, 14 aa, Homo sapiens
  CDR3 for alpha chain variable domain of TCR clone 380298 (TRAV8-2, TRAJ44)
CVVSLTGTASKLTF

SEQ ID NO: 760596 - protein, 15 aa, Homo sapiens
  CDR3 for beta chain variable domain of TCR clone 380298 (TRBV7-2, TRBJ2-1)
CASSFSGGIYNEQYF

SEQ ID NO: 760597 - protein, 12 aa, Homo sapiens
  CDR3 for alpha chain variable domain of TCR clone 380299 (TRAV13-1, TRAJ9)
CAASYLGFKTIF

SEQ ID NO: 760598 - protein, 15 aa, Homo sapiens
  CDR3 for beta chain variable domain of TCR clone 380299 (TRBV6-3, TRBJ2-7)
CASSSPGTVFYEQYF

SEQ ID NO: 760599 - protein, 15 aa, Homo sapiens
  CDR3 for alpha chain variable domain of TCR clone 380300 (TRAV8-4, TRAJ8)
CAVSDLNTGFQKLVF

SEQ ID NO: 760600 - protein, 14 aa, Homo sapiens
  CDR3 for beta chain variable domain of TCR clone 380300 (TRBV7-2, TRBJ2-3)
CASSQTGSSYTQYF

SEQ ID NO: 760601 - protein, 15 aa, Homo sapiens
  CDR3 for alpha chain variable domain of TCR clone 380301 (TRAV12-3, TRAJ49)
CAMAVTPNTGNQFYF

SEQ ID NO: 760602 - protein, 18 aa, Homo sapiens
  CDR3 for beta chain variable domain of TCR clone 380301 (TRBV4-1, TRBJ1-5)
CASSHDPRGQGSNQPQHF

SEQ ID NO: 760603 - protein, 21 aa, Homo sapiens
  CDR3 for alpha chain variable domain of TCR clone 380302 (TRAV36/DV7, TRAJ39)
TATQTGDSAIYLPNAGNMLTF

SEQ ID NO: 760604 - protein, 15 aa, Homo sapiens
  CDR3 for beta chain variable domain of TCR clone 380302 (TRBV13, TRBJ2-1)
CASSLLSGLNNEQFF

SEQ ID NO: 760605 - protein, 14 aa, Homo sapiens
  CDR3 for alpha chain variable domain of TCR clone 380303 (TRAV3, TRAJ21)
CAVRDAYNFNKFYF

SEQ ID NO: 760606 - protein, 15 aa, Homo sapiens
  CDR3 for beta chain variable domain of TCR clone 380303 (TRBV6-5, TRBJ1-5)
CDSSYSWDSNQPQHF

SEQ ID NO: 760607 - protein, 15 aa, Homo sapiens
  CDR3 for alpha chain variable domain of TCR clone 380304 (TRAV3, TRAJ22)
CAVRDRGGSARQLTF

SEQ ID NO: 760608 - protein, 12 aa, Homo sapiens
  CDR3 for beta chain variable domain of TCR clone 380304 (TRBV7-2, TRBJ2-1)
CASRPQDIEQFF

SEQ ID NO: 760609 - protein, 14 aa, Homo sapiens
  CDR3 for alpha chain variable domain of TCR clone 380305 (TRAV8-3, TRAJ4)
GAVGAAGGYNKLIF

SEQ ID NO: 760610 - protein, 14 aa, Homo sapiens
  CDR3 for beta chain variable domain of TCR clone 380305 (TRBV12-5, TRBJ2-5)
CASGSRTHQETQYF

SEQ ID NO: 760611 - protein, 14 aa, Homo sapiens
  CDR3 for alpha chain variable domain of TCR clone 380306 (TRAV3, TRAJ20)
CAVPPAPNDYKLSF

SEQ ID NO: 760612 - protein, 13 aa, Homo sapiens
  CDR3 for beta chain variable domain of TCR clone 380306 (TRBV7-9, TRBJ2-3)
CASSPGSTDTQYF

SEQ ID NO: 760613 - protein, 15 aa, Homo sapiens
  CDR3 for alpha chain variable domain of TCR clone 380307 (TRAV12-3, TRAJ48)
CAMNANNFGNEKLTF

SEQ ID NO: 760614 - protein, 14 aa, Homo sapiens
  CDR3 for beta chain variable domain of TCR clone 380307 (TRBV2, TRBJ1-6)
CASSESRNNSPLHF

SEQ ID NO: 760615 - protein, 15 aa, Homo sapiens
  CDR3 for alpha chain variable domain of TCR clone 380308 (TRAV21, TRAJ17)
CAVRRSPSCRQQANF

SEQ ID NO: 760616 - protein, 15 aa, Homo sapiens
  CDR3 for beta chain variable domain of TCR clone 380308 (TRBV19, TRBJ1-1)
CASTSGQIQNTEAFF

SEQ ID NO: 760617 - protein, 15 aa, Homo sapiens
  CDR3 for alpha chain variable domain of TCR clone 380309 (TRAV8-3, TRAJ27)
CAVGPSKTNAGKSTF

SEQ ID NO: 760618 - protein, 12 aa, Homo sapiens
  CDR3 for beta chain variable domain of TCR clone 380309 (TRBV6-3, TRBJ2-7)
CASSLTPYEQYF

SEQ ID NO: 760619 - protein, 14 aa, Homo sapiens
  CDR3 for alpha chain variable domain of TCR clone 380310 (TRAV17, TRAJ57)
CATDPQGGSEKLVF

SEQ ID NO: 760620 - protein, 15 aa, Homo sapiens
  CDR3 for beta chain variable domain of TCR clone 380310 (TRBV7-2, TRBJ2-1)
CASTHGTGIYNEQFF

SEQ ID NO: 760621 - protein, 11 aa, Homo sapiens
  CDR3 for alpha chain variable domain of TCR clone 380311 (TRAV12-2, TRAJ47)
CAVNNGNKLVF

SEQ ID NO: 760622 - protein, 16 aa, Homo sapiens
  CDR3 for beta chain variable domain of TCR clone 380311 (TRBV19, TRBJ2-2)
CASRSSGTGATGELFF

SEQ ID NO: 760623 - protein, 17 aa, Homo sapiens
  CDR3 for alpha chain variable domain of TCR clone 380312 (TRAV3, TRAJ12)
CAVRDGGRMDSSYKLIF

SEQ ID NO: 760624 - protein, 13 aa, Homo sapiens
  CDR3 for beta chain variable domain of TCR clone 380312 (TRBV15, TRBJ1-6)
CVTSGGLNSPLHF

SEQ ID NO: 760625 - protein, 14 aa, Homo sapiens
  CDR3 for alpha chain variable domain of TCR clone 380313 (TRAV1-2, TRAJ16)
CAVNRFSDGQKLLF

SEQ ID NO: 760626 - protein, 13 aa, Homo sapiens
  CDR3 for beta chain variable domain of TCR clone 380313 (TRBV7-9, TRBJ1-2)
CSSSLKQNYGYTF

SEQ ID NO: 760627 - protein, 15 aa, Homo sapiens
  CDR3 for alpha chain variable domain of TCR clone 380314 (TRAV3, TRAJ5)
FAVRDLDTGRRARTF

SEQ ID NO: 760628 - protein, 13 aa, Homo sapiens
  CDR3 for beta chain variable domain of TCR clone 380314 (TRBV12-4, TRBJ2-7)
CASSPTETYEQYF

SEQ ID NO: 760629 - protein, 15 aa, Homo sapiens
  CDR3 for alpha chain variable domain of TCR clone 380315 (TRAV21, TRAJ40)
CAVRPQTSGTYKYIF

SEQ ID NO: 760630 - protein, 16 aa, Homo sapiens
  CDR3 for beta chain variable domain of TCR clone 380315 (TRBV12-5, TRBJ2-5)
CASGPRTSGNQETQYF

SEQ ID NO: 760631 - protein, 13 aa, Homo sapiens
  CDR3 for alpha chain variable domain of TCR clone 380316 (TRAV12-1, TRAJ53)
CVVNAESNYKLTF

SEQ ID NO: 760632 - protein, 15 aa, Homo sapiens
  CDR3 for beta chain variable domain of TCR clone 380316 (TRBV2, TRBJ2-5)
CASSGTVAAGEAQYF

SEQ ID NO: 760633 - protein, 15 aa, Homo sapiens
  CDR3 for alpha chain variable domain of TCR clone 380317 (TRAV16, TRAJ10)
CALEGLTGGGNKLTF

SEQ ID NO: 760634 - protein, 16 aa, Homo sapiens
  CDR3 for beta chain variable domain of TCR clone 380317 (TRBV5-7, TRBJ1-1)
CASSLVGPQGNTEAFF

SEQ ID NO: 760635 - protein, 15 aa, Homo sapiens
  CDR3 for alpha chain variable domain of TCR clone 380318 (TRAV2, TRAJ21)
CAVDFTTSTNFTLDL

SEQ ID NO: 760636 - protein, 12 aa, Homo sapiens
  CDR3 for beta chain variable domain of TCR clone 380318 (TRBV7-3, TRBJ2-1)
CASSFQSGTQFF

SEQ ID NO: 760637 - protein, 15 aa, Homo sapiens
  CDR3 for alpha chain variable domain of TCR clone 380319 (TRAV20, TRAJ6)
CAVRLQSGGSYIPTF

SEQ ID NO: 760638 - protein, 16 aa, Homo sapiens
  CDR3 for beta chain variable domain of TCR clone 380319 (TRBV12-4, TRBJ2-7)
CTSVPSASGGWYEQYF

SEQ ID NO: 760639 - protein, 16 aa, Homo sapiens
  CDR3 for alpha chain variable domain of TCR clone 380320 (TRAV30, TRAJ24)
CGTELVDADSWGKFQF

SEQ ID NO: 760640 - protein, 14 aa, Homo sapiens
  CDR3 for beta chain variable domain of TCR clone 380320 (TRBV7-9, TRBJ2-4)
CASSLAMGGNIQYF

SEQ ID NO: 760641 - protein, 13 aa, Homo sapiens
  CDR3 for alpha chain variable domain of TCR clone 380321 (TRAV8-3, TRAJ43)
CAVGPDNNNDMRF

SEQ ID NO: 760642 - protein, 14 aa, Homo sapiens
  CDR3 for beta chain variable domain of TCR clone 380321 (TRBV7-2, TRBJ1-6)
CAAAYPVHPSTLGM

SEQ ID NO: 760643 - protein, 15 aa, Homo sapiens
  CDR3 for alpha chain variable domain of TCR clone 380322 (TRAV12-1, TRAJ9)
CVVSFGDTGGFKTIF

SEQ ID NO: 760644 - protein, 15 aa, Homo sapiens
  CDR3 for beta chain variable domain of TCR clone 380322 (TRBV2, TRBJ2-5)
CASTRDGGPQETQYF

SEQ ID NO: 760645 - protein, 14 aa, Homo sapiens
  CDR3 for alpha chain variable domain of TCR clone 380323 (TRAV1-2, TRAJ16)
CAVNRFSDGRKLLF

SEQ ID NO: 760646 - protein, 15 aa, Homo sapiens
  CDR3 for beta chain variable domain of TCR clone 380323 (TRBV7-9, TRBJ1-6)
CASSSPGRGNSPRHF

SEQ ID NO: 760647 - protein, 14 aa, Homo sapiens
  CDR3 for alpha chain variable domain of TCR clone 380324 (TRAV12-2, TRAJ40)
CAVRIPSVTYKYIF

SEQ ID NO: 760648 - protein, 14 aa, Homo sapiens
  CDR3 for beta chain variable domain of TCR clone 380324 (TRBV20-1, TRBJ1-1)
CSAQTRIGGTEAFF

SEQ ID NO: 760649 - protein, 13 aa, Homo sapiens
  CDR3 for alpha chain variable domain of TCR clone 380325 (TRAV12-1, TRAJ11)
CVVTRGGSSTLTF

SEQ ID NO: 760650 - protein, 13 aa, Homo sapiens
  CDR3 for beta chain variable domain of TCR clone 380325 (TRBV20-1, TRBJ1-2)
CSARDQGAYGYTF

SEQ ID NO: 760651 - protein, 14 aa, Homo sapiens
  CDR3 for alpha chain variable domain of TCR clone 380326 (TRAV1-2, TRAJ8)
CAVREDTGFQKLVF

SEQ ID NO: 760652 - protein, 15 aa, Homo sapiens
  CDR3 for beta chain variable domain of TCR clone 380326 (TRBV19, TRBJ1-5)
CASSDSGPRNQPQHF

SEQ ID NO: 760653 - protein, 13 aa, Homo sapiens
  CDR3 for alpha chain variable domain of TCR clone 380327 (TRAV12-2, TRAJ20)
CAVYPSNDYKLSF

SEQ ID NO: 760654 - protein, 12 aa, Homo sapiens
  CDR3 for beta chain variable domain of TCR clone 380327 (TRBV5-7, TRBJ1-1)
CASSLGRGKAFF

SEQ ID NO: 760655 - protein, 14 aa, Homo sapiens
  CDR3 for alpha chain variable domain of TCR clone 380328 (TRAV12-2, TRAJ40)
CAVKIPSGTYKYIF

SEQ ID NO: 760656 - protein, 15 aa, Homo sapiens
  CDR3 for beta chain variable domain of TCR clone 380328 (TRBV11-2, TRBJ1-6)
CASSLDPWAVSPLHF

SEQ ID NO: 760657 - protein, 12 aa, Homo sapiens
  CDR3 for alpha chain variable domain of TCR clone 380329 (TRAV29/DV5, TRAJ49)
CAASAIGNQFYF

SEQ ID NO: 760658 - protein, 17 aa, Homo sapiens
  CDR3 for beta chain variable domain of TCR clone 380329 (TRBV5-1, TRBJ2-2)
CASSRTSGRFSTGELYF

SEQ ID NO: 760659 - protein, 11 aa, Homo sapiens
  CDR3 for alpha chain variable domain of TCR clone 380330 (TRAV17, TRAJ49)
CATNTGNQFSF

SEQ ID NO: 760660 - protein, 12 aa, Homo sapiens
  CDR3 for beta chain variable domain of TCR clone 380330 (TRBV2, TRBJ2-7)
CASSGVSGIPYF

SEQ ID NO: 760661 - protein, 11 aa, Homo sapiens
  CDR3 for alpha chain variable domain of TCR clone 380331 (TRAV27, TRAJ45)
CAGAKEEVLTD

SEQ ID NO: 760662 - protein, 13 aa, Homo sapiens
  CDR3 for beta chain variable domain of TCR clone 380331 (TRBV7-7, TRBJ2-5)
CASSRSGQETQYF

SEQ ID NO: 760663 - protein, 13 aa, Homo sapiens
  CDR3 for alpha chain variable domain of TCR clone 380332 (TRAV13-2, TRAJ13)
CAERPGGYQKVTF

SEQ ID NO: 760664 - protein, 14 aa, Homo sapiens
  CDR3 for beta chain variable domain of TCR clone 380332 (TRBV12-4, TRBJ1-1)
CASRQTGLNTEAFF

SEQ ID NO: 760665 - protein, 12 aa, Homo sapiens
  CDR3 for alpha chain variable domain of TCR clone 380333 (TRAV21, TRAJ37)
CAVRGNTGKLIF

SEQ ID NO: 760666 - protein, 14 aa, Homo sapiens
  CDR3 for beta chain variable domain of TCR clone 380333 (TRBV19, TRBJ2-1)
CASEGTGARNEQFF

SEQ ID NO: 760667 - protein, 14 aa, Homo sapiens
  CDR3 for alpha chain variable domain of TCR clone 380334 (TRAV1-2, TRAJ16)
CAVNRFSDGQKLLF

SEQ ID NO: 760668 - protein, 14 aa, Homo sapiens
  CDR3 for beta chain variable domain of TCR clone 380334 (TRBV7-9, TRBJ2-1)
CPSSPRDSLYEQFF

SEQ ID NO: 760669 - protein, 13 aa, Homo sapiens
  CDR3 for alpha chain variable domain of TCR clone 380335 (TRAV20, TRAJ37)
CAGCSSNTGKLIF

SEQ ID NO: 760670 - protein, 16 aa, Homo sapiens
  CDR3 for beta chain variable domain of TCR clone 380335 (TRBV15, TRBJ1-4)
CATSRDSPSGREKLFF

SEQ ID NO: 760671 - protein, 15 aa, Homo sapiens
  CDR3 for alpha chain variable domain of TCR clone 380336 (TRAV8-4, TRAJ37)
CAVSRGSGNTGKLIF

SEQ ID NO: 760672 - protein, 17 aa, Homo sapiens
  CDR3 for beta chain variable domain of TCR clone 380336 (TRBV7-8, TRBJ2-6)
CASSAGTGGAGANVLTF

SEQ ID NO: 760673 - protein, 11 aa, Homo sapiens
  CDR3 for alpha chain variable domain of TCR clone 380337 (TRAV13-1, TRAJ30)
CAASRDDKIIL

SEQ ID NO: 760674 - protein, 16 aa, Homo sapiens
  CDR3 for beta chain variable domain of TCR clone 380337 (TRBV7-9, TRBJ2-1)
CASSDVAGGSYSEQFF

SEQ ID NO: 760675 - protein, 14 aa, Homo sapiens
  CDR3 for alpha chain variable domain of TCR clone 380338 (TRAV3, TRAJ27)
CACRDDTNAGKSTF

SEQ ID NO: 760676 - protein, 15 aa, Homo sapiens
  CDR3 for beta chain variable domain of TCR clone 380338 (TRBV7-7, TRBJ2-2)
CATSKLAKNTGELFF

SEQ ID NO: 760677 - protein, 15 aa, Homo sapiens
  CDR3 for alpha chain variable domain of TCR clone 380339 (TRAV12-3, TRAJ6)
CAMSASTGGSYIPPF

SEQ ID NO: 760678 - protein, 16 aa, Homo sapiens
  CDR3 for beta chain variable domain of TCR clone 380339 (TRBV20-1, TRBJ1-2)
CSASMGQGVANYGYTF

SEQ ID NO: 760679 - protein, 14 aa, Homo sapiens
  CDR3 for alpha chain variable domain of TCR clone 380340 (TRAV1-2, TRAJ16)
CAVNRFSDGQKLLF

SEQ ID NO: 760680 - protein, 15 aa, Homo sapiens
  CDR3 for beta chain variable domain of TCR clone 380340 (TRBV19, TRBJ1-1)
CASSRGGALNTEAFF

SEQ ID NO: 760681 - protein, 16 aa, Homo sapiens
  CDR3 for alpha chain variable domain of TCR clone 380341 (TRAV35, TRAJ28)
CAGYLYSGAGSYQLTF

SEQ ID NO: 760682 - protein, 16 aa, Homo sapiens
  CDR3 for beta chain variable domain of TCR clone 380341 (TRBV5-1, TRBJ2-1)
CASSHGLAGPKNEQFF

SEQ ID NO: 760683 - protein, 18 aa, Homo sapiens
  CDR3 for alpha chain variable domain of TCR clone 380342 (TRAV12-3, TRAJ52)
CAMSRTNAGGTSYGKLTF

SEQ ID NO: 760684 - protein, 14 aa, Homo sapiens
  CDR3 for beta chain variable domain of TCR clone 380342 (TRBV20-1, TRBJ2-1)
CSATLAGGLGEQFF

SEQ ID NO: 760685 - protein, 15 aa, Homo sapiens
  CDR3 for alpha chain variable domain of TCR clone 380343 (TRAV3, TRAJ5)
CAVSDLDTGRRALTF

SEQ ID NO: 760686 - protein, 13 aa, Homo sapiens
  CDR3 for beta chain variable domain of TCR clone 380343 (TRBV12-4, TRBJ2-7)
CASSPTETDEQYF

SEQ ID NO: 760687 - protein, 13 aa, Homo sapiens
  CDR3 for alpha chain variable domain of TCR clone 380344 (TRAV35, TRAJ53)
CAGQESSNYKLTF

SEQ ID NO: 760688 - protein, 11 aa, Homo sapiens
  CDR3 for beta chain variable domain of TCR clone 380344 (TRBV29-1, TRBJ2-5)
CSEDGTGTQYF

SEQ ID NO: 760689 - protein, 14 aa, Homo sapiens
  CDR3 for alpha chain variable domain of TCR clone 380345 (TRAV20, TRAJ42)
CAVQAGGSQANLIF

SEQ ID NO: 760690 - protein, 14 aa, Homo sapiens
  CDR3 for beta chain variable domain of TCR clone 380345 (TRBV28, TRBJ1-2)
CASRIQGANYGYTF

SEQ ID NO: 760691 - protein, 17 aa, Homo sapiens
  CDR3 for alpha chain variable domain of TCR clone 380346 (TRAV3, TRAJ42)
CAVRDRDYGGSQGNLIF

SEQ ID NO: 760692 - protein, 17 aa, Homo sapiens
  CDR3 for beta chain variable domain of TCR clone 380346 (TRBV7-9, TRBJ2-3)
CASSPTVAGNLTDTQYF

SEQ ID NO: 760693 - protein, 10 aa, Homo sapiens
  CDR3 for alpha chain variable domain of TCR clone 380347 (TRAV12-3, TRAJ49)
CAMNDDQFYF

SEQ ID NO: 760694 - protein, 13 aa, Homo sapiens
  CDR3 for beta chain variable domain of TCR clone 380347 (TRBV12-4, TRBJ1-1)
RASGPGTGFEAFF

SEQ ID NO: 760695 - protein, 13 aa, Homo sapiens
  CDR3 for alpha chain variable domain of TCR clone 380348 (TRAV9-2, TRAJ49)
CALSEGTGNQFYF

SEQ ID NO: 760696 - protein, 14 aa, Homo sapiens
  CDR3 for beta chain variable domain of TCR clone 380348 (TRBV7-2, TRBJ2-7)
CASSPKTSFYEQYF

SEQ ID NO: 760697 - protein, 12 aa, Homo sapiens
  CDR3 for alpha chain variable domain of TCR clone 380349 (TRAV3, TRAJ31)
CAAQRANARLMF

SEQ ID NO: 760698 - protein, 14 aa, Homo sapiens
  CDR3 for beta chain variable domain of TCR clone 380349 (TRBV5-5, TRBJ1-5)
CANSGQGVDQPQHF

SEQ ID NO: 760699 - protein, 16 aa, Homo sapiens
  CDR3 for alpha chain variable domain of TCR clone 380350 (TRAV13-1, TRAJ45)
CAASWESGGGADGLTC

SEQ ID NO: 760700 - protein, 14 aa, Homo sapiens
  CDR3 for beta chain variable domain of TCR clone 380350 (TRBV12-4, TRBJ1-3)
CASGQTVSGNTIYF

SEQ ID NO: 760701 - protein, 17 aa, Homo sapiens
  CDR3 for alpha chain variable domain of TCR clone 380351 (TRAV3, TRAJ12)
CAVRDGGGMDSSDKLIF

SEQ ID NO: 760702 - protein, 16 aa, Homo sapiens
  CDR3 for beta chain variable domain of TCR clone 380351 (TRBV9, TRBJ2-2)
CASSAMGKGNTGELFF

SEQ ID NO: 760703 - protein, 12 aa, Homo sapiens
  CDR3 for alpha chain variable domain of TCR clone 380352 (TRAV12-1, TRAJ40)
CVVYSGTYKYIF

SEQ ID NO: 760704 - protein, 15 aa, Homo sapiens
  CDR3 for beta chain variable domain of TCR clone 380352 (TRBV13, TRBJ1-5)
CASSFGQGGVQPQHF

SEQ ID NO: 760705 - protein, 13 aa, Homo sapiens
  CDR3 for alpha chain variable domain of TCR clone 380353 (TRAV3, TRAJ40)
CAVRGSGAYKYIF

SEQ ID NO: 760706 - protein, 15 aa, Homo sapiens
  CDR3 for beta chain variable domain of TCR clone 380353 (TRBV27, TRBJ1-5)
CARSSSGTGNQPQHF

SEQ ID NO: 760707 - protein, 14 aa, Homo sapiens
  CDR3 for alpha chain variable domain of TCR clone 380354 (TRAV12-3, TRAJ58)
CAMSTETSGSRLTF

SEQ ID NO: 760708 - protein, 15 aa, Homo sapiens
  CDR3 for beta chain variable domain of TCR clone 380354 (TRBV11-3, TRBJ2-3)
CASLKDGREGDTKYF

SEQ ID NO: 760709 - protein, 12 aa, Homo sapiens
  CDR3 for alpha chain variable domain of TCR clone 380355 (TRAV26-1, TRAJ31)
CIVRNNNARLIF

SEQ ID NO: 760710 - protein, 15 aa, Homo sapiens
  CDR3 for beta chain variable domain of TCR clone 380355 (TRBV20-1, TRBJ2-4)
CSARDLTGGPNIQYF

SEQ ID NO: 760711 - protein, 15 aa, Homo sapiens
  CDR3 for alpha chain variable domain of TCR clone 380356 (TRAV16, TRAJ4)
CALEDPSGGYNKLIF

SEQ ID NO: 760712 - protein, 17 aa, Homo sapiens
  CDR3 for beta chain variable domain of TCR clone 380356 (TRBV11-2, TRBJ2-1)
CASSLYPPGVEYNEQFF

SEQ ID NO: 760713 - protein, 13 aa, Homo sapiens
  CDR3 for alpha chain variable domain of TCR clone 380357 (TRAV8-3, TRAJ43)
CAVVPYNNDDMRF

SEQ ID NO: 760714 - protein, 16 aa, Homo sapiens
  CDR3 for beta chain variable domain of TCR clone 380357 (TRBV7-2, TRBJ2-5)
CASSPFPTGGEETQYF

SEQ ID NO: 760715 - protein, 13 aa, Homo sapiens
  CDR3 for alpha chain variable domain of TCR clone 380358 (TRAV1-2, TRAJ9)
CAALNTGGFKTIF

SEQ ID NO: 760716 - protein, 16 aa, Homo sapiens
  CDR3 for beta chain variable domain of TCR clone 380358 (TRBV12-4, TRBJ2-7)
CASSLIGGTGTYEQYF

SEQ ID NO: 760717 - protein, 17 aa, Homo sapiens
  CDR3 for alpha chain variable domain of TCR clone 380359 (TRAV13-1, TRAJ28)
CAASPPYSGAGSYQLTF

SEQ ID NO: 760718 - protein, 12 aa, Homo sapiens
  CDR3 for beta chain variable domain of TCR clone 380359 (TRBV11-2, TRBJ2-2)
CASSLPNGELFF

SEQ ID NO: 760719 - protein, 12 aa, Homo sapiens
  CDR3 for alpha chain variable domain of TCR clone 380360 (TRAV8-3, TRAJ34)
CAVRGNTDKLIF

SEQ ID NO: 760720 - protein, 15 aa, Homo sapiens
  CDR3 for beta chain variable domain of TCR clone 380360 (TRBV7-9, TRBJ2-2)
CASGPLDTFPGELFF

SEQ ID NO: 760721 - protein, 14 aa, Homo sapiens
  CDR3 for alpha chain variable domain of TCR clone 380361 (TRAV13-1, TRAJ44)
CAAKATGTASKLTF

SEQ ID NO: 760722 - protein, 15 aa, Homo sapiens
  CDR3 for beta chain variable domain of TCR clone 380361 (TRBV20-1, TRBJ2-7)
CSARKGLAESYEQYF

SEQ ID NO: 760723 - protein, 14 aa, Homo sapiens
  CDR3 for alpha chain variable domain of TCR clone 380362 (TRAV17, TRAJ31)
CATDAEDNNARLIF

SEQ ID NO: 760724 - protein, 13 aa, Homo sapiens
  CDR3 for beta chain variable domain of TCR clone 380362 (TRBV20-1, TRBJ2-3)
CSARLAGTDTQYF

SEQ ID NO: 760725 - protein, 14 aa, Homo sapiens
  CDR3 for alpha chain variable domain of TCR clone 380363 (TRAV29/DV5, TRAJ36)
CAARRKTGANNPFF

SEQ ID NO: 760726 - protein, 17 aa, Homo sapiens
  CDR3 for beta chain variable domain of TCR clone 380363 (TRBV13, TRBJ2-3)
CASSLSRVAGGRNTQYF

SEQ ID NO: 760727 - protein, 14 aa, Homo sapiens
  CDR3 for alpha chain variable domain of TCR clone 380364 (TRAV36/DV7, TRAJ28)
CCWYSGAGSYQLTF

SEQ ID NO: 760728 - protein, 15 aa, Homo sapiens
  CDR3 for beta chain variable domain of TCR clone 380364 (TRBV10-2, TRBJ2-6)
CASSEQGTGANVLTF

SEQ ID NO: 760729 - protein, 12 aa, Homo sapiens
  CDR3 for alpha chain variable domain of TCR clone 380365 (TRAV2, TRAJ31)
CAVDDNNARLMF

SEQ ID NO: 760730 - protein, 14 aa, Homo sapiens
  CDR3 for beta chain variable domain of TCR clone 380365 (TRBV7-3, TRBJ1-1)
CASSLGTGYTEAFF

SEQ ID NO: 760731 - protein, 14 aa, Homo sapiens
  CDR3 for alpha chain variable domain of TCR clone 380366 (TRAV12-1, TRAJ3)
CGAARYSSASKIIF

SEQ ID NO: 760732 - protein, 15 aa, Homo sapiens
  CDR3 for beta chain variable domain of TCR clone 380366 (TRBV7-2, TRBJ2-6)
CVSSREGSGANVLTF

SEQ ID NO: 760733 - protein, 17 aa, Homo sapiens
  CDR3 for alpha chain variable domain of TCR clone 380367 (TRAV4, TRAJ13)
CLVGVQGSSGGYQKVTF

SEQ ID NO: 760734 - protein, 15 aa, Homo sapiens
  CDR3 for beta chain variable domain of TCR clone 380367 (TRBV4-1, TRBJ2-7)
CASSQQGQGFDEQYF

SEQ ID NO: 760735 - protein, 15 aa, Homo sapiens
  CDR3 for alpha chain variable domain of TCR clone 380368 (TRAV17, TRAJ57)
CATGPSQGESEKLVF

SEQ ID NO: 760736 - protein, 16 aa, Homo sapiens
  CDR3 for beta chain variable domain of TCR clone 380368 (TRBV12-4, TRBJ1-5)
CASSRPVGGSNQPQHF

SEQ ID NO: 760737 - protein, 18 aa, Homo sapiens
  CDR3 for alpha chain variable domain of TCR clone 380369 (TRAV21, TRAJ52)
CAVRPSPAGGSSYGKLTF

SEQ ID NO: 760738 - protein, 13 aa, Homo sapiens
  CDR3 for beta chain variable domain of TCR clone 380369 (TRBV29-1, TRBJ2-2)
CSVYREDTGELFF

SEQ ID NO: 760739 - protein, 12 aa, Homo sapiens
  CDR3 for alpha chain variable domain of TCR clone 380370 (TRAV12-3, TRAJ17)
CAMTLTGNKLTF

SEQ ID NO: 760740 - protein, 15 aa, Homo sapiens
  CDR3 for beta chain variable domain of TCR clone 380370 (TRBV5-1, TRBJ2-1)
CASSPPRATYNEQFF

SEQ ID NO: 760741 - protein, 11 aa, Homo sapiens
  CDR3 for alpha chain variable domain of TCR clone 380371 (TRAV23/DV6, TRAJ48)
CAPRWGEKLTF

SEQ ID NO: 760742 - protein, 14 aa, Homo sapiens
  CDR3 for beta chain variable domain of TCR clone 380371 (TRBV19, TRBJ2-1)
CASPTFVLSGEQFF

SEQ ID NO: 760743 - protein, 16 aa, Homo sapiens
  CDR3 for alpha chain variable domain of TCR clone 380372 (TRAV3, TRAJ28)
CAVLPRSGAGSYQLTF

SEQ ID NO: 760744 - protein, 13 aa, Homo sapiens
  CDR3 for beta chain variable domain of TCR clone 380372 (TRBV12-4, TRBJ2-5)
CASRLAVQETQDF

SEQ ID NO: 760745 - protein, 13 aa, Homo sapiens
  CDR3 for alpha chain variable domain of TCR clone 380373 (TRAV1-2, TRAJ9)
CAVLNTGGFKTIF

SEQ ID NO: 760746 - protein, 16 aa, Homo sapiens
  CDR3 for beta chain variable domain of TCR clone 380373 (TRBV13, TRBJ2-3)
CQQPLQGSGGRNTQYF

SEQ ID NO: 760747 - protein, 15 aa, Homo sapiens
  CDR3 for alpha chain variable domain of TCR clone 380374 (TRAV17, TRAJ54)
CATTRSEQGAQKLVF

SEQ ID NO: 760748 - protein, 16 aa, Homo sapiens
  CDR3 for beta chain variable domain of TCR clone 380374 (TRBV12-4, TRBJ2-3)
CASSLRLAGTTDTQYF

SEQ ID NO: 760749 - protein, 16 aa, Homo sapiens
  CDR3 for alpha chain variable domain of TCR clone 380375 (TRAV23/DV6, TRAJ9)
CAASIGGNTGGFTTIF

SEQ ID NO: 760750 - protein, 16 aa, Homo sapiens
  CDR3 for beta chain variable domain of TCR clone 380375 (TRBV7-2, TRBJ2-5)
CASSLAVSGRGETQYF

SEQ ID NO: 760751 - protein, 12 aa, Homo sapiens
  CDR3 for alpha chain variable domain of TCR clone 380376 (TRAV24, TRAJ47)
CAFGEYGNKLVF

SEQ ID NO: 760752 - protein, 19 aa, Homo sapiens
  CDR3 for beta chain variable domain of TCR clone 380376 (TRBV7-2, TRBJ2-3)
CASSFLSRNWGGGTDTQYF

SEQ ID NO: 760753 - protein, 11 aa, Homo sapiens
  CDR3 for alpha chain variable domain of TCR clone 380377 (TRAV1-1, TRAJ30)
CAQNRDDMIIF

SEQ ID NO: 760754 - protein, 14 aa, Homo sapiens
  CDR3 for beta chain variable domain of TCR clone 380377 (TRBV7-8, TRBJ2-7)
CASSPGLADYEQYF

SEQ ID NO: 760755 - protein, 14 aa, Homo sapiens
  CDR3 for alpha chain variable domain of TCR clone 380378 (TRAV1-2, TRAJ16)
CAVNRFSDGQKLLF

SEQ ID NO: 760756 - protein, 14 aa, Homo sapiens
  CDR3 for beta chain variable domain of TCR clone 380378 (TRBV20-1, TRBJ1-1)
CSAPPADMNTEAFF

SEQ ID NO: 760757 - protein, 15 aa, Homo sapiens
  CDR3 for alpha chain variable domain of TCR clone 380379 (TRAV6, TRAJ13)
CALGGDSVGYQKVTF

SEQ ID NO: 760758 - protein, 15 aa, Homo sapiens
  CDR3 for beta chain variable domain of TCR clone 380379 (TRBV5-1, TRBJ2-3)
CASSVTSGSTDTQYF

SEQ ID NO: 760759 - protein, 12 aa, Homo sapiens
  CDR3 for alpha chain variable domain of TCR clone 380380 (TRAV17, TRAJ30)
CVPERRDAKIIF

SEQ ID NO: 760760 - protein, 11 aa, Homo sapiens
  CDR3 for beta chain variable domain of TCR clone 380380 (TRBV20-1, TRBJ1-2)
CSVQGAGGYTF

SEQ ID NO: 760761 - protein, 17 aa, Homo sapiens
  CDR3 for alpha chain variable domain of TCR clone 380381 (TRAV3, TRAJ38)
CAVRHCLNAGNNRKLIW

SEQ ID NO: 760762 - protein, 13 aa, Homo sapiens
  CDR3 for beta chain variable domain of TCR clone 380381 (TRBV23-1, TRBJ1-4)
CASRGKFNEKLFF

SEQ ID NO: 760763 - protein, 15 aa, Homo sapiens
  CDR3 for alpha chain variable domain of TCR clone 380382 (TRAV8-3, TRAJ45)
CALSYSGGGGDGLTF

SEQ ID NO: 760764 - protein, 13 aa, Homo sapiens
  CDR3 for beta chain variable domain of TCR clone 380382 (TRBV10-3, TRBJ2-7)
CASKRAVNYEQYF

SEQ ID NO: 760765 - protein, 14 aa, Homo sapiens
  CDR3 for alpha chain variable domain of TCR clone 380383 (TRAV35, TRAJ22)
CAGLRPGSARQLTF

SEQ ID NO: 760766 - protein, 13 aa, Homo sapiens
  CDR3 for beta chain variable domain of TCR clone 380383 (TRBV20-1, TRBJ2-7)
CSSTHTSGYEQYF

SEQ ID NO: 760767 - protein, 14 aa, Homo sapiens
  CDR3 for alpha chain variable domain of TCR clone 380384 (TRAV13-2, TRAJ16)
CAENNWEDGQKLLF

SEQ ID NO: 760768 - protein, 14 aa, Homo sapiens
  CDR3 for beta chain variable domain of TCR clone 380384 (TRBV7-9, TRBJ1-1)
CASSLGGLKTEAVF

SEQ ID NO: 760769 - protein, 15 aa, Homo sapiens
  CDR3 for alpha chain variable domain of TCR clone 380385 (TRAV27, TRAJ38)
CAGRFNAGNNRKLIW

SEQ ID NO: 760770 - protein, 15 aa, Homo sapiens
  CDR3 for beta chain variable domain of TCR clone 380385 (TRBV2, TRBJ2-1)
CASSEEREGDNEQFF

SEQ ID NO: 760771 - protein, 14 aa, Homo sapiens
  CDR3 for alpha chain variable domain of TCR clone 380386 (TRAV1-2, TRAJ8)
CAVREDTGFPKLVF

SEQ ID NO: 760772 - protein, 15 aa, Homo sapiens
  CDR3 for beta chain variable domain of TCR clone 380386 (TRBV27, TRBJ2-1)
CASSNGGGSSNEQFF

SEQ ID NO: 760773 - protein, 17 aa, Homo sapiens
  CDR3 for alpha chain variable domain of TCR clone 380387 (TRAV16, TRAJ26)
CALSGSEFCPWSRNQIV

SEQ ID NO: 760774 - protein, 13 aa, Homo sapiens
  CDR3 for beta chain variable domain of TCR clone 380387 (TRBV6-6, TRBJ2-1)
CASSLHQGDEQFF

SEQ ID NO: 760775 - protein, 16 aa, Homo sapiens
  CDR3 for alpha chain variable domain of TCR clone 380388 (TRAV12-3, TRAJ53)
CAMSPGSGGSNYKLTF

SEQ ID NO: 760776 - protein, 11 aa, Homo sapiens
  CDR3 for beta chain variable domain of TCR clone 380388 (TRBV29-1, TRBJ2-5)
CSEDRAGTQHF

SEQ ID NO: 760777 - protein, 14 aa, Homo sapiens
  CDR3 for alpha chain variable domain of TCR clone 380389 (TRAV26-1, TRAJ49)
CIVRLTNTGNQFYF

SEQ ID NO: 760778 - protein, 15 aa, Homo sapiens
  CDR3 for beta chain variable domain of TCR clone 380389 (TRBV4-1, TRBJ2-5)
CASSQWDLYQETQYF

SEQ ID NO: 760779 - protein, 11 aa, Homo sapiens
  CDR3 for alpha chain variable domain of TCR clone 380390 (TRAV2, TRAJ23)
CAVETRGKLIY

SEQ ID NO: 760780 - protein, 17 aa, Homo sapiens
  CDR3 for beta chain variable domain of TCR clone 380390 (TRBV20-1, TRBJ2-1)
CSASSSGLAGSYNEQFF

SEQ ID NO: 760781 - protein, 18 aa, Homo sapiens
  CDR3 for alpha chain variable domain of TCR clone 380391 (TRAV1-1, TRAJ28)
CLLLLRCEIGAGSYQLTF

SEQ ID NO: 760782 - protein, 14 aa, Homo sapiens
  CDR3 for beta chain variable domain of TCR clone 380391 (TRBV19, TRBJ2-1)
CASPTFVLSGEQFF

SEQ ID NO: 760783 - protein, 14 aa, Homo sapiens
  CDR3 for alpha chain variable domain of TCR clone 380392 (TRAV8-4, TRAJ23)
CAVGAPGSGGKLIF

SEQ ID NO: 760784 - protein, 17 aa, Homo sapiens
  CDR3 for beta chain variable domain of TCR clone 380392 (TRBV4-3, TRBJ2-3)
CASSQDPLAGAVDTQYF

SEQ ID NO: 760785 - protein, 13 aa, Homo sapiens
  CDR3 for alpha chain variable domain of TCR clone 380393 (TRAV21, TRAJ11)
CAVPNSGYSTLTF

SEQ ID NO: 760786 - protein, 17 aa, Homo sapiens
  CDR3 for beta chain variable domain of TCR clone 380393 (TRBV3-1, TRBJ2-7)
CISVPAASGTVFYEQYF

SEQ ID NO: 760787 - protein, 10 aa, Homo sapiens
  CDR3 for alpha chain variable domain of TCR clone 380394 (TRAV13-1, TRAJ41)
CAAIGPRRTQ

SEQ ID NO: 760788 - protein, 16 aa, Homo sapiens
  CDR3 for beta chain variable domain of TCR clone 380394 (TRBV18, TRBJ2-3)
CASSPPAGGPRKYAVF

SEQ ID NO: 760789 - protein, 11 aa, Homo sapiens
  CDR3 for alpha chain variable domain of TCR clone 380395 (TRAV8-4, TRAJ34)
CAVGWTDKLIF

SEQ ID NO: 760790 - protein, 14 aa, Homo sapiens
  CDR3 for beta chain variable domain of TCR clone 380395 (TRBV7-9, TRBJ2-3)
CASSLEDGTDTQYF

SEQ ID NO: 760791 - protein, 15 aa, Homo sapiens
  CDR3 for alpha chain variable domain of TCR clone 380396 (TRAV14/DV4, TRAJ33)
CAMREGRDSNYQLIW

SEQ ID NO: 760792 - protein, 17 aa, Homo sapiens
  CDR3 for beta chain variable domain of TCR clone 380396 (TRBV13, TRBJ2-3)
CASSLSRVAGGRNTQYF

SEQ ID NO: 760793 - protein, 16 aa, Homo sapiens
  CDR3 for alpha chain variable domain of TCR clone 380397 (TRAV8-3, TRAJ8)
CAVPRERNTGFQKLVF

SEQ ID NO: 760794 - protein, 14 aa, Homo sapiens
  CDR3 for beta chain variable domain of TCR clone 380397 (TRBV28, TRBJ1-1)
CASSESGRGTEAFF

SEQ ID NO: 760795 - protein, 10 aa, Homo sapiens
  CDR3 for alpha chain variable domain of TCR clone 380398 (TRAV12-3, TRAJ54)
CAMFAQGAQA

SEQ ID NO: 760796 - protein, 16 aa, Homo sapiens
  CDR3 for beta chain variable domain of TCR clone 380398 (TRBV7-6, TRBJ2-3)
CASSPRRGGLGDTQYF

SEQ ID NO: 760797 - protein, 13 aa, Homo sapiens
  CDR3 for alpha chain variable domain of TCR clone 380399 (TRAV13-1, TRAJ20)
CAARISNDYKLSF

SEQ ID NO: 760798 - protein, 12 aa, Homo sapiens
  CDR3 for beta chain variable domain of TCR clone 380399 (TRBV20-1, TRBJ2-1)
CSARLGTDEQFF

SEQ ID NO: 760799 - protein, 10 aa, Homo sapiens
  CDR3 for alpha chain variable domain of TCR clone 380400 (TRAV1-2, TRAJ20)
RVPNDYKLSF

SEQ ID NO: 760800 - protein, 14 aa, Homo sapiens
  CDR3 for beta chain variable domain of TCR clone 380400 (TRBV12-5, TRBJ2-5)
CASGSRTHQETQYF

SEQ ID NO: 760801 - protein, 13 aa, Homo sapiens
  CDR3 for alpha chain variable domain of TCR clone 380401 (TRAV12-3, TRAJ7)
CAMSASGNNRLAF

SEQ ID NO: 760802 - protein, 13 aa, Homo sapiens
  CDR3 for beta chain variable domain of TCR clone 380401 (TRBV7-2, TRBJ2-2)
CASSLAVTGELFF

SEQ ID NO: 760803 - protein, 11 aa, Homo sapiens
  CDR3 for alpha chain variable domain of TCR clone 380402 (TRAV8-3, TRAJ16)
CAVVPYQKLLF

SEQ ID NO: 760804 - protein, 12 aa, Homo sapiens
  CDR3 for beta chain variable domain of TCR clone 380402 (TRBV3-1, TRBJ1-1)
CASSQDPTEAFF

SEQ ID NO: 760805 - protein, 13 aa, Homo sapiens
  CDR3 for alpha chain variable domain of TCR clone 380403 (TRAV20, TRAJ56)
CAVQAGANSKLTF

SEQ ID NO: 760806 - protein, 14 aa, Homo sapiens
  CDR3 for beta chain variable domain of TCR clone 380403 (TRBV28, TRBJ1-1)
CASSPRTWWAEAFF

SEQ ID NO: 760807 - protein, 12 aa, Homo sapiens
  CDR3 for alpha chain variable domain of TCR clone 380404 (TRAV8-3, TRAJ26)
CAGDNYGQNFVF

SEQ ID NO: 760808 - protein, 13 aa, Homo sapiens
  CDR3 for beta chain variable domain of TCR clone 380404 (TRBV20-1, TRBJ2-7)
CSARVRQGGEQYF

SEQ ID NO: 760809 - protein, 13 aa, Homo sapiens
  CDR3 for alpha chain variable domain of TCR clone 380405 (TRAV21, TRAJ27)
CAARPGNAGKSTF

SEQ ID NO: 760810 - protein, 12 aa, Homo sapiens
  CDR3 for beta chain variable domain of TCR clone 380405 (TRBV12-5, TRBJ2-5)
CASGQGVETQYF

SEQ ID NO: 760811 - protein, 15 aa, Homo sapiens
  CDR3 for alpha chain variable domain of TCR clone 380406 (TRAV30, TRAJ57)
CGTAIPQGGSEKLVV

SEQ ID NO: 760812 - protein, 13 aa, Homo sapiens
  CDR3 for beta chain variable domain of TCR clone 380406 (TRBV7-9, TRBJ1-2)
CASSPSNFWGYTF

SEQ ID NO: 760813 - protein, 12 aa, Homo sapiens
  CDR3 for alpha chain variable domain of TCR clone 380407 (TRAV29/DV5, TRAJ49)
CAATDTGNQFYF

SEQ ID NO: 760814 - protein, 13 aa, Homo sapiens
  CDR3 for beta chain variable domain of TCR clone 380407 (TRBV24-1, TRBJ2-2)
CATSDWSTWELFF

SEQ ID NO: 760815 - protein, 13 aa, Homo sapiens
  CDR3 for alpha chain variable domain of TCR clone 380408 (TRAV14/DV4, TRAJ4)
CAMKAGGYNKLIF

SEQ ID NO: 760816 - protein, 13 aa, Homo sapiens
  CDR3 for beta chain variable domain of TCR clone 380408 (TRBV11-3, TRBJ2-2)
CASSLAVTGELFF

SEQ ID NO: 760817 - protein, 14 aa, Homo sapiens
  CDR3 for alpha chain variable domain of TCR clone 380409 (TRAV35, TRAJ33)
CAGSSQDSHYQLIW

SEQ ID NO: 760818 - protein, 15 aa, Homo sapiens
  CDR3 for beta chain variable domain of TCR clone 380409 (TRBV29-1, TRBJ2-7)
CSVEFFDRGSYEQYF

SEQ ID NO: 760819 - protein, 11 aa, Homo sapiens
  CDR3 for alpha chain variable domain of TCR clone 380410 (TRAV2, TRAJ13)
CASGGYQKVTF

SEQ ID NO: 760820 - protein, 20 aa, Homo sapiens
  CDR3 for beta chain variable domain of TCR clone 380410 (TRBV6-1, TRBJ2-5)
CASSELWTGERRPSTSGQAR

SEQ ID NO: 760821 - protein, 15 aa, Homo sapiens
  CDR3 for alpha chain variable domain of TCR clone 380411 (TRAV21, TRAJ53)
CANLNSGGSNYKLTF

SEQ ID NO: 760822 - protein, 13 aa, Homo sapiens
  CDR3 for beta chain variable domain of TCR clone 380411 (TRBV7-9, TRBJ2-3)
CASSPGSTDTQYF

SEQ ID NO: 760823 - protein, 14 aa, Homo sapiens
  CDR3 for alpha chain variable domain of TCR clone 380412 (TRAV2, TRAJ9)
CAVEDRSGGFKTIV

SEQ ID NO: 760824 - protein, 18 aa, Homo sapiens
  CDR3 for beta chain variable domain of TCR clone 380412 (TRBV11-2, TRBJ2-3)
CASSLGGASRGAPNTQYF

SEQ ID NO: 760825 - protein, 15 aa, Homo sapiens
  CDR3 for alpha chain variable domain of TCR clone 380413 (TRAV3, TRAJ3)
CAVRDRDSSASKIIF

SEQ ID NO: 760826 - protein, 18 aa, Homo sapiens
  CDR3 for beta chain variable domain of TCR clone 380413 (TRBV25-1, TRBJ1-2)
CASSGLQNGQGSISGYTF

SEQ ID NO: 760827 - protein, 16 aa, Homo sapiens
  CDR3 for alpha chain variable domain of TCR clone 380414 (TRAV21, TRAJ17)
CAVRPGGEAAGNKRTF

SEQ ID NO: 760828 - protein, 13 aa, Homo sapiens
  CDR3 for beta chain variable domain of TCR clone 380414 (TRBV11-2, TRBJ2-5)
CASSSTGEETQYF

SEQ ID NO: 760829 - protein, 13 aa, Homo sapiens
  CDR3 for alpha chain variable domain of TCR clone 380415 (TRAV30, TRAJ49)
CGTEGNTGNQFYF

SEQ ID NO: 760830 - protein, 13 aa, Homo sapiens
  CDR3 for beta chain variable domain of TCR clone 380415 (TRBV27, TRBJ1-2)
CASSTGHGYGYTF

SEQ ID NO: 760831 - protein, 13 aa, Homo sapiens
  CDR3 for alpha chain variable domain of TCR clone 380416 (TRAV1-2, TRAJ9)
CAALNIGGLKTIF

SEQ ID NO: 760832 - protein, 13 aa, Homo sapiens
  CDR3 for beta chain variable domain of TCR clone 380416 (TRBV19, TRBJ1-2)
CASSVPGQDGYIF

SEQ ID NO: 760833 - protein, 14 aa, Homo sapiens
  CDR3 for alpha chain variable domain of TCR clone 380417 (TRAV30, TRAJ12)
CGTAWMDSSYKLIF

SEQ ID NO: 760834 - protein, 14 aa, Homo sapiens
  CDR3 for beta chain variable domain of TCR clone 380417 (TRBV19, TRBJ2-1)
CASPTFVLSGEQFF

SEQ ID NO: 760835 - protein, 16 aa, Homo sapiens
  CDR3 for alpha chain variable domain of TCR clone 380418 (TRAV3, TRAJ10)
CAVRDMRAGGGNKLTF

SEQ ID NO: 760836 - protein, 17 aa, Homo sapiens
  CDR3 for beta chain variable domain of TCR clone 380418 (TRBV7-3, TRBJ2-5)
CASSLGSGRSGSGTQYF

SEQ ID NO: 760837 - protein, 16 aa, Homo sapiens
  CDR3 for alpha chain variable domain of TCR clone 380419 (TRAV30, TRAJ24)
CGTEIVDADSWGNSSL

SEQ ID NO: 760838 - protein, 17 aa, Homo sapiens
  CDR3 for beta chain variable domain of TCR clone 380419 (TRBV20-1, TRBJ2-1)
CSAPPRLAGTRYNEQFF

SEQ ID NO: 760839 - protein, 14 aa, Homo sapiens
  CDR3 for alpha chain variable domain of TCR clone 380420 (TRAV8-3, TRAJ4)
CAVGASGGYNKLIF

SEQ ID NO: 760840 - protein, 13 aa, Homo sapiens
  CDR3 for beta chain variable domain of TCR clone 380420 (TRBV18, TRBJ2-5)
CASSLQEQETQYF

SEQ ID NO: 760841 - protein, 12 aa, Homo sapiens
  CDR3 for alpha chain variable domain of TCR clone 380421 (TRAV12-3, TRAJ40)
CAMTSGTYKYIF

SEQ ID NO: 760842 - protein, 15 aa, Homo sapiens
  CDR3 for beta chain variable domain of TCR clone 380421 (TRBV7-3, TRBJ2-2)
CASSLTGQGAGELFF

SEQ ID NO: 760843 - protein, 15 aa, Homo sapiens
  CDR3 for alpha chain variable domain of TCR clone 380422 (TRAV8-4, TRAJ15)
CAVSDPGQAGTALIF

SEQ ID NO: 760844 - protein, 14 aa, Homo sapiens
  CDR3 for beta chain variable domain of TCR clone 380422 (TRBV7-2, TRBJ1-3)
CASRLSRSGNTIYF

SEQ ID NO: 760845 - protein, 18 aa, Homo sapiens
  CDR3 for alpha chain variable domain of TCR clone 380423 (TRAV21, TRAJ52)
FAVRPSPAGGTSYGKLTF

SEQ ID NO: 760846 - protein, 15 aa, Homo sapiens
  CDR3 for beta chain variable domain of TCR clone 380423 (TRBV27, TRBJ2-1)
CASSNGGGSSNEQFF

SEQ ID NO: 760847 - protein, 12 aa, Homo sapiens
  CDR3 for alpha chain variable domain of TCR clone 380424 (TRAV1-2, TRAJ33)
CAALDSNYQLIW

SEQ ID NO: 760848 - protein, 15 aa, Homo sapiens
  CDR3 for beta chain variable domain of TCR clone 380424 (TRBV11-2, TRBJ2-2)
CASRGLAANTGELFF

SEQ ID NO: 760849 - protein, 15 aa, Homo sapiens
  CDR3 for alpha chain variable domain of TCR clone 380425 (TRAV12-2, TRAJ56)
CAVNPFTGANSKLTC

SEQ ID NO: 760850 - protein, 13 aa, Homo sapiens
  CDR3 for beta chain variable domain of TCR clone 380425 (TRBV20-1, TRBJ1-2)
CSARDRVYGGYTF

SEQ ID NO: 760851 - protein, 12 aa, Homo sapiens
  CDR3 for alpha chain variable domain of TCR clone 380426 (TRAV12-3, TRAJ17)
CAMTLTGNKLTF

SEQ ID NO: 760852 - protein, 15 aa, Homo sapiens
  CDR3 for beta chain variable domain of TCR clone 380426 (TRBV20-1, TRBJ2-7)
CSARDRVTGMDEQFF

SEQ ID NO: 760853 - protein, 14 aa, Homo sapiens
  CDR3 for alpha chain variable domain of TCR clone 380427 (TRAV38-1, TRAJ40)
CALRPTSRTYQYIF

SEQ ID NO: 760854 - protein, 14 aa, Homo sapiens
  CDR3 for beta chain variable domain of TCR clone 380427 (TRBV5-4, TRBJ1-1)
CASSLDSRRDEAFF

SEQ ID NO: 760855 - protein, 17 aa, Homo sapiens
  CDR3 for alpha chain variable domain of TCR clone 380428 (TRAV3, TRAJ6)
CAVSRRTDTGGSYIPTF

SEQ ID NO: 760856 - protein, 14 aa, Homo sapiens
  CDR3 for beta chain variable domain of TCR clone 380428 (TRBV12-5, TRBJ2-5)
CASGSRTHQETQYF

SEQ ID NO: 760857 - protein, 15 aa, Homo sapiens
  CDR3 for alpha chain variable domain of TCR clone 380429 (TRAV17, TRAJ57)
CATGPSQGGSEKRVF

SEQ ID NO: 760858 - protein, 14 aa, Homo sapiens
  CDR3 for beta chain variable domain of TCR clone 380429 (TRBV11-2, TRBJ1-2)
CASSLYRGNYGYTF

SEQ ID NO: 760859 - protein, 13 aa, Homo sapiens
  CDR3 for alpha chain variable domain of TCR clone 380430 (TRAV21, TRAJ37)
CAVSSGNTGKLIF

SEQ ID NO: 760860 - protein, 15 aa, Homo sapiens
  CDR3 for beta chain variable domain of TCR clone 380430 (TRBV11-3, TRBJ2-3)
CASPKDGREGDTQYF

SEQ ID NO: 760861 - protein, 14 aa, Homo sapiens
  CDR3 for alpha chain variable domain of TCR clone 380431 (TRAV12-2, TRAJ5)
CAVNRSTGRRALTF

SEQ ID NO: 760862 - protein, 12 aa, Homo sapiens
  CDR3 for beta chain variable domain of TCR clone 380431 (TRBV19, TRBJ1-5)
CASSIAQQPQHL

SEQ ID NO: 760863 - protein, 18 aa, Homo sapiens
  CDR3 for alpha chain variable domain of TCR clone 380432 (TRAV29/DV5, TRAJ52)
CAAKNPNAGGTSYGKLTF

SEQ ID NO: 760864 - protein, 12 aa, Homo sapiens
  CDR3 for beta chain variable domain of TCR clone 380432 (TRBV29-1, TRBJ2-3)
CSVTGGADTQYF

SEQ ID NO: 760865 - protein, 17 aa, Homo sapiens
  CDR3 for alpha chain variable domain of TCR clone 380433 (TRAV16, TRAJ42)
CALSPKLYGGSQGNLIF

SEQ ID NO: 760866 - protein, 13 aa, Homo sapiens
  CDR3 for beta chain variable domain of TCR clone 380433 (TRBV19, TRBJ1-5)
CASSTRQDQPQHF

SEQ ID NO: 760867 - protein, 14 aa, Homo sapiens
  CDR3 for alpha chain variable domain of TCR clone 380434 (TRAV23/DV6, TRAJ13)
CAAMYSGGYKKVTF

SEQ ID NO: 760868 - protein, 14 aa, Homo sapiens
  CDR3 for beta chain variable domain of TCR clone 380434 (TRBV7-9, TRBJ2-1)
CASSPRDSLYEQFF

SEQ ID NO: 760869 - protein, 15 aa, Homo sapiens
  CDR3 for alpha chain variable domain of TCR clone 380435 (TRAV2, TRAJ15)
CAVEDRGQAGTALIF

SEQ ID NO: 760870 - protein, 13 aa, Homo sapiens
  CDR3 for beta chain variable domain of TCR clone 380435 (TRBV10-2, TRBJ2-7)
CASGASVGYEQYF

SEQ ID NO: 760871 - protein, 11 aa, Homo sapiens
  CDR3 for alpha chain variable domain of TCR clone 380436 (TRAV12-1, TRAJ30)
CVVNGQDKIIF

SEQ ID NO: 760872 - protein, 12 aa, Homo sapiens
  CDR3 for beta chain variable domain of TCR clone 380436 (TRBV7-2, TRBJ2-5)
CASSLYQETQYF

SEQ ID NO: 760873 - protein, 14 aa, Homo sapiens
  CDR3 for alpha chain variable domain of TCR clone 380437 (TRAV8-4, TRAJ9)
CAVRINTGGFKTIF

SEQ ID NO: 760874 - protein, 13 aa, Homo sapiens
  CDR3 for beta chain variable domain of TCR clone 380437 (TRBV12-4, TRBJ1-2)
CASSLRQGKGYSF

SEQ ID NO: 760875 - protein, 12 aa, Homo sapiens
  CDR3 for alpha chain variable domain of TCR clone 380438 (TRAV12-3, TRAJ32)
CAGGGATNKLIF

SEQ ID NO: 760876 - protein, 17 aa, Homo sapiens
  CDR3 for beta chain variable domain of TCR clone 380438 (TRBV28, TRBJ2-5)
CASSTPEGDALQETRYF

SEQ ID NO: 760877 - protein, 17 aa, Homo sapiens
  CDR3 for alpha chain variable domain of TCR clone 380439 (TRAV3, TRAJ6)
CAVRDGPRAGGSDIPTF

SEQ ID NO: 760878 - protein, 17 aa, Homo sapiens
  CDR3 for beta chain variable domain of TCR clone 380439 (TRBV13, TRBJ2-3)
CASSLSRVAGGRNTQYF

SEQ ID NO: 760879 - protein, 18 aa, Homo sapiens
  CDR3 for alpha chain variable domain of TCR clone 380440 (TRAV13-1, TRAJ52)
CAASKRRAGGTSYGKLPF

SEQ ID NO: 760880 - protein, 13 aa, Homo sapiens
  CDR3 for beta chain variable domain of TCR clone 380440 (TRBV12-4, TRBJ1-2)
CASSLRQGKGYTF

SEQ ID NO: 760881 - protein, 16 aa, Homo sapiens
  CDR3 for alpha chain variable domain of TCR clone 380441 (TRAV27, TRAJ48)
TAAQPGDTGLYLPPTF

SEQ ID NO: 760882 - protein, 15 aa, Homo sapiens
  CDR3 for beta chain variable domain of TCR clone 380441 (TRBV28, TRBJ2-2)
CASTVAGANTGELFF

SEQ ID NO: 760883 - protein, 12 aa, Homo sapiens
  CDR3 for alpha chain variable domain of TCR clone 380442 (TRAV21, TRAJ33)
CAKMDSNYPFIW

SEQ ID NO: 760884 - protein, 14 aa, Homo sapiens
  CDR3 for beta chain variable domain of TCR clone 380442 (TRBV2, TRBJ2-7)
CASSLTSGGYEQYF

SEQ ID NO: 760885 - protein, 17 aa, Homo sapiens
  CDR3 for alpha chain variable domain of TCR clone 380443 (TRAV13-1, TRAJ28)
CAASPLYSGAGSYQLTF

SEQ ID NO: 760886 - protein, 15 aa, Homo sapiens
  CDR3 for beta chain variable domain of TCR clone 380443 (TRBV6-3, TRBJ2-2)
CASSFLATLTGELFF

SEQ ID NO: 760887 - protein, 16 aa, Homo sapiens
  CDR3 for alpha chain variable domain of TCR clone 380444 (TRAV12-2, TRAJ32)
CAVNKGDGGATNKLIF

SEQ ID NO: 760888 - protein, 13 aa, Homo sapiens
  CDR3 for beta chain variable domain of TCR clone 380444 (TRBV10-3, TRBJ2-3)
CAIRGDRADTQYF

SEQ ID NO: 760889 - protein, 16 aa, Homo sapiens
  CDR3 for alpha chain variable domain of TCR clone 380445 (TRAV21, TRAJ45)
CAVSWGSGGGADGLTF

SEQ ID NO: 760890 - protein, 14 aa, Homo sapiens
  CDR3 for beta chain variable domain of TCR clone 380445 (TRBV4-2, TRBJ2-1)
CASGLDRAYNEQFF

SEQ ID NO: 760891 - protein, 13 aa, Homo sapiens
  CDR3 for alpha chain variable domain of TCR clone 380446 (TRAV20, TRAJ48)
CAVQGVRNEKLNF

SEQ ID NO: 760892 - protein, 14 aa, Homo sapiens
  CDR3 for beta chain variable domain of TCR clone 380446 (TRBV27, TRBJ2-7)
CASSFRDGPYEQYF

SEQ ID NO: 760893 - protein, 14 aa, Homo sapiens
  CDR3 for alpha chain variable domain of TCR clone 380447 (TRAV35, TRAJ22)
CAGLRPGSARQLTF

SEQ ID NO: 760894 - protein, 16 aa, Homo sapiens
  CDR3 for beta chain variable domain of TCR clone 380447 (TRBV28, TRBJ2-7)
CASSLFFETGGPEQYF

SEQ ID NO: 760895 - protein, 14 aa, Homo sapiens
  CDR3 for alpha chain variable domain of TCR clone 380448 (TRAV1-2, TRAJ16)
CAVNRFSDGQKLLF

SEQ ID NO: 760896 - protein, 14 aa, Homo sapiens
  CDR3 for beta chain variable domain of TCR clone 380448 (TRBV7-6, TRBJ2-3)
GASSLGTVTDTQYF

SEQ ID NO: 760897 - protein, 12 aa, Homo sapiens
  CDR3 for alpha chain variable domain of TCR clone 380449 (TRAV21, TRAJ37)
CAVRGNKGKLIF

SEQ ID NO: 760898 - protein, 14 aa, Homo sapiens
  CDR3 for beta chain variable domain of TCR clone 380449 (TRBV19, TRBJ2-1)
CASEVTGARNEQFF

SEQ ID NO: 760899 - protein, 16 aa, Homo sapiens
  CDR3 for alpha chain variable domain of TCR clone 380450 (TRAV30, TRAJ24)
CGTEIVDADSWGKFQF

SEQ ID NO: 760900 - protein, 13 aa, Homo sapiens
  CDR3 for beta chain variable domain of TCR clone 380450 (TRBV20-1, TRBJ2-2)
CSVRGQATGELFF

SEQ ID NO: 760901 - protein, 12 aa, Homo sapiens
  CDR3 for alpha chain variable domain of TCR clone 380451 (TRAV12-2, TRAJ9)
CAVYNGGFKTIF

SEQ ID NO: 760902 - protein, 14 aa, Homo sapiens
  CDR3 for beta chain variable domain of TCR clone 380451 (TRBV6-1, TRBJ1-5)
CASSETGMEQHQYF

SEQ ID NO: 760903 - protein, 15 aa, Homo sapiens
  CDR3 for alpha chain variable domain of TCR clone 380452 (TRAV3, TRAJ3)
CAVRDGHSSASKIIF

SEQ ID NO: 760904 - protein, 17 aa, Homo sapiens
  CDR3 for beta chain variable domain of TCR clone 380452 (TRBV25-1, TRBJ2-7)
CASSDARVVVSSYEQYF

SEQ ID NO: 760905 - protein, 12 aa, Homo sapiens
  CDR3 for alpha chain variable domain of TCR clone 380453 (TRAV2, TRAJ31)
CAVEDNNARLMF

SEQ ID NO: 760906 - protein, 14 aa, Homo sapiens
  CDR3 for beta chain variable domain of TCR clone 380453 (TRBV18, TRBJ2-3)
CASSGLADTDTQYF

SEQ ID NO: 760907 - protein, 14 aa, Homo sapiens
  CDR3 for alpha chain variable domain of TCR clone 380454 (TRAV1-2, TRAJ16)
CAVNRFSDGQKLLF

SEQ ID NO: 760908 - protein, 16 aa, Homo sapiens
  CDR3 for beta chain variable domain of TCR clone 380454 (TRBV7-2, TRBJ2-2)
CASSVTGGGRAGELFF

SEQ ID NO: 760909 - protein, 13 aa, Homo sapiens
  CDR3 for alpha chain variable domain of TCR clone 380455 (TRAV13-1, TRAJ12)
CSKYMGRSYKLIF

SEQ ID NO: 760910 - protein, 14 aa, Homo sapiens
  CDR3 for beta chain variable domain of TCR clone 380455 (TRBV29-1, TRBJ2-3)
CSARAGAGTDTQYF

SEQ ID NO: 760911 - protein, 17 aa, Homo sapiens
  CDR3 for alpha chain variable domain of TCR clone 380456 (TRAV26-1, TRAJ46)
IASSESEKKSSGDKLTF

SEQ ID NO: 760912 - protein, 13 aa, Homo sapiens
  CDR3 for beta chain variable domain of TCR clone 380456 (TRBV11-2, TRBJ2-5)
CASSFSSQETQYF

SEQ ID NO: 760913 - protein, 14 aa, Homo sapiens
  CDR3 for alpha chain variable domain of TCR clone 380457 (TRAV8-4, TRAJ9)
CAVPFNTGGFKTIF

SEQ ID NO: 760914 - protein, 15 aa, Homo sapiens
  CDR3 for beta chain variable domain of TCR clone 380457 (TRBV7-9, TRBJ2-2)
CASSPETGAGGELFF

SEQ ID NO: 760915 - protein, 17 aa, Homo sapiens
  CDR3 for alpha chain variable domain of TCR clone 380458 (TRAV23/DV6, TRAJ53)
CSASKLGSGGSNYKLTF

SEQ ID NO: 760916 - protein, 14 aa, Homo sapiens
  CDR3 for beta chain variable domain of TCR clone 380458 (TRBV7-9, TRBJ2-3)
CASSLEQGTNTQYF

SEQ ID NO: 760917 - protein, 18 aa, Homo sapiens
  CDR3 for alpha chain variable domain of TCR clone 380459 (TRAV21, TRAJ52)
CAVRPSPAGGTSYGKLTF

SEQ ID NO: 760918 - protein, 16 aa, Homo sapiens
  CDR3 for beta chain variable domain of TCR clone 380459 (TRBV28, TRBJ1-5)
CASSFRGGYSNQPQHF

SEQ ID NO: 760919 - protein, 17 aa, Homo sapiens
  CDR3 for alpha chain variable domain of TCR clone 380460 (TRAV8-6, TRAJ58)
CTVSSWVGETSGSRLTF

SEQ ID NO: 760920 - protein, 17 aa, Homo sapiens
  CDR3 for beta chain variable domain of TCR clone 380460 (TRBV4-3, TRBJ1-2)
CASSSRLQAGGSVGYTF

SEQ ID NO: 760921 - protein, 14 aa, Homo sapiens
  CDR3 for alpha chain variable domain of TCR clone 380461 (TRAV12-2, TRAJ9)
CAVNMEGGGFKTIF

SEQ ID NO: 760922 - protein, 15 aa, Homo sapiens
  CDR3 for beta chain variable domain of TCR clone 380461 (TRBV5-1, TRBJ2-3)
CASSVTSGSTDTQYF

SEQ ID NO: 760923 - protein, 15 aa, Homo sapiens
  CDR3 for alpha chain variable domain of TCR clone 380462 (TRAV16, TRAJ48)
CALFISNFGNEKLTF

SEQ ID NO: 760924 - protein, 15 aa, Homo sapiens
  CDR3 for beta chain variable domain of TCR clone 380462 (TRBV10-2, TRBJ2-6)
CASSEQGTGANVLTF

SEQ ID NO: 760925 - protein, 13 aa, Homo sapiens
  CDR3 for alpha chain variable domain of TCR clone 380463 (TRAV16, TRAJ10)
CALLTGGVNKLTF

SEQ ID NO: 760926 - protein, 12 aa, Homo sapiens
  CDR3 for beta chain variable domain of TCR clone 380463 (TRBV28, TRBJ2-7)
CASTGNHYEQYF

SEQ ID NO: 760927 - protein, 12 aa, Homo sapiens
  CDR3 for alpha chain variable domain of TCR clone 380464 (TRAV8-6, TRAJ11)
CALSSGYSTLTF

SEQ ID NO: 760928 - protein, 11 aa, Homo sapiens
  CDR3 for beta chain variable domain of TCR clone 380464 (TRBV20-1, TRBJ1-5)
CSAQGDQPQHF

SEQ ID NO: 760929 - protein, 16 aa, Homo sapiens
  CDR3 for alpha chain variable domain of TCR clone 380465 (TRAV21, TRAJ37)
CAVRTAGSSNTGKLIF

SEQ ID NO: 760930 - protein, 15 aa, Homo sapiens
  CDR3 for beta chain variable domain of TCR clone 380465 (TRBV11-2, TRBJ2-1)
CASSKNRGLIYEQFF

SEQ ID NO: 760931 - protein, 14 aa, Homo sapiens
  CDR3 for alpha chain variable domain of TCR clone 380466 (TRAV1-2, TRAJ17)
CALRRGAAGNKLTF

SEQ ID NO: 760932 - protein, 12 aa, Homo sapiens
  CDR3 for beta chain variable domain of TCR clone 380466 (TRBV11-2, TRBJ2-2)
RASSLGGGELFF

SEQ ID NO: 760933 - protein, 12 aa, Homo sapiens
  CDR3 for alpha chain variable domain of TCR clone 380467 (TRAV16, TRAJ10)
CSRTGGGNKLTF

SEQ ID NO: 760934 - protein, 13 aa, Homo sapiens
  CDR3 for beta chain variable domain of TCR clone 380467 (TRBV15, TRBJ2-7)
CATTTTGHYEQYF

SEQ ID NO: 760935 - protein, 10 aa, Homo sapiens
  CDR3 for alpha chain variable domain of TCR clone 380468 (TRAV12-3, TRAJ23)
CAPGGGKLIF

SEQ ID NO: 760936 - protein, 17 aa, Homo sapiens
  CDR3 for beta chain variable domain of TCR clone 380468 (TRBV11-2, TRBJ2-1)
CASSLYPPGVEYNEQFF

SEQ ID NO: 760937 - protein, 15 aa, Homo sapiens
  CDR3 for alpha chain variable domain of TCR clone 380469 (TRAV3, TRAJ22)
CAVRDRGGSARQLTF

SEQ ID NO: 760938 - protein, 15 aa, Homo sapiens
  CDR3 for beta chain variable domain of TCR clone 380469 (TRBV7-3, TRBJ2-2)
CASSETGQGTGEMFF

SEQ ID NO: 760939 - protein, 14 aa, Homo sapiens
  CDR3 for alpha chain variable domain of TCR clone 380470 (TRAV14/DV4, TRAJ20)
SAMRESLNDYKLSF

SEQ ID NO: 760940 - protein, 15 aa, Homo sapiens
  CDR3 for beta chain variable domain of TCR clone 380470 (TRBV7-9, TRBJ2-7)
CASSLALAEAYEQYF

SEQ ID NO: 760941 - protein, 14 aa, Homo sapiens
  CDR3 for alpha chain variable domain of TCR clone 380471 (TRAV8-3, TRAJ22)
CAVKPPGSSRQLTF

SEQ ID NO: 760942 - protein, 14 aa, Homo sapiens
  CDR3 for beta chain variable domain of TCR clone 380471 (TRBV12-4, TRBJ2-2)
CASSLSQDTGELFF

SEQ ID NO: 760943 - protein, 13 aa, Homo sapiens
  CDR3 for alpha chain variable domain of TCR clone 380472 (TRAV8-3, TRAJ28)
CAVGAVGSYQLTF

SEQ ID NO: 760944 - protein, 14 aa, Homo sapiens
  CDR3 for beta chain variable domain of TCR clone 380472 (TRBV7-2, TRBJ2-7)
CARRSRGAAYEQYF

SEQ ID NO: 760945 - protein, 13 aa, Homo sapiens
  CDR3 for alpha chain variable domain of TCR clone 380473 (TRAV12-3, TRAJ13)
CAMTSGGHQKVTF

SEQ ID NO: 760946 - protein, 13 aa, Homo sapiens
  CDR3 for beta chain variable domain of TCR clone 380473 (TRBV20-1, TRBJ2-2)
CSALSGGAGELSF

SEQ ID NO: 760947 - protein, 15 aa, Homo sapiens
  CDR3 for alpha chain variable domain of TCR clone 380474 (TRAV8-6, TRAJ6)
CAVSGESGGSYKTTF

SEQ ID NO: 760948 - protein, 14 aa, Homo sapiens
  CDR3 for beta chain variable domain of TCR clone 380474 (TRBV9, TRBJ2-4)
CASSPSGTSGFQYF

SEQ ID NO: 760949 - protein, 17 aa, Homo sapiens
  CDR3 for alpha chain variable domain of TCR clone 380475 (TRAV13-1, TRAJ5)
CSNPCLSRDTGRRALTF

SEQ ID NO: 760950 - protein, 17 aa, Homo sapiens
  CDR3 for beta chain variable domain of TCR clone 380475 (TRBV24-1, TRBJ2-1)
CATSDVSTSGTYNEQFF

SEQ ID NO: 760951 - protein, 14 aa, Homo sapiens
  CDR3 for alpha chain variable domain of TCR clone 380476 (TRAV4, TRAJ20)
CLVGRRSNDYKLTF

SEQ ID NO: 760952 - protein, 18 aa, Homo sapiens
  CDR3 for beta chain variable domain of TCR clone 380476 (TRBV2, TRBJ2-5)
CASSGDPQGRGAQETQYF

SEQ ID NO: 760953 - protein, 15 aa, Homo sapiens
  CDR3 for alpha chain variable domain of TCR clone 380477 (TRAV3, TRAJ22)
CAVRGRGGSARPLTF

SEQ ID NO: 760954 - protein, 16 aa, Homo sapiens
  CDR3 for beta chain variable domain of TCR clone 380477 (TRBV5-4, TRBJ2-3)
CASQQPGAGGADTQYF

SEQ ID NO: 760955 - protein, 14 aa, Homo sapiens
  CDR3 for alpha chain variable domain of TCR clone 380478 (TRAV1-2, TRAJ33)
CAVRAPYSNYQLIW

SEQ ID NO: 760956 - protein, 14 aa, Homo sapiens
  CDR3 for beta chain variable domain of TCR clone 380478 (TRBV11-3, TRBJ1-6)
CASSFSGGDSPLHF

SEQ ID NO: 760957 - protein, 12 aa, Homo sapiens
  CDR3 for alpha chain variable domain of TCR clone 380479 (TRAV13-1, TRAJ30)
CAASYRDDKIIF

SEQ ID NO: 760958 - protein, 16 aa, Homo sapiens
  CDR3 for beta chain variable domain of TCR clone 380479 (TRBV12-5, TRBJ2-5)
CASGPRTSGNQETQYF

SEQ ID NO: 760959 - protein, 12 aa, Homo sapiens
  CDR3 for alpha chain variable domain of TCR clone 380480 (TRAV12-3, TRAJ17)
CAMTLTGNKLTF

SEQ ID NO: 760960 - protein, 15 aa, Homo sapiens
  CDR3 for beta chain variable domain of TCR clone 380480 (TRBV20-1, TRBJ2-7)
CSARDRLSGMYEQYF

SEQ ID NO: 760961 - protein, 20 aa, Homo sapiens
  CDR3 for alpha chain variable domain of TCR clone 380481 (TRAV1-1, TRAJ39)
CLLLLRCESSAYNAGNMLTF

SEQ ID NO: 760962 - protein, 13 aa, Homo sapiens
  CDR3 for beta chain variable domain of TCR clone 380481 (TRBV12-4, TRBJ1-5)
CASSPDRAQPQYF

SEQ ID NO: 760963 - protein, 12 aa, Homo sapiens
  CDR3 for alpha chain variable domain of TCR clone 380482 (TRAV1-1, TRAJ8)
CAGGTGFQKLGF

SEQ ID NO: 760964 - protein, 13 aa, Homo sapiens
  CDR3 for beta chain variable domain of TCR clone 380482 (TRBV7-3, TRBJ1-1)
CASSQDWGAEAFF

SEQ ID NO: 760965 - protein, 12 aa, Homo sapiens
  CDR3 for alpha chain variable domain of TCR clone 380483 (TRAV12-2, TRAJ10)
WGVTGGGNKLTF

SEQ ID NO: 760966 - protein, 15 aa, Homo sapiens
  CDR3 for beta chain variable domain of TCR clone 380483 (TRBV7-2, TRBJ1-2)
CASSLVSGGDYGYTF

SEQ ID NO: 760967 - protein, 14 aa, Homo sapiens
  CDR3 for alpha chain variable domain of TCR clone 380484 (TRAV27, TRAJ45)
CAGAQEEVLTDLPL

SEQ ID NO: 760968 - protein, 17 aa, Homo sapiens
  CDR3 for beta chain variable domain of TCR clone 380484 (TRBV28, TRBJ2-5)
CASSTPEGDALQETQYF

SEQ ID NO: 760969 - protein, 13 aa, Homo sapiens
  CDR3 for alpha chain variable domain of TCR clone 380485 (TRAV20, TRAJ20)
CAVQALNDYKLSF

SEQ ID NO: 760970 - protein, 14 aa, Homo sapiens
  CDR3 for beta chain variable domain of TCR clone 380485 (TRBV6-1, TRBJ1-3)
CASVQGGGGNTIYF

SEQ ID NO: 760971 - protein, 14 aa, Homo sapiens
  CDR3 for alpha chain variable domain of TCR clone 380486 (TRAV12-3, TRAJ54)
CAMRGIQGAQKLVF

SEQ ID NO: 760972 - protein, 13 aa, Homo sapiens
  CDR3 for beta chain variable domain of TCR clone 380486 (TRBV19, TRBJ1-1)
CASSPSNWGEAFF

SEQ ID NO: 760973 - protein, 11 aa, Homo sapiens
  CDR3 for alpha chain variable domain of TCR clone 380487 (TRAV35, TRAJ34)
CWAGNTDKLIF

SEQ ID NO: 760974 - protein, 14 aa, Homo sapiens
  CDR3 for beta chain variable domain of TCR clone 380487 (TRBV5-1, TRBJ2-7)
CASSRGESLYEQYF

SEQ ID NO: 760975 - protein, 15 aa, Homo sapiens
  CDR3 for alpha chain variable domain of TCR clone 380488 (TRAV21, TRAJ52)
CAVRGGGTSYGKLTF

SEQ ID NO: 760976 - protein, 13 aa, Homo sapiens
  CDR3 for beta chain variable domain of TCR clone 380488 (TRBV6-5, TRBJ2-5)
CAIAPSPQETQYF

SEQ ID NO: 760977 - protein, 12 aa, Homo sapiens
  CDR3 for alpha chain variable domain of TCR clone 380489 (TRAV21, TRAJ49)
CAVNDGGNQFYF

SEQ ID NO: 760978 - protein, 14 aa, Homo sapiens
  CDR3 for beta chain variable domain of TCR clone 380489 (TRBV18, TRBJ2-7)
CASSPRAGSYEQYF

SEQ ID NO: 760979 - protein, 16 aa, Homo sapiens
  CDR3 for alpha chain variable domain of TCR clone 380490 (TRAV30, TRAJ24)
CGTEIVDADSWGKFQF

SEQ ID NO: 760980 - protein, 14 aa, Homo sapiens
  CDR3 for beta chain variable domain of TCR clone 380490 (TRBV19, TRBJ1-5)
CASSKMTGPQPQHF

SEQ ID NO: 760981 - protein, 12 aa, Homo sapiens
  CDR3 for alpha chain variable domain of TCR clone 380491 (TRAV12-3, TRAJ17)
CALTLTGNKLTF

SEQ ID NO: 760982 - protein, 15 aa, Homo sapiens
  CDR3 for beta chain variable domain of TCR clone 380491 (TRBV20-1, TRBJ2-7)
CSAGDRVSGMDEQYF

SEQ ID NO: 760983 - protein, 16 aa, Homo sapiens
  CDR3 for alpha chain variable domain of TCR clone 380492 (TRAV30, TRAJ24)
CGTEIVDADSWGKFQF

SEQ ID NO: 760984 - protein, 17 aa, Homo sapiens
  CDR3 for beta chain variable domain of TCR clone 380492 (TRBV20-1, TRBJ2-2)
RSASGSGQGGLTGELFF

SEQ ID NO: 760985 - protein, 15 aa, Homo sapiens
  CDR3 for alpha chain variable domain of TCR clone 380493 (TRAV12-2, TRAJ56)
CAVNPFTGANSKLTF

SEQ ID NO: 760986 - protein, 13 aa, Homo sapiens
  CDR3 for beta chain variable domain of TCR clone 380493 (TRBV20-1, TRBJ1-2)
CSARDRVYGSYTF

SEQ ID NO: 760987 - protein, 19 aa, Homo sapiens
  CDR3 for alpha chain variable domain of TCR clone 380494 (TRAV26-2, TRAJ52)
CILRTGFNAGGTSYGKLTF

SEQ ID NO: 760988 - protein, 12 aa, Homo sapiens
  CDR3 for beta chain variable domain of TCR clone 380494 (TRBV7-9, TRBJ2-7)
CASSIKREEQYF

SEQ ID NO: 760989 - protein, 13 aa, Homo sapiens
  CDR3 for alpha chain variable domain of TCR clone 380495 (TRAV2, TRAJ40)
CAVVTSGTHKYIF

SEQ ID NO: 760990 - protein, 16 aa, Homo sapiens
  CDR3 for beta chain variable domain of TCR clone 380495 (TRBV29-1, TRBJ1-2)
CSVEANRDIANYGYTF

SEQ ID NO: 760991 - protein, 15 aa, Homo sapiens
  CDR3 for alpha chain variable domain of TCR clone 380496 (TRAV2, TRAJ9)
CAVEERGTGGFKTIF

SEQ ID NO: 760992 - protein, 16 aa, Homo sapiens
  CDR3 for beta chain variable domain of TCR clone 380496 (TRBV24-1, TRBJ2-3)
CAASDPGTGATDTQYF

SEQ ID NO: 760993 - protein, 16 aa, Homo sapiens
  CDR3 for alpha chain variable domain of TCR clone 380497 (TRAV30, TRAJ48)
CGTEIKSNFGNEKLTF

SEQ ID NO: 760994 - protein, 17 aa, Homo sapiens
  CDR3 for beta chain variable domain of TCR clone 380497 (TRBV27, TRBJ2-1)
WASSSERGGQSADEQFF

SEQ ID NO: 760995 - protein, 16 aa, Homo sapiens
  CDR3 for alpha chain variable domain of TCR clone 380498 (TRAV20, TRAJ22)
CAVQASSSGSERQLTF

SEQ ID NO: 760996 - protein, 13 aa, Homo sapiens
  CDR3 for beta chain variable domain of TCR clone 380498 (TRBV7-2, TRBJ2-5)
CASSQTSVETQYF

SEQ ID NO: 760997 - protein, 15 aa, Homo sapiens
  CDR3 for alpha chain variable domain of TCR clone 380499 (TRAV3, TRAJ20)
CAVRDIKLSDYKLSF

SEQ ID NO: 760998 - protein, 18 aa, Homo sapiens
  CDR3 for beta chain variable domain of TCR clone 380499 (TRBV20-1, TRBJ2-5)
CRQTGDSGRLGGKETQYF

SEQ ID NO: 760999 - protein, 11 aa, Homo sapiens
  CDR3 for alpha chain variable domain of TCR clone 380500 (TRAV16, TRAJ31)
CALFNNARLMF

SEQ ID NO: 761000 - protein, 15 aa, Homo sapiens
  CDR3 for beta chain variable domain of TCR clone 380500 (TRBV10-3, TRBJ2-1)
CAIRNGTSGHNEQFF

SEQ ID NO: 761001 - protein, 14 aa, Homo sapiens
  CDR3 for alpha chain variable domain of TCR clone 380501 (TRAV12-2, TRAJ45)
CALPERGGADGLTF

SEQ ID NO: 761002 - protein, 12 aa, Homo sapiens
  CDR3 for beta chain variable domain of TCR clone 380501 (TRBV7-9, TRBJ2-7)
CASSFGSYEQYF

SEQ ID NO: 761003 - protein, 17 aa, Homo sapiens
  CDR3 for alpha chain variable domain of TCR clone 380502 (TRAV3, TRAJ42)
CAVRDRDYGGSQGNLIF

SEQ ID NO: 761004 - protein, 16 aa, Homo sapiens
  CDR3 for beta chain variable domain of TCR clone 380502 (TRBV7-3, TRBJ2-1)
CASSKPLAGGYNEQFF

SEQ ID NO: 761005 - protein, 15 aa, Homo sapiens
  CDR3 for alpha chain variable domain of TCR clone 380503 (TRAV16, TRAJ12)
CSKWPLRDSSYKLIF

SEQ ID NO: 761006 - protein, 15 aa, Homo sapiens
  CDR3 for beta chain variable domain of TCR clone 380503 (TRBV7-9, TRBJ1-6)
CASSSPGRGNSPLHF

SEQ ID NO: 761007 - protein, 12 aa, Homo sapiens
  CDR3 for alpha chain variable domain of TCR clone 380504 (TRAV21, TRAJ11)
CAVRGGNSTLTF

SEQ ID NO: 761008 - protein, 16 aa, Homo sapiens
  CDR3 for beta chain variable domain of TCR clone 380504 (TRBV7-2, TRBJ2-5)
CASSYKTGISLETQYF

SEQ ID NO: 761009 - protein, 18 aa, Homo sapiens
  CDR3 for alpha chain variable domain of TCR clone 380505 (TRAV21, TRAJ52)
CAVRPSPEGGTSYGKLTF

SEQ ID NO: 761010 - protein, 14 aa, Homo sapiens
  CDR3 for beta chain variable domain of TCR clone 380505 (TRBV4-1, TRBJ2-2)
CASSQAVNTGELFF

SEQ ID NO: 761011 - protein, 14 aa, Homo sapiens
  CDR3 for alpha chain variable domain of TCR clone 380506 (TRAV2, TRAJ37)
CAVDFTSNTGKLIF

SEQ ID NO: 761012 - protein, 14 aa, Homo sapiens
  CDR3 for beta chain variable domain of TCR clone 380506 (TRBV20-1, TRBJ2-7)
CSAPELAGVGEQYF

SEQ ID NO: 761013 - protein, 16 aa, Homo sapiens
  CDR3 for alpha chain variable domain of TCR clone 380507 (TRAV17, TRAJ54)
CATDSGIIQGAQKLVF

SEQ ID NO: 761014 - protein, 16 aa, Homo sapiens
  CDR3 for beta chain variable domain of TCR clone 380507 (TRBV5-1, TRBJ2-1)
CASSGAGASDYNEQFF

SEQ ID NO: 761015 - protein, 14 aa, Homo sapiens
  CDR3 for alpha chain variable domain of TCR clone 380508 (TRAV17, TRAJ12)
CATDEKDSSYKLIF

SEQ ID NO: 761016 - protein, 18 aa, Homo sapiens
  CDR3 for beta chain variable domain of TCR clone 380508 (TRBV25-1, TRBJ1-2)
WASSGLQNGQGLIFGYTF

SEQ ID NO: 761017 - protein, 10 aa, Homo sapiens
  CDR3 for alpha chain variable domain of TCR clone 380509 (TRAV1-2, TRAJ20)
CALNDYKLSF

SEQ ID NO: 761018 - protein, 14 aa, Homo sapiens
  CDR3 for beta chain variable domain of TCR clone 380509 (TRBV7-8, TRBJ1-5)
CASSTGTVGGPQHF

SEQ ID NO: 761019 - protein, 14 aa, Homo sapiens
  CDR3 for alpha chain variable domain of TCR clone 380510 (TRAV25, TRAJ27)
CAGEHMTNAGKSTF

SEQ ID NO: 761020 - protein, 14 aa, Homo sapiens
  CDR3 for beta chain variable domain of TCR clone 380510 (TRBV4-2, TRBJ1-2)
CASSPGGSNYGYTF

SEQ ID NO: 761021 - protein, 13 aa, Homo sapiens
  CDR3 for alpha chain variable domain of TCR clone 380511 (TRAV20, TRAJ37)
CAGCSINTVKLIF

SEQ ID NO: 761022 - protein, 11 aa, Homo sapiens
  CDR3 for beta chain variable domain of TCR clone 380511 (TRBV12-4, TRBJ2-3)
CASTATDTQYV

SEQ ID NO: 761023 - protein, 14 aa, Homo sapiens
  CDR3 for alpha chain variable domain of TCR clone 380512 (TRAV12-3, TRAJ54)
CAMRIIQGAQKLVF

SEQ ID NO: 761024 - protein, 14 aa, Homo sapiens
  CDR3 for beta chain variable domain of TCR clone 380512 (TRBV28, TRBJ1-1)
CASSSEQGYTEAFF

SEQ ID NO: 761025 - protein, 14 aa, Homo sapiens
  CDR3 for alpha chain variable domain of TCR clone 380513 (TRAV12-1, TRAJ17)
CVVNPKAAGNKLTF

SEQ ID NO: 761026 - protein, 16 aa, Homo sapiens
  CDR3 for beta chain variable domain of TCR clone 380513 (TRBV3-1, TRBJ2-5)
CASSQDWASGQETQYF

SEQ ID NO: 761027 - protein, 21 aa, Homo sapiens
  CDR3 for alpha chain variable domain of TCR clone 380514 (TRAV4, TRAJ30)
PRVSLSDTAVYYCLRDDKIIF

SEQ ID NO: 761028 - protein, 15 aa, Homo sapiens
  CDR3 for beta chain variable domain of TCR clone 380514 (TRBV28, TRBJ2-1)
CASSIIAGGRSEQFF

SEQ ID NO: 761029 - protein, 14 aa, Homo sapiens
  CDR3 for alpha chain variable domain of TCR clone 380515 (TRAV16, TRAJ37)
CALDISGNTGKLIF

SEQ ID NO: 761030 - protein, 15 aa, Homo sapiens
  CDR3 for beta chain variable domain of TCR clone 380515 (TRBV28, TRBJ2-1)
CASSIIAGGRSEQFF

SEQ ID NO: 761031 - protein, 16 aa, Homo sapiens
  CDR3 for alpha chain variable domain of TCR clone 380516 (TRAV30, TRAJ24)
CGTEIVDADSWGKFQF

SEQ ID NO: 761032 - protein, 15 aa, Homo sapiens
  CDR3 for beta chain variable domain of TCR clone 380516 (TRBV18, TRBJ2-1)
CASLPDRWRDNEQFF

SEQ ID NO: 761033 - protein, 11 aa, Homo sapiens
  CDR3 for alpha chain variable domain of TCR clone 380517 (TRAV2, TRAJ20)
CAVSDDYKLSF

SEQ ID NO: 761034 - protein, 20 aa, Homo sapiens
  CDR3 for beta chain variable domain of TCR clone 380517 (TRBV19, TRBJ2-1)
CASSISRTVTGTRLNNEQFF

SEQ ID NO: 761035 - protein, 17 aa, Homo sapiens
  CDR3 for alpha chain variable domain of TCR clone 380518 (TRAV36/DV7, TRAJ52)
CAVAQRAGGTSYGKLTF

SEQ ID NO: 761036 - protein, 15 aa, Homo sapiens
  CDR3 for beta chain variable domain of TCR clone 380518 (TRBV28, TRBJ2-5)
CASSSGRTIQETQYF

SEQ ID NO: 761037 - protein, 14 aa, Homo sapiens
  CDR3 for alpha chain variable domain of TCR clone 380519 (TRAV13-1, TRAJ44)
CAAKATGTASKLTF

SEQ ID NO: 761038 - protein, 16 aa, Homo sapiens
  CDR3 for beta chain variable domain of TCR clone 380519 (TRBV25-1, TRBJ1-1)
CASTHLGGNTEAFLDK

SEQ ID NO: 761039 - protein, 13 aa, Homo sapiens
  CDR3 for alpha chain variable domain of TCR clone 380520 (TRAV17, TRAJ4)
CATKSGGYNKLIF

SEQ ID NO: 761040 - protein, 14 aa, Homo sapiens
  CDR3 for beta chain variable domain of TCR clone 380520 (TRBV20-1, TRBJ1-5)
SSARDDRGNQPQHF

SEQ ID NO: 761041 - protein, 13 aa, Homo sapiens
  CDR3 for alpha chain variable domain of TCR clone 380521 (TRAV8-4, TRAJ10)
CAAFTGGGNQLTF

SEQ ID NO: 761042 - protein, 15 aa, Homo sapiens
  CDR3 for beta chain variable domain of TCR clone 380521 (TRBV2, TRBJ2-3)
CASSDFEKATDTQYF

SEQ ID NO: 761043 - protein, 15 aa, Homo sapiens
  CDR3 for alpha chain variable domain of TCR clone 380522 (TRAV8-2, TRAJ16)
CVVSDGFSDGQKLLF

SEQ ID NO: 761044 - protein, 13 aa, Homo sapiens
  CDR3 for beta chain variable domain of TCR clone 380522 (TRBV20-1, TRBJ1-1)
CSAPPGGHAEAFF

SEQ ID NO: 761045 - protein, 13 aa, Homo sapiens
  CDR3 for alpha chain variable domain of TCR clone 380523 (TRAV13-1, TRAJ39)
CSKYSNAGNMLTF

SEQ ID NO: 761046 - protein, 13 aa, Homo sapiens
  CDR3 for beta chain variable domain of TCR clone 380523 (TRBV7-9, TRBJ1-2)
CASSVKQNYGYTF

SEQ ID NO: 761047 - protein, 14 aa, Homo sapiens
  CDR3 for alpha chain variable domain of TCR clone 380524 (TRAV12-2, TRAJ13)
CAVKKTGGYQKFTF

SEQ ID NO: 761048 - protein, 15 aa, Homo sapiens
  CDR3 for beta chain variable domain of TCR clone 380524 (TRBV7-9, TRBJ1-5)
CASSQGHQPNQPQHF

SEQ ID NO: 761049 - protein, 12 aa, Homo sapiens
  CDR3 for alpha chain variable domain of TCR clone 380525 (TRAV1-1, TRAJ24)
CAVRGSWGKFQC

SEQ ID NO: 761050 - protein, 14 aa, Homo sapiens
  CDR3 for beta chain variable domain of TCR clone 380525 (TRBV20-1, TRBJ2-3)
CSARGGTSTDTQYF

SEQ ID NO: 761051 - protein, 10 aa, Homo sapiens
  CDR3 for alpha chain variable domain of TCR clone 380526 (TRAV21, TRAJ34)
CAADTDKPIF

SEQ ID NO: 761052 - protein, 17 aa, Homo sapiens
  CDR3 for beta chain variable domain of TCR clone 380526 (TRBV19, TRBJ2-6)
CASSTGQVFSGANVLTF

SEQ ID NO: 761053 - protein, 12 aa, Homo sapiens
  CDR3 for alpha chain variable domain of TCR clone 380527 (TRAV3, TRAJ20)
CAVRDGDYKLSF

SEQ ID NO: 761054 - protein, 14 aa, Homo sapiens
  CDR3 for beta chain variable domain of TCR clone 380527 (TRBV11-2, TRBJ2-1)
CASTTGQGNNEQFF

SEQ ID NO: 761055 - protein, 17 aa, Homo sapiens
  CDR3 for alpha chain variable domain of TCR clone 380528 (TRAV3, TRAJ6)
CAVSRRTDTGGSYIPTF

SEQ ID NO: 761056 - protein, 15 aa, Homo sapiens
  CDR3 for beta chain variable domain of TCR clone 380528 (TRBV7-2, TRBJ2-3)
CASSVTSGSTDTQYF

SEQ ID NO: 761057 - protein, 18 aa, Homo sapiens
  CDR3 for alpha chain variable domain of TCR clone 380529 (TRAV21, TRAJ52)
CAVRPSPAGGTSYGNLTF

SEQ ID NO: 761058 - protein, 13 aa, Homo sapiens
  CDR3 for beta chain variable domain of TCR clone 380529 (TRBV4-1, TRBJ2-7)
CASSQGQAYEQYF

SEQ ID NO: 761059 - protein, 15 aa, Homo sapiens
  CDR3 for alpha chain variable domain of TCR clone 380530 (TRAV23/DV6, TRAJ18)
CAARYRGSTLGRLYF

SEQ ID NO: 761060 - protein, 15 aa, Homo sapiens
  CDR3 for beta chain variable domain of TCR clone 380530 (TRBV7-2, TRBJ2-7)
CASSSLAGASSTSGR

SEQ ID NO: 761061 - protein, 14 aa, Homo sapiens
  CDR3 for alpha chain variable domain of TCR clone 380531 (TRAV12-2, TRAJ45)
CAVYSGGVADGLTF

SEQ ID NO: 761062 - protein, 13 aa, Homo sapiens
  CDR3 for beta chain variable domain of TCR clone 380531 (TRBV7-7, TRBJ2-3)
CASSLSRADTQYF

SEQ ID NO: 761063 - protein, 14 aa, Homo sapiens
  CDR3 for alpha chain variable domain of TCR clone 380532 (TRAV35, TRAJ40)
CAGSTTSGTYKYIF

SEQ ID NO: 761064 - protein, 13 aa, Homo sapiens
  CDR3 for beta chain variable domain of TCR clone 380532 (TRBV20-1, TRBJ1-6)
CSAPLGVGSPLQF

SEQ ID NO: 761065 - protein, 13 aa, Homo sapiens
  CDR3 for alpha chain variable domain of TCR clone 380533 (TRAV23/DV6, TRAJ22)
CAPWGGSARQLNF

SEQ ID NO: 761066 - protein, 14 aa, Homo sapiens
  CDR3 for beta chain variable domain of TCR clone 380533 (TRBV18, TRBJ2-7)
CASSPTSGGYEQYF

SEQ ID NO: 761067 - protein, 10 aa, Homo sapiens
  CDR3 for alpha chain variable domain of TCR clone 380534 (TRAV38-2/DV8, TRAJ40)
CASGTYKYIF

SEQ ID NO: 761068 - protein, 14 aa, Homo sapiens
  CDR3 for beta chain variable domain of TCR clone 380534 (TRBV7-9, TRBJ2-1)
CASSPRDSLYKQFF

SEQ ID NO: 761069 - protein, 14 aa, Homo sapiens
  CDR3 for alpha chain variable domain of TCR clone 380535 (TRAV1-2, TRAJ16)
CAVNRFSDVQKLLF

SEQ ID NO: 761070 - protein, 20 aa, Homo sapiens
  CDR3 for beta chain variable domain of TCR clone 380535 (TRBV7-8, TRBJ2-2)
CASSHLFPGPTIHITGELFF

SEQ ID NO: 761071 - protein, 11 aa, Homo sapiens
  CDR3 for alpha chain variable domain of TCR clone 380536 (TRAV2, TRAJ13)
CASGGYQKVTF

SEQ ID NO: 761072 - protein, 16 aa, Homo sapiens
  CDR3 for beta chain variable domain of TCR clone 380536 (TRBV6-1, TRBJ2-5)
CASSETLDRGAETQNF

SEQ ID NO: 761073 - protein, 15 aa, Homo sapiens
  CDR3 for alpha chain variable domain of TCR clone 380537 (TRAV26-1, TRAJ29)
CIVRVEGSGKTPLAF

SEQ ID NO: 761074 - protein, 15 aa, Homo sapiens
  CDR3 for beta chain variable domain of TCR clone 380537 (TRBV7-9, TRBJ1-5)
CASSQGHQPNQPQHF

SEQ ID NO: 761075 - protein, 14 aa, Homo sapiens
  CDR3 for alpha chain variable domain of TCR clone 380538 (TRAV12-2, TRAJ40)
CAVKIPSGTYKYIF

SEQ ID NO: 761076 - protein, 13 aa, Homo sapiens
  CDR3 for beta chain variable domain of TCR clone 380538 (TRBV7-9, TRBJ1-2)
CASSIKQNYGYTF

SEQ ID NO: 761077 - protein, 11 aa, Homo sapiens
  CDR3 for alpha chain variable domain of TCR clone 380539 (TRAV35, TRAJ30)
CAGLRDDKIIF

SEQ ID NO: 761078 - protein, 13 aa, Homo sapiens
  CDR3 for beta chain variable domain of TCR clone 380539 (TRBV7-3, TRBJ1-1)
CASSQDWGAEAFF

SEQ ID NO: 761079 - protein, 14 aa, Homo sapiens
  CDR3 for alpha chain variable domain of TCR clone 380540 (TRAV1-2, TRAJ8)
CAVGEDTGFQKLVF

SEQ ID NO: 761080 - protein, 18 aa, Homo sapiens
  CDR3 for beta chain variable domain of TCR clone 380540 (TRBV11-2, TRBJ2-3)
CASSLGGASRGAPNTQYF

SEQ ID NO: 761081 - protein, 15 aa, Homo sapiens
  CDR3 for alpha chain variable domain of TCR clone 380541 (TRAV8-3, TRAJ27)
CAVGPSKTNAGKSTF

SEQ ID NO: 761082 - protein, 14 aa, Homo sapiens
  CDR3 for beta chain variable domain of TCR clone 380541 (TRBV19, TRBJ2-5)
CASSMTGQQETQYF

SEQ ID NO: 761083 - protein, 13 aa, Homo sapiens
  CDR3 for alpha chain variable domain of TCR clone 380542 (TRAV16, TRAJ22)
SAMLAGSARQLTF

SEQ ID NO: 761084 - protein, 14 aa, Homo sapiens
  CDR3 for beta chain variable domain of TCR clone 380542 (TRBV7-9, TRBJ2-1)
CASSPRDSLYEQFF

SEQ ID NO: 761085 - protein, 13 aa, Homo sapiens
  CDR3 for alpha chain variable domain of TCR clone 380543 (TRAV36/DV7, TRAJ7)
CAVERYGNNRLAF

SEQ ID NO: 761086 - protein, 12 aa, Homo sapiens
  CDR3 for beta chain variable domain of TCR clone 380543 (TRBV11-2, TRBJ2-2)
CASSLGGGELFF

SEQ ID NO: 761087 - protein, 12 aa, Homo sapiens
  CDR3 for alpha chain variable domain of TCR clone 380544 (TRAV8-3, TRAJ26)
CTGDNYGQNFVF

SEQ ID NO: 761088 - protein, 15 aa, Homo sapiens
  CDR3 for beta chain variable domain of TCR clone 380544 (TRBV9, TRBJ2-1)
CASSLAGSPYNEQFF

SEQ ID NO: 761089 - protein, 17 aa, Homo sapiens
  CDR3 for alpha chain variable domain of TCR clone 380545 (TRAV13-1, TRAJ31)
CAPRDRLMFGDGTQLVV

SEQ ID NO: 761090 - protein, 12 aa, Homo sapiens
  CDR3 for beta chain variable domain of TCR clone 380545 (TRBV7-9, TRBJ2-7)
CTSSLEGYEQYF

SEQ ID NO: 761091 - protein, 12 aa, Homo sapiens
  CDR3 for alpha chain variable domain of TCR clone 380546 (TRAV12-3, TRAJ17)
CAMTLTGNKPTF

SEQ ID NO: 761092 - protein, 13 aa, Homo sapiens
  CDR3 for beta chain variable domain of TCR clone 380546 (TRBV19, TRBJ1-2)
CASSQGQVYGYTF

SEQ ID NO: 761093 - protein, 13 aa, Homo sapiens
  CDR3 for alpha chain variable domain of TCR clone 380547 (TRAV20, TRAJ37)
CAGCSSNAGKLIL

SEQ ID NO: 761094 - protein, 11 aa, Homo sapiens
  CDR3 for beta chain variable domain of TCR clone 380547 (TRBV12-4, TRBJ2-3)
CASTATDTQYF

SEQ ID NO: 761095 - protein, 17 aa, Homo sapiens
  CDR3 for alpha chain variable domain of TCR clone 380548 (TRAV3, TRAJ22)
CAVRDPPLEGFCKATDL

SEQ ID NO: 761096 - protein, 14 aa, Homo sapiens
  CDR3 for beta chain variable domain of TCR clone 380548 (TRBV7-2, TRBJ1-2)
CASSQTGSTYGYTF

SEQ ID NO: 761097 - protein, 12 aa, Homo sapiens
  CDR3 for alpha chain variable domain of TCR clone 380549 (TRAV12-3, TRAJ17)
CAMTLTGNKLTF

SEQ ID NO: 761098 - protein, 15 aa, Homo sapiens
  CDR3 for beta chain variable domain of TCR clone 380549 (TRBV6-5, TRBJ2-1)
CASSYDAGAGNEQSF

SEQ ID NO: 761099 - protein, 14 aa, Homo sapiens
  CDR3 for alpha chain variable domain of TCR clone 380550 (TRAV26-1, TRAJ39)
CIVRGSRAGNMLTF

SEQ ID NO: 761100 - protein, 15 aa, Homo sapiens
  CDR3 for beta chain variable domain of TCR clone 380550 (TRBV7-9, TRBJ1-5)
CASSQGPKPNQPQHF

SEQ ID NO: 761101 - protein, 11 aa, Homo sapiens
  CDR3 for alpha chain variable domain of TCR clone 380551 (TRAV2, TRAJ13)
CASGGYQKVTF

SEQ ID NO: 761102 - protein, 14 aa, Homo sapiens
  CDR3 for beta chain variable domain of TCR clone 380551 (TRBV28, TRBJ1-2)
CASRIQGANYGYTF

SEQ ID NO: 761103 - protein, 14 aa, Homo sapiens
  CDR3 for alpha chain variable domain of TCR clone 380552 (TRAV3, TRAJ9)
CAVRLNTGGFKTIF

SEQ ID NO: 761104 - protein, 14 aa, Homo sapiens
  CDR3 for beta chain variable domain of TCR clone 380552 (TRBV15, TRBJ2-5)
CATSSTGYQETQYF

SEQ ID NO: 761105 - protein, 15 aa, Homo sapiens
  CDR3 for alpha chain variable domain of TCR clone 380553 (TRAV26-2, TRAJ13)
CILRDLSVGYQKVTF

SEQ ID NO: 761106 - protein, 14 aa, Homo sapiens
  CDR3 for beta chain variable domain of TCR clone 380553 (TRBV4-1, TRBJ2-3)
CASSQEGSTDTQYF

SEQ ID NO: 761107 - protein, 16 aa, Homo sapiens
  CDR3 for alpha chain variable domain of TCR clone 380554 (TRAV29/DV5, TRAJ28)
CAAVAYSGAGSYQLTF

SEQ ID NO: 761108 - protein, 15 aa, Homo sapiens
  CDR3 for beta chain variable domain of TCR clone 380554 (TRBV24-1, TRBJ1-4)
CATSDPQGADEKLFF

SEQ ID NO: 761109 - protein, 13 aa, Homo sapiens
  CDR3 for alpha chain variable domain of TCR clone 380555 (TRAV12-2, TRAJ24)
CAVATDSWGKLQF

SEQ ID NO: 761110 - protein, 14 aa, Homo sapiens
  CDR3 for beta chain variable domain of TCR clone 380555 (TRBV19, TRBJ1-5)
CASRAPDSFLSQHF

SEQ ID NO: 761111 - protein, 12 aa, Homo sapiens
  CDR3 for alpha chain variable domain of TCR clone 380556 (TRAV16, TRAJ10)
CSRTGGGNKLTF

SEQ ID NO: 761112 - protein, 17 aa, Homo sapiens
  CDR3 for beta chain variable domain of TCR clone 380556 (TRBV28, TRBJ2-7)
CASSPLHRASGVYEQYF

SEQ ID NO: 761113 - protein, 12 aa, Homo sapiens
  CDR3 for alpha chain variable domain of TCR clone 380557 (TRAV38-2/DV8, TRAJ27)
CAYRNNAGKSTF

SEQ ID NO: 761114 - protein, 13 aa, Homo sapiens
  CDR3 for beta chain variable domain of TCR clone 380557 (TRBV25-1, TRBJ2-6)
CASRGPGANVLTF

SEQ ID NO: 761115 - protein, 17 aa, Homo sapiens
  CDR3 for alpha chain variable domain of TCR clone 380558 (TRAV1-1, TRAJ3)
CLLLLRCPYSSASKIIF

SEQ ID NO: 761116 - protein, 13 aa, Homo sapiens
  CDR3 for beta chain variable domain of TCR clone 380558 (TRBV20-1, TRBJ1-1)
CSARAGGNTEAVF

SEQ ID NO: 761117 - protein, 15 aa, Homo sapiens
  CDR3 for alpha chain variable domain of TCR clone 380559 (TRAV12-1, TRAJ8)
CVVNVENTVFQKLVF

SEQ ID NO: 761118 - protein, 16 aa, Homo sapiens
  CDR3 for beta chain variable domain of TCR clone 380559 (TRBV7-2, TRBJ2-7)
CASSLEAGGPWYEQYF

SEQ ID NO: 761119 - protein, 17 aa, Homo sapiens
  CDR3 for alpha chain variable domain of TCR clone 380560 (TRAV3, TRAJ42)
CAVRDRDYGGSQGILIF

SEQ ID NO: 761120 - protein, 14 aa, Homo sapiens
  CDR3 for beta chain variable domain of TCR clone 380560 (TRBV7-2, TRBJ2-5)
CASSPRGSSETQYF

SEQ ID NO: 761121 - protein, 14 aa, Homo sapiens
  CDR3 for alpha chain variable domain of TCR clone 380561 (TRAV13-1, TRAJ24)
CAASRTDSWGKLQF

SEQ ID NO: 761122 - protein, 15 aa, Homo sapiens
  CDR3 for beta chain variable domain of TCR clone 380561 (TRBV7-9, TRBJ1-5)
SASSQGHQPNQPQHF

SEQ ID NO: 761123 - protein, 13 aa, Homo sapiens
  CDR3 for alpha chain variable domain of TCR clone 380562 (TRAV34, TRAJ33)
CGADMNSNYQLIL

SEQ ID NO: 761124 - protein, 16 aa, Homo sapiens
  CDR3 for beta chain variable domain of TCR clone 380562 (TRBV20-1, TRBJ2-1)
CSASLAGGPGYNEQFF

SEQ ID NO: 761125 - protein, 16 aa, Homo sapiens
  CDR3 for alpha chain variable domain of TCR clone 380563 (TRAV12-3, TRAJ53)
CAMSPGSGGSNHKLTF

SEQ ID NO: 761126 - protein, 15 aa, Homo sapiens
  CDR3 for beta chain variable domain of TCR clone 380563 (TRBV27, TRBJ2-1)
CASSNGGGSSNEQFF

SEQ ID NO: 761127 - protein, 12 aa, Homo sapiens
  CDR3 for alpha chain variable domain of TCR clone 380564 (TRAV12-3, TRAJ40)
CAVSSRTYKYIF

SEQ ID NO: 761128 - protein, 15 aa, Homo sapiens
  CDR3 for beta chain variable domain of TCR clone 380564 (TRBV7-9, TRBJ2-7)
CASSPGGGLTYEQYF

SEQ ID NO: 761129 - protein, 15 aa, Homo sapiens
  CDR3 for alpha chain variable domain of TCR clone 380565 (TRAV23/DV6, TRAJ37)
CAAGECSSNTGKLIF

SEQ ID NO: 761130 - protein, 17 aa, Homo sapiens
  CDR3 for beta chain variable domain of TCR clone 380565 (TRBV20-1, TRBJ2-7)
CSATRAGGVAGVEEQYF

SEQ ID NO: 761131 - protein, 15 aa, Homo sapiens
  CDR3 for alpha chain variable domain of TCR clone 380566 (TRAV26-1, TRAJ29)
CIARVEGSGNTPLVF

SEQ ID NO: 761132 - protein, 15 aa, Homo sapiens
  CDR3 for beta chain variable domain of TCR clone 380566 (TRBV28, TRBJ1-3)
CASSMGWASGNTMYF

SEQ ID NO: 761133 - protein, 19 aa, Homo sapiens
  CDR3 for alpha chain variable domain of TCR clone 380567 (TRAV8-3, TRAJ8)
CAVGPNEHSLSETCIWNLH

SEQ ID NO: 761134 - protein, 13 aa, Homo sapiens
  CDR3 for beta chain variable domain of TCR clone 380567 (TRBV10-2, TRBJ2-3)
CASSESGDHTQYF

SEQ ID NO: 761135 - protein, 15 aa, Homo sapiens
  CDR3 for alpha chain variable domain of TCR clone 380568 (TRAV3, TRAJ22)
CAVRDGGGSARQLTF

SEQ ID NO: 761136 - protein, 14 aa, Homo sapiens
  CDR3 for beta chain variable domain of TCR clone 380568 (TRBV19, TRBJ2-1)
CASSRLASINEQFF

SEQ ID NO: 761137 - protein, 13 aa, Homo sapiens
  CDR3 for alpha chain variable domain of TCR clone 380569 (TRAV8-4, TRAJ10)
CAAFTGGGNKLTF

SEQ ID NO: 761138 - protein, 15 aa, Homo sapiens
  CDR3 for beta chain variable domain of TCR clone 380569 (TRBV7-3, TRBJ2-2)
CASSETGQGTGELFF

SEQ ID NO: 761139 - protein, 15 aa, Homo sapiens
  CDR3 for alpha chain variable domain of TCR clone 380570 (TRAV3, TRAJ5)
CGLRDLDTGRRALTF

SEQ ID NO: 761140 - protein, 13 aa, Homo sapiens
  CDR3 for beta chain variable domain of TCR clone 380570 (TRBV12-4, TRBJ2-7)
CASSPTETYEQYF

SEQ ID NO: 761141 - protein, 12 aa, Homo sapiens
  CDR3 for alpha chain variable domain of TCR clone 380571 (TRAV12-3, TRAJ17)
CAMTLTGNKLTF

SEQ ID NO: 761142 - protein, 15 aa, Homo sapiens
  CDR3 for beta chain variable domain of TCR clone 380571 (TRBV20-1, TRBJ2-7)
CSARDRVSGRDERYF

SEQ ID NO: 761143 - protein, 16 aa, Homo sapiens
  CDR3 for alpha chain variable domain of TCR clone 380572 (TRAV12-2, TRAJ45)
CAVNMYSGGGADGLTF

SEQ ID NO: 761144 - protein, 14 aa, Homo sapiens
  CDR3 for beta chain variable domain of TCR clone 380572 (TRBV7-8, TRBJ2-3)
CASSFPDGQDTQYF

SEQ ID NO: 761145 - protein, 14 aa, Homo sapiens
  CDR3 for alpha chain variable domain of TCR clone 380573 (TRAV21, TRAJ35)
CAVMPIGFGNVLHC

SEQ ID NO: 761146 - protein, 15 aa, Homo sapiens
  CDR3 for beta chain variable domain of TCR clone 380573 (TRBV5-1, TRBJ2-1)
CASSPPRAPYNEQFF

SEQ ID NO: 761147 - protein, 12 aa, Homo sapiens
  CDR3 for alpha chain variable domain of TCR clone 380574 (TRAV3, TRAJ7)
CADLLWEQQTRF

SEQ ID NO: 761148 - protein, 13 aa, Homo sapiens
  CDR3 for beta chain variable domain of TCR clone 380574 (TRBV7-3, TRBJ2-5)
CASSFRGGETQYI

SEQ ID NO: 761149 - protein, 19 aa, Homo sapiens
  CDR3 for alpha chain variable domain of TCR clone 380575 (TRAV3, TRAJ6)
CAVRDRNPSRSGGSYIPTF

SEQ ID NO: 761150 - protein, 14 aa, Homo sapiens
  CDR3 for beta chain variable domain of TCR clone 380575 (TRBV5-1, TRBJ2-7)
CASSFTGGGFEQYF

SEQ ID NO: 761151 - protein, 19 aa, Homo sapiens
  CDR3 for alpha chain variable domain of TCR clone 380576 (TRAV8-4, )
CAGGEDIQNPDPAVNQLRD

SEQ ID NO: 761152 - protein, 15 aa, Homo sapiens
  CDR3 for beta chain variable domain of TCR clone 380576 (TRBV7-2, TRBJ2-1)
CASRKTGSSYNEQFF

SEQ ID NO: 761153 - protein, 12 aa, Homo sapiens
  CDR3 for alpha chain variable domain of TCR clone 380577 (TRAV12-3, TRAJ20)
CVMVRGDYKLSF

SEQ ID NO: 761154 - protein, 12 aa, Homo sapiens
  CDR3 for beta chain variable domain of TCR clone 380577 (TRBV6-1, TRBJ2-7)
CASSDYSYEQYF

SEQ ID NO: 761155 - protein, 15 aa, Homo sapiens
  CDR3 for alpha chain variable domain of TCR clone 380578 (TRAV38-1, TRAJ57)
CAFIDSQGGSEKLVF

SEQ ID NO: 761156 - protein, 16 aa, Homo sapiens
  CDR3 for beta chain variable domain of TCR clone 380578 (TRBV10-3, TRBJ2-1)
CAIRGGGRGDYNEQFF

SEQ ID NO: 761157 - protein, 14 aa, Homo sapiens
  CDR3 for alpha chain variable domain of TCR clone 380579 (TRAV1-2, TRAJ16)
CAVNRFSDGQKLLF

SEQ ID NO: 761158 - protein, 19 aa, Homo sapiens
  CDR3 for beta chain variable domain of TCR clone 380579 (TRBV5-7, TRBJ2-6)
CASSPRARGTFSGANVLTF

SEQ ID NO: 761159 - protein, 14 aa, Homo sapiens
  CDR3 for alpha chain variable domain of TCR clone 380580 (TRAV23/DV6, TRAJ24)
CAASLRNSWGKLQF

SEQ ID NO: 761160 - protein, 16 aa, Homo sapiens
  CDR3 for beta chain variable domain of TCR clone 380580 (TRBV7-9, TRBJ2-6)
CASSLKGPLRANVLTF

SEQ ID NO: 761161 - protein, 14 aa, Homo sapiens
  CDR3 for alpha chain variable domain of TCR clone 380581 (TRAV1-2, TRAJ8)
CAVREDTGFQKLVF

SEQ ID NO: 761162 - protein, 15 aa, Homo sapiens
  CDR3 for beta chain variable domain of TCR clone 380581 (TRBV6-1, TRBJ2-2)
CASSRLRGDTGELFF

SEQ ID NO: 761163 - protein, 13 aa, Homo sapiens
  CDR3 for alpha chain variable domain of TCR clone 380582 (TRAV3, TRAJ27)
CAVRPLGAGKSTF

SEQ ID NO: 761164 - protein, 12 aa, Homo sapiens
  CDR3 for beta chain variable domain of TCR clone 380582 (TRBV7-9, TRBJ2-3)
CQQPRVTDTQYF

SEQ ID NO: 761165 - protein, 15 aa, Homo sapiens
  CDR3 for alpha chain variable domain of TCR clone 380583 (TRAV12-3, TRAJ6)
CAMSATTGGGYIPPF

SEQ ID NO: 761166 - protein, 16 aa, Homo sapiens
  CDR3 for beta chain variable domain of TCR clone 380583 (TRBV20-1, TRBJ1-2)
CSASMGQGVANYGYTF

SEQ ID NO: 761167 - protein, 22 aa, Homo sapiens
  CDR3 for alpha chain variable domain of TCR clone 380584 (TRAV21, )
CAAILQIPDIQNPDPAVYQLRD

SEQ ID NO: 761168 - protein, 15 aa, Homo sapiens
  CDR3 for beta chain variable domain of TCR clone 380584 (TRBV11-2, TRBJ2-1)
CASSKNRGLIYEQFF

SEQ ID NO: 761169 - protein, 15 aa, Homo sapiens
  CDR3 for alpha chain variable domain of TCR clone 380585 (TRAV3, TRAJ20)
CAVRDIKLSDYKLSF

SEQ ID NO: 761170 - protein, 18 aa, Homo sapiens
  CDR3 for beta chain variable domain of TCR clone 380585 (TRBV20-1, TRBJ2-5)
CSQTGGSGRLGGKETQYF

SEQ ID NO: 761171 - protein, 14 aa, Homo sapiens
  CDR3 for alpha chain variable domain of TCR clone 380586 (TRAV26-1, TRAJ48)
CIVRVGFGNEKLTF

SEQ ID NO: 761172 - protein, 14 aa, Homo sapiens
  CDR3 for beta chain variable domain of TCR clone 380586 (TRBV19, TRBJ2-1)
CASPTFVLSGEKFF

SEQ ID NO: 761173 - protein, 15 aa, Homo sapiens
  CDR3 for alpha chain variable domain of TCR clone 380587 (TRAV19, TRAJ11)
CALSEGSGGYSTLTF

SEQ ID NO: 761174 - protein, 14 aa, Homo sapiens
  CDR3 for beta chain variable domain of TCR clone 380587 (TRBV5-1, TRBJ1-1)
CASSSTGEDTEAFF

SEQ ID NO: 761175 - protein, 16 aa, Homo sapiens
  CDR3 for alpha chain variable domain of TCR clone 380588 (TRAV14/DV4, TRAJ52)
CAMRYAGGTSYGKLTF

SEQ ID NO: 761176 - protein, 12 aa, Homo sapiens
  CDR3 for beta chain variable domain of TCR clone 380588 (TRBV11-2, TRBJ2-2)
CASSLGGGELFF

SEQ ID NO: 761177 - protein, 14 aa, Homo sapiens
  CDR3 for alpha chain variable domain of TCR clone 380589 (TRAV8-4, TRAJ13)
CAVTLSGGYQKVTF

SEQ ID NO: 761178 - protein, 17 aa, Homo sapiens
  CDR3 for beta chain variable domain of TCR clone 380589 (TRBV7-3, TRBJ2-3)
CASSLMKRMRGADAQYF

SEQ ID NO: 761179 - protein, 15 aa, Homo sapiens
  CDR3 for alpha chain variable domain of TCR clone 380590 (TRAV12-2, TRAJ45)
CAVLLGGGGADGLTF

SEQ ID NO: 761180 - protein, 15 aa, Homo sapiens
  CDR3 for beta chain variable domain of TCR clone 380590 (TRBV2, TRBJ2-1)
CASSETGGNYNEQFF

SEQ ID NO: 761181 - protein, 14 aa, Homo sapiens
  CDR3 for alpha chain variable domain of TCR clone 380591 (TRAV23/DV6, TRAJ10)
CAARLTGGGNKLTF

SEQ ID NO: 761182 - protein, 16 aa, Homo sapiens
  CDR3 for beta chain variable domain of TCR clone 380591 (TRBV19, TRBJ2-3)
CASSPGADSRTDTQYF

SEQ ID NO: 761183 - protein, 13 aa, Homo sapiens
  CDR3 for alpha chain variable domain of TCR clone 380592 (TRAV12-2, TRAJ20)
CAVYPSNDYKLSF

SEQ ID NO: 761184 - protein, 16 aa, Homo sapiens
  CDR3 for beta chain variable domain of TCR clone 380592 (TRBV13, TRBJ2-7)
CASSSRESGRTYEQYF

SEQ ID NO: 761185 - protein, 16 aa, Homo sapiens
  CDR3 for alpha chain variable domain of TCR clone 380593 (TRAV8-1, TRAJ39)
CAVNVPSYNAGNMRTF

SEQ ID NO: 761186 - protein, 15 aa, Homo sapiens
  CDR3 for beta chain variable domain of TCR clone 380593 (TRBV4-1, TRBJ2-3)
CASRSTRAGTDTQYF

SEQ ID NO: 761187 - protein, 15 aa, Homo sapiens
  CDR3 for alpha chain variable domain of TCR clone 380594 (TRAV26-1, TRAJ22)
CIVRVSFWFCKATDL

SEQ ID NO: 761188 - protein, 14 aa, Homo sapiens
  CDR3 for beta chain variable domain of TCR clone 380594 (TRBV7-9, TRBJ1-2)
CASSLKQLWLHLRF

SEQ ID NO: 761189 - protein, 13 aa, Homo sapiens
  CDR3 for alpha chain variable domain of TCR clone 380595 (TRAV8-1, TRAJ9)
CAVNSVGGFKTNF

SEQ ID NO: 761190 - protein, 15 aa, Homo sapiens
  CDR3 for beta chain variable domain of TCR clone 380595 (TRBV11-2, TRBJ2-3)
CASSGRDGLTDTQYF

SEQ ID NO: 761191 - protein, 14 aa, Homo sapiens
  CDR3 for alpha chain variable domain of TCR clone 380596 (TRAV12-2, TRAJ40)
CAVKIPSGTYKYIF

SEQ ID NO: 761192 - protein, 13 aa, Homo sapiens
  CDR3 for beta chain variable domain of TCR clone 380596 (TRBV20-1, TRBJ1-1)
QCTTRIGGTEAFF

SEQ ID NO: 761193 - protein, 12 aa, Homo sapiens
  CDR3 for alpha chain variable domain of TCR clone 380597 (TRAV13-2, TRAJ23)
CAERHRGGKLIF

SEQ ID NO: 761194 - protein, 12 aa, Homo sapiens
  CDR3 for beta chain variable domain of TCR clone 380597 (TRBV11-2, TRBJ2-2)
CASSLVGGELFF

SEQ ID NO: 761195 - protein, 13 aa, Homo sapiens
  CDR3 for alpha chain variable domain of TCR clone 380598 (TRAV20, TRAJ9)
CAVPDTGGFKSIF

SEQ ID NO: 761196 - protein, 15 aa, Homo sapiens
  CDR3 for beta chain variable domain of TCR clone 380598 (TRBV27, TRBJ2-7)
CASSKAGRGGYEQYF

SEQ ID NO: 761197 - protein, 15 aa, Homo sapiens
  CDR3 for alpha chain variable domain of TCR clone 380599 (TRAV26-1, TRAJ39)
CIVRVARNAGNMLTF

SEQ ID NO: 761198 - protein, 16 aa, Homo sapiens
  CDR3 for beta chain variable domain of TCR clone 380599 (TRBV5-1, TRBJ2-1)
CASSLTLAGGRSEQFF

SEQ ID NO: 761199 - protein, 20 aa, Homo sapiens
  CDR3 for alpha chain variable domain of TCR clone 380600 (TRAV12-2, TRAJ52)
SPVIQPPSRAGGTSYGKLTF

SEQ ID NO: 761200 - protein, 16 aa, Homo sapiens
  CDR3 for beta chain variable domain of TCR clone 380600 (TRBV15, TRBJ1-2)
CATSRGPRTGGGGYTF

SEQ ID NO: 761201 - protein, 12 aa, Homo sapiens
  CDR3 for alpha chain variable domain of TCR clone 380601 (TRAV21, TRAJ15)
CAVNQAGTALIF

SEQ ID NO: 761202 - protein, 13 aa, Homo sapiens
  CDR3 for beta chain variable domain of TCR clone 380601 (TRBV11-2, TRBJ2-5)
CASSATGEETQYF

SEQ ID NO: 761203 - protein, 12 aa, Homo sapiens
  CDR3 for alpha chain variable domain of TCR clone 380602 (TRAV23/DV6, TRAJ16)
CAATGTGQKLLF

SEQ ID NO: 761204 - protein, 13 aa, Homo sapiens
  CDR3 for beta chain variable domain of TCR clone 380602 (TRBV5-5, TRBJ1-2)
CASSFWRGEDYTF

SEQ ID NO: 761205 - protein, 14 aa, Homo sapiens
  CDR3 for alpha chain variable domain of TCR clone 380603 (TRAV12-2, TRAJ17)
CAVLFKAAGNKLTF

SEQ ID NO: 761206 - protein, 14 aa, Homo sapiens
  CDR3 for beta chain variable domain of TCR clone 380603 (TRBV12-5, TRBJ2-5)
CASCSRTHQETQYF

SEQ ID NO: 761207 - protein, 19 aa, Homo sapiens
  CDR3 for alpha chain variable domain of TCR clone 380604 (TRAV27, TRAJ41)
CAVRTQIPDIQNPDPAVYH

SEQ ID NO: 761208 - protein, 16 aa, Homo sapiens
  CDR3 for beta chain variable domain of TCR clone 380604 (TRBV5-1, TRBJ2-3)
CASSLGLAVYTDTQYF

SEQ ID NO: 761209 - protein, 14 aa, Homo sapiens
  CDR3 for alpha chain variable domain of TCR clone 380605 (TRAV9-2, TRAJ39)
CALYIYNAGNMLTF

SEQ ID NO: 761210 - protein, 13 aa, Homo sapiens
  CDR3 for beta chain variable domain of TCR clone 380605 (TRBV7-2, TRBJ1-6)
CASSLKFDSPLHF

SEQ ID NO: 761211 - protein, 16 aa, Homo sapiens
  CDR3 for alpha chain variable domain of TCR clone 380606 (TRAV26-1, TRAJ36)
CIVRVSYQTGANNLFF

SEQ ID NO: 761212 - protein, 17 aa, Homo sapiens
  CDR3 for beta chain variable domain of TCR clone 380606 (TRBV20-1, TRBJ2-2)
CSASGSGQGGLTGELFF

SEQ ID NO: 761213 - protein, 12 aa, Homo sapiens
  CDR3 for alpha chain variable domain of TCR clone 380607 (TRAV1-1, TRAJ23)
CAVTNQGGKLIF

SEQ ID NO: 761214 - protein, 15 aa, Homo sapiens
  CDR3 for beta chain variable domain of TCR clone 380607 (TRBV3-1, TRBJ2-7)
SASSQVRQGAYEQYF

SEQ ID NO: 761215 - protein, 13 aa, Homo sapiens
  CDR3 for alpha chain variable domain of TCR clone 380608 (TRAV27, TRAJ54)
CEGAGQGAQKLVL

SEQ ID NO: 761216 - protein, 15 aa, Homo sapiens
  CDR3 for beta chain variable domain of TCR clone 380608 (TRBV18, TRBJ2-6)
CASSPSYAGANVLTF

SEQ ID NO: 761217 - protein, 21 aa, Homo sapiens
  CDR3 for alpha chain variable domain of TCR clone 380609 (TRAV26-1, TRAJ38)
CIADNAGNNHIQNPDPAVYQL

SEQ ID NO: 761218 - protein, 13 aa, Homo sapiens
  CDR3 for beta chain variable domain of TCR clone 380609 (TRBV20-1, TRBJ1-1)
CSARDGGNTEAFF

SEQ ID NO: 761219 - protein, 14 aa, Homo sapiens
  CDR3 for alpha chain variable domain of TCR clone 380610 (TRAV38-1, TRAJ45)
CAYYSGGGADGLTF

SEQ ID NO: 761220 - protein, 12 aa, Homo sapiens
  CDR3 for beta chain variable domain of TCR clone 380610 (TRBV11-2, TRBJ2-2)
CASSLPTGELFF

SEQ ID NO: 761221 - protein, 14 aa, Homo sapiens
  CDR3 for alpha chain variable domain of TCR clone 380611 (TRAV13-1, TRAJ35)
CAASKGSFGNVMHC

SEQ ID NO: 761222 - protein, 13 aa, Homo sapiens
  CDR3 for beta chain variable domain of TCR clone 380611 (TRBV7-3, TRBJ1-1)
CASSQDWGAEAFF

SEQ ID NO: 761223 - protein, 12 aa, Homo sapiens
  CDR3 for alpha chain variable domain of TCR clone 380612 (TRAV36/DV7, TRAJ54)
CAVVWGAQKLVF

SEQ ID NO: 761224 - protein, 14 aa, Homo sapiens
  CDR3 for beta chain variable domain of TCR clone 380612 (TRBV7-3, TRBJ1-1)
CASSLKGGNTEAFF

SEQ ID NO: 761225 - protein, 14 aa, Homo sapiens
  CDR3 for alpha chain variable domain of TCR clone 380613 (TRAV8-2, TRAJ4)
CVVSPSGGYNKLIF

SEQ ID NO: 761226 - protein, 12 aa, Homo sapiens
  CDR3 for beta chain variable domain of TCR clone 380613 (TRBV19, TRBJ1-5)
CASSIAQQPQHF

SEQ ID NO: 761227 - protein, 13 aa, Homo sapiens
  CDR3 for alpha chain variable domain of TCR clone 380614 (TRAV13-1, TRAJ21)
CAASIYNFNKFYF

SEQ ID NO: 761228 - protein, 13 aa, Homo sapiens
  CDR3 for beta chain variable domain of TCR clone 380614 (TRBV12-4, TRBJ1-2)
CASSSGLTVISTF

SEQ ID NO: 761229 - protein, 12 aa, Homo sapiens
  CDR3 for alpha chain variable domain of TCR clone 380615 (TRAV23/DV6, TRAJ3)
CAARAPQPCFQD

SEQ ID NO: 761230 - protein, 17 aa, Homo sapiens
  CDR3 for beta chain variable domain of TCR clone 380615 (TRBV7-9, TRBJ2-3)
CASSPTVAGDLTDTQYF

SEQ ID NO: 761231 - protein, 10 aa, Homo sapiens
  CDR3 for alpha chain variable domain of TCR clone 380616 (TRAV12-1, TRAJ43)
CVVHNNDMRF

SEQ ID NO: 761232 - protein, 12 aa, Homo sapiens
  CDR3 for beta chain variable domain of TCR clone 380616 (TRBV27, TRBJ2-7)
CASSGGFYEQYF

SEQ ID NO: 761233 - protein, 11 aa, Homo sapiens
  CDR3 for alpha chain variable domain of TCR clone 380617 (TRAV1-1, TRAJ5)
CAVRVRRALTF

SEQ ID NO: 761234 - protein, 13 aa, Homo sapiens
  CDR3 for beta chain variable domain of TCR clone 380617 (TRBV7-9, TRBJ1-2)
CASSLKQNYGYTF

SEQ ID NO: 761235 - protein, 12 aa, Homo sapiens
  CDR3 for alpha chain variable domain of TCR clone 380618 (TRAV13-1, TRAJ49)
RAASIRSNQFYF

SEQ ID NO: 761236 - protein, 14 aa, Homo sapiens
  CDR3 for beta chain variable domain of TCR clone 380618 (TRBV7-2, TRBJ2-1)
CASSPGLAGNEQFF

SEQ ID NO: 761237 - protein, 11 aa, Homo sapiens
  CDR3 for alpha chain variable domain of TCR clone 380619 (TRAV3, TRAJ21)
CALGNFNKFYF

SEQ ID NO: 761238 - protein, 16 aa, Homo sapiens
  CDR3 for beta chain variable domain of TCR clone 380619 (TRBV19, TRBJ2-1)
CAGSKAGPSSYNEQFF

SEQ ID NO: 761239 - protein, 18 aa, Homo sapiens
  CDR3 for alpha chain variable domain of TCR clone 380620 (TRAV21, TRAJ52)
CAVRPSPAGGTSFGKLTF

SEQ ID NO: 761240 - protein, 15 aa, Homo sapiens
  CDR3 for beta chain variable domain of TCR clone 380620 (TRBV19, TRBJ1-1)
CASTSGQIQNTEAFF

SEQ ID NO: 761241 - protein, 15 aa, Homo sapiens
  CDR3 for alpha chain variable domain of TCR clone 380621 (TRAV8-4, TRAJ10)
CAVSDGPGGGNKPTF

SEQ ID NO: 761242 - protein, 13 aa, Homo sapiens
  CDR3 for beta chain variable domain of TCR clone 380621 (TRBV28, TRBJ1-3)
CASSFLGSGTIYF

SEQ ID NO: 761243 - protein, 16 aa, Homo sapiens
  CDR3 for alpha chain variable domain of TCR clone 380622 (TRAV4, TRAJ4)
CLVGAAFSGGYNKLIF

SEQ ID NO: 761244 - protein, 13 aa, Homo sapiens
  CDR3 for beta chain variable domain of TCR clone 380622 (TRBV20-1, TRBJ1-1)
CSARGGGNTEAFF

SEQ ID NO: 761245 - protein, 15 aa, Homo sapiens
  CDR3 for alpha chain variable domain of TCR clone 380623 (TRAV3, TRAJ20)
CAVRDIKLSDYKLSF

SEQ ID NO: 761246 - protein, 13 aa, Homo sapiens
  CDR3 for beta chain variable domain of TCR clone 380623 (TRBV4-2, TRBJ1-1)
CASSQAGNIEAFF

SEQ ID NO: 761247 - protein, 18 aa, Homo sapiens
  CDR3 for alpha chain variable domain of TCR clone 380624 (TRAV12-3, TRAJ52)
CAMSALNAGGTSRGKLTF

SEQ ID NO: 761248 - protein, 13 aa, Homo sapiens
  CDR3 for beta chain variable domain of TCR clone 380624 (TRBV27, TRBJ1-1)
CASSLSIGAEAFF

SEQ ID NO: 761249 - protein, 13 aa, Homo sapiens
  CDR3 for alpha chain variable domain of TCR clone 380625 (TRAV21, TRAJ13)
CAVNSGCYQKVTF

SEQ ID NO: 761250 - protein, 17 aa, Homo sapiens
  CDR3 for beta chain variable domain of TCR clone 380625 (TRBV9, TRBJ2-5)
CASSVAGQGPSIETQYF

SEQ ID NO: 761251 - protein, 11 aa, Homo sapiens
  CDR3 for alpha chain variable domain of TCR clone 380626 (TRAV2, TRAJ13)
CASGGYQKVTF

SEQ ID NO: 761252 - protein, 14 aa, Homo sapiens
  CDR3 for beta chain variable domain of TCR clone 380626 (TRBV7-2, TRBJ2-1)
CATIGGGSNGEQFF

SEQ ID NO: 761253 - protein, 18 aa, Homo sapiens
  CDR3 for alpha chain variable domain of TCR clone 380627 (TRAV12-3, TRAJ52)
CAMSVGWAGGTSYGKLTF

SEQ ID NO: 761254 - protein, 15 aa, Homo sapiens
  CDR3 for beta chain variable domain of TCR clone 380627 (TRBV27, TRBJ1-6)
CASSFDRGLGSPLHF

SEQ ID NO: 761255 - protein, 14 aa, Homo sapiens
  CDR3 for alpha chain variable domain of TCR clone 380628 (TRAV9-2, TRAJ39)
CALYIYNAGNMLTF

SEQ ID NO: 761256 - protein, 16 aa, Homo sapiens
  CDR3 for beta chain variable domain of TCR clone 380628 (TRBV5-1, TRBJ2-1)
CASSIRSGGSYNEQFF

SEQ ID NO: 761257 - protein, 13 aa, Homo sapiens
  CDR3 for alpha chain variable domain of TCR clone 380629 (TRAV9-2, TRAJ49)
CALTSNTGNQFYF

SEQ ID NO: 761258 - protein, 16 aa, Homo sapiens
  CDR3 for beta chain variable domain of TCR clone 380629 (TRBV4-1, TRBJ1-2)
CASSQDAGQVLYGYTF

SEQ ID NO: 761259 - protein, 11 aa, Homo sapiens
  CDR3 for alpha chain variable domain of TCR clone 380630 (TRAV13-1, TRAJ9)
CAASEGWRLQN

SEQ ID NO: 761260 - protein, 17 aa, Homo sapiens
  CDR3 for beta chain variable domain of TCR clone 380630 (TRBV13, TRBJ2-3)
CASSLSRVAGGRNTQYF

SEQ ID NO: 761261 - protein, 15 aa, Homo sapiens
  CDR3 for alpha chain variable domain of TCR clone 380631 (TRAV8-4, TRAJ13)
CAVSDRGGGYQTVTF

SEQ ID NO: 761262 - protein, 16 aa, Homo sapiens
  CDR3 for beta chain variable domain of TCR clone 380631 (TRBV6-4, TRBJ1-2)
CASSEAVGDPNYGYTF

SEQ ID NO: 761263 - protein, 15 aa, Homo sapiens
  CDR3 for alpha chain variable domain of TCR clone 380632 (TRAV14/DV4, TRAJ10)
RAMRELTGGGKKLTF

SEQ ID NO: 761264 - protein, 18 aa, Homo sapiens
  CDR3 for beta chain variable domain of TCR clone 380632 (TRBV7-9, TRBJ2-7)
CASSLTTSGSRTWYEQYF

SEQ ID NO: 761265 - protein, 13 aa, Homo sapiens
  CDR3 for alpha chain variable domain of TCR clone 380633 (TRAV8-4, TRAJ15)
CAVPRRAGTALIF

SEQ ID NO: 761266 - protein, 19 aa, Homo sapiens
  CDR3 for beta chain variable domain of TCR clone 380633 (TRBV19, TRBJ2-5)
CASSIGQVTDFFLGETQYF

SEQ ID NO: 761267 - protein, 12 aa, Homo sapiens
  CDR3 for alpha chain variable domain of TCR clone 380634 (TRAV3, TRAJ26)
CAVRDYGQNFFF

SEQ ID NO: 761268 - protein, 16 aa, Homo sapiens
  CDR3 for beta chain variable domain of TCR clone 380634 (TRBV11-2, TRBJ1-2)
CASSPSGRGANYGYTF

SEQ ID NO: 761269 - protein, 11 aa, Homo sapiens
  CDR3 for alpha chain variable domain of TCR clone 380635 (TRAV35, TRAJ30)
CAGLRDDKIIF

SEQ ID NO: 761270 - protein, 18 aa, Homo sapiens
  CDR3 for beta chain variable domain of TCR clone 380635 (TRBV11-2, TRBJ2-3)
CASSLGGASRGAPNTQYF

SEQ ID NO: 761271 - protein, 13 aa, Homo sapiens
  CDR3 for alpha chain variable domain of TCR clone 380636 (TRAV27, TRAJ41)
CAGEGHSGYALNF

SEQ ID NO: 761272 - protein, 14 aa, Homo sapiens
  CDR3 for beta chain variable domain of TCR clone 380636 (TRBV7-2, TRBJ1-1)
CASSFVTGTTEAFF

SEQ ID NO: 761273 - protein, 14 aa, Homo sapiens
  CDR3 for alpha chain variable domain of TCR clone 380637 (TRAV38-2/DV8, TRAJ42)
CAYPEGGSQGNLSF

SEQ ID NO: 761274 - protein, 15 aa, Homo sapiens
  CDR3 for beta chain variable domain of TCR clone 380637 (TRBV19, TRBJ2-1)
CASSTGTSSYNEQFF

SEQ ID NO: 761275 - protein, 15 aa, Homo sapiens
  CDR3 for alpha chain variable domain of TCR clone 380638 (TRAV2, TRAJ15)
CAVEDWCQAGTALIF

SEQ ID NO: 761276 - protein, 13 aa, Homo sapiens
  CDR3 for beta chain variable domain of TCR clone 380638 (TRBV12-4, TRBJ2-5)
CASSLGGSRTQYF

SEQ ID NO: 761277 - protein, 13 aa, Homo sapiens
  CDR3 for alpha chain variable domain of TCR clone 380639 (TRAV2, TRAJ40)
CAVVTSVTYKYIF

SEQ ID NO: 761278 - protein, 14 aa, Homo sapiens
  CDR3 for beta chain variable domain of TCR clone 380639 (TRBV19, TRBJ2-1)
CASPTFFLSGEHFF

SEQ ID NO: 761279 - protein, 12 aa, Homo sapiens
  CDR3 for alpha chain variable domain of TCR clone 380640 (TRAV4, TRAJ26)
CLGGDYGQNFVF

SEQ ID NO: 761280 - protein, 16 aa, Homo sapiens
  CDR3 for beta chain variable domain of TCR clone 380640 (TRBV7-2, TRBJ1-2)
CASSSTQDRRGHGYTF

SEQ ID NO: 761281 - protein, 13 aa, Homo sapiens
  CDR3 for alpha chain variable domain of TCR clone 380641 (TRAV8-3, TRAJ47)
CAVSMEYGNKLVF

SEQ ID NO: 761282 - protein, 13 aa, Homo sapiens
  CDR3 for beta chain variable domain of TCR clone 380641 (TRBV19, TRBJ1-2)
CASSVPGQDGYTF

SEQ ID NO: 761283 - protein, 16 aa, Homo sapiens
  CDR3 for alpha chain variable domain of TCR clone 380642 (TRAV30, TRAJ24)
CGTEIVDADSWGKFPF

SEQ ID NO: 761284 - protein, 16 aa, Homo sapiens
  CDR3 for beta chain variable domain of TCR clone 380642 (TRBV24-1, TRBJ2-3)
CATSDPGTGATDTQYF

SEQ ID NO: 761285 - protein, 16 aa, Homo sapiens
  CDR3 for alpha chain variable domain of TCR clone 380643 (TRAV21, TRAJ45)
CAVTMYSGGGADGLTF

SEQ ID NO: 761286 - protein, 14 aa, Homo sapiens
  CDR3 for beta chain variable domain of TCR clone 380643 (TRBV19, TRBJ2-3)
CASSVGRGSDTQYF

SEQ ID NO: 761287 - protein, 11 aa, Homo sapiens
  CDR3 for alpha chain variable domain of TCR clone 380644 (TRAV3, TRAJ17)
PRGAAGNKLTF

SEQ ID NO: 761288 - protein, 17 aa, Homo sapiens
  CDR3 for beta chain variable domain of TCR clone 380644 (TRBV28, TRBJ2-7)
CASSPLHRASGVYEQYF

SEQ ID NO: 761289 - protein, 16 aa, Homo sapiens
  CDR3 for alpha chain variable domain of TCR clone 380645 (TRAV3, TRAJ37)
CAVRPHGSGNTGKLIF

SEQ ID NO: 761290 - protein, 15 aa, Homo sapiens
  CDR3 for beta chain variable domain of TCR clone 380645 (TRBV10-3, TRBJ2-3)
CAISLTSGVTDTQYF

SEQ ID NO: 761291 - protein, 15 aa, Homo sapiens
  CDR3 for alpha chain variable domain of TCR clone 380646 (TRAV26-1, TRAJ42)
FIVRVKGGSQGNLIF

SEQ ID NO: 761292 - protein, 14 aa, Homo sapiens
  CDR3 for beta chain variable domain of TCR clone 380646 (TRBV19, TRBJ2-2)
CATTGHATTGELFF

SEQ ID NO: 761293 - protein, 14 aa, Homo sapiens
  CDR3 for alpha chain variable domain of TCR clone 380647 (TRAV26-1, TRAJ39)
CIVRGSRAGHMLTF

SEQ ID NO: 761294 - protein, 15 aa, Homo sapiens
  CDR3 for beta chain variable domain of TCR clone 380647 (TRBV7-9, TRBJ1-5)
CASSQGDQPNQPQHF

SEQ ID NO: 761295 - protein, 17 aa, Homo sapiens
  CDR3 for alpha chain variable domain of TCR clone 380648 (TRAV3, TRAJ42)
CAVRDRDYGGGQGILIF

SEQ ID NO: 761296 - protein, 15 aa, Homo sapiens
  CDR3 for beta chain variable domain of TCR clone 380648 (TRBV6-6, TRBJ2-7)
CASSYSYGGSYEQYF

SEQ ID NO: 761297 - protein, 13 aa, Homo sapiens
  CDR3 for alpha chain variable domain of TCR clone 380649 (TRAV21, TRAJ27)
CAAHPGNAGKSTF

SEQ ID NO: 761298 - protein, 16 aa, Homo sapiens
  CDR3 for beta chain variable domain of TCR clone 380649 (TRBV20-1, TRBJ1-2)
CSASMGQGVANYGYTF

SEQ ID NO: 761299 - protein, 13 aa, Homo sapiens
  CDR3 for alpha chain variable domain of TCR clone 380650 (TRAV21, TRAJ45)
CAVMGGGADGLTF

SEQ ID NO: 761300 - protein, 14 aa, Homo sapiens
  CDR3 for beta chain variable domain of TCR clone 380650 (TRBV7-9, TRBJ2-5)
CASSSPPGTETQYF

SEQ ID NO: 761301 - protein, 13 aa, Homo sapiens
  CDR3 for alpha chain variable domain of TCR clone 380651 (TRAV17, TRAJ7)
CATDNYGNNRLAF

SEQ ID NO: 761302 - protein, 13 aa, Homo sapiens
  CDR3 for beta chain variable domain of TCR clone 380651 (TRBV28, TRBJ1-5)
CASSDRGNQPQHF

SEQ ID NO: 761303 - protein, 12 aa, Homo sapiens
  CDR3 for alpha chain variable domain of TCR clone 380652 (TRAV36/DV7, TRAJ50)
CAVEPENLLRQG

SEQ ID NO: 761304 - protein, 12 aa, Homo sapiens
  CDR3 for beta chain variable domain of TCR clone 380652 (TRBV7-9, TRBJ2-7)
CASSFGSYEQYF

SEQ ID NO: 761305 - protein, 14 aa, Homo sapiens
  CDR3 for alpha chain variable domain of TCR clone 380653 (TRAV12-2, TRAJ9)
CAVNLNTGGFKTIF

SEQ ID NO: 761306 - protein, 17 aa, Homo sapiens
  CDR3 for beta chain variable domain of TCR clone 380653 (TRBV20-1, TRBJ2-2)
CSATRQVGQGYTGELFF

SEQ ID NO: 761307 - protein, 15 aa, Homo sapiens
  CDR3 for alpha chain variable domain of TCR clone 380654 (TRAV21, TRAJ42)
CAVTRYGGSQGNLIF

SEQ ID NO: 761308 - protein, 13 aa, Homo sapiens
  CDR3 for beta chain variable domain of TCR clone 380654 (TRBV2, TRBJ1-1)
CASSVLMNTEAFF

SEQ ID NO: 761309 - protein, 13 aa, Homo sapiens
  CDR3 for alpha chain variable domain of TCR clone 380655 (TRAV27, TRAJ49)
CAPRPYTGNQFYF

SEQ ID NO: 761310 - protein, 16 aa, Homo sapiens
  CDR3 for beta chain variable domain of TCR clone 380655 (TRBV4-1, TRBJ1-2)
CASSQDAGQVLYCYTF

SEQ ID NO: 761311 - protein, 16 aa, Homo sapiens
  CDR3 for alpha chain variable domain of TCR clone 380656 (TRAV21, TRAJ52)
CAVTNAGGTSYGKLTF

SEQ ID NO: 761312 - protein, 13 aa, Homo sapiens
  CDR3 for beta chain variable domain of TCR clone 380656 (TRBV27, TRBJ2-1)
CASRTLGVGEQFF

SEQ ID NO: 761313 - protein, 14 aa, Homo sapiens
  CDR3 for alpha chain variable domain of TCR clone 380657 (TRAV12-3, TRAJ9)
CAMSPNTGGFKTIF

SEQ ID NO: 761314 - protein, 16 aa, Homo sapiens
  CDR3 for beta chain variable domain of TCR clone 380657 (TRBV7-3, TRBJ2-1)
CASSLVSGSSNNEQFF

SEQ ID NO: 761315 - protein, 14 aa, Homo sapiens
  CDR3 for alpha chain variable domain of TCR clone 380658 (TRAV1-2, TRAJ8)
CAVREDTGFQKLVY

SEQ ID NO: 761316 - protein, 13 aa, Homo sapiens
  CDR3 for beta chain variable domain of TCR clone 380658 (TRBV7-3, TRBJ2-1)
CASSLDSYNEQFF

SEQ ID NO: 761317 - protein, 13 aa, Homo sapiens
  CDR3 for alpha chain variable domain of TCR clone 380659 (TRAV35, TRAJ43)
CAGYPYNNNDMRF

SEQ ID NO: 761318 - protein, 15 aa, Homo sapiens
  CDR3 for beta chain variable domain of TCR clone 380659 (TRBV25-1, TRBJ1-4)
CACSKRIATNEKLFF

SEQ ID NO: 761319 - protein, 12 aa, Homo sapiens
  CDR3 for alpha chain variable domain of TCR clone 380660 (TRAV12-3, TRAJ41)
CAMSYSGYALNF

SEQ ID NO: 761320 - protein, 15 aa, Homo sapiens
  CDR3 for beta chain variable domain of TCR clone 380660 (TRBV5-1, TRBJ1-1)
SASSPTGFDVTEAFF

SEQ ID NO: 761321 - protein, 14 aa, Homo sapiens
  CDR3 for alpha chain variable domain of TCR clone 380661 (TRAV2, TRAJ13)
CAVPPEGGYQKVTF

SEQ ID NO: 761322 - protein, 13 aa, Homo sapiens
  CDR3 for beta chain variable domain of TCR clone 380661 (TRBV7-9, TRBJ1-2)
CASSLKQNYGYTF

SEQ ID NO: 761323 - protein, 17 aa, Homo sapiens
  CDR3 for alpha chain variable domain of TCR clone 380662 (TRAV3, TRAJ6)
FAVIDGPRAGGSYIPTF

SEQ ID NO: 761324 - protein, 14 aa, Homo sapiens
  CDR3 for beta chain variable domain of TCR clone 380662 (TRBV7-2, TRBJ2-7)
CASSPKTSFYEQYF

SEQ ID NO: 761325 - protein, 13 aa, Homo sapiens
  CDR3 for alpha chain variable domain of TCR clone 380663 (TRAV12-1, TRAJ39)
CVVPQRAGNMLTF

SEQ ID NO: 761326 - protein, 14 aa, Homo sapiens
  CDR3 for beta chain variable domain of TCR clone 380663 (TRBV28, TRBJ1-1)
CASSLSPENTEAFF

SEQ ID NO: 761327 - protein, 16 aa, Homo sapiens
  CDR3 for alpha chain variable domain of TCR clone 380664 (TRAV21, TRAJ17)
CAVRPGEEAAGNKLTF

SEQ ID NO: 761328 - protein, 15 aa, Homo sapiens
  CDR3 for beta chain variable domain of TCR clone 380664 (TRBV7-9, TRBJ2-2)
CASGPLDTFPGELFF

SEQ ID NO: 761329 - protein, 12 aa, Homo sapiens
  CDR3 for alpha chain variable domain of TCR clone 380665 (TRAV23/DV6, TRAJ30)
CAASKGDDKIII

SEQ ID NO: 761330 - protein, 13 aa, Homo sapiens
  CDR3 for beta chain variable domain of TCR clone 380665 (TRBV19, TRBJ1-2)
CASSVPGQDGYTF

SEQ ID NO: 761331 - protein, 11 aa, Homo sapiens
  CDR3 for alpha chain variable domain of TCR clone 380666 (TRAV17, TRAJ20)
CATDAGYKLSF

SEQ ID NO: 761332 - protein, 14 aa, Homo sapiens
  CDR3 for beta chain variable domain of TCR clone 380666 (TRBV7-2, TRBJ1-6)
CASSLQGANSPLHF

SEQ ID NO: 761333 - protein, 10 aa, Homo sapiens
  CDR3 for alpha chain variable domain of TCR clone 380667 (TRAV1-2, TRAJ23)
CAGQGGKLIF

SEQ ID NO: 761334 - protein, 15 aa, Homo sapiens
  CDR3 for beta chain variable domain of TCR clone 380667 (TRBV28, TRBJ2-7)
CASKKPSGRAYEQYF

SEQ ID NO: 761335 - protein, 14 aa, Homo sapiens
  CDR3 for alpha chain variable domain of TCR clone 380668 (TRAV12-2, TRAJ11)
CSVNRESGYSTLTF

SEQ ID NO: 761336 - protein, 10 aa, Homo sapiens
  CDR3 for beta chain variable domain of TCR clone 380668 (TRBV20-1, TRBJ2-5)
FSARFETQYF

SEQ ID NO: 761337 - protein, 15 aa, Homo sapiens
  CDR3 for alpha chain variable domain of TCR clone 380669 (TRAV12-1, TRAJ44)
CVVFVNTGTASKLTF

SEQ ID NO: 761338 - protein, 17 aa, Homo sapiens
  CDR3 for beta chain variable domain of TCR clone 380669 (TRBV7-8, TRBJ2-6)
CASSAGKGGAGANVLTF

SEQ ID NO: 761339 - protein, 14 aa, Homo sapiens
  CDR3 for alpha chain variable domain of TCR clone 380670 (TRAV8-3, TRAJ28)
CAVVPGAGSYQLTF

SEQ ID NO: 761340 - protein, 16 aa, Homo sapiens
  CDR3 for beta chain variable domain of TCR clone 380670 (TRBV10-3, TRBJ2-1)
CAISGVGDGGGGEQFF

SEQ ID NO: 761341 - protein, 15 aa, Homo sapiens
  CDR3 for alpha chain variable domain of TCR clone 380671 (TRAV12-1, TRAJ44)
YVVFVNTGTASKLTF

SEQ ID NO: 761342 - protein, 17 aa, Homo sapiens
  CDR3 for beta chain variable domain of TCR clone 380671 (TRBV7-8, TRBJ2-6)
CASSAGTGGAGANVLTF

SEQ ID NO: 761343 - protein, 14 aa, Homo sapiens
  CDR3 for alpha chain variable domain of TCR clone 380672 (TRAV20, TRAJ42)
CDVQAGGSQGNLIF

SEQ ID NO: 761344 - protein, 14 aa, Homo sapiens
  CDR3 for beta chain variable domain of TCR clone 380672 (TRBV28, TRBJ1-2)
CAGRIQGANYGYTF

SEQ ID NO: 761345 - protein, 13 aa, Homo sapiens
  CDR3 for alpha chain variable domain of TCR clone 380673 (TRAV1-2, TRAJ9)
CAALNTGGFKTIF

SEQ ID NO: 761346 - protein, 13 aa, Homo sapiens
  CDR3 for beta chain variable domain of TCR clone 380673 (TRBV19, TRBJ1-2)
CASSDPGQDGYAF

SEQ ID NO: 761347 - protein, 13 aa, Homo sapiens
  CDR3 for alpha chain variable domain of TCR clone 380674 (TRAV13-2, TRAJ53)
CAENMGSNYNMTF

SEQ ID NO: 761348 - protein, 13 aa, Homo sapiens
  CDR3 for beta chain variable domain of TCR clone 380674 (TRBV4-1, TRBJ2-2)
CASSQENTGELFF

SEQ ID NO: 761349 - protein, 18 aa, Homo sapiens
  CDR3 for alpha chain variable domain of TCR clone 380675 (TRAV21, TRAJ52)
RAVRLSPAGGTSYGKLTF

SEQ ID NO: 761350 - protein, 17 aa, Homo sapiens
  CDR3 for beta chain variable domain of TCR clone 380675 (TRBV13, TRBJ2-3)
CASSLSRVAGGRNTQYF

SEQ ID NO: 761351 - protein, 12 aa, Homo sapiens
  CDR3 for alpha chain variable domain of TCR clone 380676 (TRAV13-2, TRAJ23)
CAERHRGGKLIF

SEQ ID NO: 761352 - protein, 13 aa, Homo sapiens
  CDR3 for beta chain variable domain of TCR clone 380676 (TRBV7-7, TRBJ2-5)
CASSLRAIETQYF

SEQ ID NO: 761353 - protein, 14 aa, Homo sapiens
  CDR3 for alpha chain variable domain of TCR clone 380677 (TRAV12-2, TRAJ9)
CAVNLNTGGFKTIF

SEQ ID NO: 761354 - protein, 17 aa, Homo sapiens
  CDR3 for beta chain variable domain of TCR clone 380677 (TRBV20-1, TRBJ2-2)
CSASGQVGQGYTGELFF

SEQ ID NO: 761355 - protein, 16 aa, Homo sapiens
  CDR3 for alpha chain variable domain of TCR clone 380678 (TRAV29/DV5, TRAJ54)
CAARAPLIQGAQKLVF

SEQ ID NO: 761356 - protein, 12 aa, Homo sapiens
  CDR3 for beta chain variable domain of TCR clone 380678 (TRBV6-3, TRBJ2-7)
CASSEPGFEQYF

SEQ ID NO: 761357 - protein, 14 aa, Homo sapiens
  CDR3 for alpha chain variable domain of TCR clone 380679 (TRAV29/DV5, TRAJ36)
CAARRKTGANNLFF

SEQ ID NO: 761358 - protein, 13 aa, Homo sapiens
  CDR3 for beta chain variable domain of TCR clone 380679 (TRBV15, TRBJ2-7)
CATSTTGHYEQYF

SEQ ID NO: 761359 - protein, 17 aa, Homo sapiens
  CDR3 for alpha chain variable domain of TCR clone 380680 (TRAV13-1, TRAJ28)
CAASPPYSGAGSYQLTF

SEQ ID NO: 761360 - protein, 15 aa, Homo sapiens
  CDR3 for beta chain variable domain of TCR clone 380680 (TRBV4-2, TRBJ1-2)
CASSRNTGAGYGYTF

SEQ ID NO: 761361 - protein, 13 aa, Homo sapiens
  CDR3 for alpha chain variable domain of TCR clone 380681 (TRAV12-3, TRAJ40)
CAMSDSGTYKYIF

SEQ ID NO: 761362 - protein, 16 aa, Homo sapiens
  CDR3 for beta chain variable domain of TCR clone 380681 (TRBV7-2, TRBJ1-2)
CASSSNQDRRGHGYTF

SEQ ID NO: 761363 - protein, 12 aa, Homo sapiens
  CDR3 for alpha chain variable domain of TCR clone 380682 (TRAV13-2, TRAJ8)
CAPWLGFRKLVF

SEQ ID NO: 761364 - protein, 15 aa, Homo sapiens
  CDR3 for beta chain variable domain of TCR clone 380682 (TRBV12-4, TRBJ2-5)
CASSLSGAFQETQYF

SEQ ID NO: 761365 - protein, 11 aa, Homo sapiens
  CDR3 for alpha chain variable domain of TCR clone 380683 (TRAV13-1, TRAJ34)
CAAENTDKLIF

SEQ ID NO: 761366 - protein, 17 aa, Homo sapiens
  CDR3 for beta chain variable domain of TCR clone 380683 (TRBV13, TRBJ2-3)
CASSLSRVAGGRNTQYF

SEQ ID NO: 761367 - protein, 13 aa, Homo sapiens
  CDR3 for alpha chain variable domain of TCR clone 380684 (TRAV2, TRAJ40)
CAVVTSGTYKYIF

SEQ ID NO: 761368 - protein, 12 aa, Homo sapiens
  CDR3 for beta chain variable domain of TCR clone 380684 (TRBV5-1, TRBJ1-2)
CASSQDTYGYTF

SEQ ID NO: 761369 - protein, 14 aa, Homo sapiens
  CDR3 for alpha chain variable domain of TCR clone 380685 (TRAV2, TRAJ9)
CAVEDRSGGFKTIF

SEQ ID NO: 761370 - protein, 16 aa, Homo sapiens
  CDR3 for beta chain variable domain of TCR clone 380685 (TRBV7-3, TRBJ2-1)
CASRLEGYRSYNEQFF

SEQ ID NO: 761371 - protein, 16 aa, Homo sapiens
  CDR3 for alpha chain variable domain of TCR clone 380686 (TRAV16, TRAJ4)
CALSRMFSGGYNKLIF

SEQ ID NO: 761372 - protein, 16 aa, Homo sapiens
  CDR3 for beta chain variable domain of TCR clone 380686 (TRBV12-4, TRBJ1-5)
CASSRQVGGSNQPQHF

SEQ ID NO: 761373 - protein, 15 aa, Homo sapiens
  CDR3 for alpha chain variable domain of TCR clone 380687 (TRAV12-1, TRAJ44)
CVVDEYTGTASKLTF

SEQ ID NO: 761374 - protein, 13 aa, Homo sapiens
  CDR3 for beta chain variable domain of TCR clone 380687 (TRBV6-6, TRBJ2-7)
CASSPKHLAEQYF

SEQ ID NO: 761375 - protein, 12 aa, Homo sapiens
  CDR3 for alpha chain variable domain of TCR clone 380688 (TRAV12-1, TRAJ40)
CLFYSGTYKYIF

SEQ ID NO: 761376 - protein, 18 aa, Homo sapiens
  CDR3 for beta chain variable domain of TCR clone 380688 (TRBV11-2, TRBJ2-3)
CASSLGGASRGAPNTQYF

SEQ ID NO: 761377 - protein, 13 aa, Homo sapiens
  CDR3 for alpha chain variable domain of TCR clone 380689 (TRAV20, TRAJ57)
CAVSQGGSEKLVF

SEQ ID NO: 761378 - protein, 12 aa, Homo sapiens
  CDR3 for beta chain variable domain of TCR clone 380689 (TRBV11-2, TRBJ2-2)
CASSLGGGELFF

SEQ ID NO: 761379 - protein, 12 aa, Homo sapiens
  CDR3 for alpha chain variable domain of TCR clone 380690 (TRAV12-2, TRAJ47)
CAVMEYGNKLVF

SEQ ID NO: 761380 - protein, 15 aa, Homo sapiens
  CDR3 for beta chain variable domain of TCR clone 380690 (TRBV7-3, TRBJ2-1)
CASILDGNSYNEQFF

SEQ ID NO: 761381 - protein, 14 aa, Homo sapiens
  CDR3 for alpha chain variable domain of TCR clone 380691 (TRAV12-3, TRAJ10)
SHLPLTGGGHKLTF

SEQ ID NO: 761382 - protein, 12 aa, Homo sapiens
  CDR3 for beta chain variable domain of TCR clone 380691 (TRBV7-3, TRBJ2-5)
CASSSPGGTQYF

SEQ ID NO: 761383 - protein, 13 aa, Homo sapiens
  CDR3 for alpha chain variable domain of TCR clone 380692 (TRAV12-3, TRAJ9)
CAMRNTGGFKTIF

SEQ ID NO: 761384 - protein, 15 aa, Homo sapiens
  CDR3 for beta chain variable domain of TCR clone 380692 (TRBV7-3, TRBJ2-2)
CASSLTGQGTGELFF

SEQ ID NO: 761385 - protein, 12 aa, Homo sapiens
  CDR3 for alpha chain variable domain of TCR clone 380693 (TRAV27, TRAJ9)
CAGESGGFKTIF

SEQ ID NO: 761386 - protein, 12 aa, Homo sapiens
  CDR3 for beta chain variable domain of TCR clone 380693 (TRBV5-1, TRBJ2-7)
CASSLDSYEQYF

SEQ ID NO: 761387 - protein, 14 aa, Homo sapiens
  CDR3 for alpha chain variable domain of TCR clone 380694 (TRAV2, TRAJ29)
CAVTPPSGNTPLVF

SEQ ID NO: 761388 - protein, 15 aa, Homo sapiens
  CDR3 for beta chain variable domain of TCR clone 380694 (TRBV4-1, TRBJ2-3)
CASGRGQGIPDTQYF

SEQ ID NO: 761389 - protein, 18 aa, Homo sapiens
  CDR3 for alpha chain variable domain of TCR clone 380695 (TRAV21, TRAJ52)
CAVRPSPAGGTSYGKLTF

SEQ ID NO: 761390 - protein, 14 aa, Homo sapiens
  CDR3 for beta chain variable domain of TCR clone 380695 (TRBV12-4, TRBJ2-3)
CASTIAGWGDTQYF

SEQ ID NO: 761391 - protein, 13 aa, Homo sapiens
  CDR3 for alpha chain variable domain of TCR clone 380696 (TRAV17, TRAJ34)
CATDLYNTEKPIF

SEQ ID NO: 761392 - protein, 15 aa, Homo sapiens
  CDR3 for beta chain variable domain of TCR clone 380696 (TRBV20-1, TRBJ2-3)
CSATGTSGFTDTQYF

SEQ ID NO: 761393 - protein, 14 aa, Homo sapiens
  CDR3 for alpha chain variable domain of TCR clone 380697 (TRAV30, TRAJ26)
CGTEIVSYGQNFVF

SEQ ID NO: 761394 - protein, 18 aa, Homo sapiens
  CDR3 for beta chain variable domain of TCR clone 380697 (TRBV11-2, TRBJ2-3)
CASSLGGASRGAPNTQYF

SEQ ID NO: 761395 - protein, 13 aa, Homo sapiens
  CDR3 for alpha chain variable domain of TCR clone 380698 (TRAV27, TRAJ41)
CAGEGNSGYALNF

SEQ ID NO: 761396 - protein, 13 aa, Homo sapiens
  CDR3 for beta chain variable domain of TCR clone 380698 (TRBV29-1, TRBJ2-2)
CSTTGVNTGELFF

SEQ ID NO: 761397 - protein, 16 aa, Homo sapiens
  CDR3 for alpha chain variable domain of TCR clone 380699 (TRAV20, TRAJ38)
SAVQASNAGNNRKLIW

SEQ ID NO: 761398 - protein, 16 aa, Homo sapiens
  CDR3 for beta chain variable domain of TCR clone 380699 (TRBV7-8, TRBJ2-6)
CASRVGDSSGANVLTF

SEQ ID NO: 761399 - protein, 14 aa, Homo sapiens
  CDR3 for alpha chain variable domain of TCR clone 380700 (TRAV1-2, TRAJ16)
CAVNRFSDGEKLLF

SEQ ID NO: 761400 - protein, 14 aa, Homo sapiens
  CDR3 for beta chain variable domain of TCR clone 380700 (TRBV7-2, TRBJ1-1)
CASSFLTGTTEAFF

SEQ ID NO: 761401 - protein, 16 aa, Homo sapiens
  CDR3 for alpha chain variable domain of TCR clone 380701 (TRAV8-6, TRAJ37)
CAVSGLGSSNTGQLIF

SEQ ID NO: 761402 - protein, 15 aa, Homo sapiens
  CDR3 for beta chain variable domain of TCR clone 380701 (TRBV20-1, TRBJ1-5)
CSARSGPSMNQPQHF

SEQ ID NO: 761403 - protein, 15 aa, Homo sapiens
  CDR3 for alpha chain variable domain of TCR clone 380702 (TRAV4, TRAJ39)
CLVGPNNNAGNMLTF

SEQ ID NO: 761404 - protein, 16 aa, Homo sapiens
  CDR3 for beta chain variable domain of TCR clone 380702 (TRBV7-9, TRBJ1-2)
CASSLGFSSGEDGYTF

SEQ ID NO: 761405 - protein, 14 aa, Homo sapiens
  CDR3 for alpha chain variable domain of TCR clone 380703 (TRAV8-3, TRAJ44)
CAVGNTGTASQLTF

SEQ ID NO: 761406 - protein, 13 aa, Homo sapiens
  CDR3 for beta chain variable domain of TCR clone 380703 (TRBV7-9, TRBJ1-2)
CASSLKQNNGYTF

SEQ ID NO: 761407 - protein, 15 aa, Homo sapiens
  CDR3 for alpha chain variable domain of TCR clone 380704 (TRAV3, TRAJ3)
CAVRNRDSSASKIIF

SEQ ID NO: 761408 - protein, 15 aa, Homo sapiens
  CDR3 for beta chain variable domain of TCR clone 380704 (TRBV19, TRBJ2-1)
CASSSPGVPLDEQFF

SEQ ID NO: 761409 - protein, 14 aa, Homo sapiens
  CDR3 for alpha chain variable domain of TCR clone 380705 (TRAV17, TRAJ22)
CATSPSGSARQLTF

SEQ ID NO: 761410 - protein, 15 aa, Homo sapiens
  CDR3 for beta chain variable domain of TCR clone 380705 (TRBV4-3, TRBJ2-7)
CASSQGGRGIYEQYF

SEQ ID NO: 761411 - protein, 14 aa, Homo sapiens
  CDR3 for alpha chain variable domain of TCR clone 380706 (TRAV27, TRAJ45)
CAGAQEEVLTDTPL

SEQ ID NO: 761412 - protein, 11 aa, Homo sapiens
  CDR3 for beta chain variable domain of TCR clone 380706 (TRBV19, TRBJ1-1)
CASSIGSEAFF

SEQ ID NO: 761413 - protein, 13 aa, Homo sapiens
  CDR3 for alpha chain variable domain of TCR clone 380707 (TRAV8-6, TRAJ49)
CAVITNTGNQFYF

SEQ ID NO: 761414 - protein, 13 aa, Homo sapiens
  CDR3 for beta chain variable domain of TCR clone 380707 (TRBV27, TRBJ1-4)
CASSLMGDEKLFF

SEQ ID NO: 761415 - protein, 12 aa, Homo sapiens
  CDR3 for alpha chain variable domain of TCR clone 380708 (TRAV8-3, TRAJ20)
CAVGANDYKLSF

SEQ ID NO: 761416 - protein, 16 aa, Homo sapiens
  CDR3 for beta chain variable domain of TCR clone 380708 (TRBV19, TRBJ2-2)
CASRSPGTGATEELFS

SEQ ID NO: 761417 - protein, 17 aa, Homo sapiens
  CDR3 for alpha chain variable domain of TCR clone 380709 (TRAV3, TRAJ12)
CAVRYGGRMDSSYKLIF

SEQ ID NO: 761418 - protein, 13 aa, Homo sapiens
  CDR3 for beta chain variable domain of TCR clone 380709 (TRBV15, TRBJ1-6)
CATSGGLNSPLHF

SEQ ID NO: 761419 - protein, 13 aa, Homo sapiens
  CDR3 for alpha chain variable domain of TCR clone 380710 (TRAV27, TRAJ56)
CAGKPGANSKLTF

SEQ ID NO: 761420 - protein, 14 aa, Homo sapiens
  CDR3 for beta chain variable domain of TCR clone 380710 (TRBV4-1, TRBJ2-2)
CASSQAVNTGELFF

SEQ ID NO: 761421 - protein, 14 aa, Homo sapiens
  CDR3 for alpha chain variable domain of TCR clone 380711 (TRAV27, TRAJ45)
CAGAQEEVLRDSTL

SEQ ID NO: 761422 - protein, 15 aa, Homo sapiens
  CDR3 for beta chain variable domain of TCR clone 380711 (TRBV9, TRBJ2-2)
CASSDFAGASGELFF

SEQ ID NO: 761423 - protein, 10 aa, Homo sapiens
  CDR3 for alpha chain variable domain of TCR clone 380712 (TRAV3, TRAJ13)
RPGGYQKVTF

SEQ ID NO: 761424 - protein, 15 aa, Homo sapiens
  CDR3 for beta chain variable domain of TCR clone 380712 (TRBV27, TRBJ2-1)
CASSNGGGSSNEQFF

SEQ ID NO: 761425 - protein, 16 aa, Homo sapiens
  CDR3 for alpha chain variable domain of TCR clone 380713 (TRAV3, TRAJ37)
CAVREGAYGNTGKLIF

SEQ ID NO: 761426 - protein, 13 aa, Homo sapiens
  CDR3 for beta chain variable domain of TCR clone 380713 (TRBV5-7, TRBJ1-1)
CASSLFQNTEAFF

SEQ ID NO: 761427 - protein, 15 aa, Homo sapiens
  CDR3 for alpha chain variable domain of TCR clone 380714 (TRAV26-1, TRAJ29)
CIVRVEGSGNTPLVF

SEQ ID NO: 761428 - protein, 15 aa, Homo sapiens
  CDR3 for beta chain variable domain of TCR clone 380714 (TRBV7-2, TRBJ2-3)
CASSLRGGSTDTQYF

SEQ ID NO: 761429 - protein, 15 aa, Homo sapiens
  CDR3 for alpha chain variable domain of TCR clone 380715 (TRAV29/DV5, TRAJ24)
CAASGSTDSWGKFQF

SEQ ID NO: 761430 - protein, 12 aa, Homo sapiens
  CDR3 for beta chain variable domain of TCR clone 380715 (TRBV11-3, TRBJ2-2)
CASSLPTGELFF

SEQ ID NO: 761431 - protein, 13 aa, Homo sapiens
  CDR3 for alpha chain variable domain of TCR clone 380716 (TRAV2, TRAJ15)
CAVASQAGTALIF

SEQ ID NO: 761432 - protein, 16 aa, Homo sapiens
  CDR3 for beta chain variable domain of TCR clone 380716 (TRBV27, TRBJ2-5)
CASSLLAGGFQETQYF

SEQ ID NO: 761433 - protein, 15 aa, Homo sapiens
  CDR3 for alpha chain variable domain of TCR clone 380717 (TRAV21, TRAJ40)
CAVRLQTSGPYKYIF

SEQ ID NO: 761434 - protein, 13 aa, Homo sapiens
  CDR3 for beta chain variable domain of TCR clone 380717 (TRBV7-2, TRBJ2-2)
CASSSVRAGELFF

SEQ ID NO: 761435 - protein, 14 aa, Homo sapiens
  CDR3 for alpha chain variable domain of TCR clone 380718 (TRAV12-2, TRAJ40)
CAVKIPSGTYKYIF

SEQ ID NO: 761436 - protein, 15 aa, Homo sapiens
  CDR3 for beta chain variable domain of TCR clone 380718 (TRBV20-1, TRBJ2-3)
CSARPSGFYTDTQYF

SEQ ID NO: 761437 - protein, 12 aa, Homo sapiens
  CDR3 for alpha chain variable domain of TCR clone 380719 (TRAV16, TRAJ56)
CAPTGANSKLTF

SEQ ID NO: 761438 - protein, 15 aa, Homo sapiens
  CDR3 for beta chain variable domain of TCR clone 380719 (TRBV19, TRBJ1-5)
CASSIVWADNQPQHF

SEQ ID NO: 761439 - protein, 11 aa, Homo sapiens
  CDR3 for alpha chain variable domain of TCR clone 380720 (TRAV29/DV5, TRAJ31)
CAAMHNARLMF

SEQ ID NO: 761440 - protein, 15 aa, Homo sapiens
  CDR3 for beta chain variable domain of TCR clone 380720 (TRBV27, TRBJ2-7)
CASSTAGTGSYEQYF

SEQ ID NO: 761441 - protein, 12 aa, Homo sapiens
  CDR3 for alpha chain variable domain of TCR clone 380721 (TRAV25, TRAJ33)
CAGPDSNYQLIL

SEQ ID NO: 761442 - protein, 20 aa, Homo sapiens
  CDR3 for beta chain variable domain of TCR clone 380721 (TRBV4-1, TRBJ2-2)
CASSQASPPGLASNTGELFF

SEQ ID NO: 761443 - protein, 11 aa, Homo sapiens
  CDR3 for alpha chain variable domain of TCR clone 380722 (TRAV21, TRAJ34)
CAHYNTDKLIF

SEQ ID NO: 761444 - protein, 19 aa, Homo sapiens
  CDR3 for beta chain variable domain of TCR clone 380722 (TRBV7-2, TRBJ2-7)
CASSQRAAGPGTSFYEQYF

SEQ ID NO: 761445 - protein, 11 aa, Homo sapiens
  CDR3 for alpha chain variable domain of TCR clone 380723 (TRAV12-2, TRAJ31)
CAVTRWARLMF

SEQ ID NO: 761446 - protein, 15 aa, Homo sapiens
  CDR3 for beta chain variable domain of TCR clone 380723 (TRBV5-1, TRBJ2-7)
CASSLDLTSSYEQYF

SEQ ID NO: 761447 - protein, 13 aa, Homo sapiens
  CDR3 for alpha chain variable domain of TCR clone 380724 (TRAV27, TRAJ41)
CAGERNSGYALNF

SEQ ID NO: 761448 - protein, 14 aa, Homo sapiens
  CDR3 for beta chain variable domain of TCR clone 380724 (TRBV25-1, TRBJ1-1)
CASTHLGGNTEAFF

SEQ ID NO: 761449 - protein, 15 aa, Homo sapiens
  CDR3 for alpha chain variable domain of TCR clone 380725 (TRAV8-3, TRAJ41)
CAVGSNSNSGYALNF

SEQ ID NO: 761450 - protein, 17 aa, Homo sapiens
  CDR3 for beta chain variable domain of TCR clone 380725 (TRBV25-1, TRBJ2-1)
CASSAYGQGRGVYEQFS

SEQ ID NO: 761451 - protein, 19 aa, Homo sapiens
  CDR3 for alpha chain variable domain of TCR clone 380726 (TRAV3, TRAJ6)
CAVRDRNRSRSGGSYIPTF

SEQ ID NO: 761452 - protein, 15 aa, Homo sapiens
  CDR3 for beta chain variable domain of TCR clone 380726 (TRBV18, TRBJ2-7)
CASSPTFMDSYEQYF

SEQ ID NO: 761453 - protein, 15 aa, Homo sapiens
  CDR3 for alpha chain variable domain of TCR clone 380727 (TRAV22, TRAJ24)
CAVPLSTDSWGKLQF

SEQ ID NO: 761454 - protein, 11 aa, Homo sapiens
  CDR3 for beta chain variable domain of TCR clone 380727 (TRBV29-1, TRBJ2-5)
CSEDRTGTQYF

SEQ ID NO: 761455 - protein, 16 aa, Homo sapiens
  CDR3 for alpha chain variable domain of TCR clone 380728 (TRAV13-1, TRAJ18)
CAASRMRGSTLGRLYF

SEQ ID NO: 761456 - protein, 12 aa, Homo sapiens
  CDR3 for beta chain variable domain of TCR clone 380728 (TRBV11-3, TRBJ2-1)
CASSPGNNEQFF

SEQ ID NO: 761457 - protein, 15 aa, Homo sapiens
  CDR3 for alpha chain variable domain of TCR clone 380729 (TRAV3, TRAJ4)
CAVRDGTGGYNKLIF

SEQ ID NO: 761458 - protein, 18 aa, Homo sapiens
  CDR3 for beta chain variable domain of TCR clone 380729 (TRBV15, TRBJ2-3)
CVPPAGLGLAGPTDTQYF

SEQ ID NO: 761459 - protein, 14 aa, Homo sapiens
  CDR3 for alpha chain variable domain of TCR clone 380730 (TRAV12-3, TRAJ10)
SHLPLTGGGNKLTF

SEQ ID NO: 761460 - protein, 14 aa, Homo sapiens
  CDR3 for beta chain variable domain of TCR clone 380730 (TRBV6-5, TRBJ1-2)
CASSYSGQGGGYTF

SEQ ID NO: 761461 - protein, 16 aa, Homo sapiens
  CDR3 for alpha chain variable domain of TCR clone 380731 (TRAV3, TRAJ23)
CTVEPLIYNQGGKLIF

SEQ ID NO: 761462 - protein, 15 aa, Homo sapiens
  CDR3 for beta chain variable domain of TCR clone 380731 (TRBV19, TRBJ1-5)
CASSPEGRPNQPQHF

SEQ ID NO: 761463 - protein, 16 aa, Homo sapiens
  CDR3 for alpha chain variable domain of TCR clone 380732 (TRAV3, TRAJ10)
CAVRDMRAGGGNKLTF

SEQ ID NO: 761464 - protein, 19 aa, Homo sapiens
  CDR3 for beta chain variable domain of TCR clone 380732 (TRBV12-4, TRBJ2-1)
CASTLAFDPRDKEANEQFF

SEQ ID NO: 761465 - protein, 13 aa, Homo sapiens
  CDR3 for alpha chain variable domain of TCR clone 380733 (TRAV2, TRAJ23)
CAVMGNPGGKLIF

SEQ ID NO: 761466 - protein, 14 aa, Homo sapiens
  CDR3 for beta chain variable domain of TCR clone 380733 (TRBV11-2, TRBJ2-1)
CASSRATSYNEQFF

SEQ ID NO: 761467 - protein, 15 aa, Homo sapiens
  CDR3 for alpha chain variable domain of TCR clone 380734 (TRAV17, TRAJ57)
CATGPSQGGSEKLVF

SEQ ID NO: 761468 - protein, 13 aa, Homo sapiens
  CDR3 for beta chain variable domain of TCR clone 380734 (TRBV7-2, TRBJ2-2)
CASSLAVTGGLFF

SEQ ID NO: 761469 - protein, 14 aa, Homo sapiens
  CDR3 for alpha chain variable domain of TCR clone 380735 (TRAV8-4, TRAJ39)
CAVSEGNAGNMLTF

SEQ ID NO: 761470 - protein, 16 aa, Homo sapiens
  CDR3 for beta chain variable domain of TCR clone 380735 (TRBV7-3, TRBJ2-1)
CASSLEGYRSYNEQFF

SEQ ID NO: 761471 - protein, 16 aa, Homo sapiens
  CDR3 for alpha chain variable domain of TCR clone 380736 (TRAV30, TRAJ24)
CGTEIVDADSWGKFQF

SEQ ID NO: 761472 - protein, 15 aa, Homo sapiens
  CDR3 for beta chain variable domain of TCR clone 380736 (TRBV15, TRBJ2-1)
CATSRADRGHNEQFF

SEQ ID NO: 761473 - protein, 12 aa, Homo sapiens
  CDR3 for alpha chain variable domain of TCR clone 380737 (TRAV21, TRAJ39)
YAADNAGNMLTF

SEQ ID NO: 761474 - protein, 14 aa, Homo sapiens
  CDR3 for beta chain variable domain of TCR clone 380737 (TRBV5-1, TRBJ2-7)
CASSRGESLYEQYF

SEQ ID NO: 761475 - protein, 12 aa, Homo sapiens
  CDR3 for alpha chain variable domain of TCR clone 380738 (TRAV30, TRAJ43)
CGTEERGNDMRF

SEQ ID NO: 761476 - protein, 14 aa, Homo sapiens
  CDR3 for beta chain variable domain of TCR clone 380738 (TRBV4-1, TRBJ1-2)
CASSQDGQVRGYTF

SEQ ID NO: 761477 - protein, 17 aa, Homo sapiens
  CDR3 for alpha chain variable domain of TCR clone 380739 (TRAV8-3, TRAJ34)
CAIPGKPIFGTGTRLQV

SEQ ID NO: 761478 - protein, 16 aa, Homo sapiens
  CDR3 for beta chain variable domain of TCR clone 380739 (TRBV15, TRBJ1-2)
CATSRGPRTGGGGYTF

SEQ ID NO: 761479 - protein, 14 aa, Homo sapiens
  CDR3 for alpha chain variable domain of TCR clone 380740 (TRAV3, TRAJ28)
CAVRRGAGSYQLTF

SEQ ID NO: 761480 - protein, 16 aa, Homo sapiens
  CDR3 for beta chain variable domain of TCR clone 380740 (TRBV4-1, TRBJ2-7)
CASTQEWTSGPLEQYF

SEQ ID NO: 761481 - protein, 17 aa, Homo sapiens
  CDR3 for alpha chain variable domain of TCR clone 380741 (TRAV3, TRAJ42)
CAVRDRYYGGIQGNLIF

SEQ ID NO: 761482 - protein, 14 aa, Homo sapiens
  CDR3 for beta chain variable domain of TCR clone 380741 (TRBV7-2, TRBJ2-5)
CASSPRGSSETQYF

SEQ ID NO: 761483 - protein, 18 aa, Homo sapiens
  CDR3 for alpha chain variable domain of TCR clone 380742 (TRAV26-2, TRAJ54)
CILRDVEVGIQGAQKLVF

SEQ ID NO: 761484 - protein, 15 aa, Homo sapiens
  CDR3 for beta chain variable domain of TCR clone 380742 (TRBV6-4, TRBJ2-1)
CASSDSTGGYNEQFF

SEQ ID NO: 761485 - protein, 16 aa, Homo sapiens
  CDR3 for alpha chain variable domain of TCR clone 380743 (TRAV3, TRAJ37)
CAVRPHGSGNTGKLIF

SEQ ID NO: 761486 - protein, 16 aa, Homo sapiens
  CDR3 for beta chain variable domain of TCR clone 380743 (TRBV2, TRBJ2-1)
FASSVGGSLSYNEQFF

SEQ ID NO: 761487 - protein, 13 aa, Homo sapiens
  CDR3 for alpha chain variable domain of TCR clone 380744 (TRAV8-3, TRAJ6)
CAGGSGGSYIPTF

SEQ ID NO: 761488 - protein, 14 aa, Homo sapiens
  CDR3 for beta chain variable domain of TCR clone 380744 (TRBV11-2, TRBJ1-1)
RASSTQRGRTDAFF

SEQ ID NO: 761489 - protein, 13 aa, Homo sapiens
  CDR3 for alpha chain variable domain of TCR clone 380745 (TRAV8-3, TRAJ28)
CAVGAVGSYQLTF

SEQ ID NO: 761490 - protein, 14 aa, Homo sapiens
  CDR3 for beta chain variable domain of TCR clone 380745 (TRBV19, TRBJ2-1)
CSSPTFVLSGEQFF

SEQ ID NO: 761491 - protein, 14 aa, Homo sapiens
  CDR3 for alpha chain variable domain of TCR clone 380746 (TRAV1-2, TRAJ8)
CAVREDTGFQNLVF

SEQ ID NO: 761492 - protein, 12 aa, Homo sapiens
  CDR3 for beta chain variable domain of TCR clone 380746 (TRBV11-2, TRBJ2-2)
CGSSLGGGELFF

SEQ ID NO: 761493 - protein, 19 aa, Homo sapiens
  CDR3 for alpha chain variable domain of TCR clone 380747 (TRAV26-1, TRAJ22)
CCVLLHRWVFSGSARQLTF

SEQ ID NO: 761494 - protein, 16 aa, Homo sapiens
  CDR3 for beta chain variable domain of TCR clone 380747 (TRBV19, TRBJ2-5)
VSDRLPILFLGETQYF

SEQ ID NO: 761495 - protein, 14 aa, Homo sapiens
  CDR3 for alpha chain variable domain of TCR clone 380748 (TRAV26-1, TRAJ39)
CIVRGSRAGNMLTF

SEQ ID NO: 761496 - protein, 15 aa, Homo sapiens
  CDR3 for beta chain variable domain of TCR clone 380748 (TRBV12-4, TRBJ2-5)
CASSPPTGLQETQYF

SEQ ID NO: 761497 - protein, 17 aa, Homo sapiens
  CDR3 for alpha chain variable domain of TCR clone 380749 (TRAV3, TRAJ42)
CAVGDRDYGGSQGNLIF

SEQ ID NO: 761498 - protein, 20 aa, Homo sapiens
  CDR3 for beta chain variable domain of TCR clone 380749 (TRBV28, TRBJ2-1)
GASTPIGRSPGLAGGNEQFF

SEQ ID NO: 761499 - protein, 12 aa, Homo sapiens
  CDR3 for alpha chain variable domain of TCR clone 380750 (TRAV16, TRAJ56)
CAPTGANSKLTF

SEQ ID NO: 761500 - protein, 16 aa, Homo sapiens
  CDR3 for beta chain variable domain of TCR clone 380750 (TRBV2, TRBJ2-1)
CASSVGGSLSYNEQFF

SEQ ID NO: 761501 - protein, 14 aa, Homo sapiens
  CDR3 for alpha chain variable domain of TCR clone 380751 (TRAV2, TRAJ9)
CAVEDRSEGFKTIF

SEQ ID NO: 761502 - protein, 15 aa, Homo sapiens
  CDR3 for beta chain variable domain of TCR clone 380751 (TRBV20-1, TRBJ2-7)
CSARDRVSGMDEPYF

SEQ ID NO: 761503 - protein, 11 aa, Homo sapiens
  CDR3 for alpha chain variable domain of TCR clone 380752 (TRAV2, TRAJ13)
CASGGYQKITF

SEQ ID NO: 761504 - protein, 14 aa, Homo sapiens
  CDR3 for beta chain variable domain of TCR clone 380752 (TRBV7-3, TRBJ2-7)
CANSYDQDYYEQYF

SEQ ID NO: 761505 - protein, 12 aa, Homo sapiens
  CDR3 for alpha chain variable domain of TCR clone 380753 (TRAV12-2, TRAJ45)
CASGGGADGPTF

SEQ ID NO: 761506 - protein, 16 aa, Homo sapiens
  CDR3 for beta chain variable domain of TCR clone 380753 (TRBV19, TRBJ2-3)
CASSPGLLASTDTQYF

SEQ ID NO: 761507 - protein, 18 aa, Homo sapiens
  CDR3 for alpha chain variable domain of TCR clone 380754 (TRAV26-2, TRAJ45)
CILRVDKYSGGGADGLTF

SEQ ID NO: 761508 - protein, 15 aa, Homo sapiens
  CDR3 for beta chain variable domain of TCR clone 380754 (TRBV5-1, TRBJ2-5)
CASSLGLAEQETQYF

SEQ ID NO: 761509 - protein, 14 aa, Homo sapiens
  CDR3 for alpha chain variable domain of TCR clone 380755 (TRAV13-1, TRAJ35)
CAASKGGFGNVLHC

SEQ ID NO: 761510 - protein, 19 aa, Homo sapiens
  CDR3 for beta chain variable domain of TCR clone 380755 (TRBV25-1, TRBJ2-2)
CTILVYRVDRGRKTGELFF

SEQ ID NO: 761511 - protein, 13 aa, Homo sapiens
  CDR3 for alpha chain variable domain of TCR clone 380756 (TRAV27, TRAJ45)
CRSSGGGADGLTF

SEQ ID NO: 761512 - protein, 13 aa, Homo sapiens
  CDR3 for beta chain variable domain of TCR clone 380756 (TRBV11-2, TRBJ2-7)
CASSGTRPYEQYF

SEQ ID NO: 761513 - protein, 20 aa, Homo sapiens
  CDR3 for alpha chain variable domain of TCR clone 380757 (TRAV26-1, TRAJ42)
CWVLLHRQTYYVGSQGNLIF

SEQ ID NO: 761514 - protein, 16 aa, Homo sapiens
  CDR3 for beta chain variable domain of TCR clone 380757 (TRBV7-3, TRBJ2-2)
CASSLKRGTLSGELFF

SEQ ID NO: 761515 - protein, 14 aa, Homo sapiens
  CDR3 for alpha chain variable domain of TCR clone 380758 (TRAV13-1, TRAJ48)
CAASTDFGNEKLTF

SEQ ID NO: 761516 - protein, 13 aa, Homo sapiens
  CDR3 for beta chain variable domain of TCR clone 380758 (TRBV10-3, TRBJ2-5)
CHQGGNNQETQYF

SEQ ID NO: 761517 - protein, 15 aa, Homo sapiens
  CDR3 for alpha chain variable domain of TCR clone 380759 (TRAV1-2, TRAJ17)
CAVRGYGAAGNKLTF

SEQ ID NO: 761518 - protein, 13 aa, Homo sapiens
  CDR3 for beta chain variable domain of TCR clone 380759 (TRBV7-2, TRBJ2-2)
CASSSVRAGELFF

SEQ ID NO: 761519 - protein, 13 aa, Homo sapiens
  CDR3 for alpha chain variable domain of TCR clone 380760 (TRAV27, TRAJ29)
CAGAHSGNTPLVF

SEQ ID NO: 761520 - protein, 16 aa, Homo sapiens
  CDR3 for beta chain variable domain of TCR clone 380760 (TRBV4-2, TRBJ1-5)
CASSPGTGDSNQPQHF

SEQ ID NO: 761521 - protein, 11 aa, Homo sapiens
  CDR3 for alpha chain variable domain of TCR clone 380761 (TRAV12-1, TRAJ33)
CVVNSNYQLIW

SEQ ID NO: 761522 - protein, 19 aa, Homo sapiens
  CDR3 for beta chain variable domain of TCR clone 380761 (TRBV7-6, TRBJ2-5)
CASSLLGPGTSGEQETQYF

SEQ ID NO: 761523 - protein, 12 aa, Homo sapiens
  CDR3 for alpha chain variable domain of TCR clone 380762 (TRAV10, TRAJ43)
CVVVRVGNDMRF

SEQ ID NO: 761524 - protein, 14 aa, Homo sapiens
  CDR3 for beta chain variable domain of TCR clone 380762 (TRBV25-1, TRBJ1-1)
CASTHLGGNTEAFF

SEQ ID NO: 761525 - protein, 13 aa, Homo sapiens
  CDR3 for alpha chain variable domain of TCR clone 380763 (TRAV26-1, TRAJ48)
CIVRVVGDEKLTF

SEQ ID NO: 761526 - protein, 14 aa, Homo sapiens
  CDR3 for beta chain variable domain of TCR clone 380763 (TRBV12-5, TRBJ2-5)
CASGSRTHQETRYF

SEQ ID NO: 761527 - protein, 14 aa, Homo sapiens
  CDR3 for alpha chain variable domain of TCR clone 380764 (TRAV17, TRAJ48)
CATEGNFGNEKLTF

SEQ ID NO: 761528 - protein, 15 aa, Homo sapiens
  CDR3 for beta chain variable domain of TCR clone 380764 (TRBV2, TRBJ1-1)
CASTEPGQGASGAFF

SEQ ID NO: 761529 - protein, 16 aa, Homo sapiens
  CDR3 for alpha chain variable domain of TCR clone 380765 (TRAV30, TRAJ24)
CGTAIVDADSWGKFQC

SEQ ID NO: 761530 - protein, 14 aa, Homo sapiens
  CDR3 for beta chain variable domain of TCR clone 380765 (TRBV12-5, TRBJ2-5)
CASGSRTHQETQYF

SEQ ID NO: 761531 - protein, 15 aa, Homo sapiens
  CDR3 for alpha chain variable domain of TCR clone 380766 (TRAV22, TRAJ28)
SAARRSGAGSYQLTF

SEQ ID NO: 761532 - protein, 15 aa, Homo sapiens
  CDR3 for beta chain variable domain of TCR clone 380766 (TRBV14, TRBJ1-1)
CASSQDGMGRREAFF

SEQ ID NO: 761533 - protein, 13 aa, Homo sapiens
  CDR3 for alpha chain variable domain of TCR clone 380767 (TRAV2, TRAJ40)
CAVVTSGTYKYIF

SEQ ID NO: 761534 - protein, 15 aa, Homo sapiens
  CDR3 for beta chain variable domain of TCR clone 380767 (TRBV27, TRBJ2-3)
CAGSLGLAATDTQYF

SEQ ID NO: 761535 - protein, 11 aa, Homo sapiens
  CDR3 for alpha chain variable domain of TCR clone 380768 (TRAV21, TRAJ34)
CAPLDTDKLIF

SEQ ID NO: 761536 - protein, 16 aa, Homo sapiens
  CDR3 for beta chain variable domain of TCR clone 380768 (TRBV5-1, TRBJ2-3)
GASSLAGDRGTDTQYL

SEQ ID NO: 761537 - protein, 13 aa, Homo sapiens
  CDR3 for alpha chain variable domain of TCR clone 380769 (TRAV12-2, TRAJ18)
CAVRGSTLGRLYF

SEQ ID NO: 761538 - protein, 20 aa, Homo sapiens
  CDR3 for beta chain variable domain of TCR clone 380769 (TRBV7-8, TRBJ2-2)
CARSHLFPGPTIHITGELFF

SEQ ID NO: 761539 - protein, 14 aa, Homo sapiens
  CDR3 for alpha chain variable domain of TCR clone 380770 (TRAV12-2, TRAJ17)
CAVLFKAAGNKLTF

SEQ ID NO: 761540 - protein, 15 aa, Homo sapiens
  CDR3 for beta chain variable domain of TCR clone 380770 (TRBV5-7, TRBJ1-5)
CASSYGKLWDQPQHF

SEQ ID NO: 761541 - protein, 20 aa, Homo sapiens
  CDR3 for alpha chain variable domain of TCR clone 380771 (TRAV13-1, TRAJ10)
CAAKGHGRRKQTHLWDRYSA

SEQ ID NO: 761542 - protein, 13 aa, Homo sapiens
  CDR3 for beta chain variable domain of TCR clone 380771 (TRBV7-3, TRBJ2-1)
CASSLDSYNEQFF

SEQ ID NO: 761543 - protein, 16 aa, Homo sapiens
  CDR3 for alpha chain variable domain of TCR clone 380772 (TRAV3, TRAJ27)
CAVRDPYNTNAGKSTF

SEQ ID NO: 761544 - protein, 12 aa, Homo sapiens
  CDR3 for beta chain variable domain of TCR clone 380772 (TRBV5-4, TRBJ2-5)
CASSSTRETQYF

SEQ ID NO: 761545 - protein, 12 aa, Homo sapiens
  CDR3 for alpha chain variable domain of TCR clone 380773 (TRAV16, TRAJ10)
CSRTGGGNKLTF

SEQ ID NO: 761546 - protein, 18 aa, Homo sapiens
  CDR3 for beta chain variable domain of TCR clone 380773 (TRBV6-3, TRBJ2-7)
CTSVPAVPPGTVFYEQYF

SEQ ID NO: 761547 - protein, 12 aa, Homo sapiens
  CDR3 for alpha chain variable domain of TCR clone 380774 (TRAV3, TRAJ31)
CAVRPRGPRLMF

SEQ ID NO: 761548 - protein, 17 aa, Homo sapiens
  CDR3 for beta chain variable domain of TCR clone 380774 (TRBV7-9, TRBJ1-5)
CASRASQGGYSNQPQHF

SEQ ID NO: 761549 - protein, 11 aa, Homo sapiens
  CDR3 for alpha chain variable domain of TCR clone 380775 (TRAV2, TRAJ33)
CAVDSNYQLIW

SEQ ID NO: 761550 - protein, 15 aa, Homo sapiens
  CDR3 for beta chain variable domain of TCR clone 380775 (TRBV4-1, TRBJ2-7)
CASSQQGQGFDERYF

SEQ ID NO: 761551 - protein, 15 aa, Homo sapiens
  CDR3 for alpha chain variable domain of TCR clone 380776 (TRAV2, TRAJ24)
CAVEVLTDSWGKFQF

SEQ ID NO: 761552 - protein, 10 aa, Homo sapiens
  CDR3 for beta chain variable domain of TCR clone 380776 (TRBV28, TRBJ1-2)
CASSSDRAVF

SEQ ID NO: 761553 - protein, 14 aa, Homo sapiens
  CDR3 for alpha chain variable domain of TCR clone 380777 (TRAV2, TRAJ12)
CAVDAMDSSYKLIF

SEQ ID NO: 761554 - protein, 14 aa, Homo sapiens
  CDR3 for beta chain variable domain of TCR clone 380777 (TRBV25-1, TRBJ1-1)
CASTHLGGNTEAFF

SEQ ID NO: 761555 - protein, 12 aa, Homo sapiens
  CDR3 for alpha chain variable domain of TCR clone 380778 (TRAV3, TRAJ39)
CAVIEWSNMLTF

SEQ ID NO: 761556 - protein, 15 aa, Homo sapiens
  CDR3 for beta chain variable domain of TCR clone 380778 (TRBV7-9, TRBJ1-4)
CASSARTGGNEKLFF

SEQ ID NO: 761557 - protein, 14 aa, Homo sapiens
  CDR3 for alpha chain variable domain of TCR clone 380779 (TRAV12-2, TRAJ13)
CAVKKTGGYQKVTF

SEQ ID NO: 761558 - protein, 17 aa, Homo sapiens
  CDR3 for beta chain variable domain of TCR clone 380779 (TRBV5-1, TRBJ1-6)
CASSFGEVSSYNSPLHF

SEQ ID NO: 761559 - protein, 12 aa, Homo sapiens
  CDR3 for alpha chain variable domain of TCR clone 380780 (TRAV12-3, TRAJ17)
CAMTLTGNKLTF

SEQ ID NO: 761560 - protein, 15 aa, Homo sapiens
  CDR3 for beta chain variable domain of TCR clone 380780 (TRBV28, TRBJ2-7)
CASKKPSGRAYEQYF

SEQ ID NO: 761561 - protein, 16 aa, Homo sapiens
  CDR3 for alpha chain variable domain of TCR clone 380781 (TRAV30, TRAJ24)
RGTEIVDADSWGKFQF

SEQ ID NO: 761562 - protein, 13 aa, Homo sapiens
  CDR3 for beta chain variable domain of TCR clone 380781 (TRBV7-9, TRBJ1-2)
CASSLKQNYGYTF

SEQ ID NO: 761563 - protein, 15 aa, Homo sapiens
  CDR3 for alpha chain variable domain of TCR clone 380782 (TRAV8-4, TRAJ10)
CAVSDGPGGGNELTF

SEQ ID NO: 761564 - protein, 13 aa, Homo sapiens
  CDR3 for beta chain variable domain of TCR clone 380782 (TRBV28, TRBJ1-3)
CASSFLGSGTIYF

SEQ ID NO: 761565 - protein, 16 aa, Homo sapiens
  CDR3 for alpha chain variable domain of TCR clone 380783 (TRAV1-2, TRAJ10)
CAVRGVLTGGGNKLTF

SEQ ID NO: 761566 - protein, 13 aa, Homo sapiens
  CDR3 for beta chain variable domain of TCR clone 380783 (TRBV20-1, TRBJ2-2)
CSASAAGTGEMFF

SEQ ID NO: 761567 - protein, 13 aa, Homo sapiens
  CDR3 for alpha chain variable domain of TCR clone 380784 (TRAV12-2, TRAJ20)
CAVYPSNDYKPSF

SEQ ID NO: 761568 - protein, 14 aa, Homo sapiens
  CDR3 for beta chain variable domain of TCR clone 380784 (TRBV27, TRBJ2-5)
CQQFIPAGGRDQYF

SEQ ID NO: 761569 - protein, 14 aa, Homo sapiens
  CDR3 for alpha chain variable domain of TCR clone 380785 (TRAV26-1, TRAJ34)
CIVRESYNTYKLIF

SEQ ID NO: 761570 - protein, 16 aa, Homo sapiens
  CDR3 for beta chain variable domain of TCR clone 380785 (TRBV10-3, TRBJ2-1)
CAISGVGDGGGGEQFF

SEQ ID NO: 761571 - protein, 14 aa, Homo sapiens
  CDR3 for alpha chain variable domain of TCR clone 380786 (TRAV1-2, TRAJ16)
CAVRGFSDGQKLLF

SEQ ID NO: 761572 - protein, 16 aa, Homo sapiens
  CDR3 for beta chain variable domain of TCR clone 380786 (TRBV20-1, TRBJ2-1)
RSARDHLAGGRGEQFF

SEQ ID NO: 761573 - protein, 14 aa, Homo sapiens
  CDR3 for alpha chain variable domain of TCR clone 380787 (TRAV12-2, TRAJ15)
CALESPKAGTALIF

SEQ ID NO: 761574 - protein, 13 aa, Homo sapiens
  CDR3 for beta chain variable domain of TCR clone 380787 (TRBV20-1, TRBJ1-1)
CSARGGGNTEAFF

SEQ ID NO: 761575 - protein, 14 aa, Homo sapiens
  CDR3 for alpha chain variable domain of TCR clone 380788 (TRAV12-2, TRAJ17)
CAVLFKAAGNKLTF

SEQ ID NO: 761576 - protein, 15 aa, Homo sapiens
  CDR3 for beta chain variable domain of TCR clone 380788 (TRBV20-1, TRBJ2-3)
CSARRGEAIIDTQYF

SEQ ID NO: 761577 - protein, 23 aa, Homo sapiens
  CDR3 for alpha chain variable domain of TCR clone 380789 (TRAV26-1, TRAJ38)
CIADNAGNNHIQNPDPAVSQLRD

SEQ ID NO: 761578 - protein, 13 aa, Homo sapiens
  CDR3 for beta chain variable domain of TCR clone 380789 (TRBV5-4, TRBJ1-1)
CASSVDLGTEAFF

SEQ ID NO: 761579 - protein, 15 aa, Homo sapiens
  CDR3 for alpha chain variable domain of TCR clone 380790 (TRAV20, TRAJ53)
CAVQASGGSNYKLTY

SEQ ID NO: 761580 - protein, 12 aa, Homo sapiens
  CDR3 for beta chain variable domain of TCR clone 380790 (TRBV7-8, TRBJ2-7)
CASSLGDREQYF

SEQ ID NO: 761581 - protein, 12 aa, Homo sapiens
  CDR3 for alpha chain variable domain of TCR clone 380791 (TRAV17, TRAJ57)
CATDGGSEKLVF

SEQ ID NO: 761582 - protein, 15 aa, Homo sapiens
  CDR3 for beta chain variable domain of TCR clone 380791 (TRBV5-1, TRBJ2-1)
CASSPPRAPYNEQFF

SEQ ID NO: 761583 - protein, 13 aa, Homo sapiens
  CDR3 for alpha chain variable domain of TCR clone 380792 (TRAV3, TRAJ20)
CAVRSLNDYKLSF

SEQ ID NO: 761584 - protein, 17 aa, Homo sapiens
  CDR3 for beta chain variable domain of TCR clone 380792 (TRBV28, TRBJ2-7)
CASSPGLAGGDSSEQYF

SEQ ID NO: 761585 - protein, 20 aa, Homo sapiens
  CDR3 for alpha chain variable domain of TCR clone 380793 (TRAV26-1, TRAJ42)
CCVLLHRQTYYGGSQGNLIF

SEQ ID NO: 761586 - protein, 13 aa, Homo sapiens
  CDR3 for beta chain variable domain of TCR clone 380793 (TRBV11-2, TRBJ2-5)
CASSFSSQETQYF

SEQ ID NO: 761587 - protein, 21 aa, Homo sapiens
  CDR3 for alpha chain variable domain of TCR clone 380794 (TRAV25, TRAJ53)
TAPQTTDVGTGSGGSNSKLTF

SEQ ID NO: 761588 - protein, 16 aa, Homo sapiens
  CDR3 for beta chain variable domain of TCR clone 380794 (TRBV4-2, TRBJ2-3)
CASSLSSGGHTDTQYF

SEQ ID NO: 761589 - protein, 14 aa, Homo sapiens
  CDR3 for alpha chain variable domain of TCR clone 380795 (TRAV8-3, TRAJ6)
CAVGASGGSYIPTF

SEQ ID NO: 761590 - protein, 17 aa, Homo sapiens
  CDR3 for beta chain variable domain of TCR clone 380795 (TRBV18, TRBJ2-2)
CASSPADPWQNTGELFF

SEQ ID NO: 761591 - protein, 12 aa, Homo sapiens
  CDR3 for alpha chain variable domain of TCR clone 380796 (TRAV2, TRAJ26)
CAGSPGRLWPEF

SEQ ID NO: 761592 - protein, 17 aa, Homo sapiens
  CDR3 for beta chain variable domain of TCR clone 380796 (TRBV11-2, TRBJ2-1)
CASSLYPPGVEYNEQFV

SEQ ID NO: 761593 - protein, 12 aa, Homo sapiens
  CDR3 for alpha chain variable domain of TCR clone 380797 (TRAV35, TRAJ30)
CAGQLADDKIIF

SEQ ID NO: 761594 - protein, 15 aa, Homo sapiens
  CDR3 for beta chain variable domain of TCR clone 380797 (TRBV24-1, TRBJ1-3)
CATSDHGESGNTIYF

SEQ ID NO: 761595 - protein, 12 aa, Homo sapiens
  CDR3 for alpha chain variable domain of TCR clone 380798 (TRAV13-1, TRAJ9)
CASHTGGFKPIF

SEQ ID NO: 761596 - protein, 18 aa, Homo sapiens
  CDR3 for beta chain variable domain of TCR clone 380798 (TRBV11-2, TRBJ2-3)
CASSLGGASRGAPNTQYF

SEQ ID NO: 761597 - protein, 15 aa, Homo sapiens
  CDR3 for alpha chain variable domain of TCR clone 380799 (TRAV30, TRAJ32)
CGTAILGGATNKPIF

SEQ ID NO: 761598 - protein, 13 aa, Homo sapiens
  CDR3 for beta chain variable domain of TCR clone 380799 (TRBV6-3, TRBJ2-7)
CASSFSGGYEQYF

SEQ ID NO: 761599 - protein, 13 aa, Homo sapiens
  CDR3 for alpha chain variable domain of TCR clone 380800 (TRAV4, TRAJ42)
CLVGGGSQGNLIF

SEQ ID NO: 761600 - protein, 16 aa, Homo sapiens
  CDR3 for beta chain variable domain of TCR clone 380800 (TRBV5-1, TRBJ2-3)
CASSLQGRVGADTQYL

SEQ ID NO: 761601 - protein, 12 aa, Homo sapiens
  CDR3 for alpha chain variable domain of TCR clone 380801 (TRAV2, TRAJ3)
CAVRRSASKIIF

SEQ ID NO: 761602 - protein, 15 aa, Homo sapiens
  CDR3 for beta chain variable domain of TCR clone 380801 (TRBV15, TRBJ2-5)
CATSRDGGPQETQYF

SEQ ID NO: 761603 - protein, 15 aa, Homo sapiens
  CDR3 for alpha chain variable domain of TCR clone 380802 (TRAV21, TRAJ53)
CATLNSGGSNYKLTF

SEQ ID NO: 761604 - protein, 17 aa, Homo sapiens
  CDR3 for beta chain variable domain of TCR clone 380802 (TRBV20-1, TRBJ2-2)
CSASGSGQGGLTGELFF

SEQ ID NO: 761605 - protein, 14 aa, Homo sapiens
  CDR3 for alpha chain variable domain of TCR clone 380803 (TRAV12-2, TRAJ39)
CAVKGGNAGNMPTF

SEQ ID NO: 761606 - protein, 13 aa, Homo sapiens
  CDR3 for beta chain variable domain of TCR clone 380803 (TRBV12-4, TRBJ1-1)
CASSSGRGTEAFF

SEQ ID NO: 761607 - protein, 22 aa, Homo sapiens
  CDR3 for alpha chain variable domain of TCR clone 380804 (TRAV27, TRAJ38)
CAARRNAGNNHIQNPDPAVYQL

SEQ ID NO: 761608 - protein, 13 aa, Homo sapiens
  CDR3 for beta chain variable domain of TCR clone 380804 (TRBV12-5, TRBJ2-3)
CASGDRQSDTKYF

SEQ ID NO: 761609 - protein, 13 aa, Homo sapiens
  CDR3 for alpha chain variable domain of TCR clone 380805 (TRAV8-6, TRAJ9)
CAVWDTGGFKTIF

SEQ ID NO: 761610 - protein, 16 aa, Homo sapiens
  CDR3 for beta chain variable domain of TCR clone 380805 (TRBV20-1, TRBJ1-2)
CSASMGQGVANYGYTF

SEQ ID NO: 761611 - protein, 15 aa, Homo sapiens
  CDR3 for alpha chain variable domain of TCR clone 380806 (TRAV3, TRAJ20)
CAVRDIKLSDYKLSF

SEQ ID NO: 761612 - protein, 14 aa, Homo sapiens
  CDR3 for beta chain variable domain of TCR clone 380806 (TRBV16, TRBJ1-1)
CASSQAGPNTEAFF

SEQ ID NO: 761613 - protein, 15 aa, Homo sapiens
  CDR3 for alpha chain variable domain of TCR clone 380807 (TRAV12-1, TRAJ44)
CVVDEYTGTASKLTF

SEQ ID NO: 761614 - protein, 14 aa, Homo sapiens
  CDR3 for beta chain variable domain of TCR clone 380807 (TRBV5-1, TRBJ1-2)
CASSLEPVHYGYTL

SEQ ID NO: 761615 - protein, 16 aa, Homo sapiens
  CDR3 for alpha chain variable domain of TCR clone 380808 (TRAV27, TRAJ13)
CAGAKSDSGGYQKVTF

SEQ ID NO: 761616 - protein, 16 aa, Homo sapiens
  CDR3 for beta chain variable domain of TCR clone 380808 (TRBV7-9, TRBJ1-3)
CASSLGAGSSGNTIYF

SEQ ID NO: 761617 - protein, 10 aa, Homo sapiens
  CDR3 for alpha chain variable domain of TCR clone 380809 (TRAV12-3, TRAJ49)
RAMNDDQFYF

SEQ ID NO: 761618 - protein, 16 aa, Homo sapiens
  CDR3 for beta chain variable domain of TCR clone 380809 (TRBV5-1, TRBJ2-5)
CASSLGTGEVGETQYF

SEQ ID NO: 761619 - protein, 15 aa, Homo sapiens
  CDR3 for alpha chain variable domain of TCR clone 380810 (TRAV8-3, TRAJ45)
CASSYSGGGADGLTF

SEQ ID NO: 761620 - protein, 13 aa, Homo sapiens
  CDR3 for beta chain variable domain of TCR clone 380810 (TRBV19, TRBJ1-1)
CASSIGPQAEAFF

SEQ ID NO: 761621 - protein, 13 aa, Homo sapiens
  CDR3 for alpha chain variable domain of TCR clone 380811 (TRAV35, TRAJ48)
CAGHEFGNEKLTF

SEQ ID NO: 761622 - protein, 14 aa, Homo sapiens
  CDR3 for beta chain variable domain of TCR clone 380811 (TRBV2, TRBJ2-7)
CASTVGRSSYEQYF

SEQ ID NO: 761623 - protein, 14 aa, Homo sapiens
  CDR3 for alpha chain variable domain of TCR clone 380812 (TRAV13-1, TRAJ9)
CAASALTGGFKTIF

SEQ ID NO: 761624 - protein, 13 aa, Homo sapiens
  CDR3 for beta chain variable domain of TCR clone 380812 (TRBV20-1, TRBJ1-1)
CSAGTAGNTEAFF

SEQ ID NO: 761625 - protein, 19 aa, Homo sapiens
  CDR3 for alpha chain variable domain of TCR clone 380813 (TRAV2, TRAJ20)
ILQVREADADVYRDCKLSF

SEQ ID NO: 761626 - protein, 16 aa, Homo sapiens
  CDR3 for beta chain variable domain of TCR clone 380813 (TRBV5-1, TRBJ2-5)
CASSLALLRAGETQYF

SEQ ID NO: 761627 - protein, 14 aa, Homo sapiens
  CDR3 for alpha chain variable domain of TCR clone 380814 (TRAV2, TRAJ37)
CAVDFTRNKGKLIF

SEQ ID NO: 761628 - protein, 15 aa, Homo sapiens
  CDR3 for beta chain variable domain of TCR clone 380814 (TRBV20-1, TRBJ1-1)
CSASRGVTGNTEAFF

SEQ ID NO: 761629 - protein, 16 aa, Homo sapiens
  CDR3 for alpha chain variable domain of TCR clone 380815 (TRAV30, TRAJ24)
CGTEIVYADSWGKFQF

SEQ ID NO: 761630 - protein, 16 aa, Homo sapiens
  CDR3 for beta chain variable domain of TCR clone 380815 (TRBV6-1, TRBJ2-1)
CASILRQGSSYNEQFF

SEQ ID NO: 761631 - protein, 13 aa, Homo sapiens
  CDR3 for alpha chain variable domain of TCR clone 380816 (TRAV12-2, TRAJ7)
RAVNIYGNNRLAF

SEQ ID NO: 761632 - protein, 14 aa, Homo sapiens
  CDR3 for beta chain variable domain of TCR clone 380816 (TRBV25-1, TRBJ1-2)
CASSEATGPYGYTF

SEQ ID NO: 761633 - protein, 15 aa, Homo sapiens
  CDR3 for alpha chain variable domain of TCR clone 380817 (TRAV3, TRAJ22)
CDVRDRGGSARQLTF

SEQ ID NO: 761634 - protein, 16 aa, Homo sapiens
  CDR3 for beta chain variable domain of TCR clone 380817 (TRBV5-4, TRBJ2-3)
CASQQPGAGGSDTQYF

SEQ ID NO: 761635 - protein, 14 aa, Homo sapiens
  CDR3 for alpha chain variable domain of TCR clone 380818 (TRAV8-4, TRAJ57)
CAVSFQGGSEKLVF

SEQ ID NO: 761636 - protein, 15 aa, Homo sapiens
  CDR3 for beta chain variable domain of TCR clone 380818 (TRBV27, TRBJ2-1)
CASSNGGGSSNEQFF

SEQ ID NO: 761637 - protein, 15 aa, Homo sapiens
  CDR3 for alpha chain variable domain of TCR clone 380819 (TRAV3, TRAJ22)
CAVRDRGGSARQLTF

SEQ ID NO: 761638 - protein, 17 aa, Homo sapiens
  CDR3 for beta chain variable domain of TCR clone 380819 (TRBV11-2, TRBJ2-1)
CASSLCPPGVEYNEQFF

SEQ ID NO: 761639 - protein, 13 aa, Homo sapiens
  CDR3 for alpha chain variable domain of TCR clone 380820 (TRAV8-3, TRAJ28)
CAVGAVGSYQLTF

SEQ ID NO: 761640 - protein, 13 aa, Homo sapiens
  CDR3 for beta chain variable domain of TCR clone 380820 (TRBV29-1, TRBJ2-1)
CSVEGGKVNEQFF

SEQ ID NO: 761641 - protein, 14 aa, Homo sapiens
  CDR3 for alpha chain variable domain of TCR clone 380821 (TRAV13-1, TRAJ45)
CAAIGGGGADGLTF

SEQ ID NO: 761642 - protein, 13 aa, Homo sapiens
  CDR3 for beta chain variable domain of TCR clone 380821 (TRBV7-3, TRBJ2-5)
CASSFRGGETQYF

SEQ ID NO: 761643 - protein, 14 aa, Homo sapiens
  CDR3 for alpha chain variable domain of TCR clone 380822 (TRAV8-3, TRAJ4)
CAVGAAGGYHKVIF

SEQ ID NO: 761644 - protein, 16 aa, Homo sapiens
  CDR3 for beta chain variable domain of TCR clone 380822 (TRBV4-3, TRBJ2-2)
CASSHLQGSGTRELFF

SEQ ID NO: 761645 - protein, 15 aa, Homo sapiens
  CDR3 for alpha chain variable domain of TCR clone 380823 (TRAV4, TRAJ27)
CLVGAEGTNAGKPTF

SEQ ID NO: 761646 - protein, 16 aa, Homo sapiens
  CDR3 for beta chain variable domain of TCR clone 380823 (TRBV6-5, TRBJ2-1)
CASSYSLAGGYNEQFF

SEQ ID NO: 761647 - protein, 12 aa, Homo sapiens
  CDR3 for alpha chain variable domain of TCR clone 380824 (TRAV12-3, TRAJ41)
CAMSYSGYALNF

SEQ ID NO: 761648 - protein, 13 aa, Homo sapiens
  CDR3 for beta chain variable domain of TCR clone 380824 (TRBV3-1, TRBJ1-2)
CASSQRAPGGYTF

SEQ ID NO: 761649 - protein, 12 aa, Homo sapiens
  CDR3 for alpha chain variable domain of TCR clone 380825 (TRAV27, TRAJ13)
CAGAGGYQQVTS

SEQ ID NO: 761650 - protein, 15 aa, Homo sapiens
  CDR3 for beta chain variable domain of TCR clone 380825 (TRBV20-1, TRBJ2-6)
CSARDRGPGANVLTF

SEQ ID NO: 761651 - protein, 18 aa, Homo sapiens
  CDR3 for alpha chain variable domain of TCR clone 380826 (TRAV26-1, TRAJ52)
CIVRVEGAGGTSYGKLTF

SEQ ID NO: 761652 - protein, 13 aa, Homo sapiens
  CDR3 for beta chain variable domain of TCR clone 380826 (TRBV7-3, TRBJ1-2)
CASSLKRGYGYVL

SEQ ID NO: 761653 - protein, 14 aa, Homo sapiens
  CDR3 for alpha chain variable domain of TCR clone 380827 (TRAV12-2, TRAJ40)
CAVKIPSGTYKYIF

SEQ ID NO: 761654 - protein, 15 aa, Homo sapiens
  CDR3 for beta chain variable domain of TCR clone 380827 (TRBV5-1, TRBJ2-3)
CASRSNREGTDTQYF

SEQ ID NO: 761655 - protein, 13 aa, Homo sapiens
  CDR3 for alpha chain variable domain of TCR clone 380828 (TRAV12-2, TRAJ49)
CAVNMRTGNQFYF

SEQ ID NO: 761656 - protein, 15 aa, Homo sapiens
  CDR3 for beta chain variable domain of TCR clone 380828 (TRBV7-2, TRBJ2-1)
CASSSRTSREDEQFF

SEQ ID NO: 761657 - protein, 14 aa, Homo sapiens
  CDR3 for alpha chain variable domain of TCR clone 380829 (TRAV26-1, TRAJ21)
CIVTPPYNFNKFYF

SEQ ID NO: 761658 - protein, 14 aa, Homo sapiens
  CDR3 for beta chain variable domain of TCR clone 380829 (TRBV19, TRBJ2-1)
CASPTFVLSGEQFL

SEQ ID NO: 761659 - protein, 13 aa, Homo sapiens
  CDR3 for alpha chain variable domain of TCR clone 380830 (TRAV1-1, TRAJ13)
FAVNSGGYQKVTF

SEQ ID NO: 761660 - protein, 12 aa, Homo sapiens
  CDR3 for beta chain variable domain of TCR clone 380830 (TRBV28, TRBJ2-1)
CASSVQINEQFF

SEQ ID NO: 761661 - protein, 13 aa, Homo sapiens
  CDR3 for alpha chain variable domain of TCR clone 380831 (TRAV1-2, TRAJ9)
CAALNTGGFKTIF

SEQ ID NO: 761662 - protein, 14 aa, Homo sapiens
  CDR3 for beta chain variable domain of TCR clone 380831 (TRBV13, TRBJ2-3)
CAGSSGSPTDTQYF

SEQ ID NO: 761663 - protein, 13 aa, Homo sapiens
  CDR3 for alpha chain variable domain of TCR clone 380832 (TRAV21, TRAJ37)
CAVSSGNPGKLIS

SEQ ID NO: 761664 - protein, 17 aa, Homo sapiens
  CDR3 for beta chain variable domain of TCR clone 380832 (TRBV5-1, TRBJ2-5)
CASSLLGLAANQETQYF

SEQ ID NO: 761665 - protein, 13 aa, Homo sapiens
  CDR3 for alpha chain variable domain of TCR clone 380833 (TRAV13-1, TRAJ11)
FAAVLAGYSTLTF

SEQ ID NO: 761666 - protein, 17 aa, Homo sapiens
  CDR3 for beta chain variable domain of TCR clone 380833 (TRBV25-1, TRBJ2-7)
CASSDARVVFSSYEQYF

SEQ ID NO: 761667 - protein, 14 aa, Homo sapiens
  CDR3 for alpha chain variable domain of TCR clone 380834 (TRAV13-2, TRAJ16)
CAENNWEDGQKLLF

SEQ ID NO: 761668 - protein, 14 aa, Homo sapiens
  CDR3 for beta chain variable domain of TCR clone 380834 (TRBV7-9, TRBJ1-1)
CASSLGGLKSEAFF

SEQ ID NO: 761669 - protein, 13 aa, Homo sapiens
  CDR3 for alpha chain variable domain of TCR clone 380835 (TRAV29/DV5, TRAJ40)
CAATYSGTYKSIF

SEQ ID NO: 761670 - protein, 14 aa, Homo sapiens
  CDR3 for beta chain variable domain of TCR clone 380835 (TRBV24-1, TRBJ2-3)
CATSATGSTDTQYF

SEQ ID NO: 761671 - protein, 15 aa, Homo sapiens
  CDR3 for alpha chain variable domain of TCR clone 380836 (TRAV12-3, TRAJ10)
CASDILTGGGNKLTF

SEQ ID NO: 761672 - protein, 14 aa, Homo sapiens
  CDR3 for beta chain variable domain of TCR clone 380836 (TRBV4-1, TRBJ2-2)
CASSQAVNTGELFF

SEQ ID NO: 761673 - protein, 13 aa, Homo sapiens
  CDR3 for alpha chain variable domain of TCR clone 380837 (TRAV27, TRAJ41)
CAGEGNSGYALNF

SEQ ID NO: 761674 - protein, 16 aa, Homo sapiens
  CDR3 for beta chain variable domain of TCR clone 380837 (TRBV12-5, TRBJ2-5)
CASGPRTSGNQETQYF

SEQ ID NO: 761675 - protein, 14 aa, Homo sapiens
  CDR3 for alpha chain variable domain of TCR clone 380838 (TRAV12-1, TRAJ17)
CVLNYKAAGNRLTF

SEQ ID NO: 761676 - protein, 17 aa, Homo sapiens
  CDR3 for beta chain variable domain of TCR clone 380838 (TRBV20-1, TRBJ2-1)
CSASSSGLAGSYNEQFF

SEQ ID NO: 761677 - protein, 12 aa, Homo sapiens
  CDR3 for alpha chain variable domain of TCR clone 380839 (TRAV1-1, TRAJ39)
CAVPVVGNMVTF

SEQ ID NO: 761678 - protein, 15 aa, Homo sapiens
  CDR3 for beta chain variable domain of TCR clone 380839 (TRBV19, TRBJ1-6)
CASSTQGAVGSPLHF

SEQ ID NO: 761679 - protein, 16 aa, Homo sapiens
  CDR3 for alpha chain variable domain of TCR clone 380840 (TRAV30, TRAJ24)
CGTEIVDADSWAKFQF

SEQ ID NO: 761680 - protein, 14 aa, Homo sapiens
  CDR3 for beta chain variable domain of TCR clone 380840 (TRBV7-2, TRBJ2-7)
CASSPKTSFYEQYF

SEQ ID NO: 761681 - protein, 12 aa, Homo sapiens
  CDR3 for alpha chain variable domain of TCR clone 380841 (TRAV16, TRAJ10)
CSRTGGGNNLTF

SEQ ID NO: 761682 - protein, 12 aa, Homo sapiens
  CDR3 for beta chain variable domain of TCR clone 380841 (TRBV11-3, TRBJ1-1)
CASSHRQGEAFF

SEQ ID NO: 761683 - protein, 15 aa, Homo sapiens
  CDR3 for alpha chain variable domain of TCR clone 380842 (TRAV26-1, TRAJ29)
CTVRVEGSGNKPLVF

SEQ ID NO: 761684 - protein, 14 aa, Homo sapiens
  CDR3 for beta chain variable domain of TCR clone 380842 (TRBV18, TRBJ2-5)
CASSPGVSQETQYF

SEQ ID NO: 761685 - protein, 12 aa, Homo sapiens
  CDR3 for alpha chain variable domain of TCR clone 380843 (TRAV25, TRAJ5)
CAGGGGRRALTL

SEQ ID NO: 761686 - protein, 15 aa, Homo sapiens
  CDR3 for beta chain variable domain of TCR clone 380843 (TRBV9, TRBJ1-2)
CASSVVGQANYGYTF

SEQ ID NO: 761687 - protein, 13 aa, Homo sapiens
  CDR3 for alpha chain variable domain of TCR clone 380844 (TRAV12-2, TRAJ54)
CAVKNQGAQKLVF

SEQ ID NO: 761688 - protein, 14 aa, Homo sapiens
  CDR3 for beta chain variable domain of TCR clone 380844 (TRBV7-2, TRBJ2-7)
CASSLYPGRYEQYF

SEQ ID NO: 761689 - protein, 13 aa, Homo sapiens
  CDR3 for alpha chain variable domain of TCR clone 380845 (TRAV8-4, TRAJ49)
CAVRALTGNQFYF

SEQ ID NO: 761690 - protein, 16 aa, Homo sapiens
  CDR3 for beta chain variable domain of TCR clone 380845 (TRBV5-7, TRBJ2-5)
CASTLAPAGGRETQYF

SEQ ID NO: 761691 - protein, 15 aa, Homo sapiens
  CDR3 for alpha chain variable domain of TCR clone 380846 (TRAV25, TRAJ52)
CAGRPGGTSYGKLTF

SEQ ID NO: 761692 - protein, 16 aa, Homo sapiens
  CDR3 for beta chain variable domain of TCR clone 380846 (TRBV7-6, TRBJ2-5)
CASSETSGRAVETQYF

SEQ ID NO: 761693 - protein, 14 aa, Homo sapiens
  CDR3 for alpha chain variable domain of TCR clone 380847 (TRAV12-3, TRAJ42)
CAMNYGGSQGNLIF

SEQ ID NO: 761694 - protein, 15 aa, Homo sapiens
  CDR3 for beta chain variable domain of TCR clone 380847 (TRBV11-2, TRBJ1-2)
CASSLEGVQRNGYTF

SEQ ID NO: 761695 - protein, 11 aa, Homo sapiens
  CDR3 for alpha chain variable domain of TCR clone 380848 (TRAV1-2, TRAJ31)
CAVNNNARLMF

SEQ ID NO: 761696 - protein, 12 aa, Homo sapiens
  CDR3 for beta chain variable domain of TCR clone 380848 (TRBV7-2, TRBJ1-6)
CASSLSSSPLHF

SEQ ID NO: 761697 - protein, 16 aa, Homo sapiens
  CDR3 for alpha chain variable domain of TCR clone 380849 (TRAV3, TRAJ37)
CAVRPHGSGNTGKLIF

SEQ ID NO: 761698 - protein, 16 aa, Homo sapiens
  CDR3 for beta chain variable domain of TCR clone 380849 (TRBV20-1, TRBJ1-1)
CSARALTQGMNTEAFF

SEQ ID NO: 761699 - protein, 15 aa, Homo sapiens
  CDR3 for alpha chain variable domain of TCR clone 380850 (TRAV12-2, TRAJ53)
CAVNGVGGSNYKLTF

SEQ ID NO: 761700 - protein, 17 aa, Homo sapiens
  CDR3 for beta chain variable domain of TCR clone 380850 (TRBV7-3, TRBJ2-3)
RASSLMKRMRGADTQYF

SEQ ID NO: 761701 - protein, 15 aa, Homo sapiens
  CDR3 for alpha chain variable domain of TCR clone 380851 (TRAV17, TRAJ57)
CATGPSQGGSEKLVF

SEQ ID NO: 761702 - protein, 18 aa, Homo sapiens
  CDR3 for beta chain variable domain of TCR clone 380851 (TRBV20-1, TRBJ2-6)
CSARTLAGGPAGANVLTF

SEQ ID NO: 761703 - protein, 14 aa, Homo sapiens
  CDR3 for alpha chain variable domain of TCR clone 380852 (TRAV2, TRAJ20)
CAVEDGTNDYKLSF

SEQ ID NO: 761704 - protein, 17 aa, Homo sapiens
  CDR3 for beta chain variable domain of TCR clone 380852 (TRBV28, TRBJ2-5)
CASSTPEGDALQETQYF

SEQ ID NO: 761705 - protein, 15 aa, Homo sapiens
  CDR3 for alpha chain variable domain of TCR clone 380853 (TRAV12-2, TRAJ53)
CAVNGGGGSNYKLTF

SEQ ID NO: 761706 - protein, 14 aa, Homo sapiens
  CDR3 for beta chain variable domain of TCR clone 380853 (TRBV12-5, TRBJ2-5)
CASDSRTHQETQYF

SEQ ID NO: 761707 - protein, 13 aa, Homo sapiens
  CDR3 for alpha chain variable domain of TCR clone 380854 (TRAV21, TRAJ11)
CAVPNSGYSTLTF

SEQ ID NO: 761708 - protein, 13 aa, Homo sapiens
  CDR3 for beta chain variable domain of TCR clone 380854 (TRBV3-1, TRBJ2-7)
CSSSLRDGYEQYF

SEQ ID NO: 761709 - protein, 16 aa, Homo sapiens
  CDR3 for alpha chain variable domain of TCR clone 380855 (TRAV3, TRAJ37)
CAVRGKGSGNTGKLIF

SEQ ID NO: 761710 - protein, 13 aa, Homo sapiens
  CDR3 for beta chain variable domain of TCR clone 380855 (TRBV7-3, TRBJ1-1)
CASSQDWGAEACF

SEQ ID NO: 761711 - protein, 11 aa, Homo sapiens
  CDR3 for alpha chain variable domain of TCR clone 380856 (TRAV3, TRAJ21)
CAVGNCNKFYF

SEQ ID NO: 761712 - protein, 14 aa, Homo sapiens
  CDR3 for beta chain variable domain of TCR clone 380856 (TRBV29-1, TRBJ2-2)
CSGRGSGNPGELFF

SEQ ID NO: 761713 - protein, 11 aa, Homo sapiens
  CDR3 for alpha chain variable domain of TCR clone 380857 (TRAV21, TRAJ11)
CAVTGYSHLTF

SEQ ID NO: 761714 - protein, 11 aa, Homo sapiens
  CDR3 for beta chain variable domain of TCR clone 380857 (TRBV19, TRBJ1-1)
CASSIGSEAFF

SEQ ID NO: 761715 - protein, 14 aa, Homo sapiens
  CDR3 for alpha chain variable domain of TCR clone 380858 (TRAV1-1, TRAJ27)
CAVIYNTNAGKSTF

SEQ ID NO: 761716 - protein, 15 aa, Homo sapiens
  CDR3 for beta chain variable domain of TCR clone 380858 (TRBV6-3, TRBJ2-7)
CASSSPGTVLYEQYF

SEQ ID NO: 761717 - protein, 16 aa, Homo sapiens
  CDR3 for alpha chain variable domain of TCR clone 380859 (TRAV20, TRAJ52)
CAVLPDGGTSYGKLTF

SEQ ID NO: 761718 - protein, 12 aa, Homo sapiens
  CDR3 for beta chain variable domain of TCR clone 380859 (TRBV19, TRBJ2-1)
CASSQISNEQVF

SEQ ID NO: 761719 - protein, 15 aa, Homo sapiens
  CDR3 for alpha chain variable domain of TCR clone 380860 (TRAV12-3, TRAJ49)
CAMAVTPNTGNQFHF

SEQ ID NO: 761720 - protein, 14 aa, Homo sapiens
  CDR3 for beta chain variable domain of TCR clone 380860 (TRBV7-8, TRBJ2-3)
CASSLEAGTDTQYF

SEQ ID NO: 761721 - protein, 13 aa, Homo sapiens
  CDR3 for alpha chain variable domain of TCR clone 380861 (TRAV36/DV7, TRAJ53)
CALSGGSNYKLTF

SEQ ID NO: 761722 - protein, 15 aa, Homo sapiens
  CDR3 for beta chain variable domain of TCR clone 380861 (TRBV9, TRBJ2-1)
CASSLAGSSYNEQFF

SEQ ID NO: 761723 - protein, 19 aa, Homo sapiens
  CDR3 for alpha chain variable domain of TCR clone 380862 (TRAV14/DV4, )
CAMREDIQNPDPAVYQLRD

SEQ ID NO: 761724 - protein, 13 aa, Homo sapiens
  CDR3 for beta chain variable domain of TCR clone 380862 (TRBV4-1, TRBJ1-1)
CASSQLGTGEAFF

SEQ ID NO: 761725 - protein, 13 aa, Homo sapiens
  CDR3 for alpha chain variable domain of TCR clone 380863 (TRAV13-1, TRAJ21)
CAASIYNFNKFYF

SEQ ID NO: 761726 - protein, 17 aa, Homo sapiens
  CDR3 for beta chain variable domain of TCR clone 380863 (TRBV28, TRBJ2-2)
CVSSFVAGGLYGGELFF

SEQ ID NO: 761727 - protein, 10 aa, Homo sapiens
  CDR3 for alpha chain variable domain of TCR clone 380864 (TRAV20, TRAJ22)
CAAAARQLTF

SEQ ID NO: 761728 - protein, 14 aa, Homo sapiens
  CDR3 for beta chain variable domain of TCR clone 380864 (TRBV19, TRBJ2-1)
CASSMGSGATEQFF

SEQ ID NO: 761729 - protein, 11 aa, Homo sapiens
  CDR3 for alpha chain variable domain of TCR clone 380865 (TRAV2, TRAJ13)
CASWGYQKVTF

SEQ ID NO: 761730 - protein, 14 aa, Homo sapiens
  CDR3 for beta chain variable domain of TCR clone 380865 (TRBV4-2, TRBJ2-3)
CASSQERGTDTQYF

SEQ ID NO: 761731 - protein, 11 aa, Homo sapiens
  CDR3 for alpha chain variable domain of TCR clone 380866 (TRAV39, TRAJ49)
CAVDISTQFYF

SEQ ID NO: 761732 - protein, 11 aa, Homo sapiens
  CDR3 for beta chain variable domain of TCR clone 380866 (TRBV7-8, TRBJ2-7)
CASSLSLGQYF

SEQ ID NO: 761733 - protein, 16 aa, Homo sapiens
  CDR3 for alpha chain variable domain of TCR clone 380867 (TRAV30, TRAJ24)
CGTEIVDADSWGKFQF

SEQ ID NO: 761734 - protein, 17 aa, Homo sapiens
  CDR3 for beta chain variable domain of TCR clone 380867 (TRBV4-1, TRBJ2-7)
CASSQPTSGSRGYEQYF

SEQ ID NO: 761735 - protein, 15 aa, Homo sapiens
  CDR3 for alpha chain variable domain of TCR clone 380868 (TRAV12-1, TRAJ10)
CVVNKLTGGGNKLTF

SEQ ID NO: 761736 - protein, 17 aa, Homo sapiens
  CDR3 for beta chain variable domain of TCR clone 380868 (TRBV5-1, TRBJ1-6)
CASSPSLQGSDNSALHF

SEQ ID NO: 761737 - protein, 17 aa, Homo sapiens
  CDR3 for alpha chain variable domain of TCR clone 380869 (TRAV3, TRAJ6)
CAVRDGPRAGGSYIPTF

SEQ ID NO: 761738 - protein, 14 aa, Homo sapiens
  CDR3 for beta chain variable domain of TCR clone 380869 (TRBV10-3, TRBJ2-1)
CAISSDLAYNEQFF

SEQ ID NO: 761739 - protein, 14 aa, Homo sapiens
  CDR3 for alpha chain variable domain of TCR clone 380870 (TRAV3, TRAJ6)
CAVRRPQGRRKLHT

SEQ ID NO: 761740 - protein, 15 aa, Homo sapiens
  CDR3 for beta chain variable domain of TCR clone 380870 (TRBV29-1, TRBJ2-5)
CSVEGLTVNQETQYF

SEQ ID NO: 761741 - protein, 12 aa, Homo sapiens
  CDR3 for alpha chain variable domain of TCR clone 380871 (TRAV21, TRAJ58)
CALSASGSRLTF

SEQ ID NO: 761742 - protein, 15 aa, Homo sapiens
  CDR3 for beta chain variable domain of TCR clone 380871 (TRBV11-3, TRBJ1-1)
CASSLGGPGDTEAFF

SEQ ID NO: 761743 - protein, 12 aa, Homo sapiens
  CDR3 for alpha chain variable domain of TCR clone 380872 (TRAV12-3, TRAJ17)
CAMTLTGNKLTF

SEQ ID NO: 761744 - protein, 15 aa, Homo sapiens
  CDR3 for beta chain variable domain of TCR clone 380872 (TRBV6-5, TRBJ2-7)
CASSYSSSGSYEQYF

SEQ ID NO: 761745 - protein, 13 aa, Homo sapiens
  CDR3 for alpha chain variable domain of TCR clone 380873 (TRAV12-3, TRAJ56)
CAMSFGANSKLPF

SEQ ID NO: 761746 - protein, 12 aa, Homo sapiens
  CDR3 for beta chain variable domain of TCR clone 380873 (TRBV12-4, TRBJ1-4)
CASSETNEKLFF

SEQ ID NO: 761747 - protein, 16 aa, Homo sapiens
  CDR3 for alpha chain variable domain of TCR clone 380874 (TRAV21, TRAJ37)
CAVRTAGSSNPGKLIF

SEQ ID NO: 761748 - protein, 13 aa, Homo sapiens
  CDR3 for beta chain variable domain of TCR clone 380874 (TRBV7-9, TRBJ2-5)
CASLPSGRETQYL

SEQ ID NO: 761749 - protein, 14 aa, Homo sapiens
  CDR3 for alpha chain variable domain of TCR clone 380875 (TRAV13-1, TRAJ44)
CAAKATGTASKLTF

SEQ ID NO: 761750 - protein, 15 aa, Homo sapiens
  CDR3 for beta chain variable domain of TCR clone 380875 (TRBV9, TRBJ2-1)
CASSLAESSYNEQFF

SEQ ID NO: 761751 - protein, 13 aa, Homo sapiens
  CDR3 for alpha chain variable domain of TCR clone 380876 (TRAV36/DV7, TRAJ54)
CAVDIQGAQKLVF

SEQ ID NO: 761752 - protein, 20 aa, Homo sapiens
  CDR3 for beta chain variable domain of TCR clone 380876 (TRBV7-8, TRBJ2-2)
CASSHLFPGPTIHITGELFF

SEQ ID NO: 761753 - protein, 17 aa, Homo sapiens
  CDR3 for alpha chain variable domain of TCR clone 380877 (TRAV38-1, TRAJ42)
CDVFLSRWGGSQGNLIF

SEQ ID NO: 761754 - protein, 10 aa, Homo sapiens
  CDR3 for beta chain variable domain of TCR clone 380877 (TRBV2, TRBJ2-5)
CASSAATQYF

SEQ ID NO: 761755 - protein, 12 aa, Homo sapiens
  CDR3 for alpha chain variable domain of TCR clone 380878 (TRAV8-3, TRAJ41)
CAVALSGYALNF

SEQ ID NO: 761756 - protein, 16 aa, Homo sapiens
  CDR3 for beta chain variable domain of TCR clone 380878 (TRBV27, TRBJ2-7)
CASCSERRDSAYEQYF

SEQ ID NO: 761757 - protein, 18 aa, Homo sapiens
  CDR3 for alpha chain variable domain of TCR clone 380879 (TRAV26-1, TRAJ22)
CIIRVALISSGSARQLTF

SEQ ID NO: 761758 - protein, 13 aa, Homo sapiens
  CDR3 for beta chain variable domain of TCR clone 380879 (TRBV13, TRBJ2-5)
CASSPEVGETQYF

SEQ ID NO: 761759 - protein, 12 aa, Homo sapiens
  CDR3 for alpha chain variable domain of TCR clone 380880 (TRAV21, TRAJ30)
CAAWNRDDKIIF

SEQ ID NO: 761760 - protein, 16 aa, Homo sapiens
  CDR3 for beta chain variable domain of TCR clone 380880 (TRBV5-1, TRBJ2-3)
CASSLGLAVYTDTQYF

SEQ ID NO: 761761 - protein, 15 aa, Homo sapiens
  CDR3 for alpha chain variable domain of TCR clone 380881 (TRAV8-4, TRAJ13)
CAVSDWGGGYQKVTF

SEQ ID NO: 761762 - protein, 15 aa, Homo sapiens
  CDR3 for beta chain variable domain of TCR clone 380881 (TRBV25-1, TRBJ1-4)
CASSPGDSTNEKLFS

SEQ ID NO: 761763 - protein, 10 aa, Homo sapiens
  CDR3 for alpha chain variable domain of TCR clone 380882 (TRAV1-2, TRAJ20)
CAVTDYKLSF

SEQ ID NO: 761764 - protein, 16 aa, Homo sapiens
  CDR3 for beta chain variable domain of TCR clone 380882 (TRBV13, TRBJ2-2)
CASSPRTGEHTGELFF

SEQ ID NO: 761765 - protein, 14 aa, Homo sapiens
  CDR3 for alpha chain variable domain of TCR clone 380883 (TRAV29/DV5, TRAJ36)
CAARRKTGANNLFF

SEQ ID NO: 761766 - protein, 18 aa, Homo sapiens
  CDR3 for beta chain variable domain of TCR clone 380883 (TRBV7-3, TRBJ2-3)
CASSSTGTYPGSTDTQYF

SEQ ID NO: 761767 - protein, 14 aa, Homo sapiens
  CDR3 for alpha chain variable domain of TCR clone 380884 (TRAV12-2, TRAJ13)
CAVKKTGGYQKVTF

SEQ ID NO: 761768 - protein, 17 aa, Homo sapiens
  CDR3 for beta chain variable domain of TCR clone 380884 (TRBV7-3, TRBJ2-2)
CASSLSGTSGGTGELFF

SEQ ID NO: 761769 - protein, 14 aa, Homo sapiens
  CDR3 for alpha chain variable domain of TCR clone 380885 (TRAV8-2, TRAJ5)
CVVDMDTGRRALTF

SEQ ID NO: 761770 - protein, 15 aa, Homo sapiens
  CDR3 for beta chain variable domain of TCR clone 380885 (TRBV5-7, TRBJ2-1)
CASSYSSGRGNEQFF

SEQ ID NO: 761771 - protein, 14 aa, Homo sapiens
  CDR3 for alpha chain variable domain of TCR clone 380886 (TRAV1-2, TRAJ16)
CAVNRFSDGQKLLF

SEQ ID NO: 761772 - protein, 15 aa, Homo sapiens
  CDR3 for beta chain variable domain of TCR clone 380886 (TRBV7-6, TRBJ2-7)
CASSLGGAEPYEQYF

SEQ ID NO: 761773 - protein, 15 aa, Homo sapiens
  CDR3 for alpha chain variable domain of TCR clone 380887 (TRAV21, TRAJ38)
CALRQDAGNNRKLIW

SEQ ID NO: 761774 - protein, 16 aa, Homo sapiens
  CDR3 for beta chain variable domain of TCR clone 380887 (TRBV4-2, TRBJ1-1)
CASRPLDGGGDTEAFF

SEQ ID NO: 761775 - protein, 15 aa, Homo sapiens
  CDR3 for alpha chain variable domain of TCR clone 380888 (TRAV20, TRAJ43)
CAVQAGKRSNNDMRF

SEQ ID NO: 761776 - protein, 13 aa, Homo sapiens
  CDR3 for beta chain variable domain of TCR clone 380888 (TRBV27, TRBJ1-1)
CASSLAIGAEAFF

SEQ ID NO: 761777 - protein, 15 aa, Homo sapiens
  CDR3 for alpha chain variable domain of TCR clone 380889 (TRAV20, TRAJ6)
CTVRLQSGGSYIPTF

SEQ ID NO: 761778 - protein, 14 aa, Homo sapiens
  CDR3 for beta chain variable domain of TCR clone 380889 (TRBV12-4, TRBJ2-7)
CASSASGGWYEHYF

SEQ ID NO: 761779 - protein, 15 aa, Homo sapiens
  CDR3 for alpha chain variable domain of TCR clone 380890 (TRAV29/DV5, TRAJ40)
CAASAQGSGTYKYIF

SEQ ID NO: 761780 - protein, 17 aa, Homo sapiens
  CDR3 for beta chain variable domain of TCR clone 380890 (TRBV7-2, TRBJ2-6)
CASSAGTGGAGANVLTF

SEQ ID NO: 761781 - protein, 13 aa, Homo sapiens
  CDR3 for alpha chain variable domain of TCR clone 380891 (TRAV3, TRAJ27)
CAVRPLCAGKSAF

SEQ ID NO: 761782 - protein, 13 aa, Homo sapiens
  CDR3 for beta chain variable domain of TCR clone 380891 (TRBV7-9, TRBJ2-3)
CASSPGSTDTQYF

SEQ ID NO: 761783 - protein, 12 aa, Homo sapiens
  CDR3 for alpha chain variable domain of TCR clone 380892 (TRAV8-3, TRAJ26)
CAGDNYCHNFVF

SEQ ID NO: 761784 - protein, 15 aa, Homo sapiens
  CDR3 for beta chain variable domain of TCR clone 380892 (TRBV9, TRBJ2-1)
CASSLAGSSYNEQFF

SEQ ID NO: 761785 - protein, 14 aa, Homo sapiens
  CDR3 for alpha chain variable domain of TCR clone 380893 (TRAV8-2, TRAJ37)
CVVSISGNTGKLIF

SEQ ID NO: 761786 - protein, 12 aa, Homo sapiens
  CDR3 for beta chain variable domain of TCR clone 380893 (TRBV7-3, TRBJ2-5)
CASSSPGGTQYF

SEQ ID NO: 761787 - protein, 16 aa, Homo sapiens
  CDR3 for alpha chain variable domain of TCR clone 380894 (TRAV17, TRAJ28)
CATALDSGAGSYQLTF

SEQ ID NO: 761788 - protein, 14 aa, Homo sapiens
  CDR3 for beta chain variable domain of TCR clone 380894 (TRBV11-2, TRBJ1-5)
CASSSRTGNQPQHF

SEQ ID NO: 761789 - protein, 23 aa, Homo sapiens
  CDR3 for alpha chain variable domain of TCR clone 380895 (TRAV3, TRAJ24)
CAVRDKMTAGGNCRLEQVPRLWS

SEQ ID NO: 761790 - protein, 14 aa, Homo sapiens
  CDR3 for beta chain variable domain of TCR clone 380895 (TRBV7-2, TRBJ2-3)
CASSQTGSSYTQYF

SEQ ID NO: 761791 - protein, 20 aa, Homo sapiens
  CDR3 for alpha chain variable domain of TCR clone 380896 (TRAV12-1, TRAJ18)
CVPRTDIGPDRGSTLGRLYF

SEQ ID NO: 761792 - protein, 18 aa, Homo sapiens
  CDR3 for beta chain variable domain of TCR clone 380896 (TRBV4-1, TRBJ2-2)
DQQQKEASGRPNTGELFF

SEQ ID NO: 761793 - protein, 13 aa, Homo sapiens
  CDR3 for alpha chain variable domain of TCR clone 380897 (TRAV13-1, TRAJ11)
CAASIRVYSTLTF

SEQ ID NO: 761794 - protein, 17 aa, Homo sapiens
  CDR3 for beta chain variable domain of TCR clone 380897 (TRBV4-3, TRBJ1-2)
CASSSRLQAGGSVGYTF

SEQ ID NO: 761795 - protein, 12 aa, Homo sapiens
  CDR3 for alpha chain variable domain of TCR clone 380898 (TRAV21, TRAJ39)
CAADNAGNMLTF

SEQ ID NO: 761796 - protein, 13 aa, Homo sapiens
  CDR3 for beta chain variable domain of TCR clone 380898 (TRBV20-1, TRBJ1-1)
CSARGGGNTEAFF

SEQ ID NO: 761797 - protein, 17 aa, Homo sapiens
  CDR3 for alpha chain variable domain of TCR clone 380899 (TRAV3, TRAJ42)
CAVRDREYGGSKGNLIF

SEQ ID NO: 761798 - protein, 12 aa, Homo sapiens
  CDR3 for beta chain variable domain of TCR clone 380899 (TRBV11-2, TRBJ2-1)
CASSPGNNEQFF

SEQ ID NO: 761799 - protein, 11 aa, Homo sapiens
  CDR3 for alpha chain variable domain of TCR clone 380900 (TRAV2, TRAJ33)
CAVDSNYQLIW

SEQ ID NO: 761800 - protein, 16 aa, Homo sapiens
  CDR3 for beta chain variable domain of TCR clone 380900 (TRBV13, TRBJ2-2)
CASSPRTAEHTGELFF

SEQ ID NO: 761801 - protein, 15 aa, Homo sapiens
  CDR3 for alpha chain variable domain of TCR clone 380901 (TRAV30, TRAJ32)
CGTEILGGATNKLIF

SEQ ID NO: 761802 - protein, 17 aa, Homo sapiens
  CDR3 for beta chain variable domain of TCR clone 380901 (TRBV5-4, TRBJ2-1)
CASSSACGRGPYNEQFF

SEQ ID NO: 761803 - protein, 11 aa, Homo sapiens
  CDR3 for alpha chain variable domain of TCR clone 380902 (TRAV2, TRAJ13)
CASGGYQKVTF

SEQ ID NO: 761804 - protein, 12 aa, Homo sapiens
  CDR3 for beta chain variable domain of TCR clone 380902 (TRBV24-1, TRBJ2-2)
CATSDPGLTGLQ

SEQ ID NO: 761805 - protein, 16 aa, Homo sapiens
  CDR3 for alpha chain variable domain of TCR clone 380903 (TRAV16, TRAJ24)
CALRGGSTDSWGKLQF

SEQ ID NO: 761806 - protein, 15 aa, Homo sapiens
  CDR3 for beta chain variable domain of TCR clone 380903 (TRBV27, TRBJ2-1)
CASSNGGGSYNEQFF

SEQ ID NO: 761807 - protein, 16 aa, Homo sapiens
  CDR3 for alpha chain variable domain of TCR clone 380904 (TRAV3, TRAJ37)
CAVRPHGPGNTGKLIF

SEQ ID NO: 761808 - protein, 15 aa, Homo sapiens
  CDR3 for beta chain variable domain of TCR clone 380904 (TRBV20-1, TRBJ2-7)
CSARDRVSGMDEQYF

SEQ ID NO: 761809 - protein, 17 aa, Homo sapiens
  CDR3 for alpha chain variable domain of TCR clone 380905 (TRAV8-6, TRAJ8)
CAVKEGIENTGFQKLVF

SEQ ID NO: 761810 - protein, 12 aa, Homo sapiens
  CDR3 for beta chain variable domain of TCR clone 380905 (TRBV19, TRBJ1-4)
CASKDWPVGLFF

SEQ ID NO: 761811 - protein, 15 aa, Homo sapiens
  CDR3 for alpha chain variable domain of TCR clone 380906 (TRAV12-3, TRAJ27)
CAMRAYNTNAGKSTY

SEQ ID NO: 761812 - protein, 13 aa, Homo sapiens
  CDR3 for beta chain variable domain of TCR clone 380906 (TRBV11-2, TRBJ2-5)
CASGRGPSETQYF

SEQ ID NO: 761813 - protein, 11 aa, Homo sapiens
  CDR3 for alpha chain variable domain of TCR clone 380907 (TRAV1-2, TRAJ34)
CAGYNTDKPIF

SEQ ID NO: 761814 - protein, 13 aa, Homo sapiens
  CDR3 for beta chain variable domain of TCR clone 380907 (TRBV11-2, TRBJ1-1)
CASSLGNGAEAFF

SEQ ID NO: 761815 - protein, 15 aa, Homo sapiens
  CDR3 for alpha chain variable domain of TCR clone 380908 (TRAV12-3, TRAJ6)
CAMSPASGGSYRPTF

SEQ ID NO: 761816 - protein, 15 aa, Homo sapiens
  CDR3 for beta chain variable domain of TCR clone 380908 (TRBV2, TRBJ1-2)
CASSESRTVNYGYTF

SEQ ID NO: 761817 - protein, 14 aa, Homo sapiens
  CDR3 for alpha chain variable domain of TCR clone 380909 (TRAV20, TRAJ44)
CAVDYTGTASKLTF

SEQ ID NO: 761818 - protein, 17 aa, Homo sapiens
  CDR3 for beta chain variable domain of TCR clone 380909 (TRBV20-1, TRBJ2-2)
CSASGSGQGGLTGELFF

SEQ ID NO: 761819 - protein, 13 aa, Homo sapiens
  CDR3 for alpha chain variable domain of TCR clone 380910 (TRAV16, TRAJ31)
CALSAHNNARFMF

SEQ ID NO: 761820 - protein, 17 aa, Homo sapiens
  CDR3 for beta chain variable domain of TCR clone 380910 (TRBV12-4, TRBJ2-1)
CTSSPGLAGGRINEQFF

SEQ ID NO: 761821 - protein, 11 aa, Homo sapiens
  CDR3 for alpha chain variable domain of TCR clone 380911 (TRAV2, TRAJ33)
CAVESNYQLIW

SEQ ID NO: 761822 - protein, 13 aa, Homo sapiens
  CDR3 for beta chain variable domain of TCR clone 380911 (TRBV10-3, TRBJ2-5)
CAISESGRGAQYF

SEQ ID NO: 761823 - protein, 14 aa, Homo sapiens
  CDR3 for alpha chain variable domain of TCR clone 380912 (TRAV29/DV5, TRAJ44)
CAAFLVGTASKLTF

SEQ ID NO: 761824 - protein, 16 aa, Homo sapiens
  CDR3 for beta chain variable domain of TCR clone 380912 (TRBV19, TRBJ1-5)
CASSIRGGYSNQPQHF

SEQ ID NO: 761825 - protein, 12 aa, Homo sapiens
  CDR3 for alpha chain variable domain of TCR clone 380913 (TRAV17, TRAJ12)
CATLRGSYKLIF

SEQ ID NO: 761826 - protein, 16 aa, Homo sapiens
  CDR3 for beta chain variable domain of TCR clone 380913 (TRBV28, TRBJ2-7)
CASSLFFETGGHEQYF

SEQ ID NO: 761827 - protein, 18 aa, Homo sapiens
  CDR3 for alpha chain variable domain of TCR clone 380914 (TRAV21, TRAJ52)
CAVRPSPAGGTGYGKLTF

SEQ ID NO: 761828 - protein, 15 aa, Homo sapiens
  CDR3 for beta chain variable domain of TCR clone 380914 (TRBV19, TRBJ1-1)
CASTSGQIQNTEAFF

SEQ ID NO: 761829 - protein, 13 aa, Homo sapiens
  CDR3 for alpha chain variable domain of TCR clone 380915 (TRAV12-3, TRAJ9)
CAMRNTGGFKTIF

SEQ ID NO: 761830 - protein, 17 aa, Homo sapiens
  CDR3 for beta chain variable domain of TCR clone 380915 (TRBV7-8, TRBJ2-6)
CASSAGTGGAGANVLTF

SEQ ID NO: 761831 - protein, 16 aa, Homo sapiens
  CDR3 for alpha chain variable domain of TCR clone 380916 (TRAV21, TRAJ37)
CAVRPRGSSNTGKLIF

SEQ ID NO: 761832 - protein, 13 aa, Homo sapiens
  CDR3 for beta chain variable domain of TCR clone 380916 (TRBV7-9, TRBJ2-5)
CASLSPGQENQYF

SEQ ID NO: 761833 - protein, 14 aa, Homo sapiens
  CDR3 for alpha chain variable domain of TCR clone 380917 (TRAV12-3, TRAJ54)
CAMSALQGAQKLVF

SEQ ID NO: 761834 - protein, 15 aa, Homo sapiens
  CDR3 for beta chain variable domain of TCR clone 380917 (TRBV19, TRBJ2-4)
CTSSTPGIAKNIQYF

SEQ ID NO: 761835 - protein, 15 aa, Homo sapiens
  CDR3 for alpha chain variable domain of TCR clone 380918 (TRAV12-2, TRAJ53)
CAVNGGGGSNYNLTF

SEQ ID NO: 761836 - protein, 12 aa, Homo sapiens
  CDR3 for beta chain variable domain of TCR clone 380918 (TRBV7-6, TRBJ2-5)
CASSLSQETQYF

SEQ ID NO: 761837 - protein, 16 aa, Homo sapiens
  CDR3 for alpha chain variable domain of TCR clone 380919 (TRAV26-1, TRAJ23)
CIVRVANSNQGGKLIF

SEQ ID NO: 761838 - protein, 16 aa, Homo sapiens
  CDR3 for beta chain variable domain of TCR clone 380919 (TRBV6-1, TRBJ2-1)
CASILRQGSSYNEQFF

SEQ ID NO: 761839 - protein, 14 aa, Homo sapiens
  CDR3 for alpha chain variable domain of TCR clone 380920 (TRAV2, TRAJ37)
CAVDFTSNTGKLIF

SEQ ID NO: 761840 - protein, 15 aa, Homo sapiens
  CDR3 for beta chain variable domain of TCR clone 380920 (TRBV2, TRBJ2-1)
CASSELAGSCNEQFF

SEQ ID NO: 761841 - protein, 17 aa, Homo sapiens
  CDR3 for alpha chain variable domain of TCR clone 380921 (TRAV38-2/DV8, TRAJ38)
CAYRSARGAGNNRKLMW

SEQ ID NO: 761842 - protein, 15 aa, Homo sapiens
  CDR3 for beta chain variable domain of TCR clone 380921 (TRBV27, TRBJ2-1)
CASSNGGGSSNEQFF

SEQ ID NO: 761843 - protein, 15 aa, Homo sapiens
  CDR3 for alpha chain variable domain of TCR clone 380922 (TRAV3, TRAJ5)
CAVRDLDTGRRALTF

SEQ ID NO: 761844 - protein, 12 aa, Homo sapiens
  CDR3 for beta chain variable domain of TCR clone 380922 (TRBV14, TRBJ2-5)
CASSHLKETQYF

SEQ ID NO: 761845 - protein, 13 aa, Homo sapiens
  CDR3 for alpha chain variable domain of TCR clone 380923 (TRAV13-2, TRAJ48)
CAEMDFGNEKLTF

SEQ ID NO: 761846 - protein, 22 aa, Homo sapiens
  CDR3 for beta chain variable domain of TCR clone 380923 (TRBV7-9, TRBJ1-6)
CASSSPGRGNSPRLWERDQAHC

SEQ ID NO: 761847 - protein, 12 aa, Homo sapiens
  CDR3 for alpha chain variable domain of TCR clone 380924 (TRAV12-2, TRAJ10)
WGGTGGGNKLTF

SEQ ID NO: 761848 - protein, 16 aa, Homo sapiens
  CDR3 for beta chain variable domain of TCR clone 380924 (TRBV24-1, TRBJ2-3)
CATSDRRQDLTDTQYF

SEQ ID NO: 761849 - protein, 14 aa, Homo sapiens
  CDR3 for alpha chain variable domain of TCR clone 380925 (TRAV12-2, TRAJ17)
CAVNIKAAGKKLTF

SEQ ID NO: 761850 - protein, 16 aa, Homo sapiens
  CDR3 for beta chain variable domain of TCR clone 380925 (TRBV20-1, TRBJ2-6)
CSASSQGYDGANVLTF

SEQ ID NO: 761851 - protein, 12 aa, Homo sapiens
  CDR3 for alpha chain variable domain of TCR clone 380926 (TRAV12-2, TRAJ4)
GWPEGGYNKLIF

SEQ ID NO: 761852 - protein, 13 aa, Homo sapiens
  CDR3 for beta chain variable domain of TCR clone 380926 (TRBV4-1, TRBJ2-2)
CASSQENTGELFF

SEQ ID NO: 761853 - protein, 13 aa, Homo sapiens
  CDR3 for alpha chain variable domain of TCR clone 380927 (TRAV36/DV7, TRAJ33)
CAVNMDSNYQLIW

SEQ ID NO: 761854 - protein, 16 aa, Homo sapiens
  CDR3 for beta chain variable domain of TCR clone 380927 (TRBV15, TRBJ2-3)
CATRLSGGRAPDTQYF

SEQ ID NO: 761855 - protein, 16 aa, Homo sapiens
  CDR3 for alpha chain variable domain of TCR clone 380928 (TRAV21, TRAJ37)
CAFRTAGSSNTGQLIF

SEQ ID NO: 761856 - protein, 13 aa, Homo sapiens
  CDR3 for beta chain variable domain of TCR clone 380928 (TRBV7-9, TRBJ2-5)
CASLPSGRETQYF

SEQ ID NO: 761857 - protein, 13 aa, Homo sapiens
  CDR3 for alpha chain variable domain of TCR clone 380929 (TRAV8-4, TRAJ34)
CAVSEDNTDKLIF

SEQ ID NO: 761858 - protein, 14 aa, Homo sapiens
  CDR3 for beta chain variable domain of TCR clone 380929 (TRBV12-5, TRBJ2-5)
CASGSRTHQETQYF

SEQ ID NO: 761859 - protein, 14 aa, Homo sapiens
  CDR3 for alpha chain variable domain of TCR clone 380930 (TRAV17, TRAJ35)
CATDRPGFGKVLHC

SEQ ID NO: 761860 - protein, 19 aa, Homo sapiens
  CDR3 for beta chain variable domain of TCR clone 380930 (TRBV11-3, TRBJ2-2)
CASSTRPGAKTTNTGELFF

SEQ ID NO: 761861 - protein, 10 aa, Homo sapiens
  CDR3 for alpha chain variable domain of TCR clone 380931 (TRAV8-4, TRAJ43)
GAVSADDMSF

SEQ ID NO: 761862 - protein, 15 aa, Homo sapiens
  CDR3 for beta chain variable domain of TCR clone 380931 (TRBV5-1, TRBJ2-3)
CASSVTSGATDTQYF

SEQ ID NO: 761863 - protein, 14 aa, Homo sapiens
  CDR3 for alpha chain variable domain of TCR clone 380932 (TRAV2, TRAJ37)
CAVDFTSNTGKLIF

SEQ ID NO: 761864 - protein, 14 aa, Homo sapiens
  CDR3 for beta chain variable domain of TCR clone 380932 (TRBV20-1, TRBJ1-1)
CRAQTRIGGTEAFF

SEQ ID NO: 761865 - protein, 14 aa, Homo sapiens
  CDR3 for alpha chain variable domain of TCR clone 380933 (TRAV12-2, TRAJ53)
CAVKGGGSNYKLTF

SEQ ID NO: 761866 - protein, 13 aa, Homo sapiens
  CDR3 for beta chain variable domain of TCR clone 380933 (TRBV20-1, TRBJ2-7)
CSLLGEGWPEQYF

SEQ ID NO: 761867 - protein, 12 aa, Homo sapiens
  CDR3 for alpha chain variable domain of TCR clone 380934 (TRAV13-1, TRAJ21)
CAAKEGFNKFYF

SEQ ID NO: 761868 - protein, 17 aa, Homo sapiens
  CDR3 for beta chain variable domain of TCR clone 380934 (TRBV20-1, TRBJ2-1)
CSASSSGLAGSYNEQCF

SEQ ID NO: 761869 - protein, 11 aa, Homo sapiens
  CDR3 for alpha chain variable domain of TCR clone 380935 (TRAV2, TRAJ21)
CAVFNFNKFYF

SEQ ID NO: 761870 - protein, 15 aa, Homo sapiens
  CDR3 for beta chain variable domain of TCR clone 380935 (TRBV5-1, TRBJ2-3)
CASSVTSGSTDTQYF

SEQ ID NO: 761871 - protein, 17 aa, Homo sapiens
  CDR3 for alpha chain variable domain of TCR clone 380936 (TRAV3, TRAJ6)
CAVRDGPRAGGSYIPTF

SEQ ID NO: 761872 - protein, 15 aa, Homo sapiens
  CDR3 for beta chain variable domain of TCR clone 380936 (TRBV28, TRBJ1-1)
CASSPWTGPNTEAFF

SEQ ID NO: 761873 - protein, 17 aa, Homo sapiens
  CDR3 for alpha chain variable domain of TCR clone 380937 (TRAV2, TRAJ22)
ILQVREADAAEQRQLTF

SEQ ID NO: 761874 - protein, 20 aa, Homo sapiens
  CDR3 for beta chain variable domain of TCR clone 380937 (TRBV2, TRBJ2-5)
CASSETQGVGEETSTSGQAR

SEQ ID NO: 761875 - protein, 12 aa, Homo sapiens
  CDR3 for alpha chain variable domain of TCR clone 380938 (TRAV12-1, TRAJ31)
CVSWNKNVRLMF

SEQ ID NO: 761876 - protein, 15 aa, Homo sapiens
  CDR3 for beta chain variable domain of TCR clone 380938 (TRBV7-2, TRBJ1-5)
CASSLDRGQDQPQHF

SEQ ID NO: 761877 - protein, 15 aa, Homo sapiens
  CDR3 for alpha chain variable domain of TCR clone 380939 (TRAV26-2, TRAJ13)
CILRDLSGGYQKVTF

SEQ ID NO: 761878 - protein, 11 aa, Homo sapiens
  CDR3 for beta chain variable domain of TCR clone 380939 (TRBV7-9, TRBJ2-3)
CASSYTDTQYL

SEQ ID NO: 761879 - protein, 16 aa, Homo sapiens
  CDR3 for alpha chain variable domain of TCR clone 380940 (TRAV3, TRAJ10)
CAVRDMRAGGGNKLTV

SEQ ID NO: 761880 - protein, 14 aa, Homo sapiens
  CDR3 for beta chain variable domain of TCR clone 380940 (TRBV6-1, TRBJ1-3)
CASVQGGGGNTIYF

SEQ ID NO: 761881 - protein, 14 aa, Homo sapiens
  CDR3 for alpha chain variable domain of TCR clone 380941 (TRAV8-4, TRAJ9)
CAVRINTGGFKTIF

SEQ ID NO: 761882 - protein, 15 aa, Homo sapiens
  CDR3 for beta chain variable domain of TCR clone 380941 (TRBV10-2, TRBJ2-6)
CASSEQGTGANVLPF

SEQ ID NO: 761883 - protein, 15 aa, Homo sapiens
  CDR3 for alpha chain variable domain of TCR clone 380942 (TRAV8-3, TRAJ40)
CAAPSLSSGTYRYIF

SEQ ID NO: 761884 - protein, 12 aa, Homo sapiens
  CDR3 for beta chain variable domain of TCR clone 380942 (TRBV11-2, TRBJ2-2)
CASSLGGGELFF

SEQ ID NO: 761885 - protein, 10 aa, Homo sapiens
  CDR3 for alpha chain variable domain of TCR clone 380943 (TRAV38-2/DV8, TRAJ40)
CASGTYKYIF

SEQ ID NO: 761886 - protein, 14 aa, Homo sapiens
  CDR3 for beta chain variable domain of TCR clone 380943 (TRBV7-9, TRBJ2-1)
CANSPRDSLYEQFF

SEQ ID NO: 761887 - protein, 14 aa, Homo sapiens
  CDR3 for alpha chain variable domain of TCR clone 380944 (TRAV12-2, TRAJ48)
CAVNAFFGNEKLTF

SEQ ID NO: 761888 - protein, 13 aa, Homo sapiens
  CDR3 for beta chain variable domain of TCR clone 380944 (TRBV28, TRBJ2-7)
CAGAQQGLDEQYS

SEQ ID NO: 761889 - protein, 15 aa, Homo sapiens
  CDR3 for alpha chain variable domain of TCR clone 380945 (TRAV8-3, TRAJ27)
CAVGPSKTNAGKSNL

SEQ ID NO: 761890 - protein, 15 aa, Homo sapiens
  CDR3 for beta chain variable domain of TCR clone 380945 (TRBV7-2, TRBJ2-1)
CASSSGLAGGNEQFF

SEQ ID NO: 761891 - protein, 14 aa, Homo sapiens
  CDR3 for alpha chain variable domain of TCR clone 380946 (TRAV3, TRAJ7)
CAVREEEREQQTRF

SEQ ID NO: 761892 - protein, 16 aa, Homo sapiens
  CDR3 for beta chain variable domain of TCR clone 380946 (TRBV7-3, TRBJ2-2)
CASRLKRGTLSGELFF

SEQ ID NO: 761893 - protein, 14 aa, Homo sapiens
  CDR3 for alpha chain variable domain of TCR clone 380947 (TRAV1-2, TRAJ16)
CAVNRFSDGQTPLF

SEQ ID NO: 761894 - protein, 15 aa, Homo sapiens
  CDR3 for beta chain variable domain of TCR clone 380947 (TRBV7-9, TRBJ1-6)
CASSSPGRGNSPLHF

SEQ ID NO: 761895 - protein, 20 aa, Homo sapiens
  CDR3 for alpha chain variable domain of TCR clone 380948 (TRAV21, TRAJ4)
AASQPGDSASLAGGYNKLIF

SEQ ID NO: 761896 - protein, 19 aa, Homo sapiens
  CDR3 for beta chain variable domain of TCR clone 380948 (TRBV18, TRBJ1-3)
CASSPLSRTGMSSGNTIYF

SEQ ID NO: 761897 - protein, 12 aa, Homo sapiens
  CDR3 for alpha chain variable domain of TCR clone 380949 (TRAV13-1, TRAJ21)
CAAKEGFNKFYF

SEQ ID NO: 761898 - protein, 14 aa, Homo sapiens
  CDR3 for beta chain variable domain of TCR clone 380949 (TRBV7-2, TRBJ2-5)
CASRLSGGGETQYF

SEQ ID NO: 761899 - protein, 18 aa, Homo sapiens
  CDR3 for alpha chain variable domain of TCR clone 380950 (TRAV1-2, TRAJ18)
CAVRDMGDRGSTLGRLYF

SEQ ID NO: 761900 - protein, 16 aa, Homo sapiens
  CDR3 for beta chain variable domain of TCR clone 380950 (TRBV29-1, TRBJ1-2)
CSVEANRDIANYGYNF

SEQ ID NO: 761901 - protein, 12 aa, Homo sapiens
  CDR3 for alpha chain variable domain of TCR clone 380951 (TRAV9-2, TRAJ36)
CALKKGANNLFF

SEQ ID NO: 761902 - protein, 11 aa, Homo sapiens
  CDR3 for beta chain variable domain of TCR clone 380951 (TRBV12-4, TRBJ2-3)
CASTATDTQYF

SEQ ID NO: 761903 - protein, 17 aa, Homo sapiens
  CDR3 for alpha chain variable domain of TCR clone 380952 (TRAV3, TRAJ6)
CAVRDGPRAGGSYIPTS

SEQ ID NO: 761904 - protein, 14 aa, Homo sapiens
  CDR3 for beta chain variable domain of TCR clone 380952 (TRBV7-2, TRBJ2-7)
CASSPKTSFFEQYF

SEQ ID NO: 761905 - protein, 14 aa, Homo sapiens
  CDR3 for alpha chain variable domain of TCR clone 380953 (TRAV12-1, TRAJ8)
CVVNSNTGFQKLVF

SEQ ID NO: 761906 - protein, 15 aa, Homo sapiens
  CDR3 for beta chain variable domain of TCR clone 380953 (TRBV20-1, TRBJ2-7)
CSAESGTSGAYEQYF

SEQ ID NO: 761907 - protein, 12 aa, Homo sapiens
  CDR3 for alpha chain variable domain of TCR clone 380954 (TRAV36/DV7, TRAJ54)
CAVVRGAQKLVL

SEQ ID NO: 761908 - protein, 13 aa, Homo sapiens
  CDR3 for beta chain variable domain of TCR clone 380954 (TRBV7-3, TRBJ1-1)
CQQLKGGNTEAFF

SEQ ID NO: 761909 - protein, 13 aa, Homo sapiens
  CDR3 for alpha chain variable domain of TCR clone 380955 (TRAV12-2, TRAJ45)
CAVNRGGADGLTF

SEQ ID NO: 761910 - protein, 16 aa, Homo sapiens
  CDR3 for beta chain variable domain of TCR clone 380955 (TRBV2, TRBJ1-1)
CASSPTRGGASTEAFF

SEQ ID NO: 761911 - protein, 14 aa, Homo sapiens
  CDR3 for alpha chain variable domain of TCR clone 380956 (TRAV1-2, TRAJ16)
CAVRGFSDGQKLLF

SEQ ID NO: 761912 - protein, 15 aa, Homo sapiens
  CDR3 for beta chain variable domain of TCR clone 380956 (TRBV19, TRBJ1-5)
CASSDSGPRNQPQHF

SEQ ID NO: 761913 - protein, 14 aa, Homo sapiens
  CDR3 for alpha chain variable domain of TCR clone 380957 (TRAV1-2, TRAJ16)
CAVNRFSDGQKLLF

SEQ ID NO: 761914 - protein, 13 aa, Homo sapiens
  CDR3 for beta chain variable domain of TCR clone 380957 (TRBV2, TRBJ1-4)
CASSELGVEKLFF

SEQ ID NO: 761915 - protein, 15 aa, Homo sapiens
  CDR3 for alpha chain variable domain of TCR clone 380958 (TRAV23/DV6, TRAJ28)
CAAKRTGAGSYQLPF

SEQ ID NO: 761916 - protein, 12 aa, Homo sapiens
  CDR3 for beta chain variable domain of TCR clone 380958 (TRBV12-4, TRBJ2-5)
CQQFHFRETQYF

SEQ ID NO: 761917 - protein, 17 aa, Homo sapiens
  CDR3 for alpha chain variable domain of TCR clone 380959 (TRAV3, TRAJ22)
CAVRDPPLEGFCKATDL

SEQ ID NO: 761918 - protein, 15 aa, Homo sapiens
  CDR3 for beta chain variable domain of TCR clone 380959 (TRBV12-4, TRBJ2-5)
CASSPPTGLQETQYF

SEQ ID NO: 761919 - protein, 14 aa, Homo sapiens
  CDR3 for alpha chain variable domain of TCR clone 380960 (TRAV8-3, TRAJ37)
CAVGSSGNTGKLIF

SEQ ID NO: 761920 - protein, 15 aa, Homo sapiens
  CDR3 for beta chain variable domain of TCR clone 380960 (TRBV28, TRBJ2-1)
CASSIIAGGRSEQFF

SEQ ID NO: 761921 - protein, 14 aa, Homo sapiens
  CDR3 for alpha chain variable domain of TCR clone 380961 (TRAV12-2, TRAJ12)
GAVINRDSSYKLIF

SEQ ID NO: 761922 - protein, 15 aa, Homo sapiens
  CDR3 for beta chain variable domain of TCR clone 380961 (TRBV28, TRBJ2-1)
CASSLDTSSYNEQFF

SEQ ID NO: 761923 - protein, 10 aa, Homo sapiens
  CDR3 for alpha chain variable domain of TCR clone 380962 (TRAV16, TRAJ20)
CALKRLQAQL

SEQ ID NO: 761924 - protein, 14 aa, Homo sapiens
  CDR3 for beta chain variable domain of TCR clone 380962 (TRBV19, TRBJ2-7)
CASSIFAGTYEQYF

SEQ ID NO: 761925 - protein, 14 aa, Homo sapiens
  CDR3 for alpha chain variable domain of TCR clone 380963 (TRAV26-1, TRAJ39)
CIVRGSRAGNMLTF

SEQ ID NO: 761926 - protein, 15 aa, Homo sapiens
  CDR3 for beta chain variable domain of TCR clone 380963 (TRBV7-9, TRBJ1-5)
CASSQGHQRNQAQHF

SEQ ID NO: 761927 - protein, 15 aa, Homo sapiens
  CDR3 for alpha chain variable domain of TCR clone 380964 (TRAV3, TRAJ5)
CAVRALDTGRRALTF

SEQ ID NO: 761928 - protein, 12 aa, Homo sapiens
  CDR3 for beta chain variable domain of TCR clone 380964 (TRBV10-2, TRBJ2-5)
CASSGGGKTQYF

SEQ ID NO: 761929 - protein, 16 aa, Homo sapiens
  CDR3 for alpha chain variable domain of TCR clone 380965 (TRAV30, TRAJ24)
CGTEIVDADSWGNFQF

SEQ ID NO: 761930 - protein, 16 aa, Homo sapiens
  CDR3 for beta chain variable domain of TCR clone 380965 (TRBV12-5, TRBJ2-5)
CASGPRTSGNQETQYF

SEQ ID NO: 761931 - protein, 15 aa, Homo sapiens
  CDR3 for alpha chain variable domain of TCR clone 380966 (TRAV21, TRAJ24)
CAARSSTDSWGKWQF

SEQ ID NO: 761932 - protein, 14 aa, Homo sapiens
  CDR3 for beta chain variable domain of TCR clone 380966 (TRBV11-2, TRBJ2-5)
CASSRTGGIETQYF

SEQ ID NO: 761933 - protein, 14 aa, Homo sapiens
  CDR3 for alpha chain variable domain of TCR clone 380967 (TRAV1-2, TRAJ16)
CAVNRFSDGQKLLF

SEQ ID NO: 761934 - protein, 14 aa, Homo sapiens
  CDR3 for beta chain variable domain of TCR clone 380967 (TRBV13, TRBJ2-5)
CASSLRRGQETQYF

SEQ ID NO: 761935 - protein, 13 aa, Homo sapiens
  CDR3 for alpha chain variable domain of TCR clone 380968 (TRAV13-1, TRAJ21)
CAASIYNFNKFYF

SEQ ID NO: 761936 - protein, 16 aa, Homo sapiens
  CDR3 for beta chain variable domain of TCR clone 380968 (TRBV25-1, TRBJ1-1)
CASSGDRDRGRIEAFF

SEQ ID NO: 761937 - protein, 15 aa, Homo sapiens
  CDR3 for alpha chain variable domain of TCR clone 380969 (TRAV26-1, TRAJ28)
CIVRVAGAGSYQLTF

SEQ ID NO: 761938 - protein, 19 aa, Homo sapiens
  CDR3 for beta chain variable domain of TCR clone 380969 (TRBV7-3, TRBJ2-7)
CASSLTGVAGGWPSNEQYF

SEQ ID NO: 761939 - protein, 16 aa, Homo sapiens
  CDR3 for alpha chain variable domain of TCR clone 380970 (TRAV20, TRAJ26)
CAVQHRRDDYGQNFVF

SEQ ID NO: 761940 - protein, 15 aa, Homo sapiens
  CDR3 for beta chain variable domain of TCR clone 380970 (TRBV7-2, TRBJ2-7)
CASSWGQGAIYEQYF

SEQ ID NO: 761941 - protein, 13 aa, Homo sapiens
  CDR3 for alpha chain variable domain of TCR clone 380971 (TRAV17, TRAJ4)
CATKSGGYNKLIF

SEQ ID NO: 761942 - protein, 15 aa, Homo sapiens
  CDR3 for beta chain variable domain of TCR clone 380971 (TRBV2, TRBJ2-1)
CASSELAGSYNEQFF

SEQ ID NO: 761943 - protein, 13 aa, Homo sapiens
  CDR3 for alpha chain variable domain of TCR clone 380972 (TRAV13-2, TRAJ40)
CAETLSGTYKYIF

SEQ ID NO: 761944 - protein, 16 aa, Homo sapiens
  CDR3 for beta chain variable domain of TCR clone 380972 (TRBV20-1, TRBJ2-1)
CNARDFSGRIGDEQFF

SEQ ID NO: 761945 - protein, 13 aa, Homo sapiens
  CDR3 for alpha chain variable domain of TCR clone 380973 (TRAV2, TRAJ40)
CAVVTSGTYKYIF

SEQ ID NO: 761946 - protein, 14 aa, Homo sapiens
  CDR3 for beta chain variable domain of TCR clone 380973 (TRBV19, TRBJ2-1)
CASPTVVLSGEQVF

SEQ ID NO: 761947 - protein, 11 aa, Homo sapiens
  CDR3 for alpha chain variable domain of TCR clone 380974 (TRAV1-1, TRAJ23)
CAVRPGGKLIF

SEQ ID NO: 761948 - protein, 13 aa, Homo sapiens
  CDR3 for beta chain variable domain of TCR clone 380974 (TRBV20-1, TRBJ1-1)
CSAPLGGGTEAFF

SEQ ID NO: 761949 - protein, 13 aa, Homo sapiens
  CDR3 for alpha chain variable domain of TCR clone 380975 (TRAV38-1, TRAJ42)
CARWGGSQGNLIF

SEQ ID NO: 761950 - protein, 13 aa, Homo sapiens
  CDR3 for beta chain variable domain of TCR clone 380975 (TRBV27, TRBJ1-4)
CASSLMGDEKLFF

SEQ ID NO: 761951 - protein, 15 aa, Homo sapiens
  CDR3 for alpha chain variable domain of TCR clone 380976 (TRAV2, TRAJ22)
CAVPSRGGSASQLTF

SEQ ID NO: 761952 - protein, 15 aa, Homo sapiens
  CDR3 for beta chain variable domain of TCR clone 380976 (TRBV7-9, TRBJ1-5)
CASSQGHQPNQPQHF

SEQ ID NO: 761953 - protein, 16 aa, Homo sapiens
  CDR3 for alpha chain variable domain of TCR clone 380977 (TRAV8-4, TRAJ13)
CAVTLSGGYRKLPLEL

SEQ ID NO: 761954 - protein, 14 aa, Homo sapiens
  CDR3 for beta chain variable domain of TCR clone 380977 (TRBV7-2, TRBJ1-2)
CASSQTGSTYGYTF

SEQ ID NO: 761955 - protein, 16 aa, Homo sapiens
  CDR3 for alpha chain variable domain of TCR clone 380978 (TRAV38-1, TRAJ37)
CAFKGDGSSNTGKLIF

SEQ ID NO: 761956 - protein, 13 aa, Homo sapiens
  CDR3 for beta chain variable domain of TCR clone 380978 (TRBV12-4, TRBJ2-5)
YASSLFRRETQYF

SEQ ID NO: 761957 - protein, 14 aa, Homo sapiens
  CDR3 for alpha chain variable domain of TCR clone 380979 (TRAV35, TRAJ22)
CAGLRPGSAMQLTF

SEQ ID NO: 761958 - protein, 14 aa, Homo sapiens
  CDR3 for beta chain variable domain of TCR clone 380979 (TRBV5-1, TRBJ2-7)
CASSRGESLYEQYI

SEQ ID NO: 761959 - protein, 13 aa, Homo sapiens
  CDR3 for alpha chain variable domain of TCR clone 380980 (TRAV13-1, TRAJ5)
CAARVTGGRALTF

SEQ ID NO: 761960 - protein, 15 aa, Homo sapiens
  CDR3 for beta chain variable domain of TCR clone 380980 (TRBV7-9, TRBJ2-7)
CASSPGGGLTYEQYF

SEQ ID NO: 761961 - protein, 15 aa, Homo sapiens
  CDR3 for alpha chain variable domain of TCR clone 380981 (TRAV2, TRAJ9)
CAVEDRGTGGFKTIF

SEQ ID NO: 761962 - protein, 16 aa, Homo sapiens
  CDR3 for beta chain variable domain of TCR clone 380981 (TRBV24-1, TRBJ2-3)
CANSDPGTGATDTQYF

SEQ ID NO: 761963 - protein, 10 aa, Homo sapiens
  CDR3 for alpha chain variable domain of TCR clone 380982 (TRAV36/DV7, TRAJ56)
CAGPAVELTF

SEQ ID NO: 761964 - protein, 13 aa, Homo sapiens
  CDR3 for beta chain variable domain of TCR clone 380982 (TRBV7-9, TRBJ2-7)
CASSFWSSDEQYF

SEQ ID NO: 761965 - protein, 18 aa, Homo sapiens
  CDR3 for alpha chain variable domain of TCR clone 380983 (TRAV13-1, TRAJ52)
CAASKRSAGGTSYGRLTF

SEQ ID NO: 761966 - protein, 17 aa, Homo sapiens
  CDR3 for beta chain variable domain of TCR clone 380983 (TRBV13, TRBJ2-3)
CASSLSRVAGGRNTQYF

SEQ ID NO: 761967 - protein, 14 aa, Homo sapiens
  CDR3 for alpha chain variable domain of TCR clone 380984 (TRAV8-4, TRAJ13)
CAVTLSGGGQKVTF

SEQ ID NO: 761968 - protein, 16 aa, Homo sapiens
  CDR3 for beta chain variable domain of TCR clone 380984 (TRBV19, TRBJ2-2)
CASRSPGTGATGELFF

SEQ ID NO: 761969 - protein, 14 aa, Homo sapiens
  CDR3 for alpha chain variable domain of TCR clone 380985 (TRAV12-3, TRAJ58)
CAMSTETSGSRLTF

SEQ ID NO: 761970 - protein, 15 aa, Homo sapiens
  CDR3 for beta chain variable domain of TCR clone 380985 (TRBV4-1, TRBJ1-4)
CASSDTRGTNEKLFF

SEQ ID NO: 761971 - protein, 13 aa, Homo sapiens
  CDR3 for alpha chain variable domain of TCR clone 380986 (TRAV27, TRAJ6)
CAGGTRGSCIPTF

SEQ ID NO: 761972 - protein, 14 aa, Homo sapiens
  CDR3 for beta chain variable domain of TCR clone 380986 (TRBV7-2, TRBJ2-7)
CASSLRWEVNEQYF

SEQ ID NO: 761973 - protein, 13 aa, Homo sapiens
  CDR3 for alpha chain variable domain of TCR clone 380987 (TRAV29/DV5, TRAJ31)
CSASRNNNARLMF

SEQ ID NO: 761974 - protein, 12 aa, Homo sapiens
  CDR3 for beta chain variable domain of TCR clone 380987 (TRBV14, TRBJ1-1)
CASSQLKGLAFF

SEQ ID NO: 761975 - protein, 14 aa, Homo sapiens
  CDR3 for alpha chain variable domain of TCR clone 380988 (TRAV17, TRAJ37)
CATDGSSNTGKLIF

SEQ ID NO: 761976 - protein, 15 aa, Homo sapiens
  CDR3 for beta chain variable domain of TCR clone 380988 (TRBV20-1, TRBJ2-3)
CSASPPQVSTDTQYF

SEQ ID NO: 761977 - protein, 11 aa, Homo sapiens
  CDR3 for alpha chain variable domain of TCR clone 380989 (TRAV35, TRAJ42)
CKGGSQGNLIF

SEQ ID NO: 761978 - protein, 17 aa, Homo sapiens
  CDR3 for beta chain variable domain of TCR clone 380989 (TRBV12-4, TRBJ2-3)
CASSPPFAGYSTDTQYF

SEQ ID NO: 761979 - protein, 13 aa, Homo sapiens
  CDR3 for alpha chain variable domain of TCR clone 380990 (TRAV6, TRAJ16)
CALDDSDGQKLLF

SEQ ID NO: 761980 - protein, 16 aa, Homo sapiens
  CDR3 for beta chain variable domain of TCR clone 380990 (TRBV12-4, TRBJ1-6)
CASNLQGKGSPLLLGT

SEQ ID NO: 761981 - protein, 14 aa, Homo sapiens
  CDR3 for alpha chain variable domain of TCR clone 380991 (TRAV12-2, TRAJ40)
CAVKIPSGTYKYIF

SEQ ID NO: 761982 - protein, 11 aa, Homo sapiens
  CDR3 for beta chain variable domain of TCR clone 380991 (TRBV10-3, TRBJ2-7)
CAISEGLEQYF

SEQ ID NO: 761983 - protein, 13 aa, Homo sapiens
  CDR3 for alpha chain variable domain of TCR clone 380992 (TRAV16, TRAJ34)
FSLSPYNTDKLIF

SEQ ID NO: 761984 - protein, 17 aa, Homo sapiens
  CDR3 for beta chain variable domain of TCR clone 380992 (TRBV5-1, TRBJ2-1)
CDSSTGTSGYSYNEQFF

SEQ ID NO: 761985 - protein, 16 aa, Homo sapiens
  CDR3 for alpha chain variable domain of TCR clone 380993 (TRAV4, TRAJ18)
CCVLLIGGSTLGRLYF

SEQ ID NO: 761986 - protein, 12 aa, Homo sapiens
  CDR3 for beta chain variable domain of TCR clone 380993 (TRBV7-3, TRBJ2-5)
CASSSPGGTQYF

SEQ ID NO: 761987 - protein, 14 aa, Homo sapiens
  CDR3 for alpha chain variable domain of TCR clone 380994 (TRAV12-3, TRAJ10)
SHLPLPGGGNKLTF

SEQ ID NO: 761988 - protein, 14 aa, Homo sapiens
  CDR3 for beta chain variable domain of TCR clone 380994 (TRBV18, TRBJ2-3)
CASSPRTSTDTQYF

SEQ ID NO: 761989 - protein, 13 aa, Homo sapiens
  CDR3 for alpha chain variable domain of TCR clone 380995 (TRAV3, TRAJ21)
CAGREPDFNKFYF

SEQ ID NO: 761990 - protein, 15 aa, Homo sapiens
  CDR3 for beta chain variable domain of TCR clone 380995 (TRBV11-2, TRBJ2-2)
CASSSDRVNAGELFF

SEQ ID NO: 761991 - protein, 16 aa, Homo sapiens
  CDR3 for alpha chain variable domain of TCR clone 380996 (TRAV35, TRAJ28)
CAGQKYSGAGSYQLTF

SEQ ID NO: 761992 - protein, 16 aa, Homo sapiens
  CDR3 for beta chain variable domain of TCR clone 380996 (TRBV7-3, TRBJ2-2)
CASSLKRGTLSEELFF

SEQ ID NO: 761993 - protein, 15 aa, Homo sapiens
  CDR3 for alpha chain variable domain of TCR clone 380997 (TRAV3, TRAJ32)
CAVSSYGGATNKLIF

SEQ ID NO: 761994 - protein, 13 aa, Homo sapiens
  CDR3 for beta chain variable domain of TCR clone 380997 (TRBV20-1, TRBJ2-7)
CSAMPSTNYEQYF

SEQ ID NO: 761995 - protein, 15 aa, Homo sapiens
  CDR3 for alpha chain variable domain of TCR clone 380998 (TRAV8-3, TRAJ45)
CASSYSGGGADGLTF

SEQ ID NO: 761996 - protein, 17 aa, Homo sapiens
  CDR3 for beta chain variable domain of TCR clone 380998 (TRBV15, TRBJ1-2)
CATSGREIDVVNYGYTF

SEQ ID NO: 761997 - protein, 13 aa, Homo sapiens
  CDR3 for alpha chain variable domain of TCR clone 380999 (TRAV17, TRAJ54)
CATVSQGAQKLVF

SEQ ID NO: 761998 - protein, 15 aa, Homo sapiens
  CDR3 for beta chain variable domain of TCR clone 380999 (TRBV13, TRBJ2-1)
CASSLLSGLNNEQFF

SEQ ID NO: 761999 - protein, 11 aa, Homo sapiens
  CDR3 for alpha chain variable domain of TCR clone 381000 (TRAV13-1, TRAJ49)
CACVGGNQFYF

SEQ ID NO: 762000 - protein, 16 aa, Homo sapiens
  CDR3 for beta chain variable domain of TCR clone 381000 (TRBV11-2, TRBJ2-2)
CASSPRTGNLIGELFS

SEQ ID NO: 762001 - protein, 14 aa, Homo sapiens
  CDR3 for alpha chain variable domain of TCR clone 381001 (TRAV14/DV4, TRAJ20)
CAMRESLNDYKLSF

SEQ ID NO: 762002 - protein, 14 aa, Homo sapiens
  CDR3 for beta chain variable domain of TCR clone 381001 (TRBV19, TRBJ2-1)
CASPTFVLSGEQFF

SEQ ID NO: 762003 - protein, 10 aa, Homo sapiens
  CDR3 for alpha chain variable domain of TCR clone 381002 (TRAV1-2, TRAJ20)
FALNDYKLSF

SEQ ID NO: 762004 - protein, 14 aa, Homo sapiens
  CDR3 for beta chain variable domain of TCR clone 381002 (TRBV19, TRBJ2-1)
CASPTFVLSGEQFF

SEQ ID NO: 762005 - protein, 14 aa, Homo sapiens
  CDR3 for alpha chain variable domain of TCR clone 381003 (TRAV12-3, TRAJ13)
CAMKNSGGYKKVTF

SEQ ID NO: 762006 - protein, 13 aa, Homo sapiens
  CDR3 for beta chain variable domain of TCR clone 381003 (TRBV29-1, TRBJ2-5)
CSARDRAEETQYF

SEQ ID NO: 762007 - protein, 14 aa, Homo sapiens
  CDR3 for alpha chain variable domain of TCR clone 381004 (TRAV12-3, TRAJ10)
SHLPLTGGGNKLTF

SEQ ID NO: 762008 - protein, 15 aa, Homo sapiens
  CDR3 for beta chain variable domain of TCR clone 381004 (TRBV9, TRBJ1-6)
CAGSVAGTGDSPLHF

SEQ ID NO: 762009 - protein, 10 aa, Homo sapiens
  CDR3 for alpha chain variable domain of TCR clone 381005 (TRAV23/DV6, TRAJ31)
CARGGARLMF

SEQ ID NO: 762010 - protein, 17 aa, Homo sapiens
  CDR3 for beta chain variable domain of TCR clone 381005 (TRBV28, TRBJ2-3)
CASSSPPTGLSTDTQYF

SEQ ID NO: 762011 - protein, 11 aa, Homo sapiens
  CDR3 for alpha chain variable domain of TCR clone 381006 (TRAV3, TRAJ21)
CAVGNFNKFYF

SEQ ID NO: 762012 - protein, 15 aa, Homo sapiens
  CDR3 for beta chain variable domain of TCR clone 381006 (TRBV27, TRBJ2-7)
CASSPSRDRSYEQYF

SEQ ID NO: 762013 - protein, 14 aa, Homo sapiens
  CDR3 for alpha chain variable domain of TCR clone 381007 (TRAV17, TRAJ12)
CATDEKDSTYKLIF

SEQ ID NO: 762014 - protein, 16 aa, Homo sapiens
  CDR3 for beta chain variable domain of TCR clone 381007 (TRBV11-2, TRBJ2-1)
CASSPRLAGVYNEQFF

SEQ ID NO: 762015 - protein, 12 aa, Homo sapiens
  CDR3 for alpha chain variable domain of TCR clone 381008 (TRAV21, TRAJ37)
CAVRGNTGKLIV

SEQ ID NO: 762016 - protein, 16 aa, Homo sapiens
  CDR3 for beta chain variable domain of TCR clone 381008 (TRBV2, TRBJ2-3)
CASSPRDSTYTDTQYF

SEQ ID NO: 762017 - protein, 18 aa, Homo sapiens
  CDR3 for alpha chain variable domain of TCR clone 381009 (TRAV13-1, TRAJ52)
CAASKRSAGGTSYGKLKF

SEQ ID NO: 762018 - protein, 14 aa, Homo sapiens
  CDR3 for beta chain variable domain of TCR clone 381009 (TRBV4-1, TRBJ2-2)
CASSQAVNTGELFF

SEQ ID NO: 762019 - protein, 12 aa, Homo sapiens
  CDR3 for alpha chain variable domain of TCR clone 381010 (TRAV38-2/DV8, TRAJ48)
CALLSGKEKLTF

SEQ ID NO: 762020 - protein, 14 aa, Homo sapiens
  CDR3 for beta chain variable domain of TCR clone 381010 (TRBV11-2, TRBJ2-3)
CASSRLARTDTQYF

SEQ ID NO: 762021 - protein, 15 aa, Homo sapiens
  CDR3 for alpha chain variable domain of TCR clone 381011 (TRAV20, TRAJ4)
CAVEGSSGGYNKLIF

SEQ ID NO: 762022 - protein, 14 aa, Homo sapiens
  CDR3 for beta chain variable domain of TCR clone 381011 (TRBV7-8, TRBJ2-7)
CAITLGGALGEQYF

SEQ ID NO: 762023 - protein, 17 aa, Homo sapiens
  CDR3 for alpha chain variable domain of TCR clone 381012 (TRAV13-1, TRAJ52)
CAAGRNASGTSYGKLTF

SEQ ID NO: 762024 - protein, 12 aa, Homo sapiens
  CDR3 for beta chain variable domain of TCR clone 381012 (TRBV29-1, TRBJ1-3)
CSTRDSGNTIYF

SEQ ID NO: 762025 - protein, 13 aa, Homo sapiens
  CDR3 for alpha chain variable domain of TCR clone 381013 (TRAV8-3, TRAJ36)
CAVGATGANNLFF

SEQ ID NO: 762026 - protein, 14 aa, Homo sapiens
  CDR3 for beta chain variable domain of TCR clone 381013 (TRBV7-9, TRBJ2-2)
CASSGLADTGELFF

SEQ ID NO: 762027 - protein, 11 aa, Homo sapiens
  CDR3 for alpha chain variable domain of TCR clone 381014 (TRAV13-1, TRAJ8)
CAARGFQKLVF

SEQ ID NO: 762028 - protein, 16 aa, Homo sapiens
  CDR3 for beta chain variable domain of TCR clone 381014 (TRBV19, TRBJ1-5)
CASSTRGTRSNQPQHY

SEQ ID NO: 762029 - protein, 11 aa, Homo sapiens
  CDR3 for alpha chain variable domain of TCR clone 381015 (TRAV39, TRAJ49)
CAVDISTQFYF

SEQ ID NO: 762030 - protein, 11 aa, Homo sapiens
  CDR3 for beta chain variable domain of TCR clone 381015 (TRBV7-8, TRBJ2-7)
CASSLSREQYL

SEQ ID NO: 762031 - protein, 14 aa, Homo sapiens
  CDR3 for alpha chain variable domain of TCR clone 381016 (TRAV13-1, TRAJ35)
CAARKGGFGNVLHC

SEQ ID NO: 762032 - protein, 13 aa, Homo sapiens
  CDR3 for beta chain variable domain of TCR clone 381016 (TRBV7-3, TRBJ1-1)
CASSQDCWAEAFF

SEQ ID NO: 762033 - protein, 14 aa, Homo sapiens
  CDR3 for alpha chain variable domain of TCR clone 381017 (TRAV16, TRAJ48)
CALTPGFVNEKLTF

SEQ ID NO: 762034 - protein, 14 aa, Homo sapiens
  CDR3 for beta chain variable domain of TCR clone 381017 (TRBV7-2, TRBJ2-7)
CASSSMSGFSEQYF

SEQ ID NO: 762035 - protein, 14 aa, Homo sapiens
  CDR3 for alpha chain variable domain of TCR clone 381018 (TRAV13-1, TRAJ40)
CAASMTSRTYKYIF

SEQ ID NO: 762036 - protein, 15 aa, Homo sapiens
  CDR3 for beta chain variable domain of TCR clone 381018 (TRBV7-3, TRBJ2-1)
CASSPTGGGEVEQLF

SEQ ID NO: 762037 - protein, 15 aa, Homo sapiens
  CDR3 for alpha chain variable domain of TCR clone 381019 (TRAV21, TRAJ53)
CATLNSGGSNYKLTF

SEQ ID NO: 762038 - protein, 15 aa, Homo sapiens
  CDR3 for beta chain variable domain of TCR clone 381019 (TRBV5-1, TRBJ2-3)
CASSYTSGSTDSQYF

SEQ ID NO: 762039 - protein, 15 aa, Homo sapiens
  CDR3 for alpha chain variable domain of TCR clone 381020 (TRAV3, TRAJ32)
CAVSFYGVATNKLIF

SEQ ID NO: 762040 - protein, 16 aa, Homo sapiens
  CDR3 for beta chain variable domain of TCR clone 381020 (TRBV5-1, TRBJ2-5)
CASSLSLAGAQETQYF

SEQ ID NO: 762041 - protein, 13 aa, Homo sapiens
  CDR3 for alpha chain variable domain of TCR clone 381021 (TRAV41, TRAJ48)
SVPVNFGNEKLTF

SEQ ID NO: 762042 - protein, 15 aa, Homo sapiens
  CDR3 for beta chain variable domain of TCR clone 381021 (TRBV19, TRBJ1-1)
CASSGNSHPNTEAFF

SEQ ID NO: 762043 - protein, 11 aa, Homo sapiens
  CDR3 for alpha chain variable domain of TCR clone 381022 (TRAV3, TRAJ21)
CAVGNFNKFYF

SEQ ID NO: 762044 - protein, 15 aa, Homo sapiens
  CDR3 for beta chain variable domain of TCR clone 381022 (TRBV29-1, TRBJ2-1)
CSVEGDRPPTMSSSS

SEQ ID NO: 762045 - protein, 12 aa, Homo sapiens
  CDR3 for alpha chain variable domain of TCR clone 381023 (TRAV8-3, TRAJ20)
CAVGGGDYKLSF

SEQ ID NO: 762046 - protein, 12 aa, Homo sapiens
  CDR3 for beta chain variable domain of TCR clone 381023 (TRBV3-1, TRBJ2-7)
CASSQVRYGQYF

SEQ ID NO: 762047 - protein, 16 aa, Homo sapiens
  CDR3 for alpha chain variable domain of TCR clone 381024 (TRAV26-2, TRAJ48)
CILRPPFNFANEKLTF

SEQ ID NO: 762048 - protein, 15 aa, Homo sapiens
  CDR3 for beta chain variable domain of TCR clone 381024 (TRBV20-1, TRBJ2-3)
CSARVEGTYTDTQYF

SEQ ID NO: 762049 - protein, 14 aa, Homo sapiens
  CDR3 for alpha chain variable domain of TCR clone 381025 (TRAV1-2, TRAJ16)
CAVNRFSDGQNLLF

SEQ ID NO: 762050 - protein, 15 aa, Homo sapiens
  CDR3 for beta chain variable domain of TCR clone 381025 (TRBV2, TRBJ1-2)
CASRGVDGTNYGYTF

SEQ ID NO: 762051 - protein, 15 aa, Homo sapiens
  CDR3 for alpha chain variable domain of TCR clone 381026 (TRAV8-4, TRAJ48)
CAVSAAYFGNVKLTF

SEQ ID NO: 762052 - protein, 12 aa, Homo sapiens
  CDR3 for beta chain variable domain of TCR clone 381026 (TRBV3-1, TRBJ2-5)
CASSQRGETQYF

SEQ ID NO: 762053 - protein, 19 aa, Homo sapiens
  CDR3 for alpha chain variable domain of TCR clone 381027 (TRAV16, )
CALSGDIQNPDPAVYQLRD

SEQ ID NO: 762054 - protein, 16 aa, Homo sapiens
  CDR3 for beta chain variable domain of TCR clone 381027 (TRBV12-5, TRBJ2-5)
CASGPRTSGNQETQFF

SEQ ID NO: 762055 - protein, 16 aa, Homo sapiens
  CDR3 for alpha chain variable domain of TCR clone 381028 (TRAV30, TRAJ44)
CGTEDKRTGTASKLTL

SEQ ID NO: 762056 - protein, 13 aa, Homo sapiens
  CDR3 for beta chain variable domain of TCR clone 381028 (TRBV5-1, TRBJ2-1)
CASRPFGYNEQFF

SEQ ID NO: 762057 - protein, 17 aa, Homo sapiens
  CDR3 for alpha chain variable domain of TCR clone 381029 (TRAV3, TRAJ6)
CAERDGPRAGGSYIPTF

SEQ ID NO: 762058 - protein, 15 aa, Homo sapiens
  CDR3 for beta chain variable domain of TCR clone 381029 (TRBV11-3, TRBJ2-7)
CASSPGPASSYEQYF

SEQ ID NO: 762059 - protein, 17 aa, Homo sapiens
  CDR3 for alpha chain variable domain of TCR clone 381030 (TRAV3, TRAJ42)
CAVRDRDYGGRQGNLIF

SEQ ID NO: 762060 - protein, 13 aa, Homo sapiens
  CDR3 for beta chain variable domain of TCR clone 381030 (TRBV10-3, TRBJ2-7)
CASKLAVNYEQYF

SEQ ID NO: 762061 - protein, 14 aa, Homo sapiens
  CDR3 for alpha chain variable domain of TCR clone 381031 (TRAV1-2, TRAJ16)
CAVNRFSDGQKLRF

SEQ ID NO: 762062 - protein, 11 aa, Homo sapiens
  CDR3 for beta chain variable domain of TCR clone 381031 (TRBV12-4, TRBJ2-2)
CASSSAGELFF

SEQ ID NO: 762063 - protein, 16 aa, Homo sapiens
  CDR3 for alpha chain variable domain of TCR clone 381032 (TRAV1-2, TRAJ10)
CAVRGVLTGGGNNLTF

SEQ ID NO: 762064 - protein, 12 aa, Homo sapiens
  CDR3 for beta chain variable domain of TCR clone 381032 (TRBV11-2, TRBJ2-1)
CASSPGNNEQFF

SEQ ID NO: 762065 - protein, 12 aa, Homo sapiens
  CDR3 for alpha chain variable domain of TCR clone 381033 (TRAV4, TRAJ21)
CLVGDNFNKFYF

SEQ ID NO: 762066 - protein, 13 aa, Homo sapiens
  CDR3 for beta chain variable domain of TCR clone 381033 (TRBV29-1, TRBJ2-7)
CSVKRGGNYEQYF

SEQ ID NO: 762067 - protein, 13 aa, Homo sapiens
  CDR3 for alpha chain variable domain of TCR clone 381034 (TRAV1-1, TRAJ9)
CAAKNTGGFKTIF

SEQ ID NO: 762068 - protein, 14 aa, Homo sapiens
  CDR3 for beta chain variable domain of TCR clone 381034 (TRBV7-8, TRBJ2-7)
CASSPRDRVYEQYF

SEQ ID NO: 762069 - protein, 17 aa, Homo sapiens
  CDR3 for alpha chain variable domain of TCR clone 381035 (TRAV23/DV6, TRAJ58)
CAARLLRGETSGSRLTF

SEQ ID NO: 762070 - protein, 14 aa, Homo sapiens
  CDR3 for beta chain variable domain of TCR clone 381035 (TRBV2, TRBJ2-7)
CASSLTSGGYEQYI

SEQ ID NO: 762071 - protein, 12 aa, Homo sapiens
  CDR3 for alpha chain variable domain of TCR clone 381036 (TRAV12-3, TRAJ34)
YAMGYNTDKLIF

SEQ ID NO: 762072 - protein, 14 aa, Homo sapiens
  CDR3 for beta chain variable domain of TCR clone 381036 (TRBV4-1, TRBJ2-2)
GASSQAVNTGELFF

SEQ ID NO: 762073 - protein, 15 aa, Homo sapiens
  CDR3 for alpha chain variable domain of TCR clone 381037 (TRAV8-1, TRAJ37)
CAVKKGTGNTGKLIF

SEQ ID NO: 762074 - protein, 17 aa, Homo sapiens
  CDR3 for beta chain variable domain of TCR clone 381037 (TRBV12-4, TRBJ1-1)
CASSLSGFRTMNTEAFF

SEQ ID NO: 762075 - protein, 10 aa, Homo sapiens
  CDR3 for alpha chain variable domain of TCR clone 381038 (TRAV2, TRAJ34)
CAVVNDKLIF

SEQ ID NO: 762076 - protein, 20 aa, Homo sapiens
  CDR3 for beta chain variable domain of TCR clone 381038 (TRBV19, TRBJ2-1)
CASSISRTVTSTRLNNEQFV

SEQ ID NO: 762077 - protein, 13 aa, Homo sapiens
  CDR3 for alpha chain variable domain of TCR clone 381039 (TRAV8-3, TRAJ28)
CAVGAVGSYQLTF

SEQ ID NO: 762078 - protein, 11 aa, Homo sapiens
  CDR3 for beta chain variable domain of TCR clone 381039 (TRBV6-3, TRBJ2-3)
CATGQADTQYF

SEQ ID NO: 762079 - protein, 12 aa, Homo sapiens
  CDR3 for alpha chain variable domain of TCR clone 381040 (TRAV12-1, TRAJ40)
CVVPSGTYKYIF

SEQ ID NO: 762080 - protein, 15 aa, Homo sapiens
  CDR3 for beta chain variable domain of TCR clone 381040 (TRBV12-4, TRBJ2-1)
CVGSPLSGRNSEQFF

SEQ ID NO: 762081 - protein, 14 aa, Homo sapiens
  CDR3 for alpha chain variable domain of TCR clone 381041 (TRAV9-2, TRAJ36)
CALPWRTGGNNLFF

SEQ ID NO: 762082 - protein, 14 aa, Homo sapiens
  CDR3 for beta chain variable domain of TCR clone 381041 (TRBV2, TRBJ1-2)
CASSELQVNYGYTF

SEQ ID NO: 762083 - protein, 10 aa, Homo sapiens
  CDR3 for alpha chain variable domain of TCR clone 381042 (TRAV1-2, TRAJ20)
CACNDYKLSF

SEQ ID NO: 762084 - protein, 16 aa, Homo sapiens
  CDR3 for beta chain variable domain of TCR clone 381042 (TRBV20-1, TRBJ2-1)
GSARDLKQGMNNEQFF

SEQ ID NO: 762085 - protein, 12 aa, Homo sapiens
  CDR3 for alpha chain variable domain of TCR clone 381043 (TRAV1-1, TRAJ8)
CAGGTGFQKLVF

SEQ ID NO: 762086 - protein, 16 aa, Homo sapiens
  CDR3 for beta chain variable domain of TCR clone 381043 (TRBV24-1, TRBJ2-3)
CATSDPVTGATDTQYF

SEQ ID NO: 762087 - protein, 11 aa, Homo sapiens
  CDR3 for alpha chain variable domain of TCR clone 381044 (TRAV2, TRAJ13)
CASGGYQKVTF

SEQ ID NO: 762088 - protein, 12 aa, Homo sapiens
  CDR3 for beta chain variable domain of TCR clone 381044 (TRBV7-8, TRBJ2-7)
CTSSLGDREQYF

SEQ ID NO: 762089 - protein, 18 aa, Homo sapiens
  CDR3 for alpha chain variable domain of TCR clone 381045 (TRAV16, TRAJ52)
CALSGVDAGGTSYGKLTF

SEQ ID NO: 762090 - protein, 13 aa, Homo sapiens
  CDR3 for beta chain variable domain of TCR clone 381045 (TRBV4-2, TRBJ1-1)
CASSQAGNTEAFF

SEQ ID NO: 762091 - protein, 11 aa, Homo sapiens
  CDR3 for alpha chain variable domain of TCR clone 381046 (TRAV2, TRAJ13)
CASGGYEKVTF

SEQ ID NO: 762092 - protein, 11 aa, Homo sapiens
  CDR3 for beta chain variable domain of TCR clone 381046 (TRBV5-6, TRBJ2-5)
CASSLERTQYF

SEQ ID NO: 762093 - protein, 14 aa, Homo sapiens
  CDR3 for alpha chain variable domain of TCR clone 381047 (TRAV1-2, TRAJ16)
CAVNRFSDGQKLLF

SEQ ID NO: 762094 - protein, 15 aa, Homo sapiens
  CDR3 for beta chain variable domain of TCR clone 381047 (TRBV12-4, TRBJ2-5)
CASSPPTGLQETEYF

SEQ ID NO: 762095 - protein, 17 aa, Homo sapiens
  CDR3 for alpha chain variable domain of TCR clone 381048 (TRAV8-6, TRAJ8)
GAVKEGIENTGFQKLVF

SEQ ID NO: 762096 - protein, 12 aa, Homo sapiens
  CDR3 for beta chain variable domain of TCR clone 381048 (TRBV19, TRBJ1-4)
CTSKDWPGGLFF

SEQ ID NO: 762097 - protein, 16 aa, Homo sapiens
  CDR3 for alpha chain variable domain of TCR clone 381049 (TRAV36/DV7, TRAJ33)
WRPGNQVQDSNYQLIW

SEQ ID NO: 762098 - protein, 15 aa, Homo sapiens
  CDR3 for beta chain variable domain of TCR clone 381049 (TRBV29-1, TRBJ2-1)
CSVGRHALFYNEQFF

SEQ ID NO: 762099 - protein, 12 aa, Homo sapiens
  CDR3 for alpha chain variable domain of TCR clone 381050 (TRAV2, TRAJ36)
CAEFTGANNLFF

SEQ ID NO: 762100 - protein, 14 aa, Homo sapiens
  CDR3 for beta chain variable domain of TCR clone 381050 (TRBV18, TRBJ2-7)
CASSPRGGAYEQYF

SEQ ID NO: 762101 - protein, 16 aa, Homo sapiens
  CDR3 for alpha chain variable domain of TCR clone 381051 (TRAV12-3, TRAJ58)
CAMTDTEETSGSSLTF

SEQ ID NO: 762102 - protein, 22 aa, Homo sapiens
  CDR3 for beta chain variable domain of TCR clone 381051 (TRBV23-1, TRBJ2-7)
CARSRRLDSGPGYVGGGYEQYF

SEQ ID NO: 762103 - protein, 14 aa, Homo sapiens
  CDR3 for alpha chain variable domain of TCR clone 381052 (TRAV12-2, TRAJ40)
CAVKIPSGTYKYIF

SEQ ID NO: 762104 - protein, 17 aa, Homo sapiens
  CDR3 for beta chain variable domain of TCR clone 381052 (TRBV7-8, TRBJ2-6)
CASSAGTVGAGANVLTF

SEQ ID NO: 762105 - protein, 14 aa, Homo sapiens
  CDR3 for alpha chain variable domain of TCR clone 381053 (TRAV12-3, TRAJ42)
CAMNYGGSQGNLVF

SEQ ID NO: 762106 - protein, 15 aa, Homo sapiens
  CDR3 for beta chain variable domain of TCR clone 381053 (TRBV5-7, TRBJ1-5)
CASSYGKLWDQPQHF

SEQ ID NO: 762107 - protein, 13 aa, Homo sapiens
  CDR3 for alpha chain variable domain of TCR clone 381054 (TRAV3, TRAJ36)
CAVRDTGSNNLFF

SEQ ID NO: 762108 - protein, 15 aa, Homo sapiens
  CDR3 for beta chain variable domain of TCR clone 381054 (TRBV24-1, TRBJ2-1)
CATSGSGGFYNEQFF

SEQ ID NO: 762109 - protein, 15 aa, Homo sapiens
  CDR3 for alpha chain variable domain of TCR clone 381055 (TRAV38-1, TRAJ37)
CAFIFGSGNKGKLIF

SEQ ID NO: 762110 - protein, 11 aa, Homo sapiens
  CDR3 for beta chain variable domain of TCR clone 381055 (TRBV12-4, TRBJ2-3)
CASTATDTQYF

SEQ ID NO: 762111 - protein, 14 aa, Homo sapiens
  CDR3 for alpha chain variable domain of TCR clone 381056 (TRAV14/DV4, TRAJ15)
CAMRRDQAGTALII

SEQ ID NO: 762112 - protein, 11 aa, Homo sapiens
  CDR3 for beta chain variable domain of TCR clone 381056 (TRBV7-2, TRBJ2-7)
CASSSGLWQYF

SEQ ID NO: 762113 - protein, 13 aa, Homo sapiens
  CDR3 for alpha chain variable domain of TCR clone 381057 (TRAV26-1, TRAJ33)
CIVPMDSNYQLIW

SEQ ID NO: 762114 - protein, 15 aa, Homo sapiens
  CDR3 for beta chain variable domain of TCR clone 381057 (TRBV7-2, TRBJ2-1)
CASSSGLAGGNEQFF

SEQ ID NO: 762115 - protein, 14 aa, Homo sapiens
  CDR3 for alpha chain variable domain of TCR clone 381058 (TRAV8-6, TRAJ8)
CAVNENTGFQKLVF

SEQ ID NO: 762116 - protein, 16 aa, Homo sapiens
  CDR3 for beta chain variable domain of TCR clone 381058 (TRBV24-1, TRBJ1-2)
CATSDERGGGNYGYTF

SEQ ID NO: 762117 - protein, 14 aa, Homo sapiens
  CDR3 for alpha chain variable domain of TCR clone 381059 (TRAV1-2, TRAJ8)
CAVREDTGFQNIVF

SEQ ID NO: 762118 - protein, 15 aa, Homo sapiens
  CDR3 for beta chain variable domain of TCR clone 381059 (TRBV6-3, TRBJ2-7)
CASSSPGTVFYEQYF

SEQ ID NO: 762119 - protein, 12 aa, Homo sapiens
  CDR3 for alpha chain variable domain of TCR clone 381060 (TRAV2, TRAJ9)
CAVGAGGFKTIF

SEQ ID NO: 762120 - protein, 15 aa, Homo sapiens
  CDR3 for beta chain variable domain of TCR clone 381060 (TRBV10-3, TRBJ2-1)
CAIRNGTSGHNEQFF

SEQ ID NO: 762121 - protein, 12 aa, Homo sapiens
  CDR3 for alpha chain variable domain of TCR clone 381061 (TRAV2, TRAJ9)
CAVGAGGFKTIF

SEQ ID NO: 762122 - protein, 15 aa, Homo sapiens
  CDR3 for beta chain variable domain of TCR clone 381061 (TRBV4-3, TRBJ1-6)
CASSQDSQGGSPLHF

SEQ ID NO: 762123 - protein, 13 aa, Homo sapiens
  CDR3 for alpha chain variable domain of TCR clone 381062 (TRAV1-2, TRAJ9)
CAVLTTGGFKTIF

SEQ ID NO: 762124 - protein, 18 aa, Homo sapiens
  CDR3 for beta chain variable domain of TCR clone 381062 (TRBV19, TRBJ1-5)
CASSKGQVSIHSNQPQHF

SEQ ID NO: 762125 - protein, 14 aa, Homo sapiens
  CDR3 for alpha chain variable domain of TCR clone 381063 (TRAV12-2, TRAJ13)
CAVKKTGGYKKVTF

SEQ ID NO: 762126 - protein, 17 aa, Homo sapiens
  CDR3 for beta chain variable domain of TCR clone 381063 (TRBV13, TRBJ2-3)
CASSLSRVAGGRNTQYF

SEQ ID NO: 762127 - protein, 14 aa, Homo sapiens
  CDR3 for alpha chain variable domain of TCR clone 381064 (TRAV9-2, TRAJ20)
CALRDPLNDYKLSF

SEQ ID NO: 762128 - protein, 13 aa, Homo sapiens
  CDR3 for beta chain variable domain of TCR clone 381064 (TRBV19, TRBJ2-7)
CASSPRQSYEQYF

SEQ ID NO: 762129 - protein, 14 aa, Homo sapiens
  CDR3 for alpha chain variable domain of TCR clone 381065 (TRAV1-2, TRAJ16)
CAVNRFSDGQKLLF

SEQ ID NO: 762130 - protein, 15 aa, Homo sapiens
  CDR3 for beta chain variable domain of TCR clone 381065 (TRBV7-9, TRBJ2-2)
CASRPEGTSTGELFF

SEQ ID NO: 762131 - protein, 15 aa, Homo sapiens
  CDR3 for alpha chain variable domain of TCR clone 381066 (TRAV38-1, TRAJ37)
CAFIHGSGNTDKLIF

SEQ ID NO: 762132 - protein, 12 aa, Homo sapiens
  CDR3 for beta chain variable domain of TCR clone 381066 (TRBV7-9, TRBJ2-7)
CASSFGSYEQYF

SEQ ID NO: 762133 - protein, 17 aa, Homo sapiens
  CDR3 for alpha chain variable domain of TCR clone 381067 (TRAV3, TRAJ6)
CAVRDGPRAGGSYIPTF

SEQ ID NO: 762134 - protein, 13 aa, Homo sapiens
  CDR3 for beta chain variable domain of TCR clone 381067 (TRBV27, TRBJ2-7)
CASSFVSSYEQYF

SEQ ID NO: 762135 - protein, 11 aa, Homo sapiens
  CDR3 for alpha chain variable domain of TCR clone 381068 (TRAV2, TRAJ23)
CAVDTRGKLIF

SEQ ID NO: 762136 - protein, 17 aa, Homo sapiens
  CDR3 for beta chain variable domain of TCR clone 381068 (TRBV20-1, TRBJ2-1)
CSASSSGLAGSHNEQFF

SEQ ID NO: 762137 - protein, 15 aa, Homo sapiens
  CDR3 for alpha chain variable domain of TCR clone 381069 (TRAV8-3, TRAJ27)
CAVGPSTTNAGKSNF

SEQ ID NO: 762138 - protein, 15 aa, Homo sapiens
  CDR3 for beta chain variable domain of TCR clone 381069 (TRBV7-2, TRBJ2-1)
CASSSGLAGGNEQFF

SEQ ID NO: 762139 - protein, 22 aa, Homo sapiens
  CDR3 for alpha chain variable domain of TCR clone 381070 (TRAV27, )
CAARRNAGDNHIQNPDPAVYQL

SEQ ID NO: 762140 - protein, 12 aa, Homo sapiens
  CDR3 for beta chain variable domain of TCR clone 381070 (TRBV29-1, TRBJ2-3)
CSVTGGADTQYF

SEQ ID NO: 762141 - protein, 10 aa, Homo sapiens
  CDR3 for alpha chain variable domain of TCR clone 381071 (TRAV12-2, TRAJ52)
RSTSYGKLTF

SEQ ID NO: 762142 - protein, 11 aa, Homo sapiens
  CDR3 for beta chain variable domain of TCR clone 381071 (TRBV11-2, TRBJ2-2)
CASSLPGQLFF

SEQ ID NO: 762143 - protein, 14 aa, Homo sapiens
  CDR3 for alpha chain variable domain of TCR clone 381072 (TRAV12-3, TRAJ58)
CAMSTETSGSRLTF

SEQ ID NO: 762144 - protein, 15 aa, Homo sapiens
  CDR3 for beta chain variable domain of TCR clone 381072 (TRBV12-4, TRBJ2-5)
CASSPPTGLQETQYF

SEQ ID NO: 762145 - protein, 14 aa, Homo sapiens
  CDR3 for alpha chain variable domain of TCR clone 381073 (TRAV29/DV5, TRAJ45)
CAASFRGGAYGLTF

SEQ ID NO: 762146 - protein, 11 aa, Homo sapiens
  CDR3 for beta chain variable domain of TCR clone 381073 (TRBV11-2, TRBJ2-2)
CASSLPGKLFF

SEQ ID NO: 762147 - protein, 12 aa, Homo sapiens
  CDR3 for alpha chain variable domain of TCR clone 381074 (TRAV8-3, TRAJ26)
CAGDNYGQNFVF

SEQ ID NO: 762148 - protein, 13 aa, Homo sapiens
  CDR3 for beta chain variable domain of TCR clone 381074 (TRBV19, TRBJ2-2)
CASGIWSTGELFF

SEQ ID NO: 762149 - protein, 15 aa, Homo sapiens
  CDR3 for alpha chain variable domain of TCR clone 381075 (TRAV30, TRAJ57)
CGTAIPQGGSEKLDF

SEQ ID NO: 762150 - protein, 13 aa, Homo sapiens
  CDR3 for beta chain variable domain of TCR clone 381075 (TRBV7-9, TRBJ1-2)
CASSPSNFWGYTF

SEQ ID NO: 762151 - protein, 14 aa, Homo sapiens
  CDR3 for alpha chain variable domain of TCR clone 381076 (TRAV16, TRAJ48)
CALTPGFGNEKLTF

SEQ ID NO: 762152 - protein, 14 aa, Homo sapiens
  CDR3 for beta chain variable domain of TCR clone 381076 (TRBV12-5, TRBJ2-5)
CASGSRTHQETQYF

SEQ ID NO: 762153 - protein, 15 aa, Homo sapiens
  CDR3 for alpha chain variable domain of TCR clone 381077 (TRAV21, TRAJ24)
CAARSSTDSWGKLQF

SEQ ID NO: 762154 - protein, 14 aa, Homo sapiens
  CDR3 for beta chain variable domain of TCR clone 381077 (TRBV7-9, TRBJ2-1)
CASSPRDSLYEQFF

SEQ ID NO: 762155 - protein, 16 aa, Homo sapiens
  CDR3 for alpha chain variable domain of TCR clone 381078 (TRAV30, TRAJ24)
CGTEIVDADSWGKFQF

SEQ ID NO: 762156 - protein, 15 aa, Homo sapiens
  CDR3 for beta chain variable domain of TCR clone 381078 (TRBV18, TRBJ1-5)
CASSPSDRSNQPQHF

SEQ ID NO: 762157 - protein, 13 aa, Homo sapiens
  CDR3 for alpha chain variable domain of TCR clone 381079 (TRAV38-2/DV8, TRAJ29)
CAYRTPGNTPLVF

SEQ ID NO: 762158 - protein, 12 aa, Homo sapiens
  CDR3 for beta chain variable domain of TCR clone 381079 (TRBV7-8, TRBJ1-1)
CASGTATTEAFF

SEQ ID NO: 762159 - protein, 12 aa, Homo sapiens
  CDR3 for alpha chain variable domain of TCR clone 381080 (TRAV16, TRAJ10)
CSRTGGGNKLTF

SEQ ID NO: 762160 - protein, 17 aa, Homo sapiens
  CDR3 for beta chain variable domain of TCR clone 381080 (TRBV7-6, TRBJ2-5)
CASSPGLADPWGETQYF

SEQ ID NO: 762161 - protein, 14 aa, Homo sapiens
  CDR3 for alpha chain variable domain of TCR clone 381081 (TRAV1-2, TRAJ16)
CAVNRFSDGEKLLF

SEQ ID NO: 762162 - protein, 14 aa, Homo sapiens
  CDR3 for beta chain variable domain of TCR clone 381081 (TRBV7-9, TRBJ2-1)
CASSPRDSLYEQFF

SEQ ID NO: 762163 - protein, 15 aa, Homo sapiens
  CDR3 for alpha chain variable domain of TCR clone 381082 (TRAV3, TRAJ20)
CAVRDIKLSDYKLSF

SEQ ID NO: 762164 - protein, 15 aa, Homo sapiens
  CDR3 for beta chain variable domain of TCR clone 381082 (TRBV7-9, TRBJ1-5)
CASSQGHQPNQPQHF

SEQ ID NO: 762165 - protein, 13 aa, Homo sapiens
  CDR3 for alpha chain variable domain of TCR clone 381083 (TRAV13-2, TRAJ48)
CAEMDFGNEKLTF

SEQ ID NO: 762166 - protein, 15 aa, Homo sapiens
  CDR3 for beta chain variable domain of TCR clone 381083 (TRBV7-9, TRBJ1-6)
CASCSPGRGNSPLHF

SEQ ID NO: 762167 - protein, 16 aa, Homo sapiens
  CDR3 for alpha chain variable domain of TCR clone 381084 (TRAV16, TRAJ4)
CITVLPFSGGYNKLIF

SEQ ID NO: 762168 - protein, 14 aa, Homo sapiens
  CDR3 for beta chain variable domain of TCR clone 381084 (TRBV19, TRBJ2-7)
CASSMGRGAIEQYF

SEQ ID NO: 762169 - protein, 16 aa, Homo sapiens
  CDR3 for alpha chain variable domain of TCR clone 381085 (TRAV12-3, TRAJ53)
CAMSPGSGGSNYKLTF

SEQ ID NO: 762170 - protein, 14 aa, Homo sapiens
  CDR3 for beta chain variable domain of TCR clone 381085 (TRBV7-3, TRBJ2-1)
CASSLTGGANEQFF

SEQ ID NO: 762171 - protein, 15 aa, Homo sapiens
  CDR3 for alpha chain variable domain of TCR clone 381086 (TRAV2, TRAJ15)
CAVEDRGQAGTALIF

SEQ ID NO: 762172 - protein, 13 aa, Homo sapiens
  CDR3 for beta chain variable domain of TCR clone 381086 (TRBV12-4, TRBJ2-5)
CASSSGGSRTQYV

SEQ ID NO: 762173 - protein, 13 aa, Homo sapiens
  CDR3 for alpha chain variable domain of TCR clone 381087 (TRAV27, TRAJ54)
CAGAGQGAQKLVF

SEQ ID NO: 762174 - protein, 12 aa, Homo sapiens
  CDR3 for beta chain variable domain of TCR clone 381087 (TRBV7-9, TRBJ1-5)
CASSPQGQPQHF

SEQ ID NO: 762175 - protein, 16 aa, Homo sapiens
  CDR3 for alpha chain variable domain of TCR clone 381088 (TRAV26-1, TRAJ37)
CIVRGDGSGNTGKLIF

SEQ ID NO: 762176 - protein, 13 aa, Homo sapiens
  CDR3 for beta chain variable domain of TCR clone 381088 (TRBV4-1, TRBJ2-2)
CAGSQENTGELFF

SEQ ID NO: 762177 - protein, 14 aa, Homo sapiens
  CDR3 for alpha chain variable domain of TCR clone 381089 (TRAV23/DV6, TRAJ57)
CAASSTFLRADLNS

SEQ ID NO: 762178 - protein, 14 aa, Homo sapiens
  CDR3 for beta chain variable domain of TCR clone 381089 (TRBV25-1, TRBJ1-1)
CASTHLGGNTEAFF

SEQ ID NO: 762179 - protein, 12 aa, Homo sapiens
  CDR3 for alpha chain variable domain of TCR clone 381090 (TRAV12-3, TRAJ17)
CALTLTGNKLTF

SEQ ID NO: 762180 - protein, 15 aa, Homo sapiens
  CDR3 for beta chain variable domain of TCR clone 381090 (TRBV20-1, TRBJ2-7)
CSARNRVAGMDEQYF

SEQ ID NO: 762181 - protein, 12 aa, Homo sapiens
  CDR3 for alpha chain variable domain of TCR clone 381091 (TRAV35, TRAJ49)
CAGWNTCNQFYF

SEQ ID NO: 762182 - protein, 16 aa, Homo sapiens
  CDR3 for beta chain variable domain of TCR clone 381091 (TRBV5-1, TRBJ2-2)
CASSLWDTTNTGELFF

SEQ ID NO: 762183 - protein, 16 aa, Homo sapiens
  CDR3 for alpha chain variable domain of TCR clone 381092 (TRAV3, TRAJ10)
CAVRDMRAGGGNNLTF

SEQ ID NO: 762184 - protein, 17 aa, Homo sapiens
  CDR3 for beta chain variable domain of TCR clone 381092 (TRBV28, TRBJ2-5)
CASSTPEGDALQETQYF

SEQ ID NO: 762185 - protein, 16 aa, Homo sapiens
  CDR3 for alpha chain variable domain of TCR clone 381093 (TRAV20, TRAJ53)
CAVRRGSGGSNYKLTF

SEQ ID NO: 762186 - protein, 12 aa, Homo sapiens
  CDR3 for beta chain variable domain of TCR clone 381093 (TRBV29-1, TRBJ2-3)
CSVVLGADTQCF

SEQ ID NO: 762187 - protein, 16 aa, Homo sapiens
  CDR3 for alpha chain variable domain of TCR clone 381094 (TRAV30, TRAJ24)
CGTEIVDADSWGKFQF

SEQ ID NO: 762188 - protein, 15 aa, Homo sapiens
  CDR3 for beta chain variable domain of TCR clone 381094 (TRBV27, TRBJ2-3)
CASSSLAGVIDTQYF

SEQ ID NO: 762189 - protein, 14 aa, Homo sapiens
  CDR3 for alpha chain variable domain of TCR clone 381095 (TRAV2, TRAJ9)
CAVEDRSGGFKTIF

SEQ ID NO: 762190 - protein, 14 aa, Homo sapiens
  CDR3 for beta chain variable domain of TCR clone 381095 (TRBV25-1, TRBJ1-1)
CASTHLGENTEAFF

SEQ ID NO: 762191 - protein, 11 aa, Homo sapiens
  CDR3 for alpha chain variable domain of TCR clone 381096 (TRAV17, TRAJ43)
CATPRSNDMRF

SEQ ID NO: 762192 - protein, 15 aa, Homo sapiens
  CDR3 for beta chain variable domain of TCR clone 381096 (TRBV11-2, TRBJ2-1)
CASSLWTSGLNEQFF

SEQ ID NO: 762193 - protein, 17 aa, Homo sapiens
  CDR3 for alpha chain variable domain of TCR clone 381097 (TRAV3, TRAJ6)
CAVRDGPRAGGSYIPTF

SEQ ID NO: 762194 - protein, 13 aa, Homo sapiens
  CDR3 for beta chain variable domain of TCR clone 381097 (TRBV7-2, TRBJ2-7)
SSSPKTSFYEQYF

SEQ ID NO: 762195 - protein, 14 aa, Homo sapiens
  CDR3 for alpha chain variable domain of TCR clone 381098 (TRAV3, TRAJ21)
CAVESQANFNKFYF

SEQ ID NO: 762196 - protein, 12 aa, Homo sapiens
  CDR3 for beta chain variable domain of TCR clone 381098 (TRBV6-3, TRBJ2-7)
CASSLSPYEQYF

SEQ ID NO: 762197 - protein, 16 aa, Homo sapiens
  CDR3 for alpha chain variable domain of TCR clone 381099 (TRAV1-2, TRAJ6)
CAVRDQGTGGSYIPTF

SEQ ID NO: 762198 - protein, 13 aa, Homo sapiens
  CDR3 for beta chain variable domain of TCR clone 381099 (TRBV28, TRBJ2-7)
CASTSGLAGEQYF

SEQ ID NO: 762199 - protein, 15 aa, Homo sapiens
  CDR3 for alpha chain variable domain of TCR clone 381100 (TRAV8-4, TRAJ37)
CAVSRGSGNTGKLIF

SEQ ID NO: 762200 - protein, 14 aa, Homo sapiens
  CDR3 for beta chain variable domain of TCR clone 381100 (TRBV7-3, TRBJ2-1)
CASSLAGGTNEQFF

SEQ ID NO: 762201 - protein, 12 aa, Homo sapiens
  CDR3 for alpha chain variable domain of TCR clone 381101 (TRAV1-2, TRAJ24)
CAVGGSWGKFQF

SEQ ID NO: 762202 - protein, 14 aa, Homo sapiens
  CDR3 for beta chain variable domain of TCR clone 381101 (TRBV7-6, TRBJ2-3)
CASSLGTVTDTQYF

SEQ ID NO: 762203 - protein, 13 aa, Homo sapiens
  CDR3 for alpha chain variable domain of TCR clone 381102 (TRAV13-1, TRAJ49)
CAAIWGLGNQFYF

SEQ ID NO: 762204 - protein, 15 aa, Homo sapiens
  CDR3 for beta chain variable domain of TCR clone 381102 (TRBV7-6, TRBJ2-5)
CASSSGLAGVETQYF

SEQ ID NO: 762205 - protein, 14 aa, Homo sapiens
  CDR3 for alpha chain variable domain of TCR clone 381103 (TRAV23/DV6, TRAJ39)
CAANIGNAGNMPTF

SEQ ID NO: 762206 - protein, 12 aa, Homo sapiens
  CDR3 for beta chain variable domain of TCR clone 381103 (TRBV20-1, TRBJ2-5)
CSVGTGSETQYF

SEQ ID NO: 762207 - protein, 14 aa, Homo sapiens
  CDR3 for alpha chain variable domain of TCR clone 381104 (TRAV1-2, TRAJ16)
CAVNRFSDGQKLLF

SEQ ID NO: 762208 - protein, 14 aa, Homo sapiens
  CDR3 for beta chain variable domain of TCR clone 381104 (TRBV4-1, TRBJ2-2)
CASSQAVNAGKLFF

SEQ ID NO: 762209 - protein, 13 aa, Homo sapiens
  CDR3 for alpha chain variable domain of TCR clone 381105 (TRAV13-1, TRAJ36)
CAASNSGANNLFF

SEQ ID NO: 762210 - protein, 15 aa, Homo sapiens
  CDR3 for beta chain variable domain of TCR clone 381105 (TRBV12-4, TRBJ1-1)
CASSLAVSRGAEAFF

SEQ ID NO: 762211 - protein, 12 aa, Homo sapiens
  CDR3 for alpha chain variable domain of TCR clone 381106 (TRAV8-3, TRAJ20)
CAVGANDYKLSF

SEQ ID NO: 762212 - protein, 15 aa, Homo sapiens
  CDR3 for beta chain variable domain of TCR clone 381106 (TRBV20-1, TRBJ2-5)
CSAEGTGGLQETQYF

SEQ ID NO: 762213 - protein, 11 aa, Homo sapiens
  CDR3 for alpha chain variable domain of TCR clone 381107 (TRAV1-1, TRAJ23)
CAVRQGGKLIF

SEQ ID NO: 762214 - protein, 17 aa, Homo sapiens
  CDR3 for beta chain variable domain of TCR clone 381107 (TRBV7-3, TRBJ2-5)
CASSLGSGRSGSETQYF

SEQ ID NO: 762215 - protein, 13 aa, Homo sapiens
  CDR3 for alpha chain variable domain of TCR clone 381108 (TRAV8-4, TRAJ40)
CAVSEGGTYKYIF

SEQ ID NO: 762216 - protein, 13 aa, Homo sapiens
  CDR3 for beta chain variable domain of TCR clone 381108 (TRBV20-1, TRBJ1-5)
CSAPGGPKQPQHF

SEQ ID NO: 762217 - protein, 12 aa, Homo sapiens
  CDR3 for alpha chain variable domain of TCR clone 381109 (TRAV36/DV7, TRAJ54)
CAVVRGAQKLVF

SEQ ID NO: 762218 - protein, 13 aa, Homo sapiens
  CDR3 for beta chain variable domain of TCR clone 381109 (TRBV7-6, TRBJ2-3)
CASSLRSDNTQYF

SEQ ID NO: 762219 - protein, 10 aa, Homo sapiens
  CDR3 for alpha chain variable domain of TCR clone 381110 (TRAV8-4, TRAJ39)
CAVAGNMLTF

SEQ ID NO: 762220 - protein, 17 aa, Homo sapiens
  CDR3 for beta chain variable domain of TCR clone 381110 (TRBV19, TRBJ2-7)
CASSISFYDSYPYEQYF

SEQ ID NO: 762221 - protein, 16 aa, Homo sapiens
  CDR3 for alpha chain variable domain of TCR clone 381111 (TRAV3, TRAJ37)
CAVRPHGSGNTGKLTF

SEQ ID NO: 762222 - protein, 15 aa, Homo sapiens
  CDR3 for beta chain variable domain of TCR clone 381111 (TRBV10-3, TRBJ2-3)
FAISLTSGGTDTQYF

SEQ ID NO: 762223 - protein, 13 aa, Homo sapiens
  CDR3 for alpha chain variable domain of TCR clone 381112 (TRAV21, TRAJ15)
CAVANQAGTALIF

SEQ ID NO: 762224 - protein, 13 aa, Homo sapiens
  CDR3 for beta chain variable domain of TCR clone 381112 (TRBV12-4, TRBJ1-5)
CASSPDRAQPQHF

SEQ ID NO: 762225 - protein, 14 aa, Homo sapiens
  CDR3 for alpha chain variable domain of TCR clone 381113 (TRAV1-2, TRAJ8)
CAVREDTGFQKLVF

SEQ ID NO: 762226 - protein, 17 aa, Homo sapiens
  CDR3 for beta chain variable domain of TCR clone 381113 (TRBV11-2, TRBJ2-1)
CASSLYPPGVEYKEQFF

SEQ ID NO: 762227 - protein, 14 aa, Homo sapiens
  CDR3 for alpha chain variable domain of TCR clone 381114 (TRAV1-2, TRAJ28)
CAVPSGAGSYQLTF

SEQ ID NO: 762228 - protein, 11 aa, Homo sapiens
  CDR3 for beta chain variable domain of TCR clone 381114 (TRBV20-1, TRBJ1-2)
QCSTRQGPDTF

SEQ ID NO: 762229 - protein, 13 aa, Homo sapiens
  CDR3 for alpha chain variable domain of TCR clone 381115 (TRAV1-2, TRAJ20)
CAVRDGNDYKLSF

SEQ ID NO: 762230 - protein, 14 aa, Homo sapiens
  CDR3 for beta chain variable domain of TCR clone 381115 (TRBV7-2, TRBJ2-3)
CQQLRGEGRDTQYF

SEQ ID NO: 762231 - protein, 16 aa, Homo sapiens
  CDR3 for alpha chain variable domain of TCR clone 381116 (TRAV30, TRAJ24)
CGTEIVDADSWGKFQF

SEQ ID NO: 762232 - protein, 15 aa, Homo sapiens
  CDR3 for beta chain variable domain of TCR clone 381116 (TRBV5-1, TRBJ2-5)
CASSRLGTVQETQYF

SEQ ID NO: 762233 - protein, 11 aa, Homo sapiens
  CDR3 for alpha chain variable domain of TCR clone 381117 (TRAV1-1, TRAJ22)
CLEGFCKATDL

SEQ ID NO: 762234 - protein, 14 aa, Homo sapiens
  CDR3 for beta chain variable domain of TCR clone 381117 (TRBV27, TRBJ2-7)
CASSLAGLSSEQYF

SEQ ID NO: 762235 - protein, 13 aa, Homo sapiens
  CDR3 for alpha chain variable domain of TCR clone 381118 (TRAV36/DV7, TRAJ7)
CAGTRYGNYRLAF

SEQ ID NO: 762236 - protein, 15 aa, Homo sapiens
  CDR3 for beta chain variable domain of TCR clone 381118 (TRBV11-3, TRBJ2-7)
CASSPGPASSYEQYF

SEQ ID NO: 762237 - protein, 17 aa, Homo sapiens
  CDR3 for alpha chain variable domain of TCR clone 381119 (TRAV2, TRAJ22)
ILQVREADAAEQRQLTF

SEQ ID NO: 762238 - protein, 15 aa, Homo sapiens
  CDR3 for beta chain variable domain of TCR clone 381119 (TRBV20-1, TRBJ1-1)
CSASRGVTGNTEAFF

SEQ ID NO: 762239 - protein, 15 aa, Homo sapiens
  CDR3 for alpha chain variable domain of TCR clone 381120 (TRAV26-1, TRAJ29)
CIVRVEGSGNTHLAF

SEQ ID NO: 762240 - protein, 15 aa, Homo sapiens
  CDR3 for beta chain variable domain of TCR clone 381120 (TRBV7-9, TRBJ1-5)
CASSQGHQPNQPQHF

SEQ ID NO: 762241 - protein, 13 aa, Homo sapiens
  CDR3 for alpha chain variable domain of TCR clone 381121 (TRAV8-6, TRAJ24)
CAVSSDSWGKLQF

SEQ ID NO: 762242 - protein, 16 aa, Homo sapiens
  CDR3 for beta chain variable domain of TCR clone 381121 (TRBV28, TRBJ2-7)
CASSLFFETGGPEQYF

SEQ ID NO: 762243 - protein, 13 aa, Homo sapiens
  CDR3 for alpha chain variable domain of TCR clone 381122 (TRAV21, TRAJ57)
CAVTQGGSEKLVF

SEQ ID NO: 762244 - protein, 15 aa, Homo sapiens
  CDR3 for beta chain variable domain of TCR clone 381122 (TRBV28, TRBJ2-5)
CASSPPWSYQETQYF

SEQ ID NO: 762245 - protein, 14 aa, Homo sapiens
  CDR3 for alpha chain variable domain of TCR clone 381123 (TRAV17, TRAJ34)
CATDSLEGTDKLIF

SEQ ID NO: 762246 - protein, 12 aa, Homo sapiens
  CDR3 for beta chain variable domain of TCR clone 381123 (TRBV11-2, TRBJ2-2)
CASSLPTGELFF

SEQ ID NO: 762247 - protein, 13 aa, Homo sapiens
  CDR3 for alpha chain variable domain of TCR clone 381124 (TRAV35, TRAJ20)
CAGPLSNDYKLSF

SEQ ID NO: 762248 - protein, 19 aa, Homo sapiens
  CDR3 for beta chain variable domain of TCR clone 381124 (TRBV29-1, TRBJ2-7)
SAALKSWGLAGATSSTSGR

SEQ ID NO: 762249 - protein, 14 aa, Homo sapiens
  CDR3 for alpha chain variable domain of TCR clone 381125 (TRAV3, TRAJ21)
CAVQSQANFNKFYF

SEQ ID NO: 762250 - protein, 12 aa, Homo sapiens
  CDR3 for beta chain variable domain of TCR clone 381125 (TRBV6-3, TRBJ2-7)
CASSLTPYEQYF

SEQ ID NO: 762251 - protein, 13 aa, Homo sapiens
  CDR3 for alpha chain variable domain of TCR clone 381126 (TRAV1-2, TRAJ9)
CSVLNTGGFKTIF

SEQ ID NO: 762252 - protein, 14 aa, Homo sapiens
  CDR3 for beta chain variable domain of TCR clone 381126 (TRBV5-1, TRBJ2-2)
CASSLGGGSGELFF

SEQ ID NO: 762253 - protein, 11 aa, Homo sapiens
  CDR3 for alpha chain variable domain of TCR clone 381127 (TRAV12-2, TRAJ31)
CAILINARLMF

SEQ ID NO: 762254 - protein, 16 aa, Homo sapiens
  CDR3 for beta chain variable domain of TCR clone 381127 (TRBV13, TRBJ2-2)
CASSPRTGEHTGELFF

SEQ ID NO: 762255 - protein, 19 aa, Homo sapiens
  CDR3 for alpha chain variable domain of TCR clone 381128 (TRAV17, TRAJ52)
CATATSAGAGGTSYGKLTF

SEQ ID NO: 762256 - protein, 13 aa, Homo sapiens
  CDR3 for beta chain variable domain of TCR clone 381128 (TRBV3-1, TRBJ1-2)
CASSQIQGHGYTF

SEQ ID NO: 762257 - protein, 14 aa, Homo sapiens
  CDR3 for alpha chain variable domain of TCR clone 381129 (TRAV1-2, TRAJ16)
CAVNRFSDGQKLLF

SEQ ID NO: 762258 - protein, 13 aa, Homo sapiens
  CDR3 for beta chain variable domain of TCR clone 381129 (TRBV9, TRBJ2-7)
CASSVAEYYEQYF

SEQ ID NO: 762259 - protein, 13 aa, Homo sapiens
  CDR3 for alpha chain variable domain of TCR clone 381130 (TRAV2, TRAJ40)
CAVVTSGTYKYSF

SEQ ID NO: 762260 - protein, 16 aa, Homo sapiens
  CDR3 for beta chain variable domain of TCR clone 381130 (TRBV7-9, TRBJ1-3)
CASSLGAGSSGNTIYF

SEQ ID NO: 762261 - protein, 18 aa, Homo sapiens
  CDR3 for alpha chain variable domain of TCR clone 381131 (TRAV21, TRAJ52)
CAVRRSPAGGTSYGKLTF

SEQ ID NO: 762262 - protein, 19 aa, Homo sapiens
  CDR3 for beta chain variable domain of TCR clone 381131 (TRBV12-3, TRBJ2-1)
CASTLAFDPRDKEANEQFF

SEQ ID NO: 762263 - protein, 15 aa, Homo sapiens
  CDR3 for alpha chain variable domain of TCR clone 381132 (TRAV8-3, TRAJ11)
CAVGLLNSGYSTLTF

SEQ ID NO: 762264 - protein, 23 aa, Homo sapiens
  CDR3 for beta chain variable domain of TCR clone 381132 (TRBV7-9, TRBJ1-2)
EAQLEKTRLLSDRFSSGEDGYTF

SEQ ID NO: 762265 - protein, 13 aa, Homo sapiens
  CDR3 for alpha chain variable domain of TCR clone 381133 (TRAV8-6, TRAJ21)
CAVSPSYLNNFYF

SEQ ID NO: 762266 - protein, 14 aa, Homo sapiens
  CDR3 for beta chain variable domain of TCR clone 381133 (TRBV7-9, TRBJ2-5)
CASSLDTAQETQYF

SEQ ID NO: 762267 - protein, 12 aa, Homo sapiens
  CDR3 for alpha chain variable domain of TCR clone 381134 (TRAV3, TRAJ20)
CAVRVPDYKLSF

SEQ ID NO: 762268 - protein, 14 aa, Homo sapiens
  CDR3 for beta chain variable domain of TCR clone 381134 (TRBV4-2, TRBJ2-1)
CASGPDRAYNEQFF

SEQ ID NO: 762269 - protein, 13 aa, Homo sapiens
  CDR3 for alpha chain variable domain of TCR clone 381135 (TRAV2, TRAJ10)
CAVETGGGNKLTF

SEQ ID NO: 762270 - protein, 14 aa, Homo sapiens
  CDR3 for beta chain variable domain of TCR clone 381135 (TRBV20-1, TRBJ2-3)
CSAGGMRGTDTQYF

SEQ ID NO: 762271 - protein, 13 aa, Homo sapiens
  CDR3 for alpha chain variable domain of TCR clone 381136 (TRAV35, TRAJ32)
CAGVGGATNKLIF

SEQ ID NO: 762272 - protein, 14 aa, Homo sapiens
  CDR3 for beta chain variable domain of TCR clone 381136 (TRBV20-1, TRBJ1-1)
CSAQTRIGGTEAFF

SEQ ID NO: 762273 - protein, 15 aa, Homo sapiens
  CDR3 for alpha chain variable domain of TCR clone 381137 (TRAV8-1, TRAJ6)
CAVNTSPGRSYIPTF

SEQ ID NO: 762274 - protein, 15 aa, Homo sapiens
  CDR3 for beta chain variable domain of TCR clone 381137 (TRBV11-2, TRBJ2-2)
CASSSDRVNAGELFF

SEQ ID NO: 762275 - protein, 14 aa, Homo sapiens
  CDR3 for alpha chain variable domain of TCR clone 381138 (TRAV21, TRAJ45)
CAVSSGGGADGLTF

SEQ ID NO: 762276 - protein, 15 aa, Homo sapiens
  CDR3 for beta chain variable domain of TCR clone 381138 (TRBV6-3, TRBJ2-7)
CASSSPGTVFYEQYF

SEQ ID NO: 762277 - protein, 15 aa, Homo sapiens
  CDR3 for alpha chain variable domain of TCR clone 381139 (TRAV8-2, TRAJ40)
CGVLGTTSGTYKYIF

SEQ ID NO: 762278 - protein, 14 aa, Homo sapiens
  CDR3 for beta chain variable domain of TCR clone 381139 (TRBV25-1, TRBJ1-1)
CASTHLGGNTEAFF

SEQ ID NO: 762279 - protein, 14 aa, Homo sapiens
  CDR3 for alpha chain variable domain of TCR clone 381140 (TRAV9-2, TRAJ39)
CALYIYNAGNMLTF

SEQ ID NO: 762280 - protein, 14 aa, Homo sapiens
  CDR3 for beta chain variable domain of TCR clone 381140 (TRBV12-5, TRBJ2-5)
CASGSRTHQEAQYF

SEQ ID NO: 762281 - protein, 14 aa, Homo sapiens
  CDR3 for alpha chain variable domain of TCR clone 381141 (TRAV16, TRAJ57)
CALSGQGGSEKLVF

SEQ ID NO: 762282 - protein, 13 aa, Homo sapiens
  CDR3 for beta chain variable domain of TCR clone 381141 (TRBV5-4, TRBJ2-1)
CASSLQGTREQFF

SEQ ID NO: 762283 - protein, 14 aa, Homo sapiens
  CDR3 for alpha chain variable domain of TCR clone 381142 (TRAV35, TRAJ33)
CAGSSQDSNYQLIW

SEQ ID NO: 762284 - protein, 14 aa, Homo sapiens
  CDR3 for beta chain variable domain of TCR clone 381142 (TRBV6-1, TRBJ1-3)
CASVQGGGGNTIYF

SEQ ID NO: 762285 - protein, 16 aa, Homo sapiens
  CDR3 for alpha chain variable domain of TCR clone 381143 (TRAV16, TRAJ4)
CALSRMFSGGYNNLIF

SEQ ID NO: 762286 - protein, 17 aa, Homo sapiens
  CDR3 for beta chain variable domain of TCR clone 381143 (TRBV15, TRBJ2-1)
CATSRDRGGRGVGEQFF

SEQ ID NO: 762287 - protein, 10 aa, Homo sapiens
  CDR3 for alpha chain variable domain of TCR clone 381144 (TRAV20, TRAJ22)
CAAPARQLTF

SEQ ID NO: 762288 - protein, 14 aa, Homo sapiens
  CDR3 for beta chain variable domain of TCR clone 381144 (TRBV19, TRBJ2-1)
CASSRGSGATEQFF

SEQ ID NO: 762289 - protein, 13 aa, Homo sapiens
  CDR3 for alpha chain variable domain of TCR clone 381145 (TRAV17, TRAJ5)
CAPMDTGRRALTF

SEQ ID NO: 762290 - protein, 18 aa, Homo sapiens
  CDR3 for beta chain variable domain of TCR clone 381145 (TRBV28, TRBJ2-1)
CASSSTSGRANSYNEQFF

SEQ ID NO: 762291 - protein, 13 aa, Homo sapiens
  CDR3 for alpha chain variable domain of TCR clone 381146 (TRAV8-6, TRAJ49)
CAVITNTGNQFYF

SEQ ID NO: 762292 - protein, 14 aa, Homo sapiens
  CDR3 for beta chain variable domain of TCR clone 381146 (TRBV5-1, TRBJ2-7)
CASSRGESLYEQYI

SEQ ID NO: 762293 - protein, 14 aa, Homo sapiens
  CDR3 for alpha chain variable domain of TCR clone 381147 (TRAV23/DV6, TRAJ24)
CAASLSDSWGKLQF

SEQ ID NO: 762294 - protein, 14 aa, Homo sapiens
  CDR3 for beta chain variable domain of TCR clone 381147 (TRBV19, TRBJ2-1)
CASPIFVLSGEQFF

SEQ ID NO: 762295 - protein, 11 aa, Homo sapiens
  CDR3 for alpha chain variable domain of TCR clone 381148 (TRAV21, TRAJ34)
CAVTNTDKLIF

SEQ ID NO: 762296 - protein, 15 aa, Homo sapiens
  CDR3 for beta chain variable domain of TCR clone 381148 (TRBV2, TRBJ2-1)
CASSEEREGDNEQFF

SEQ ID NO: 762297 - protein, 14 aa, Homo sapiens
  CDR3 for alpha chain variable domain of TCR clone 381149 (TRAV16, TRAJ16)
FALSVLSDGQKLLF

SEQ ID NO: 762298 - protein, 12 aa, Homo sapiens
  CDR3 for beta chain variable domain of TCR clone 381149 (TRBV5-5, TRBJ1-2)
CAGSALNYGYTF

SEQ ID NO: 762299 - protein, 12 aa, Homo sapiens
  CDR3 for alpha chain variable domain of TCR clone 381150 (TRAV20, TRAJ54)
CAVQEGAQKLVF

SEQ ID NO: 762300 - protein, 16 aa, Homo sapiens
  CDR3 for beta chain variable domain of TCR clone 381150 (TRBV13, TRBJ2-3)
CQQPRQGSGGRNTQYF

SEQ ID NO: 762301 - protein, 14 aa, Homo sapiens
  CDR3 for alpha chain variable domain of TCR clone 381151 (TRAV20, TRAJ56)
CAAQFGGTNSKLTF

SEQ ID NO: 762302 - protein, 14 aa, Homo sapiens
  CDR3 for beta chain variable domain of TCR clone 381151 (TRBV20-1, TRBJ2-7)
CSAKRGRSSYEQYF

SEQ ID NO: 762303 - protein, 13 aa, Homo sapiens
  CDR3 for alpha chain variable domain of TCR clone 381152 (TRAV8-3, TRAJ43)
CAVGPDDNNDMLF

SEQ ID NO: 762304 - protein, 12 aa, Homo sapiens
  CDR3 for beta chain variable domain of TCR clone 381152 (TRBV7-2, TRBJ1-6)
CASSLSSSPLHF

SEQ ID NO: 762305 - protein, 17 aa, Homo sapiens
  CDR3 for alpha chain variable domain of TCR clone 381153 (TRAV23/DV6, TRAJ57)
CAASSTLSQGGSEKLVL

SEQ ID NO: 762306 - protein, 14 aa, Homo sapiens
  CDR3 for beta chain variable domain of TCR clone 381153 (TRBV25-1, TRBJ1-1)
CASTRLGGNTEAFF

SEQ ID NO: 762307 - protein, 17 aa, Homo sapiens
  CDR3 for alpha chain variable domain of TCR clone 381154 (TRAV3, TRAJ6)
CAVRDGPRAGGSYIPTF

SEQ ID NO: 762308 - protein, 12 aa, Homo sapiens
  CDR3 for beta chain variable domain of TCR clone 381154 (TRBV5-7, TRBJ1-1)
CARSLGDTEAFF

SEQ ID NO: 762309 - protein, 16 aa, Homo sapiens
  CDR3 for alpha chain variable domain of TCR clone 381155 (TRAV23/DV6, TRAJ3)
CAARAPQPCFQDNLWI

SEQ ID NO: 762310 - protein, 17 aa, Homo sapiens
  CDR3 for beta chain variable domain of TCR clone 381155 (TRBV7-9, TRBJ2-3)
CASSPTVAGDLTDTQYF

SEQ ID NO: 762311 - protein, 12 aa, Homo sapiens
  CDR3 for alpha chain variable domain of TCR clone 381156 (TRAV13-1, TRAJ21)
CAAKEGFNKFYF

SEQ ID NO: 762312 - protein, 13 aa, Homo sapiens
  CDR3 for beta chain variable domain of TCR clone 381156 (TRBV19, TRBJ1-2)
CASSVSGQDGYTF

SEQ ID NO: 762313 - protein, 14 aa, Homo sapiens
  CDR3 for alpha chain variable domain of TCR clone 381157 (TRAV38-1, TRAJ54)
CAFMSPSGAQKLEF

SEQ ID NO: 762314 - protein, 16 aa, Homo sapiens
  CDR3 for beta chain variable domain of TCR clone 381157 (TRBV28, TRBJ2-1)
CASSLGGSGSYNEQFF

SEQ ID NO: 762315 - protein, 16 aa, Homo sapiens
  CDR3 for alpha chain variable domain of TCR clone 381158 (TRAV20, TRAJ53)
CAVQGNSGGSNYKLTF

SEQ ID NO: 762316 - protein, 14 aa, Homo sapiens
  CDR3 for beta chain variable domain of TCR clone 381158 (TRBV6-1, TRBJ1-3)
CASVQGGGGNTIYF

SEQ ID NO: 762317 - protein, 11 aa, Homo sapiens
  CDR3 for alpha chain variable domain of TCR clone 381159 (TRAV12-3, TRAJ27)
CAMANAGKSTF

SEQ ID NO: 762318 - protein, 12 aa, Homo sapiens
  CDR3 for beta chain variable domain of TCR clone 381159 (TRBV7-2, TRBJ2-5)
CASSQYQETQYF

SEQ ID NO: 762319 - protein, 11 aa, Homo sapiens
  CDR3 for alpha chain variable domain of TCR clone 381160 (TRAV17, TRAJ43)
CATPRSNDMRF

SEQ ID NO: 762320 - protein, 14 aa, Homo sapiens
  CDR3 for beta chain variable domain of TCR clone 381160 (TRBV11-2, TRBJ2-1)
CQQLGTSGLNEQFF

SEQ ID NO: 762321 - protein, 16 aa, Homo sapiens
  CDR3 for alpha chain variable domain of TCR clone 381161 (TRAV12-2, TRAJ28)
CAVITDSGAGSYQLTF

SEQ ID NO: 762322 - protein, 13 aa, Homo sapiens
  CDR3 for beta chain variable domain of TCR clone 381161 (TRBV19, TRBJ2-1)
CATSRGVYNEQFF

SEQ ID NO: 762323 - protein, 14 aa, Homo sapiens
  CDR3 for alpha chain variable domain of TCR clone 381162 (TRAV23/DV6, TRAJ40)
CAARNNSGTYKYIF

SEQ ID NO: 762324 - protein, 14 aa, Homo sapiens
  CDR3 for beta chain variable domain of TCR clone 381162 (TRBV10-3, TRBJ2-5)
CAISERDYQETQYF

SEQ ID NO: 762325 - protein, 17 aa, Homo sapiens
  CDR3 for alpha chain variable domain of TCR clone 381163 (TRAV3, TRAJ6)
CAVRDGPRAGGGYKPTF

SEQ ID NO: 762326 - protein, 14 aa, Homo sapiens
  CDR3 for beta chain variable domain of TCR clone 381163 (TRBV7-2, TRBJ2-7)
CASSPKTSFYEQYF

SEQ ID NO: 762327 - protein, 12 aa, Homo sapiens
  CDR3 for alpha chain variable domain of TCR clone 381164 (TRAV12-1, TRAJ40)
CVVYSGTYKYIF

SEQ ID NO: 762328 - protein, 15 aa, Homo sapiens
  CDR3 for beta chain variable domain of TCR clone 381164 (TRBV7-9, TRBJ1-6)
CASSSPGRGNPPLHF

SEQ ID NO: 762329 - protein, 11 aa, Homo sapiens
  CDR3 for alpha chain variable domain of TCR clone 381165 (TRAV35, TRAJ30)
CAGPGDDKIIF

SEQ ID NO: 762330 - protein, 17 aa, Homo sapiens
  CDR3 for beta chain variable domain of TCR clone 381165 (TRBV7-8, TRBJ2-6)
CASSAGTGGAGANVLTF

SEQ ID NO: 762331 - protein, 16 aa, Homo sapiens
  CDR3 for alpha chain variable domain of TCR clone 381166 (TRAV12-3, TRAJ53)
CAMSPGGGGSNYKLPF

SEQ ID NO: 762332 - protein, 11 aa, Homo sapiens
  CDR3 for beta chain variable domain of TCR clone 381166 (TRBV29-1, TRBJ2-5)
CSEDRTGTQYF

SEQ ID NO: 762333 - protein, 12 aa, Homo sapiens
  CDR3 for alpha chain variable domain of TCR clone 381167 (TRAV3, TRAJ17)
CAMTLTGNKLTF

SEQ ID NO: 762334 - protein, 15 aa, Homo sapiens
  CDR3 for beta chain variable domain of TCR clone 381167 (TRBV20-1, TRBJ2-7)
CSARDRVSGMDEQYF

SEQ ID NO: 762335 - protein, 14 aa, Homo sapiens
  CDR3 for alpha chain variable domain of TCR clone 381168 (TRAV9-2, TRAJ39)
CALYIYNAGNMLTF

SEQ ID NO: 762336 - protein, 11 aa, Homo sapiens
  CDR3 for beta chain variable domain of TCR clone 381168 (TRBV6-3, TRBJ2-7)
CASSFSYEQYF

SEQ ID NO: 762337 - protein, 15 aa, Homo sapiens
  CDR3 for alpha chain variable domain of TCR clone 381169 (TRAV8-3, TRAJ11)
CAVGLLNSGYSTLTF

SEQ ID NO: 762338 - protein, 13 aa, Homo sapiens
  CDR3 for beta chain variable domain of TCR clone 381169 (TRBV6-3, TRBJ2-7)
CASTRDLPYEQYF

SEQ ID NO: 762339 - protein, 13 aa, Homo sapiens
  CDR3 for alpha chain variable domain of TCR clone 381170 (TRAV1-1, TRAJ16)
CAVMFSDGQKLLF

SEQ ID NO: 762340 - protein, 13 aa, Homo sapiens
  CDR3 for beta chain variable domain of TCR clone 381170 (TRBV5-1, TRBJ2-1)
CASSSEGFEEQFF

SEQ ID NO: 762341 - protein, 11 aa, Homo sapiens
  CDR3 for alpha chain variable domain of TCR clone 381171 (TRAV12-2, TRAJ49)
CALQGGNQFYF

SEQ ID NO: 762342 - protein, 15 aa, Homo sapiens
  CDR3 for beta chain variable domain of TCR clone 381171 (TRBV3-1, TRBJ2-7)
CASSQVRQGAYEQYF

SEQ ID NO: 762343 - protein, 18 aa, Homo sapiens
  CDR3 for alpha chain variable domain of TCR clone 381172 (TRAV12-3, TRAJ52)
CAMTRTNSGGTSYGKLTF

SEQ ID NO: 762344 - protein, 17 aa, Homo sapiens
  CDR3 for beta chain variable domain of TCR clone 381172 (TRBV7-3, TRBJ2-3)
CASSLMKRMRGADTQYF

SEQ ID NO: 762345 - protein, 13 aa, Homo sapiens
  CDR3 for alpha chain variable domain of TCR clone 381173 (TRAV39, TRAJ58)
CAGEETRGSRLTF

SEQ ID NO: 762346 - protein, 15 aa, Homo sapiens
  CDR3 for beta chain variable domain of TCR clone 381173 (TRBV20-1, TRBJ2-7)
CSARDRVSGMDEQYF

SEQ ID NO: 762347 - protein, 14 aa, Homo sapiens
  CDR3 for alpha chain variable domain of TCR clone 381174 (TRAV12-2, TRAJ13)
CAVKKTGGYQKVTF

SEQ ID NO: 762348 - protein, 14 aa, Homo sapiens
  CDR3 for beta chain variable domain of TCR clone 381174 (TRBV4-1, TRBJ1-6)
CASSPGSDSSPLHF

SEQ ID NO: 762349 - protein, 14 aa, Homo sapiens
  CDR3 for alpha chain variable domain of TCR clone 381175 (TRAV39, TRAJ54)
CAVVLIHGAQKLVF

SEQ ID NO: 762350 - protein, 13 aa, Homo sapiens
  CDR3 for beta chain variable domain of TCR clone 381175 (TRBV29-1, TRBJ2-5)
GSVGGTSAETQYF

SEQ ID NO: 762351 - protein, 15 aa, Homo sapiens
  CDR3 for alpha chain variable domain of TCR clone 381176 (TRAV2, TRAJ15)
CAVEDQGQAGTALIF

SEQ ID NO: 762352 - protein, 17 aa, Homo sapiens
  CDR3 for beta chain variable domain of TCR clone 381176 (TRBV5-4, TRBJ2-1)
CASSSAGGRGPYNEQFF

SEQ ID NO: 762353 - protein, 15 aa, Homo sapiens
  CDR3 for alpha chain variable domain of TCR clone 381177 (TRAV8-4, TRAJ53)
CAVSDGGGSNYKLTF

SEQ ID NO: 762354 - protein, 17 aa, Homo sapiens
  CDR3 for beta chain variable domain of TCR clone 381177 (TRBV11-2, TRBJ2-1)
CASSLYPPGVEYNEQFF

SEQ ID NO: 762355 - protein, 14 aa, Homo sapiens
  CDR3 for alpha chain variable domain of TCR clone 381178 (TRAV12-2, TRAJ5)
CAVNRSTGRRARTF

SEQ ID NO: 762356 - protein, 12 aa, Homo sapiens
  CDR3 for beta chain variable domain of TCR clone 381178 (TRBV19, TRBJ1-5)
CASSIAQQPQHF

SEQ ID NO: 762357 - protein, 15 aa, Homo sapiens
  CDR3 for alpha chain variable domain of TCR clone 381179 (TRAV8-1, TRAJ6)
CAVNTPPGGSYIPTF

SEQ ID NO: 762358 - protein, 15 aa, Homo sapiens
  CDR3 for beta chain variable domain of TCR clone 381179 (TRBV11-2, TRBJ2-2)
CASSSDRVNAGELFC

SEQ ID NO: 762359 - protein, 13 aa, Homo sapiens
  CDR3 for alpha chain variable domain of TCR clone 381180 (TRAV12-2, TRAJ12)
CAVNWDSSYKLIF

SEQ ID NO: 762360 - protein, 14 aa, Homo sapiens
  CDR3 for beta chain variable domain of TCR clone 381180 (TRBV12-5, TRBJ2-5)
CASGSRTHQETQYF

SEQ ID NO: 762361 - protein, 14 aa, Homo sapiens
  CDR3 for alpha chain variable domain of TCR clone 381181 (TRAV2, TRAJ22)
CAVEVKRAGRQLTF

SEQ ID NO: 762362 - protein, 14 aa, Homo sapiens
  CDR3 for beta chain variable domain of TCR clone 381181 (TRBV19, TRBJ2-2)
CASTPGYSGGELFF

SEQ ID NO: 762363 - protein, 13 aa, Homo sapiens
  CDR3 for alpha chain variable domain of TCR clone 381182 (TRAV17, TRAJ7)
CATDNYGNNRLAF

SEQ ID NO: 762364 - protein, 12 aa, Homo sapiens
  CDR3 for beta chain variable domain of TCR clone 381182 (TRBV12-4, TRBJ2-7)
CASSLGGYEQYF

SEQ ID NO: 762365 - protein, 16 aa, Homo sapiens
  CDR3 for alpha chain variable domain of TCR clone 381183 (TRAV3, TRAJ37)
CAVRPHGSGNTGKLIF

SEQ ID NO: 762366 - protein, 11 aa, Homo sapiens
  CDR3 for beta chain variable domain of TCR clone 381183 (TRBV10-3, TRBJ2-7)
WAISEGLEQYF

SEQ ID NO: 762367 - protein, 13 aa, Homo sapiens
  CDR3 for alpha chain variable domain of TCR clone 381184 (TRAV8-2, TRAJ49)
CVVTPNTGNQFYF

SEQ ID NO: 762368 - protein, 15 aa, Homo sapiens
  CDR3 for beta chain variable domain of TCR clone 381184 (TRBV11-2, TRBJ2-5)
CASSLTSGGYNEQFF

SEQ ID NO: 762369 - protein, 16 aa, Homo sapiens
  CDR3 for alpha chain variable domain of TCR clone 381185 (TRAV30, TRAJ24)
CGTEIVDADSWGKFQF

SEQ ID NO: 762370 - protein, 18 aa, Homo sapiens
  CDR3 for beta chain variable domain of TCR clone 381185 (TRBV10-2, TRBJ2-2)
CISAQAVHRQADAGELFF

SEQ ID NO: 762371 - protein, 16 aa, Homo sapiens
  CDR3 for alpha chain variable domain of TCR clone 381186 (TRAV17, TRAJ35)
CATDEGGIGFGNVLHC

SEQ ID NO: 762372 - protein, 16 aa, Homo sapiens
  CDR3 for beta chain variable domain of TCR clone 381186 (TRBV6-5, TRBJ2-7)
CASSSDPTSGFYEQYF

SEQ ID NO: 762373 - protein, 14 aa, Homo sapiens
  CDR3 for alpha chain variable domain of TCR clone 381187 (TRAV8-1, TRAJ34)
CAVITTYNTEKLIF

SEQ ID NO: 762374 - protein, 14 aa, Homo sapiens
  CDR3 for beta chain variable domain of TCR clone 381187 (TRBV11-3, TRBJ1-3)
CASSHNGQGNTIYF

SEQ ID NO: 762375 - protein, 16 aa, Homo sapiens
  CDR3 for alpha chain variable domain of TCR clone 381188 (TRAV17, TRAJ22)
CATCPISSGSARQLTF

SEQ ID NO: 762376 - protein, 13 aa, Homo sapiens
  CDR3 for beta chain variable domain of TCR clone 381188 (TRBV11-2, TRBJ2-1)
CASSLGLAGGRFF

SEQ ID NO: 762377 - protein, 13 aa, Homo sapiens
  CDR3 for alpha chain variable domain of TCR clone 381189 (TRAV35, TRAJ42)
CAGFPGSQGDLIF

SEQ ID NO: 762378 - protein, 14 aa, Homo sapiens
  CDR3 for beta chain variable domain of TCR clone 381189 (TRBV4-1, TRBJ2-2)
CASSQAVNTGEPFF

SEQ ID NO: 762379 - protein, 15 aa, Homo sapiens
  CDR3 for alpha chain variable domain of TCR clone 381190 (TRAV17, TRAJ56)
CATDANTGANSKLTF

SEQ ID NO: 762380 - protein, 15 aa, Homo sapiens
  CDR3 for beta chain variable domain of TCR clone 381190 (TRBV11-2, TRBJ1-3)
CASSLDGTVGNTIYF

SEQ ID NO: 762381 - protein, 13 aa, Homo sapiens
  CDR3 for alpha chain variable domain of TCR clone 381191 (TRAV21, TRAJ45)
CAVMGGGADGLTF

SEQ ID NO: 762382 - protein, 14 aa, Homo sapiens
  CDR3 for beta chain variable domain of TCR clone 381191 (TRBV4-3, TRBJ1-4)
CASRPLQRNEKLFF

SEQ ID NO: 762383 - protein, 11 aa, Homo sapiens
  CDR3 for alpha chain variable domain of TCR clone 381192 (TRAV12-3, TRAJ49)
CAANTGNQFNF

SEQ ID NO: 762384 - protein, 12 aa, Homo sapiens
  CDR3 for beta chain variable domain of TCR clone 381192 (TRBV6-3, TRBJ2-7)
CASSEPGCEQYF

SEQ ID NO: 762385 - protein, 15 aa, Homo sapiens
  CDR3 for alpha chain variable domain of TCR clone 381193 (TRAV13-1, TRAJ44)
CAASRNTGTSSKLTF

SEQ ID NO: 762386 - protein, 14 aa, Homo sapiens
  CDR3 for beta chain variable domain of TCR clone 381193 (TRBV2, TRBJ2-7)
CASSLTSGGYEQYF

SEQ ID NO: 762387 - protein, 18 aa, Homo sapiens
  CDR3 for alpha chain variable domain of TCR clone 381194 (TRAV21, TRAJ52)
CAVRPSPAGGTSYGKLTF

SEQ ID NO: 762388 - protein, 16 aa, Homo sapiens
  CDR3 for beta chain variable domain of TCR clone 381194 (TRBV5-1, TRBJ2-7)
CASSYASTSSGGEQYF

SEQ ID NO: 762389 - protein, 16 aa, Homo sapiens
  CDR3 for alpha chain variable domain of TCR clone 381195 (TRAV12-3, TRAJ53)
CAMSPGSGCSNYKLTF

SEQ ID NO: 762390 - protein, 16 aa, Homo sapiens
  CDR3 for beta chain variable domain of TCR clone 381195 (TRBV4-2, TRBJ1-1)
CASSQAGFGVNPEAFF

SEQ ID NO: 762391 - protein, 12 aa, Homo sapiens
  CDR3 for alpha chain variable domain of TCR clone 381196 (TRAV27, TRAJ34)
CAGAKNTDKLIF

SEQ ID NO: 762392 - protein, 19 aa, Homo sapiens
  CDR3 for beta chain variable domain of TCR clone 381196 (TRBV25-1, TRBJ2-2)
CAILVYRVDRGRKTGELFF

SEQ ID NO: 762393 - protein, 14 aa, Homo sapiens
  CDR3 for alpha chain variable domain of TCR clone 381197 (TRAV27, TRAJ52)
CAGAGGTSYGKLTF

SEQ ID NO: 762394 - protein, 12 aa, Homo sapiens
  CDR3 for beta chain variable domain of TCR clone 381197 (TRBV7-9, TRBJ1-4)
CASSTDREKLFF

SEQ ID NO: 762395 - protein, 14 aa, Homo sapiens
  CDR3 for alpha chain variable domain of TCR clone 381198 (TRAV9-2, TRAJ39)
CALYIYNAGNMLTF

SEQ ID NO: 762396 - protein, 13 aa, Homo sapiens
  CDR3 for beta chain variable domain of TCR clone 381198 (TRBV20-1, TRBJ1-1)
CSAGTVGNTESFF

SEQ ID NO: 762397 - protein, 11 aa, Homo sapiens
  CDR3 for alpha chain variable domain of TCR clone 381199 (TRAV27, TRAJ40)
SLPSGTYKYIF

SEQ ID NO: 762398 - protein, 12 aa, Homo sapiens
  CDR3 for beta chain variable domain of TCR clone 381199 (TRBV18, TRBJ2-3)
CQLNQNTDTQYF

SEQ ID NO: 762399 - protein, 17 aa, Homo sapiens
  CDR3 for alpha chain variable domain of TCR clone 381200 (TRAV3, TRAJ42)
CAVRDRDYGGSHGNLIF

SEQ ID NO: 762400 - protein, 13 aa, Homo sapiens
  CDR3 for beta chain variable domain of TCR clone 381200 (TRBV10-3, TRBJ2-7)
CASKLAVNYEQYF

SEQ ID NO: 762401 - protein, 16 aa, Homo sapiens
  CDR3 for alpha chain variable domain of TCR clone 381201 (TRAV26-1, TRAJ38)
CIASSNAGNNHIRTLT

SEQ ID NO: 762402 - protein, 12 aa, Homo sapiens
  CDR3 for beta chain variable domain of TCR clone 381201 (TRBV5-8, TRBJ1-2)
CASSFGVYGYTF

SEQ ID NO: 762403 - protein, 12 aa, Homo sapiens
  CDR3 for alpha chain variable domain of TCR clone 381202 (TRAV12-2, TRAJ47)
CAVAEYGNKLVC

SEQ ID NO: 762404 - protein, 14 aa, Homo sapiens
  CDR3 for beta chain variable domain of TCR clone 381202 (TRBV20-1, TRBJ1-1)
CSAMGGTANTEAFF

SEQ ID NO: 762405 - protein, 14 aa, Homo sapiens
  CDR3 for alpha chain variable domain of TCR clone 381203 (TRAV35, TRAJ33)
CAGSSQDSNYQLMW

SEQ ID NO: 762406 - protein, 15 aa, Homo sapiens
  CDR3 for beta chain variable domain of TCR clone 381203 (TRBV20-1, TRBJ2-7)
CSAESGTSGAYEQYF

SEQ ID NO: 762407 - protein, 18 aa, Homo sapiens
  CDR3 for alpha chain variable domain of TCR clone 381204 (TRAV26-1, TRAJ23)
CIVRVGLEVWNQGGKLIF

SEQ ID NO: 762408 - protein, 14 aa, Homo sapiens
  CDR3 for beta chain variable domain of TCR clone 381204 (TRBV12-5, TRBJ2-5)
CASGSRTQQETQYF

SEQ ID NO: 762409 - protein, 13 aa, Homo sapiens
  CDR3 for alpha chain variable domain of TCR clone 381205 (TRAV24, TRAJ32)
CADLGGATNKLIF

SEQ ID NO: 762410 - protein, 12 aa, Homo sapiens
  CDR3 for beta chain variable domain of TCR clone 381205 (TRBV6-3, TRBJ2-7)
CASSEPGFEQYF

SEQ ID NO: 762411 - protein, 16 aa, Homo sapiens
  CDR3 for alpha chain variable domain of TCR clone 381206 (TRAV8-3, TRAJ10)
CAVGPILTGGGNKLTF

SEQ ID NO: 762412 - protein, 16 aa, Homo sapiens
  CDR3 for beta chain variable domain of TCR clone 381206 (TRBV7-2, TRBJ2-5)
CTSSSKWLSGQETQYF

SEQ ID NO: 762413 - protein, 14 aa, Homo sapiens
  CDR3 for alpha chain variable domain of TCR clone 381207 (TRAV8-4, TRAJ29)
CAVSAVEGNTPLVF

SEQ ID NO: 762414 - protein, 13 aa, Homo sapiens
  CDR3 for beta chain variable domain of TCR clone 381207 (TRBV12-4, TRBJ2-7)
CASSAQGRYEQYF

SEQ ID NO: 762415 - protein, 16 aa, Homo sapiens
  CDR3 for alpha chain variable domain of TCR clone 381208 (TRAV16, TRAJ57)
CAPYLITQGGSEKLVF

SEQ ID NO: 762416 - protein, 16 aa, Homo sapiens
  CDR3 for beta chain variable domain of TCR clone 381208 (TRBV2, TRBJ2-5)
CASSARGLRGRETQYF

SEQ ID NO: 762417 - protein, 15 aa, Homo sapiens
  CDR3 for alpha chain variable domain of TCR clone 381209 (TRAV12-2, TRAJ43)
CAFDMRFGAGPRLPV

SEQ ID NO: 762418 - protein, 18 aa, Homo sapiens
  CDR3 for beta chain variable domain of TCR clone 381209 (TRBV20-1, TRBJ2-3)
CSASGLAGGPGTTDTQYF

SEQ ID NO: 762419 - protein, 14 aa, Homo sapiens
  CDR3 for alpha chain variable domain of TCR clone 381210 (TRAV3, TRAJ8)
CAVSRNTGFQKLVF

SEQ ID NO: 762420 - protein, 13 aa, Homo sapiens
  CDR3 for beta chain variable domain of TCR clone 381210 (TRBV7-2, TRBJ2-7)
CASSSPSGSEQYF

SEQ ID NO: 762421 - protein, 18 aa, Homo sapiens
  CDR3 for alpha chain variable domain of TCR clone 381211 (TRAV21, TRAJ52)
CAVRPSPAGGTSYGKLTF

SEQ ID NO: 762422 - protein, 13 aa, Homo sapiens
  CDR3 for beta chain variable domain of TCR clone 381211 (TRBV12-4, TRBJ1-2)
CASTMTSNYGYTF

SEQ ID NO: 762423 - protein, 19 aa, Homo sapiens
  CDR3 for alpha chain variable domain of TCR clone 381212 (TRAV2, TRAJ20)
ILQVRVADAAVYRDCKLSF

SEQ ID NO: 762424 - protein, 15 aa, Homo sapiens
  CDR3 for beta chain variable domain of TCR clone 381212 (TRBV7-2, TRBJ2-1)
CASSSGLAGGNEQFF

SEQ ID NO: 762425 - protein, 21 aa, Homo sapiens
  CDR3 for alpha chain variable domain of TCR clone 381213 (TRAV8-4, TRAJ47)
HLTKPSAHMSDAAERGNKLVF

SEQ ID NO: 762426 - protein, 18 aa, Homo sapiens
  CDR3 for beta chain variable domain of TCR clone 381213 (TRBV11-2, TRBJ2-3)
CASSLGGASRGAPNTQYF

SEQ ID NO: 762427 - protein, 14 aa, Homo sapiens
  CDR3 for alpha chain variable domain of TCR clone 381214 (TRAV12-2, TRAJ13)
CAGKKTGGYRKVTF

SEQ ID NO: 762428 - protein, 15 aa, Homo sapiens
  CDR3 for beta chain variable domain of TCR clone 381214 (TRBV27, TRBJ2-1)
CASSNGGGSSNEQFF

SEQ ID NO: 762429 - protein, 15 aa, Homo sapiens
  CDR3 for alpha chain variable domain of TCR clone 381215 (TRAV8-3, TRAJ45)
CASSYSGGGADGVTF

SEQ ID NO: 762430 - protein, 15 aa, Homo sapiens
  CDR3 for beta chain variable domain of TCR clone 381215 (TRBV27, TRBJ2-1)
CASSNGGGSSNEQFF

SEQ ID NO: 762431 - protein, 15 aa, Homo sapiens
  CDR3 for alpha chain variable domain of TCR clone 381216 (TRAV8-4, TRAJ3)
CAVTGENLVQQCFQD

SEQ ID NO: 762432 - protein, 12 aa, Homo sapiens
  CDR3 for beta chain variable domain of TCR clone 381216 (TRBV5-5, TRBJ1-2)
CASSALNYGYTF

SEQ ID NO: 762433 - protein, 14 aa, Homo sapiens
  CDR3 for alpha chain variable domain of TCR clone 381217 (TRAV12-2, TRAJ13)
CAVKKTGGYQKVTF

SEQ ID NO: 762434 - protein, 15 aa, Homo sapiens
  CDR3 for beta chain variable domain of TCR clone 381217 (TRBV24-1, TRBJ2-5)
CATSETTGAVGAQYF

SEQ ID NO: 762435 - protein, 16 aa, Homo sapiens
  CDR3 for alpha chain variable domain of TCR clone 381218 (TRAV12-2, TRAJ45)
CAVKRNPGGGADGLTF

SEQ ID NO: 762436 - protein, 13 aa, Homo sapiens
  CDR3 for beta chain variable domain of TCR clone 381218 (TRBV12-5, TRBJ2-1)
CASGLGRGNEQFF

SEQ ID NO: 762437 - protein, 12 aa, Homo sapiens
  CDR3 for alpha chain variable domain of TCR clone 381219 (TRAV23/DV6, TRAJ3)
CAARAPQQCFQD

SEQ ID NO: 762438 - protein, 17 aa, Homo sapiens
  CDR3 for beta chain variable domain of TCR clone 381219 (TRBV7-9, TRBJ2-3)
WASSPTVAGDLTDTQYF

SEQ ID NO: 762439 - protein, 15 aa, Homo sapiens
  CDR3 for alpha chain variable domain of TCR clone 381220 (TRAV26-1, TRAJ44)
CIVRIGTGTGSKLTF

SEQ ID NO: 762440 - protein, 15 aa, Homo sapiens
  CDR3 for beta chain variable domain of TCR clone 381220 (TRBV7-6, TRBJ2-1)
CASSSLAGEGNEQFF

SEQ ID NO: 762441 - protein, 15 aa, Homo sapiens
  CDR3 for alpha chain variable domain of TCR clone 381221 (TRAV8-3, TRAJ45)
CASSYSGGGADGLPF

SEQ ID NO: 762442 - protein, 14 aa, Homo sapiens
  CDR3 for beta chain variable domain of TCR clone 381221 (TRBV11-2, TRBJ2-3)
CASSRLARTDTQYF

SEQ ID NO: 762443 - protein, 16 aa, Homo sapiens
  CDR3 for alpha chain variable domain of TCR clone 381222 (TRAV1-2, TRAJ10)
CAVRGVLTGGGNKLTF

SEQ ID NO: 762444 - protein, 13 aa, Homo sapiens
  CDR3 for beta chain variable domain of TCR clone 381222 (TRBV12-5, TRBJ2-3)
CASGDRRSDTQYF

SEQ ID NO: 762445 - protein, 16 aa, Homo sapiens
  CDR3 for alpha chain variable domain of TCR clone 381223 (TRAV23/DV6, TRAJ9)
CAASIGGNTGGFKTIF

SEQ ID NO: 762446 - protein, 14 aa, Homo sapiens
  CDR3 for beta chain variable domain of TCR clone 381223 (TRBV11-3, TRBJ2-7)
CASSLGVGDYEQYF

SEQ ID NO: 762447 - protein, 14 aa, Homo sapiens
  CDR3 for alpha chain variable domain of TCR clone 381224 (TRAV8-4, TRAJ9)
CAVTFNTGGFKTIF

SEQ ID NO: 762448 - protein, 15 aa, Homo sapiens
  CDR3 for beta chain variable domain of TCR clone 381224 (TRBV7-9, TRBJ2-2)
CARSPETGAGGELFF

SEQ ID NO: 762449 - protein, 19 aa, Homo sapiens
  CDR3 for alpha chain variable domain of TCR clone 381225 (TRAV2, TRAJ20)
ILQVREADAAVYRDCKLSF

SEQ ID NO: 762450 - protein, 15 aa, Homo sapiens
  CDR3 for beta chain variable domain of TCR clone 381225 (TRBV15, TRBJ1-4)
CATSRDMGSYEKLFF

SEQ ID NO: 762451 - protein, 13 aa, Homo sapiens
  CDR3 for alpha chain variable domain of TCR clone 381226 (TRAV13-2, TRAJ13)
CAERPGGYQKVTF

SEQ ID NO: 762452 - protein, 14 aa, Homo sapiens
  CDR3 for beta chain variable domain of TCR clone 381226 (TRBV7-8, TRBJ2-3)
CASSLEAGTDTQYF

SEQ ID NO: 762453 - protein, 19 aa, Homo sapiens
  CDR3 for alpha chain variable domain of TCR clone 381227 (TRAV2, TRAJ20)
ILQVREADAAVYRDCKLSF

SEQ ID NO: 762454 - protein, 13 aa, Homo sapiens
  CDR3 for beta chain variable domain of TCR clone 381227 (TRBV7-6, TRBJ1-2)
CTSSLVADYGYTF

SEQ ID NO: 762455 - protein, 13 aa, Homo sapiens
  CDR3 for alpha chain variable domain of TCR clone 381228 (TRAV25, TRAJ47)
CAGHREYGNKLVF

SEQ ID NO: 762456 - protein, 17 aa, Homo sapiens
  CDR3 for beta chain variable domain of TCR clone 381228 (TRBV7-8, TRBJ2-5)
CASSLASGGRCQETQYF

SEQ ID NO: 762457 - protein, 14 aa, Homo sapiens
  CDR3 for alpha chain variable domain of TCR clone 381229 (TRAV8-3, TRAJ35)
CAVVPQGFGNVLHC

SEQ ID NO: 762458 - protein, 15 aa, Homo sapiens
  CDR3 for beta chain variable domain of TCR clone 381229 (TRBV6-1, TRBJ2-2)
CASSAGQGYTGELFC

SEQ ID NO: 762459 - protein, 14 aa, Homo sapiens
  CDR3 for alpha chain variable domain of TCR clone 381230 (TRAV20, TRAJ13)
CAVQVSGGYQKVTF

SEQ ID NO: 762460 - protein, 15 aa, Homo sapiens
  CDR3 for beta chain variable domain of TCR clone 381230 (TRBV5-1, TRBJ2-1)
CASSQAGYWWNEQFF

SEQ ID NO: 762461 - protein, 13 aa, Homo sapiens
  CDR3 for alpha chain variable domain of TCR clone 381231 (TRAV1-2, TRAJ11)
CAVRREGYSTPTF

SEQ ID NO: 762462 - protein, 14 aa, Homo sapiens
  CDR3 for beta chain variable domain of TCR clone 381231 (TRBV14, TRBJ2-7)
CASRHRDKPYEQYF

SEQ ID NO: 762463 - protein, 15 aa, Homo sapiens
  CDR3 for alpha chain variable domain of TCR clone 381232 (TRAV3, TRAJ22)
CAVRDRGGSARQLTF

SEQ ID NO: 762464 - protein, 19 aa, Homo sapiens
  CDR3 for beta chain variable domain of TCR clone 381232 (TRBV11-2, TRBJ2-3)
CASSLTSGTRFRVTDTQYF

SEQ ID NO: 762465 - protein, 16 aa, Homo sapiens
  CDR3 for alpha chain variable domain of TCR clone 381233 (TRAV30, TRAJ24)
CGTEIVDADSRGKFQC

SEQ ID NO: 762466 - protein, 14 aa, Homo sapiens
  CDR3 for beta chain variable domain of TCR clone 381233 (TRBV12-5, TRBJ2-5)
CASGSRTHQETQYF

SEQ ID NO: 762467 - protein, 16 aa, Homo sapiens
  CDR3 for alpha chain variable domain of TCR clone 381234 (TRAV35, TRAJ28)
CAGHKYSGAGSYQLTF

SEQ ID NO: 762468 - protein, 12 aa, Homo sapiens
  CDR3 for beta chain variable domain of TCR clone 381234 (TRBV11-2, TRBJ2-2)
CASSLGGGELFF

SEQ ID NO: 762469 - protein, 13 aa, Homo sapiens
  CDR3 for alpha chain variable domain of TCR clone 381235 (TRAV27, TRAJ41)
CAGEGDSGYALNF

SEQ ID NO: 762470 - protein, 14 aa, Homo sapiens
  CDR3 for beta chain variable domain of TCR clone 381235 (TRBV7-2, TRBJ1-1)
CASSFLTGTTGAFF

SEQ ID NO: 762471 - protein, 10 aa, Homo sapiens
  CDR3 for alpha chain variable domain of TCR clone 381236 (TRAV1-2, TRAJ31)
CAFFRCQTHV

SEQ ID NO: 762472 - protein, 15 aa, Homo sapiens
  CDR3 for beta chain variable domain of TCR clone 381236 (TRBV7-3, TRBJ2-1)
CASSLGQGPFGEQFF

SEQ ID NO: 762473 - protein, 14 aa, Homo sapiens
  CDR3 for alpha chain variable domain of TCR clone 381237 (TRAV12-2, TRAJ13)
CSVEKTGGYQKVTF

SEQ ID NO: 762474 - protein, 16 aa, Homo sapiens
  CDR3 for beta chain variable domain of TCR clone 381237 (TRBV4-1, TRBJ2-3)
CASSQSTSGAEDTQYF

SEQ ID NO: 762475 - protein, 13 aa, Homo sapiens
  CDR3 for alpha chain variable domain of TCR clone 381238 (TRAV8-1, TRAJ30)
CAVIMNSDDKIIF

SEQ ID NO: 762476 - protein, 14 aa, Homo sapiens
  CDR3 for beta chain variable domain of TCR clone 381238 (TRBV7-2, TRBJ1-6)
CASSLQGANSPLHF

SEQ ID NO: 762477 - protein, 14 aa, Homo sapiens
  CDR3 for alpha chain variable domain of TCR clone 381239 (TRAV12-2, TRAJ36)
CAVNPPTGANNLFF

SEQ ID NO: 762478 - protein, 16 aa, Homo sapiens
  CDR3 for beta chain variable domain of TCR clone 381239 (TRBV11-3, TRBJ2-5)
CASSSVVAGSTETQYF

SEQ ID NO: 762479 - protein, 12 aa, Homo sapiens
  CDR3 for alpha chain variable domain of TCR clone 381240 (TRAV8-3, TRAJ26)
CAGDNYGQNFVF

SEQ ID NO: 762480 - protein, 13 aa, Homo sapiens
  CDR3 for beta chain variable domain of TCR clone 381240 (TRBV12-5, TRBJ2-3)
CASGDRQSDTQYF

SEQ ID NO: 762481 - protein, 14 aa, Homo sapiens
  CDR3 for alpha chain variable domain of TCR clone 381241 (TRAV27, TRAJ36)
CAGPPKRGARNLFF

SEQ ID NO: 762482 - protein, 15 aa, Homo sapiens
  CDR3 for beta chain variable domain of TCR clone 381241 (TRBV18, TRBJ2-7)
CASSPASTPNYEQYF

SEQ ID NO: 762483 - protein, 20 aa, Homo sapiens
  CDR3 for alpha chain variable domain of TCR clone 381242 (TRAV26-1, TRAJ37)
CCVYCIVRGDGSGNTGKLIF

SEQ ID NO: 762484 - protein, 17 aa, Homo sapiens
  CDR3 for beta chain variable domain of TCR clone 381242 (TRBV4-1, TRBJ2-7)
CASSRDPLGVRGGEQYF

SEQ ID NO: 762485 - protein, 16 aa, Homo sapiens
  CDR3 for alpha chain variable domain of TCR clone 381243 (TRAV35, TRAJ28)
CAGQKYSGAGSYQLTF

SEQ ID NO: 762486 - protein, 14 aa, Homo sapiens
  CDR3 for beta chain variable domain of TCR clone 381243 (TRBV5-1, TRBJ2-1)
CASSQRDIYNEQFF

SEQ ID NO: 762487 - protein, 15 aa, Homo sapiens
  CDR3 for alpha chain variable domain of TCR clone 381244 (TRAV17, TRAJ57)
CATGPSQGGSEKLVF

SEQ ID NO: 762488 - protein, 13 aa, Homo sapiens
  CDR3 for beta chain variable domain of TCR clone 381244 (TRBV18, TRBJ2-2)
CASSPTRGGELFF

SEQ ID NO: 762489 - protein, 14 aa, Homo sapiens
  CDR3 for alpha chain variable domain of TCR clone 381245 (TRAV8-2, TRAJ5)
CVVDMDTGRRALTF

SEQ ID NO: 762490 - protein, 13 aa, Homo sapiens
  CDR3 for beta chain variable domain of TCR clone 381245 (TRBV20-1, TRBJ1-1)
CSARGGGNTEAFF

SEQ ID NO: 762491 - protein, 11 aa, Homo sapiens
  CDR3 for alpha chain variable domain of TCR clone 381246 (TRAV12-2, TRAJ47)
CRGGIWKQLVF

SEQ ID NO: 762492 - protein, 14 aa, Homo sapiens
  CDR3 for beta chain variable domain of TCR clone 381246 (TRBV20-1, TRBJ1-1)
CSAMGGTANTEAFF

SEQ ID NO: 762493 - protein, 10 aa, Homo sapiens
  CDR3 for alpha chain variable domain of TCR clone 381247 (TRAV8-2, TRAJ29)
CTGGNTPLVF

SEQ ID NO: 762494 - protein, 17 aa, Homo sapiens
  CDR3 for beta chain variable domain of TCR clone 381247 (TRBV20-1, TRBJ2-2)
CSASGSGQGGLTGELFF

SEQ ID NO: 762495 - protein, 16 aa, Homo sapiens
  CDR3 for alpha chain variable domain of TCR clone 381248 (TRAV3, TRAJ21)
CAVRHRSASTNFTLDL

SEQ ID NO: 762496 - protein, 16 aa, Homo sapiens
  CDR3 for beta chain variable domain of TCR clone 381248 (TRBV7-2, TRBJ2-5)
CASSLESAGGRETQYF

SEQ ID NO: 762497 - protein, 13 aa, Homo sapiens
  CDR3 for alpha chain variable domain of TCR clone 381249 (TRAV17, TRAJ9)
CATDYTGGFKTIF

SEQ ID NO: 762498 - protein, 13 aa, Homo sapiens
  CDR3 for beta chain variable domain of TCR clone 381249 (TRBV7-3, TRBJ2-2)
CASSLWSVGELFF

SEQ ID NO: 762499 - protein, 11 aa, Homo sapiens
  CDR3 for alpha chain variable domain of TCR clone 381250 (TRAV2, TRAJ13)
CDSGGYQKVTF

SEQ ID NO: 762500 - protein, 13 aa, Homo sapiens
  CDR3 for beta chain variable domain of TCR clone 381250 (TRBV24-1, TRBJ2-3)
CATSTGGTDTQYF

SEQ ID NO: 762501 - protein, 11 aa, Homo sapiens
  CDR3 for alpha chain variable domain of TCR clone 381251 (TRAV22, TRAJ27)
CAVLNAGKSTF

SEQ ID NO: 762502 - protein, 16 aa, Homo sapiens
  CDR3 for beta chain variable domain of TCR clone 381251 (TRBV19, TRBJ2-2)
CASRSPGTGATGELFF

SEQ ID NO: 762503 - protein, 14 aa, Homo sapiens
  CDR3 for alpha chain variable domain of TCR clone 381252 (TRAV30, TRAJ26)
CGAEIVSYGQNFVF

SEQ ID NO: 762504 - protein, 13 aa, Homo sapiens
  CDR3 for beta chain variable domain of TCR clone 381252 (TRBV7-3, TRBJ1-1)
CASSQDWGAEAFL

SEQ ID NO: 762505 - protein, 17 aa, Homo sapiens
  CDR3 for alpha chain variable domain of TCR clone 381253 (TRAV3, TRAJ6)
CAVRDGPREGGSYIPTF

SEQ ID NO: 762506 - protein, 14 aa, Homo sapiens
  CDR3 for beta chain variable domain of TCR clone 381253 (TRBV7-2, TRBJ2-7)
CASSPKTSFHEQYF

SEQ ID NO: 762507 - protein, 14 aa, Homo sapiens
  CDR3 for alpha chain variable domain of TCR clone 381254 (TRAV12-2, TRAJ3)
CAVSLYSSASKIIL

SEQ ID NO: 762508 - protein, 14 aa, Homo sapiens
  CDR3 for beta chain variable domain of TCR clone 381254 (TRBV27, TRBJ2-1)
CAGSIAETYNEQFF

SEQ ID NO: 762509 - protein, 21 aa, Homo sapiens
  CDR3 for alpha chain variable domain of TCR clone 381255 (TRAV26-1, TRAJ17)
CCVLLHRQSSGSKAAGNKLTF

SEQ ID NO: 762510 - protein, 14 aa, Homo sapiens
  CDR3 for beta chain variable domain of TCR clone 381255 (TRBV28, TRBJ1-2)
CASRIQGADYGYTF

SEQ ID NO: 762511 - protein, 12 aa, Homo sapiens
  CDR3 for alpha chain variable domain of TCR clone 381256 (TRAV8-3, TRAJ26)
CAGDNYGKNFVF

SEQ ID NO: 762512 - protein, 17 aa, Homo sapiens
  CDR3 for beta chain variable domain of TCR clone 381256 (TRBV7-8, TRBJ2-6)
CASSAGTGGAGANVLTF

SEQ ID NO: 762513 - protein, 14 aa, Homo sapiens
  CDR3 for alpha chain variable domain of TCR clone 381257 (TRAV1-2, TRAJ16)
CAVNRFSDGQKLLF

SEQ ID NO: 762514 - protein, 15 aa, Homo sapiens
  CDR3 for beta chain variable domain of TCR clone 381257 (TRBV6-6, TRBJ2-1)
CASSYSYGGSYEQYF

SEQ ID NO: 762515 - protein, 16 aa, Homo sapiens
  CDR3 for alpha chain variable domain of TCR clone 381258 (TRAV13-1, TRAJ48)
CSKYRECNFGNEKLTF

SEQ ID NO: 762516 - protein, 17 aa, Homo sapiens
  CDR3 for beta chain variable domain of TCR clone 381258 (TRBV28, TRBJ2-1)
CASSSARQALTYNEQFF

SEQ ID NO: 762517 - protein, 16 aa, Homo sapiens
  CDR3 for alpha chain variable domain of TCR clone 381259 (TRAV3, TRAJ37)
CAVRGKGSGNTGKLIF

SEQ ID NO: 762518 - protein, 18 aa, Homo sapiens
  CDR3 for beta chain variable domain of TCR clone 381259 (TRBV7-3, TRBJ2-3)
CASSSTGTYPGNTDTQYF

SEQ ID NO: 762519 - protein, 12 aa, Homo sapiens
  CDR3 for alpha chain variable domain of TCR clone 381260 (TRAV12-2, TRAJ44)
CADTGTASKLTL

SEQ ID NO: 762520 - protein, 17 aa, Homo sapiens
  CDR3 for beta chain variable domain of TCR clone 381260 (TRBV20-1, TRBJ1-1)
CSARGTGGSYGNTGAFF

SEQ ID NO: 762521 - protein, 11 aa, Homo sapiens
  CDR3 for alpha chain variable domain of TCR clone 381261 (TRAV1-2, TRAJ20)
CAVANDYKLSF

SEQ ID NO: 762522 - protein, 14 aa, Homo sapiens
  CDR3 for beta chain variable domain of TCR clone 381261 (TRBV12-5, TRBJ2-5)
SASGSRTHQETQYF

SEQ ID NO: 762523 - protein, 14 aa, Homo sapiens
  CDR3 for alpha chain variable domain of TCR clone 381262 (TRAV1-2, TRAJ8)
CAVREDTGFQKLVF

SEQ ID NO: 762524 - protein, 13 aa, Homo sapiens
  CDR3 for beta chain variable domain of TCR clone 381262 (TRBV2, TRBJ1-1)
CARNPTGEFHAFF

SEQ ID NO: 762525 - protein, 14 aa, Homo sapiens
  CDR3 for alpha chain variable domain of TCR clone 381263 (TRAV12-1, TRAJ12)
CVVTRMDSSYKLIF

SEQ ID NO: 762526 - protein, 13 aa, Homo sapiens
  CDR3 for beta chain variable domain of TCR clone 381263 (TRBV20-1, TRBJ1-1)
CSARGGGNTEASF

SEQ ID NO: 762527 - protein, 16 aa, Homo sapiens
  CDR3 for alpha chain variable domain of TCR clone 381264 (TRAV3, TRAJ21)
CAVRDIERGNFNKFYF

SEQ ID NO: 762528 - protein, 13 aa, Homo sapiens
  CDR3 for beta chain variable domain of TCR clone 381264 (TRBV27, TRBJ2-7)
CASSLTTGYEQYC

SEQ ID NO: 762529 - protein, 15 aa, Homo sapiens
  CDR3 for alpha chain variable domain of TCR clone 381265 (TRAV25, TRAJ52)
CAGTSGSSSYGKLTF

SEQ ID NO: 762530 - protein, 16 aa, Homo sapiens
  CDR3 for beta chain variable domain of TCR clone 381265 (TRBV15, TRBJ1-2)
CATSRGPRTGGGGYTF

SEQ ID NO: 762531 - protein, 18 aa, Homo sapiens
  CDR3 for alpha chain variable domain of TCR clone 381266 (TRAV12-3, TRAJ52)
GAMSVGGAGCTSYGKLTF

SEQ ID NO: 762532 - protein, 15 aa, Homo sapiens
  CDR3 for beta chain variable domain of TCR clone 381266 (TRBV27, TRBJ1-6)
CASSFDRGLGSPLHF

SEQ ID NO: 762533 - protein, 12 aa, Homo sapiens
  CDR3 for alpha chain variable domain of TCR clone 381267 (TRAV21, TRAJ49)
CAVRNTGNQFYF

SEQ ID NO: 762534 - protein, 14 aa, Homo sapiens
  CDR3 for beta chain variable domain of TCR clone 381267 (TRBV6-1, TRBJ2-2)
CASTWQGNTGELFF

SEQ ID NO: 762535 - protein, 12 aa, Homo sapiens
  CDR3 for alpha chain variable domain of TCR clone 381268 (TRAV29/DV5, TRAJ34)
CAASSGTDKLIF

SEQ ID NO: 762536 - protein, 14 aa, Homo sapiens
  CDR3 for beta chain variable domain of TCR clone 381268 (TRBV7-2, TRBJ2-7)
CASRSQGAAYEQYF

SEQ ID NO: 762537 - protein, 15 aa, Homo sapiens
  CDR3 for alpha chain variable domain of TCR clone 381269 (TRAV13-1, TRAJ44)
CAASRGGCTASKLTF

SEQ ID NO: 762538 - protein, 12 aa, Homo sapiens
  CDR3 for beta chain variable domain of TCR clone 381269 (TRBV11-2, TRBJ2-2)
CASSLGGGELFF

SEQ ID NO: 762539 - protein, 14 aa, Homo sapiens
  CDR3 for alpha chain variable domain of TCR clone 381270 (TRAV12-2, TRAJ9)
RAVNALEGGFKTIF

SEQ ID NO: 762540 - protein, 16 aa, Homo sapiens
  CDR3 for beta chain variable domain of TCR clone 381270 (TRBV19, TRBJ1-6)
CASSVAPVAGNSPLHF

SEQ ID NO: 762541 - protein, 14 aa, Homo sapiens
  CDR3 for alpha chain variable domain of TCR clone 381271 (TRAV12-3, TRAJ10)
SHLPLTGVGKKLTF

SEQ ID NO: 762542 - protein, 11 aa, Homo sapiens
  CDR3 for beta chain variable domain of TCR clone 381271 (TRBV19, TRBJ1-1)
CASSIGSEAFF

SEQ ID NO: 762543 - protein, 17 aa, Homo sapiens
  CDR3 for alpha chain variable domain of TCR clone 381272 (TRAV17, TRAJ52)
CATERPSGGTSYGKLTF

SEQ ID NO: 762544 - protein, 17 aa, Homo sapiens
  CDR3 for beta chain variable domain of TCR clone 381272 (TRBV7-3, TRBJ2-3)
CASSPRGQGYGTDTQYF

SEQ ID NO: 762545 - protein, 14 aa, Homo sapiens
  CDR3 for alpha chain variable domain of TCR clone 381273 (TRAV26-1, TRAJ11)
CIVPLYSGYSTLTF

SEQ ID NO: 762546 - protein, 14 aa, Homo sapiens
  CDR3 for beta chain variable domain of TCR clone 381273 (TRBV12-5, TRBJ2-5)
CASGSRTHQETQYF

SEQ ID NO: 762547 - protein, 13 aa, Homo sapiens
  CDR3 for alpha chain variable domain of TCR clone 381274 (TRAV26-2, TRAJ43)
CILRAVNNNDMRF

SEQ ID NO: 762548 - protein, 15 aa, Homo sapiens
  CDR3 for beta chain variable domain of TCR clone 381274 (TRBV7-2, TRBJ2-1)
SASTHGTGIYNEQFF

SEQ ID NO: 762549 - protein, 12 aa, Homo sapiens
  CDR3 for alpha chain variable domain of TCR clone 381275 (TRAV29/DV5, TRAJ43)
CAASYNNNDMRF

SEQ ID NO: 762550 - protein, 16 aa, Homo sapiens
  CDR3 for beta chain variable domain of TCR clone 381275 (TRBV12-5, TRBJ2-5)
CASGPRTSGNQETQYF

SEQ ID NO: 762551 - protein, 16 aa, Homo sapiens
  CDR3 for alpha chain variable domain of TCR clone 381276 (TRAV8-3, TRAJ38)
CAVGASNAGNNRKLIL

SEQ ID NO: 762552 - protein, 15 aa, Homo sapiens
  CDR3 for beta chain variable domain of TCR clone 381276 (TRBV11-3, TRBJ1-3)
CASSLFGPSGNTTYF

SEQ ID NO: 762553 - protein, 15 aa, Homo sapiens
  CDR3 for alpha chain variable domain of TCR clone 381277 (TRAV12-3, TRAJ6)
CAMSATPEGSYIPTF

SEQ ID NO: 762554 - protein, 16 aa, Homo sapiens
  CDR3 for beta chain variable domain of TCR clone 381277 (TRBV20-1, TRBJ1-2)
CSASMGQGVANYGYTF

SEQ ID NO: 762555 - protein, 12 aa, Homo sapiens
  CDR3 for alpha chain variable domain of TCR clone 381278 (TRAV3, TRAJ20)
CAVRDPDYKLSF

SEQ ID NO: 762556 - protein, 15 aa, Homo sapiens
  CDR3 for beta chain variable domain of TCR clone 381278 (TRBV7-3, TRBJ2-1)
CASSPTGGGEVEQFF

SEQ ID NO: 762557 - protein, 13 aa, Homo sapiens
  CDR3 for alpha chain variable domain of TCR clone 381279 (TRAV12-2, TRAJ7)
CAGLIYGNNRLAF

SEQ ID NO: 762558 - protein, 15 aa, Homo sapiens
  CDR3 for beta chain variable domain of TCR clone 381279 (TRBV27, TRBJ2-1)
CASSNGGGSSNEQFF

SEQ ID NO: 762559 - protein, 16 aa, Homo sapiens
  CDR3 for alpha chain variable domain of TCR clone 381280 (TRAV12-3, TRAJ53)
CAMSPGGGGSNYKLTF

SEQ ID NO: 762560 - protein, 13 aa, Homo sapiens
  CDR3 for beta chain variable domain of TCR clone 381280 (TRBV7-3, TRBJ1-1)
CASSQDWGAEAFF

SEQ ID NO: 762561 - protein, 10 aa, Homo sapiens
  CDR3 for alpha chain variable domain of TCR clone 381281 (TRAV36/DV7, TRAJ49)
CALTGNQFYF

SEQ ID NO: 762562 - protein, 17 aa, Homo sapiens
  CDR3 for beta chain variable domain of TCR clone 381281 (TRBV13, TRBJ2-3)
CASSLSRVAGGRNTQYF

SEQ ID NO: 762563 - protein, 15 aa, Homo sapiens
  CDR3 for alpha chain variable domain of TCR clone 381282 (TRAV27, TRAJ38)
CAARRNAGNNRKLIC

SEQ ID NO: 762564 - protein, 17 aa, Homo sapiens
  CDR3 for beta chain variable domain of TCR clone 381282 (TRBV20-1, TRBJ2-2)
CSASGSGQGGLTGELFF

SEQ ID NO: 762565 - protein, 10 aa, Homo sapiens
  CDR3 for alpha chain variable domain of TCR clone 381283 (TRAV25, TRAJ20)
CAVNDSKLSF

SEQ ID NO: 762566 - protein, 18 aa, Homo sapiens
  CDR3 for beta chain variable domain of TCR clone 381283 (TRBV20-1, TRBJ2-6)
CSAETTPPHGSGANVLTF

SEQ ID NO: 762567 - protein, 10 aa, Homo sapiens
  CDR3 for alpha chain variable domain of TCR clone 381284 (TRAV1-2, TRAJ31)
CVSEDARLMF

SEQ ID NO: 762568 - protein, 13 aa, Homo sapiens
  CDR3 for beta chain variable domain of TCR clone 381284 (TRBV11-2, TRBJ2-7)
CASSTLDRYEQYF

SEQ ID NO: 762569 - protein, 14 aa, Homo sapiens
  CDR3 for alpha chain variable domain of TCR clone 381285 (TRAV12-1, TRAJ43)
CVVNVRSNNNDMRF

SEQ ID NO: 762570 - protein, 13 aa, Homo sapiens
  CDR3 for beta chain variable domain of TCR clone 381285 (TRBV2, TRBJ1-4)
CASSELGVEKLFF

SEQ ID NO: 762571 - protein, 15 aa, Homo sapiens
  CDR3 for alpha chain variable domain of TCR clone 381286 (TRAV12-1, TRAJ44)
CVVDEYTGTASKLTF

SEQ ID NO: 762572 - protein, 14 aa, Homo sapiens
  CDR3 for beta chain variable domain of TCR clone 381286 (TRBV5-1, TRBJ1-2)
CDSSLEPVNYGYTF

SEQ ID NO: 762573 - protein, 13 aa, Homo sapiens
  CDR3 for alpha chain variable domain of TCR clone 381287 (TRAV36/DV7, TRAJ37)
CAVFSSNTGKLIF

SEQ ID NO: 762574 - protein, 17 aa, Homo sapiens
  CDR3 for beta chain variable domain of TCR clone 381287 (TRBV11-2, TRBJ2-3)
CQQLRGGLAGAPNTQYF

SEQ ID NO: 762575 - protein, 15 aa, Homo sapiens
  CDR3 for alpha chain variable domain of TCR clone 381288 (TRAV19, TRAJ11)
CALSEGSGGYSTLTF

SEQ ID NO: 762576 - protein, 15 aa, Homo sapiens
  CDR3 for beta chain variable domain of TCR clone 381288 (TRBV28, TRBJ2-3)
CASSPDRQGANTQYF

SEQ ID NO: 762577 - protein, 15 aa, Homo sapiens
  CDR3 for alpha chain variable domain of TCR clone 381289 (TRAV20, TRAJ50)
CAVRQMKTSYDKVIF

SEQ ID NO: 762578 - protein, 14 aa, Homo sapiens
  CDR3 for beta chain variable domain of TCR clone 381289 (TRBV7-2, TRBJ2-7)
CTSSLPPGQGPQYF

SEQ ID NO: 762579 - protein, 13 aa, Homo sapiens
  CDR3 for alpha chain variable domain of TCR clone 381290 (TRAV12-1, TRAJ16)
CVVNGPDGQKLLF

SEQ ID NO: 762580 - protein, 13 aa, Homo sapiens
  CDR3 for beta chain variable domain of TCR clone 381290 (TRBV2, TRBJ1-1)
CARNATGGCHAFF

SEQ ID NO: 762581 - protein, 12 aa, Homo sapiens
  CDR3 for alpha chain variable domain of TCR clone 381291 (TRAV1-2, TRAJ26)
CAVSPYGQNFVF

SEQ ID NO: 762582 - protein, 14 aa, Homo sapiens
  CDR3 for beta chain variable domain of TCR clone 381291 (TRBV5-1, TRBJ2-7)
CPSSFASGVNEQYF

SEQ ID NO: 762583 - protein, 13 aa, Homo sapiens
  CDR3 for alpha chain variable domain of TCR clone 381292 (TRAV21, TRAJ27)
CAARPGNAGKSTY

SEQ ID NO: 762584 - protein, 14 aa, Homo sapiens
  CDR3 for beta chain variable domain of TCR clone 381292 (TRBV7-6, TRBJ2-3)
CASSLGTVTDTRYF

SEQ ID NO: 762585 - protein, 14 aa, Homo sapiens
  CDR3 for alpha chain variable domain of TCR clone 381293 (TRAV8-6, TRAJ36)
CAVSEKDGANNLFF

SEQ ID NO: 762586 - protein, 12 aa, Homo sapiens
  CDR3 for beta chain variable domain of TCR clone 381293 (TRBV11-2, TRBJ2-2)
CASSLGGGELFF

SEQ ID NO: 762587 - protein, 16 aa, Homo sapiens
  CDR3 for alpha chain variable domain of TCR clone 381294 (TRAV30, TRAJ24)
CGTEIVDADSWGKFQF

SEQ ID NO: 762588 - protein, 17 aa, Homo sapiens
  CDR3 for beta chain variable domain of TCR clone 381294 (TRBV28, TRBJ2-3)
CASSPTPAGGRVDTQYF

SEQ ID NO: 762589 - protein, 16 aa, Homo sapiens
  CDR3 for alpha chain variable domain of TCR clone 381295 (TRAV36/DV7, TRAJ52)
CALEDAGGTSYGKLTF

SEQ ID NO: 762590 - protein, 16 aa, Homo sapiens
  CDR3 for beta chain variable domain of TCR clone 381295 (TRBV2, TRBJ2-1)
CASRSPAGGKYNEQFF

SEQ ID NO: 762591 - protein, 13 aa, Homo sapiens
  CDR3 for alpha chain variable domain of TCR clone 381296 (TRAV36/DV7, TRAJ37)
CAVFSSNTGKLIF

SEQ ID NO: 762592 - protein, 16 aa, Homo sapiens
  CDR3 for beta chain variable domain of TCR clone 381296 (TRBV3-1, TRBJ2-5)
CASSPGQFNGFGTQYC

SEQ ID NO: 762593 - protein, 14 aa, Homo sapiens
  CDR3 for alpha chain variable domain of TCR clone 381297 (TRAV17, TRAJ6)
CATDASGGSYIPTF

SEQ ID NO: 762594 - protein, 19 aa, Homo sapiens
  CDR3 for beta chain variable domain of TCR clone 381297 (TRBV4-3, TRBJ2-7)
CTSSQEFIGWQVTPYEQYF

SEQ ID NO: 762595 - protein, 13 aa, Homo sapiens
  CDR3 for alpha chain variable domain of TCR clone 381298 (TRAV3, TRAJ16)
CAVRDRNGQKLPF

SEQ ID NO: 762596 - protein, 15 aa, Homo sapiens
  CDR3 for beta chain variable domain of TCR clone 381298 (TRBV5-1, TRBJ2-1)
CASSPPRAPYNKQLF

SEQ ID NO: 762597 - protein, 12 aa, Homo sapiens
  CDR3 for alpha chain variable domain of TCR clone 381299 (TRAV3, TRAJ43)
CAVGDPNNDMSF

SEQ ID NO: 762598 - protein, 15 aa, Homo sapiens
  CDR3 for beta chain variable domain of TCR clone 381299 (TRBV27, TRBJ1-5)
CASSLGTGFDQPQYF

SEQ ID NO: 762599 - protein, 12 aa, Homo sapiens
  CDR3 for alpha chain variable domain of TCR clone 381300 (TRAV17, TRAJ39)
CATGASGNMLTF

SEQ ID NO: 762600 - protein, 14 aa, Homo sapiens
  CDR3 for beta chain variable domain of TCR clone 381300 (TRBV7-9, TRBJ1-2)
CASGRQGANYGYTF

SEQ ID NO: 762601 - protein, 14 aa, Homo sapiens
  CDR3 for alpha chain variable domain of TCR clone 381301 (TRAV17, TRAJ6)
CATNPAGGSYIPTF

SEQ ID NO: 762602 - protein, 12 aa, Homo sapiens
  CDR3 for beta chain variable domain of TCR clone 381301 (TRBV11-2, TRBJ2-2)
CASSLGGGELFF

SEQ ID NO: 762603 - protein, 15 aa, Homo sapiens
  CDR3 for alpha chain variable domain of TCR clone 381302 (TRAV21, TRAJ24)
CAARSPTDSWGKLQF

SEQ ID NO: 762604 - protein, 17 aa, Homo sapiens
  CDR3 for beta chain variable domain of TCR clone 381302 (TRBV11-2, TRBJ2-1)
CASSLYPPGVEYNEQFF

SEQ ID NO: 762605 - protein, 12 aa, Homo sapiens
  CDR3 for alpha chain variable domain of TCR clone 381303 (TRAV3, TRAJ26)
CAVRDYGQNFVF

SEQ ID NO: 762606 - protein, 16 aa, Homo sapiens
  CDR3 for beta chain variable domain of TCR clone 381303 (TRBV11-2, TRBJ1-2)
CASSPSGNEANYGYTF

SEQ ID NO: 762607 - protein, 13 aa, Homo sapiens
  CDR3 for alpha chain variable domain of TCR clone 381304 (TRAV3, TRAJ41)
CAVSSNSGNELTF

SEQ ID NO: 762608 - protein, 13 aa, Homo sapiens
  CDR3 for beta chain variable domain of TCR clone 381304 (TRBV20-1, TRBJ2-2)
CSALSGGAGELFF

SEQ ID NO: 762609 - protein, 15 aa, Homo sapiens
  CDR3 for alpha chain variable domain of TCR clone 381305 (TRAV2, TRAJ44)
CAVEAYTGTASKLTF

SEQ ID NO: 762610 - protein, 14 aa, Homo sapiens
  CDR3 for beta chain variable domain of TCR clone 381305 (TRBV11-2, TRBJ2-1)
CASSPGSRDNEQFL

SEQ ID NO: 762611 - protein, 15 aa, Homo sapiens
  CDR3 for alpha chain variable domain of TCR clone 381306 (TRAV25, TRAJ52)
CAGTSGGTSYVQLTF

SEQ ID NO: 762612 - protein, 16 aa, Homo sapiens
  CDR3 for beta chain variable domain of TCR clone 381306 (TRBV15, TRBJ1-2)
CATSRGTRTGGGGYTF

SEQ ID NO: 762613 - protein, 14 aa, Homo sapiens
  CDR3 for alpha chain variable domain of TCR clone 381307 (TRAV35, TRAJ22)
CAGLRPGSARQLPF

SEQ ID NO: 762614 - protein, 16 aa, Homo sapiens
  CDR3 for beta chain variable domain of TCR clone 381307 (TRBV7-3, TRBJ2-1)
CASSLEGYRSYNEQFF

SEQ ID NO: 762615 - protein, 12 aa, Homo sapiens
  CDR3 for alpha chain variable domain of TCR clone 381308 (TRAV8-3, TRAJ26)
CAVDNYGQNFVF

SEQ ID NO: 762616 - protein, 15 aa, Homo sapiens
  CDR3 for beta chain variable domain of TCR clone 381308 (TRBV13, TRBJ1-5)
CASSFGQGGVQPQHF

SEQ ID NO: 762617 - protein, 14 aa, Homo sapiens
  CDR3 for alpha chain variable domain of TCR clone 381309 (TRAV9-2, TRAJ38)
CALRGAGNNRKLIW

SEQ ID NO: 762618 - protein, 15 aa, Homo sapiens
  CDR3 for beta chain variable domain of TCR clone 381309 (TRBV7-2, TRBJ2-3)
CASSLVVRGPDTQYF

SEQ ID NO: 762619 - protein, 15 aa, Homo sapiens
  CDR3 for alpha chain variable domain of TCR clone 381310 (TRAV3, TRAJ3)
CAVRDGHSRASKIIF

SEQ ID NO: 762620 - protein, 17 aa, Homo sapiens
  CDR3 for beta chain variable domain of TCR clone 381310 (TRBV25-1, TRBJ2-7)
CASRDARVVFSSYEQYF

SEQ ID NO: 762621 - protein, 11 aa, Homo sapiens
  CDR3 for alpha chain variable domain of TCR clone 381311 (TRAV3, TRAJ21)
CAVGNFNKFYF

SEQ ID NO: 762622 - protein, 17 aa, Homo sapiens
  CDR3 for beta chain variable domain of TCR clone 381311 (TRBV7-7, TRBJ1-1)
CASIGDRPNLGVTEAFF

SEQ ID NO: 762623 - protein, 16 aa, Homo sapiens
  CDR3 for alpha chain variable domain of TCR clone 381312 (TRAV16, TRAJ52)
CALSSAGGTSYGKLTF

SEQ ID NO: 762624 - protein, 13 aa, Homo sapiens
  CDR3 for beta chain variable domain of TCR clone 381312 (TRBV3-1, TRBJ1-5)
CASSQFGDQPQHF

SEQ ID NO: 762625 - protein, 15 aa, Homo sapiens
  CDR3 for alpha chain variable domain of TCR clone 381313 (TRAV40, TRAJ45)
CLLVDLGGGADGLTF

SEQ ID NO: 762626 - protein, 17 aa, Homo sapiens
  CDR3 for beta chain variable domain of TCR clone 381313 (TRBV18, TRBJ1-5)
CASSPTMGQGTNQPQHF

SEQ ID NO: 762627 - protein, 14 aa, Homo sapiens
  CDR3 for alpha chain variable domain of TCR clone 381314 (TRAV21, TRAJ45)
CAVVSGGGADRLTF

SEQ ID NO: 762628 - protein, 14 aa, Homo sapiens
  CDR3 for beta chain variable domain of TCR clone 381314 (TRBV20-1, TRBJ2-3)
CSALGLEGADTQYF

SEQ ID NO: 762629 - protein, 15 aa, Homo sapiens
  CDR3 for alpha chain variable domain of TCR clone 381315 (TRAV12-2, TRAJ53)
CAVNGGGGRKYKLTF

SEQ ID NO: 762630 - protein, 13 aa, Homo sapiens
  CDR3 for beta chain variable domain of TCR clone 381315 (TRBV3-1, TRBJ1-1)
CASSPGVITEAFF

SEQ ID NO: 762631 - protein, 11 aa, Homo sapiens
  CDR3 for alpha chain variable domain of TCR clone 381316 (TRAV12-2, TRAJ29)
CAVTLRSPLVF

SEQ ID NO: 762632 - protein, 12 aa, Homo sapiens
  CDR3 for beta chain variable domain of TCR clone 381316 (TRBV7-2, TRBJ1-5)
CASSLWSQPQHF

SEQ ID NO: 762633 - protein, 11 aa, Homo sapiens
  CDR3 for alpha chain variable domain of TCR clone 381317 (TRAV26-1, TRAJ37)
CIVRVGRKLIF

SEQ ID NO: 762634 - protein, 13 aa, Homo sapiens
  CDR3 for beta chain variable domain of TCR clone 381317 (TRBV4-1, TRBJ2-5)
CASSLTRGETQYF

SEQ ID NO: 762635 - protein, 16 aa, Homo sapiens
  CDR3 for alpha chain variable domain of TCR clone 381318 (TRAV3, TRAJ4)
CAVRAFFSGGYNKLIF

SEQ ID NO: 762636 - protein, 13 aa, Homo sapiens
  CDR3 for beta chain variable domain of TCR clone 381318 (TRBV19, TRBJ1-2)
CASSVPGQDGYTF

SEQ ID NO: 762637 - protein, 15 aa, Homo sapiens
  CDR3 for alpha chain variable domain of TCR clone 381319 (TRAV3, TRAJ5)
CAVSDLDTGRRALTF

SEQ ID NO: 762638 - protein, 15 aa, Homo sapiens
  CDR3 for beta chain variable domain of TCR clone 381319 (TRBV4-1, TRBJ1-2)
CASSQGQGAAYGYTF

SEQ ID NO: 762639 - protein, 21 aa, Homo sapiens
  CDR3 for alpha chain variable domain of TCR clone 381320 (TRAV16, TRAJ22)
HLKKPFAQGEDSAMYLRQLTF

SEQ ID NO: 762640 - protein, 15 aa, Homo sapiens
  CDR3 for beta chain variable domain of TCR clone 381320 (TRBV7-9, TRBJ1-6)
CASSAPGRGNSPLHF

SEQ ID NO: 762641 - protein, 23 aa, Homo sapiens
  CDR3 for alpha chain variable domain of TCR clone 381321 (TRAV8-6, TRAJ38)
CAVRNAGNNHIQTPDPAVYQLRD

SEQ ID NO: 762642 - protein, 15 aa, Homo sapiens
  CDR3 for beta chain variable domain of TCR clone 381321 (TRBV4-1, TRBJ2-2)
CASSEGQGITGELFF

SEQ ID NO: 762643 - protein, 18 aa, Homo sapiens
  CDR3 for alpha chain variable domain of TCR clone 381322 (TRAV13-1, TRAJ52)
CAAKNPNAGGTSYGKLTF

SEQ ID NO: 762644 - protein, 14 aa, Homo sapiens
  CDR3 for beta chain variable domain of TCR clone 381322 (TRBV9, TRBJ2-7)
CASSVGVGPYEQYF

SEQ ID NO: 762645 - protein, 13 aa, Homo sapiens
  CDR3 for alpha chain variable domain of TCR clone 381323 (TRAV29/DV5, TRAJ31)
CAAIRNNNARLMF

SEQ ID NO: 762646 - protein, 12 aa, Homo sapiens
  CDR3 for beta chain variable domain of TCR clone 381323 (TRBV11-2, TRBJ2-1)
CASSPGNNEQFF

SEQ ID NO: 762647 - protein, 15 aa, Homo sapiens
  CDR3 for alpha chain variable domain of TCR clone 381324 (TRAV2, TRAJ8)
CAVEDLNTGFQKLVF

SEQ ID NO: 762648 - protein, 15 aa, Homo sapiens
  CDR3 for beta chain variable domain of TCR clone 381324 (TRBV3-1, TRBJ2-1)
CASSTGDTNYNEQFF

SEQ ID NO: 762649 - protein, 12 aa, Homo sapiens
  CDR3 for alpha chain variable domain of TCR clone 381325 (TRAV24, TRAJ17)
CASKAAGNKLTF

SEQ ID NO: 762650 - protein, 20 aa, Homo sapiens
  CDR3 for beta chain variable domain of TCR clone 381325 (TRBV7-8, TRBJ2-2)
CASSHLFPGPTIQITGELFF

SEQ ID NO: 762651 - protein, 16 aa, Homo sapiens
  CDR3 for alpha chain variable domain of TCR clone 381326 (TRAV38-1, TRAJ45)
CAFMKGSGGGADGLTF

SEQ ID NO: 762652 - protein, 15 aa, Homo sapiens
  CDR3 for beta chain variable domain of TCR clone 381326 (TRBV20-1, TRBJ2-7)
CSAREGRDSLYEQFF

SEQ ID NO: 762653 - protein, 13 aa, Homo sapiens
  CDR3 for alpha chain variable domain of TCR clone 381327 (TRAV13-1, TRAJ39)
CAASIWAGNMLTL

SEQ ID NO: 762654 - protein, 15 aa, Homo sapiens
  CDR3 for beta chain variable domain of TCR clone 381327 (TRBV7-9, TRBJ1-1)
CASSLIEQGGTEAFF

SEQ ID NO: 762655 - protein, 14 aa, Homo sapiens
  CDR3 for alpha chain variable domain of TCR clone 381328 (TRAV12-1, TRAJ13)
CVVIDSGGYQKVTF

SEQ ID NO: 762656 - protein, 13 aa, Homo sapiens
  CDR3 for beta chain variable domain of TCR clone 381328 (TRBV12-4, TRBJ2-5)
CASRLAVQETQYF

SEQ ID NO: 762657 - protein, 14 aa, Homo sapiens
  CDR3 for alpha chain variable domain of TCR clone 381329 (TRAV1-2, TRAJ8)
CAVREDTGFQKLVF

SEQ ID NO: 762658 - protein, 15 aa, Homo sapiens
  CDR3 for beta chain variable domain of TCR clone 381329 (TRBV4-1, TRBJ2-7)
CASSHTTGRLYEQYF

SEQ ID NO: 762659 - protein, 14 aa, Homo sapiens
  CDR3 for alpha chain variable domain of TCR clone 381330 (TRAV8-3, TRAJ4)
CAVGAAGGYNKLIF

SEQ ID NO: 762660 - protein, 14 aa, Homo sapiens
  CDR3 for beta chain variable domain of TCR clone 381330 (TRBV19, TRBJ2-1)
CASTTFVLSGEQFL

SEQ ID NO: 762661 - protein, 14 aa, Homo sapiens
  CDR3 for alpha chain variable domain of TCR clone 381331 (TRAV1-2, TRAJ8)
CAVREDTGFQKLVF

SEQ ID NO: 762662 - protein, 16 aa, Homo sapiens
  CDR3 for beta chain variable domain of TCR clone 381331 (TRBV7-3, TRBJ2-2)
CASGLKRGTLSGELFF

SEQ ID NO: 762663 - protein, 13 aa, Homo sapiens
  CDR3 for alpha chain variable domain of TCR clone 381332 (TRAV17, TRAJ26)
CATVDKYGQNFVF

SEQ ID NO: 762664 - protein, 16 aa, Homo sapiens
  CDR3 for beta chain variable domain of TCR clone 381332 (TRBV2, TRBJ2-1)
CASSVGGSLSYNEQFF

SEQ ID NO: 762665 - protein, 13 aa, Homo sapiens
  CDR3 for alpha chain variable domain of TCR clone 381333 (TRAV17, TRAJ5)
CALRGTGRRALTF

SEQ ID NO: 762666 - protein, 14 aa, Homo sapiens
  CDR3 for beta chain variable domain of TCR clone 381333 (TRBV11-2, TRBJ2-7)
CASSSTGEGYEQYF

SEQ ID NO: 762667 - protein, 10 aa, Homo sapiens
  CDR3 for alpha chain variable domain of TCR clone 381334 (TRAV12-3, TRAJ34)
CAMSADKLIF

SEQ ID NO: 762668 - protein, 15 aa, Homo sapiens
  CDR3 for beta chain variable domain of TCR clone 381334 (TRBV27, TRBJ2-1)
CASSNGGGSSNEQFV

SEQ ID NO: 762669 - protein, 14 aa, Homo sapiens
  CDR3 for alpha chain variable domain of TCR clone 381335 (TRAV12-2, TRAJ17)
CAGLFKAAGNKLTF

SEQ ID NO: 762670 - protein, 14 aa, Homo sapiens
  CDR3 for beta chain variable domain of TCR clone 381335 (TRBV15, TRBJ1-2)
CATSRDFDRVGYTF

SEQ ID NO: 762671 - protein, 14 aa, Homo sapiens
  CDR3 for alpha chain variable domain of TCR clone 381336 (TRAV8-2, TRAJ4)
CVVSPSGFYNKLIF

SEQ ID NO: 762672 - protein, 14 aa, Homo sapiens
  CDR3 for beta chain variable domain of TCR clone 381336 (TRBV19, TRBJ2-5)
CASSSSGIQETQYF

SEQ ID NO: 762673 - protein, 13 aa, Homo sapiens
  CDR3 for alpha chain variable domain of TCR clone 381337 (TRAV21, TRAJ20)
CAVGLRVDYKLSF

SEQ ID NO: 762674 - protein, 19 aa, Homo sapiens
  CDR3 for beta chain variable domain of TCR clone 381337 (TRBV23-1, TRBJ2-3)
TVSLRQQPRSTGSTDTQYF

SEQ ID NO: 762675 - protein, 14 aa, Homo sapiens
  CDR3 for alpha chain variable domain of TCR clone 381338 (TRAV26-1, TRAJ38)
CVADNAGNNRKLIW

SEQ ID NO: 762676 - protein, 17 aa, Homo sapiens
  CDR3 for beta chain variable domain of TCR clone 381338 (TRBV15, TRBJ1-1)
CATSRVGGADGDTEAFF

SEQ ID NO: 762677 - protein, 13 aa, Homo sapiens
  CDR3 for alpha chain variable domain of TCR clone 381339 (TRAV2, TRAJ40)
CAVVTSGTYKYIF

SEQ ID NO: 762678 - protein, 14 aa, Homo sapiens
  CDR3 for beta chain variable domain of TCR clone 381339 (TRBV11-3, TRBJ2-1)
CASSATTSGSIQFF

SEQ ID NO: 762679 - protein, 11 aa, Homo sapiens
  CDR3 for alpha chain variable domain of TCR clone 381340 (TRAV12-1, TRAJ26)
CVVAYGQNLVF

SEQ ID NO: 762680 - protein, 13 aa, Homo sapiens
  CDR3 for beta chain variable domain of TCR clone 381340 (TRBV7-2, TRBJ2-4)
CASSREHANIQYF

SEQ ID NO: 762681 - protein, 13 aa, Homo sapiens
  CDR3 for alpha chain variable domain of TCR clone 381341 (TRAV12-1, TRAJ10)
CVVSTGGGNKLTF

SEQ ID NO: 762682 - protein, 16 aa, Homo sapiens
  CDR3 for beta chain variable domain of TCR clone 381341 (TRBV12-4, TRBJ1-5)
CASSRPVGGSNQHQHF

SEQ ID NO: 762683 - protein, 18 aa, Homo sapiens
  CDR3 for alpha chain variable domain of TCR clone 381342 (TRAV17, TRAJ28)
CATDPPRGSGAGRYQLTF

SEQ ID NO: 762684 - protein, 14 aa, Homo sapiens
  CDR3 for beta chain variable domain of TCR clone 381342 (TRBV13, TRBJ2-5)
CAGSLDYPQETQYF

SEQ ID NO: 762685 - protein, 18 aa, Homo sapiens
  CDR3 for alpha chain variable domain of TCR clone 381343 (TRAV29/DV5, TRAJ52)
CAAGFRGAGGTSYGKLTC

SEQ ID NO: 762686 - protein, 16 aa, Homo sapiens
  CDR3 for beta chain variable domain of TCR clone 381343 (TRBV7-3, TRBJ2-2)
CASSLKRGTLSGELFF

SEQ ID NO: 762687 - protein, 14 aa, Homo sapiens
  CDR3 for alpha chain variable domain of TCR clone 381344 (TRAV34, TRAJ44)
CGADGTGTASKLTF

SEQ ID NO: 762688 - protein, 15 aa, Homo sapiens
  CDR3 for beta chain variable domain of TCR clone 381344 (TRBV5-1, TRBJ2-1)
CASSPPRAHYNEQFF

SEQ ID NO: 762689 - protein, 13 aa, Homo sapiens
  CDR3 for alpha chain variable domain of TCR clone 381345 (TRAV12-1, TRAJ40)
CVVPTSGTSKYIF

SEQ ID NO: 762690 - protein, 14 aa, Homo sapiens
  CDR3 for beta chain variable domain of TCR clone 381345 (TRBV6-1, TRBJ1-3)
CASVQGGGGNTIYF

SEQ ID NO: 762691 - protein, 12 aa, Homo sapiens
  CDR3 for alpha chain variable domain of TCR clone 381346 (TRAV13-2, TRAJ23)
CAERHRGGKLIF

SEQ ID NO: 762692 - protein, 12 aa, Homo sapiens
  CDR3 for beta chain variable domain of TCR clone 381346 (TRBV11-2, TRBJ2-1)
CASSPGNNEQLF

SEQ ID NO: 762693 - protein, 14 aa, Homo sapiens
  CDR3 for alpha chain variable domain of TCR clone 381347 (TRAV4, TRAJ9)
CLVGSGTGGFKTIF

SEQ ID NO: 762694 - protein, 19 aa, Homo sapiens
  CDR3 for beta chain variable domain of TCR clone 381347 (TRBV25-1, TRBJ2-2)
CAILVYRVDRGRKTGELFF

SEQ ID NO: 762695 - protein, 13 aa, Homo sapiens
  CDR3 for alpha chain variable domain of TCR clone 381348 (TRAV21, TRAJ47)
CAVSGLYGNKLDF

SEQ ID NO: 762696 - protein, 17 aa, Homo sapiens
  CDR3 for beta chain variable domain of TCR clone 381348 (TRBV15, TRBJ2-3)
CATSGTTSEEGTDTQYF

SEQ ID NO: 762697 - protein, 14 aa, Homo sapiens
  CDR3 for alpha chain variable domain of TCR clone 381349 (TRAV1-2, TRAJ16)
CAVNRFSDGQKLLY

SEQ ID NO: 762698 - protein, 15 aa, Homo sapiens
  CDR3 for beta chain variable domain of TCR clone 381349 (TRBV7-9, TRBJ1-6)
CASSSPGRGNSALHF

SEQ ID NO: 762699 - protein, 19 aa, Homo sapiens
  CDR3 for alpha chain variable domain of TCR clone 381350 (TRAV16, )
CALSGDIQNPDPAVYQLRD

SEQ ID NO: 762700 - protein, 16 aa, Homo sapiens
  CDR3 for beta chain variable domain of TCR clone 381350 (TRBV12-5, TRBJ2-5)
CASGLRTSGNQETQYF

SEQ ID NO: 762701 - protein, 12 aa, Homo sapiens
  CDR3 for alpha chain variable domain of TCR clone 381351 (TRAV21, TRAJ3)
CCFYSSASKIIF

SEQ ID NO: 762702 - protein, 16 aa, Homo sapiens
  CDR3 for beta chain variable domain of TCR clone 381351 (TRBV19, TRBJ2-1)
CAISKAGPSSYNEQFF

SEQ ID NO: 762703 - protein, 15 aa, Homo sapiens
  CDR3 for alpha chain variable domain of TCR clone 381352 (TRAV26-1, TRAJ48)
CIDRWSWFGNEKLTF

SEQ ID NO: 762704 - protein, 12 aa, Homo sapiens
  CDR3 for beta chain variable domain of TCR clone 381352 (TRBV19, TRBJ2-5)
CASSISEETQYF

SEQ ID NO: 762705 - protein, 15 aa, Homo sapiens
  CDR3 for alpha chain variable domain of TCR clone 381353 (TRAV27, TRAJ38)
FAARRNAGNNRKPIW

SEQ ID NO: 762706 - protein, 13 aa, Homo sapiens
  CDR3 for beta chain variable domain of TCR clone 381353 (TRBV12-5, TRBJ2-3)
CASGDRQSDTQYF

SEQ ID NO: 762707 - protein, 14 aa, Homo sapiens
  CDR3 for alpha chain variable domain of TCR clone 381354 (TRAV2, TRAJ9)
CAVEDRSGGFKTIF

SEQ ID NO: 762708 - protein, 15 aa, Homo sapiens
  CDR3 for beta chain variable domain of TCR clone 381354 (TRBV11-3, TRBJ2-7)
CASSPGPASSYEQYL

SEQ ID NO: 762709 - protein, 15 aa, Homo sapiens
  CDR3 for alpha chain variable domain of TCR clone 381355 (TRAV17, TRAJ23)
CATDAEDNQGGKLIF

SEQ ID NO: 762710 - protein, 17 aa, Homo sapiens
  CDR3 for beta chain variable domain of TCR clone 381355 (TRBV7-8, TRBJ2-6)
CASSAGTGGAGANVLTF

SEQ ID NO: 762711 - protein, 13 aa, Homo sapiens
  CDR3 for alpha chain variable domain of TCR clone 381356 (TRAV3, TRAJ21)
CAVREPDFNKFYF

SEQ ID NO: 762712 - protein, 16 aa, Homo sapiens
  CDR3 for beta chain variable domain of TCR clone 381356 (TRBV10-3, TRBJ2-6)
CAISTSGDLGANVLTF

SEQ ID NO: 762713 - protein, 14 aa, Homo sapiens
  CDR3 for alpha chain variable domain of TCR clone 381357 (TRAV38-1, TRAJ45)
CAYYSGGGDDGLTF

SEQ ID NO: 762714 - protein, 20 aa, Homo sapiens
  CDR3 for beta chain variable domain of TCR clone 381357 (TRBV28, TRBJ2-1)
CASTPIGRSPGLAGGNEQLF

SEQ ID NO: 762715 - protein, 14 aa, Homo sapiens
  CDR3 for alpha chain variable domain of TCR clone 381358 (TRAV26-1, TRAJ57)
CIRAGQDGSEKLVF

SEQ ID NO: 762716 - protein, 13 aa, Homo sapiens
  CDR3 for beta chain variable domain of TCR clone 381358 (TRBV19, TRBJ2-7)
CASSLTTSYEQYF

SEQ ID NO: 762717 - protein, 14 aa, Homo sapiens
  CDR3 for alpha chain variable domain of TCR clone 381359 (TRAV1-2, TRAJ8)
CAVREDTRFQKLVF

SEQ ID NO: 762718 - protein, 15 aa, Homo sapiens
  CDR3 for beta chain variable domain of TCR clone 381359 (TRBV20-1, TRBJ2-7)
CSAREGRDSLYEQYF

SEQ ID NO: 762719 - protein, 14 aa, Homo sapiens
  CDR3 for alpha chain variable domain of TCR clone 381360 (TRAV21, TRAJ35)
CAVMPIGIGNVLRC

SEQ ID NO: 762720 - protein, 12 aa, Homo sapiens
  CDR3 for beta chain variable domain of TCR clone 381360 (TRBV7-9, TRBJ2-7)
CASSIKREEQYF

SEQ ID NO: 762721 - protein, 12 aa, Homo sapiens
  CDR3 for alpha chain variable domain of TCR clone 381361 (TRAV3, TRAJ26)
CAVRAYGQNFVF

SEQ ID NO: 762722 - protein, 14 aa, Homo sapiens
  CDR3 for beta chain variable domain of TCR clone 381361 (TRBV20-1, TRBJ2-4)
CSASGRVGENTQYF

SEQ ID NO: 762723 - protein, 13 aa, Homo sapiens
  CDR3 for alpha chain variable domain of TCR clone 381362 (TRAV13-1, TRAJ32)
QVTDDGATNKLIF

SEQ ID NO: 762724 - protein, 15 aa, Homo sapiens
  CDR3 for beta chain variable domain of TCR clone 381362 (TRBV18, TRBJ2-1)
CASSPPSASYNEQFF

SEQ ID NO: 762725 - protein, 11 aa, Homo sapiens
  CDR3 for alpha chain variable domain of TCR clone 381363 (TRAV12-1, TRAJ30)
CAVGRDDKIIF

SEQ ID NO: 762726 - protein, 14 aa, Homo sapiens
  CDR3 for beta chain variable domain of TCR clone 381363 (TRBV6-1, TRBJ1-3)
CASVQGGGGNTIYF

SEQ ID NO: 762727 - protein, 16 aa, Homo sapiens
  CDR3 for alpha chain variable domain of TCR clone 381364 (TRAV30, TRAJ24)
CGTEIVDADSWGKFQL

SEQ ID NO: 762728 - protein, 18 aa, Homo sapiens
  CDR3 for beta chain variable domain of TCR clone 381364 (TRBV20-1, TRBJ2-2)
CSARVQTARPSGTGELFF

SEQ ID NO: 762729 - protein, 14 aa, Homo sapiens
  CDR3 for alpha chain variable domain of TCR clone 381365 (TRAV13-1, TRAJ35)
CAASKGGFGNLLHC

SEQ ID NO: 762730 - protein, 15 aa, Homo sapiens
  CDR3 for beta chain variable domain of TCR clone 381365 (TRBV7-9, TRBJ1-6)
CASSSPGRGNSPLHF

SEQ ID NO: 762731 - protein, 14 aa, Homo sapiens
  CDR3 for alpha chain variable domain of TCR clone 381366 (TRAV1-2, TRAJ16)
FAVNRFSDGQKLFF

SEQ ID NO: 762732 - protein, 15 aa, Homo sapiens
  CDR3 for beta chain variable domain of TCR clone 381366 (TRBV9, TRBJ1-6)
CASSVAGTGDSPLHF

SEQ ID NO: 762733 - protein, 18 aa, Homo sapiens
  CDR3 for alpha chain variable domain of TCR clone 381367 (TRAV21, TRAJ52)
CAVRPSPAGGTSYGELTF

SEQ ID NO: 762734 - protein, 16 aa, Homo sapiens
  CDR3 for beta chain variable domain of TCR clone 381367 (TRBV2, TRBJ1-4)
CASNLLQGATNEKLFF

SEQ ID NO: 762735 - protein, 12 aa, Homo sapiens
  CDR3 for alpha chain variable domain of TCR clone 381368 (TRAV16, TRAJ10)
CSRTGGGNKLTF

SEQ ID NO: 762736 - protein, 12 aa, Homo sapiens
  CDR3 for beta chain variable domain of TCR clone 381368 (TRBV11-3, TRBJ1-1)
CACSHRQGEAFF

SEQ ID NO: 762737 - protein, 15 aa, Homo sapiens
  CDR3 for alpha chain variable domain of TCR clone 381369 (TRAV12-3, TRAJ42)
CAMSGHGGSQGNLIF

SEQ ID NO: 762738 - protein, 15 aa, Homo sapiens
  CDR3 for beta chain variable domain of TCR clone 381369 (TRBV5-1, TRBJ2-1)
CASKGLAGVYNEQFF

SEQ ID NO: 762739 - protein, 15 aa, Homo sapiens
  CDR3 for alpha chain variable domain of TCR clone 381370 (TRAV12-2, TRAJ56)
CAVNYFTGDNSKLTF

SEQ ID NO: 762740 - protein, 13 aa, Homo sapiens
  CDR3 for beta chain variable domain of TCR clone 381370 (TRBV20-1, TRBJ1-2)
CSARDRVYGGYTF

SEQ ID NO: 762741 - protein, 14 aa, Homo sapiens
  CDR3 for alpha chain variable domain of TCR clone 381371 (TRAV23/DV6, TRAJ37)
CAASTSSNTGKLIF

SEQ ID NO: 762742 - protein, 16 aa, Homo sapiens
  CDR3 for beta chain variable domain of TCR clone 381371 (TRBV19, TRBJ2-2)
CASRSPGTGATGELFF

SEQ ID NO: 762743 - protein, 13 aa, Homo sapiens
  CDR3 for alpha chain variable domain of TCR clone 381372 (TRAV12-3, TRAJ13)
CAMSSGGYQKVTF

SEQ ID NO: 762744 - protein, 14 aa, Homo sapiens
  CDR3 for beta chain variable domain of TCR clone 381372 (TRBV2, TRBJ2-1)
CTSRTGSAYNEQFF

SEQ ID NO: 762745 - protein, 14 aa, Homo sapiens
  CDR3 for alpha chain variable domain of TCR clone 381373 (TRAV12-2, TRAJ45)
CAVYSGGGADGLTF

SEQ ID NO: 762746 - protein, 12 aa, Homo sapiens
  CDR3 for beta chain variable domain of TCR clone 381373 (TRBV7-9, TRBJ2-7)
CASSIKREEQYF

SEQ ID NO: 762747 - protein, 17 aa, Homo sapiens
  CDR3 for alpha chain variable domain of TCR clone 381374 (TRAV1-2, TRAJ27)
CAVRDKTGDTNAGKSTF

SEQ ID NO: 762748 - protein, 15 aa, Homo sapiens
  CDR3 for beta chain variable domain of TCR clone 381374 (TRBV5-1, TRBJ2-1)
CASSPPRAPYNEQFF

SEQ ID NO: 762749 - protein, 13 aa, Homo sapiens
  CDR3 for alpha chain variable domain of TCR clone 381375 (TRAV1-2, TRAJ7)
CAGPYYWNNRLAF

SEQ ID NO: 762750 - protein, 14 aa, Homo sapiens
  CDR3 for beta chain variable domain of TCR clone 381375 (TRBV7-8, TRBJ2-3)
CASSLEAGTDTQYF

SEQ ID NO: 762751 - protein, 14 aa, Homo sapiens
  CDR3 for alpha chain variable domain of TCR clone 381376 (TRAV12-1, TRAJ30)
CLVNIGGRDDKIIF

SEQ ID NO: 762752 - protein, 13 aa, Homo sapiens
  CDR3 for beta chain variable domain of TCR clone 381376 (TRBV12-5, TRBJ2-1)
CASGVGRGNEQFF

SEQ ID NO: 762753 - protein, 15 aa, Homo sapiens
  CDR3 for alpha chain variable domain of TCR clone 381377 (TRAV1-2, TRAJ6)
CAMSATTGGSYIPTF

SEQ ID NO: 762754 - protein, 16 aa, Homo sapiens
  CDR3 for beta chain variable domain of TCR clone 381377 (TRBV20-1, TRBJ1-2)
CSASMGQGVANYGYTF

SEQ ID NO: 762755 - protein, 15 aa, Homo sapiens
  CDR3 for alpha chain variable domain of TCR clone 381378 (TRAV3, TRAJ47)
CAVRDIGEYGNKLVF

SEQ ID NO: 762756 - protein, 14 aa, Homo sapiens
  CDR3 for beta chain variable domain of TCR clone 381378 (TRBV13, TRBJ2-5)
CASCLERVGETQYF

SEQ ID NO: 762757 - protein, 11 aa, Homo sapiens
  CDR3 for alpha chain variable domain of TCR clone 381379 (TRAV23/DV6, TRAJ58)
CAARLLRGETS

SEQ ID NO: 762758 - protein, 15 aa, Homo sapiens
  CDR3 for beta chain variable domain of TCR clone 381379 (TRBV5-7, TRBJ1-5)
CASSYGKLWDQPQHF

SEQ ID NO: 762759 - protein, 16 aa, Homo sapiens
  CDR3 for alpha chain variable domain of TCR clone 381380 (TRAV12-2, TRAJ40)
CAVIRGGTSGTYKYTF

SEQ ID NO: 762760 - protein, 14 aa, Homo sapiens
  CDR3 for beta chain variable domain of TCR clone 381380 (TRBV20-1, TRBJ2-5)
CSARDGRAGETQYF

SEQ ID NO: 762761 - protein, 17 aa, Homo sapiens
  CDR3 for alpha chain variable domain of TCR clone 381381 (TRAV38-2/DV8, TRAJ28)
CAFLTLYSGAGSYQLTF

SEQ ID NO: 762762 - protein, 22 aa, Homo sapiens
  CDR3 for beta chain variable domain of TCR clone 381381 (TRBV6-1, TRBJ1-3)
CASVQGGGWKHHIFWRGKLAHC

SEQ ID NO: 762763 - protein, 15 aa, Homo sapiens
  CDR3 for alpha chain variable domain of TCR clone 381382 (TRAV21, TRAJ52)
CAVRGGGTSYGKLTF

SEQ ID NO: 762764 - protein, 12 aa, Homo sapiens
  CDR3 for beta chain variable domain of TCR clone 381382 (TRBV11-2, TRBJ2-1)
CASSPGNNEQFF

SEQ ID NO: 762765 - protein, 12 aa, Homo sapiens
  CDR3 for alpha chain variable domain of TCR clone 381383 (TRAV9-2, TRAJ26)
CALRGYGQNFVF

SEQ ID NO: 762766 - protein, 15 aa, Homo sapiens
  CDR3 for beta chain variable domain of TCR clone 381383 (TRBV4-1, TRBJ1-4)
CASSDTGGTNEKLFF

SEQ ID NO: 762767 - protein, 11 aa, Homo sapiens
  CDR3 for alpha chain variable domain of TCR clone 381384 (TRAV8-6, TRAJ48)
CAVSQNEKLTF

SEQ ID NO: 762768 - protein, 14 aa, Homo sapiens
  CDR3 for beta chain variable domain of TCR clone 381384 (TRBV2, TRBJ2-5)
CQHEGRGPQETQYF

SEQ ID NO: 762769 - protein, 13 aa, Homo sapiens
  CDR3 for alpha chain variable domain of TCR clone 381385 (TRAV21, TRAJ20)
CAVGLRVDYKLSF

SEQ ID NO: 762770 - protein, 16 aa, Homo sapiens
  CDR3 for beta chain variable domain of TCR clone 381385 (TRBV20-1, TRBJ2-1)
CSARSTSESSYNEQFF

SEQ ID NO: 762771 - protein, 14 aa, Homo sapiens
  CDR3 for alpha chain variable domain of TCR clone 381386 (TRAV1-2, TRAJ16)
CAVNRFSDGQKLLF

SEQ ID NO: 762772 - protein, 19 aa, Homo sapiens
  CDR3 for beta chain variable domain of TCR clone 381386 (TRBV19, TRBJ2-5)
CASSIGQVTDFLLGETQYF

SEQ ID NO: 762773 - protein, 14 aa, Homo sapiens
  CDR3 for alpha chain variable domain of TCR clone 381387 (TRAV12-2, TRAJ40)
CSVKIPSGTYKYIF

SEQ ID NO: 762774 - protein, 14 aa, Homo sapiens
  CDR3 for beta chain variable domain of TCR clone 381387 (TRBV20-1, TRBJ1-1)
CSAQTRVGGTEAFF

SEQ ID NO: 762775 - protein, 11 aa, Homo sapiens
  CDR3 for alpha chain variable domain of TCR clone 381388 (TRAV3, TRAJ21)
CAVGNFNKFYF

SEQ ID NO: 762776 - protein, 11 aa, Homo sapiens
  CDR3 for beta chain variable domain of TCR clone 381388 (TRBV7-9, TRBJ2-5)
CASSLGETQYF

SEQ ID NO: 762777 - protein, 14 aa, Homo sapiens
  CDR3 for alpha chain variable domain of TCR clone 381389 (TRAV30, TRAJ26)
CGTEIVSYGQNFVF

SEQ ID NO: 762778 - protein, 12 aa, Homo sapiens
  CDR3 for beta chain variable domain of TCR clone 381389 (TRBV11-2, TRBJ2-1)
CASSPGNNEQFF

SEQ ID NO: 762779 - protein, 14 aa, Homo sapiens
  CDR3 for alpha chain variable domain of TCR clone 381390 (TRAV1-2, TRAJ16)
CAVNRSSDGQKLLF

SEQ ID NO: 762780 - protein, 14 aa, Homo sapiens
  CDR3 for beta chain variable domain of TCR clone 381390 (TRBV7-2, TRBJ2-7)
CASSPKTSFHEQYF

SEQ ID NO: 762781 - protein, 14 aa, Homo sapiens
  CDR3 for alpha chain variable domain of TCR clone 381391 (TRAV8-1, TRAJ24)
CAVNAADSWGKLQF

SEQ ID NO: 762782 - protein, 16 aa, Homo sapiens
  CDR3 for beta chain variable domain of TCR clone 381391 (TRBV4-3, TRBJ2-1)
CANSPALDRGVNEQFF

SEQ ID NO: 762783 - protein, 11 aa, Homo sapiens
  CDR3 for alpha chain variable domain of TCR clone 381392 (TRAV3, TRAJ21)
CAVGNFNKFYF

SEQ ID NO: 762784 - protein, 15 aa, Homo sapiens
  CDR3 for beta chain variable domain of TCR clone 381392 (TRBV29-1, TRBJ2-1)
CSVEGGPAYYNEQFF

SEQ ID NO: 762785 - protein, 12 aa, Homo sapiens
  CDR3 for alpha chain variable domain of TCR clone 381393 (TRAV2, TRAJ9)
CAVGAGGFKTIF

SEQ ID NO: 762786 - protein, 14 aa, Homo sapiens
  CDR3 for beta chain variable domain of TCR clone 381393 (TRBV6-1, TRBJ1-3)
CASVQGGGGNTIYC

SEQ ID NO: 762787 - protein, 16 aa, Homo sapiens
  CDR3 for alpha chain variable domain of TCR clone 381394 (TRAV12-3, TRAJ50)
CAMSDPMKTSYDKVIF

SEQ ID NO: 762788 - protein, 13 aa, Homo sapiens
  CDR3 for beta chain variable domain of TCR clone 381394 (TRBV4-1, TRBJ2-3)
CASSLDFTDTQYF

SEQ ID NO: 762789 - protein, 14 aa, Homo sapiens
  CDR3 for alpha chain variable domain of TCR clone 381395 (TRAV38-2/DV8, TRAJ23)
CAYRSQNQGGKLIF

SEQ ID NO: 762790 - protein, 17 aa, Homo sapiens
  CDR3 for beta chain variable domain of TCR clone 381395 (TRBV11-2, TRBJ2-1)
CASSLYPPGVEYNERFF

SEQ ID NO: 762791 - protein, 10 aa, Homo sapiens
  CDR3 for alpha chain variable domain of TCR clone 381396 (TRAV26-1, TRAJ40)
CIAGTYKYIF

SEQ ID NO: 762792 - protein, 12 aa, Homo sapiens
  CDR3 for beta chain variable domain of TCR clone 381396 (TRBV2, TRBJ1-1)
CATPSRGTEAFF

SEQ ID NO: 762793 - protein, 14 aa, Homo sapiens
  CDR3 for alpha chain variable domain of TCR clone 381397 (TRAV13-2, TRAJ22)
CADGTLGSARQLTF

SEQ ID NO: 762794 - protein, 16 aa, Homo sapiens
  CDR3 for beta chain variable domain of TCR clone 381397 (TRBV19, TRBJ2-1)
CASSSKGTRSFNEQFF

SEQ ID NO: 762795 - protein, 18 aa, Homo sapiens
  CDR3 for alpha chain variable domain of TCR clone 381398 (TRAV13-1, TRAJ10)
YAASKGRAVTGGGNKLTF

SEQ ID NO: 762796 - protein, 14 aa, Homo sapiens
  CDR3 for beta chain variable domain of TCR clone 381398 (TRBV18, TRBJ2-7)
CASSPRGGAYEQYF

SEQ ID NO: 762797 - protein, 15 aa, Homo sapiens
  CDR3 for alpha chain variable domain of TCR clone 381399 (TRAV26-1, TRAJ28)
CIVRVAGAGSYQLTF

SEQ ID NO: 762798 - protein, 19 aa, Homo sapiens
  CDR3 for beta chain variable domain of TCR clone 381399 (TRBV7-3, TRBJ2-7)
CASSLTGVAGGWPSYEQYV

SEQ ID NO: 762799 - protein, 11 aa, Homo sapiens
  CDR3 for alpha chain variable domain of TCR clone 381400 (TRAV1-1, TRAJ23)
CAVRQGGKLIF

SEQ ID NO: 762800 - protein, 20 aa, Homo sapiens
  CDR3 for beta chain variable domain of TCR clone 381400 (TRBV7-8, TRBJ2-2)
CASSNLFRGPTIHITGELFF

SEQ ID NO: 762801 - protein, 14 aa, Homo sapiens
  CDR3 for alpha chain variable domain of TCR clone 381401 (TRAV17, TRAJ22)
CATSPSGSARQLTF

SEQ ID NO: 762802 - protein, 12 aa, Homo sapiens
  CDR3 for beta chain variable domain of TCR clone 381401 (TRBV28, TRBJ2-3)
CASSLYRDTQYF

SEQ ID NO: 762803 - protein, 11 aa, Homo sapiens
  CDR3 for alpha chain variable domain of TCR clone 381402 (TRAV21, TRAJ11)
CAVNGYSTLTF

SEQ ID NO: 762804 - protein, 17 aa, Homo sapiens
  CDR3 for beta chain variable domain of TCR clone 381402 (TRBV7-9, TRBJ2-7)
CASSFDGSRGGAYEQYF

SEQ ID NO: 762805 - protein, 10 aa, Homo sapiens
  CDR3 for alpha chain variable domain of TCR clone 381403 (TRAV30, TRAJ16)
CGTGGQKLLF

SEQ ID NO: 762806 - protein, 18 aa, Homo sapiens
  CDR3 for beta chain variable domain of TCR clone 381403 (TRBV7-2, TRBJ2-3)
CASSLKREGSGITDTQYF

SEQ ID NO: 762807 - protein, 14 aa, Homo sapiens
  CDR3 for alpha chain variable domain of TCR clone 381404 (TRAV26-1, TRAJ38)
CIADNARNNRKLIW

SEQ ID NO: 762808 - protein, 15 aa, Homo sapiens
  CDR3 for beta chain variable domain of TCR clone 381404 (TRBV20-1, TRBJ2-7)
CSARDRVSGMDEQYF

SEQ ID NO: 762809 - protein, 11 aa, Homo sapiens
  CDR3 for alpha chain variable domain of TCR clone 381405 (TRAV30, TRAJ23)
CGTEIAGKLIF

SEQ ID NO: 762810 - protein, 13 aa, Homo sapiens
  CDR3 for beta chain variable domain of TCR clone 381405 (TRBV7-8, TRBJ2-1)
CASTRDAVDEQFF

SEQ ID NO: 762811 - protein, 14 aa, Homo sapiens
  CDR3 for alpha chain variable domain of TCR clone 381406 (TRAV8-4, TRAJ47)
CAVSIMEYENKLVF

SEQ ID NO: 762812 - protein, 16 aa, Homo sapiens
  CDR3 for beta chain variable domain of TCR clone 381406 (TRBV14, TRBJ1-2)
CASSQGPTTANYGYTF

SEQ ID NO: 762813 - protein, 14 aa, Homo sapiens
  CDR3 for alpha chain variable domain of TCR clone 381407 (TRAV2, TRAJ9)
CAVEDRSGGFKTIF

SEQ ID NO: 762814 - protein, 13 aa, Homo sapiens
  CDR3 for beta chain variable domain of TCR clone 381407 (TRBV24-1, TRBJ2-2)
CATSDWSTGELFF

SEQ ID NO: 762815 - protein, 13 aa, Homo sapiens
  CDR3 for alpha chain variable domain of TCR clone 381408 (TRAV36/DV7, TRAJ49)
CAGDSNTGNQFYF

SEQ ID NO: 762816 - protein, 15 aa, Homo sapiens
  CDR3 for beta chain variable domain of TCR clone 381408 (TRBV25-1, TRBJ1-4)
CASSKRIATNEKLFF

SEQ ID NO: 762817 - protein, 14 aa, Homo sapiens
  CDR3 for alpha chain variable domain of TCR clone 381409 (TRAV3, TRAJ40)
CAVRVRRGTYKYIF

SEQ ID NO: 762818 - protein, 15 aa, Homo sapiens
  CDR3 for beta chain variable domain of TCR clone 381409 (TRBV28, TRBJ2-1)
CASSIIAGGRSEQFF

SEQ ID NO: 762819 - protein, 15 aa, Homo sapiens
  CDR3 for alpha chain variable domain of TCR clone 381410 (TRAV14/DV4, TRAJ33)
CAMREGRDSNYQLIW

SEQ ID NO: 762820 - protein, 15 aa, Homo sapiens
  CDR3 for beta chain variable domain of TCR clone 381410 (TRBV5-5, TRBJ1-5)
CASSSTPGRNQPQHF

SEQ ID NO: 762821 - protein, 14 aa, Homo sapiens
  CDR3 for alpha chain variable domain of TCR clone 381411 (TRAV21, TRAJ4)
CAAPGVGGYNKLIF

SEQ ID NO: 762822 - protein, 16 aa, Homo sapiens
  CDR3 for beta chain variable domain of TCR clone 381411 (TRBV7-3, TRBJ2-2)
CASSLKRGTLSGELFF

SEQ ID NO: 762823 - protein, 16 aa, Homo sapiens
  CDR3 for alpha chain variable domain of TCR clone 381412 (TRAV30, TRAJ24)
CGTEIVDADSCGKFQF

SEQ ID NO: 762824 - protein, 14 aa, Homo sapiens
  CDR3 for beta chain variable domain of TCR clone 381412 (TRBV12-5, TRBJ2-5)
CASVSRTHQETQYF

SEQ ID NO: 762825 - protein, 13 aa, Homo sapiens
  CDR3 for alpha chain variable domain of TCR clone 381413 (TRAV36/DV7, TRAJ41)
CAVEANSGYALNF

SEQ ID NO: 762826 - protein, 12 aa, Homo sapiens
  CDR3 for beta chain variable domain of TCR clone 381413 (TRBV11-2, TRBJ2-2)
CASSLGGGELFF

SEQ ID NO: 762827 - protein, 17 aa, Homo sapiens
  CDR3 for alpha chain variable domain of TCR clone 381414 (TRAV3, TRAJ6)
CAVRDGPRAGGSYIPTF

SEQ ID NO: 762828 - protein, 12 aa, Homo sapiens
  CDR3 for beta chain variable domain of TCR clone 381414 (TRBV4-1, TRBJ2-3)
CASSQGTDTQYF

SEQ ID NO: 762829 - protein, 16 aa, Homo sapiens
  CDR3 for alpha chain variable domain of TCR clone 381415 (TRAV16, TRAJ4)
CALSRMFSGGYNKLIF

SEQ ID NO: 762830 - protein, 13 aa, Homo sapiens
  CDR3 for beta chain variable domain of TCR clone 381415 (TRBV4-2, TRBJ2-3)
CASSQDWQHTQYF

SEQ ID NO: 762831 - protein, 16 aa, Homo sapiens
  CDR3 for alpha chain variable domain of TCR clone 381416 (TRAV30, TRAJ24)
CGAEIVDADSWGKFQF

SEQ ID NO: 762832 - protein, 16 aa, Homo sapiens
  CDR3 for beta chain variable domain of TCR clone 381416 (TRBV7-9, TRBJ1-2)
CASSLGFSSGEDGYTF

SEQ ID NO: 762833 - protein, 18 aa, Homo sapiens
  CDR3 for alpha chain variable domain of TCR clone 381417 (TRAV21, TRAJ52)
CAVRPSPAGGTSYGKLTF

SEQ ID NO: 762834 - protein, 14 aa, Homo sapiens
  CDR3 for beta chain variable domain of TCR clone 381417 (TRBV25-1, TRBJ1-1)
CTSTHLGGNTEAFF

SEQ ID NO: 762835 - protein, 18 aa, Homo sapiens
  CDR3 for alpha chain variable domain of TCR clone 381418 (TRAV21, TRAJ52)
CAVRPSPAGGTSYGKLTF

SEQ ID NO: 762836 - protein, 16 aa, Homo sapiens
  CDR3 for beta chain variable domain of TCR clone 381418 (TRBV12-4, TRBJ1-5)
CASSRPVGGSNHPQHF

SEQ ID NO: 762837 - protein, 15 aa, Homo sapiens
  CDR3 for alpha chain variable domain of TCR clone 381419 (TRAV12-2, TRAJ50)
CAVNGLETSYDKVIF

SEQ ID NO: 762838 - protein, 14 aa, Homo sapiens
  CDR3 for beta chain variable domain of TCR clone 381419 (TRBV5-5, TRBJ2-2)
CASSLLGDTGELFF

SEQ ID NO: 762839 - protein, 17 aa, Homo sapiens
  CDR3 for alpha chain variable domain of TCR clone 381420 (TRAV12-2, TRAJ42)
CAVNILNYGGIQGNLIF

SEQ ID NO: 762840 - protein, 13 aa, Homo sapiens
  CDR3 for beta chain variable domain of TCR clone 381420 (TRBV3-1, TRBJ1-5)
CASSQDLDQTQHF

SEQ ID NO: 762841 - protein, 16 aa, Homo sapiens
  CDR3 for alpha chain variable domain of TCR clone 381421 (TRAV17, TRAJ35)
CATAEGGIGFGNVLHC

SEQ ID NO: 762842 - protein, 15 aa, Homo sapiens
  CDR3 for beta chain variable domain of TCR clone 381421 (TRBV20-1, TRBJ2-7)
CSARGPLAGGREQYF

SEQ ID NO: 762843 - protein, 15 aa, Homo sapiens
  CDR3 for alpha chain variable domain of TCR clone 381422 (TRAV8-2, TRAJ13)
CVLSDLSGGYQKVTF

SEQ ID NO: 762844 - protein, 16 aa, Homo sapiens
  CDR3 for beta chain variable domain of TCR clone 381422 (TRBV27, TRBJ2-2)
CASSFRGLVRTGELFF

SEQ ID NO: 762845 - protein, 14 aa, Homo sapiens
  CDR3 for alpha chain variable domain of TCR clone 381423 (TRAV20, TRAJ54)
CAVQAGRGAQKLVF

SEQ ID NO: 762846 - protein, 14 aa, Homo sapiens
  CDR3 for beta chain variable domain of TCR clone 381423 (TRBV7-7, TRBJ2-2)
CATRQDSDTGELFF

SEQ ID NO: 762847 - protein, 14 aa, Homo sapiens
  CDR3 for alpha chain variable domain of TCR clone 381424 (TRAV23/DV6, TRAJ8)
CTASKATGFQKLVF

SEQ ID NO: 762848 - protein, 15 aa, Homo sapiens
  CDR3 for beta chain variable domain of TCR clone 381424 (TRBV28, TRBJ2-3)
CASSPDRQGANTQYF

SEQ ID NO: 762849 - protein, 15 aa, Homo sapiens
  CDR3 for alpha chain variable domain of TCR clone 381425 (TRAV21, TRAJ52)
CAVRGGGTSYGKLPF

SEQ ID NO: 762850 - protein, 15 aa, Homo sapiens
  CDR3 for beta chain variable domain of TCR clone 381425 (TRBV18, TRBJ1-5)
CASSPSDRSNKPQHF

SEQ ID NO: 762851 - protein, 15 aa, Homo sapiens
  CDR3 for alpha chain variable domain of TCR clone 381426 (TRAV12-1, TRAJ44)
CVVFVNTSTASKLTF

SEQ ID NO: 762852 - protein, 15 aa, Homo sapiens
  CDR3 for beta chain variable domain of TCR clone 381426 (TRBV19, TRBJ2-1)
CASNAQGLAGREQFF

SEQ ID NO: 762853 - protein, 18 aa, Homo sapiens
  CDR3 for alpha chain variable domain of TCR clone 381427 (TRAV29/DV5, TRAJ52)
CAAGSRVAGGTSYGKLKF

SEQ ID NO: 762854 - protein, 16 aa, Homo sapiens
  CDR3 for beta chain variable domain of TCR clone 381427 (TRBV7-3, TRBJ2-2)
CASSLKRGTLSGELFF

SEQ ID NO: 762855 - protein, 18 aa, Homo sapiens
  CDR3 for alpha chain variable domain of TCR clone 381428 (TRAV8-4, TRAJ52)
RAVTRANAGGTSSGKLTF

SEQ ID NO: 762856 - protein, 12 aa, Homo sapiens
  CDR3 for beta chain variable domain of TCR clone 381428 (TRBV12-4, TRBJ2-7)
CASSLGGYEQYF

SEQ ID NO: 762857 - protein, 16 aa, Homo sapiens
  CDR3 for alpha chain variable domain of TCR clone 381429 (TRAV12-1, TRAJ12)
CVVNTLLLDSSYKLIF

SEQ ID NO: 762858 - protein, 13 aa, Homo sapiens
  CDR3 for beta chain variable domain of TCR clone 381429 (TRBV11-2, TRBJ2-1)
CASSSEAYNEQFF

SEQ ID NO: 762859 - protein, 15 aa, Homo sapiens
  CDR3 for alpha chain variable domain of TCR clone 381430 (TRAV8-3, TRAJ44)
CAVGAGAGTASKLTF

SEQ ID NO: 762860 - protein, 14 aa, Homo sapiens
  CDR3 for beta chain variable domain of TCR clone 381430 (TRBV5-1, TRBJ2-7)
CASSRGESLYEQYS

SEQ ID NO: 762861 - protein, 15 aa, Homo sapiens
  CDR3 for alpha chain variable domain of TCR clone 381431 (TRAV13-2, TRAJ5)
CAENPHWTGRRALTF

SEQ ID NO: 762862 - protein, 16 aa, Homo sapiens
  CDR3 for beta chain variable domain of TCR clone 381431 (TRBV7-9, TRBJ1-3)
CASSRTSGLRLGTMYF

SEQ ID NO: 762863 - protein, 15 aa, Homo sapiens
  CDR3 for alpha chain variable domain of TCR clone 381432 (TRAV26-1, TRAJ29)
CIVGVEGSGNTPLVF

SEQ ID NO: 762864 - protein, 18 aa, Homo sapiens
  CDR3 for beta chain variable domain of TCR clone 381432 (TRBV5-5, TRBJ1-5)
CASSLRQVKGSSNQPQHF

SEQ ID NO: 762865 - protein, 15 aa, Homo sapiens
  CDR3 for alpha chain variable domain of TCR clone 381433 (TRAV26-1, TRAJ29)
CIVRVEGSGNTPLVF

SEQ ID NO: 762866 - protein, 17 aa, Homo sapiens
  CDR3 for beta chain variable domain of TCR clone 381433 (TRBV7-9, TRBJ1-5)
CASSASQGGYSNQPQHF

SEQ ID NO: 762867 - protein, 15 aa, Homo sapiens
  CDR3 for alpha chain variable domain of TCR clone 381434 (TRAV27, TRAJ38)
CAARRKAGNNRKRIW

SEQ ID NO: 762868 - protein, 13 aa, Homo sapiens
  CDR3 for beta chain variable domain of TCR clone 381434 (TRBV12-5, TRBJ2-3)
CASGDRQSDTQYF

SEQ ID NO: 762869 - protein, 14 aa, Homo sapiens
  CDR3 for alpha chain variable domain of TCR clone 381435 (TRAV14/DV4, TRAJ15)
CAMRRDQAVTALIF

SEQ ID NO: 762870 - protein, 16 aa, Homo sapiens
  CDR3 for beta chain variable domain of TCR clone 381435 (TRBV15, TRBJ2-3)
CATSRDLGIVTDTQYF

SEQ ID NO: 762871 - protein, 18 aa, Homo sapiens
  CDR3 for alpha chain variable domain of TCR clone 381436 (TRAV21, TRAJ52)
CAVRPSPAGGTSYGKLTF

SEQ ID NO: 762872 - protein, 15 aa, Homo sapiens
  CDR3 for beta chain variable domain of TCR clone 381436 (TRBV27, TRBJ2-5)
CASSLIPSGGETQYF

SEQ ID NO: 762873 - protein, 13 aa, Homo sapiens
  CDR3 for alpha chain variable domain of TCR clone 381437 (TRAV8-3, TRAJ34)
CAVGAYNTDKLIF

SEQ ID NO: 762874 - protein, 11 aa, Homo sapiens
  CDR3 for beta chain variable domain of TCR clone 381437 (TRBV7-3, TRBJ1-2)
CASSVGDGYTF

SEQ ID NO: 762875 - protein, 17 aa, Homo sapiens
  CDR3 for alpha chain variable domain of TCR clone 381438 (TRAV13-1, TRAJ28)
CAASPPYSGAGSYQLTS

SEQ ID NO: 762876 - protein, 17 aa, Homo sapiens
  CDR3 for beta chain variable domain of TCR clone 381438 (TRBV13, TRBJ2-3)
CASSLSRVAGGRNTQYF

SEQ ID NO: 762877 - protein, 14 aa, Homo sapiens
  CDR3 for alpha chain variable domain of TCR clone 381439 (TRAV1-2, TRAJ16)
CAVNRFSGGQKLLF

SEQ ID NO: 762878 - protein, 15 aa, Homo sapiens
  CDR3 for beta chain variable domain of TCR clone 381439 (TRBV5-8, TRBJ1-1)
CASSFSGTSLKGAFF

SEQ ID NO: 762879 - protein, 13 aa, Homo sapiens
  CDR3 for alpha chain variable domain of TCR clone 381440 (TRAV1-2, TRAJ9)
CAALNTGGFKTIF

SEQ ID NO: 762880 - protein, 16 aa, Homo sapiens
  CDR3 for beta chain variable domain of TCR clone 381440 (TRBV11-2, TRBJ2-1)
CVSSPRLAGVYNEQFF

SEQ ID NO: 762881 - protein, 12 aa, Homo sapiens
  CDR3 for alpha chain variable domain of TCR clone 381441 (TRAV5, TRAJ29)
CAESKKETHLLS

SEQ ID NO: 762882 - protein, 15 aa, Homo sapiens
  CDR3 for beta chain variable domain of TCR clone 381441 (TRBV10-1, TRBJ2-3)
CASSATSGGFGTQYF

SEQ ID NO: 762883 - protein, 10 aa, Homo sapiens
  CDR3 for alpha chain variable domain of TCR clone 381442 (TRAV2, TRAJ34)
CAVVNDKLIF

SEQ ID NO: 762884 - protein, 20 aa, Homo sapiens
  CDR3 for beta chain variable domain of TCR clone 381442 (TRBV19, TRBJ2-1)
CASRISRTVTSTQLNNEQFF

SEQ ID NO: 762885 - protein, 15 aa, Homo sapiens
  CDR3 for alpha chain variable domain of TCR clone 381443 (TRAV3, TRAJ5)
CAVRDLDTGRRSLTF

SEQ ID NO: 762886 - protein, 14 aa, Homo sapiens
  CDR3 for beta chain variable domain of TCR clone 381443 (TRBV25-1, TRBJ1-1)
CASTHLGGNTEAFF

SEQ ID NO: 762887 - protein, 12 aa, Homo sapiens
  CDR3 for alpha chain variable domain of TCR clone 381444 (TRAV12-3, TRAJ39)
CAMTQAGNMHTF

SEQ ID NO: 762888 - protein, 13 aa, Homo sapiens
  CDR3 for beta chain variable domain of TCR clone 381444 (TRBV20-1, TRBJ1-1)
CSAPEGGNTEAFF

SEQ ID NO: 762889 - protein, 14 aa, Homo sapiens
  CDR3 for alpha chain variable domain of TCR clone 381445 (TRAV13-2, TRAJ43)
CAEIPTYNNNDMRF

SEQ ID NO: 762890 - protein, 15 aa, Homo sapiens
  CDR3 for beta chain variable domain of TCR clone 381445 (TRBV7-9, TRBJ2-2)
CASGPLDTFPVELFF

SEQ ID NO: 762891 - protein, 12 aa, Homo sapiens
  CDR3 for alpha chain variable domain of TCR clone 381446 (TRAV12-3, TRAJ20)
YAMVGGDYKLSF

SEQ ID NO: 762892 - protein, 14 aa, Homo sapiens
  CDR3 for beta chain variable domain of TCR clone 381446 (TRBV5-5, TRBJ1-5)
CASSGQGVDQPQHF

SEQ ID NO: 762893 - protein, 20 aa, Homo sapiens
  CDR3 for alpha chain variable domain of TCR clone 381447 (TRAV21, TRAJ4)
AASQPGDSATLAGGYNKLIF

SEQ ID NO: 762894 - protein, 11 aa, Homo sapiens
  CDR3 for beta chain variable domain of TCR clone 381447 (TRBV29-1, TRBJ2-5)
CSEDRTGTQYF

SEQ ID NO: 762895 - protein, 18 aa, Homo sapiens
  CDR3 for alpha chain variable domain of TCR clone 381448 (TRAV13-1, TRAJ52)
CSAKNPNAGGTSYGKLTF

SEQ ID NO: 762896 - protein, 13 aa, Homo sapiens
  CDR3 for beta chain variable domain of TCR clone 381448 (TRBV7-9, TRBJ1-2)
CASSLKQNYGYTF

SEQ ID NO: 762897 - protein, 12 aa, Homo sapiens
  CDR3 for alpha chain variable domain of TCR clone 381449 (TRAV35, TRAJ30)
CAGLNRDDKIIF

SEQ ID NO: 762898 - protein, 14 aa, Homo sapiens
  CDR3 for beta chain variable domain of TCR clone 381449 (TRBV18, TRBJ2-5)
CASSPGVSQDTQYF

SEQ ID NO: 762899 - protein, 14 aa, Homo sapiens
  CDR3 for alpha chain variable domain of TCR clone 381450 (TRAV8-4, TRAJ11)
CAVSGGVGYSTLTF

SEQ ID NO: 762900 - protein, 14 aa, Homo sapiens
  CDR3 for beta chain variable domain of TCR clone 381450 (TRBV4-1, TRBJ2-2)
CASSQAVNTGELFF

SEQ ID NO: 762901 - protein, 14 aa, Homo sapiens
  CDR3 for alpha chain variable domain of TCR clone 381451 (TRAV12-2, TRAJ9)
CAVNMEGGGLKTIF

SEQ ID NO: 762902 - protein, 14 aa, Homo sapiens
  CDR3 for beta chain variable domain of TCR clone 381451 (TRBV19, TRBJ2-3)
CASSAPRGTDTQYF

SEQ ID NO: 762903 - protein, 14 aa, Homo sapiens
  CDR3 for alpha chain variable domain of TCR clone 381452 (TRAV12-1, TRAJ43)
CVVNGRSNNNDMRF

SEQ ID NO: 762904 - protein, 13 aa, Homo sapiens
  CDR3 for beta chain variable domain of TCR clone 381452 (TRBV10-3, TRBJ2-7)
CASNLAVNYEQYF

SEQ ID NO: 762905 - protein, 14 aa, Homo sapiens
  CDR3 for alpha chain variable domain of TCR clone 381453 (TRAV27, TRAJ22)
CAGVSVLGKRQLTF

SEQ ID NO: 762906 - protein, 14 aa, Homo sapiens
  CDR3 for beta chain variable domain of TCR clone 381453 (TRBV18, TRBJ2-5)
CASSPGVSQETQYF

SEQ ID NO: 762907 - protein, 15 aa, Homo sapiens
  CDR3 for alpha chain variable domain of TCR clone 381454 (TRAV12-3, TRAJ42)
CAMSGHGGSQGNPIF

SEQ ID NO: 762908 - protein, 14 aa, Homo sapiens
  CDR3 for beta chain variable domain of TCR clone 381454 (TRBV7-2, TRBJ2-7)
CASSPKTSFYEQYF

SEQ ID NO: 762909 - protein, 18 aa, Homo sapiens
  CDR3 for alpha chain variable domain of TCR clone 381455 (TRAV13-1, TRAJ52)
CAASKRSAGGTSYGKLTY

SEQ ID NO: 762910 - protein, 13 aa, Homo sapiens
  CDR3 for beta chain variable domain of TCR clone 381455 (TRBV12-4, TRBJ1-2)
CASSLRQGKGYTF

SEQ ID NO: 762911 - protein, 16 aa, Homo sapiens
  CDR3 for alpha chain variable domain of TCR clone 381456 (TRAV8-3, TRAJ13)
CAVGACSSGGYQKVTF

SEQ ID NO: 762912 - protein, 15 aa, Homo sapiens
  CDR3 for beta chain variable domain of TCR clone 381456 (TRBV19, TRBJ1-5)
CASSIVWADNQPQHF

SEQ ID NO: 762913 - protein, 11 aa, Homo sapiens
  CDR3 for alpha chain variable domain of TCR clone 381457 (TRAV3, TRAJ21)
CAVGNCNKFYF

SEQ ID NO: 762914 - protein, 15 aa, Homo sapiens
  CDR3 for beta chain variable domain of TCR clone 381457 (TRBV19, TRBJ1-2)
CASSVGQVLNYGYTF

SEQ ID NO: 762915 - protein, 12 aa, Homo sapiens
  CDR3 for alpha chain variable domain of TCR clone 381458 (TRAV12-3, TRAJ40)
CAVSSGTYKYIL

SEQ ID NO: 762916 - protein, 15 aa, Homo sapiens
  CDR3 for beta chain variable domain of TCR clone 381458 (TRBV7-9, TRBJ2-7)
CASSPGGGLTYEQYF

SEQ ID NO: 762917 - protein, 18 aa, Homo sapiens
  CDR3 for alpha chain variable domain of TCR clone 381459 (TRAV21, TRAJ52)
CAVSPSPAGGTSYGKLTF

SEQ ID NO: 762918 - protein, 14 aa, Homo sapiens
  CDR3 for beta chain variable domain of TCR clone 381459 (TRBV4-2, TRBJ2-1)
CASGLDRAYNEQFF

SEQ ID NO: 762919 - protein, 15 aa, Homo sapiens
  CDR3 for alpha chain variable domain of TCR clone 381460 (TRAV3, TRAJ17)
CAVRDGPAAGNKLTF

SEQ ID NO: 762920 - protein, 16 aa, Homo sapiens
  CDR3 for beta chain variable domain of TCR clone 381460 (TRBV7-3, TRBJ2-2)
CASSLKRGTLSGELFV

SEQ ID NO: 762921 - protein, 17 aa, Homo sapiens
  CDR3 for alpha chain variable domain of TCR clone 381461 (TRAV38-1, TRAJ45)
CAFMRSHSGGGADGLTF

SEQ ID NO: 762922 - protein, 15 aa, Homo sapiens
  CDR3 for beta chain variable domain of TCR clone 381461 (TRBV5-1, TRBJ2-1)
CASSPPRAPYNEQFF

SEQ ID NO: 762923 - protein, 14 aa, Homo sapiens
  CDR3 for alpha chain variable domain of TCR clone 381462 (TRAV21, TRAJ45)
CAVVSGGGADGLTF

SEQ ID NO: 762924 - protein, 14 aa, Homo sapiens
  CDR3 for beta chain variable domain of TCR clone 381462 (TRBV20-1, TRBJ2-3)
CSALGREGADTQYF

SEQ ID NO: 762925 - protein, 15 aa, Homo sapiens
  CDR3 for alpha chain variable domain of TCR clone 381463 (TRAV12-3, TRAJ6)
CAMSGTTGGSYIPTY

SEQ ID NO: 762926 - protein, 16 aa, Homo sapiens
  CDR3 for beta chain variable domain of TCR clone 381463 (TRBV20-1, TRBJ1-2)
CSASMVQGVANYGYTF

SEQ ID NO: 762927 - protein, 15 aa, Homo sapiens
  CDR3 for alpha chain variable domain of TCR clone 381464 (TRAV35, TRAJ40)
CAGQLGTSGTYKYIF

SEQ ID NO: 762928 - protein, 14 aa, Homo sapiens
  CDR3 for beta chain variable domain of TCR clone 381464 (TRBV4-2, TRBJ2-1)
CASGLDRAYNEQFF

SEQ ID NO: 762929 - protein, 15 aa, Homo sapiens
  CDR3 for alpha chain variable domain of TCR clone 381465 (TRAV8-6, TRAJ40)
CAVSEAPSGTYKYIF

SEQ ID NO: 762930 - protein, 14 aa, Homo sapiens
  CDR3 for beta chain variable domain of TCR clone 381465 (TRBV6-5, TRBJ2-7)
CASSTSGCNYEQYF

SEQ ID NO: 762931 - protein, 14 aa, Homo sapiens
  CDR3 for alpha chain variable domain of TCR clone 381466 (TRAV12-1, TRAJ3)
CGELSGSSASKIIF

SEQ ID NO: 762932 - protein, 14 aa, Homo sapiens
  CDR3 for beta chain variable domain of TCR clone 381466 (TRBV7-6, TRBJ2-3)
CASSLGTVTDTQYF

SEQ ID NO: 762933 - protein, 11 aa, Homo sapiens
  CDR3 for alpha chain variable domain of TCR clone 381467 (TRAV17, TRAJ43)
CATPRSNGMRF

SEQ ID NO: 762934 - protein, 14 aa, Homo sapiens
  CDR3 for beta chain variable domain of TCR clone 381467 (TRBV11-2, TRBJ2-1)
CASSLAGGTNEQFF

SEQ ID NO: 762935 - protein, 14 aa, Homo sapiens
  CDR3 for alpha chain variable domain of TCR clone 381468 (TRAV12-2, TRAJ11)
CAFEGGSGYSTLTF

SEQ ID NO: 762936 - protein, 16 aa, Homo sapiens
  CDR3 for beta chain variable domain of TCR clone 381468 (TRBV6-1, TRBJ1-2)
CASSGAWQGRSHGYTF

SEQ ID NO: 762937 - protein, 15 aa, Homo sapiens
  CDR3 for alpha chain variable domain of TCR clone 381469 (TRAV26-1, TRAJ29)
CIVRVEGSGNTPLVF

SEQ ID NO: 762938 - protein, 11 aa, Homo sapiens
  CDR3 for beta chain variable domain of TCR clone 381469 (TRBV11-2, TRBJ2-2)
CAGSLPGELFF

SEQ ID NO: 762939 - protein, 13 aa, Homo sapiens
  CDR3 for alpha chain variable domain of TCR clone 381470 (TRAV12-3, TRAJ33)
CTMSVNSNYQLIW

SEQ ID NO: 762940 - protein, 13 aa, Homo sapiens
  CDR3 for beta chain variable domain of TCR clone 381470 (TRBV7-2, TRBJ2-2)
CASSLAGTGELFF

SEQ ID NO: 762941 - protein, 15 aa, Homo sapiens
  CDR3 for alpha chain variable domain of TCR clone 381471 (TRAV21, TRAJ53)
CATLNSGGSNYKLTF

SEQ ID NO: 762942 - protein, 16 aa, Homo sapiens
  CDR3 for beta chain variable domain of TCR clone 381471 (TRBV9, TRBJ2-1)
CASIVGGGGNYNEQFF

SEQ ID NO: 762943 - protein, 14 aa, Homo sapiens
  CDR3 for alpha chain variable domain of TCR clone 381472 (TRAV1-2, TRAJ8)
CAVREDTGFQKLVF

SEQ ID NO: 762944 - protein, 11 aa, Homo sapiens
  CDR3 for beta chain variable domain of TCR clone 381472 (TRBV11-3, TRBJ2-7)
CASSRTYELYF

SEQ ID NO: 762945 - protein, 17 aa, Homo sapiens
  CDR3 for alpha chain variable domain of TCR clone 381473 (TRAV3, TRAJ38)
CAVRDRLNAGNNRKLLW

SEQ ID NO: 762946 - protein, 15 aa, Homo sapiens
  CDR3 for beta chain variable domain of TCR clone 381473 (TRBV10-3, TRBJ2-1)
CAIRNGTSGHNEQFF

SEQ ID NO: 762947 - protein, 13 aa, Homo sapiens
  CDR3 for alpha chain variable domain of TCR clone 381474 (TRAV20, TRAJ21)
CAVEGYNFNKFYF

SEQ ID NO: 762948 - protein, 18 aa, Homo sapiens
  CDR3 for beta chain variable domain of TCR clone 381474 (TRBV11-2, TRBJ2-3)
CASSLGGASRGAPNTQYF

SEQ ID NO: 762949 - protein, 15 aa, Homo sapiens
  CDR3 for alpha chain variable domain of TCR clone 381475 (TRAV4, TRAJ10)
CLVVREGGGGNKLTF

SEQ ID NO: 762950 - protein, 16 aa, Homo sapiens
  CDR3 for beta chain variable domain of TCR clone 381475 (TRBV19, TRBJ2-1)
CASSKAGPSSYNEQFF

SEQ ID NO: 762951 - protein, 10 aa, Homo sapiens
  CDR3 for alpha chain variable domain of TCR clone 381476 (TRAV5, TRAJ34)
CAEDTDKLIF

SEQ ID NO: 762952 - protein, 16 aa, Homo sapiens
  CDR3 for beta chain variable domain of TCR clone 381476 (TRBV7-2, TRBJ1-4)
CASSLAPGRRDEKLFF

SEQ ID NO: 762953 - protein, 15 aa, Homo sapiens
  CDR3 for alpha chain variable domain of TCR clone 381477 (TRAV26-1, TRAJ40)
CIVRVTTSGTYKYIF

SEQ ID NO: 762954 - protein, 16 aa, Homo sapiens
  CDR3 for beta chain variable domain of TCR clone 381477 (TRBV7-3, TRBJ2-2)
CASSLKRGTLSGELFF

SEQ ID NO: 762955 - protein, 17 aa, Homo sapiens
  CDR3 for alpha chain variable domain of TCR clone 381478 (TRAV3, TRAJ42)
CAVRDRDYGGSQGNLIF

SEQ ID NO: 762956 - protein, 17 aa, Homo sapiens
  CDR3 for beta chain variable domain of TCR clone 381478 (TRBV20-1, TRBJ2-3)
HASGLAGGPGTTDTQYF

SEQ ID NO: 762957 - protein, 16 aa, Homo sapiens
  CDR3 for alpha chain variable domain of TCR clone 381479 (TRAV30, TRAJ24)
CGTEIVDADSWGKFQF

SEQ ID NO: 762958 - protein, 14 aa, Homo sapiens
  CDR3 for beta chain variable domain of TCR clone 381479 (TRBV19, TRBJ2-1)
CASPTFGLSGEQFF

SEQ ID NO: 762959 - protein, 14 aa, Homo sapiens
  CDR3 for alpha chain variable domain of TCR clone 381480 (TRAV14/DV4, TRAJ41)
CARGGPDSGYALNF

SEQ ID NO: 762960 - protein, 15 aa, Homo sapiens
  CDR3 for beta chain variable domain of TCR clone 381480 (TRBV19, TRBJ2-1)
CASSIQATSYNEQLF

SEQ ID NO: 762961 - protein, 13 aa, Homo sapiens
  CDR3 for alpha chain variable domain of TCR clone 381481 (TRAV12-3, TRAJ5)
CAMIYTARRALTF

SEQ ID NO: 762962 - protein, 12 aa, Homo sapiens
  CDR3 for beta chain variable domain of TCR clone 381481 (TRBV18, TRBJ1-4)
CASSPSREKLFF

SEQ ID NO: 762963 - protein, 14 aa, Homo sapiens
  CDR3 for alpha chain variable domain of TCR clone 381482 (TRAV12-1, TRAJ34)
CVVNLDYNTDKPIF

SEQ ID NO: 762964 - protein, 13 aa, Homo sapiens
  CDR3 for beta chain variable domain of TCR clone 381482 (TRBV29-1, TRBJ2-1)
CSVEGGRVNEQFF

SEQ ID NO: 762965 - protein, 14 aa, Homo sapiens
  CDR3 for alpha chain variable domain of TCR clone 381483 (TRAV1-2, TRAJ28)
CAPPDGAGSYQLTF

SEQ ID NO: 762966 - protein, 12 aa, Homo sapiens
  CDR3 for beta chain variable domain of TCR clone 381483 (TRBV11-2, TRBJ2-5)
CASSPPAETQYF

SEQ ID NO: 762967 - protein, 11 aa, Homo sapiens
  CDR3 for alpha chain variable domain of TCR clone 381484 (TRAV12-2, TRAJ31)
CAILNNARLLF

SEQ ID NO: 762968 - protein, 16 aa, Homo sapiens
  CDR3 for beta chain variable domain of TCR clone 381484 (TRBV13, TRBJ2-2)
CASSPRTGEHTGELFF

SEQ ID NO: 762969 - protein, 14 aa, Homo sapiens
  CDR3 for alpha chain variable domain of TCR clone 381485 (TRAV2, TRAJ9)
CAVEDRSGGCKTIF

SEQ ID NO: 762970 - protein, 16 aa, Homo sapiens
  CDR3 for beta chain variable domain of TCR clone 381485 (TRBV11-2, TRBJ2-2)
CASSLRTGNLIGELFF

SEQ ID NO: 762971 - protein, 10 aa, Homo sapiens
  CDR3 for alpha chain variable domain of TCR clone 381486 (TRAV1-2, TRAJ20)
CACNDYKLSF

SEQ ID NO: 762972 - protein, 16 aa, Homo sapiens
  CDR3 for beta chain variable domain of TCR clone 381486 (TRBV12-4, TRBJ2-5)
CASSWRPSGDLETQYF

SEQ ID NO: 762973 - protein, 16 aa, Homo sapiens
  CDR3 for alpha chain variable domain of TCR clone 381487 (TRAV2, TRAJ4)
CAVEDRFSGGYNKLIF

SEQ ID NO: 762974 - protein, 16 aa, Homo sapiens
  CDR3 for beta chain variable domain of TCR clone 381487 (TRBV12-4, TRBJ2-5)
CASSFFVRGRQETQYF

SEQ ID NO: 762975 - protein, 10 aa, Homo sapiens
  CDR3 for alpha chain variable domain of TCR clone 381488 (TRAV1-2, TRAJ18)
CAVRVEAQPW

SEQ ID NO: 762976 - protein, 19 aa, Homo sapiens
  CDR3 for beta chain variable domain of TCR clone 381488 (TRBV6-3, TRBJ1-2)
CASSYSKGRTGPPNYVYTF

SEQ ID NO: 762977 - protein, 13 aa, Homo sapiens
  CDR3 for alpha chain variable domain of TCR clone 381489 (TRAV1-2, TRAJ31)
CAVRPNSNARLMF

SEQ ID NO: 762978 - protein, 14 aa, Homo sapiens
  CDR3 for beta chain variable domain of TCR clone 381489 (TRBV25-1, TRBJ1-1)
CASTHLGGNTEAFF

SEQ ID NO: 762979 - protein, 13 aa, Homo sapiens
  CDR3 for alpha chain variable domain of TCR clone 381490 (TRAV13-1, TRAJ6)
CGASMGGSYIPTF

SEQ ID NO: 762980 - protein, 14 aa, Homo sapiens
  CDR3 for beta chain variable domain of TCR clone 381490 (TRBV7-2, TRBJ2-5)
CASSFGGAQETQYF

SEQ ID NO: 762981 - protein, 16 aa, Homo sapiens
  CDR3 for alpha chain variable domain of TCR clone 381491 (TRAV30, TRAJ24)
CGTEIVDADSWGKFQF

SEQ ID NO: 762982 - protein, 13 aa, Homo sapiens
  CDR3 for beta chain variable domain of TCR clone 381491 (TRBV19, TRBJ1-2)
CASSVPGQDVYTF

SEQ ID NO: 762983 - protein, 16 aa, Homo sapiens
  CDR3 for alpha chain variable domain of TCR clone 381492 (TRAV16, TRAJ4)
CALSRMFSVVYNKLIF

SEQ ID NO: 762984 - protein, 16 aa, Homo sapiens
  CDR3 for beta chain variable domain of TCR clone 381492 (TRBV24-1, TRBJ2-3)
CATSDPGTGATDTQYF

SEQ ID NO: 762985 - protein, 15 aa, Homo sapiens
  CDR3 for alpha chain variable domain of TCR clone 381493 (TRAV12-1, TRAJ44)
CVSDLPTGTASKLTF

SEQ ID NO: 762986 - protein, 13 aa, Homo sapiens
  CDR3 for beta chain variable domain of TCR clone 381493 (TRBV20-1, TRBJ2-5)
CSARGDYQETQYF

SEQ ID NO: 762987 - protein, 11 aa, Homo sapiens
  CDR3 for alpha chain variable domain of TCR clone 381494 (TRAV1-2, TRAJ20)
CAVANDYKLSF

SEQ ID NO: 762988 - protein, 18 aa, Homo sapiens
  CDR3 for beta chain variable domain of TCR clone 381494 (TRBV20-1, TRBJ2-6)
CSAETTPTHGSAANVLTF

SEQ ID NO: 762989 - protein, 11 aa, Homo sapiens
  CDR3 for alpha chain variable domain of TCR clone 381495 (TRAV12-3, TRAJ27)
CAMANAGKSTF

SEQ ID NO: 762990 - protein, 13 aa, Homo sapiens
  CDR3 for beta chain variable domain of TCR clone 381495 (TRBV20-1, TRBJ1-1)
CSARVSGNTEAFF

SEQ ID NO: 762991 - protein, 14 aa, Homo sapiens
  CDR3 for alpha chain variable domain of TCR clone 381496 (TRAV13-1, TRAJ44)
CAAKAAGTASKLTF

SEQ ID NO: 762992 - protein, 13 aa, Homo sapiens
  CDR3 for beta chain variable domain of TCR clone 381496 (TRBV5-5, TRBJ1-2)
CASSFWLGEDYTF

SEQ ID NO: 762993 - protein, 13 aa, Homo sapiens
  CDR3 for alpha chain variable domain of TCR clone 381497 (TRAV8-3, TRAJ36)
CAVGATGANNLFF

SEQ ID NO: 762994 - protein, 15 aa, Homo sapiens
  CDR3 for beta chain variable domain of TCR clone 381497 (TRBV11-2, TRBJ2-1)
CASSRNRGLMYEQFF

SEQ ID NO: 762995 - protein, 15 aa, Homo sapiens
  CDR3 for alpha chain variable domain of TCR clone 381498 (TRAV26-1, TRAJ29)
CIVKVEGSGNNPLVF

SEQ ID NO: 762996 - protein, 14 aa, Homo sapiens
  CDR3 for beta chain variable domain of TCR clone 381498 (TRBV18, TRBJ2-5)
CASSPGVSQETQYF

SEQ ID NO: 762997 - protein, 14 aa, Homo sapiens
  CDR3 for alpha chain variable domain of TCR clone 381499 (TRAV12-3, TRAJ10)
SHLPLTGGGNKLTF

SEQ ID NO: 762998 - protein, 16 aa, Homo sapiens
  CDR3 for beta chain variable domain of TCR clone 381499 (TRBV5-4, TRBJ2-1)
CASSLALAGAYNEQFF

SEQ ID NO: 762999 - protein, 17 aa, Homo sapiens
  CDR3 for alpha chain variable domain of TCR clone 381500 (TRAV13-1, TRAJ52)
CAAGRNAGGTSYGKLTF

SEQ ID NO: 763000 - protein, 14 aa, Homo sapiens
  CDR3 for beta chain variable domain of TCR clone 381500 (TRBV7-7, TRBJ2-2)
CATRQDSDTGELFF

SEQ ID NO: 763001 - protein, 13 aa, Homo sapiens
  CDR3 for alpha chain variable domain of TCR clone 381501 (TRAV38-1, TRAJ42)
CARWGGSQGNHIF

SEQ ID NO: 763002 - protein, 10 aa, Homo sapiens
  CDR3 for beta chain variable domain of TCR clone 381501 (TRBV2, TRBJ2-5)
CASSAATQYF

SEQ ID NO: 763003 - protein, 10 aa, Homo sapiens
  CDR3 for alpha chain variable domain of TCR clone 381502 (TRAV13-1, TRAJ49)
CAVPGNQFYF

SEQ ID NO: 763004 - protein, 11 aa, Homo sapiens
  CDR3 for beta chain variable domain of TCR clone 381502 (TRBV6-3, TRBJ2-3)
CATGQADTQYF

SEQ ID NO: 763005 - protein, 13 aa, Homo sapiens
  CDR3 for alpha chain variable domain of TCR clone 381503 (TRAV27, TRAJ3)
ASLRGSSASKIIF

SEQ ID NO: 763006 - protein, 14 aa, Homo sapiens
  CDR3 for beta chain variable domain of TCR clone 381503 (TRBV27, TRBJ2-7)
CASSSATMVLEQYF

SEQ ID NO: 763007 - protein, 17 aa, Homo sapiens
  CDR3 for alpha chain variable domain of TCR clone 381504 (TRAV4, TRAJ13)
CIVGVQGSSGGYQKVTF

SEQ ID NO: 763008 - protein, 18 aa, Homo sapiens
  CDR3 for beta chain variable domain of TCR clone 381504 (TRBV15, TRBJ2-3)
CATSRDGARSWDTDTQYS

SEQ ID NO: 763009 - protein, 15 aa, Homo sapiens
  CDR3 for alpha chain variable domain of TCR clone 381505 (TRAV26-1, TRAJ22)
CIVRVTFWFCKATDL

SEQ ID NO: 763010 - protein, 13 aa, Homo sapiens
  CDR3 for beta chain variable domain of TCR clone 381505 (TRBV7-6, TRBJ2-7)
CASSLDHTHEQYF

SEQ ID NO: 763011 - protein, 12 aa, Homo sapiens
  CDR3 for alpha chain variable domain of TCR clone 381506 (TRAV12-3, TRAJ17)
CAMTLTGNKLTF

SEQ ID NO: 763012 - protein, 16 aa, Homo sapiens
  CDR3 for beta chain variable domain of TCR clone 381506 (TRBV13, TRBJ2-2)
CASSPRTVEHTGELFF

SEQ ID NO: 763013 - protein, 14 aa, Homo sapiens
  CDR3 for alpha chain variable domain of TCR clone 381507 (TRAV12-3, TRAJ9)
CAMSPNTGGFKTIF

SEQ ID NO: 763014 - protein, 15 aa, Homo sapiens
  CDR3 for beta chain variable domain of TCR clone 381507 (TRBV5-1, TRBJ2-3)
CASSVTSGSTDTQYF

SEQ ID NO: 763015 - protein, 11 aa, Homo sapiens
  CDR3 for alpha chain variable domain of TCR clone 381508 (TRAV30, TRAJ23)
CGTEIAGKLIF

SEQ ID NO: 763016 - protein, 16 aa, Homo sapiens
  CDR3 for beta chain variable domain of TCR clone 381508 (TRBV7-2, TRBJ2-7)
CASTSQAASGGYKQYF

SEQ ID NO: 763017 - protein, 23 aa, Homo sapiens
  CDR3 for alpha chain variable domain of TCR clone 381509 (TRAV3, TRAJ32)
CAVKDELVLQTSSSLELALCLLF

SEQ ID NO: 763018 - protein, 17 aa, Homo sapiens
  CDR3 for beta chain variable domain of TCR clone 381509 (TRBV20-1, TRBJ2-1)
CSARDPLAGVWDNEQFF

SEQ ID NO: 763019 - protein, 13 aa, Homo sapiens
  CDR3 for alpha chain variable domain of TCR clone 381510 (TRAV1-2, TRAJ9)
CAALNTGGFKTIF

SEQ ID NO: 763020 - protein, 14 aa, Homo sapiens
  CDR3 for beta chain variable domain of TCR clone 381510 (TRBV6-5, TRBJ2-7)
CASSLFPGGYEQYF

SEQ ID NO: 763021 - protein, 15 aa, Homo sapiens
  CDR3 for alpha chain variable domain of TCR clone 381511 (TRAV12-1, TRAJ44)
CVVFVNTGTASKLTF

SEQ ID NO: 763022 - protein, 17 aa, Homo sapiens
  CDR3 for beta chain variable domain of TCR clone 381511 (TRBV7-8, TRBJ2-6)
SASSAGTGGAGANVLTF

SEQ ID NO: 763023 - protein, 14 aa, Homo sapiens
  CDR3 for alpha chain variable domain of TCR clone 381512 (TRAV9-2, TRAJ38)
CALSNAGNNRKLIW

SEQ ID NO: 763024 - protein, 15 aa, Homo sapiens
  CDR3 for beta chain variable domain of TCR clone 381512 (TRBV19, TRBJ2-1)
CASSIQATSYNEQFF

SEQ ID NO: 763025 - protein, 16 aa, Homo sapiens
  CDR3 for alpha chain variable domain of TCR clone 381513 (TRAV30, TRAJ24)
CGTEIVDADSWGKFQS

SEQ ID NO: 763026 - protein, 14 aa, Homo sapiens
  CDR3 for beta chain variable domain of TCR clone 381513 (TRBV12-5, TRBJ2-5)
CASGARTHQETQYF

SEQ ID NO: 763027 - protein, 12 aa, Homo sapiens
  CDR3 for alpha chain variable domain of TCR clone 381514 (TRAV21, TRAJ27)
CAPPSNAGKSTF

SEQ ID NO: 763028 - protein, 13 aa, Homo sapiens
  CDR3 for beta chain variable domain of TCR clone 381514 (TRBV2, TRBJ1-1)
CARNPTGGFHAFF

SEQ ID NO: 763029 - protein, 15 aa, Homo sapiens
  CDR3 for alpha chain variable domain of TCR clone 381515 (TRAV3, TRAJ22)
CAVRDRGGSARQLTF

SEQ ID NO: 763030 - protein, 17 aa, Homo sapiens
  CDR3 for beta chain variable domain of TCR clone 381515 (TRBV13, TRBJ2-3)
CASSLSRVAGVRNTQYF

SEQ ID NO: 763031 - protein, 14 aa, Homo sapiens
  CDR3 for alpha chain variable domain of TCR clone 381516 (TRAV4, TRAJ31)
CLVGDRDNNARLMF

SEQ ID NO: 763032 - protein, 17 aa, Homo sapiens
  CDR3 for beta chain variable domain of TCR clone 381516 (TRBV28, TRBJ2-1)
CASTGPGLAVSEDEQFF

SEQ ID NO: 763033 - protein, 18 aa, Homo sapiens
  CDR3 for alpha chain variable domain of TCR clone 381517 (TRAV8-4, TRAJ52)
CAVTRANAGGTSYGKLTF

SEQ ID NO: 763034 - protein, 20 aa, Homo sapiens
  CDR3 for beta chain variable domain of TCR clone 381517 (TRBV19, TRBJ2-1)
CASSISRTVTSTRPNNEQFF

SEQ ID NO: 763035 - protein, 17 aa, Homo sapiens
  CDR3 for alpha chain variable domain of TCR clone 381518 (TRAV3, TRAJ42)
CAVRDRDYGGSQGNLIF

SEQ ID NO: 763036 - protein, 13 aa, Homo sapiens
  CDR3 for beta chain variable domain of TCR clone 381518 (TRBV10-3, TRBJ2-7)
CASRLAVNYEQYF

SEQ ID NO: 763037 - protein, 13 aa, Homo sapiens
  CDR3 for alpha chain variable domain of TCR clone 381519 (TRAV1-2, TRAJ20)
CAVRDGNDYKLSF

SEQ ID NO: 763038 - protein, 16 aa, Homo sapiens
  CDR3 for beta chain variable domain of TCR clone 381519 (TRBV12-5, TRBJ2-5)
CASGPRTSGKQETQYF

SEQ ID NO: 763039 - protein, 14 aa, Homo sapiens
  CDR3 for alpha chain variable domain of TCR clone 381520 (TRAV13-1, TRAJ44)
CAAKATGTSSKLTF

SEQ ID NO: 763040 - protein, 17 aa, Homo sapiens
  CDR3 for beta chain variable domain of TCR clone 381520 (TRBV11-2, TRBJ2-1)
CASSLYPPGVEYNEQFF

SEQ ID NO: 763041 - protein, 14 aa, Homo sapiens
  CDR3 for alpha chain variable domain of TCR clone 381521 (TRAV29/DV5, TRAJ45)
CAASFRGGADGLTF

SEQ ID NO: 763042 - protein, 16 aa, Homo sapiens
  CDR3 for beta chain variable domain of TCR clone 381521 (TRBV19, TRBJ2-2)
CASRSPGTGATGELFF

SEQ ID NO: 763043 - protein, 12 aa, Homo sapiens
  CDR3 for alpha chain variable domain of TCR clone 381522 (TRAV22, TRAJ36)
CAVGTGANNPFF

SEQ ID NO: 763044 - protein, 15 aa, Homo sapiens
  CDR3 for beta chain variable domain of TCR clone 381522 (TRBV20-1, TRBJ1-1)
CSASRGVTGNTEAFF

SEQ ID NO: 763045 - protein, 12 aa, Homo sapiens
  CDR3 for alpha chain variable domain of TCR clone 381523 (TRAV9-2, TRAJ36)
CALKKGANNLFF

SEQ ID NO: 763046 - protein, 13 aa, Homo sapiens
  CDR3 for beta chain variable domain of TCR clone 381523 (TRBV7-6, TRBJ2-7)
CASSLDHTHEQYF

SEQ ID NO: 763047 - protein, 12 aa, Homo sapiens
  CDR3 for alpha chain variable domain of TCR clone 381524 (TRAV35, TRAJ30)
CAGQLADDKIIF

SEQ ID NO: 763048 - protein, 17 aa, Homo sapiens
  CDR3 for beta chain variable domain of TCR clone 381524 (TRBV4-2, TRBJ2-5)
CASSPGRWRNFQENQYF

SEQ ID NO: 763049 - protein, 14 aa, Homo sapiens
  CDR3 for alpha chain variable domain of TCR clone 381525 (TRAV1-2, TRAJ8)
CAVREDTGCQKLVF

SEQ ID NO: 763050 - protein, 13 aa, Homo sapiens
  CDR3 for beta chain variable domain of TCR clone 381525 (TRBV12-5, TRBJ2-3)
CASGDRQSDTQYF

SEQ ID NO: 763051 - protein, 15 aa, Homo sapiens
  CDR3 for alpha chain variable domain of TCR clone 381526 (TRAV17, TRAJ22)
CATVAPSGSARQLTF

SEQ ID NO: 763052 - protein, 13 aa, Homo sapiens
  CDR3 for beta chain variable domain of TCR clone 381526 (TRBV7-2, TRBJ2-2)
CASSLAVTGELFF

SEQ ID NO: 763053 - protein, 13 aa, Homo sapiens
  CDR3 for alpha chain variable domain of TCR clone 381527 (TRAV4, TRAJ9)
CLVAEGGGVKTIF

SEQ ID NO: 763054 - protein, 17 aa, Homo sapiens
  CDR3 for beta chain variable domain of TCR clone 381527 (TRBV27, TRBJ2-1)
CASSPMKGQGSYNEQFF

SEQ ID NO: 763055 - protein, 15 aa, Homo sapiens
  CDR3 for alpha chain variable domain of TCR clone 381528 (TRAV21, TRAJ45)
CAVSYSGGGADGLTF

SEQ ID NO: 763056 - protein, 13 aa, Homo sapiens
  CDR3 for beta chain variable domain of TCR clone 381528 (TRBV20-1, TRBJ2-5)
CSTATELQETQYF

SEQ ID NO: 763057 - protein, 14 aa, Homo sapiens
  CDR3 for alpha chain variable domain of TCR clone 381529 (TRAV8-3, TRAJ4)
CAVGASGGYNKLIF

SEQ ID NO: 763058 - protein, 13 aa, Homo sapiens
  CDR3 for beta chain variable domain of TCR clone 381529 (TRBV18, TRBJ2-5)
CASSLQGQENQYF

SEQ ID NO: 763059 - protein, 13 aa, Homo sapiens
  CDR3 for alpha chain variable domain of TCR clone 381530 (TRAV20, TRAJ48)
CAVHLFGNEKLTF

SEQ ID NO: 763060 - protein, 15 aa, Homo sapiens
  CDR3 for beta chain variable domain of TCR clone 381530 (TRBV6-5, TRBJ2-6)
CASSQWEGGANVLTF

SEQ ID NO: 763061 - protein, 12 aa, Homo sapiens
  CDR3 for alpha chain variable domain of TCR clone 381531 (TRAV17, TRAJ21)
CALRYNFNKFYF

SEQ ID NO: 763062 - protein, 13 aa, Homo sapiens
  CDR3 for beta chain variable domain of TCR clone 381531 (TRBV24-1, TRBJ2-5)
CATSTGGTETQFF

SEQ ID NO: 763063 - protein, 17 aa, Homo sapiens
  CDR3 for alpha chain variable domain of TCR clone 381532 (TRAV27, TRAJ26)
GAVARAPLDNYGQNFVF

SEQ ID NO: 763064 - protein, 15 aa, Homo sapiens
  CDR3 for beta chain variable domain of TCR clone 381532 (TRBV11-2, TRBJ2-5)
CASSPRSGGLETQYF

SEQ ID NO: 763065 - protein, 19 aa, Homo sapiens
  CDR3 for alpha chain variable domain of TCR clone 381533 (TRAV1-2, TRAJ26)
CLLPLCCERPDNYGQNFVF

SEQ ID NO: 763066 - protein, 11 aa, Homo sapiens
  CDR3 for beta chain variable domain of TCR clone 381533 (TRBV12-4, TRBJ2-3)
CASTATDTQYC

SEQ ID NO: 763067 - protein, 15 aa, Homo sapiens
  CDR3 for alpha chain variable domain of TCR clone 381534 (TRAV12-1, TRAJ44)
CVVFVNTGTASKLTF

SEQ ID NO: 763068 - protein, 13 aa, Homo sapiens
  CDR3 for beta chain variable domain of TCR clone 381534 (TRBV7-9, TRBJ2-1)
CASSWESYNEQFF

SEQ ID NO: 763069 - protein, 22 aa, Homo sapiens
  CDR3 for alpha chain variable domain of TCR clone 381535 (TRAV40, )
CLLGDGIPDIQNPDPAVYQMRD

SEQ ID NO: 763070 - protein, 16 aa, Homo sapiens
  CDR3 for beta chain variable domain of TCR clone 381535 (TRBV20-1, TRBJ1-5)
CSAELPGQQTNQPQHF

SEQ ID NO: 763071 - protein, 17 aa, Homo sapiens
  CDR3 for alpha chain variable domain of TCR clone 381536 (TRAV8-1, TRAJ52)
CAVIANAGGTGYGKLTF

SEQ ID NO: 763072 - protein, 11 aa, Homo sapiens
  CDR3 for beta chain variable domain of TCR clone 381536 (TRBV29-1, TRBJ2-5)
CSVLLGETQYF

SEQ ID NO: 763073 - protein, 14 aa, Homo sapiens
  CDR3 for alpha chain variable domain of TCR clone 381537 (TRAV38-2/DV8, TRAJ42)
CAYPEGGSQGNLIF

SEQ ID NO: 763074 - protein, 15 aa, Homo sapiens
  CDR3 for beta chain variable domain of TCR clone 381537 (TRBV19, TRBJ2-1)
CACSTGTSSYNEQFF

SEQ ID NO: 763075 - protein, 13 aa, Homo sapiens
  CDR3 for alpha chain variable domain of TCR clone 381538 (TRAV16, TRAJ5)
CALTNTGRRALTF

SEQ ID NO: 763076 - protein, 15 aa, Homo sapiens
  CDR3 for beta chain variable domain of TCR clone 381538 (TRBV11-2, TRBJ2-4)
CASSRPGTGINIRYF

SEQ ID NO: 763077 - protein, 15 aa, Homo sapiens
  CDR3 for alpha chain variable domain of TCR clone 381539 (TRAV8-6, TRAJ10)
CAVSSKGGGGNKITF

SEQ ID NO: 763078 - protein, 15 aa, Homo sapiens
  CDR3 for beta chain variable domain of TCR clone 381539 (TRBV28, TRBJ1-2)
CASSSHSIANYGYTF

SEQ ID NO: 763079 - protein, 14 aa, Homo sapiens
  CDR3 for alpha chain variable domain of TCR clone 381540 (TRAV12-3, TRAJ35)
CAMSLIGFGNVRHC

SEQ ID NO: 763080 - protein, 12 aa, Homo sapiens
  CDR3 for beta chain variable domain of TCR clone 381540 (TRBV12-4, TRBJ1-1)
CASSLAGLEAFF

SEQ ID NO: 763081 - protein, 12 aa, Homo sapiens
  CDR3 for alpha chain variable domain of TCR clone 381541 (TRAV1-1, TRAJ23)
CAVTNQGGKLIF

SEQ ID NO: 763082 - protein, 15 aa, Homo sapiens
  CDR3 for beta chain variable domain of TCR clone 381541 (TRBV5-4, TRBJ2-5)
CASSFFGEGMETQYF

SEQ ID NO: 763083 - protein, 15 aa, Homo sapiens
  CDR3 for alpha chain variable domain of TCR clone 381542 (TRAV38-2/DV8, TRAJ48)
CAYRSGGFGNAKLTF

SEQ ID NO: 763084 - protein, 16 aa, Homo sapiens
  CDR3 for beta chain variable domain of TCR clone 381542 (TRBV28, TRBJ2-7)
CASSPWVATGDLSQYF

SEQ ID NO: 763085 - protein, 14 aa, Homo sapiens
  CDR3 for alpha chain variable domain of TCR clone 381543 (TRAV3, TRAJ6)
CAVRDPWGSYIPTF

SEQ ID NO: 763086 - protein, 15 aa, Homo sapiens
  CDR3 for beta chain variable domain of TCR clone 381543 (TRBV12-4, TRBJ1-3)
CASSFQGTFGNTIYV

SEQ ID NO: 763087 - protein, 12 aa, Homo sapiens
  CDR3 for alpha chain variable domain of TCR clone 381544 (TRAV16, TRAJ26)
CALRSYGQNFVF

SEQ ID NO: 763088 - protein, 14 aa, Homo sapiens
  CDR3 for beta chain variable domain of TCR clone 381544 (TRBV10-3, TRBJ2-1)
CAISSDLSYNEQFF

SEQ ID NO: 763089 - protein, 14 aa, Homo sapiens
  CDR3 for alpha chain variable domain of TCR clone 381545 (TRAV29/DV5, TRAJ32)
CAASQGGATNKLIF

SEQ ID NO: 763090 - protein, 14 aa, Homo sapiens
  CDR3 for beta chain variable domain of TCR clone 381545 (TRBV19, TRBJ2-1)
CASEVTGARNEQFF

SEQ ID NO: 763091 - protein, 11 aa, Homo sapiens
  CDR3 for alpha chain variable domain of TCR clone 381546 (TRAV2, TRAJ13)
CASGGYQKVTF

SEQ ID NO: 763092 - protein, 15 aa, Homo sapiens
  CDR3 for beta chain variable domain of TCR clone 381546 (TRBV5-1, TRBJ2-1)
CASSPLRAPYNEQFF

SEQ ID NO: 763093 - protein, 13 aa, Homo sapiens
  CDR3 for alpha chain variable domain of TCR clone 381547 (TRAV26-1, TRAJ47)
CIFFHGIWKQTGL

SEQ ID NO: 763094 - protein, 13 aa, Homo sapiens
  CDR3 for beta chain variable domain of TCR clone 381547 (TRBV24-1, TRBJ2-7)
CATSDLGPYEQYF

SEQ ID NO: 763095 - protein, 14 aa, Homo sapiens
  CDR3 for alpha chain variable domain of TCR clone 381548 (TRAV1-2, TRAJ16)
CAVNRFSDGQKLLS

SEQ ID NO: 763096 - protein, 14 aa, Homo sapiens
  CDR3 for beta chain variable domain of TCR clone 381548 (TRBV7-3, TRBJ2-1)
CASSLAGGTNEQFF

SEQ ID NO: 763097 - protein, 13 aa, Homo sapiens
  CDR3 for alpha chain variable domain of TCR clone 381549 (TRAV23/DV6, TRAJ24)
CAASTDSWGKFQF

SEQ ID NO: 763098 - protein, 13 aa, Homo sapiens
  CDR3 for beta chain variable domain of TCR clone 381549 (TRBV19, TRBJ1-2)
CASSVPGQDGYTF

SEQ ID NO: 763099 - protein, 14 aa, Homo sapiens
  CDR3 for alpha chain variable domain of TCR clone 381550 (TRAV26-1, TRAJ54)
CIVRRTQGAQKLVF

SEQ ID NO: 763100 - protein, 15 aa, Homo sapiens
  CDR3 for beta chain variable domain of TCR clone 381550 (TRBV20-1, TRBJ2-7)
CSARDRVSGMDEQYF

SEQ ID NO: 763101 - protein, 12 aa, Homo sapiens
  CDR3 for alpha chain variable domain of TCR clone 381551 (TRAV17, TRAJ12)
CATLRSSYKLIF

SEQ ID NO: 763102 - protein, 14 aa, Homo sapiens
  CDR3 for beta chain variable domain of TCR clone 381551 (TRBV19, TRBJ2-1)
CARGARSFEWEQFF

SEQ ID NO: 763103 - protein, 15 aa, Homo sapiens
  CDR3 for alpha chain variable domain of TCR clone 381552 (TRAV8-3, TRAJ11)
CAVGLLNSGYSTLTF

SEQ ID NO: 763104 - protein, 18 aa, Homo sapiens
  CDR3 for beta chain variable domain of TCR clone 381552 (TRBV7-9, TRBJ2-7)
CASSLTTSGSRTWYEQYF

SEQ ID NO: 763105 - protein, 13 aa, Homo sapiens
  CDR3 for alpha chain variable domain of TCR clone 381553 (TRAV21, TRAJ20)
CAVGLRVDYKLSF

SEQ ID NO: 763106 - protein, 15 aa, Homo sapiens
  CDR3 for beta chain variable domain of TCR clone 381553 (TRBV7-6, TRBJ2-7)
CASSGRRDTFGEQYF

SEQ ID NO: 763107 - protein, 14 aa, Homo sapiens
  CDR3 for alpha chain variable domain of TCR clone 381554 (TRAV12-3, TRAJ56)
CAMSVTGANSKLTF

SEQ ID NO: 763108 - protein, 17 aa, Homo sapiens
  CDR3 for beta chain variable domain of TCR clone 381554 (TRBV20-1, TRBJ2-3)
CSASLLGGGGSADTQYF

SEQ ID NO: 763109 - protein, 15 aa, Homo sapiens
  CDR3 for alpha chain variable domain of TCR clone 381555 (TRAV21, TRAJ53)
CATLNSGGSNYKLTF

SEQ ID NO: 763110 - protein, 15 aa, Homo sapiens
  CDR3 for beta chain variable domain of TCR clone 381555 (TRBV19, TRBJ1-2)
CASTLDSTGNYGYTF

SEQ ID NO: 763111 - protein, 14 aa, Homo sapiens
  CDR3 for alpha chain variable domain of TCR clone 381556 (TRAV1-2, TRAJ8)
CAVREDTGFQRLVF

SEQ ID NO: 763112 - protein, 14 aa, Homo sapiens
  CDR3 for beta chain variable domain of TCR clone 381556 (TRBV7-2, TRBJ2-7)
CASSPKTSFYEQYF

SEQ ID NO: 763113 - protein, 12 aa, Homo sapiens
  CDR3 for alpha chain variable domain of TCR clone 381557 (TRAV20, TRAJ54)
CAVPEGAQKLVF

SEQ ID NO: 763114 - protein, 17 aa, Homo sapiens
  CDR3 for beta chain variable domain of TCR clone 381557 (TRBV13, TRBJ2-3)
CASSLSRVAGGRNTQYF

SEQ ID NO: 763115 - protein, 18 aa, Homo sapiens
  CDR3 for alpha chain variable domain of TCR clone 381558 (TRAV12-3, TRAJ52)
CAMSVGGAGGTSYGKLTF

SEQ ID NO: 763116 - protein, 17 aa, Homo sapiens
  CDR3 for beta chain variable domain of TCR clone 381558 (TRBV13, TRBJ2-3)
CPSSLSRVAGGRNTQYF

SEQ ID NO: 763117 - protein, 14 aa, Homo sapiens
  CDR3 for alpha chain variable domain of TCR clone 381559 (TRAV1-2, TRAJ16)
CAVNRFSDGQKLLF

SEQ ID NO: 763118 - protein, 15 aa, Homo sapiens
  CDR3 for beta chain variable domain of TCR clone 381559 (TRBV7-9, TRBJ1-6)
CASSSPERGNSPLHF

SEQ ID NO: 763119 - protein, 14 aa, Homo sapiens
  CDR3 for alpha chain variable domain of TCR clone 381560 (TRAV12-1, TRAJ17)
CVVNYKAAGNKLTF

SEQ ID NO: 763120 - protein, 17 aa, Homo sapiens
  CDR3 for beta chain variable domain of TCR clone 381560 (TRBV20-1, TRBJ2-1)
YRASSSGLAGSYNEQFF

SEQ ID NO: 763121 - protein, 23 aa, Homo sapiens
  CDR3 for alpha chain variable domain of TCR clone 381561 (TRAV26-1, TRAJ38)
CIADNAGNNHIQNPDPAVYQLRD

SEQ ID NO: 763122 - protein, 13 aa, Homo sapiens
  CDR3 for beta chain variable domain of TCR clone 381561 (TRBV20-1, TRBJ1-1)
CSARGGGNTAAFF

SEQ ID NO: 763123 - protein, 14 aa, Homo sapiens
  CDR3 for alpha chain variable domain of TCR clone 381562 (TRAV20, TRAJ26)
SAVQAAIYGQNFVF

SEQ ID NO: 763124 - protein, 14 aa, Homo sapiens
  CDR3 for beta chain variable domain of TCR clone 381562 (TRBV27, TRBJ2-2)
CASSLGDTTGELFF

SEQ ID NO: 763125 - protein, 13 aa, Homo sapiens
  CDR3 for alpha chain variable domain of TCR clone 381563 (TRAV3, TRAJ15)
CAVRDQAGTALIF

SEQ ID NO: 763126 - protein, 15 aa, Homo sapiens
  CDR3 for beta chain variable domain of TCR clone 381563 (TRBV11-1, TRBJ2-7)
CASSLNRGASYEQYF

SEQ ID NO: 763127 - protein, 13 aa, Homo sapiens
  CDR3 for alpha chain variable domain of TCR clone 381564 (TRAV12-2, TRAJ10)
CAVPTGGGNKLTF

SEQ ID NO: 763128 - protein, 14 aa, Homo sapiens
  CDR3 for beta chain variable domain of TCR clone 381564 (TRBV12-4, TRBJ1-2)
CASSFVGTAYGYTF

SEQ ID NO: 763129 - protein, 14 aa, Homo sapiens
  CDR3 for alpha chain variable domain of TCR clone 381565 (TRAV1-2, TRAJ16)
FAVNRFSDGQKLLF

SEQ ID NO: 763130 - protein, 13 aa, Homo sapiens
  CDR3 for beta chain variable domain of TCR clone 381565 (TRBV15, TRBJ1-6)
CATSGGLNSPLHF

SEQ ID NO: 763131 - protein, 13 aa, Homo sapiens
  CDR3 for alpha chain variable domain of TCR clone 381566 (TRAV21, TRAJ56)
CAVRLGTNSKLTF

SEQ ID NO: 763132 - protein, 12 aa, Homo sapiens
  CDR3 for beta chain variable domain of TCR clone 381566 (TRBV12-4, TRBJ2-3)
CASSSTTDTQYF

SEQ ID NO: 763133 - protein, 12 aa, Homo sapiens
  CDR3 for alpha chain variable domain of TCR clone 381567 (TRAV3, TRAJ20)
CAVRDADYKLSF

SEQ ID NO: 763134 - protein, 15 aa, Homo sapiens
  CDR3 for beta chain variable domain of TCR clone 381567 (TRBV2, TRBJ2-2)
CASSRETVGTGELFF

SEQ ID NO: 763135 - protein, 12 aa, Homo sapiens
  CDR3 for alpha chain variable domain of TCR clone 381568 (TRAV13-1, TRAJ48)
CAANFGNEKLTF

SEQ ID NO: 763136 - protein, 15 aa, Homo sapiens
  CDR3 for beta chain variable domain of TCR clone 381568 (TRBV28, TRBJ2-5)
CASSPGQGSIETQYF

SEQ ID NO: 763137 - protein, 15 aa, Homo sapiens
  CDR3 for alpha chain variable domain of TCR clone 381569 (TRAV8-2, TRAJ16)
CVVSDGVSDGQKLLF

SEQ ID NO: 763138 - protein, 15 aa, Homo sapiens
  CDR3 for beta chain variable domain of TCR clone 381569 (TRBV12-4, TRBJ2-5)
CASSPPTGLQETQYF

SEQ ID NO: 763139 - protein, 14 aa, Homo sapiens
  CDR3 for alpha chain variable domain of TCR clone 381570 (TRAV1-2, TRAJ16)
CAVNRFSDGQKLLF

SEQ ID NO: 763140 - protein, 16 aa, Homo sapiens
  CDR3 for beta chain variable domain of TCR clone 381570 (TRBV2, TRBJ2-1)
CASRSPAGGEYNEQFF

SEQ ID NO: 763141 - protein, 14 aa, Homo sapiens
  CDR3 for alpha chain variable domain of TCR clone 381571 (TRAV8-4, TRAJ13)
CAVTLFGGYQKVTF

SEQ ID NO: 763142 - protein, 16 aa, Homo sapiens
  CDR3 for beta chain variable domain of TCR clone 381571 (TRBV19, TRBJ2-2)
CASRSPGTGATGELFF

SEQ ID NO: 763143 - protein, 14 aa, Homo sapiens
  CDR3 for alpha chain variable domain of TCR clone 381572 (TRAV20, TRAJ56)
CAVQFGGATSKLTF

SEQ ID NO: 763144 - protein, 14 aa, Homo sapiens
  CDR3 for beta chain variable domain of TCR clone 381572 (TRBV11-2, TRBJ2-5)
CASSRTGGIETQYF

SEQ ID NO: 763145 - protein, 22 aa, Homo sapiens
  CDR3 for alpha chain variable domain of TCR clone 381573 (TRAV8-4, TRAJ9)
CAVRINTGASKLSLEQEQDYLL

SEQ ID NO: 763146 - protein, 15 aa, Homo sapiens
  CDR3 for beta chain variable domain of TCR clone 381573 (TRBV10-2, TRBJ2-6)
CASSEQGTGANVLTF

SEQ ID NO: 763147 - protein, 17 aa, Homo sapiens
  CDR3 for alpha chain variable domain of TCR clone 381574 (TRAV27, TRAJ52)
CAGAGWAGGTSYGKLTF

SEQ ID NO: 763148 - protein, 14 aa, Homo sapiens
  CDR3 for beta chain variable domain of TCR clone 381574 (TRBV2, TRBJ1-5)
CASSGTVSNQPQHF

SEQ ID NO: 763149 - protein, 14 aa, Homo sapiens
  CDR3 for alpha chain variable domain of TCR clone 381575 (TRAV12-2, TRAJ40)
CAVKIPPGTYKYIF

SEQ ID NO: 763150 - protein, 14 aa, Homo sapiens
  CDR3 for beta chain variable domain of TCR clone 381575 (TRBV7-9, TRBJ1-2)
CASSRQGANYGYTF

SEQ ID NO: 763151 - protein, 17 aa, Homo sapiens
  CDR3 for alpha chain variable domain of TCR clone 381576 (TRAV3, TRAJ6)
CAVRDGPRAGGSYIPTF

SEQ ID NO: 763152 - protein, 20 aa, Homo sapiens
  CDR3 for beta chain variable domain of TCR clone 381576 (TRBV28, TRBJ2-1)
CASTPIWRSPGLAGGNEQFF

SEQ ID NO: 763153 - protein, 17 aa, Homo sapiens
  CDR3 for alpha chain variable domain of TCR clone 381577 (TRAV3, TRAJ42)
CAVRDRDYGGSQGNIIF

SEQ ID NO: 763154 - protein, 13 aa, Homo sapiens
  CDR3 for beta chain variable domain of TCR clone 381577 (TRBV10-3, TRBJ2-7)
CASRLAVNYEQYV

SEQ ID NO: 763155 - protein, 16 aa, Homo sapiens
  CDR3 for alpha chain variable domain of TCR clone 381578 (TRAV1-2, TRAJ10)
CAVRGVLTGGGNKLNF

SEQ ID NO: 763156 - protein, 15 aa, Homo sapiens
  CDR3 for beta chain variable domain of TCR clone 381578 (TRBV2, TRBJ2-1)
CASSELAGSYNEQFF

SEQ ID NO: 763157 - protein, 13 aa, Homo sapiens
  CDR3 for alpha chain variable domain of TCR clone 381579 (TRAV40, TRAJ41)
CLLGAQSGYALNF

SEQ ID NO: 763158 - protein, 11 aa, Homo sapiens
  CDR3 for beta chain variable domain of TCR clone 381579 (TRBV29-1, TRBJ2-5)
CSEDRTGTQYC

SEQ ID NO: 763159 - protein, 15 aa, Homo sapiens
  CDR3 for alpha chain variable domain of TCR clone 381580 (TRAV26-1, TRAJ22)
CIVRVSFCFCKATDL

SEQ ID NO: 763160 - protein, 13 aa, Homo sapiens
  CDR3 for beta chain variable domain of TCR clone 381580 (TRBV7-9, TRBJ1-2)
YASSLKQNYGYTF

SEQ ID NO: 763161 - protein, 14 aa, Homo sapiens
  CDR3 for alpha chain variable domain of TCR clone 381581 (TRAV1-2, TRAJ29)
CAVRELTSATPLVF

SEQ ID NO: 763162 - protein, 15 aa, Homo sapiens
  CDR3 for beta chain variable domain of TCR clone 381581 (TRBV19, TRBJ2-1)
CASSIQATSYNEQFF

SEQ ID NO: 763163 - protein, 15 aa, Homo sapiens
  CDR3 for alpha chain variable domain of TCR clone 381582 (TRAV26-1, TRAJ29)
CIVRVEVSGNTPLVF

SEQ ID NO: 763164 - protein, 14 aa, Homo sapiens
  CDR3 for beta chain variable domain of TCR clone 381582 (TRBV18, TRBJ2-5)
CASSHGVSQETQYF

SEQ ID NO: 763165 - protein, 11 aa, Homo sapiens
  CDR3 for alpha chain variable domain of TCR clone 381583 (TRAV35, TRAJ30)
CAPGGDDKIIF

SEQ ID NO: 763166 - protein, 16 aa, Homo sapiens
  CDR3 for beta chain variable domain of TCR clone 381583 (TRBV12-5, TRBJ2-5)
CASGPRTSGNQETQYF

SEQ ID NO: 763167 - protein, 15 aa, Homo sapiens
  CDR3 for alpha chain variable domain of TCR clone 381584 (TRAV21, TRAJ48)
CAVQISNFGNEKLTF

SEQ ID NO: 763168 - protein, 16 aa, Homo sapiens
  CDR3 for beta chain variable domain of TCR clone 381584 (TRBV5-7, TRBJ2-7)
CASSLAPSVLNYEQYF

SEQ ID NO: 763169 - protein, 11 aa, Homo sapiens
  CDR3 for alpha chain variable domain of TCR clone 381585 (TRAV24, TRAJ26)
CLFNYGQNFVF

SEQ ID NO: 763170 - protein, 19 aa, Homo sapiens
  CDR3 for beta chain variable domain of TCR clone 381585 (TRBV7-2, TRBJ2-3)
CASSPGLAGGGLTTDTQYF

SEQ ID NO: 763171 - protein, 12 aa, Homo sapiens
  CDR3 for alpha chain variable domain of TCR clone 381586 (TRAV12-3, TRAJ17)
CAMTLTGNKLTF

SEQ ID NO: 763172 - protein, 11 aa, Homo sapiens
  CDR3 for beta chain variable domain of TCR clone 381586 (TRBV12-4, TRBJ2-2)
CASSSVGELFF

SEQ ID NO: 763173 - protein, 12 aa, Homo sapiens
  CDR3 for alpha chain variable domain of TCR clone 381587 (TRAV25, TRAJ20)
CAGSSNDYKLSF

SEQ ID NO: 763174 - protein, 12 aa, Homo sapiens
  CDR3 for beta chain variable domain of TCR clone 381587 (TRBV5-4, TRBJ2-7)
CASSPGTEEQYF

SEQ ID NO: 763175 - protein, 16 aa, Homo sapiens
  CDR3 for alpha chain variable domain of TCR clone 381588 (TRAV3, TRAJ37)
CAVRVRGTGNTGKLIF

SEQ ID NO: 763176 - protein, 11 aa, Homo sapiens
  CDR3 for beta chain variable domain of TCR clone 381588 (TRBV11-2, TRBJ2-2)
CASSLPGELFF

SEQ ID NO: 763177 - protein, 11 aa, Homo sapiens
  CDR3 for alpha chain variable domain of TCR clone 381589 (TRAV16, TRAJ20)
CALSEGFKAAL

SEQ ID NO: 763178 - protein, 13 aa, Homo sapiens
  CDR3 for beta chain variable domain of TCR clone 381589 (TRBV7-3, TRBJ2-1)
RASSLDSYNDQFF

SEQ ID NO: 763179 - protein, 15 aa, Homo sapiens
  CDR3 for alpha chain variable domain of TCR clone 381590 (TRAV26-1, TRAJ22)
CIVRVSFWFCKPTDL

SEQ ID NO: 763180 - protein, 13 aa, Homo sapiens
  CDR3 for beta chain variable domain of TCR clone 381590 (TRBV7-9, TRBJ1-2)
CASSLKQNYGYTF

SEQ ID NO: 763181 - protein, 11 aa, Homo sapiens
  CDR3 for alpha chain variable domain of TCR clone 381591 (TRAV1-2, TRAJ20)
CAVANDYKLSF

SEQ ID NO: 763182 - protein, 15 aa, Homo sapiens
  CDR3 for beta chain variable domain of TCR clone 381591 (TRBV19, TRBJ1-2)
CASTPGQVANYGYTF

SEQ ID NO: 763183 - protein, 15 aa, Homo sapiens
  CDR3 for alpha chain variable domain of TCR clone 381592 (TRAV35, TRAJ20)
CAGQLVGSNDYKLSF

SEQ ID NO: 763184 - protein, 15 aa, Homo sapiens
  CDR3 for beta chain variable domain of TCR clone 381592 (TRBV27, TRBJ2-1)
CASSNGGGSSNEQFF

SEQ ID NO: 763185 - protein, 14 aa, Homo sapiens
  CDR3 for alpha chain variable domain of TCR clone 381593 (TRAV1-2, TRAJ8)
CAVREDTGFKKLVF

SEQ ID NO: 763186 - protein, 15 aa, Homo sapiens
  CDR3 for beta chain variable domain of TCR clone 381593 (TRBV7-2, TRBJ2-3)
CASSLVVRGPDTQYF

SEQ ID NO: 763187 - protein, 15 aa, Homo sapiens
  CDR3 for alpha chain variable domain of TCR clone 381594 (TRAV2, TRAJ45)
CAVDGTGGGADGLTF

SEQ ID NO: 763188 - protein, 15 aa, Homo sapiens
  CDR3 for beta chain variable domain of TCR clone 381594 (TRBV28, TRBJ2-7)
CASRPWDRFSYEQYF

SEQ ID NO: 763189 - protein, 15 aa, Homo sapiens
  CDR3 for alpha chain variable domain of TCR clone 381595 (TRAV4, TRAJ39)
CPVGPNNNAGNMPTF

SEQ ID NO: 763190 - protein, 16 aa, Homo sapiens
  CDR3 for beta chain variable domain of TCR clone 381595 (TRBV27, TRBJ2-2)
CASSFRGLVRTGELFF

SEQ ID NO: 763191 - protein, 17 aa, Homo sapiens
  CDR3 for alpha chain variable domain of TCR clone 381596 (TRAV8-1, TRAJ43)
CAVTNDMRFGAGTRLTV

SEQ ID NO: 763192 - protein, 16 aa, Homo sapiens
  CDR3 for beta chain variable domain of TCR clone 381596 (TRBV20-1, TRBJ2-7)
CSARDLQRTGRYEQYF

SEQ ID NO: 763193 - protein, 15 aa, Homo sapiens
  CDR3 for alpha chain variable domain of TCR clone 381597 (TRAV26-1, TRAJ22)
CIVRVSFWFCKATDL

SEQ ID NO: 763194 - protein, 15 aa, Homo sapiens
  CDR3 for beta chain variable domain of TCR clone 381597 (TRBV5-1, TRBJ2-7)
CASSLMTSGSNEQYF

SEQ ID NO: 763195 - protein, 15 aa, Homo sapiens
  CDR3 for alpha chain variable domain of TCR clone 381598 (TRAV29/DV5, TRAJ24)
CAASGATDSWVKFQF

SEQ ID NO: 763196 - protein, 14 aa, Homo sapiens
  CDR3 for beta chain variable domain of TCR clone 381598 (TRBV5-1, TRBJ2-7)
CASSLVRGSGEQYF

SEQ ID NO: 763197 - protein, 14 aa, Homo sapiens
  CDR3 for alpha chain variable domain of TCR clone 381599 (TRAV26-1, TRAJ39)
CIVFTNSAGNMLTF

SEQ ID NO: 763198 - protein, 15 aa, Homo sapiens
  CDR3 for beta chain variable domain of TCR clone 381599 (TRBV7-9, TRBJ1-4)
CASSRTGGFNEKLFF

SEQ ID NO: 763199 - protein, 18 aa, Homo sapiens
  CDR3 for alpha chain variable domain of TCR clone 381600 (TRAV21, TRAJ52)
CAVRPSPACGTSYGKLTF

SEQ ID NO: 763200 - protein, 13 aa, Homo sapiens
  CDR3 for beta chain variable domain of TCR clone 381600 (TRBV28, TRBJ1-1)
CASSKQGWNEAFF

SEQ ID NO: 763201 - protein, 18 aa, Homo sapiens
  CDR3 for alpha chain variable domain of TCR clone 381601 (TRAV12-2, )
CAVEDIQNPDPAAYQLRD

SEQ ID NO: 763202 - protein, 16 aa, Homo sapiens
  CDR3 for beta chain variable domain of TCR clone 381601 (TRBV6-1, TRBJ1-2)
CASSGAWQGRSHGYTF

SEQ ID NO: 763203 - protein, 16 aa, Homo sapiens
  CDR3 for alpha chain variable domain of TCR clone 381602 (TRAV17, TRAJ53)
CATDALSGGSNYQLNF

SEQ ID NO: 763204 - protein, 12 aa, Homo sapiens
  CDR3 for beta chain variable domain of TCR clone 381602 (TRBV5-1, TRBJ2-7)
CASSFRGYEQYF

SEQ ID NO: 763205 - protein, 13 aa, Homo sapiens
  CDR3 for alpha chain variable domain of TCR clone 381603 (TRAV2, TRAJ40)
CAVVTSGTYKYIF

SEQ ID NO: 763206 - protein, 16 aa, Homo sapiens
  CDR3 for beta chain variable domain of TCR clone 381603 (TRBV7-9, TRBJ1-3)
CASSLGAGSSGDTIYF

SEQ ID NO: 763207 - protein, 16 aa, Homo sapiens
  CDR3 for alpha chain variable domain of TCR clone 381604 (TRAV14/DV4, TRAJ53)
SAMREGGGGSNYKLTF

SEQ ID NO: 763208 - protein, 13 aa, Homo sapiens
  CDR3 for beta chain variable domain of TCR clone 381604 (TRBV2, TRBJ1-1)
CASSEGGNTEAFF

SEQ ID NO: 763209 - protein, 11 aa, Homo sapiens
  CDR3 for alpha chain variable domain of TCR clone 381605 (TRAV1-1, TRAJ39)
CAVPVVGNMLT

SEQ ID NO: 763210 - protein, 15 aa, Homo sapiens
  CDR3 for beta chain variable domain of TCR clone 381605 (TRBV19, TRBJ1-6)
CASSTQGAVGSPLHF

SEQ ID NO: 763211 - protein, 10 aa, Homo sapiens
  CDR3 for alpha chain variable domain of TCR clone 381606 (TRAV12-3, TRAJ34)
CAMSADKLIF

SEQ ID NO: 763212 - protein, 12 aa, Homo sapiens
  CDR3 for beta chain variable domain of TCR clone 381606 (TRBV11-2, TRBJ2-2)
CASSLGGGELFF

SEQ ID NO: 763213 - protein, 12 aa, Homo sapiens
  CDR3 for alpha chain variable domain of TCR clone 381607 (TRAV8-3, TRAJ27)
CAVGTVQANQPL

SEQ ID NO: 763214 - protein, 13 aa, Homo sapiens
  CDR3 for beta chain variable domain of TCR clone 381607 (TRBV24-1, TRBJ2-2)
CATSETNTGELFF

SEQ ID NO: 763215 - protein, 16 aa, Homo sapiens
  CDR3 for alpha chain variable domain of TCR clone 381608 (TRAV3, TRAJ10)
CAVRDMRAGGGNKLTF

SEQ ID NO: 763216 - protein, 13 aa, Homo sapiens
  CDR3 for beta chain variable domain of TCR clone 381608 (TRBV18, TRBJ2-7)
CASSRSGSYEQYF

SEQ ID NO: 763217 - protein, 14 aa, Homo sapiens
  CDR3 for alpha chain variable domain of TCR clone 381609 (TRAV29/DV5, TRAJ34)
CAASASRETDKLII

SEQ ID NO: 763218 - protein, 15 aa, Homo sapiens
  CDR3 for beta chain variable domain of TCR clone 381609 (TRBV7-8, TRBJ2-7)
CASSLERAGSYEQYF

SEQ ID NO: 763219 - protein, 13 aa, Homo sapiens
  CDR3 for alpha chain variable domain of TCR clone 381610 (TRAV12-2, TRAJ39)
CAENNNAGNMLTF

SEQ ID NO: 763220 - protein, 13 aa, Homo sapiens
  CDR3 for beta chain variable domain of TCR clone 381610 (TRBV2, TRBJ1-5)
CATAGPSNQPQHF

SEQ ID NO: 763221 - protein, 16 aa, Homo sapiens
  CDR3 for alpha chain variable domain of TCR clone 381611 (TRAV3, TRAJ28)
CAVLPRSGAGSYQLTF

SEQ ID NO: 763222 - protein, 13 aa, Homo sapiens
  CDR3 for beta chain variable domain of TCR clone 381611 (TRBV12-4, TRBJ2-5)
CASRLAVQDTQYF

SEQ ID NO: 763223 - protein, 14 aa, Homo sapiens
  CDR3 for alpha chain variable domain of TCR clone 381612 (TRAV12-2, TRAJ13)
CAVKKTGGYQKVTF

SEQ ID NO: 763224 - protein, 14 aa, Homo sapiens
  CDR3 for beta chain variable domain of TCR clone 381612 (TRBV10-3, TRBJ2-1)
CAICSDLAYNEQFF

SEQ ID NO: 763225 - protein, 14 aa, Homo sapiens
  CDR3 for alpha chain variable domain of TCR clone 381613 (TRAV12-2, TRAJ45)
CALPERGSADGLTF

SEQ ID NO: 763226 - protein, 14 aa, Homo sapiens
  CDR3 for beta chain variable domain of TCR clone 381613 (TRBV18, TRBJ1-5)
CASSPGNSNQPQHF

SEQ ID NO: 763227 - protein, 14 aa, Homo sapiens
  CDR3 for alpha chain variable domain of TCR clone 381614 (TRAV30, TRAJ33)
CGTVAPRSNYQLIW

SEQ ID NO: 763228 - protein, 17 aa, Homo sapiens
  CDR3 for beta chain variable domain of TCR clone 381614 (TRBV28, TRBJ2-7)
CASSPLHRASGVYEQYS

SEQ ID NO: 763229 - protein, 14 aa, Homo sapiens
  CDR3 for alpha chain variable domain of TCR clone 381615 (TRAV16, TRAJ48)
CALTPGFGNEKLIF

SEQ ID NO: 763230 - protein, 15 aa, Homo sapiens
  CDR3 for beta chain variable domain of TCR clone 381615 (TRBV6-6, TRBJ2-7)
CASSYSYGGSYEQYF

SEQ ID NO: 763231 - protein, 14 aa, Homo sapiens
  CDR3 for alpha chain variable domain of TCR clone 381616 (TRAV12-3, TRAJ42)
CAMNYGGSQGNLIF

SEQ ID NO: 763232 - protein, 15 aa, Homo sapiens
  CDR3 for beta chain variable domain of TCR clone 381616 (TRBV2, TRBJ2-1)
CASSETGGNYNEQFF

SEQ ID NO: 763233 - protein, 11 aa, Homo sapiens
  CDR3 for alpha chain variable domain of TCR clone 381617 (TRAV21, TRAJ33)
CAVIRNYQLIW

SEQ ID NO: 763234 - protein, 14 aa, Homo sapiens
  CDR3 for beta chain variable domain of TCR clone 381617 (TRBV4-2, TRBJ1-5)
CASSQDSINQPQHF

SEQ ID NO: 763235 - protein, 15 aa, Homo sapiens
  CDR3 for alpha chain variable domain of TCR clone 381618 (TRAV29/DV5, TRAJ24)
CAASGATDSWGKFQF

SEQ ID NO: 763236 - protein, 12 aa, Homo sapiens
  CDR3 for beta chain variable domain of TCR clone 381618 (TRBV11-2, TRBJ2-2)
CDSSLPTGELFF

SEQ ID NO: 763237 - protein, 17 aa, Homo sapiens
  CDR3 for alpha chain variable domain of TCR clone 381619 (TRAV8-6, TRAJ58)
CAVSSWVGETSGSRFTF

SEQ ID NO: 763238 - protein, 14 aa, Homo sapiens
  CDR3 for beta chain variable domain of TCR clone 381619 (TRBV7-2, TRBJ2-7)
CASSPKTSFYEQYF

SEQ ID NO: 763239 - protein, 12 aa, Homo sapiens
  CDR3 for alpha chain variable domain of TCR clone 381620 (TRAV20, TRAJ56)
CAVTGANSKLTF

SEQ ID NO: 763240 - protein, 14 aa, Homo sapiens
  CDR3 for beta chain variable domain of TCR clone 381620 (TRBV20-1, TRBJ2-5)
CSALVTGYQETQYF

SEQ ID NO: 763241 - protein, 10 aa, Homo sapiens
  CDR3 for alpha chain variable domain of TCR clone 381621 (TRAV12-1, TRAJ23)
CVVSGGKLIF

SEQ ID NO: 763242 - protein, 15 aa, Homo sapiens
  CDR3 for beta chain variable domain of TCR clone 381621 (TRBV11-2, TRBJ1-2)
CASSLEGVQRNGYTF

SEQ ID NO: 763243 - protein, 15 aa, Homo sapiens
  CDR3 for alpha chain variable domain of TCR clone 381622 (TRAV26-1, TRAJ29)
CIVRVAGSGNTPLVF

SEQ ID NO: 763244 - protein, 15 aa, Homo sapiens
  CDR3 for beta chain variable domain of TCR clone 381622 (TRBV7-9, TRBJ1-5)
CASSQGHQPNQPRHF

SEQ ID NO: 763245 - protein, 22 aa, Homo sapiens
  CDR3 for alpha chain variable domain of TCR clone 381623 (TRAV4, )
CLGGRVKPNIQNPDPAVYQLRD

SEQ ID NO: 763246 - protein, 16 aa, Homo sapiens
  CDR3 for beta chain variable domain of TCR clone 381623 (TRBV6-6, TRBJ2-7)
CASIETGTNSSYEQCF

SEQ ID NO: 763247 - protein, 14 aa, Homo sapiens
  CDR3 for alpha chain variable domain of TCR clone 381624 (TRAV14/DV4, TRAJ42)
CPRGSLRSQGNRIF

SEQ ID NO: 763248 - protein, 16 aa, Homo sapiens
  CDR3 for beta chain variable domain of TCR clone 381624 (TRBV24-1, TRBJ2-2)
CATSDTGQGGTGELFF

SEQ ID NO: 763249 - protein, 13 aa, Homo sapiens
  CDR3 for alpha chain variable domain of TCR clone 381625 (TRAV6, TRAJ12)
CSEVLDSSYQLIF

SEQ ID NO: 763250 - protein, 18 aa, Homo sapiens
  CDR3 for beta chain variable domain of TCR clone 381625 (TRBV11-2, TRBJ2-3)
CASSLGGASRGAPNTQYF

SEQ ID NO: 763251 - protein, 15 aa, Homo sapiens
  CDR3 for alpha chain variable domain of TCR clone 381626 (TRAV23/DV6, TRAJ13)
CAAWPGGGGYQKVTF

SEQ ID NO: 763252 - protein, 15 aa, Homo sapiens
  CDR3 for beta chain variable domain of TCR clone 381626 (TRBV7-2, TRBJ2-3)
CASSLNLRDTDTQYF

SEQ ID NO: 763253 - protein, 13 aa, Homo sapiens
  CDR3 for alpha chain variable domain of TCR clone 381627 (TRAV1-2, TRAJ9)
CAVLNTGGFKTIF

SEQ ID NO: 763254 - protein, 13 aa, Homo sapiens
  CDR3 for beta chain variable domain of TCR clone 381627 (TRBV19, TRBJ2-7)
CASGKAGGSEQYF

SEQ ID NO: 763255 - protein, 13 aa, Homo sapiens
  CDR3 for alpha chain variable domain of TCR clone 381628 (TRAV17, TRAJ7)
CATDNYGNKRLAF

SEQ ID NO: 763256 - protein, 13 aa, Homo sapiens
  CDR3 for beta chain variable domain of TCR clone 381628 (TRBV27, TRBJ2-1)
CASSSGSYNEQFF

SEQ ID NO: 763257 - protein, 16 aa, Homo sapiens
  CDR3 for alpha chain variable domain of TCR clone 381629 (TRAV23/DV6, TRAJ9)
CAASIGGNTGGFKTSF

SEQ ID NO: 763258 - protein, 14 aa, Homo sapiens
  CDR3 for beta chain variable domain of TCR clone 381629 (TRBV9, TRBJ2-7)
CASSVGVGSYEQYF

SEQ ID NO: 763259 - protein, 15 aa, Homo sapiens
  CDR3 for alpha chain variable domain of TCR clone 381630 (TRAV2, TRAJ11)
CAVGGRNSGYSTLPF

SEQ ID NO: 763260 - protein, 20 aa, Homo sapiens
  CDR3 for beta chain variable domain of TCR clone 381630 (TRBV28, TRBJ2-1)
CASTPIGRSPGLAGGNEQFF

SEQ ID NO: 763261 - protein, 16 aa, Homo sapiens
  CDR3 for alpha chain variable domain of TCR clone 381631 (TRAV17, TRAJ35)
CATAEGGIGFGNVLHC

SEQ ID NO: 763262 - protein, 14 aa, Homo sapiens
  CDR3 for beta chain variable domain of TCR clone 381631 (TRBV7-9, TRBJ2-1)
CASSDNSGYNEQFF

SEQ ID NO: 763263 - protein, 15 aa, Homo sapiens
  CDR3 for alpha chain variable domain of TCR clone 381632 (TRAV35, TRAJ37)
WAFLRGSSNTGKLIF

SEQ ID NO: 763264 - protein, 13 aa, Homo sapiens
  CDR3 for beta chain variable domain of TCR clone 381632 (TRBV2, TRBJ1-2)
CASSVRGNYGYTF

SEQ ID NO: 763265 - protein, 14 aa, Homo sapiens
  CDR3 for alpha chain variable domain of TCR clone 381633 (TRAV30, TRAJ33)
CCTVAPLSNYQLIW

SEQ ID NO: 763266 - protein, 16 aa, Homo sapiens
  CDR3 for beta chain variable domain of TCR clone 381633 (TRBV3-1, TRBJ2-5)
CASSPGQFNGFGTQYF

SEQ ID NO: 763267 - protein, 13 aa, Homo sapiens
  CDR3 for alpha chain variable domain of TCR clone 381634 (TRAV30, TRAJ6)
CGFIEGGSYIPTF

SEQ ID NO: 763268 - protein, 15 aa, Homo sapiens
  CDR3 for beta chain variable domain of TCR clone 381634 (TRBV20-1, TRBJ1-1)
CSASRGVTGNTEAFF

SEQ ID NO: 763269 - protein, 15 aa, Homo sapiens
  CDR3 for alpha chain variable domain of TCR clone 381635 (TRAV3, TRAJ22)
CAVRDRGGSARQLTF

SEQ ID NO: 763270 - protein, 15 aa, Homo sapiens
  CDR3 for beta chain variable domain of TCR clone 381635 (TRBV5-4, TRBJ1-4)
CASSDTGGTNEKLFF

SEQ ID NO: 763271 - protein, 13 aa, Homo sapiens
  CDR3 for alpha chain variable domain of TCR clone 381636 (TRAV3, TRAJ36)
CAVRDTGANNLFF

SEQ ID NO: 763272 - protein, 15 aa, Homo sapiens
  CDR3 for beta chain variable domain of TCR clone 381636 (TRBV24-1, TRBJ2-1)
CATSGSGRFYNEQFF

SEQ ID NO: 763273 - protein, 14 aa, Homo sapiens
  CDR3 for alpha chain variable domain of TCR clone 381637 (TRAV35, TRAJ40)
CAGSTTSGTYKYIF

SEQ ID NO: 763274 - protein, 13 aa, Homo sapiens
  CDR3 for beta chain variable domain of TCR clone 381637 (TRBV27, TRBJ2-1)
CASRTLGVGEQFF

SEQ ID NO: 763275 - protein, 13 aa, Homo sapiens
  CDR3 for alpha chain variable domain of TCR clone 381638 (TRAV13-1, TRAJ11)
CAASIRGYSTLTF

SEQ ID NO: 763276 - protein, 17 aa, Homo sapiens
  CDR3 for beta chain variable domain of TCR clone 381638 (TRBV4-3, TRBJ1-2)
CASSSRLQAGGSVGDSF

SEQ ID NO: 763277 - protein, 16 aa, Homo sapiens
  CDR3 for alpha chain variable domain of TCR clone 381639 (TRAV26-1, TRAJ23)
CIVRPHGSNQGGKLIF

SEQ ID NO: 763278 - protein, 19 aa, Homo sapiens
  CDR3 for beta chain variable domain of TCR clone 381639 (TRBV5-4, TRBJ2-7)
CASSLGQSPGAPTSSTSGR

SEQ ID NO: 763279 - protein, 12 aa, Homo sapiens
  CDR3 for alpha chain variable domain of TCR clone 381640 (TRAV21, TRAJ31)
CAVWGNNARLMF

SEQ ID NO: 763280 - protein, 13 aa, Homo sapiens
  CDR3 for beta chain variable domain of TCR clone 381640 (TRBV7-2, TRBJ2-4)
CASSREHANIQYF

SEQ ID NO: 763281 - protein, 17 aa, Homo sapiens
  CDR3 for alpha chain variable domain of TCR clone 381641 (TRAV13-1, TRAJ10)
CAASIWRGTGGRNKRTF

SEQ ID NO: 763282 - protein, 13 aa, Homo sapiens
  CDR3 for beta chain variable domain of TCR clone 381641 (TRBV20-1, TRBJ1-1)
CSARGGGNTEAFF

SEQ ID NO: 763283 - protein, 13 aa, Homo sapiens
  CDR3 for alpha chain variable domain of TCR clone 381642 (TRAV3, TRAJ16)
CAVRDRNGQKLLF

SEQ ID NO: 763284 - protein, 15 aa, Homo sapiens
  CDR3 for beta chain variable domain of TCR clone 381642 (TRBV5-1, TRBJ2-1)
CASSPPRAPCNKQFF

SEQ ID NO: 763285 - protein, 14 aa, Homo sapiens
  CDR3 for alpha chain variable domain of TCR clone 381643 (TRAV1-2, TRAJ29)
CAVRTDSGNTPLVF

SEQ ID NO: 763286 - protein, 14 aa, Homo sapiens
  CDR3 for beta chain variable domain of TCR clone 381643 (TRBV7-2, TRBJ2-7)
CASSPKTSFYEEYF

SEQ ID NO: 763287 - protein, 16 aa, Homo sapiens
  CDR3 for alpha chain variable domain of TCR clone 381644 (TRAV8-3, TRAJ4)
CAVGARGSGGYNKLIF

SEQ ID NO: 763288 - protein, 13 aa, Homo sapiens
  CDR3 for beta chain variable domain of TCR clone 381644 (TRBV4-2, TRBJ1-1)
CASSQAGNTEAFF

SEQ ID NO: 763289 - protein, 11 aa, Homo sapiens
  CDR3 for alpha chain variable domain of TCR clone 381645 (TRAV21, TRAJ34)
CAHYNTDKLIF

SEQ ID NO: 763290 - protein, 13 aa, Homo sapiens
  CDR3 for beta chain variable domain of TCR clone 381645 (TRBV7-6, TRBJ1-2)
CASSLVPDYGYTF

SEQ ID NO: 763291 - protein, 16 aa, Homo sapiens
  CDR3 for alpha chain variable domain of TCR clone 381646 (TRAV12-3, TRAJ53)
CAMSPGSGGSNDKLTF

SEQ ID NO: 763292 - protein, 15 aa, Homo sapiens
  CDR3 for beta chain variable domain of TCR clone 381646 (TRBV27, TRBJ2-1)
CASSNGGGSSNEQFF

SEQ ID NO: 763293 - protein, 16 aa, Homo sapiens
  CDR3 for alpha chain variable domain of TCR clone 381647 (TRAV16, TRAJ57)
CAPYLITQGGSEKLVF

SEQ ID NO: 763294 - protein, 17 aa, Homo sapiens
  CDR3 for beta chain variable domain of TCR clone 381647 (TRBV24-1, TRBJ2-4)
CATSDAEARGVSNIQYF

SEQ ID NO: 763295 - protein, 14 aa, Homo sapiens
  CDR3 for alpha chain variable domain of TCR clone 381648 (TRAV2, TRAJ6)
CAVVFVGGSYIPTF

SEQ ID NO: 763296 - protein, 16 aa, Homo sapiens
  CDR3 for beta chain variable domain of TCR clone 381648 (TRBV11-2, TRBJ1-1)
CASSLRQGGEHSKAFF

SEQ ID NO: 763297 - protein, 13 aa, Homo sapiens
  CDR3 for alpha chain variable domain of TCR clone 381649 (TRAV27, TRAJ8)
CAGGPTGFQKLVC

SEQ ID NO: 763298 - protein, 15 aa, Homo sapiens
  CDR3 for beta chain variable domain of TCR clone 381649 (TRBV6-1, TRBJ2-7)
CASSESMGDFYEQYF

SEQ ID NO: 763299 - protein, 14 aa, Homo sapiens
  CDR3 for alpha chain variable domain of TCR clone 381650 (TRAV12-2, TRAJ17)
CAVNIKAAGNKLTF

SEQ ID NO: 763300 - protein, 13 aa, Homo sapiens
  CDR3 for beta chain variable domain of TCR clone 381650 (TRBV3-1, TRBJ1-5)
CASSQFGDQPQHF

SEQ ID NO: 763301 - protein, 14 aa, Homo sapiens
  CDR3 for alpha chain variable domain of TCR clone 381651 (TRAV12-2, TRAJ13)
CAVKKTGRYQKVTF

SEQ ID NO: 763302 - protein, 15 aa, Homo sapiens
  CDR3 for beta chain variable domain of TCR clone 381651 (TRBV27, TRBJ2-1)
CASSNGGGSANEQFF

SEQ ID NO: 763303 - protein, 15 aa, Homo sapiens
  CDR3 for alpha chain variable domain of TCR clone 381652 (TRAV3, TRAJ20)
FAVRDSRSNDYKLSF

SEQ ID NO: 763304 - protein, 14 aa, Homo sapiens
  CDR3 for beta chain variable domain of TCR clone 381652 (TRBV20-1, TRBJ2-7)
CSARRGNGIYEQYF

SEQ ID NO: 763305 - protein, 19 aa, Homo sapiens
  CDR3 for alpha chain variable domain of TCR clone 381653 (TRAV2, TRAJ20)
ILQVREADAAVYRDCKLSF

SEQ ID NO: 763306 - protein, 14 aa, Homo sapiens
  CDR3 for beta chain variable domain of TCR clone 381653 (TRBV18, TRBJ2-7)
CASSPRGGAYEQYF

SEQ ID NO: 763307 - protein, 13 aa, Homo sapiens
  CDR3 for alpha chain variable domain of TCR clone 381654 (TRAV27, TRAJ6)
CAGGTRGSHIPTF

SEQ ID NO: 763308 - protein, 14 aa, Homo sapiens
  CDR3 for beta chain variable domain of TCR clone 381654 (TRBV7-3, TRBJ1-1)
CASSLKGGNTEAFF

SEQ ID NO: 763309 - protein, 16 aa, Homo sapiens
  CDR3 for alpha chain variable domain of TCR clone 381655 (TRAV3, TRAJ37)
CAVRPHVSGNTGKLIF

SEQ ID NO: 763310 - protein, 15 aa, Homo sapiens
  CDR3 for beta chain variable domain of TCR clone 381655 (TRBV20-1, TRBJ2-7)
CSARDRVSGMDEQYF

SEQ ID NO: 763311 - protein, 15 aa, Homo sapiens
  CDR3 for alpha chain variable domain of TCR clone 381656 (TRAV12-3, TRAJ10)
CASYILTGGGNKLTF

SEQ ID NO: 763312 - protein, 16 aa, Homo sapiens
  CDR3 for beta chain variable domain of TCR clone 381656 (TRBV19, TRBJ2-1)
CASSKAGPSSYNEQFF

SEQ ID NO: 763313 - protein, 15 aa, Homo sapiens
  CDR3 for alpha chain variable domain of TCR clone 381657 (TRAV8-4, TRAJ11)
CAVSRALSGYSSLTF

SEQ ID NO: 763314 - protein, 13 aa, Homo sapiens
  CDR3 for beta chain variable domain of TCR clone 381657 (TRBV10-3, TRBJ2-7)
CASKLAVNYEKYF

SEQ ID NO: 763315 - protein, 15 aa, Homo sapiens
  CDR3 for alpha chain variable domain of TCR clone 381658 (TRAV14/DV4, TRAJ15)
CAMRGSNQAGTALIF

SEQ ID NO: 763316 - protein, 11 aa, Homo sapiens
  CDR3 for beta chain variable domain of TCR clone 381658 (TRBV11-2, TRBJ2-2)
CASSLPGELFF

SEQ ID NO: 763317 - protein, 14 aa, Homo sapiens
  CDR3 for alpha chain variable domain of TCR clone 381659 (TRAV17, TRAJ57)
CATVPQGGSEKLVF

SEQ ID NO: 763318 - protein, 16 aa, Homo sapiens
  CDR3 for beta chain variable domain of TCR clone 381659 (TRBV13, TRBJ2-2)
CASSPRTGEHTGELFF

SEQ ID NO: 763319 - protein, 15 aa, Homo sapiens
  CDR3 for alpha chain variable domain of TCR clone 381660 (TRAV21, TRAJ22)
CAVRLFFWFCKASDL

SEQ ID NO: 763320 - protein, 14 aa, Homo sapiens
  CDR3 for beta chain variable domain of TCR clone 381660 (TRBV18, TRBJ2-5)
CASSPGVSQETQYF

SEQ ID NO: 763321 - protein, 12 aa, Homo sapiens
  CDR3 for alpha chain variable domain of TCR clone 381661 (TRAV13-1, TRAJ21)
CAAKEGFNKFYF

SEQ ID NO: 763322 - protein, 14 aa, Homo sapiens
  CDR3 for beta chain variable domain of TCR clone 381661 (TRBV23-1, TRBJ2-5)
CASSVLRSQETQYF

SEQ ID NO: 763323 - protein, 13 aa, Homo sapiens
  CDR3 for alpha chain variable domain of TCR clone 381662 (TRAV8-3, TRAJ21)
CAVGSYNFNQFYF

SEQ ID NO: 763324 - protein, 16 aa, Homo sapiens
  CDR3 for beta chain variable domain of TCR clone 381662 (TRBV19, TRBJ2-1)
CASSMGGGSSYNEQFF

SEQ ID NO: 763325 - protein, 14 aa, Homo sapiens
  CDR3 for alpha chain variable domain of TCR clone 381663 (TRAV13-1, TRAJ20)
CAARPGSNDYKLSF

SEQ ID NO: 763326 - protein, 13 aa, Homo sapiens
  CDR3 for beta chain variable domain of TCR clone 381663 (TRBV20-1, TRBJ1-1)
RSAPPGGHTEAFF

SEQ ID NO: 763327 - protein, 14 aa, Homo sapiens
  CDR3 for alpha chain variable domain of TCR clone 381664 (TRAV8-1, TRAJ9)
CAVNAWTGGFKTIF

SEQ ID NO: 763328 - protein, 16 aa, Homo sapiens
  CDR3 for beta chain variable domain of TCR clone 381664 (TRBV28, TRBJ2-2)
CASSLGGGSNTGELFF

SEQ ID NO: 763329 - protein, 13 aa, Homo sapiens
  CDR3 for alpha chain variable domain of TCR clone 381665 (TRAV21, TRAJ44)
CAAHTGTASKLTF

SEQ ID NO: 763330 - protein, 19 aa, Homo sapiens
  CDR3 for beta chain variable domain of TCR clone 381665 (TRBV3-1, TRBJ2-1)
CASSRMIVPGLAGKNEQFL

SEQ ID NO: 763331 - protein, 17 aa, Homo sapiens
  CDR3 for alpha chain variable domain of TCR clone 381666 (TRAV13-1, TRAJ52)
CAASSGSGCTSYGKLTF

SEQ ID NO: 763332 - protein, 14 aa, Homo sapiens
  CDR3 for beta chain variable domain of TCR clone 381666 (TRBV2, TRBJ2-3)
CASSAITGTDTQYF

SEQ ID NO: 763333 - protein, 13 aa, Homo sapiens
  CDR3 for alpha chain variable domain of TCR clone 381667 (TRAV17, TRAJ7)
CATDNYGNNRLAF

SEQ ID NO: 763334 - protein, 16 aa, Homo sapiens
  CDR3 for beta chain variable domain of TCR clone 381667 (TRBV4-1, TRBJ2-5)
RASSQAIAASSATQYF

SEQ ID NO: 763335 - protein, 15 aa, Homo sapiens
  CDR3 for alpha chain variable domain of TCR clone 381668 (TRAV8-4, TRAJ40)
CAVSDDTSGTYKYIF

SEQ ID NO: 763336 - protein, 14 aa, Homo sapiens
  CDR3 for beta chain variable domain of TCR clone 381668 (TRBV25-1, TRBJ1-1)
CASTHLGGNTEAFF

SEQ ID NO: 763337 - protein, 15 aa, Homo sapiens
  CDR3 for alpha chain variable domain of TCR clone 381669 (TRAV12-3, TRAJ11)
CAMSEENSGYSTLTF

SEQ ID NO: 763338 - protein, 12 aa, Homo sapiens
  CDR3 for beta chain variable domain of TCR clone 381669 (TRBV7-9, TRBJ2-7)
CASSIKREEQYF

SEQ ID NO: 763339 - protein, 10 aa, Homo sapiens
  CDR3 for alpha chain variable domain of TCR clone 381670 (TRAV13-2, TRAJ43)
CAETSGDMRF

SEQ ID NO: 763340 - protein, 13 aa, Homo sapiens
  CDR3 for beta chain variable domain of TCR clone 381670 (TRBV24-1, TRBJ2-1)
WATRQGAGNEQFF

SEQ ID NO: 763341 - protein, 18 aa, Homo sapiens
  CDR3 for alpha chain variable domain of TCR clone 381671 (TRAV21, TRAJ53)
AASQPGDSATYLCATLNS

SEQ ID NO: 763342 - protein, 16 aa, Homo sapiens
  CDR3 for beta chain variable domain of TCR clone 381671 (TRBV9, TRBJ2-1)
CASSVGGGGNYNEQFF

SEQ ID NO: 763343 - protein, 13 aa, Homo sapiens
  CDR3 for alpha chain variable domain of TCR clone 381672 (TRAV8-2, TRAJ21)
CVVSSYNFNKFYF

SEQ ID NO: 763344 - protein, 15 aa, Homo sapiens
  CDR3 for beta chain variable domain of TCR clone 381672 (TRBV2, TRBJ2-3)
CASSERSGHTDTQYF

SEQ ID NO: 763345 - protein, 11 aa, Homo sapiens
  CDR3 for alpha chain variable domain of TCR clone 381673 (TRAV17, TRAJ36)
YAPTGANNLFF

SEQ ID NO: 763346 - protein, 12 aa, Homo sapiens
  CDR3 for beta chain variable domain of TCR clone 381673 (TRBV29-1, TRBJ2-3)
CSVTGGADTQYF

SEQ ID NO: 763347 - protein, 14 aa, Homo sapiens
  CDR3 for alpha chain variable domain of TCR clone 381674 (TRAV21, TRAJ38)
CAVTGAGNNRKLIW

SEQ ID NO: 763348 - protein, 13 aa, Homo sapiens
  CDR3 for beta chain variable domain of TCR clone 381674 (TRBV7-3, TRBJ2-5)
CASSIGCFETQYF

SEQ ID NO: 763349 - protein, 15 aa, Homo sapiens
  CDR3 for alpha chain variable domain of TCR clone 381675 (TRAV3, TRAJ44)
CAVRSNTGTASKLTF

SEQ ID NO: 763350 - protein, 14 aa, Homo sapiens
  CDR3 for beta chain variable domain of TCR clone 381675 (TRBV7-9, TRBJ2-7)
CASSLVEDGYEQYF

SEQ ID NO: 763351 - protein, 16 aa, Homo sapiens
  CDR3 for alpha chain variable domain of TCR clone 381676 (TRAV12-3, TRAJ53)
CAMSPGRGGSNYKLTF

SEQ ID NO: 763352 - protein, 16 aa, Homo sapiens
  CDR3 for beta chain variable domain of TCR clone 381676 (TRBV4-2, TRBJ1-1)
CASSQAGFGMNTEAFV

SEQ ID NO: 763353 - protein, 14 aa, Homo sapiens
  CDR3 for alpha chain variable domain of TCR clone 381677 (TRAV12-2, TRAJ13)
LAVKKTGGYQKVTF

SEQ ID NO: 763354 - protein, 13 aa, Homo sapiens
  CDR3 for beta chain variable domain of TCR clone 381677 (TRBV7-2, TRBJ2-7)
CASSSPSGSEQYF

SEQ ID NO: 763355 - protein, 11 aa, Homo sapiens
  CDR3 for alpha chain variable domain of TCR clone 381678 (TRAV21, TRAJ34)
CAVTNTDKPIF

SEQ ID NO: 763356 - protein, 15 aa, Homo sapiens
  CDR3 for beta chain variable domain of TCR clone 381678 (TRBV7-8, TRBJ2-1)
CASSLADSLYNEQFF

SEQ ID NO: 763357 - protein, 13 aa, Homo sapiens
  CDR3 for alpha chain variable domain of TCR clone 381679 (TRAV25, TRAJ10)
CAGRTGGGNKLTF

SEQ ID NO: 763358 - protein, 13 aa, Homo sapiens
  CDR3 for beta chain variable domain of TCR clone 381679 (TRBV7-3, TRBJ2-5)
CASSFRGGETQYF

SEQ ID NO: 763359 - protein, 13 aa, Homo sapiens
  CDR3 for alpha chain variable domain of TCR clone 381680 (TRAV27, TRAJ41)
CAGEGNAGYALNF

SEQ ID NO: 763360 - protein, 14 aa, Homo sapiens
  CDR3 for beta chain variable domain of TCR clone 381680 (TRBV7-2, TRBJ1-1)
CASSFLTRTTEAFF

SEQ ID NO: 763361 - protein, 18 aa, Homo sapiens
  CDR3 for alpha chain variable domain of TCR clone 381681 (TRAV38-2/DV8, TRAJ42)
CAYRSADRTGGSQGNLIF

SEQ ID NO: 763362 - protein, 12 aa, Homo sapiens
  CDR3 for beta chain variable domain of TCR clone 381681 (TRBV11-2, TRBJ2-2)
CASSLGGGELFF

SEQ ID NO: 763363 - protein, 15 aa, Homo sapiens
  CDR3 for alpha chain variable domain of TCR clone 381682 (TRAV14/DV4, TRAJ10)
CAMRELTGGGNKLTF

SEQ ID NO: 763364 - protein, 12 aa, Homo sapiens
  CDR3 for beta chain variable domain of TCR clone 381682 (TRBV12-4, TRBJ2-7)
CASSLGGYEQYF

SEQ ID NO: 763365 - protein, 13 aa, Homo sapiens
  CDR3 for alpha chain variable domain of TCR clone 381683 (TRAV8-3, TRAJ44)
CAVVPGTASKLTF

SEQ ID NO: 763366 - protein, 14 aa, Homo sapiens
  CDR3 for beta chain variable domain of TCR clone 381683 (TRBV11-2, TRBJ2-3)
CASSRLAPTDTQYF

SEQ ID NO: 763367 - protein, 16 aa, Homo sapiens
  CDR3 for alpha chain variable domain of TCR clone 381684 (TRAV14/DV4, TRAJ53)
CAMREGGGGSNYKLTF

SEQ ID NO: 763368 - protein, 15 aa, Homo sapiens
  CDR3 for beta chain variable domain of TCR clone 381684 (TRBV7-6, TRBJ2-5)
CASSKPTGPQETQYF

SEQ ID NO: 763369 - protein, 14 aa, Homo sapiens
  CDR3 for alpha chain variable domain of TCR clone 381685 (TRAV12-2, TRAJ11)
CAVEGGSGYSTLTF

SEQ ID NO: 763370 - protein, 14 aa, Homo sapiens
  CDR3 for beta chain variable domain of TCR clone 381685 (TRBV10-2, TRBJ2-2)
CASSERSNTGELFF

SEQ ID NO: 763371 - protein, 11 aa, Homo sapiens
  CDR3 for alpha chain variable domain of TCR clone 381686 (TRAV3, TRAJ21)
CAVGNFNKFYF

SEQ ID NO: 763372 - protein, 14 aa, Homo sapiens
  CDR3 for beta chain variable domain of TCR clone 381686 (TRBV5-1, TRBJ1-1)
CASSLTRRSTEAFF

SEQ ID NO: 763373 - protein, 11 aa, Homo sapiens
  CDR3 for alpha chain variable domain of TCR clone 381687 (TRAV35, TRAJ30)
CAGEGDDKIIF

SEQ ID NO: 763374 - protein, 14 aa, Homo sapiens
  CDR3 for beta chain variable domain of TCR clone 381687 (TRBV2, TRBJ2-7)
CASSLTSGGYEQYF

SEQ ID NO: 763375 - protein, 14 aa, Homo sapiens
  CDR3 for alpha chain variable domain of TCR clone 381688 (TRAV8-4, TRAJ45)
CASGGGGGADGLTF

SEQ ID NO: 763376 - protein, 20 aa, Homo sapiens
  CDR3 for beta chain variable domain of TCR clone 381688 (TRBV4-3, TRBJ2-3)
CASSLRVEMRASGRPDTQYF

SEQ ID NO: 763377 - protein, 14 aa, Homo sapiens
  CDR3 for alpha chain variable domain of TCR clone 381689 (TRAV30, TRAJ26)
CGTEIVSHGQNFVF

SEQ ID NO: 763378 - protein, 13 aa, Homo sapiens
  CDR3 for beta chain variable domain of TCR clone 381689 (TRBV19, TRBJ1-3)
CASRLSLGNTIYF

SEQ ID NO: 763379 - protein, 13 aa, Homo sapiens
  CDR3 for alpha chain variable domain of TCR clone 381690 (TRAV26-1, TRAJ30)
FIVRVESNDKIIF

SEQ ID NO: 763380 - protein, 15 aa, Homo sapiens
  CDR3 for beta chain variable domain of TCR clone 381690 (TRBV6-1, TRBJ2-3)
CASSERGGITDTQYF

SEQ ID NO: 763381 - protein, 11 aa, Homo sapiens
  CDR3 for alpha chain variable domain of TCR clone 381691 (TRAV13-1, TRAJ30)
CAASRDDKIIF

SEQ ID NO: 763382 - protein, 14 aa, Homo sapiens
  CDR3 for beta chain variable domain of TCR clone 381691 (TRBV4-2, TRBJ1-2)
CASSPGGSNYGYTF

SEQ ID NO: 763383 - protein, 12 aa, Homo sapiens
  CDR3 for alpha chain variable domain of TCR clone 381692 (TRAV20, TRAJ56)
CAVTGANSKLTF

SEQ ID NO: 763384 - protein, 14 aa, Homo sapiens
  CDR3 for beta chain variable domain of TCR clone 381692 (TRBV20-1, TRBJ2-5)
CIALVPGYQETQYF

SEQ ID NO: 763385 - protein, 15 aa, Homo sapiens
  CDR3 for alpha chain variable domain of TCR clone 381693 (TRAV10, TRAJ29)
CVVSEPGIQETHLLS

SEQ ID NO: 763386 - protein, 13 aa, Homo sapiens
  CDR3 for beta chain variable domain of TCR clone 381693 (TRBV7-3, TRBJ1-1)
CASSQDWGAEAFF

SEQ ID NO: 763387 - protein, 15 aa, Homo sapiens
  CDR3 for alpha chain variable domain of TCR clone 381694 (TRAV2, TRAJ13)
CATPSYSVGYQKVTF

SEQ ID NO: 763388 - protein, 14 aa, Homo sapiens
  CDR3 for beta chain variable domain of TCR clone 381694 (TRBV4-2, TRBJ2-1)
CASGLDRAYNEQFF

SEQ ID NO: 763389 - protein, 11 aa, Homo sapiens
  CDR3 for alpha chain variable domain of TCR clone 381695 (TRAV12-1, TRAJ34)
CVVNKGRELIF

SEQ ID NO: 763390 - protein, 14 aa, Homo sapiens
  CDR3 for beta chain variable domain of TCR clone 381695 (TRBV10-3, TRBJ2-2)
CAISEVSHSGELFF

SEQ ID NO: 763391 - protein, 10 aa, Homo sapiens
  CDR3 for alpha chain variable domain of TCR clone 381696 (TRAV12-3, TRAJ49)
CAAHGNQFYF

SEQ ID NO: 763392 - protein, 14 aa, Homo sapiens
  CDR3 for beta chain variable domain of TCR clone 381696 (TRBV2, TRBJ2-7)
CASSLTSGGYEQYF

SEQ ID NO: 763393 - protein, 12 aa, Homo sapiens
  CDR3 for alpha chain variable domain of TCR clone 381697 (TRAV17, TRAJ4)
CATDGGYNKLIF

SEQ ID NO: 763394 - protein, 13 aa, Homo sapiens
  CDR3 for beta chain variable domain of TCR clone 381697 (TRBV29-1, TRBJ2-2)
CSTTGVNTVELFF

SEQ ID NO: 763395 - protein, 11 aa, Homo sapiens
  CDR3 for alpha chain variable domain of TCR clone 381698 (TRAV1-2, TRAJ20)
CAVANDYKLSC

SEQ ID NO: 763396 - protein, 13 aa, Homo sapiens
  CDR3 for beta chain variable domain of TCR clone 381698 (TRBV7-3, TRBJ1-1)
CASSQDWGAEAFF

SEQ ID NO: 763397 - protein, 15 aa, Homo sapiens
  CDR3 for alpha chain variable domain of TCR clone 381699 (TRAV1-2, TRAJ13)
CAVRGSSGGYQKVTF

SEQ ID NO: 763398 - protein, 17 aa, Homo sapiens
  CDR3 for beta chain variable domain of TCR clone 381699 (TRBV13, TRBJ2-3)
CASSLSRVAGGRNTQYF

SEQ ID NO: 763399 - protein, 13 aa, Homo sapiens
  CDR3 for alpha chain variable domain of TCR clone 381700 (TRAV29/DV5, TRAJ47)
CAASAEYGNKLVF

SEQ ID NO: 763400 - protein, 16 aa, Homo sapiens
  CDR3 for beta chain variable domain of TCR clone 381700 (TRBV7-9, TRBJ1-2)
CASSLGFSSGEDGYTF

SEQ ID NO: 763401 - protein, 13 aa, Homo sapiens
  CDR3 for alpha chain variable domain of TCR clone 381701 (TRAV21, TRAJ27)
CAALNTNAGKSTF

SEQ ID NO: 763402 - protein, 16 aa, Homo sapiens
  CDR3 for beta chain variable domain of TCR clone 381701 (TRBV20-1, TRBJ2-6)
CSASSQGYDGANVLTF

SEQ ID NO: 763403 - protein, 14 aa, Homo sapiens
  CDR3 for alpha chain variable domain of TCR clone 381702 (TRAV1-2, TRAJ8)
CAVREDTGFQKLVF

SEQ ID NO: 763404 - protein, 15 aa, Homo sapiens
  CDR3 for beta chain variable domain of TCR clone 381702 (TRBV12-4, TRBJ2-5)
CASSLLQGAGETQYF

SEQ ID NO: 763405 - protein, 16 aa, Homo sapiens
  CDR3 for alpha chain variable domain of TCR clone 381703 (TRAV30, TRAJ24)
CGTEIVDADSWGKFQF

SEQ ID NO: 763406 - protein, 19 aa, Homo sapiens
  CDR3 for beta chain variable domain of TCR clone 381703 (TRBV25-1, TRBJ2-2)
SAILVYRVDRGRKTGELFF

SEQ ID NO: 763407 - protein, 15 aa, Homo sapiens
  CDR3 for alpha chain variable domain of TCR clone 381704 (TRAV12-2, TRAJ43)
CAFDMRFGAGTRLTV

SEQ ID NO: 763408 - protein, 15 aa, Homo sapiens
  CDR3 for beta chain variable domain of TCR clone 381704 (TRBV7-8, TRBJ1-2)
CASSPDSLSWLHLRF

SEQ ID NO: 763409 - protein, 13 aa, Homo sapiens
  CDR3 for alpha chain variable domain of TCR clone 381705 (TRAV2, TRAJ15)
CAVASQAGTALIF

SEQ ID NO: 763410 - protein, 16 aa, Homo sapiens
  CDR3 for beta chain variable domain of TCR clone 381705 (TRBV18, TRBJ1-5)
CASSPYRVEGNEPQHF

SEQ ID NO: 763411 - protein, 13 aa, Homo sapiens
  CDR3 for alpha chain variable domain of TCR clone 381706 (TRAV12-2, TRAJ4)
CAVRSGGYNKLIF

SEQ ID NO: 763412 - protein, 13 aa, Homo sapiens
  CDR3 for beta chain variable domain of TCR clone 381706 (TRBV4-1, TRBJ2-1)
CASSQEVQYEQFF

SEQ ID NO: 763413 - protein, 15 aa, Homo sapiens
  CDR3 for alpha chain variable domain of TCR clone 381707 (TRAV21, TRAJ53)
CATLNSGASNYKLTF

SEQ ID NO: 763414 - protein, 14 aa, Homo sapiens
  CDR3 for beta chain variable domain of TCR clone 381707 (TRBV15, TRBJ1-2)
CATSRASVNYGYTF

SEQ ID NO: 763415 - protein, 13 aa, Homo sapiens
  CDR3 for alpha chain variable domain of TCR clone 381708 (TRAV2, TRAJ15)
CAVASQAGTALIF

SEQ ID NO: 763416 - protein, 16 aa, Homo sapiens
  CDR3 for beta chain variable domain of TCR clone 381708 (TRBV5-1, TRBJ1-1)
CASSSGCNSLNTEAFF

SEQ ID NO: 763417 - protein, 15 aa, Homo sapiens
  CDR3 for alpha chain variable domain of TCR clone 381709 (TRAV8-4, TRAJ6)
CAVSAPSGGSYIPTF

SEQ ID NO: 763418 - protein, 15 aa, Homo sapiens
  CDR3 for beta chain variable domain of TCR clone 381709 (TRBV2, TRBJ2-1)
CAGSEARSAYNEQFF

SEQ ID NO: 763419 - protein, 12 aa, Homo sapiens
  CDR3 for alpha chain variable domain of TCR clone 381710 (TRAV17, TRAJ30)
CATDARDDKIIC

SEQ ID NO: 763420 - protein, 15 aa, Homo sapiens
  CDR3 for beta chain variable domain of TCR clone 381710 (TRBV4-1, TRBJ2-1)
CASSQGGELYNEQFF

SEQ ID NO: 763421 - protein, 12 aa, Homo sapiens
  CDR3 for alpha chain variable domain of TCR clone 381711 (TRAV3, TRAJ20)
FAVRDPDYKLSF

SEQ ID NO: 763422 - protein, 13 aa, Homo sapiens
  CDR3 for beta chain variable domain of TCR clone 381711 (TRBV18, TRBJ1-1)
CASSPETKPEAFF

SEQ ID NO: 763423 - protein, 11 aa, Homo sapiens
  CDR3 for alpha chain variable domain of TCR clone 381712 (TRAV3, TRAJ21)
CAAGDFNKFYF

SEQ ID NO: 763424 - protein, 16 aa, Homo sapiens
  CDR3 for beta chain variable domain of TCR clone 381712 (TRBV19, TRBJ2-1)
CASSKAGPSSYNEQFF

SEQ ID NO: 763425 - protein, 16 aa, Homo sapiens
  CDR3 for alpha chain variable domain of TCR clone 381713 (TRAV20, TRAJ10)
CAVLRGLTGGGNKLTF

SEQ ID NO: 763426 - protein, 14 aa, Homo sapiens
  CDR3 for beta chain variable domain of TCR clone 381713 (TRBV19, TRBJ1-5)
CASRAPDSLLAQHF

SEQ ID NO: 763427 - protein, 16 aa, Homo sapiens
  CDR3 for alpha chain variable domain of TCR clone 381714 (TRAV26-2, TRAJ57)
CILRDVGSGGSEKLVF

SEQ ID NO: 763428 - protein, 13 aa, Homo sapiens
  CDR3 for beta chain variable domain of TCR clone 381714 (TRBV18, TRBJ2-3)
CASSPGVTDTQDF

SEQ ID NO: 763429 - protein, 16 aa, Homo sapiens
  CDR3 for alpha chain variable domain of TCR clone 381715 (TRAV26-1, TRAJ52)
CIVSNAGGTSYGKLTF

SEQ ID NO: 763430 - protein, 14 aa, Homo sapiens
  CDR3 for beta chain variable domain of TCR clone 381715 (TRBV7-3, TRBJ2-1)
CQQPDGGRGAEQFF

SEQ ID NO: 763431 - protein, 14 aa, Homo sapiens
  CDR3 for alpha chain variable domain of TCR clone 381716 (TRAV13-1, TRAJ40)
CAASMTSGTYKYIF

SEQ ID NO: 763432 - protein, 13 aa, Homo sapiens
  CDR3 for beta chain variable domain of TCR clone 381716 (TRBV4-1, TRBJ2-5)
CASSQEGQDTQYF

SEQ ID NO: 763433 - protein, 11 aa, Homo sapiens
  CDR3 for alpha chain variable domain of TCR clone 381717 (TRAV21, TRAJ34)
CAPLDTDKLIF

SEQ ID NO: 763434 - protein, 14 aa, Homo sapiens
  CDR3 for beta chain variable domain of TCR clone 381717 (TRBV5-1, TRBJ2-3)
CASSLGTVTDTQYF

SEQ ID NO: 763435 - protein, 12 aa, Homo sapiens
  CDR3 for alpha chain variable domain of TCR clone 381718 (TRAV16, TRAJ10)
CSRTGGGNKLTF

SEQ ID NO: 763436 - protein, 15 aa, Homo sapiens
  CDR3 for beta chain variable domain of TCR clone 381718 (TRBV18, TRBJ2-5)
CASSPDPGLQETQYF

SEQ ID NO: 763437 - protein, 11 aa, Homo sapiens
  CDR3 for alpha chain variable domain of TCR clone 381719 (TRAV3, TRAJ13)
CAVTSYRKVTF

SEQ ID NO: 763438 - protein, 15 aa, Homo sapiens
  CDR3 for beta chain variable domain of TCR clone 381719 (TRBV7-9, TRBJ2-7)
CASSSSGLAVYEQYF

SEQ ID NO: 763439 - protein, 13 aa, Homo sapiens
  CDR3 for alpha chain variable domain of TCR clone 381720 (TRAV36/DV7, TRAJ49)
CAVEANTGNQFYF

SEQ ID NO: 763440 - protein, 13 aa, Homo sapiens
  CDR3 for beta chain variable domain of TCR clone 381720 (TRBV10-3, TRBJ2-7)
CASKLAVNYEQYL

SEQ ID NO: 763441 - protein, 16 aa, Homo sapiens
  CDR3 for alpha chain variable domain of TCR clone 381721 (TRAV12-2, TRAJ40)
CAVIRGGTSGTYKYIL

SEQ ID NO: 763442 - protein, 13 aa, Homo sapiens
  CDR3 for beta chain variable domain of TCR clone 381721 (TRBV7-9, TRBJ1-2)
CASSLKQNYGYAF

SEQ ID NO: 763443 - protein, 14 aa, Homo sapiens
  CDR3 for alpha chain variable domain of TCR clone 381722 (TRAV12-2, TRAJ17)
CAVPFKAAGNKLTF

SEQ ID NO: 763444 - protein, 17 aa, Homo sapiens
  CDR3 for beta chain variable domain of TCR clone 381722 (TRBV20-1, TRBJ2-2)
CSASGSGQGGLIGELFF

SEQ ID NO: 763445 - protein, 21 aa, Homo sapiens
  CDR3 for alpha chain variable domain of TCR clone 381723 (TRAV12-1, TRAJ37)
CVVNGGLWQHRQTTLWARDNF

SEQ ID NO: 763446 - protein, 12 aa, Homo sapiens
  CDR3 for beta chain variable domain of TCR clone 381723 (TRBV20-1, TRBJ1-2)
CSAPGFNYGYSF

SEQ ID NO: 763447 - protein, 12 aa, Homo sapiens
  CDR3 for alpha chain variable domain of TCR clone 381724 (TRAV20, TRAJ34)
CAVKDNTDKLIF

SEQ ID NO: 763448 - protein, 11 aa, Homo sapiens
  CDR3 for beta chain variable domain of TCR clone 381724 (TRBV7-9, TRBJ2-7)
CASSLGWEQYF

SEQ ID NO: 763449 - protein, 17 aa, Homo sapiens
  CDR3 for alpha chain variable domain of TCR clone 381725 (TRAV23/DV6, TRAJ57)
CSASSTLSQGGSEKLVF

SEQ ID NO: 763450 - protein, 14 aa, Homo sapiens
  CDR3 for beta chain variable domain of TCR clone 381725 (TRBV25-1, TRBJ1-1)
CASTHLGGNTEALF

SEQ ID NO: 763451 - protein, 14 aa, Homo sapiens
  CDR3 for alpha chain variable domain of TCR clone 381726 (TRAV12-1, TRAJ29)
CLVNEGSGNTPLVF

SEQ ID NO: 763452 - protein, 13 aa, Homo sapiens
  CDR3 for beta chain variable domain of TCR clone 381726 (TRBV7-9, TRBJ2-3)
CASSPGSTDTQYF

SEQ ID NO: 763453 - protein, 12 aa, Homo sapiens
  CDR3 for alpha chain variable domain of TCR clone 381727 (TRAV3, TRAJ20)
CAVRDPDYKLSF

SEQ ID NO: 763454 - protein, 17 aa, Homo sapiens
  CDR3 for beta chain variable domain of TCR clone 381727 (TRBV11-2, TRBJ2-1)
CASSLHPPGVEYNEQSF

SEQ ID NO: 763455 - protein, 12 aa, Homo sapiens
  CDR3 for alpha chain variable domain of TCR clone 381728 (TRAV12-1, TRAJ20)
CVVNPDDYKLSF

SEQ ID NO: 763456 - protein, 13 aa, Homo sapiens
  CDR3 for beta chain variable domain of TCR clone 381728 (TRBV10-2, TRBJ2-7)
CASGASGGYEQYF

SEQ ID NO: 763457 - protein, 13 aa, Homo sapiens
  CDR3 for alpha chain variable domain of TCR clone 381729 (TRAV2, TRAJ40)
CAVVPSGTYKYIF

SEQ ID NO: 763458 - protein, 14 aa, Homo sapiens
  CDR3 for beta chain variable domain of TCR clone 381729 (TRBV19, TRBJ2-1)
CASPTFVLSGEQIF

SEQ ID NO: 763459 - protein, 16 aa, Homo sapiens
  CDR3 for alpha chain variable domain of TCR clone 381730 (TRAV8-3, TRAJ13)
CVVGAYPSGGYQKVTF

SEQ ID NO: 763460 - protein, 13 aa, Homo sapiens
  CDR3 for beta chain variable domain of TCR clone 381730 (TRBV7-9, TRBJ1-2)
CASSLKQNYGYTF

SEQ ID NO: 763461 - protein, 16 aa, Homo sapiens
  CDR3 for alpha chain variable domain of TCR clone 381731 (TRAV27, TRAJ13)
CAGAKSDSGGYQKVTF

SEQ ID NO: 763462 - protein, 15 aa, Homo sapiens
  CDR3 for beta chain variable domain of TCR clone 381731 (TRBV29-1, TRBJ2-1)
CSVGRHALFYNEKLF

SEQ ID NO: 763463 - protein, 15 aa, Homo sapiens
  CDR3 for alpha chain variable domain of TCR clone 381732 (TRAV2, TRAJ15)
CAVEDRNQAGTALIC

SEQ ID NO: 763464 - protein, 13 aa, Homo sapiens
  CDR3 for beta chain variable domain of TCR clone 381732 (TRBV10-2, TRBJ2-1)
CASGASGDAKQFF

SEQ ID NO: 763465 - protein, 18 aa, Homo sapiens
  CDR3 for alpha chain variable domain of TCR clone 381733 (TRAV13-1, TRAJ52)
CAAKNPNAGGTSYGRLTF

SEQ ID NO: 763466 - protein, 15 aa, Homo sapiens
  CDR3 for beta chain variable domain of TCR clone 381733 (TRBV28, TRBJ2-3)
SASSPDRQGANTQYF

SEQ ID NO: 763467 - protein, 14 aa, Homo sapiens
  CDR3 for alpha chain variable domain of TCR clone 381734 (TRAV12-2, TRAJ17)
CAVLFKAAGNKLTF

SEQ ID NO: 763468 - protein, 14 aa, Homo sapiens
  CDR3 for beta chain variable domain of TCR clone 381734 (TRBV12-5, TRBJ2-5)
CGSGSRTHQETQYF

SEQ ID NO: 763469 - protein, 14 aa, Homo sapiens
  CDR3 for alpha chain variable domain of TCR clone 381735 (TRAV2, TRAJ20)
CAVEDGTNDYKLSF

SEQ ID NO: 763470 - protein, 13 aa, Homo sapiens
  CDR3 for beta chain variable domain of TCR clone 381735 (TRBV7-2, TRBJ1-1)
CASSSNTNTEAFF

SEQ ID NO: 763471 - protein, 13 aa, Homo sapiens
  CDR3 for alpha chain variable domain of TCR clone 381736 (TRAV2, TRAJ15)
CAVAPQAGTALIF

SEQ ID NO: 763472 - protein, 16 aa, Homo sapiens
  CDR3 for beta chain variable domain of TCR clone 381736 (TRBV7-3, TRBJ2-2)
CASSLKRGTLSGELFF

SEQ ID NO: 763473 - protein, 14 aa, Homo sapiens
  CDR3 for alpha chain variable domain of TCR clone 381737 (TRAV13-1, TRAJ44)
CAAKATGTASKLTF

SEQ ID NO: 763474 - protein, 12 aa, Homo sapiens
  CDR3 for beta chain variable domain of TCR clone 381737 (TRBV3-1, TRBJ2-1)
CASSKGSSGQFF

SEQ ID NO: 763475 - protein, 13 aa, Homo sapiens
  CDR3 for alpha chain variable domain of TCR clone 381738 (TRAV12-3, TRAJ7)
CAMTPYGNNRLAF

SEQ ID NO: 763476 - protein, 15 aa, Homo sapiens
  CDR3 for beta chain variable domain of TCR clone 381738 (TRBV11-2, TRBJ2-1)
CASSLGPDSYNEQFF

SEQ ID NO: 763477 - protein, 12 aa, Homo sapiens
  CDR3 for alpha chain variable domain of TCR clone 381739 (TRAV29/DV5, TRAJ26)
CAAIPSGQNFVF

SEQ ID NO: 763478 - protein, 15 aa, Homo sapiens
  CDR3 for beta chain variable domain of TCR clone 381739 (TRBV19, TRBJ1-5)
CASSDSGHRNQPQHF

SEQ ID NO: 763479 - protein, 13 aa, Homo sapiens
  CDR3 for alpha chain variable domain of TCR clone 381740 (TRAV13-1, TRAJ37)
CSYATSNTGKLIF

SEQ ID NO: 763480 - protein, 18 aa, Homo sapiens
  CDR3 for beta chain variable domain of TCR clone 381740 (TRBV5-1, TRBJ1-6)
CASRKFTPPLWERDQAHC

SEQ ID NO: 763481 - protein, 11 aa, Homo sapiens
  CDR3 for alpha chain variable domain of TCR clone 381741 (TRAV13-1, TRAJ43)
CAASMRNDMRF

SEQ ID NO: 763482 - protein, 15 aa, Homo sapiens
  CDR3 for beta chain variable domain of TCR clone 381741 (TRBV11-2, TRBJ2-2)
CASSSDRVNAGELFF

SEQ ID NO: 763483 - protein, 13 aa, Homo sapiens
  CDR3 for alpha chain variable domain of TCR clone 381742 (TRAV36/DV7, TRAJ37)
CAVFSSNTGKLIF

SEQ ID NO: 763484 - protein, 14 aa, Homo sapiens
  CDR3 for beta chain variable domain of TCR clone 381742 (TRBV7-2, TRBJ2-3)
CASSLEGRTDTQYF

SEQ ID NO: 763485 - protein, 11 aa, Homo sapiens
  CDR3 for alpha chain variable domain of TCR clone 381743 (TRAV35, TRAJ34)
CWERNTDKLIF

SEQ ID NO: 763486 - protein, 13 aa, Homo sapiens
  CDR3 for beta chain variable domain of TCR clone 381743 (TRBV19, TRBJ2-7)
CASSIDRTYEQYF

SEQ ID NO: 763487 - protein, 14 aa, Homo sapiens
  CDR3 for alpha chain variable domain of TCR clone 381744 (TRAV20, TRAJ42)
CAVQAGGSQGNLIF

SEQ ID NO: 763488 - protein, 14 aa, Homo sapiens
  CDR3 for beta chain variable domain of TCR clone 381744 (TRBV28, TRBJ1-2)
CASRIQGANYGFTF

SEQ ID NO: 763489 - protein, 11 aa, Homo sapiens
  CDR3 for alpha chain variable domain of TCR clone 381745 (TRAV12-2, TRAJ29)
CAVTLRSPLVS

SEQ ID NO: 763490 - protein, 16 aa, Homo sapiens
  CDR3 for beta chain variable domain of TCR clone 381745 (TRBV19, TRBJ1-5)
CASSIDRGGPRQPQHF

SEQ ID NO: 763491 - protein, 14 aa, Homo sapiens
  CDR3 for alpha chain variable domain of TCR clone 381746 (TRAV21, TRAJ21)
CAVKGFGNFNKFYF

SEQ ID NO: 763492 - protein, 13 aa, Homo sapiens
  CDR3 for beta chain variable domain of TCR clone 381746 (TRBV10-2, TRBJ2-7)
CASGASGGYEQYF

SEQ ID NO: 763493 - protein, 13 aa, Homo sapiens
  CDR3 for alpha chain variable domain of TCR clone 381747 (TRAV21, TRAJ27)
CATRPGNAGKSTF

SEQ ID NO: 763494 - protein, 15 aa, Homo sapiens
  CDR3 for beta chain variable domain of TCR clone 381747 (TRBV11-3, TRBJ2-3)
CASLKDGREGDTQYF

SEQ ID NO: 763495 - protein, 16 aa, Homo sapiens
  CDR3 for alpha chain variable domain of TCR clone 381748 (TRAV12-3, TRAJ53)
CAMSPGSGGSNYKLTF

SEQ ID NO: 763496 - protein, 11 aa, Homo sapiens
  CDR3 for beta chain variable domain of TCR clone 381748 (TRBV29-1, TRBJ2-5)
RSEDQTGTQYF

SEQ ID NO: 763497 - protein, 14 aa, Homo sapiens
  CDR3 for alpha chain variable domain of TCR clone 381749 (TRAV35, TRAJ50)
CAGHRKTSYDKVIF

SEQ ID NO: 763498 - protein, 13 aa, Homo sapiens
  CDR3 for beta chain variable domain of TCR clone 381749 (TRBV7-7, TRBJ2-3)
CTSSLSRADTQYF

SEQ ID NO: 763499 - protein, 16 aa, Homo sapiens
  CDR3 for alpha chain variable domain of TCR clone 381750 (TRAV30, TRAJ24)
CGTEIVDADRWGKFQF

SEQ ID NO: 763500 - protein, 15 aa, Homo sapiens
  CDR3 for beta chain variable domain of TCR clone 381750 (TRBV5-1, TRBJ1-1)
CASSLAPRGNTEAFF

SEQ ID NO: 763501 - protein, 12 aa, Homo sapiens
  CDR3 for alpha chain variable domain of TCR clone 381751 (TRAV8-3, TRAJ26)
CAGDNYRQNFVF

SEQ ID NO: 763502 - protein, 11 aa, Homo sapiens
  CDR3 for beta chain variable domain of TCR clone 381751 (TRBV19, TRBJ1-1)
CASSIGSEAFF

SEQ ID NO: 763503 - protein, 14 aa, Homo sapiens
  CDR3 for alpha chain variable domain of TCR clone 381752 (TRAV1-2, TRAJ8)
CAVREDTGFQKLVF

SEQ ID NO: 763504 - protein, 16 aa, Homo sapiens
  CDR3 for beta chain variable domain of TCR clone 381752 (TRBV4-1, TRBJ2-3)
CASSQTTSGAEDTQYF

SEQ ID NO: 763505 - protein, 14 aa, Homo sapiens
  CDR3 for alpha chain variable domain of TCR clone 381753 (TRAV12-2, TRAJ24)
CAVTPADSWGKLQF

SEQ ID NO: 763506 - protein, 15 aa, Homo sapiens
  CDR3 for beta chain variable domain of TCR clone 381753 (TRBV11-2, TRBJ2-7)
CASSLSQGGSYEQYF

SEQ ID NO: 763507 - protein, 22 aa, Homo sapiens
  CDR3 for alpha chain variable domain of TCR clone 381754 (TRAV4, )
CLVGPHNYGIQNPDPAVYQLSD

SEQ ID NO: 763508 - protein, 17 aa, Homo sapiens
  CDR3 for beta chain variable domain of TCR clone 381754 (TRBV24-1, TRBJ2-1)
CATSDVSTSGTYNEQFF

SEQ ID NO: 763509 - protein, 12 aa, Homo sapiens
  CDR3 for alpha chain variable domain of TCR clone 381755 (TRAV21, TRAJ47)
CAAMEYGNKLVF

SEQ ID NO: 763510 - protein, 14 aa, Homo sapiens
  CDR3 for beta chain variable domain of TCR clone 381755 (TRBV7-8, TRBJ2-7)
CASSPRDRVYEQYF

SEQ ID NO: 763511 - protein, 13 aa, Homo sapiens
  CDR3 for alpha chain variable domain of TCR clone 381756 (TRAV30, TRAJ24)
CGTVNDSWGKLQF

SEQ ID NO: 763512 - protein, 15 aa, Homo sapiens
  CDR3 for beta chain variable domain of TCR clone 381756 (TRBV25-1, TRBJ1-4)
CASSPGDSTNEELFF

SEQ ID NO: 763513 - protein, 18 aa, Homo sapiens
  CDR3 for alpha chain variable domain of TCR clone 381757 (TRAV13-1, TRAJ52)
CAAKNPNAVGTSYGKLTF

SEQ ID NO: 763514 - protein, 14 aa, Homo sapiens
  CDR3 for beta chain variable domain of TCR clone 381757 (TRBV6-5, TRBJ1-1)
CASSFGQGLTEAFF

SEQ ID NO: 763515 - protein, 15 aa, Homo sapiens
  CDR3 for alpha chain variable domain of TCR clone 381758 (TRAV21, TRAJ53)
CATLNSGGSNYKLTF

SEQ ID NO: 763516 - protein, 15 aa, Homo sapiens
  CDR3 for beta chain variable domain of TCR clone 381758 (TRBV18, TRBJ2-1)
CASSPPRAAYNEQFF

SEQ ID NO: 763517 - protein, 15 aa, Homo sapiens
  CDR3 for alpha chain variable domain of TCR clone 381759 (TRAV8-3, TRAJ45)
CASSYSGGGADGLTF

SEQ ID NO: 763518 - protein, 17 aa, Homo sapiens
  CDR3 for beta chain variable domain of TCR clone 381759 (TRBV7-8, TRBJ1-2)
CASSLRALQGHLDGYTF

SEQ ID NO: 763519 - protein, 15 aa, Homo sapiens
  CDR3 for alpha chain variable domain of TCR clone 381760 (TRAV23/DV6, TRAJ44)
CAASGGTGTASKLTF

SEQ ID NO: 763520 - protein, 16 aa, Homo sapiens
  CDR3 for beta chain variable domain of TCR clone 381760 (TRBV20-1, TRBJ2-3)
CSTLAFDTGDPDTQYF

SEQ ID NO: 763521 - protein, 15 aa, Homo sapiens
  CDR3 for alpha chain variable domain of TCR clone 381761 (TRAV17, TRAJ4)
CATGTWSGGYNKLIF

SEQ ID NO: 763522 - protein, 13 aa, Homo sapiens
  CDR3 for beta chain variable domain of TCR clone 381761 (TRBV2, TRBJ1-1)
CASRWTVNTEAFF

SEQ ID NO: 763523 - protein, 10 aa, Homo sapiens
  CDR3 for alpha chain variable domain of TCR clone 381762 (TRAV12-1, TRAJ37)
ARGNTGKLIF

SEQ ID NO: 763524 - protein, 16 aa, Homo sapiens
  CDR3 for beta chain variable domain of TCR clone 381762 (TRBV11-2, TRBJ2-3)
CASSFQGRGALDTQYF

SEQ ID NO: 763525 - protein, 17 aa, Homo sapiens
  CDR3 for alpha chain variable domain of TCR clone 381763 (TRAV3, TRAJ6)
CAVRDGPRAGGGYIPTF

SEQ ID NO: 763526 - protein, 12 aa, Homo sapiens
  CDR3 for beta chain variable domain of TCR clone 381763 (TRBV6-5, TRBJ2-2)
CASRTGTGELFF

SEQ ID NO: 763527 - protein, 13 aa, Homo sapiens
  CDR3 for alpha chain variable domain of TCR clone 381764 (TRAV27, TRAJ40)
CAGGLASTYKYIF

SEQ ID NO: 763528 - protein, 16 aa, Homo sapiens
  CDR3 for beta chain variable domain of TCR clone 381764 (TRBV11-3, TRBJ2-3)
CASSSISGAGTDTQYF

SEQ ID NO: 763529 - protein, 14 aa, Homo sapiens
  CDR3 for alpha chain variable domain of TCR clone 381765 (TRAV9-2, TRAJ39)
CALYIYNAGNMLIF

SEQ ID NO: 763530 - protein, 13 aa, Homo sapiens
  CDR3 for beta chain variable domain of TCR clone 381765 (TRBV7-2, TRBJ2-2)
CASSLAVTGELFF

SEQ ID NO: 763531 - protein, 14 aa, Homo sapiens
  CDR3 for alpha chain variable domain of TCR clone 381766 (TRAV12-2, TRAJ5)
CAVKRDTGRRALTF

SEQ ID NO: 763532 - protein, 15 aa, Homo sapiens
  CDR3 for beta chain variable domain of TCR clone 381766 (TRBV15, TRBJ1-5)
CATSRDPVSNQPQHF

SEQ ID NO: 763533 - protein, 14 aa, Homo sapiens
  CDR3 for alpha chain variable domain of TCR clone 381767 (TRAV8-4, TRAJ17)
CAVSDQAAANKLTF

SEQ ID NO: 763534 - protein, 15 aa, Homo sapiens
  CDR3 for beta chain variable domain of TCR clone 381767 (TRBV7-2, TRBJ1-2)
CASSLAPDRGLGYTF

SEQ ID NO: 763535 - protein, 23 aa, Homo sapiens
  CDR3 for alpha chain variable domain of TCR clone 381768 (TRAV12-2, TRAJ36)
SLLIRDSQPSDSATLERANNLFF

SEQ ID NO: 763536 - protein, 14 aa, Homo sapiens
  CDR3 for beta chain variable domain of TCR clone 381768 (TRBV12-5, TRBJ2-5)
CASGSRTHQETQYF

SEQ ID NO: 763537 - protein, 11 aa, Homo sapiens
  CDR3 for alpha chain variable domain of TCR clone 381769 (TRAV12-3, TRAJ40)
CNELGTYKYIF

SEQ ID NO: 763538 - protein, 20 aa, Homo sapiens
  CDR3 for beta chain variable domain of TCR clone 381769 (TRBV7-8, TRBJ2-2)
CASSHLFPGPTIHITGELFF

SEQ ID NO: 763539 - protein, 15 aa, Homo sapiens
  CDR3 for alpha chain variable domain of TCR clone 381770 (TRAV26-1, TRAJ56)
CIVTVATGANSKLTF

SEQ ID NO: 763540 - protein, 15 aa, Homo sapiens
  CDR3 for beta chain variable domain of TCR clone 381770 (TRBV27, TRBJ2-7)
CASSPQREGQREQYF

SEQ ID NO: 763541 - protein, 15 aa, Homo sapiens
  CDR3 for alpha chain variable domain of TCR clone 381771 (TRAV3, TRAJ17)
CAVSPKEAAGNKLTF

SEQ ID NO: 763542 - protein, 13 aa, Homo sapiens
  CDR3 for beta chain variable domain of TCR clone 381771 (TRBV4-2, TRBJ2-3)
CASSLTSTDTQYF

SEQ ID NO: 763543 - protein, 17 aa, Homo sapiens
  CDR3 for alpha chain variable domain of TCR clone 381772 (TRAV3, TRAJ42)
CAVRDRDYGGSQGNLIF

SEQ ID NO: 763544 - protein, 16 aa, Homo sapiens
  CDR3 for beta chain variable domain of TCR clone 381772 (TRBV28, TRBJ2-1)
CASSSPEYPRDNEQFF

SEQ ID NO: 763545 - protein, 13 aa, Homo sapiens
  CDR3 for alpha chain variable domain of TCR clone 381773 (TRAV38-1, TRAJ42)
CARWGGSQGNLIF

SEQ ID NO: 763546 - protein, 15 aa, Homo sapiens
  CDR3 for beta chain variable domain of TCR clone 381773 (TRBV29-1, TRBJ2-7)
CSVEFFDRGSYEQYF

SEQ ID NO: 763547 - protein, 15 aa, Homo sapiens
  CDR3 for alpha chain variable domain of TCR clone 381774 (TRAV13-2, TRAJ10)
CAENRDTGGGNKLTF

SEQ ID NO: 763548 - protein, 16 aa, Homo sapiens
  CDR3 for beta chain variable domain of TCR clone 381774 (TRBV27, TRBJ2-2)
CASSFRGLVRTGELFF

SEQ ID NO: 763549 - protein, 14 aa, Homo sapiens
  CDR3 for alpha chain variable domain of TCR clone 381775 (TRAV12-1, TRAJ3)
CVVILYSSASKIIF

SEQ ID NO: 763550 - protein, 17 aa, Homo sapiens
  CDR3 for beta chain variable domain of TCR clone 381775 (TRBV7-8, TRBJ2-6)
CASSAGTGGAGANVLTF

SEQ ID NO: 763551 - protein, 18 aa, Homo sapiens
  CDR3 for alpha chain variable domain of TCR clone 381776 (TRAV12-3, TRAJ52)
CAMSRTNAGGTSYGKMTC

SEQ ID NO: 763552 - protein, 17 aa, Homo sapiens
  CDR3 for beta chain variable domain of TCR clone 381776 (TRBV7-3, TRBJ2-3)
CASSLMKRMRGADTQYF

SEQ ID NO: 763553 - protein, 12 aa, Homo sapiens
  CDR3 for alpha chain variable domain of TCR clone 381777 (TRAV14/DV4, TRAJ9)
CAMNPGSFKTIF

SEQ ID NO: 763554 - protein, 16 aa, Homo sapiens
  CDR3 for beta chain variable domain of TCR clone 381777 (TRBV28, TRBJ2-5)
CASSFSPAGGWETQYF

SEQ ID NO: 763555 - protein, 16 aa, Homo sapiens
  CDR3 for alpha chain variable domain of TCR clone 381778 (TRAV3, TRAJ21)
CAVRDIERGNFNKFYF

SEQ ID NO: 763556 - protein, 20 aa, Homo sapiens
  CDR3 for beta chain variable domain of TCR clone 381778 (TRBV4-1, TRBJ2-2)
CASSQASPPGLASNTGEPFF

SEQ ID NO: 763557 - protein, 16 aa, Homo sapiens
  CDR3 for alpha chain variable domain of TCR clone 381779 (TRAV3, TRAJ37)
CAVRGKGSCNTGKLIF

SEQ ID NO: 763558 - protein, 16 aa, Homo sapiens
  CDR3 for beta chain variable domain of TCR clone 381779 (TRBV12-5, TRBJ2-5)
CASGPRTSGSQETQYF

SEQ ID NO: 763559 - protein, 17 aa, Homo sapiens
  CDR3 for alpha chain variable domain of TCR clone 381780 (TRAV26-1, TRAJ37)
CIVRVITVSSNTGKLIF

SEQ ID NO: 763560 - protein, 11 aa, Homo sapiens
  CDR3 for beta chain variable domain of TCR clone 381780 (TRBV29-1, TRBJ2-5)
CSEDRTGTQYC

SEQ ID NO: 763561 - protein, 17 aa, Homo sapiens
  CDR3 for alpha chain variable domain of TCR clone 381781 (TRAV8-6, TRAJ58)
CAVSSWVGETSGLRLTF

SEQ ID NO: 763562 - protein, 15 aa, Homo sapiens
  CDR3 for beta chain variable domain of TCR clone 381781 (TRBV6-5, TRBJ2-1)
CASSYDAGAGNEQFF

SEQ ID NO: 763563 - protein, 13 aa, Homo sapiens
  CDR3 for alpha chain variable domain of TCR clone 381782 (TRAV21, TRAJ27)
CSARPGNAGKSTF

SEQ ID NO: 763564 - protein, 20 aa, Homo sapiens
  CDR3 for beta chain variable domain of TCR clone 381782 (TRBV7-8, TRBJ2-2)
CASSHLFPGPTIHITGELFF

SEQ ID NO: 763565 - protein, 11 aa, Homo sapiens
  CDR3 for alpha chain variable domain of TCR clone 381783 (TRAV2, TRAJ33)
CAVDSNYQLIW

SEQ ID NO: 763566 - protein, 13 aa, Homo sapiens
  CDR3 for beta chain variable domain of TCR clone 381783 (TRBV10-2, TRBJ2-7)
CASSAESPYEQYF

SEQ ID NO: 763567 - protein, 13 aa, Homo sapiens
  CDR3 for alpha chain variable domain of TCR clone 381784 (TRAV13-1, TRAJ5)
CAASDTGRRALTF

SEQ ID NO: 763568 - protein, 15 aa, Homo sapiens
  CDR3 for beta chain variable domain of TCR clone 381784 (TRBV7-3, TRBJ2-1)
CQQLQTSGRYNEQFF

SEQ ID NO: 763569 - protein, 15 aa, Homo sapiens
  CDR3 for alpha chain variable domain of TCR clone 381785 (TRAV8-4, TRAJ37)
CAVSTRSGNTGKLFF

SEQ ID NO: 763570 - protein, 20 aa, Homo sapiens
  CDR3 for beta chain variable domain of TCR clone 381785 (TRBV7-8, TRBJ2-2)
CASSHLFPGPTIHITGELFF

SEQ ID NO: 763571 - protein, 13 aa, Homo sapiens
  CDR3 for alpha chain variable domain of TCR clone 381786 (TRAV21, TRAJ20)
CAVGVFADYKLSF

SEQ ID NO: 763572 - protein, 15 aa, Homo sapiens
  CDR3 for beta chain variable domain of TCR clone 381786 (TRBV20-1, TRBJ2-5)
CSAPPRTGFGETQYF

SEQ ID NO: 763573 - protein, 14 aa, Homo sapiens
  CDR3 for alpha chain variable domain of TCR clone 381787 (TRAV8-6, TRAJ49)
CAVSDPGTGNQFYF

SEQ ID NO: 763574 - protein, 13 aa, Homo sapiens
  CDR3 for beta chain variable domain of TCR clone 381787 (TRBV7-9, TRBJ1-2)
CASSLKQNYGCTF

SEQ ID NO: 763575 - protein, 18 aa, Homo sapiens
  CDR3 for alpha chain variable domain of TCR clone 381788 (TRAV13-1, TRAJ52)
CAASKRSAGGTSYGKLTF

SEQ ID NO: 763576 - protein, 11 aa, Homo sapiens
  CDR3 for beta chain variable domain of TCR clone 381788 (TRBV19, TRBJ1-1)
CASSIGSEAFF

SEQ ID NO: 763577 - protein, 16 aa, Homo sapiens
  CDR3 for alpha chain variable domain of TCR clone 381789 (TRAV23/DV6, TRAJ21)
CAASSGGGTTSTNFTL

SEQ ID NO: 763578 - protein, 13 aa, Homo sapiens
  CDR3 for beta chain variable domain of TCR clone 381789 (TRBV7-3, TRBJ1-1)
CASSQDWGAEAFF

SEQ ID NO: 763579 - protein, 13 aa, Homo sapiens
  CDR3 for alpha chain variable domain of TCR clone 381790 (TRAV22, TRAJ44)
CAGSTGTASKLTF

SEQ ID NO: 763580 - protein, 14 aa, Homo sapiens
  CDR3 for beta chain variable domain of TCR clone 381790 (TRBV7-9, TRBJ2-2)
CASSLVQDTGELFF

SEQ ID NO: 763581 - protein, 14 aa, Homo sapiens
  CDR3 for alpha chain variable domain of TCR clone 381791 (TRAV12-3, TRAJ12)
CAMSEVDSSYKLIF

SEQ ID NO: 763582 - protein, 12 aa, Homo sapiens
  CDR3 for beta chain variable domain of TCR clone 381791 (TRBV18, TRBJ1-4)
CASSPSREKLFF

SEQ ID NO: 763583 - protein, 14 aa, Homo sapiens
  CDR3 for alpha chain variable domain of TCR clone 381792 (TRAV1-2, TRAJ16)
CAVNRFSDGQKLLF

SEQ ID NO: 763584 - protein, 12 aa, Homo sapiens
  CDR3 for beta chain variable domain of TCR clone 381792 (TRBV7-6, TRBJ2-7)
FASSLADSEQYF

SEQ ID NO: 763585 - protein, 14 aa, Homo sapiens
  CDR3 for alpha chain variable domain of TCR clone 381793 (TRAV9-2, TRAJ57)
CALSPNSGSEKLVF

SEQ ID NO: 763586 - protein, 15 aa, Homo sapiens
  CDR3 for beta chain variable domain of TCR clone 381793 (TRBV28, TRBJ2-5)
CASSSGRTIQETQYF

SEQ ID NO: 763587 - protein, 13 aa, Homo sapiens
  CDR3 for alpha chain variable domain of TCR clone 381794 (TRAV27, TRAJ45)
CRSSGGGADGLTF

SEQ ID NO: 763588 - protein, 16 aa, Homo sapiens
  CDR3 for beta chain variable domain of TCR clone 381794 (TRBV7-6, TRBJ1-6)
CASSLSSRIGDSPLHF

SEQ ID NO: 763589 - protein, 14 aa, Homo sapiens
  CDR3 for alpha chain variable domain of TCR clone 381795 (TRAV17, TRAJ12)
FAILPMDSSYKLIF

SEQ ID NO: 763590 - protein, 15 aa, Homo sapiens
  CDR3 for beta chain variable domain of TCR clone 381795 (TRBV19, TRBJ1-2)
CASSVGQVLNYGYTF

SEQ ID NO: 763591 - protein, 13 aa, Homo sapiens
  CDR3 for alpha chain variable domain of TCR clone 381796 (TRAV3, TRAJ15)
CAGRDQAGTALLF

SEQ ID NO: 763592 - protein, 15 aa, Homo sapiens
  CDR3 for beta chain variable domain of TCR clone 381796 (TRBV11-1, TRBJ2-7)
CASSLNYGASYEQYF

SEQ ID NO: 763593 - protein, 14 aa, Homo sapiens
  CDR3 for alpha chain variable domain of TCR clone 381797 (TRAV38-1, TRAJ45)
CAYYSGGGADGLTF

SEQ ID NO: 763594 - protein, 14 aa, Homo sapiens
  CDR3 for beta chain variable domain of TCR clone 381797 (TRBV7-9, TRBJ2-1)
CASSPRDSLYEQFF

SEQ ID NO: 763595 - protein, 13 aa, Homo sapiens
  CDR3 for alpha chain variable domain of TCR clone 381798 (TRAV26-2, TRAJ54)
CIPRVGGARKLVF

SEQ ID NO: 763596 - protein, 16 aa, Homo sapiens
  CDR3 for beta chain variable domain of TCR clone 381798 (TRBV4-1, TRBJ1-1)
CASSSMSERPNTEAFF

SEQ ID NO: 763597 - protein, 13 aa, Homo sapiens
  CDR3 for alpha chain variable domain of TCR clone 381799 (TRAV12-2, TRAJ20)
CAVYPSNDYKLSF

SEQ ID NO: 763598 - protein, 13 aa, Homo sapiens
  CDR3 for beta chain variable domain of TCR clone 381799 (TRBV19, TRBJ1-1)
CASSFGRNTEAFF

SEQ ID NO: 763599 - protein, 12 aa, Homo sapiens
  CDR3 for alpha chain variable domain of TCR clone 381800 (TRAV12-3, TRAJ17)
CAMTLTGNKLTF

SEQ ID NO: 763600 - protein, 17 aa, Homo sapiens
  CDR3 for beta chain variable domain of TCR clone 381800 (TRBV20-1, TRBJ2-7)
CSAEIGSLGWTSSTSGR

SEQ ID NO: 763601 - protein, 13 aa, Homo sapiens
  CDR3 for alpha chain variable domain of TCR clone 381801 (TRAV13-1, TRAJ33)
CAASRAGNYQIIW

SEQ ID NO: 763602 - protein, 15 aa, Homo sapiens
  CDR3 for beta chain variable domain of TCR clone 381801 (TRBV2, TRBJ2-7)
EDSAMYFCASSEQYF

SEQ ID NO: 763603 - protein, 16 aa, Homo sapiens
  CDR3 for alpha chain variable domain of TCR clone 381802 (TRAV30, TRAJ24)
CGTEIVDADIWGKFQF

SEQ ID NO: 763604 - protein, 13 aa, Homo sapiens
  CDR3 for beta chain variable domain of TCR clone 381802 (TRBV7-3, TRBJ1-1)
CASSQDWGAEAFF

SEQ ID NO: 763605 - protein, 14 aa, Homo sapiens
  CDR3 for alpha chain variable domain of TCR clone 381803 (TRAV17, TRAJ57)
CATDPQGGSEKLVF

SEQ ID NO: 763606 - protein, 13 aa, Homo sapiens
  CDR3 for beta chain variable domain of TCR clone 381803 (TRBV19, TRBJ1-1)
CASTRRGDTEAFF

SEQ ID NO: 763607 - protein, 13 aa, Homo sapiens
  CDR3 for alpha chain variable domain of TCR clone 381804 (TRAV8-3, TRAJ43)
CAVGPDNNNDIRF

SEQ ID NO: 763608 - protein, 12 aa, Homo sapiens
  CDR3 for beta chain variable domain of TCR clone 381804 (TRBV7-2, TRBJ1-6)
CASSLTSSPLHF

SEQ ID NO: 763609 - protein, 12 aa, Homo sapiens
  CDR3 for alpha chain variable domain of TCR clone 381805 (TRAV23/DV6, TRAJ30)
CAASKGDEQIIF

SEQ ID NO: 763610 - protein, 18 aa, Homo sapiens
  CDR3 for beta chain variable domain of TCR clone 381805 (TRBV10-3, TRBJ2-3)
CAISESRVGPMRGDTQYF

SEQ ID NO: 763611 - protein, 13 aa, Homo sapiens
  CDR3 for alpha chain variable domain of TCR clone 381806 (TRAV26-2, TRAJ57)
CILSRGGSEKLVF

SEQ ID NO: 763612 - protein, 13 aa, Homo sapiens
  CDR3 for beta chain variable domain of TCR clone 381806 (TRBV7-9, TRBJ2-5)
CASLSPGQETQYF

SEQ ID NO: 763613 - protein, 14 aa, Homo sapiens
  CDR3 for alpha chain variable domain of TCR clone 381807 (TRAV14/DV4, TRAJ49)
CAFNRYLTGNQFYF

SEQ ID NO: 763614 - protein, 18 aa, Homo sapiens
  CDR3 for beta chain variable domain of TCR clone 381807 (TRBV11-2, TRBJ2-3)
CASSLGGASRGAPNTQYF

SEQ ID NO: 763615 - protein, 14 aa, Homo sapiens
  CDR3 for alpha chain variable domain of TCR clone 381808 (TRAV10, TRAJ32)
CGEPRGGATTKLIF

SEQ ID NO: 763616 - protein, 14 aa, Homo sapiens
  CDR3 for beta chain variable domain of TCR clone 381808 (TRBV5-4, TRBJ2-2)
CASRLDGGTGELFF

SEQ ID NO: 763617 - protein, 13 aa, Homo sapiens
  CDR3 for alpha chain variable domain of TCR clone 381809 (TRAV21, TRAJ15)
CAVANQAGTALIF

SEQ ID NO: 763618 - protein, 13 aa, Homo sapiens
  CDR3 for beta chain variable domain of TCR clone 381809 (TRBV9, TRBJ2-1)
CASSPSGGNEQFF

SEQ ID NO: 763619 - protein, 14 aa, Homo sapiens
  CDR3 for alpha chain variable domain of TCR clone 381810 (TRAV26-1, TRAJ38)
CIADNAGNNRKLIW

SEQ ID NO: 763620 - protein, 13 aa, Homo sapiens
  CDR3 for beta chain variable domain of TCR clone 381810 (TRBV15, TRBJ2-5)
CATSQIGEETQYF

SEQ ID NO: 763621 - protein, 12 aa, Homo sapiens
  CDR3 for alpha chain variable domain of TCR clone 381811 (TRAV13-1, TRAJ20)
CAASMGDDKLSF

SEQ ID NO: 763622 - protein, 14 aa, Homo sapiens
  CDR3 for beta chain variable domain of TCR clone 381811 (TRBV20-1, TRBJ2-5)
CSASDSGSGETQYF

SEQ ID NO: 763623 - protein, 12 aa, Homo sapiens
  CDR3 for alpha chain variable domain of TCR clone 381812 (TRAV1-1, TRAJ33)
CAAPDSNYQLIW

SEQ ID NO: 763624 - protein, 18 aa, Homo sapiens
  CDR3 for beta chain variable domain of TCR clone 381812 (TRBV20-1, TRBJ2-2)
CSARVQTARPSGTGELFF

SEQ ID NO: 763625 - protein, 15 aa, Homo sapiens
  CDR3 for alpha chain variable domain of TCR clone 381813 (TRAV12-1, TRAJ9)
CVVSFGDTGGFKTIF

SEQ ID NO: 763626 - protein, 15 aa, Homo sapiens
  CDR3 for beta chain variable domain of TCR clone 381813 (TRBV19, TRBJ2-1)
CASSRPGQNYNEQFF

SEQ ID NO: 763627 - protein, 17 aa, Homo sapiens
  CDR3 for alpha chain variable domain of TCR clone 381814 (TRAV3, TRAJ6)
CAVRDGPRAGGSYIPTF

SEQ ID NO: 763628 - protein, 15 aa, Homo sapiens
  CDR3 for beta chain variable domain of TCR clone 381814 (TRBV10-3, TRBJ2-1)
CAISGGREGSDEQFF

SEQ ID NO: 763629 - protein, 18 aa, Homo sapiens
  CDR3 for alpha chain variable domain of TCR clone 381815 (TRAV1-1, TRAJ42)
CAVSPSAFYGGSQGNLIF

SEQ ID NO: 763630 - protein, 13 aa, Homo sapiens
  CDR3 for beta chain variable domain of TCR clone 381815 (TRBV10-3, TRBJ2-7)
CASKLAVNYEQYF

SEQ ID NO: 763631 - protein, 16 aa, Homo sapiens
  CDR3 for alpha chain variable domain of TCR clone 381816 (TRAV12-2, TRAJ32)
CAVNLGQGGATNKLIF

SEQ ID NO: 763632 - protein, 15 aa, Homo sapiens
  CDR3 for beta chain variable domain of TCR clone 381816 (TRBV5-1, TRBJ2-7)
CASSLNGGPAREQYF

SEQ ID NO: 763633 - protein, 13 aa, Homo sapiens
  CDR3 for alpha chain variable domain of TCR clone 381817 (TRAV27, TRAJ41)
CAGEGNSGYALNF

SEQ ID NO: 763634 - protein, 14 aa, Homo sapiens
  CDR3 for beta chain variable domain of TCR clone 381817 (TRBV7-2, TRBJ2-7)
CASRSQGAAYEQFF

SEQ ID NO: 763635 - protein, 12 aa, Homo sapiens
  CDR3 for alpha chain variable domain of TCR clone 381818 (TRAV29/DV5, TRAJ43)
CAATPAGNDMRF

SEQ ID NO: 763636 - protein, 14 aa, Homo sapiens
  CDR3 for beta chain variable domain of TCR clone 381818 (TRBV7-2, TRBJ2-7)
CASRSQGAAYEQYF

SEQ ID NO: 763637 - protein, 18 aa, Homo sapiens
  CDR3 for alpha chain variable domain of TCR clone 381819 (TRAV21, TRAJ52)
CAVRPSPAGGTSYGKLTF

SEQ ID NO: 763638 - protein, 11 aa, Homo sapiens
  CDR3 for beta chain variable domain of TCR clone 381819 (TRBV11-2, TRBJ2-2)
CSSLGGGELFF

SEQ ID NO: 763639 - protein, 16 aa, Homo sapiens
  CDR3 for alpha chain variable domain of TCR clone 381820 (TRAV12-3, TRAJ53)
CAMSPGSGGSNYKLTF

SEQ ID NO: 763640 - protein, 17 aa, Homo sapiens
  CDR3 for beta chain variable domain of TCR clone 381820 (TRBV28, TRBJ2-5)
CSGSAPEGDALQETQYF

SEQ ID NO: 763641 - protein, 14 aa, Homo sapiens
  CDR3 for alpha chain variable domain of TCR clone 381821 (TRAV2, TRAJ9)
CAVEDRSGGFKIIF

SEQ ID NO: 763642 - protein, 16 aa, Homo sapiens
  CDR3 for beta chain variable domain of TCR clone 381821 (TRBV7-3, TRBJ2-1)
CASSLEGYRSYNEQFC

SEQ ID NO: 763643 - protein, 14 aa, Homo sapiens
  CDR3 for alpha chain variable domain of TCR clone 381822 (TRAV26-1, TRAJ22)
CIVRVYGSARQLTF

SEQ ID NO: 763644 - protein, 17 aa, Homo sapiens
  CDR3 for beta chain variable domain of TCR clone 381822 (TRBV13, TRBJ2-3)
CASSLSRVAGGRNTQYF

SEQ ID NO: 763645 - protein, 15 aa, Homo sapiens
  CDR3 for alpha chain variable domain of TCR clone 381823 (TRAV27, TRAJ38)
CAARRNAGNNLKLIW

SEQ ID NO: 763646 - protein, 15 aa, Homo sapiens
  CDR3 for beta chain variable domain of TCR clone 381823 (TRBV20-1, TRBJ1-5)
CSAFKNGQRNQPQHF

SEQ ID NO: 763647 - protein, 11 aa, Homo sapiens
  CDR3 for alpha chain variable domain of TCR clone 381824 (TRAV13-1, TRAJ39)
CASHAGNMLTF

SEQ ID NO: 763648 - protein, 13 aa, Homo sapiens
  CDR3 for beta chain variable domain of TCR clone 381824 (TRBV11-2, TRBJ1-5)
CQQLDRGRQPQHF

SEQ ID NO: 763649 - protein, 11 aa, Homo sapiens
  CDR3 for alpha chain variable domain of TCR clone 381825 (TRAV2, TRAJ33)
CAVESNYQLIW

SEQ ID NO: 763650 - protein, 10 aa, Homo sapiens
  CDR3 for beta chain variable domain of TCR clone 381825 (TRBV18, TRBJ2-2)
CASSLNQPGQ

SEQ ID NO: 763651 - protein, 13 aa, Homo sapiens
  CDR3 for alpha chain variable domain of TCR clone 381826 (TRAV8-6, TRAJ49)
CAVITNTCNHFYF

SEQ ID NO: 763652 - protein, 15 aa, Homo sapiens
  CDR3 for beta chain variable domain of TCR clone 381826 (TRBV9, TRBJ1-6)
CASSVAGTGDSPLHF

SEQ ID NO: 763653 - protein, 13 aa, Homo sapiens
  CDR3 for alpha chain variable domain of TCR clone 381827 (TRAV8-6, TRAJ8)
SAFMNTGFQKLVF

SEQ ID NO: 763654 - protein, 12 aa, Homo sapiens
  CDR3 for beta chain variable domain of TCR clone 381827 (TRBV14, TRBJ2-7)
CASSLYKDEQYF

SEQ ID NO: 763655 - protein, 12 aa, Homo sapiens
  CDR3 for alpha chain variable domain of TCR clone 381828 (TRAV4, TRAJ26)
CLVGDYGQNFVF

SEQ ID NO: 763656 - protein, 16 aa, Homo sapiens
  CDR3 for beta chain variable domain of TCR clone 381828 (TRBV29-1, TRBJ2-7)
CSVEVVGTSGSYEQYF

SEQ ID NO: 763657 - protein, 12 aa, Homo sapiens
  CDR3 for alpha chain variable domain of TCR clone 381829 (TRAV13-1, TRAJ15)
CAASQAGTALIF

SEQ ID NO: 763658 - protein, 14 aa, Homo sapiens
  CDR3 for beta chain variable domain of TCR clone 381829 (TRBV19, TRBJ2-2)
CASSTLLRSGELFF

SEQ ID NO: 763659 - protein, 16 aa, Homo sapiens
  CDR3 for alpha chain variable domain of TCR clone 381830 (TRAV3, TRAJ18)
CAVRAGRGSTLGRLYF

SEQ ID NO: 763660 - protein, 15 aa, Homo sapiens
  CDR3 for beta chain variable domain of TCR clone 381830 (TRBV7-9, TRBJ1-6)
CASSSPGCGNSPLHF

SEQ ID NO: 763661 - protein, 15 aa, Homo sapiens
  CDR3 for alpha chain variable domain of TCR clone 381831 (TRAV12-3, TRAJ13)
CAMSARSGGYQKVTF

SEQ ID NO: 763662 - protein, 13 aa, Homo sapiens
  CDR3 for beta chain variable domain of TCR clone 381831 (TRBV7-2, TRBJ2-5)
CASSRGGLETQYF

SEQ ID NO: 763663 - protein, 16 aa, Homo sapiens
  CDR3 for alpha chain variable domain of TCR clone 381832 (TRAV4, TRAJ22)
FLVGDLYSGSARQLTF

SEQ ID NO: 763664 - protein, 14 aa, Homo sapiens
  CDR3 for beta chain variable domain of TCR clone 381832 (TRBV28, TRBJ2-3)
CASSWRGRADTQYF

SEQ ID NO: 763665 - protein, 15 aa, Homo sapiens
  CDR3 for alpha chain variable domain of TCR clone 381833 (TRAV16, TRAJ12)
CSKWPLRDSSYKLIF

SEQ ID NO: 763666 - protein, 15 aa, Homo sapiens
  CDR3 for beta chain variable domain of TCR clone 381833 (TRBV27, TRBJ2-3)
CASSLGLAATDTQYF

SEQ ID NO: 763667 - protein, 18 aa, Homo sapiens
  CDR3 for alpha chain variable domain of TCR clone 381834 (TRAV29/DV5, TRAJ52)
CAAGFRGAGCTSYGKLTF

SEQ ID NO: 763668 - protein, 16 aa, Homo sapiens
  CDR3 for beta chain variable domain of TCR clone 381834 (TRBV7-3, TRBJ2-2)
CASSLKLGTLSGELFF

SEQ ID NO: 763669 - protein, 15 aa, Homo sapiens
  CDR3 for alpha chain variable domain of TCR clone 381835 (TRAV12-3, TRAJ6)
CAMSATTGGSYIPTF

SEQ ID NO: 763670 - protein, 16 aa, Homo sapiens
  CDR3 for beta chain variable domain of TCR clone 381835 (TRBV20-1, TRBJ1-2)
CSASIGQGFANYGYTF

SEQ ID NO: 763671 - protein, 14 aa, Homo sapiens
  CDR3 for alpha chain variable domain of TCR clone 381836 (TRAV17, TRAJ6)
CATPAMGGSYIPTF

SEQ ID NO: 763672 - protein, 16 aa, Homo sapiens
  CDR3 for beta chain variable domain of TCR clone 381836 (TRBV28, TRBJ2-7)
CASSSGTSGRGYEQYF

SEQ ID NO: 763673 - protein, 18 aa, Homo sapiens
  CDR3 for alpha chain variable domain of TCR clone 381837 (TRAV1-2, TRAJ18)
CAVRDMGDRGSTLGRLYF

SEQ ID NO: 763674 - protein, 20 aa, Homo sapiens
  CDR3 for beta chain variable domain of TCR clone 381837 (TRBV28, TRBJ2-1)
CASTPIGRSPGLAGGNEQFF

SEQ ID NO: 763675 - protein, 15 aa, Homo sapiens
  CDR3 for alpha chain variable domain of TCR clone 381838 (TRAV12-1, TRAJ44)
CVADLPTGTASKLTF

SEQ ID NO: 763676 - protein, 15 aa, Homo sapiens
  CDR3 for beta chain variable domain of TCR clone 381838 (TRBV6-1, TRBJ2-5)
CASSEGWGIQETQYF

SEQ ID NO: 763677 - protein, 11 aa, Homo sapiens
  CDR3 for alpha chain variable domain of TCR clone 381839 (TRAV21, TRAJ34)
CAHYNTDKLIF

SEQ ID NO: 763678 - protein, 14 aa, Homo sapiens
  CDR3 for beta chain variable domain of TCR clone 381839 (TRBV4-2, TRBJ2-1)
CASGLDRAYNEQFF

SEQ ID NO: 763679 - protein, 10 aa, Homo sapiens
  CDR3 for alpha chain variable domain of TCR clone 381840 (TRAV38-2/DV8, TRAJ23)
CCALSRKLIF

SEQ ID NO: 763680 - protein, 12 aa, Homo sapiens
  CDR3 for beta chain variable domain of TCR clone 381840 (TRBV11-2, TRBJ2-2)
CASSLGGGELFF

SEQ ID NO: 763681 - protein, 14 aa, Homo sapiens
  CDR3 for alpha chain variable domain of TCR clone 381841 (TRAV12-3, TRAJ41)
CALSAGNSGYALNF

SEQ ID NO: 763682 - protein, 11 aa, Homo sapiens
  CDR3 for beta chain variable domain of TCR clone 381841 (TRBV7-2, TRBJ2-3)
CASSSSDTQYF

SEQ ID NO: 763683 - protein, 13 aa, Homo sapiens
  CDR3 for alpha chain variable domain of TCR clone 381842 (TRAV21, TRAJ44)
CAAHTGTASKLTF

SEQ ID NO: 763684 - protein, 18 aa, Homo sapiens
  CDR3 for beta chain variable domain of TCR clone 381842 (TRBV25-1, TRBJ1-2)
CASSGLQNGQGLTFGYTF

SEQ ID NO: 763685 - protein, 13 aa, Homo sapiens
  CDR3 for alpha chain variable domain of TCR clone 381843 (TRAV13-1, TRAJ29)
CAATISGKHTSCL

SEQ ID NO: 763686 - protein, 17 aa, Homo sapiens
  CDR3 for beta chain variable domain of TCR clone 381843 (TRBV7-8, TRBJ2-6)
CASSAGTGGAGANVLTF

SEQ ID NO: 763687 - protein, 14 aa, Homo sapiens
  CDR3 for alpha chain variable domain of TCR clone 381844 (TRAV21, TRAJ35)
CAVMPIGFGNVLHC

SEQ ID NO: 763688 - protein, 15 aa, Homo sapiens
  CDR3 for beta chain variable domain of TCR clone 381844 (TRBV7-2, TRBJ2-3)
CASSLRGGSTDTQYF

SEQ ID NO: 763689 - protein, 15 aa, Homo sapiens
  CDR3 for alpha chain variable domain of TCR clone 381845 (TRAV3, TRAJ3)
CAVRDRDSIASKIIF

SEQ ID NO: 763690 - protein, 18 aa, Homo sapiens
  CDR3 for beta chain variable domain of TCR clone 381845 (TRBV25-1, TRBJ1-2)
CASSGLQNGQGLIFGYAF

SEQ ID NO: 763691 - protein, 15 aa, Homo sapiens
  CDR3 for alpha chain variable domain of TCR clone 381846 (TRAV1-2, TRAJ15)
CAVEAANQAGTALIF

SEQ ID NO: 763692 - protein, 16 aa, Homo sapiens
  CDR3 for beta chain variable domain of TCR clone 381846 (TRBV7-9, TRBJ1-2)
CASSLGFSSGEDGYTF

SEQ ID NO: 763693 - protein, 15 aa, Homo sapiens
  CDR3 for alpha chain variable domain of TCR clone 381847 (TRAV1-2, TRAJ17)
CAVRGYGAAGNKLTF

SEQ ID NO: 763694 - protein, 23 aa, Homo sapiens
  CDR3 for beta chain variable domain of TCR clone 381847 (TRBV11-2, TRBJ2-5)
CASSSPGGEGAASRDQVLRARHA

SEQ ID NO: 763695 - protein, 14 aa, Homo sapiens
  CDR3 for alpha chain variable domain of TCR clone 381848 (TRAV16, TRAJ57)
CALSGRGGSEKLVF

SEQ ID NO: 763696 - protein, 13 aa, Homo sapiens
  CDR3 for beta chain variable domain of TCR clone 381848 (TRBV5-4, TRBJ2-1)
CASSLQGPREQFF

SEQ ID NO: 763697 - protein, 14 aa, Homo sapiens
  CDR3 for alpha chain variable domain of TCR clone 381849 (TRAV38-1, TRAJ45)
CAYYSGGGADGLTF

SEQ ID NO: 763698 - protein, 19 aa, Homo sapiens
  CDR3 for beta chain variable domain of TCR clone 381849 (TRBV28, TRBJ2-1)
CQHPYWRSPGLAGGNEQFF

SEQ ID NO: 763699 - protein, 18 aa, Homo sapiens
  CDR3 for alpha chain variable domain of TCR clone 381850 (TRAV21, TRAJ52)
CAVRPSPAGGTSYGKLTF

SEQ ID NO: 763700 - protein, 14 aa, Homo sapiens
  CDR3 for beta chain variable domain of TCR clone 381850 (TRBV13, TRBJ2-5)
CASSLGRGQETQYF

SEQ ID NO: 763701 - protein, 12 aa, Homo sapiens
  CDR3 for alpha chain variable domain of TCR clone 381851 (TRAV21, TRAJ12)
CAVMDSSYKLIF

SEQ ID NO: 763702 - protein, 16 aa, Homo sapiens
  CDR3 for beta chain variable domain of TCR clone 381851 (TRBV7-2, TRBJ2-7)
CASSLEAGGPWYEQYF

SEQ ID NO: 763703 - protein, 10 aa, Homo sapiens
  CDR3 for alpha chain variable domain of TCR clone 381852 (TRAV23/DV6, TRAJ57)
CAASSTLSQG

SEQ ID NO: 763704 - protein, 13 aa, Homo sapiens
  CDR3 for beta chain variable domain of TCR clone 381852 (TRBV24-1, TRBJ2-2)
CATRAGSSGELFF

SEQ ID NO: 763705 - protein, 14 aa, Homo sapiens
  CDR3 for alpha chain variable domain of TCR clone 381853 (TRAV12-3, TRAJ58)
CAMSTETSGSRLAF

SEQ ID NO: 763706 - protein, 11 aa, Homo sapiens
  CDR3 for beta chain variable domain of TCR clone 381853 (TRBV29-1, TRBJ2-5)
CSEDRTGTQYF

SEQ ID NO: 763707 - protein, 13 aa, Homo sapiens
  CDR3 for alpha chain variable domain of TCR clone 381854 (TRAV8-2, TRAJ43)
CVVSDQGDNDMRF

SEQ ID NO: 763708 - protein, 13 aa, Homo sapiens
  CDR3 for beta chain variable domain of TCR clone 381854 (TRBV7-9, TRBJ2-5)
CASSSTGEETQYF

SEQ ID NO: 763709 - protein, 14 aa, Homo sapiens
  CDR3 for alpha chain variable domain of TCR clone 381855 (TRAV12-3, TRAJ10)
SHLPLTGGGNKLTF

SEQ ID NO: 763710 - protein, 16 aa, Homo sapiens
  CDR3 for beta chain variable domain of TCR clone 381855 (TRBV29-1, TRBJ2-7)
CGVEVVGTSGSYEQYF

SEQ ID NO: 763711 - protein, 15 aa, Homo sapiens
  CDR3 for alpha chain variable domain of TCR clone 381856 (TRAV12-2, TRAJ53)
CAVNGGGGCNYKLTF

SEQ ID NO: 763712 - protein, 14 aa, Homo sapiens
  CDR3 for beta chain variable domain of TCR clone 381856 (TRBV18, TRBJ2-7)
CASSPRGGAYEQYF

SEQ ID NO: 763713 - protein, 15 aa, Homo sapiens
  CDR3 for alpha chain variable domain of TCR clone 381857 (TRAV30, TRAJ32)
CGTEILGGATNKLIF

SEQ ID NO: 763714 - protein, 13 aa, Homo sapiens
  CDR3 for beta chain variable domain of TCR clone 381857 (TRBV6-3, TRBJ2-7)
CASSFSVGYEQYF

SEQ ID NO: 763715 - protein, 14 aa, Homo sapiens
  CDR3 for alpha chain variable domain of TCR clone 381858 (TRAV12-1, TRAJ9)
CVVHRRTGGFKTIF

SEQ ID NO: 763716 - protein, 16 aa, Homo sapiens
  CDR3 for beta chain variable domain of TCR clone 381858 (TRBV4-1, TRBJ2-3)
CASSQSTSGAEDTQYF

SEQ ID NO: 763717 - protein, 11 aa, Homo sapiens
  CDR3 for alpha chain variable domain of TCR clone 381859 (TRAV13-1, TRAJ39)
CASHAGNMLTF

SEQ ID NO: 763718 - protein, 13 aa, Homo sapiens
  CDR3 for beta chain variable domain of TCR clone 381859 (TRBV11-2, TRBJ1-5)
CQQLRQGRQTQHF

SEQ ID NO: 763719 - protein, 12 aa, Homo sapiens
  CDR3 for alpha chain variable domain of TCR clone 381860 (TRAV12-2, TRAJ30)
CAVRNRDDKIIV

SEQ ID NO: 763720 - protein, 15 aa, Homo sapiens
  CDR3 for beta chain variable domain of TCR clone 381860 (TRBV6-3, TRBJ1-5)
CASRVDRWSNQPQHF

SEQ ID NO: 763721 - protein, 14 aa, Homo sapiens
  CDR3 for alpha chain variable domain of TCR clone 381861 (TRAV26-1, TRAJ8)
CIVRVDTGFQKLVF

SEQ ID NO: 763722 - protein, 12 aa, Homo sapiens
  CDR3 for beta chain variable domain of TCR clone 381861 (TRBV11-2, TRBJ2-2)
RASSLPTGELFF

SEQ ID NO: 763723 - protein, 14 aa, Homo sapiens
  CDR3 for alpha chain variable domain of TCR clone 381862 (TRAV26-1, TRAJ45)
CIEVTGGGADGRTF

SEQ ID NO: 763724 - protein, 15 aa, Homo sapiens
  CDR3 for beta chain variable domain of TCR clone 381862 (TRBV5-1, TRBJ1-1)
CASSSTTGTNTEAFF

SEQ ID NO: 763725 - protein, 18 aa, Homo sapiens
  CDR3 for alpha chain variable domain of TCR clone 381863 (TRAV21, TRAJ52)
CGVRPSTAGGTSYGKLTF

SEQ ID NO: 763726 - protein, 15 aa, Homo sapiens
  CDR3 for beta chain variable domain of TCR clone 381863 (TRBV5-1, TRBJ2-3)
CASSVTSGSTDTQYF

SEQ ID NO: 763727 - protein, 12 aa, Homo sapiens
  CDR3 for alpha chain variable domain of TCR clone 381864 (TRAV38-2/DV8, TRAJ48)
CALLSGNEKLTF

SEQ ID NO: 763728 - protein, 15 aa, Homo sapiens
  CDR3 for beta chain variable domain of TCR clone 381864 (TRBV6-1, TRBJ2-1)
RANSELRGQYNEQFF

SEQ ID NO: 763729 - protein, 15 aa, Homo sapiens
  CDR3 for alpha chain variable domain of TCR clone 381865 (TRAV1-2, TRAJ10)
CAVRGFTGGGNKLTF

SEQ ID NO: 763730 - protein, 16 aa, Homo sapiens
  CDR3 for beta chain variable domain of TCR clone 381865 (TRBV4-1, TRBJ2-1)
CASSQEAGQGSYEQFF

SEQ ID NO: 763731 - protein, 23 aa, Homo sapiens
  CDR3 for alpha chain variable domain of TCR clone 381866 (TRAV1-1, TRAJ4)
LTMELQMKDSDSYFCALYNKLIF

SEQ ID NO: 763732 - protein, 18 aa, Homo sapiens
  CDR3 for beta chain variable domain of TCR clone 381866 (TRBV27, TRBJ2-7)
CASRTGQFFPGARDEQYF

SEQ ID NO: 763733 - protein, 13 aa, Homo sapiens
  CDR3 for alpha chain variable domain of TCR clone 381867 (TRAV12-1, TRAJ6)
CVVFPGGSYIPTF

SEQ ID NO: 763734 - protein, 14 aa, Homo sapiens
  CDR3 for beta chain variable domain of TCR clone 381867 (TRBV20-1, TRBJ1-3)
CSASPTWAGNTIYF

SEQ ID NO: 763735 - protein, 13 aa, Homo sapiens
  CDR3 for alpha chain variable domain of TCR clone 381868 (TRAV21, TRAJ57)
CAVTQGGSEKLVF

SEQ ID NO: 763736 - protein, 13 aa, Homo sapiens
  CDR3 for beta chain variable domain of TCR clone 381868 (TRBV2, TRBJ2-7)
CASTGGSSYEQYF

SEQ ID NO: 763737 - protein, 13 aa, Homo sapiens
  CDR3 for alpha chain variable domain of TCR clone 381869 (TRAV21, TRAJ15)
CAVRNQAGTALIF

SEQ ID NO: 763738 - protein, 22 aa, Homo sapiens
  CDR3 for beta chain variable domain of TCR clone 381869 (TRBV23-1, TRBJ2-7)
CASSRRLDSGQGYVGGGYEQYF

SEQ ID NO: 763739 - protein, 14 aa, Homo sapiens
  CDR3 for alpha chain variable domain of TCR clone 381870 (TRAV12-1, TRAJ46)
CVVTAKSSGDKLTF

SEQ ID NO: 763740 - protein, 17 aa, Homo sapiens
  CDR3 for beta chain variable domain of TCR clone 381870 (TRBV4-1, TRBJ2-3)
CASSQDPAGGPLDTQYY

SEQ ID NO: 763741 - protein, 16 aa, Homo sapiens
  CDR3 for alpha chain variable domain of TCR clone 381871 (TRAV30, TRAJ24)
CGTEIVDAYSWGKFQF

SEQ ID NO: 763742 - protein, 15 aa, Homo sapiens
  CDR3 for beta chain variable domain of TCR clone 381871 (TRBV20-1, TRBJ2-4)
CSARDLTGGPNIQYF

SEQ ID NO: 763743 - protein, 18 aa, Homo sapiens
  CDR3 for alpha chain variable domain of TCR clone 381872 (TRAV26-1, TRAJ56)
CIVRVAPRVTGANSKLPF

SEQ ID NO: 763744 - protein, 15 aa, Homo sapiens
  CDR3 for beta chain variable domain of TCR clone 381872 (TRBV7-9, TRBJ2-5)
RASSDTGRGRETQYF

SEQ ID NO: 763745 - protein, 14 aa, Homo sapiens
  CDR3 for alpha chain variable domain of TCR clone 381873 (TRAV8-3, TRAJ4)
CAVGASGGYNKLIF

SEQ ID NO: 763746 - protein, 14 aa, Homo sapiens
  CDR3 for beta chain variable domain of TCR clone 381873 (TRBV19, TRBJ2-1)
CASGKSTQYNEQFF

SEQ ID NO: 763747 - protein, 12 aa, Homo sapiens
  CDR3 for alpha chain variable domain of TCR clone 381874 (TRAV3, TRAJ39)
CAVIEWSNMLTF

SEQ ID NO: 763748 - protein, 13 aa, Homo sapiens
  CDR3 for beta chain variable domain of TCR clone 381874 (TRBV7-2, TRBJ2-2)
CASSSVRAGELFF

SEQ ID NO: 763749 - protein, 14 aa, Homo sapiens
  CDR3 for alpha chain variable domain of TCR clone 381875 (TRAV38-1, TRAJ29)
CAFITPSGNTHLVF

SEQ ID NO: 763750 - protein, 14 aa, Homo sapiens
  CDR3 for beta chain variable domain of TCR clone 381875 (TRBV20-1, TRBJ1-1)
CSAQTRIGGTEAFF

SEQ ID NO: 763751 - protein, 16 aa, Homo sapiens
  CDR3 for alpha chain variable domain of TCR clone 381876 (TRAV4, TRAJ5)
CLVGPDHGHGQESAYF

SEQ ID NO: 763752 - protein, 14 aa, Homo sapiens
  CDR3 for beta chain variable domain of TCR clone 381876 (TRBV11-2, TRBJ2-5)
CASSRTGGIETQYF

SEQ ID NO: 763753 - protein, 14 aa, Homo sapiens
  CDR3 for alpha chain variable domain of TCR clone 381877 (TRAV1-2, TRAJ16)
CAVNRFSDGQKLLF

SEQ ID NO: 763754 - protein, 14 aa, Homo sapiens
  CDR3 for beta chain variable domain of TCR clone 381877 (TRBV7-9, TRBJ2-7)
CASSPKTSFYEQYF

SEQ ID NO: 763755 - protein, 14 aa, Homo sapiens
  CDR3 for alpha chain variable domain of TCR clone 381878 (TRAV12-2, TRAJ17)
CAVLFKAAGNKLTF

SEQ ID NO: 763756 - protein, 12 aa, Homo sapiens
  CDR3 for beta chain variable domain of TCR clone 381878 (TRBV27, TRBJ2-1)
CASRGFYNEQFF

SEQ ID NO: 763757 - protein, 14 aa, Homo sapiens
  CDR3 for alpha chain variable domain of TCR clone 381879 (TRAV12-3, TRAJ21)
CAATDLYNFNKFYF

SEQ ID NO: 763758 - protein, 13 aa, Homo sapiens
  CDR3 for beta chain variable domain of TCR clone 381879 (TRBV19, TRBJ2-2)
CASSSKSTGELFF

SEQ ID NO: 763759 - protein, 13 aa, Homo sapiens
  CDR3 for alpha chain variable domain of TCR clone 381880 (TRAV3, TRAJ3)
CAVRALGASKIIF

SEQ ID NO: 763760 - protein, 13 aa, Homo sapiens
  CDR3 for beta chain variable domain of TCR clone 381880 (TRBV11-2, TRBJ2-5)
CASSSTGEETQYF

SEQ ID NO: 763761 - protein, 11 aa, Homo sapiens
  CDR3 for alpha chain variable domain of TCR clone 381881 (TRAV2, TRAJ40)
CAVEDPGNLQI

SEQ ID NO: 763762 - protein, 14 aa, Homo sapiens
  CDR3 for beta chain variable domain of TCR clone 381881 (TRBV19, TRBJ2-2)
CASSTLHRSRELFF

SEQ ID NO: 763763 - protein, 12 aa, Homo sapiens
  CDR3 for alpha chain variable domain of TCR clone 381882 (TRAV27, TRAJ36)
ASTPAGANNLFF

SEQ ID NO: 763764 - protein, 12 aa, Homo sapiens
  CDR3 for beta chain variable domain of TCR clone 381882 (TRBV7-9, TRBJ2-3)
CSSPGSTDTQYF

SEQ ID NO: 763765 - protein, 13 aa, Homo sapiens
  CDR3 for alpha chain variable domain of TCR clone 381883 (TRAV13-1, TRAJ39)
CAASIGAGNMLTF

SEQ ID NO: 763766 - protein, 13 aa, Homo sapiens
  CDR3 for beta chain variable domain of TCR clone 381883 (TRBV11-2, TRBJ1-3)
CASSLEPVNTIYF

SEQ ID NO: 763767 - protein, 12 aa, Homo sapiens
  CDR3 for alpha chain variable domain of TCR clone 381884 (TRAV1-1, TRAJ8)
CAGGTGFQKLVF

SEQ ID NO: 763768 - protein, 14 aa, Homo sapiens
  CDR3 for beta chain variable domain of TCR clone 381884 (TRBV5-4, TRBJ1-1)
CASSLDSRRDEAFF

SEQ ID NO: 763769 - protein, 14 aa, Homo sapiens
  CDR3 for alpha chain variable domain of TCR clone 381885 (TRAV3, TRAJ9)
CAVRLNTGGFRTIF

SEQ ID NO: 763770 - protein, 14 aa, Homo sapiens
  CDR3 for beta chain variable domain of TCR clone 381885 (TRBV7-2, TRBJ2-7)
CASSPKTSFYEQYF

SEQ ID NO: 763771 - protein, 11 aa, Homo sapiens
  CDR3 for alpha chain variable domain of TCR clone 381886 (TRAV16, TRAJ26)
CALTRWSEFCL

SEQ ID NO: 763772 - protein, 13 aa, Homo sapiens
  CDR3 for beta chain variable domain of TCR clone 381886 (TRBV4-2, TRBJ1-1)
CASSQAVNTEAFF

SEQ ID NO: 763773 - protein, 16 aa, Homo sapiens
  CDR3 for alpha chain variable domain of TCR clone 381887 (TRAV3, TRAJ42)
CAGRDLEGGSQGNLIF

SEQ ID NO: 763774 - protein, 14 aa, Homo sapiens
  CDR3 for beta chain variable domain of TCR clone 381887 (TRBV18, TRBJ1-1)
CASSPPTGRTEAFF

SEQ ID NO: 763775 - protein, 12 aa, Homo sapiens
  CDR3 for alpha chain variable domain of TCR clone 381888 (TRAV17, TRAJ4)
CATDGGYNKLIF

SEQ ID NO: 763776 - protein, 15 aa, Homo sapiens
  CDR3 for beta chain variable domain of TCR clone 381888 (TRBV12-4, TRBJ2-5)
CASSPPTGLQETQYF

SEQ ID NO: 763777 - protein, 13 aa, Homo sapiens
  CDR3 for alpha chain variable domain of TCR clone 381889 (TRAV17, TRAJ5)
CAPMDTGRRAPTF

SEQ ID NO: 763778 - protein, 13 aa, Homo sapiens
  CDR3 for beta chain variable domain of TCR clone 381889 (TRBV7-9, TRBJ1-2)
CASSLKQNYGYTF

SEQ ID NO: 763779 - protein, 18 aa, Homo sapiens
  CDR3 for alpha chain variable domain of TCR clone 381890 (TRAV21, TRAJ52)
CAVRPSPAGGTSYGKLTF

SEQ ID NO: 763780 - protein, 15 aa, Homo sapiens
  CDR3 for beta chain variable domain of TCR clone 381890 (TRBV11-2, TRBJ2-1)
CASSLGTSGLNEQFF

SEQ ID NO: 763781 - protein, 15 aa, Homo sapiens
  CDR3 for alpha chain variable domain of TCR clone 381891 (TRAV3, TRAJ9)
CAVRARNTGGFQTIF

SEQ ID NO: 763782 - protein, 12 aa, Homo sapiens
  CDR3 for beta chain variable domain of TCR clone 381891 (TRBV11-2, TRBJ2-7)
CASSLPTYEQYF

SEQ ID NO: 763783 - protein, 12 aa, Homo sapiens
  CDR3 for alpha chain variable domain of TCR clone 381892 (TRAV27, TRAJ33)
CAGEDSNYQLIW

SEQ ID NO: 763784 - protein, 16 aa, Homo sapiens
  CDR3 for beta chain variable domain of TCR clone 381892 (TRBV20-1, TRBJ2-2)
CSASASGIPGAGELFF

SEQ ID NO: 763785 - protein, 12 aa, Homo sapiens
  CDR3 for alpha chain variable domain of TCR clone 381893 (TRAV21, TRAJ6)
CAVKGGSYIPTF

SEQ ID NO: 763786 - protein, 13 aa, Homo sapiens
  CDR3 for beta chain variable domain of TCR clone 381893 (TRBV11-2, TRBJ1-1)
CASSFTENTEAFV

SEQ ID NO: 763787 - protein, 10 aa, Homo sapiens
  CDR3 for alpha chain variable domain of TCR clone 381894 (TRAV23/DV6, TRAJ57)
CAASSTLSQG

SEQ ID NO: 763788 - protein, 12 aa, Homo sapiens
  CDR3 for beta chain variable domain of TCR clone 381894 (TRBV19, TRBJ2-1)
CASSRQGAEQFF

SEQ ID NO: 763789 - protein, 10 aa, Homo sapiens
  CDR3 for alpha chain variable domain of TCR clone 381895 (TRAV12-2, TRAJ20)
CAVYLYKLSF

SEQ ID NO: 763790 - protein, 14 aa, Homo sapiens
  CDR3 for beta chain variable domain of TCR clone 381895 (TRBV10-3, TRBJ2-2)
CAIREVSHSGELFF

SEQ ID NO: 763791 - protein, 16 aa, Homo sapiens
  CDR3 for alpha chain variable domain of TCR clone 381896 (TRAV3, TRAJ10)
CAVRDMRAGGGNKLTF

SEQ ID NO: 763792 - protein, 15 aa, Homo sapiens
  CDR3 for beta chain variable domain of TCR clone 381896 (TRBV20-1, TRBJ2-5)
CSAGLAGVSQETQYF

SEQ ID NO: 763793 - protein, 15 aa, Homo sapiens
  CDR3 for alpha chain variable domain of TCR clone 381897 (TRAV12-1, TRAJ44)
CVADLPTGTASKLTF

SEQ ID NO: 763794 - protein, 12 aa, Homo sapiens
  CDR3 for beta chain variable domain of TCR clone 381897 (TRBV11-2, TRBJ2-2)
CASSLPTGELFF

SEQ ID NO: 763795 - protein, 14 aa, Homo sapiens
  CDR3 for alpha chain variable domain of TCR clone 381898 (TRAV12-2, TRAJ45)
CAVYSGGGADGLTF

SEQ ID NO: 763796 - protein, 15 aa, Homo sapiens
  CDR3 for beta chain variable domain of TCR clone 381898 (TRBV11-2, TRBJ2-1)
CASSRNRGLMYEQFF

SEQ ID NO: 763797 - protein, 14 aa, Homo sapiens
  CDR3 for alpha chain variable domain of TCR clone 381899 (TRAV3, TRAJ37)
CAVKESGNTGKLIF

SEQ ID NO: 763798 - protein, 14 aa, Homo sapiens
  CDR3 for beta chain variable domain of TCR clone 381899 (TRBV7-3, TRBJ1-1)
CASSLKGGNTEAFF

SEQ ID NO: 763799 - protein, 16 aa, Homo sapiens
  CDR3 for alpha chain variable domain of TCR clone 381900 (TRAV3, TRAJ10)
CAVRDMRAGGGNKLTF

SEQ ID NO: 763800 - protein, 19 aa, Homo sapiens
  CDR3 for beta chain variable domain of TCR clone 381900 (TRBV6-3, TRBJ1-2)
CASSYSKGRTVPPNYGYTF

SEQ ID NO: 763801 - protein, 13 aa, Homo sapiens
  CDR3 for alpha chain variable domain of TCR clone 381901 (TRAV2, TRAJ15)
CAVASQAGTALIF

SEQ ID NO: 763802 - protein, 14 aa, Homo sapiens
  CDR3 for beta chain variable domain of TCR clone 381901 (TRBV11-2, TRBJ2-7)
CASSLEAGAYEQYF

SEQ ID NO: 763803 - protein, 14 aa, Homo sapiens
  CDR3 for alpha chain variable domain of TCR clone 381902 (TRAV9-2, TRAJ39)
CALYTYNAGNMLTF

SEQ ID NO: 763804 - protein, 15 aa, Homo sapiens
  CDR3 for beta chain variable domain of TCR clone 381902 (TRBV9, TRBJ1-6)
CASSVAGTGDSPLHF

SEQ ID NO: 763805 - protein, 14 aa, Homo sapiens
  CDR3 for alpha chain variable domain of TCR clone 381903 (TRAV1-2, TRAJ16)
CAVNRFSDGQKPLF

SEQ ID NO: 763806 - protein, 13 aa, Homo sapiens
  CDR3 for beta chain variable domain of TCR clone 381903 (TRBV18, TRBJ2-5)
CASSPAGKETQYF

SEQ ID NO: 763807 - protein, 12 aa, Homo sapiens
  CDR3 for alpha chain variable domain of TCR clone 381904 (TRAV3, TRAJ20)
CAVRDPDYKLSF

SEQ ID NO: 763808 - protein, 14 aa, Homo sapiens
  CDR3 for beta chain variable domain of TCR clone 381904 (TRBV2, TRBJ2-2)
CQQQGNSRHGELFF

SEQ ID NO: 763809 - protein, 16 aa, Homo sapiens
  CDR3 for alpha chain variable domain of TCR clone 381905 (TRAV3, TRAJ23)
CAVKIGIYNQGGKLIF

SEQ ID NO: 763810 - protein, 16 aa, Homo sapiens
  CDR3 for beta chain variable domain of TCR clone 381905 (TRBV20-1, TRBJ1-4)
CSAPGQGLLTNEKLFF

SEQ ID NO: 763811 - protein, 16 aa, Homo sapiens
  CDR3 for alpha chain variable domain of TCR clone 381906 (TRAV14/DV4, TRAJ8)
CAMREGQYTGFQKLVF

SEQ ID NO: 763812 - protein, 16 aa, Homo sapiens
  CDR3 for beta chain variable domain of TCR clone 381906 (TRBV2, TRBJ2-1)
CASSVGGSLSYNEQFF

SEQ ID NO: 763813 - protein, 13 aa, Homo sapiens
  CDR3 for alpha chain variable domain of TCR clone 381907 (TRAV8-3, TRAJ43)
CAVGIYNNNDMRF

SEQ ID NO: 763814 - protein, 16 aa, Homo sapiens
  CDR3 for beta chain variable domain of TCR clone 381907 (TRBV7-2, TRBJ2-5)
SASSLVLWTKQETQYF

SEQ ID NO: 763815 - protein, 12 aa, Homo sapiens
  CDR3 for alpha chain variable domain of TCR clone 381908 (TRAV12-3, TRAJ17)
CAMTLTGNKLTF

SEQ ID NO: 763816 - protein, 16 aa, Homo sapiens
  CDR3 for beta chain variable domain of TCR clone 381908 (TRBV4-2, TRBJ2-5)
CASSQELVGSQETQYF

SEQ ID NO: 763817 - protein, 17 aa, Homo sapiens
  CDR3 for alpha chain variable domain of TCR clone 381909 (TRAV3, TRAJ6)
CAVRDGPRAGGSYIPTS

SEQ ID NO: 763818 - protein, 14 aa, Homo sapiens
  CDR3 for beta chain variable domain of TCR clone 381909 (TRBV7-2, TRBJ2-7)
CASSPKTSFYEQDF

SEQ ID NO: 763819 - protein, 17 aa, Homo sapiens
  CDR3 for alpha chain variable domain of TCR clone 381910 (TRAV26-1, TRAJ28)
CIVIALYSGAGSYQLTF

SEQ ID NO: 763820 - protein, 12 aa, Homo sapiens
  CDR3 for beta chain variable domain of TCR clone 381910 (TRBV12-4, TRBJ2-1)
CASRQTENEQFF

SEQ ID NO: 763821 - protein, 14 aa, Homo sapiens
  CDR3 for alpha chain variable domain of TCR clone 381911 (TRAV13-1, TRAJ35)
CAASKGGFGNVLHC

SEQ ID NO: 763822 - protein, 13 aa, Homo sapiens
  CDR3 for beta chain variable domain of TCR clone 381911 (TRBV7-9, TRBJ1-4)
CATQIGPNEKLFF

SEQ ID NO: 763823 - protein, 12 aa, Homo sapiens
  CDR3 for alpha chain variable domain of TCR clone 381912 (TRAV35, TRAJ49)
CAGWNTGNQFYF

SEQ ID NO: 763824 - protein, 16 aa, Homo sapiens
  CDR3 for beta chain variable domain of TCR clone 381912 (TRBV5-1, TRBJ2-2)
GASSLWDTTNTGELVF

SEQ ID NO: 763825 - protein, 18 aa, Homo sapiens
  CDR3 for alpha chain variable domain of TCR clone 381913 (TRAV12-3, TRAJ52)
CAMSRTNAGGTSYGKLTL

SEQ ID NO: 763826 - protein, 17 aa, Homo sapiens
  CDR3 for beta chain variable domain of TCR clone 381913 (TRBV7-3, TRBJ2-3)
CASSLMKWMRGADTQYF

SEQ ID NO: 763827 - protein, 15 aa, Homo sapiens
  CDR3 for alpha chain variable domain of TCR clone 381914 (TRAV17, TRAJ56)
CATETFTGANSKLTF

SEQ ID NO: 763828 - protein, 15 aa, Homo sapiens
  CDR3 for beta chain variable domain of TCR clone 381914 (TRBV28, TRBJ1-5)
CASSRTGGYVQPQHF

SEQ ID NO: 763829 - protein, 15 aa, Homo sapiens
  CDR3 for alpha chain variable domain of TCR clone 381915 (TRAV17, TRAJ56)
CATAANTGANSKLTF

SEQ ID NO: 763830 - protein, 12 aa, Homo sapiens
  CDR3 for beta chain variable domain of TCR clone 381915 (TRBV5-1, TRBJ1-1)
CASSLTGAEAFF

SEQ ID NO: 763831 - protein, 13 aa, Homo sapiens
  CDR3 for alpha chain variable domain of TCR clone 381916 (TRAV17, TRAJ9)
CATEYTGGIKTIF

SEQ ID NO: 763832 - protein, 14 aa, Homo sapiens
  CDR3 for beta chain variable domain of TCR clone 381916 (TRBV19, TRBJ2-5)
CASSMTGQQETQYF

SEQ ID NO: 763833 - protein, 16 aa, Homo sapiens
  CDR3 for alpha chain variable domain of TCR clone 381917 (TRAV30, TRAJ24)
CGTEIVGADSWGKLQF

SEQ ID NO: 763834 - protein, 15 aa, Homo sapiens
  CDR3 for beta chain variable domain of TCR clone 381917 (TRBV7-9, TRBJ1-4)
CASSARTGGNEKLFF

SEQ ID NO: 763835 - protein, 14 aa, Homo sapiens
  CDR3 for alpha chain variable domain of TCR clone 381918 (TRAV10, TRAJ36)
CVVKYEGGANNLFF

SEQ ID NO: 763836 - protein, 13 aa, Homo sapiens
  CDR3 for beta chain variable domain of TCR clone 381918 (TRBV20-1, TRBJ1-1)
CSARGGGNTEAFF

SEQ ID NO: 763837 - protein, 14 aa, Homo sapiens
  CDR3 for alpha chain variable domain of TCR clone 381919 (TRAV17, TRAJ5)
CATVALTGRRALTF

SEQ ID NO: 763838 - protein, 14 aa, Homo sapiens
  CDR3 for beta chain variable domain of TCR clone 381919 (TRBV28, TRBJ2-7)
CARSPYGMAYEQYF

SEQ ID NO: 763839 - protein, 14 aa, Homo sapiens
  CDR3 for alpha chain variable domain of TCR clone 381920 (TRAV1-2, TRAJ8)
CAVREDIGFQKLVF

SEQ ID NO: 763840 - protein, 14 aa, Homo sapiens
  CDR3 for beta chain variable domain of TCR clone 381920 (TRBV29-1, TRBJ1-4)
CSVTGTGGNEKLFF

SEQ ID NO: 763841 - protein, 14 aa, Homo sapiens
  CDR3 for alpha chain variable domain of TCR clone 381921 (TRAV1-2, TRAJ6)
CAVRSSGGSYIPTF

SEQ ID NO: 763842 - protein, 16 aa, Homo sapiens
  CDR3 for beta chain variable domain of TCR clone 381921 (TRBV7-3, TRBJ2-2)
CASSVKRGTLSGELFL

SEQ ID NO: 763843 - protein, 14 aa, Homo sapiens
  CDR3 for alpha chain variable domain of TCR clone 381922 (TRAV25, TRAJ27)
CAGPGNTNAGNSTF

SEQ ID NO: 763844 - protein, 16 aa, Homo sapiens
  CDR3 for beta chain variable domain of TCR clone 381922 (TRBV4-1, TRBJ2-6)
CASSQDGGPGANVLTF

SEQ ID NO: 763845 - protein, 17 aa, Homo sapiens
  CDR3 for alpha chain variable domain of TCR clone 381923 (TRAV4, TRAJ18)
CLVGERSVGSTLGRLSF

SEQ ID NO: 763846 - protein, 18 aa, Homo sapiens
  CDR3 for beta chain variable domain of TCR clone 381923 (TRBV11-2, TRBJ2-3)
CASSLGGASRGAPNTQYF

SEQ ID NO: 763847 - protein, 13 aa, Homo sapiens
  CDR3 for alpha chain variable domain of TCR clone 381924 (TRAV29/DV5, TRAJ31)
CAASRNNNARLMF

SEQ ID NO: 763848 - protein, 12 aa, Homo sapiens
  CDR3 for beta chain variable domain of TCR clone 381924 (TRBV14, TRBJ2-5)
CASSHLKGTQYF

SEQ ID NO: 763849 - protein, 15 aa, Homo sapiens
  CDR3 for alpha chain variable domain of TCR clone 381925 (TRAV8-3, TRAJ40)
CAAPSLGSVTYKYIF

SEQ ID NO: 763850 - protein, 16 aa, Homo sapiens
  CDR3 for beta chain variable domain of TCR clone 381925 (TRBV7-3, TRBJ2-3)
CASSLSGYRPEDTQYF

SEQ ID NO: 763851 - protein, 11 aa, Homo sapiens
  CDR3 for alpha chain variable domain of TCR clone 381926 (TRAV27, TRAJ47)
SIVEYGNKLVF

SEQ ID NO: 763852 - protein, 18 aa, Homo sapiens
  CDR3 for beta chain variable domain of TCR clone 381926 (TRBV2, TRBJ2-1)
CASRGIAGGPRTYNEQFF

SEQ ID NO: 763853 - protein, 12 aa, Homo sapiens
  CDR3 for alpha chain variable domain of TCR clone 381927 (TRAV12-2, TRAJ44)
CAVGGTASKLTF

SEQ ID NO: 763854 - protein, 14 aa, Homo sapiens
  CDR3 for beta chain variable domain of TCR clone 381927 (TRBV9, TRBJ2-2)
CASSGRERCGELFF

SEQ ID NO: 763855 - protein, 13 aa, Homo sapiens
  CDR3 for alpha chain variable domain of TCR clone 381928 (TRAV12-3, TRAJ13)
CAMSFGGYQEVTF

SEQ ID NO: 763856 - protein, 13 aa, Homo sapiens
  CDR3 for beta chain variable domain of TCR clone 381928 (TRBV20-1, TRBJ1-1)
CSAPPGGHTEAFF

SEQ ID NO: 763857 - protein, 14 aa, Homo sapiens
  CDR3 for alpha chain variable domain of TCR clone 381929 (TRAV2, TRAJ3)
CAVRPYSSASKIIF

SEQ ID NO: 763858 - protein, 14 aa, Homo sapiens
  CDR3 for beta chain variable domain of TCR clone 381929 (TRBV7-3, TRBJ2-2)
CASSSGGYTVELFF

SEQ ID NO: 763859 - protein, 14 aa, Homo sapiens
  CDR3 for alpha chain variable domain of TCR clone 381930 (TRAV1-2, TRAJ8)
CAVREDTGCQKLVF

SEQ ID NO: 763860 - protein, 12 aa, Homo sapiens
  CDR3 for beta chain variable domain of TCR clone 381930 (TRBV14, TRBJ2-5)
CASSQLKETQYF

SEQ ID NO: 763861 - protein, 15 aa, Homo sapiens
  CDR3 for alpha chain variable domain of TCR clone 381931 (TRAV26-1, TRAJ56)
CIVRVDNGANSKLTF

SEQ ID NO: 763862 - protein, 15 aa, Homo sapiens
  CDR3 for beta chain variable domain of TCR clone 381931 (TRBV20-1, TRBJ2-7)
RSARDPTEVGNEQYF

SEQ ID NO: 763863 - protein, 13 aa, Homo sapiens
  CDR3 for alpha chain variable domain of TCR clone 381932 (TRAV35, TRAJ57)
CWSSQGGSEKLVF

SEQ ID NO: 763864 - protein, 18 aa, Homo sapiens
  CDR3 for beta chain variable domain of TCR clone 381932 (TRBV6-6, TRBJ1-3)
CASSYSKWDSTSGNTIYF

SEQ ID NO: 763865 - protein, 11 aa, Homo sapiens
  CDR3 for alpha chain variable domain of TCR clone 381933 (TRAV21, TRAJ11)
CAVNGYSTLTF

SEQ ID NO: 763866 - protein, 11 aa, Homo sapiens
  CDR3 for beta chain variable domain of TCR clone 381933 (TRBV19, TRBJ1-1)
CARSIGSEAFV

SEQ ID NO: 763867 - protein, 16 aa, Homo sapiens
  CDR3 for alpha chain variable domain of TCR clone 381934 (TRAV12-3, TRAJ53)
CAMSPGSGGSNYKLTF

SEQ ID NO: 763868 - protein, 13 aa, Homo sapiens
  CDR3 for beta chain variable domain of TCR clone 381934 (TRBV19, TRBJ1-2)
CASSQGQVYGYSF

SEQ ID NO: 763869 - protein, 15 aa, Homo sapiens
  CDR3 for alpha chain variable domain of TCR clone 381935 (TRAV8-2, TRAJ40)
CVVLGTTSGTYKYIF

SEQ ID NO: 763870 - protein, 14 aa, Homo sapiens
  CDR3 for beta chain variable domain of TCR clone 381935 (TRBV4-1, TRBJ2-7)
CASSPVAGGDEQYF

SEQ ID NO: 763871 - protein, 16 aa, Homo sapiens
  CDR3 for alpha chain variable domain of TCR clone 381936 (TRAV16, TRAJ4)
CALSSMFSGGYNKLIF

SEQ ID NO: 763872 - protein, 12 aa, Homo sapiens
  CDR3 for beta chain variable domain of TCR clone 381936 (TRBV11-2, TRBJ2-2)
CASSLGGGELFF

SEQ ID NO: 763873 - protein, 14 aa, Homo sapiens
  CDR3 for alpha chain variable domain of TCR clone 381937 (TRAV12-2, TRAJ11)
CAVNRESGYSTLTF

SEQ ID NO: 763874 - protein, 13 aa, Homo sapiens
  CDR3 for beta chain variable domain of TCR clone 381937 (TRBV7-7, TRBJ1-1)
CASSLGANTEAFF

SEQ ID NO: 763875 - protein, 16 aa, Homo sapiens
  CDR3 for alpha chain variable domain of TCR clone 381938 (TRAV3, TRAJ6)
CAVRDGMGRRKLHTSI

SEQ ID NO: 763876 - protein, 15 aa, Homo sapiens
  CDR3 for beta chain variable domain of TCR clone 381938 (TRBV5-1, TRBJ2-7)
CASSLGDFTTYEQYF

SEQ ID NO: 763877 - protein, 15 aa, Homo sapiens
  CDR3 for alpha chain variable domain of TCR clone 381939 (TRAV2, TRAJ24)
CAVEVLTDSWGKFQF

SEQ ID NO: 763878 - protein, 16 aa, Homo sapiens
  CDR3 for beta chain variable domain of TCR clone 381939 (TRBV4-2, TRBJ2-3)
CASSQELAGDTDTQYF

SEQ ID NO: 763879 - protein, 13 aa, Homo sapiens
  CDR3 for alpha chain variable domain of TCR clone 381940 (TRAV26-2, TRAJ43)
CILRAGNNNDMRF

SEQ ID NO: 763880 - protein, 11 aa, Homo sapiens
  CDR3 for beta chain variable domain of TCR clone 381940 (TRBV29-1, TRBJ2-5)
CSEDRTGTQYF

SEQ ID NO: 763881 - protein, 14 aa, Homo sapiens
  CDR3 for alpha chain variable domain of TCR clone 381941 (TRAV8-6, TRAJ49)
CAVSVRYTGNPFYF

SEQ ID NO: 763882 - protein, 19 aa, Homo sapiens
  CDR3 for beta chain variable domain of TCR clone 381941 (TRBV28, TRBJ2-1)
CASSFSIRGSGRTRYEQFF

SEQ ID NO: 763883 - protein, 13 aa, Homo sapiens
  CDR3 for alpha chain variable domain of TCR clone 381942 (TRAV21, TRAJ15)
CAVANQAGTALIF

SEQ ID NO: 763884 - protein, 13 aa, Homo sapiens
  CDR3 for beta chain variable domain of TCR clone 381942 (TRBV20-1, TRBJ2-2)
CSASAAGTGELFF

SEQ ID NO: 763885 - protein, 11 aa, Homo sapiens
  CDR3 for alpha chain variable domain of TCR clone 381943 (TRAV29/DV5, TRAJ47)
CAATYGNKLVF

SEQ ID NO: 763886 - protein, 17 aa, Homo sapiens
  CDR3 for beta chain variable domain of TCR clone 381943 (TRBV7-9, TRBJ2-1)
CASSLVASYPAYNEQFF

SEQ ID NO: 763887 - protein, 14 aa, Homo sapiens
  CDR3 for alpha chain variable domain of TCR clone 381944 (TRAV12-2, TRAJ8)
CAVKENTGFQKLVF

SEQ ID NO: 763888 - protein, 13 aa, Homo sapiens
  CDR3 for beta chain variable domain of TCR clone 381944 (TRBV18, TRBJ1-2)
CTSSASATEGYTF

SEQ ID NO: 763889 - protein, 10 aa, Homo sapiens
  CDR3 for alpha chain variable domain of TCR clone 381945 (TRAV8-1, TRAJ21)
CAVNGTKFYF

SEQ ID NO: 763890 - protein, 15 aa, Homo sapiens
  CDR3 for beta chain variable domain of TCR clone 381945 (TRBV19, TRBJ2-4)
CASRGPRRGENIQYF

SEQ ID NO: 763891 - protein, 14 aa, Homo sapiens
  CDR3 for alpha chain variable domain of TCR clone 381946 (TRAV20, TRAJ56)
CAVQFGGANSKLTF

SEQ ID NO: 763892 - protein, 16 aa, Homo sapiens
  CDR3 for beta chain variable domain of TCR clone 381946 (TRBV19, TRBJ1-1)
CASSPTRFWPGTEAFF

SEQ ID NO: 763893 - protein, 14 aa, Homo sapiens
  CDR3 for alpha chain variable domain of TCR clone 381947 (TRAV35, TRAJ33)
CWPRGRDSNYQLIW

SEQ ID NO: 763894 - protein, 13 aa, Homo sapiens
  CDR3 for beta chain variable domain of TCR clone 381947 (TRBV7-9, TRBJ1-2)
CASSLKQNYGYTF

SEQ ID NO: 763895 - protein, 12 aa, Homo sapiens
  CDR3 for alpha chain variable domain of TCR clone 381948 (TRAV8-3, TRAJ20)
CAVGGGDYKLSF

SEQ ID NO: 763896 - protein, 14 aa, Homo sapiens
  CDR3 for beta chain variable domain of TCR clone 381948 (TRBV12-5, TRBJ2-5)
CASGSRTHQETQYF

SEQ ID NO: 763897 - protein, 15 aa, Homo sapiens
  CDR3 for alpha chain variable domain of TCR clone 381949 (TRAV17, TRAJ56)
CATDLGTGANSRLTF

SEQ ID NO: 763898 - protein, 15 aa, Homo sapiens
  CDR3 for beta chain variable domain of TCR clone 381949 (TRBV19, TRBJ1-1)
CASTSGQIQNTEAFF

SEQ ID NO: 763899 - protein, 16 aa, Homo sapiens
  CDR3 for alpha chain variable domain of TCR clone 381950 (TRAV12-3, TRAJ53)
YAMSPGSGGSHYKLTF

SEQ ID NO: 763900 - protein, 11 aa, Homo sapiens
  CDR3 for beta chain variable domain of TCR clone 381950 (TRBV29-1, TRBJ2-5)
CSEDRTGTQYF

SEQ ID NO: 763901 - protein, 14 aa, Homo sapiens
  CDR3 for alpha chain variable domain of TCR clone 381951 (TRAV1-2, TRAJ16)
CAVNRFSDGTKLLF

SEQ ID NO: 763902 - protein, 15 aa, Homo sapiens
  CDR3 for beta chain variable domain of TCR clone 381951 (TRBV7-9, TRBJ1-4)
CASSARTGGNEKLFF

SEQ ID NO: 763903 - protein, 22 aa, Homo sapiens
  CDR3 for alpha chain variable domain of TCR clone 381952 (TRAV26-1, TRAJ38)
CIVRPLNAGNNHIQNPDPAVSQ

SEQ ID NO: 763904 - protein, 13 aa, Homo sapiens
  CDR3 for beta chain variable domain of TCR clone 381952 (TRBV18, TRBJ1-1)
CASSPNGDTEAFF

SEQ ID NO: 763905 - protein, 14 aa, Homo sapiens
  CDR3 for alpha chain variable domain of TCR clone 381953 (TRAV3, TRAJ34)
CAVRDINNTDKLIF

SEQ ID NO: 763906 - protein, 15 aa, Homo sapiens
  CDR3 for beta chain variable domain of TCR clone 381953 (TRBV5-1, TRBJ2-1)
CASSPPRAPYNEQFF

SEQ ID NO: 763907 - protein, 12 aa, Homo sapiens
  CDR3 for alpha chain variable domain of TCR clone 381954 (TRAV27, TRAJ21)
CAGVRQLQQILL

SEQ ID NO: 763908 - protein, 17 aa, Homo sapiens
  CDR3 for beta chain variable domain of TCR clone 381954 (TRBV13, TRBJ2-3)
CASSLSRVAGGRNTQYF

SEQ ID NO: 763909 - protein, 17 aa, Homo sapiens
  CDR3 for alpha chain variable domain of TCR clone 381955 (TRAV3, TRAJ42)
CAVRDRDYGGSQGNLIF

SEQ ID NO: 763910 - protein, 17 aa, Homo sapiens
  CDR3 for beta chain variable domain of TCR clone 381955 (TRBV4-1, TRBJ1-5)
CASSQQPPTVANQPRHF

SEQ ID NO: 763911 - protein, 18 aa, Homo sapiens
  CDR3 for alpha chain variable domain of TCR clone 381956 (TRAV1-2, TRAJ10)
CAVRALTPVTGGGNKLSF

SEQ ID NO: 763912 - protein, 14 aa, Homo sapiens
  CDR3 for beta chain variable domain of TCR clone 381956 (TRBV4-1, TRBJ1-1)
CASSQQGNGNEAFF

SEQ ID NO: 763913 - protein, 12 aa, Homo sapiens
  CDR3 for alpha chain variable domain of TCR clone 381957 (TRAV12-1, TRAJ40)
CVFYSGTYKYIF

SEQ ID NO: 763914 - protein, 18 aa, Homo sapiens
  CDR3 for beta chain variable domain of TCR clone 381957 (TRBV12-4, TRBJ2-2)
CASSLVAGTRGRTGELCF

SEQ ID NO: 763915 - protein, 12 aa, Homo sapiens
  CDR3 for alpha chain variable domain of TCR clone 381958 (TRAV12-1, TRAJ40)
CVGYSGTYKYIF

SEQ ID NO: 763916 - protein, 18 aa, Homo sapiens
  CDR3 for beta chain variable domain of TCR clone 381958 (TRBV11-2, TRBJ2-3)
CASSFGGASRGAPNTQYF

SEQ ID NO: 763917 - protein, 17 aa, Homo sapiens
  CDR3 for alpha chain variable domain of TCR clone 381959 (TRAV26-1, TRAJ46)
IASSESEKKSSGDKLTF

SEQ ID NO: 763918 - protein, 15 aa, Homo sapiens
  CDR3 for beta chain variable domain of TCR clone 381959 (TRBV10-2, TRBJ2-6)
CASSEQGTGANVLTF

SEQ ID NO: 763919 - protein, 11 aa, Homo sapiens
  CDR3 for alpha chain variable domain of TCR clone 381960 (TRAV21, TRAJ11)
CAVNGHRTLTF

SEQ ID NO: 763920 - protein, 11 aa, Homo sapiens
  CDR3 for beta chain variable domain of TCR clone 381960 (TRBV19, TRBJ1-1)
CASSIGSEAFF

SEQ ID NO: 763921 - protein, 14 aa, Homo sapiens
  CDR3 for alpha chain variable domain of TCR clone 381961 (TRAV12-2, TRAJ40)
CAVKIPSGTYKYIF

SEQ ID NO: 763922 - protein, 20 aa, Homo sapiens
  CDR3 for beta chain variable domain of TCR clone 381961 (TRBV28, TRBJ2-1)
CARTPIGRSPGLAGGNEQFF

SEQ ID NO: 763923 - protein, 11 aa, Homo sapiens
  CDR3 for alpha chain variable domain of TCR clone 381962 (TRAV3, TRAJ21)
CAVGNFNKFYF

SEQ ID NO: 763924 - protein, 14 aa, Homo sapiens
  CDR3 for beta chain variable domain of TCR clone 381962 (TRBV28, TRBJ2-5)
CASSLGDRAETQYF

SEQ ID NO: 763925 - protein, 12 aa, Homo sapiens
  CDR3 for alpha chain variable domain of TCR clone 381963 (TRAV12-3, TRAJ4)
CAMTGAGTRLAV

SEQ ID NO: 763926 - protein, 14 aa, Homo sapiens
  CDR3 for beta chain variable domain of TCR clone 381963 (TRBV10-3, TRBJ1-1)
CTISDTDRGVEAFF

SEQ ID NO: 763927 - protein, 15 aa, Homo sapiens
  CDR3 for alpha chain variable domain of TCR clone 381964 (TRAV3, TRAJ17)
CAVSPKEAAGNKLTF

SEQ ID NO: 763928 - protein, 15 aa, Homo sapiens
  CDR3 for beta chain variable domain of TCR clone 381964 (TRBV27, TRBJ2-1)
CASSNGGGSSNEQFF

SEQ ID NO: 763929 - protein, 15 aa, Homo sapiens
  CDR3 for alpha chain variable domain of TCR clone 381965 (TRAV26-1, TRAJ29)
CIVRVEGSGNTPLVF

SEQ ID NO: 763930 - protein, 13 aa, Homo sapiens
  CDR3 for beta chain variable domain of TCR clone 381965 (TRBV6-1, TRBJ1-5)
CASRATLNQPQHF

SEQ ID NO: 763931 - protein, 14 aa, Homo sapiens
  CDR3 for alpha chain variable domain of TCR clone 381966 (TRAV12-2, TRAJ40)
CAVKIPSGTYKYIF

SEQ ID NO: 763932 - protein, 16 aa, Homo sapiens
  CDR3 for beta chain variable domain of TCR clone 381966 (TRBV20-1, TRBJ2-1)
CSARDHLAGGRGEQFF

SEQ ID NO: 763933 - protein, 23 aa, Homo sapiens
  CDR3 for alpha chain variable domain of TCR clone 381967 (TRAV26-1, )
CIADNAGNNYIQNPDPAVYQLRD

SEQ ID NO: 763934 - protein, 15 aa, Homo sapiens
  CDR3 for beta chain variable domain of TCR clone 381967 (TRBV27, TRBJ2-1)
CASSNGGGSSNEQFF

SEQ ID NO: 763935 - protein, 16 aa, Homo sapiens
  CDR3 for alpha chain variable domain of TCR clone 381968 (TRAV26-1, TRAJ50)
CIVRVVVETSYDKVIF

SEQ ID NO: 763936 - protein, 13 aa, Homo sapiens
  CDR3 for beta chain variable domain of TCR clone 381968 (TRBV7-9, TRBJ2-7)
CASSPGLAHEQYF

SEQ ID NO: 763937 - protein, 14 aa, Homo sapiens
  CDR3 for alpha chain variable domain of TCR clone 381969 (TRAV20, TRAJ22)
CAVQVSGSARQLTF

SEQ ID NO: 763938 - protein, 16 aa, Homo sapiens
  CDR3 for beta chain variable domain of TCR clone 381969 (TRBV7-3, TRBJ2-3)
CASSSLGGGSRDTQYF

SEQ ID NO: 763939 - protein, 17 aa, Homo sapiens
  CDR3 for alpha chain variable domain of TCR clone 381970 (TRAV3, TRAJ6)
CAVRDGPRAGGSYIPTF

SEQ ID NO: 763940 - protein, 15 aa, Homo sapiens
  CDR3 for beta chain variable domain of TCR clone 381970 (TRBV7-9, TRBJ2-1)
CASSFVGAGKNEQFF

SEQ ID NO: 763941 - protein, 13 aa, Homo sapiens
  CDR3 for alpha chain variable domain of TCR clone 381971 (TRAV21, TRAJ45)
CAVRGGGADGLTF

SEQ ID NO: 763942 - protein, 14 aa, Homo sapiens
  CDR3 for beta chain variable domain of TCR clone 381971 (TRBV4-3, TRBJ1-4)
CAISPLQRNEKLFF

SEQ ID NO: 763943 - protein, 14 aa, Homo sapiens
  CDR3 for alpha chain variable domain of TCR clone 381972 (TRAV38-1, TRAJ45)
CAYSSGGGADGLTF

SEQ ID NO: 763944 - protein, 15 aa, Homo sapiens
  CDR3 for beta chain variable domain of TCR clone 381972 (TRBV7-8, TRBJ2-7)
CASSLERAGSYEQYF

SEQ ID NO: 763945 - protein, 10 aa, Homo sapiens
  CDR3 for alpha chain variable domain of TCR clone 381973 (TRAV5, TRAJ34)
CAEDTDKLIF

SEQ ID NO: 763946 - protein, 17 aa, Homo sapiens
  CDR3 for beta chain variable domain of TCR clone 381973 (TRBV19, TRBJ1-1)
CASSIAGRGLMNTEAFF

SEQ ID NO: 763947 - protein, 16 aa, Homo sapiens
  CDR3 for alpha chain variable domain of TCR clone 381974 (TRAV13-1, TRAJ31)
CAPRDRLMFGDGTQLV

SEQ ID NO: 763948 - protein, 12 aa, Homo sapiens
  CDR3 for beta chain variable domain of TCR clone 381974 (TRBV7-9, TRBJ2-7)
CASSLEGYEQYF

SEQ ID NO: 763949 - protein, 13 aa, Homo sapiens
  CDR3 for alpha chain variable domain of TCR clone 381975 (TRAV27, TRAJ53)
CAGQGGSNYKLTF

SEQ ID NO: 763950 - protein, 15 aa, Homo sapiens
  CDR3 for beta chain variable domain of TCR clone 381975 (TRBV9, TRBJ1-6)
CASSVAGTGDSPLHF

SEQ ID NO: 763951 - protein, 18 aa, Homo sapiens
  CDR3 for alpha chain variable domain of TCR clone 381976 (TRAV1-2, TRAJ18)
CAVRDMGDRGSALGRLYF

SEQ ID NO: 763952 - protein, 16 aa, Homo sapiens
  CDR3 for beta chain variable domain of TCR clone 381976 (TRBV29-1, TRBJ1-2)
CSVEANRNIANYGYTF

SEQ ID NO: 763953 - protein, 14 aa, Homo sapiens
  CDR3 for alpha chain variable domain of TCR clone 381977 (TRAV8-1, TRAJ23)
CAVGTYNQGGKLIF

SEQ ID NO: 763954 - protein, 12 aa, Homo sapiens
  CDR3 for beta chain variable domain of TCR clone 381977 (TRBV7-8, TRBJ2-7)
CASSLGDREQYF

SEQ ID NO: 763955 - protein, 13 aa, Homo sapiens
  CDR3 for alpha chain variable domain of TCR clone 381978 (TRAV13-2, TRAJ48)
CAEMDFGNEKLNF

SEQ ID NO: 763956 - protein, 16 aa, Homo sapiens
  CDR3 for beta chain variable domain of TCR clone 381978 (TRBV12-5, TRBJ2-5)
CASGPRTSGNQETQYF

SEQ ID NO: 763957 - protein, 14 aa, Homo sapiens
  CDR3 for alpha chain variable domain of TCR clone 381979 (TRAV9-2, TRAJ39)
CALYTYNAGNMLTF

SEQ ID NO: 763958 - protein, 20 aa, Homo sapiens
  CDR3 for beta chain variable domain of TCR clone 381979 (TRBV7-8, TRBJ2-2)
CASSHLFPGPTIHITGELFF

SEQ ID NO: 763959 - protein, 15 aa, Homo sapiens
  CDR3 for alpha chain variable domain of TCR clone 381980 (TRAV12-1, TRAJ44)
CVVFVNTGTASKLTF

SEQ ID NO: 763960 - protein, 12 aa, Homo sapiens
  CDR3 for beta chain variable domain of TCR clone 381980 (TRBV13, TRBJ2-7)
CASSLWGREQYF

SEQ ID NO: 763961 - protein, 13 aa, Homo sapiens
  CDR3 for alpha chain variable domain of TCR clone 381981 (TRAV8-3, TRAJ28)
CAVGAVGGYQLTF

SEQ ID NO: 763962 - protein, 13 aa, Homo sapiens
  CDR3 for beta chain variable domain of TCR clone 381981 (TRBV19, TRBJ1-2)
CASSVPGQDGYTF

SEQ ID NO: 763963 - protein, 13 aa, Homo sapiens
  CDR3 for alpha chain variable domain of TCR clone 381982 (TRAV20, TRAJ45)
CAVKKRRCRRTHL

SEQ ID NO: 763964 - protein, 14 aa, Homo sapiens
  CDR3 for beta chain variable domain of TCR clone 381982 (TRBV15, TRBJ2-5)
CATSIGGLGETQYV

SEQ ID NO: 763965 - protein, 17 aa, Homo sapiens
  CDR3 for alpha chain variable domain of TCR clone 381983 (TRAV35, TRAJ28)
CAGLQVYSGAGSYQLTF

SEQ ID NO: 763966 - protein, 15 aa, Homo sapiens
  CDR3 for beta chain variable domain of TCR clone 381983 (TRBV2, TRBJ1-2)
CASSEIGGANYGYTV

SEQ ID NO: 763967 - protein, 17 aa, Homo sapiens
  CDR3 for alpha chain variable domain of TCR clone 381984 (TRAV3, TRAJ6)
CAVRDGPRAGGSYIPTS

SEQ ID NO: 763968 - protein, 14 aa, Homo sapiens
  CDR3 for beta chain variable domain of TCR clone 381984 (TRBV7-2, TRBJ2-7)
CASSPKSSFYEQYF

SEQ ID NO: 763969 - protein, 16 aa, Homo sapiens
  CDR3 for alpha chain variable domain of TCR clone 381985 (TRAV8-3, TRAJ44)
CAVGTLMTGTASKLTF

SEQ ID NO: 763970 - protein, 14 aa, Homo sapiens
  CDR3 for beta chain variable domain of TCR clone 381985 (TRBV28, TRBJ2-4)
CASTQVTGVNIQYF

SEQ ID NO: 763971 - protein, 12 aa, Homo sapiens
  CDR3 for alpha chain variable domain of TCR clone 381986 (TRAV12-3, TRAJ40)
CAVSSGTYKYIF

SEQ ID NO: 763972 - protein, 15 aa, Homo sapiens
  CDR3 for beta chain variable domain of TCR clone 381986 (TRBV7-9, TRBJ2-7)
CASSPGGGVTYEQYF

SEQ ID NO: 763973 - protein, 17 aa, Homo sapiens
  CDR3 for alpha chain variable domain of TCR clone 381987 (TRAV2, TRAJ36)
CAVADRGNWGKQPLLWD

SEQ ID NO: 763974 - protein, 14 aa, Homo sapiens
  CDR3 for beta chain variable domain of TCR clone 381987 (TRBV7-9, TRBJ2-5)
CASSLDTARETQYF

SEQ ID NO: 763975 - protein, 18 aa, Homo sapiens
  CDR3 for alpha chain variable domain of TCR clone 381988 (TRAV26-1, TRAJ23)
CMVRVGLEVWNQGGKPIF

SEQ ID NO: 763976 - protein, 16 aa, Homo sapiens
  CDR3 for beta chain variable domain of TCR clone 381988 (TRBV12-4, TRBJ2-5)
CASSFFVRGRQETQYF

SEQ ID NO: 763977 - protein, 19 aa, Homo sapiens
  CDR3 for alpha chain variable domain of TCR clone 381989 (TRAV27, TRAJ53)
ASTSVQSRNSGGNNYKLTF

SEQ ID NO: 763978 - protein, 14 aa, Homo sapiens
  CDR3 for beta chain variable domain of TCR clone 381989 (TRBV11-1, TRBJ2-7)
CASTFAVPSYEQYF

SEQ ID NO: 763979 - protein, 17 aa, Homo sapiens
  CDR3 for alpha chain variable domain of TCR clone 381990 (TRAV3, TRAJ12)
CAVRDGGRMDSSSKLIF

SEQ ID NO: 763980 - protein, 13 aa, Homo sapiens
  CDR3 for beta chain variable domain of TCR clone 381990 (TRBV15, TRBJ1-6)
CAASGGLNSPLHF

SEQ ID NO: 763981 - protein, 14 aa, Homo sapiens
  CDR3 for alpha chain variable domain of TCR clone 381991 (TRAV12-3, TRAJ41)
CAMSAGNSGYALNF

SEQ ID NO: 763982 - protein, 11 aa, Homo sapiens
  CDR3 for beta chain variable domain of TCR clone 381991 (TRBV7-2, TRBJ2-3)
SASSSSDTQYF

SEQ ID NO: 763983 - protein, 15 aa, Homo sapiens
  CDR3 for alpha chain variable domain of TCR clone 381992 (TRAV12-2, TRAJ53)
CAVNTGGGSNYKLTF

SEQ ID NO: 763984 - protein, 12 aa, Homo sapiens
  CDR3 for beta chain variable domain of TCR clone 381992 (TRBV11-2, TRBJ2-2)
CASSLGGGELFF

SEQ ID NO: 763985 - protein, 12 aa, Homo sapiens
  CDR3 for alpha chain variable domain of TCR clone 381993 (TRAV38-2/DV8, TRAJ49)
CAYRSSGNQFYF

SEQ ID NO: 763986 - protein, 17 aa, Homo sapiens
  CDR3 for beta chain variable domain of TCR clone 381993 (TRBV28, TRBJ2-5)
CASSTPEGDALQETQYF

SEQ ID NO: 763987 - protein, 12 aa, Homo sapiens
  CDR3 for alpha chain variable domain of TCR clone 381994 (TRAV23/DV6, TRAJ17)
CARGSCRQQANF

SEQ ID NO: 763988 - protein, 14 aa, Homo sapiens
  CDR3 for beta chain variable domain of TCR clone 381994 (TRBV7-8, TRBJ1-2)
CASSQTGSTYGYTF

SEQ ID NO: 763989 - protein, 15 aa, Homo sapiens
  CDR3 for alpha chain variable domain of TCR clone 381995 (TRAV26-1, TRAJ22)
CIVRVSFWFCKATDL

SEQ ID NO: 763990 - protein, 15 aa, Homo sapiens
  CDR3 for beta chain variable domain of TCR clone 381995 (TRBV6-3, TRBJ1-4)
CASSSPGQENEKLFF

SEQ ID NO: 763991 - protein, 14 aa, Homo sapiens
  CDR3 for alpha chain variable domain of TCR clone 381996 (TRAV2, TRAJ23)
CAVITYNQGGKLIF

SEQ ID NO: 763992 - protein, 13 aa, Homo sapiens
  CDR3 for beta chain variable domain of TCR clone 381996 (TRBV20-1, TRBJ2-3)
CSATSGGAGTQYF

SEQ ID NO: 763993 - protein, 11 aa, Homo sapiens
  CDR3 for alpha chain variable domain of TCR clone 381997 (TRAV17, TRAJ39)
CATNPSNMLTF

SEQ ID NO: 763994 - protein, 13 aa, Homo sapiens
  CDR3 for beta chain variable domain of TCR clone 381997 (TRBV7-8, TRBJ2-1)
CASTRDAVDEQFF

SEQ ID NO: 763995 - protein, 11 aa, Homo sapiens
  CDR3 for alpha chain variable domain of TCR clone 381998 (TRAV21, TRAJ34)
CAHYNTDKLIF

SEQ ID NO: 763996 - protein, 15 aa, Homo sapiens
  CDR3 for beta chain variable domain of TCR clone 381998 (TRBV18, TRBJ1-2)
CASSPGNGLGYGYTF

SEQ ID NO: 763997 - protein, 14 aa, Homo sapiens
  CDR3 for alpha chain variable domain of TCR clone 381999 (TRAV8-3, TRAJ13)
CAVGPSGGYQKVTF

SEQ ID NO: 763998 - protein, 15 aa, Homo sapiens
  CDR3 for beta chain variable domain of TCR clone 381999 (TRBV7-8, TRBJ2-7)
CASSLVQGPSGEQYF

SEQ ID NO: 763999 - protein, 15 aa, Homo sapiens
  CDR3 for alpha chain variable domain of TCR clone 382000 (TRAV4, TRAJ26)
CLVGDMDNYGQNFVF

SEQ ID NO: 764000 - protein, 16 aa, Homo sapiens
  CDR3 for beta chain variable domain of TCR clone 382000 (TRBV12-5, TRBJ2-5)
CASGPRTSGNQETQYF

SEQ ID NO: 764001 - protein, 10 aa, Homo sapiens
  CDR3 for alpha chain variable domain of TCR clone 382001 (TRAV12-3, TRAJ49)
CAMNDDQFYF

SEQ ID NO: 764002 - protein, 14 aa, Homo sapiens
  CDR3 for beta chain variable domain of TCR clone 382001 (TRBV4-2, TRBJ2-1)
CASGLDRAYNERFF

SEQ ID NO: 764003 - protein, 18 aa, Homo sapiens
  CDR3 for alpha chain variable domain of TCR clone 382002 (TRAV12-3, TRAJ52)
CTMSVGGAGGTSYGKLTF

SEQ ID NO: 764004 - protein, 15 aa, Homo sapiens
  CDR3 for beta chain variable domain of TCR clone 382002 (TRBV27, TRBJ1-6)
CASSFDRGLGSPLHF

SEQ ID NO: 764005 - protein, 12 aa, Homo sapiens
  CDR3 for alpha chain variable domain of TCR clone 382003 (TRAV8-3, TRAJ43)
CAVVDNNNDMRF

SEQ ID NO: 764006 - protein, 16 aa, Homo sapiens
  CDR3 for beta chain variable domain of TCR clone 382003 (TRBV2, TRBJ2-7)
CASKSPPGQGPYEQYF

SEQ ID NO: 764007 - protein, 14 aa, Homo sapiens
  CDR3 for alpha chain variable domain of TCR clone 382004 (TRAV12-2, TRAJ13)
CAVKKTGGYQKVTF

SEQ ID NO: 764008 - protein, 14 aa, Homo sapiens
  CDR3 for beta chain variable domain of TCR clone 382004 (TRBV7-6, TRBJ2-3)
CASSLGTVTDTQYC

SEQ ID NO: 764009 - protein, 16 aa, Homo sapiens
  CDR3 for alpha chain variable domain of TCR clone 382005 (TRAV1-2, TRAJ16)
CAVNRFSDGRSCSLQG

SEQ ID NO: 764010 - protein, 15 aa, Homo sapiens
  CDR3 for beta chain variable domain of TCR clone 382005 (TRBV7-9, TRBJ1-6)
CASSSPGRGNSPLHF

SEQ ID NO: 764011 - protein, 17 aa, Homo sapiens
  CDR3 for alpha chain variable domain of TCR clone 382006 (TRAV3, TRAJ6)
CAVRYGPRTGGSYIPTF

SEQ ID NO: 764012 - protein, 12 aa, Homo sapiens
  CDR3 for beta chain variable domain of TCR clone 382006 (TRBV11-2, TRBJ2-2)
CASSLGGGELFF

SEQ ID NO: 764013 - protein, 15 aa, Homo sapiens
  CDR3 for alpha chain variable domain of TCR clone 382007 (TRAV2, TRAJ9)
CAVEVRGTGGFKTIF

SEQ ID NO: 764014 - protein, 13 aa, Homo sapiens
  CDR3 for beta chain variable domain of TCR clone 382007 (TRBV19, TRBJ1-5)
CASSIGGNQPQHF

SEQ ID NO: 764015 - protein, 15 aa, Homo sapiens
  CDR3 for alpha chain variable domain of TCR clone 382008 (TRAV20, TRAJ24)
CAVQAAPYSWGKFQF

SEQ ID NO: 764016 - protein, 14 aa, Homo sapiens
  CDR3 for beta chain variable domain of TCR clone 382008 (TRBV20-1, TRBJ1-1)
CSARDRGQGSEAFF

SEQ ID NO: 764017 - protein, 14 aa, Homo sapiens
  CDR3 for alpha chain variable domain of TCR clone 382009 (TRAV13-1, TRAJ44)
CAAKATCTASKLTF

SEQ ID NO: 764018 - protein, 16 aa, Homo sapiens
  CDR3 for beta chain variable domain of TCR clone 382009 (TRBV15, TRBJ1-2)
CATSRGPRTGGGGYTF

SEQ ID NO: 764019 - protein, 13 aa, Homo sapiens
  CDR3 for alpha chain variable domain of TCR clone 382010 (TRAV8-6, TRAJ16)
CAVRSPDGQKLPF

SEQ ID NO: 764020 - protein, 16 aa, Homo sapiens
  CDR3 for beta chain variable domain of TCR clone 382010 (TRBV5-7, TRBJ2-3)
CASSSLGGAITDTQYF

SEQ ID NO: 764021 - protein, 17 aa, Homo sapiens
  CDR3 for alpha chain variable domain of TCR clone 382011 (TRAV21, TRAJ52)
CAVGVNAGGTSYGKLTF

SEQ ID NO: 764022 - protein, 13 aa, Homo sapiens
  CDR3 for beta chain variable domain of TCR clone 382011 (TRBV5-1, TRBJ1-2)
CASSFRGNYGYTF

SEQ ID NO: 764023 - protein, 15 aa, Homo sapiens
  CDR3 for alpha chain variable domain of TCR clone 382012 (TRAV3, TRAJ22)
CAVRDRGGSARQLNF

SEQ ID NO: 764024 - protein, 16 aa, Homo sapiens
  CDR3 for beta chain variable domain of TCR clone 382012 (TRBV13, TRBJ2-2)
CASSPRTGEHTGELFF

SEQ ID NO: 764025 - protein, 14 aa, Homo sapiens
  CDR3 for alpha chain variable domain of TCR clone 382013 (TRAV9-2, TRAJ39)
CALYIYNAGNMLTF

SEQ ID NO: 764026 - protein, 11 aa, Homo sapiens
  CDR3 for beta chain variable domain of TCR clone 382013 (TRBV7-9, TRBJ2-5)
CASSLGETQYF

SEQ ID NO: 764027 - protein, 14 aa, Homo sapiens
  CDR3 for alpha chain variable domain of TCR clone 382014 (TRAV3, TRAJ34)
CAVRYINNTDKLIF

SEQ ID NO: 764028 - protein, 15 aa, Homo sapiens
  CDR3 for beta chain variable domain of TCR clone 382014 (TRBV20-1, TRBJ2-7)
CSARDRVSGMDEQYF

SEQ ID NO: 764029 - protein, 18 aa, Homo sapiens
  CDR3 for alpha chain variable domain of TCR clone 382015 (TRAV13-1, TRAJ52)
CAAKNPNAGGTSYGKLTF

SEQ ID NO: 764030 - protein, 14 aa, Homo sapiens
  CDR3 for beta chain variable domain of TCR clone 382015 (TRBV19, TRBJ2-1)
CASSKDRGQDEQFF

SEQ ID NO: 764031 - protein, 14 aa, Homo sapiens
  CDR3 for alpha chain variable domain of TCR clone 382016 (TRAV16, TRAJ37)
CALDISGNTGKLIF

SEQ ID NO: 764032 - protein, 15 aa, Homo sapiens
  CDR3 for beta chain variable domain of TCR clone 382016 (TRBV18, TRBJ2-1)
CASSPPSASYNEQFF

SEQ ID NO: 764033 - protein, 12 aa, Homo sapiens
  CDR3 for alpha chain variable domain of TCR clone 382017 (TRAV25, TRAJ11)
CAGASGYSTLTF

SEQ ID NO: 764034 - protein, 15 aa, Homo sapiens
  CDR3 for beta chain variable domain of TCR clone 382017 (TRBV10-2, TRBJ2-6)
CASSEQGTGANVLTF

SEQ ID NO: 764035 - protein, 15 aa, Homo sapiens
  CDR3 for alpha chain variable domain of TCR clone 382018 (TRAV13-1, TRAJ57)
CAASNTQGGSEKLVF

SEQ ID NO: 764036 - protein, 16 aa, Homo sapiens
  CDR3 for beta chain variable domain of TCR clone 382018 (TRBV19, TRBJ2-1)
CASSKAGASSYNEQFF

SEQ ID NO: 764037 - protein, 18 aa, Homo sapiens
  CDR3 for alpha chain variable domain of TCR clone 382019 (TRAV17, TRAJ4)
CFLLLCYGPFWWLNKLIF

SEQ ID NO: 764038 - protein, 15 aa, Homo sapiens
  CDR3 for beta chain variable domain of TCR clone 382019 (TRBV7-8, TRBJ1-6)
CASSLVEGAYSPLHF

SEQ ID NO: 764039 - protein, 15 aa, Homo sapiens
  CDR3 for alpha chain variable domain of TCR clone 382020 (TRAV26-1, TRAJ52)
CIVSDLGTSYGKLTF

SEQ ID NO: 764040 - protein, 17 aa, Homo sapiens
  CDR3 for beta chain variable domain of TCR clone 382020 (TRBV4-1, TRBJ2-5)
CASSQDQTGGPQETQYF

SEQ ID NO: 764041 - protein, 15 aa, Homo sapiens
  CDR3 for alpha chain variable domain of TCR clone 382021 (TRAV12-2, TRAJ53)
CAVNGGGGSNYKLTF

SEQ ID NO: 764042 - protein, 13 aa, Homo sapiens
  CDR3 for beta chain variable domain of TCR clone 382021 (TRBV7-2, TRBJ2-2)
CASSLAVTGELFF

SEQ ID NO: 764043 - protein, 13 aa, Homo sapiens
  CDR3 for alpha chain variable domain of TCR clone 382022 (TRAV12-2, TRAJ4)
FAGFSGGYNKLIF

SEQ ID NO: 764044 - protein, 14 aa, Homo sapiens
  CDR3 for beta chain variable domain of TCR clone 382022 (TRBV24-1, TRBJ1-1)
CATSIPRGDTEAFF

SEQ ID NO: 764045 - protein, 14 aa, Homo sapiens
  CDR3 for alpha chain variable domain of TCR clone 382023 (TRAV35, TRAJ33)
CAGSSQDSNYQLIW

SEQ ID NO: 764046 - protein, 17 aa, Homo sapiens
  CDR3 for beta chain variable domain of TCR clone 382023 (TRBV20-1, TRBJ1-5)
CSARVGGERQGNQPQHF

SEQ ID NO: 764047 - protein, 17 aa, Homo sapiens
  CDR3 for alpha chain variable domain of TCR clone 382024 (TRAV29/DV5, TRAJ42)
CAASAGNYGGSQGNLIF

SEQ ID NO: 764048 - protein, 12 aa, Homo sapiens
  CDR3 for beta chain variable domain of TCR clone 382024 (TRBV11-2, TRBJ2-2)
CASSLGGGELFF

SEQ ID NO: 764049 - protein, 11 aa, Homo sapiens
  CDR3 for alpha chain variable domain of TCR clone 382025 (TRAV4, TRAJ31)
CLVGDNARLMF

SEQ ID NO: 764050 - protein, 14 aa, Homo sapiens
  CDR3 for beta chain variable domain of TCR clone 382025 (TRBV20-1, TRBJ2-5)
CSALVPGYQETQYF

SEQ ID NO: 764051 - protein, 11 aa, Homo sapiens
  CDR3 for alpha chain variable domain of TCR clone 382026 (TRAV21, TRAJ9)
CAVPGGFKTIF

SEQ ID NO: 764052 - protein, 13 aa, Homo sapiens
  CDR3 for beta chain variable domain of TCR clone 382026 (TRBV12-5, TRBJ2-3)
CASQNRGTDTQYF

SEQ ID NO: 764053 - protein, 21 aa, Homo sapiens
  CDR3 for alpha chain variable domain of TCR clone 382027 (TRAV30, TRAJ43)
GLPAQLLRNPLPITELNDMRF

SEQ ID NO: 764054 - protein, 14 aa, Homo sapiens
  CDR3 for beta chain variable domain of TCR clone 382027 (TRBV27, TRBJ2-1)
CASRHLGGGKEQFF

SEQ ID NO: 764055 - protein, 14 aa, Homo sapiens
  CDR3 for alpha chain variable domain of TCR clone 382028 (TRAV17, TRAJ16)
CATADFSDGQKLLF

SEQ ID NO: 764056 - protein, 13 aa, Homo sapiens
  CDR3 for beta chain variable domain of TCR clone 382028 (TRBV19, TRBJ2-1)
CATSRGVYNEQFF

SEQ ID NO: 764057 - protein, 14 aa, Homo sapiens
  CDR3 for alpha chain variable domain of TCR clone 382029 (TRAV34, TRAJ22)
CGADTSGSARKLTF

SEQ ID NO: 764058 - protein, 14 aa, Homo sapiens
  CDR3 for beta chain variable domain of TCR clone 382029 (TRBV6-1, TRBJ1-2)
CASSDTGASYGYTF

SEQ ID NO: 764059 - protein, 12 aa, Homo sapiens
  CDR3 for alpha chain variable domain of TCR clone 382030 (TRAV13-1, TRAJ21)
CAAKEGCNKFYF

SEQ ID NO: 764060 - protein, 14 aa, Homo sapiens
  CDR3 for beta chain variable domain of TCR clone 382030 (TRBV5-1, TRBJ2-7)
CASSRGESLYEQYF

SEQ ID NO: 764061 - protein, 12 aa, Homo sapiens
  CDR3 for alpha chain variable domain of TCR clone 382031 (TRAV38-1, TRAJ32)
CAPLGATNKLIF

SEQ ID NO: 764062 - protein, 14 aa, Homo sapiens
  CDR3 for beta chain variable domain of TCR clone 382031 (TRBV29-1, TRBJ2-5)
CSVETSGSGETQYS

SEQ ID NO: 764063 - protein, 14 aa, Homo sapiens
  CDR3 for alpha chain variable domain of TCR clone 382032 (TRAV12-2, TRAJ15)
CAPHTGQAGTALTF

SEQ ID NO: 764064 - protein, 13 aa, Homo sapiens
  CDR3 for beta chain variable domain of TCR clone 382032 (TRBV4-2, TRBJ1-1)
CASSQAGNTEAFF

SEQ ID NO: 764065 - protein, 14 aa, Homo sapiens
  CDR3 for alpha chain variable domain of TCR clone 382033 (TRAV13-1, TRAJ44)
CAAKATGTASKLTF

SEQ ID NO: 764066 - protein, 16 aa, Homo sapiens
  CDR3 for beta chain variable domain of TCR clone 382033 (TRBV7-9, TRBJ2-6)
CASSLKGPLRANVLTV

SEQ ID NO: 764067 - protein, 14 aa, Homo sapiens
  CDR3 for alpha chain variable domain of TCR clone 382034 (TRAV12-3, TRAJ10)
SHLPLTGGGNKLTF

SEQ ID NO: 764068 - protein, 20 aa, Homo sapiens
  CDR3 for beta chain variable domain of TCR clone 382034 (TRBV12-5, TRBJ2-5)
CASGPRTSGIKRPSTSGQAR

SEQ ID NO: 764069 - protein, 14 aa, Homo sapiens
  CDR3 for alpha chain variable domain of TCR clone 382035 (TRAV2, TRAJ9)
CAVEERSGGFKTIF

SEQ ID NO: 764070 - protein, 15 aa, Homo sapiens
  CDR3 for beta chain variable domain of TCR clone 382035 (TRBV6-6, TRBJ2-7)
CASSYSYGGSYEQYF

SEQ ID NO: 764071 - protein, 12 aa, Homo sapiens
  CDR3 for alpha chain variable domain of TCR clone 382036 (TRAV21, TRAJ49)
CAVRNTGNQFSF

SEQ ID NO: 764072 - protein, 12 aa, Homo sapiens
  CDR3 for beta chain variable domain of TCR clone 382036 (TRBV7-9, TRBJ2-7)
CATRTDAYEQYF

SEQ ID NO: 764073 - protein, 14 aa, Homo sapiens
  CDR3 for alpha chain variable domain of TCR clone 382037 (TRAV1-2, TRAJ16)
CSVNRFSDGQKLLF

SEQ ID NO: 764074 - protein, 16 aa, Homo sapiens
  CDR3 for beta chain variable domain of TCR clone 382037 (TRBV5-1, TRBJ2-5)
CASSLRRTSGQETQYF

SEQ ID NO: 764075 - protein, 15 aa, Homo sapiens
  CDR3 for alpha chain variable domain of TCR clone 382038 (TRAV12-3, TRAJ6)
CAMSATTGGSYIPTF

SEQ ID NO: 764076 - protein, 15 aa, Homo sapiens
  CDR3 for beta chain variable domain of TCR clone 382038 (TRBV7-2, TRBJ2-5)
CASSGILAGAETHYF

SEQ ID NO: 764077 - protein, 12 aa, Homo sapiens
  CDR3 for alpha chain variable domain of TCR clone 382039 (TRAV13-1, TRAJ15)
CAASQAGTALIF

SEQ ID NO: 764078 - protein, 15 aa, Homo sapiens
  CDR3 for beta chain variable domain of TCR clone 382039 (TRBV5-1, TRBJ2-1)
CASSLDAGPSYAQFF

SEQ ID NO: 764079 - protein, 15 aa, Homo sapiens
  CDR3 for alpha chain variable domain of TCR clone 382040 (TRAV12-3, TRAJ10)
CASYILTGGGNKLTF

SEQ ID NO: 764080 - protein, 14 aa, Homo sapiens
  CDR3 for beta chain variable domain of TCR clone 382040 (TRBV25-1, TRBJ1-1)
CASTHLGGNTEAFL

SEQ ID NO: 764081 - protein, 11 aa, Homo sapiens
  CDR3 for alpha chain variable domain of TCR clone 382041 (TRAV3, TRAJ21)
CSVGNFNKFYF

SEQ ID NO: 764082 - protein, 16 aa, Homo sapiens
  CDR3 for beta chain variable domain of TCR clone 382041 (TRBV19, TRBJ2-1)
CASSKPGPSSYNEQFF

SEQ ID NO: 764083 - protein, 15 aa, Homo sapiens
  CDR3 for alpha chain variable domain of TCR clone 382042 (TRAV8-4, TRAJ6)
CAVSAPSGGSYIPTF

SEQ ID NO: 764084 - protein, 16 aa, Homo sapiens
  CDR3 for beta chain variable domain of TCR clone 382042 (TRBV7-3, TRBJ2-2)
CASSLKRGTLSGELFF

SEQ ID NO: 764085 - protein, 18 aa, Homo sapiens
  CDR3 for alpha chain variable domain of TCR clone 382043 (TRAV13-1, TRAJ52)
CAASKRSAGGTSYGKLTF

SEQ ID NO: 764086 - protein, 17 aa, Homo sapiens
  CDR3 for beta chain variable domain of TCR clone 382043 (TRBV12-4, TRBJ2-3)
CASSLSRVAGGRNTQYF

SEQ ID NO: 764087 - protein, 15 aa, Homo sapiens
  CDR3 for alpha chain variable domain of TCR clone 382044 (TRAV8-3, TRAJ45)
CASSYSGGGGDGLTF

SEQ ID NO: 764088 - protein, 17 aa, Homo sapiens
  CDR3 for beta chain variable domain of TCR clone 382044 (TRBV7-8, TRBJ1-2)
CASSLRPLQGHLYGYTF

SEQ ID NO: 764089 - protein, 14 aa, Homo sapiens
  CDR3 for alpha chain variable domain of TCR clone 382045 (TRAV2, TRAJ37)
CAVDFTSNTGKLIF

SEQ ID NO: 764090 - protein, 13 aa, Homo sapiens
  CDR3 for beta chain variable domain of TCR clone 382045 (TRBV7-9, TRBJ2-1)
CASSWESYNEQFF

SEQ ID NO: 764091 - protein, 12 aa, Homo sapiens
  CDR3 for alpha chain variable domain of TCR clone 382046 (TRAV12-3, TRAJ17)
CAMTPKGNKLTF

SEQ ID NO: 764092 - protein, 15 aa, Homo sapiens
  CDR3 for beta chain variable domain of TCR clone 382046 (TRBV20-1, TRBJ2-7)
CSARDRVSGMDEQYF

SEQ ID NO: 764093 - protein, 14 aa, Homo sapiens
  CDR3 for alpha chain variable domain of TCR clone 382047 (TRAV12-2, TRAJ36)
CAVKISTGANNLFF

SEQ ID NO: 764094 - protein, 12 aa, Homo sapiens
  CDR3 for beta chain variable domain of TCR clone 382047 (TRBV11-2, TRBJ2-2)
CASSLGGGELFF

SEQ ID NO: 764095 - protein, 14 aa, Homo sapiens
  CDR3 for alpha chain variable domain of TCR clone 382048 (TRAV19, TRAJ15)
CALRIEQAGTALIL

SEQ ID NO: 764096 - protein, 19 aa, Homo sapiens
  CDR3 for beta chain variable domain of TCR clone 382048 (TRBV28, TRBJ2-4)
CASSFQPGGPAHSKNIQYF

SEQ ID NO: 764097 - protein, 14 aa, Homo sapiens
  CDR3 for alpha chain variable domain of TCR clone 382049 (TRAV12-1, TRAJ20)
CVVNPLSNDYKLSF

SEQ ID NO: 764098 - protein, 14 aa, Homo sapiens
  CDR3 for beta chain variable domain of TCR clone 382049 (TRBV7-6, TRBJ2-3)
CASSLTGGTDTQYF

SEQ ID NO: 764099 - protein, 20 aa, Homo sapiens
  CDR3 for alpha chain variable domain of TCR clone 382050 (TRAV25, TRAJ21)
TATQTTDVGTYPLSFNKFYF

SEQ ID NO: 764100 - protein, 16 aa, Homo sapiens
  CDR3 for beta chain variable domain of TCR clone 382050 (TRBV20-1, TRBJ2-1)
CSALTWTSGSYNEQFF

SEQ ID NO: 764101 - protein, 14 aa, Homo sapiens
  CDR3 for alpha chain variable domain of TCR clone 382051 (TRAV20, TRAJ20)
CAVRRGYNDYELSF

SEQ ID NO: 764102 - protein, 13 aa, Homo sapiens
  CDR3 for beta chain variable domain of TCR clone 382051 (TRBV19, TRBJ2-5)
CASSETAPETQYF

SEQ ID NO: 764103 - protein, 16 aa, Homo sapiens
  CDR3 for alpha chain variable domain of TCR clone 382052 (TRAV30, TRAJ42)
CGTSKHYGGSQGNLIF

SEQ ID NO: 764104 - protein, 14 aa, Homo sapiens
  CDR3 for beta chain variable domain of TCR clone 382052 (TRBV19, TRBJ1-5)
CASNSYGTHQPQHF

SEQ ID NO: 764105 - protein, 13 aa, Homo sapiens
  CDR3 for alpha chain variable domain of TCR clone 382053 (TRAV12-2, TRAJ20)
CAVYPSNDYKLSF

SEQ ID NO: 764106 - protein, 14 aa, Homo sapiens
  CDR3 for beta chain variable domain of TCR clone 382053 (TRBV19, TRBJ2-3)
CASSAPRGTDTQYF

SEQ ID NO: 764107 - protein, 12 aa, Homo sapiens
  CDR3 for alpha chain variable domain of TCR clone 382054 (TRAV25, TRAJ33)
CAGPDSNYQLIW

SEQ ID NO: 764108 - protein, 20 aa, Homo sapiens
  CDR3 for beta chain variable domain of TCR clone 382054 (TRBV4-1, TRBJ2-2)
CASRQASPPGLASNTGELFF

SEQ ID NO: 764109 - protein, 11 aa, Homo sapiens
  CDR3 for alpha chain variable domain of TCR clone 382055 (TRAV3, TRAJ21)
CAVGNFNKFYF

SEQ ID NO: 764110 - protein, 15 aa, Homo sapiens
  CDR3 for beta chain variable domain of TCR clone 382055 (TRBV11-2, TRBJ2-5)
CASSLGAGGVETQYF

SEQ ID NO: 764111 - protein, 12 aa, Homo sapiens
  CDR3 for alpha chain variable domain of TCR clone 382056 (TRAV13-2, TRAJ23)
CAERHRGGKLIF

SEQ ID NO: 764112 - protein, 12 aa, Homo sapiens
  CDR3 for beta chain variable domain of TCR clone 382056 (TRBV19, TRBJ1-4)
CASKDWPGGLFF

SEQ ID NO: 764113 - protein, 14 aa, Homo sapiens
  CDR3 for alpha chain variable domain of TCR clone 382057 (TRAV16, TRAJ39)
CALSKNNAGNMLTF

SEQ ID NO: 764114 - protein, 16 aa, Homo sapiens
  CDR3 for beta chain variable domain of TCR clone 382057 (TRBV6-6, TRBJ2-1)
CASSYSFSGSYNEQVF

SEQ ID NO: 764115 - protein, 12 aa, Homo sapiens
  CDR3 for alpha chain variable domain of TCR clone 382058 (TRAV12-3, TRAJ41)
CAMSYSGYALNF

SEQ ID NO: 764116 - protein, 13 aa, Homo sapiens
  CDR3 for beta chain variable domain of TCR clone 382058 (TRBV7-3, TRBJ2-1)
FASSLDSYNEQFF

SEQ ID NO: 764117 - protein, 14 aa, Homo sapiens
  CDR3 for alpha chain variable domain of TCR clone 382059 (TRAV26-2, TRAJ38)
CILYNAGNNRKLLW

SEQ ID NO: 764118 - protein, 14 aa, Homo sapiens
  CDR3 for beta chain variable domain of TCR clone 382059 (TRBV19, TRBJ2-1)
CASPTFVLSGEQFF

SEQ ID NO: 764119 - protein, 14 aa, Homo sapiens
  CDR3 for alpha chain variable domain of TCR clone 382060 (TRAV21, TRAJ35)
CAVMPIGFGNVLHC

SEQ ID NO: 764120 - protein, 12 aa, Homo sapiens
  CDR3 for beta chain variable domain of TCR clone 382060 (TRBV7-9, TRBJ2-1)
CASSIKREEQYF

SEQ ID NO: 764121 - protein, 14 aa, Homo sapiens
  CDR3 for alpha chain variable domain of TCR clone 382061 (TRAV26-1, TRAJ45)
CIEVTGGGADGLTF

SEQ ID NO: 764122 - protein, 16 aa, Homo sapiens
  CDR3 for beta chain variable domain of TCR clone 382061 (TRBV27, TRBJ2-2)
CASSFRGLVRTGELFF

SEQ ID NO: 764123 - protein, 15 aa, Homo sapiens
  CDR3 for alpha chain variable domain of TCR clone 382062 (TRAV1-2, TRAJ15)
CAVDVMGSAGTALIF

SEQ ID NO: 764124 - protein, 14 aa, Homo sapiens
  CDR3 for beta chain variable domain of TCR clone 382062 (TRBV19, TRBJ2-1)
CASPTFVLSGEQFF

SEQ ID NO: 764125 - protein, 18 aa, Homo sapiens
  CDR3 for alpha chain variable domain of TCR clone 382063 (TRAV21, TRAJ52)
CAVRPSPAGGTSYGKLTF

SEQ ID NO: 764126 - protein, 16 aa, Homo sapiens
  CDR3 for beta chain variable domain of TCR clone 382063 (TRBV4-1, TRBJ2-5)
CASSQAIAASSATQYF

SEQ ID NO: 764127 - protein, 14 aa, Homo sapiens
  CDR3 for alpha chain variable domain of TCR clone 382064 (TRAV1-2, TRAJ16)
CAVKRFSDGQKLLF

SEQ ID NO: 764128 - protein, 16 aa, Homo sapiens
  CDR3 for beta chain variable domain of TCR clone 382064 (TRBV12-4, TRBJ2-5)
CASSFFVRGRQETQYL

SEQ ID NO: 764129 - protein, 14 aa, Homo sapiens
  CDR3 for alpha chain variable domain of TCR clone 382065 (TRAV12-1, TRAJ45)
CVVNLGGGADGLTF

SEQ ID NO: 764130 - protein, 15 aa, Homo sapiens
  CDR3 for beta chain variable domain of TCR clone 382065 (TRBV7-2, TRBJ2-7)
CASSLKGALTYEQYF

SEQ ID NO: 764131 - protein, 13 aa, Homo sapiens
  CDR3 for alpha chain variable domain of TCR clone 382066 (TRAV23/DV6, TRAJ30)
CAAPSSRDDKIIF

SEQ ID NO: 764132 - protein, 13 aa, Homo sapiens
  CDR3 for beta chain variable domain of TCR clone 382066 (TRBV7-3, TRBJ1-1)
CASSQDWGAEAFF

SEQ ID NO: 764133 - protein, 14 aa, Homo sapiens
  CDR3 for alpha chain variable domain of TCR clone 382067 (TRAV3, TRAJ34)
CAARAPGNTDKLIF

SEQ ID NO: 764134 - protein, 14 aa, Homo sapiens
  CDR3 for beta chain variable domain of TCR clone 382067 (TRBV5-4, TRBJ1-1)
CASSLDSRRDEAFF

SEQ ID NO: 764135 - protein, 14 aa, Homo sapiens
  CDR3 for alpha chain variable domain of TCR clone 382068 (TRAV8-4, TRAJ8)
CAVSVSTGFQKLVF

SEQ ID NO: 764136 - protein, 15 aa, Homo sapiens
  CDR3 for beta chain variable domain of TCR clone 382068 (TRBV2, TRBJ2-3)
CASSGEGTGTDTQYF

SEQ ID NO: 764137 - protein, 14 aa, Homo sapiens
  CDR3 for alpha chain variable domain of TCR clone 382069 (TRAV1-2, TRAJ16)
CAVNRFSDGQKLLF

SEQ ID NO: 764138 - protein, 16 aa, Homo sapiens
  CDR3 for beta chain variable domain of TCR clone 382069 (TRBV20-1, TRBJ1-4)
CSAPGQGVLTNEELFF

SEQ ID NO: 764139 - protein, 19 aa, Homo sapiens
  CDR3 for alpha chain variable domain of TCR clone 382070 (TRAV26-1, TRAJ29)
CCVLLHRRVEGSGNTPLVF

SEQ ID NO: 764140 - protein, 14 aa, Homo sapiens
  CDR3 for beta chain variable domain of TCR clone 382070 (TRBV18, TRBJ2-5)
CASSPGVSQETQYF

SEQ ID NO: 764141 - protein, 14 aa, Homo sapiens
  CDR3 for alpha chain variable domain of TCR clone 382071 (TRAV13-1, TRAJ52)
CAANGGTSYGKLTF

SEQ ID NO: 764142 - protein, 14 aa, Homo sapiens
  CDR3 for beta chain variable domain of TCR clone 382071 (TRBV14, TRBJ2-5)
CASSSLGSGETQYF

SEQ ID NO: 764143 - protein, 15 aa, Homo sapiens
  CDR3 for alpha chain variable domain of TCR clone 382072 (TRAV22, TRAJ24)
CAVPLSTDSWGKLQF

SEQ ID NO: 764144 - protein, 15 aa, Homo sapiens
  CDR3 for beta chain variable domain of TCR clone 382072 (TRBV9, TRBJ1-6)
CASSVAGTGDSPLHF

SEQ ID NO: 764145 - protein, 14 aa, Homo sapiens
  CDR3 for alpha chain variable domain of TCR clone 382073 (TRAV12-3, TRAJ47)
CAMSLREYGNKLVF

SEQ ID NO: 764146 - protein, 15 aa, Homo sapiens
  CDR3 for beta chain variable domain of TCR clone 382073 (TRBV20-1, TRBJ2-2)
CSARDTRLNTGELFF

SEQ ID NO: 764147 - protein, 15 aa, Homo sapiens
  CDR3 for alpha chain variable domain of TCR clone 382074 (TRAV3, TRAJ3)
CAVKDMSSSASKIIF

SEQ ID NO: 764148 - protein, 14 aa, Homo sapiens
  CDR3 for beta chain variable domain of TCR clone 382074 (TRBV6-6, TRBJ2-7)
CASSIAGGVDEQYF

SEQ ID NO: 764149 - protein, 13 aa, Homo sapiens
  CDR3 for alpha chain variable domain of TCR clone 382075 (TRAV36/DV7, TRAJ37)
CAAFSSNTGKLIF

SEQ ID NO: 764150 - protein, 12 aa, Homo sapiens
  CDR3 for beta chain variable domain of TCR clone 382075 (TRBV11-2, TRBJ2-3)
GASRGAPNTQYF

SEQ ID NO: 764151 - protein, 18 aa, Homo sapiens
  CDR3 for alpha chain variable domain of TCR clone 382076 (TRAV21, TRAJ52)
CAVRPSPAGGTSYGKLTF

SEQ ID NO: 764152 - protein, 16 aa, Homo sapiens
  CDR3 for beta chain variable domain of TCR clone 382076 (TRBV19, TRBJ2-1)
CASSKAGPSSYNKQFF

SEQ ID NO: 764153 - protein, 16 aa, Homo sapiens
  CDR3 for alpha chain variable domain of TCR clone 382077 (TRAV1-2, TRAJ10)
CAVRGGLTGGGNKLTF

SEQ ID NO: 764154 - protein, 20 aa, Homo sapiens
  CDR3 for beta chain variable domain of TCR clone 382077 (TRBV4-3, TRBJ1-4)
CASSQDIGVLVFLSNEKLFF

SEQ ID NO: 764155 - protein, 20 aa, Homo sapiens
  CDR3 for alpha chain variable domain of TCR clone 382078 (TRAV26-1, TRAJ42)
CGVLLHRQTYYGGSQGNLIF

SEQ ID NO: 764156 - protein, 16 aa, Homo sapiens
  CDR3 for beta chain variable domain of TCR clone 382078 (TRBV7-3, TRBJ2-2)
CASSLKRGTLSGELFF

SEQ ID NO: 764157 - protein, 12 aa, Homo sapiens
  CDR3 for alpha chain variable domain of TCR clone 382079 (TRAV12-3, TRAJ17)
CAMTLTGNKLTF

SEQ ID NO: 764158 - protein, 15 aa, Homo sapiens
  CDR3 for beta chain variable domain of TCR clone 382079 (TRBV20-1, TRBJ2-7)
CGARDPVSGMDEQYF

SEQ ID NO: 764159 - protein, 15 aa, Homo sapiens
  CDR3 for alpha chain variable domain of TCR clone 382080 (TRAV12-2, TRAJ53)
CAVKGGGGSNYKLTF

SEQ ID NO: 764160 - protein, 13 aa, Homo sapiens
  CDR3 for beta chain variable domain of TCR clone 382080 (TRBV7-3, TRBJ1-1)
CASSQDWGAEAFF

SEQ ID NO: 764161 - protein, 12 aa, Homo sapiens
  CDR3 for alpha chain variable domain of TCR clone 382081 (TRAV27, TRAJ41)
CAGRNSGYALNF

SEQ ID NO: 764162 - protein, 13 aa, Homo sapiens
  CDR3 for beta chain variable domain of TCR clone 382081 (TRBV19, TRBJ1-2)
CASSVPGQDGYTF

SEQ ID NO: 764163 - protein, 12 aa, Homo sapiens
  CDR3 for alpha chain variable domain of TCR clone 382082 (TRAV35, TRAJ49)
CAGWNTGNQFYF

SEQ ID NO: 764164 - protein, 14 aa, Homo sapiens
  CDR3 for beta chain variable domain of TCR clone 382082 (TRBV10-3, TRBJ1-3)
CAIRGQRAGNTIYF

SEQ ID NO: 764165 - protein, 13 aa, Homo sapiens
  CDR3 for alpha chain variable domain of TCR clone 382083 (TRAV8-3, TRAJ28)
CAVGAVGSYQLTF

SEQ ID NO: 764166 - protein, 16 aa, Homo sapiens
  CDR3 for beta chain variable domain of TCR clone 382083 (TRBV19, TRBJ2-1)
CASSRAGPSSYNEQFF

SEQ ID NO: 764167 - protein, 18 aa, Homo sapiens
  CDR3 for alpha chain variable domain of TCR clone 382084 (TRAV13-1, TRAJ52)
CATKNPNAGGTSYGKLTF

SEQ ID NO: 764168 - protein, 13 aa, Homo sapiens
  CDR3 for beta chain variable domain of TCR clone 382084 (TRBV20-1, TRBJ1-1)
CSARGGGNTEAFF

SEQ ID NO: 764169 - protein, 21 aa, Homo sapiens
  CDR3 for alpha chain variable domain of TCR clone 382085 (TRAV4, TRAJ39)
CCVLLPRGGAAGGNAVNMLTF

SEQ ID NO: 764170 - protein, 16 aa, Homo sapiens
  CDR3 for beta chain variable domain of TCR clone 382085 (TRBV7-6, TRBJ2-7)
CASSGGTGALSYEQYF

SEQ ID NO: 764171 - protein, 15 aa, Homo sapiens
  CDR3 for alpha chain variable domain of TCR clone 382086 (TRAV12-1, TRAJ40)
CVVNMHFPGTYKYIF

SEQ ID NO: 764172 - protein, 15 aa, Homo sapiens
  CDR3 for beta chain variable domain of TCR clone 382086 (TRBV5-1, TRBJ2-7)
CASSLMTSGRNEQYF

SEQ ID NO: 764173 - protein, 11 aa, Homo sapiens
  CDR3 for alpha chain variable domain of TCR clone 382087 (TRAV4, TRAJ21)
CLIYNFNKFYF

SEQ ID NO: 764174 - protein, 17 aa, Homo sapiens
  CDR3 for beta chain variable domain of TCR clone 382087 (TRBV23-1, TRBJ2-1)
CISAPAVNGDQGGEQFF

SEQ ID NO: 764175 - protein, 12 aa, Homo sapiens
  CDR3 for alpha chain variable domain of TCR clone 382088 (TRAV12-2, TRAJ11)
CAATSGYSTLTF

SEQ ID NO: 764176 - protein, 16 aa, Homo sapiens
  CDR3 for beta chain variable domain of TCR clone 382088 (TRBV28, TRBJ2-2)
CASSLEGGSNTGELFF

SEQ ID NO: 764177 - protein, 19 aa, Homo sapiens
  CDR3 for alpha chain variable domain of TCR clone 382089 (TRAV16, TRAJ26)
CALTRWSEFCLWSRNQLVR

SEQ ID NO: 764178 - protein, 13 aa, Homo sapiens
  CDR3 for beta chain variable domain of TCR clone 382089 (TRBV4-1, TRBJ2-2)
CASSQENTGELFF

SEQ ID NO: 764179 - protein, 13 aa, Homo sapiens
  CDR3 for alpha chain variable domain of TCR clone 382090 (TRAV8-3, TRAJ48)
CCGCNFGNEKLTF

SEQ ID NO: 764180 - protein, 12 aa, Homo sapiens
  CDR3 for beta chain variable domain of TCR clone 382090 (TRBV24-1, TRBJ1-1)
CATSDPGLEALF

SEQ ID NO: 764181 - protein, 13 aa, Homo sapiens
  CDR3 for alpha chain variable domain of TCR clone 382091 (TRAV12-1, TRAJ34)
CGEPLRNTDKLIF

SEQ ID NO: 764182 - protein, 11 aa, Homo sapiens
  CDR3 for beta chain variable domain of TCR clone 382091 (TRBV19, TRBJ1-1)
CASSIGSEAFF

SEQ ID NO: 764183 - protein, 12 aa, Homo sapiens
  CDR3 for alpha chain variable domain of TCR clone 382092 (TRAV21, TRAJ49)
CAVTNTGKQFYF

SEQ ID NO: 764184 - protein, 17 aa, Homo sapiens
  CDR3 for beta chain variable domain of TCR clone 382092 (TRBV13, TRBJ2-3)
CASSLSRVAGGRNTQYF

SEQ ID NO: 764185 - protein, 15 aa, Homo sapiens
  CDR3 for alpha chain variable domain of TCR clone 382093 (TRAV22, TRAJ45)
CAAKYSGGGADGLTF

SEQ ID NO: 764186 - protein, 17 aa, Homo sapiens
  CDR3 for beta chain variable domain of TCR clone 382093 (TRBV13, TRBJ2-3)
CASSLSRVAGGRNTQYF

SEQ ID NO: 764187 - protein, 13 aa, Homo sapiens
  CDR3 for alpha chain variable domain of TCR clone 382094 (TRAV3, TRAJ27)
CAVRPLSAGKSTF

SEQ ID NO: 764188 - protein, 16 aa, Homo sapiens
  CDR3 for beta chain variable domain of TCR clone 382094 (TRBV10-3, TRBJ2-1)
CAISLTSGNAYNEQFF

SEQ ID NO: 764189 - protein, 14 aa, Homo sapiens
  CDR3 for alpha chain variable domain of TCR clone 382095 (TRAV13-1, TRAJ13)
CAASRVGGYQKVTF

SEQ ID NO: 764190 - protein, 14 aa, Homo sapiens
  CDR3 for beta chain variable domain of TCR clone 382095 (TRBV4-1, TRBJ2-2)
CASSQAVNTGELFF

SEQ ID NO: 764191 - protein, 23 aa, Homo sapiens
  CDR3 for alpha chain variable domain of TCR clone 382096 (TRAV36/DV7, TRAJ50)
CAVEPENLLRQDIQNPDPAVYQL

SEQ ID NO: 764192 - protein, 13 aa, Homo sapiens
  CDR3 for beta chain variable domain of TCR clone 382096 (TRBV7-3, TRBJ2-1)
CASSPVAYNEQFF

SEQ ID NO: 764193 - protein, 14 aa, Homo sapiens
  CDR3 for alpha chain variable domain of TCR clone 382097 (TRAV8-6, TRAJ4)
CAVSGSGGYNKLIL

SEQ ID NO: 764194 - protein, 13 aa, Homo sapiens
  CDR3 for beta chain variable domain of TCR clone 382097 (TRBV3-1, TRBJ2-5)
CASSPGLQETQYF

SEQ ID NO: 764195 - protein, 14 aa, Homo sapiens
  CDR3 for alpha chain variable domain of TCR clone 382098 (TRAV29/DV5, TRAJ36)
CAARRKTGANNLFF

SEQ ID NO: 764196 - protein, 14 aa, Homo sapiens
  CDR3 for beta chain variable domain of TCR clone 382098 (TRBV12-5, TRBJ2-5)
CASGSRTEQETQYF

SEQ ID NO: 764197 - protein, 14 aa, Homo sapiens
  CDR3 for alpha chain variable domain of TCR clone 382099 (TRAV17, TRAJ22)
CATSPSGSARQLTF

SEQ ID NO: 764198 - protein, 13 aa, Homo sapiens
  CDR3 for beta chain variable domain of TCR clone 382099 (TRBV12-4, TRBJ1-2)
CASILRQGKGYTF

SEQ ID NO: 764199 - protein, 15 aa, Homo sapiens
  CDR3 for alpha chain variable domain of TCR clone 382100 (TRAV27, TRAJ38)
CAARRNAGTNRKMIW

SEQ ID NO: 764200 - protein, 13 aa, Homo sapiens
  CDR3 for beta chain variable domain of TCR clone 382100 (TRBV12-5, TRBJ2-3)
CASGDRQSDTQYF

SEQ ID NO: 764201 - protein, 16 aa, Homo sapiens
  CDR3 for alpha chain variable domain of TCR clone 382101 (TRAV26-1, TRAJ53)
IASSESMGGSNYKLTF

SEQ ID NO: 764202 - protein, 12 aa, Homo sapiens
  CDR3 for beta chain variable domain of TCR clone 382101 (TRBV7-9, TRBJ1-5)
CASSPQGQPQHF

SEQ ID NO: 764203 - protein, 17 aa, Homo sapiens
  CDR3 for alpha chain variable domain of TCR clone 382102 (TRAV3, TRAJ42)
CAVRDRDYGGSQGNLVF

SEQ ID NO: 764204 - protein, 12 aa, Homo sapiens
  CDR3 for beta chain variable domain of TCR clone 382102 (TRBV29-1, TRBJ2-2)
CSVDKYTGELFF

SEQ ID NO: 764205 - protein, 13 aa, Homo sapiens
  CDR3 for alpha chain variable domain of TCR clone 382103 (TRAV8-6, TRAJ13)
CAVSSGGYQQVTF

SEQ ID NO: 764206 - protein, 15 aa, Homo sapiens
  CDR3 for beta chain variable domain of TCR clone 382103 (TRBV7-9, TRBJ2-7)
WASSLPMGQANEQYF

SEQ ID NO: 764207 - protein, 14 aa, Homo sapiens
  CDR3 for alpha chain variable domain of TCR clone 382104 (TRAV8-4, TRAJ34)
CALSDPGDTDKLIF

SEQ ID NO: 764208 - protein, 14 aa, Homo sapiens
  CDR3 for beta chain variable domain of TCR clone 382104 (TRBV20-1, TRBJ2-5)
CSARDGRAGETQYF

SEQ ID NO: 764209 - protein, 16 aa, Homo sapiens
  CDR3 for alpha chain variable domain of TCR clone 382105 (TRAV3, TRAJ10)
CAVRDMWAGGGNKLTF

SEQ ID NO: 764210 - protein, 14 aa, Homo sapiens
  CDR3 for beta chain variable domain of TCR clone 382105 (TRBV6-1, TRBJ1-3)
CASVQGGGGNTIYF

SEQ ID NO: 764211 - protein, 13 aa, Homo sapiens
  CDR3 for alpha chain variable domain of TCR clone 382106 (TRAV29/DV5, TRAJ31)
CAASRNNNARLMF

SEQ ID NO: 764212 - protein, 11 aa, Homo sapiens
  CDR3 for beta chain variable domain of TCR clone 382106 (TRBV19, TRBJ2-5)
CASSIKETQYF

SEQ ID NO: 764213 - protein, 14 aa, Homo sapiens
  CDR3 for alpha chain variable domain of TCR clone 382107 (TRAV38-2/DV8, TRAJ54)
AAMYQIQGAQKLVF

SEQ ID NO: 764214 - protein, 15 aa, Homo sapiens
  CDR3 for beta chain variable domain of TCR clone 382107 (TRBV7-3, TRBJ2-2)
CASSETGQGTGELFF

SEQ ID NO: 764215 - protein, 15 aa, Homo sapiens
  CDR3 for alpha chain variable domain of TCR clone 382108 (TRAV27, TRAJ38)
CAARRNAGNNRKLIW

SEQ ID NO: 764216 - protein, 15 aa, Homo sapiens
  CDR3 for beta chain variable domain of TCR clone 382108 (TRBV2, TRBJ2-5)
CASSEQGLIGETQYF

SEQ ID NO: 764217 - protein, 14 aa, Homo sapiens
  CDR3 for alpha chain variable domain of TCR clone 382109 (TRAV20, TRAJ22)
CAVQVSGSARPLTS

SEQ ID NO: 764218 - protein, 13 aa, Homo sapiens
  CDR3 for beta chain variable domain of TCR clone 382109 (TRBV20-1, TRBJ2-5)
CSAREGGKETQYF

SEQ ID NO: 764219 - protein, 14 aa, Homo sapiens
  CDR3 for alpha chain variable domain of TCR clone 382110 (TRAV2, TRAJ37)
CAVDFTSNTGKLIF

SEQ ID NO: 764220 - protein, 15 aa, Homo sapiens
  CDR3 for beta chain variable domain of TCR clone 382110 (TRBV20-1, TRBJ1-1)
CSASRGVTGNTEGFF

SEQ ID NO: 764221 - protein, 17 aa, Homo sapiens
  CDR3 for alpha chain variable domain of TCR clone 382111 (TRAV8-6, TRAJ58)
CAVSSWVGGTSGPRLTF

SEQ ID NO: 764222 - protein, 17 aa, Homo sapiens
  CDR3 for beta chain variable domain of TCR clone 382111 (TRBV11-2, TRBJ2-1)
CASSLYPPGVEYNEQFF

SEQ ID NO: 764223 - protein, 12 aa, Homo sapiens
  CDR3 for alpha chain variable domain of TCR clone 382112 (TRAV8-4, TRAJ37)
CAVRSNTGKLIF

SEQ ID NO: 764224 - protein, 16 aa, Homo sapiens
  CDR3 for beta chain variable domain of TCR clone 382112 (TRBV7-2, TRBJ2-3)
CASSLVGDASTDTLYF

SEQ ID NO: 764225 - protein, 18 aa, Homo sapiens
  CDR3 for alpha chain variable domain of TCR clone 382113 (TRAV8-3, TRAJ4)
WVRDPTSNVPGGSNKLIF

SEQ ID NO: 764226 - protein, 13 aa, Homo sapiens
  CDR3 for beta chain variable domain of TCR clone 382113 (TRBV20-1, TRBJ1-2)
CSATGIQGSGYTF

SEQ ID NO: 764227 - protein, 18 aa, Homo sapiens
  CDR3 for alpha chain variable domain of TCR clone 382114 (TRAV21, TRAJ52)
CAVRPSPAGGTSYGKLTF

SEQ ID NO: 764228 - protein, 15 aa, Homo sapiens
  CDR3 for beta chain variable domain of TCR clone 382114 (TRBV11-3, TRBJ2-1)
CASSLGDSSHNEQFF

SEQ ID NO: 764229 - protein, 13 aa, Homo sapiens
  CDR3 for alpha chain variable domain of TCR clone 382115 (TRAV12-3, TRAJ54)
CALVPQGTQKLVF

SEQ ID NO: 764230 - protein, 15 aa, Homo sapiens
  CDR3 for beta chain variable domain of TCR clone 382115 (TRBV4-1, TRBJ2-2)
CASSQDSRGTGELFF

SEQ ID NO: 764231 - protein, 14 aa, Homo sapiens
  CDR3 for alpha chain variable domain of TCR clone 382116 (TRAV21, TRAJ15)
CAVSLNQAGTALIV

SEQ ID NO: 764232 - protein, 11 aa, Homo sapiens
  CDR3 for beta chain variable domain of TCR clone 382116 (TRBV20-1, TRBJ2-7)
CSARTSYEQYF

SEQ ID NO: 764233 - protein, 11 aa, Homo sapiens
  CDR3 for alpha chain variable domain of TCR clone 382117 (TRAV3, TRAJ21)
CAVGNFNKFYF

SEQ ID NO: 764234 - protein, 15 aa, Homo sapiens
  CDR3 for beta chain variable domain of TCR clone 382117 (TRBV6-3, TRBJ2-2)
CASSFLATLTGELFF

SEQ ID NO: 764235 - protein, 16 aa, Homo sapiens
  CDR3 for alpha chain variable domain of TCR clone 382118 (TRAV3, TRAJ37)
CAVRPHGSGNTGKLIF

SEQ ID NO: 764236 - protein, 16 aa, Homo sapiens
  CDR3 for beta chain variable domain of TCR clone 382118 (TRBV5-1, TRBJ2-2)
CASSSYREGDTGELFF

SEQ ID NO: 764237 - protein, 16 aa, Homo sapiens
  CDR3 for alpha chain variable domain of TCR clone 382119 (TRAV17, TRAJ52)
CATSNAGGTSYGKLTF

SEQ ID NO: 764238 - protein, 16 aa, Homo sapiens
  CDR3 for beta chain variable domain of TCR clone 382119 (TRBV28, TRBJ2-5)
CASSFSPAGGWETQYF

SEQ ID NO: 764239 - protein, 11 aa, Homo sapiens
  CDR3 for alpha chain variable domain of TCR clone 382120 (TRAV35, TRAJ30)
CAGPGDDKIIF

SEQ ID NO: 764240 - protein, 14 aa, Homo sapiens
  CDR3 for beta chain variable domain of TCR clone 382120 (TRBV7-6, TRBJ1-6)
CASSKAGGGSPLHF

SEQ ID NO: 764241 - protein, 16 aa, Homo sapiens
  CDR3 for alpha chain variable domain of TCR clone 382121 (TRAV12-2, TRAJ43)
CAGDDMRFGAGTRLTV

SEQ ID NO: 764242 - protein, 16 aa, Homo sapiens
  CDR3 for beta chain variable domain of TCR clone 382121 (TRBV12-5, TRBJ2-5)
CASGPRTSGNQETQYF

SEQ ID NO: 764243 - protein, 12 aa, Homo sapiens
  CDR3 for alpha chain variable domain of TCR clone 382122 (TRAV26-1, TRAJ35)
CIGLSFGNVLHC

SEQ ID NO: 764244 - protein, 17 aa, Homo sapiens
  CDR3 for beta chain variable domain of TCR clone 382122 (TRBV7-8, TRBJ2-6)
CASSAGTGGAGANVLTF

SEQ ID NO: 764245 - protein, 14 aa, Homo sapiens
  CDR3 for alpha chain variable domain of TCR clone 382123 (TRAV12-2, TRAJ40)
CAVKIPSGTYKYIS

SEQ ID NO: 764246 - protein, 14 aa, Homo sapiens
  CDR3 for beta chain variable domain of TCR clone 382123 (TRBV7-8, TRBJ2-7)
CASSPRDRVYEQYF

SEQ ID NO: 764247 - protein, 16 aa, Homo sapiens
  CDR3 for alpha chain variable domain of TCR clone 382124 (TRAV30, TRAJ24)
CGTEIVDADSWGKFPF

SEQ ID NO: 764248 - protein, 15 aa, Homo sapiens
  CDR3 for beta chain variable domain of TCR clone 382124 (TRBV12-4, TRBJ2-2)
CASSPNDSGTGELFF

SEQ ID NO: 764249 - protein, 14 aa, Homo sapiens
  CDR3 for alpha chain variable domain of TCR clone 382125 (TRAV12-2, TRAJ13)
CAVKKRGGYQKVTF

SEQ ID NO: 764250 - protein, 15 aa, Homo sapiens
  CDR3 for beta chain variable domain of TCR clone 382125 (TRBV27, TRBJ2-1)
CASSNGGGSSNEQFF

SEQ ID NO: 764251 - protein, 14 aa, Homo sapiens
  CDR3 for alpha chain variable domain of TCR clone 382126 (TRAV2, TRAJ9)
CAVEDRSGGFKTIF

SEQ ID NO: 764252 - protein, 12 aa, Homo sapiens
  CDR3 for beta chain variable domain of TCR clone 382126 (TRBV5-5, TRBJ2-5)
CASSYFGETQYF

SEQ ID NO: 764253 - protein, 15 aa, Homo sapiens
  CDR3 for alpha chain variable domain of TCR clone 382127 (TRAV8-4, TRAJ10)
CAVSDQMGGGNKLTF

SEQ ID NO: 764254 - protein, 12 aa, Homo sapiens
  CDR3 for beta chain variable domain of TCR clone 382127 (TRBV14, TRBJ2-7)
CQQPRPRYEQYF

SEQ ID NO: 764255 - protein, 13 aa, Homo sapiens
  CDR3 for alpha chain variable domain of TCR clone 382128 (TRAV20, TRAJ48)
CAVQGVGNEKLTF

SEQ ID NO: 764256 - protein, 14 aa, Homo sapiens
  CDR3 for beta chain variable domain of TCR clone 382128 (TRBV18, TRBJ2-7)
CASSPRGGAYEQYF

SEQ ID NO: 764257 - protein, 15 aa, Homo sapiens
  CDR3 for alpha chain variable domain of TCR clone 382129 (TRAV29/DV5, TRAJ48)
CAASLGGFGNEKLTF

SEQ ID NO: 764258 - protein, 11 aa, Homo sapiens
  CDR3 for beta chain variable domain of TCR clone 382129 (TRBV20-1, TRBJ2-3)
CIGTSSTTQYF

SEQ ID NO: 764259 - protein, 12 aa, Homo sapiens
  CDR3 for alpha chain variable domain of TCR clone 382130 (TRAV12-3, TRAJ17)
CAMTLTGNKLTF

SEQ ID NO: 764260 - protein, 13 aa, Homo sapiens
  CDR3 for beta chain variable domain of TCR clone 382130 (TRBV28, TRBJ2-7)
CAILDRAGGEQYF

SEQ ID NO: 764261 - protein, 16 aa, Homo sapiens
  CDR3 for alpha chain variable domain of TCR clone 382131 (TRAV14/DV4, TRAJ53)
CAMREGGGGSTYKLTF

SEQ ID NO: 764262 - protein, 14 aa, Homo sapiens
  CDR3 for beta chain variable domain of TCR clone 382131 (TRBV20-1, TRBJ2-7)
CSAKTGTGGYEQYF

SEQ ID NO: 764263 - protein, 14 aa, Homo sapiens
  CDR3 for alpha chain variable domain of TCR clone 382132 (TRAV17, TRAJ37)
CATDGSSNTGKLIF

SEQ ID NO: 764264 - protein, 16 aa, Homo sapiens
  CDR3 for beta chain variable domain of TCR clone 382132 (TRBV4-2, TRBJ2-3)
CASSQELAGDTDTQYF

SEQ ID NO: 764265 - protein, 21 aa, Homo sapiens
  CDR3 for alpha chain variable domain of TCR clone 382133 (TRAV36/DV7, TRAJ39)
TATQTGDSAIYLPNAGNMLTF

SEQ ID NO: 764266 - protein, 13 aa, Homo sapiens
  CDR3 for beta chain variable domain of TCR clone 382133 (TRBV15, TRBJ1-6)
CATSGGLNSPLHF

SEQ ID NO: 764267 - protein, 15 aa, Homo sapiens
  CDR3 for alpha chain variable domain of TCR clone 382134 (TRAV36/DV7, TRAJ54)
CAVEKPVQGAQKLVF

SEQ ID NO: 764268 - protein, 14 aa, Homo sapiens
  CDR3 for beta chain variable domain of TCR clone 382134 (TRBV20-1, TRBJ1-1)
CSAMGGTANTEAFF

SEQ ID NO: 764269 - protein, 16 aa, Homo sapiens
  CDR3 for alpha chain variable domain of TCR clone 382135 (TRAV12-2, TRAJ50)
CAVGTATKTSYDKVIF

SEQ ID NO: 764270 - protein, 13 aa, Homo sapiens
  CDR3 for beta chain variable domain of TCR clone 382135 (TRBV7-3, TRBJ1-1)
CASSQDWGAEAFF

SEQ ID NO: 764271 - protein, 17 aa, Homo sapiens
  CDR3 for alpha chain variable domain of TCR clone 382136 (TRAV16, TRAJ58)
CITVLPNGETSGSRLTF

SEQ ID NO: 764272 - protein, 17 aa, Homo sapiens
  CDR3 for beta chain variable domain of TCR clone 382136 (TRBV18, TRBJ2-1)
CGSSKGLSGGADNEQFF

SEQ ID NO: 764273 - protein, 15 aa, Homo sapiens
  CDR3 for alpha chain variable domain of TCR clone 382137 (TRAV17, TRAJ57)
CATGPSQGGSEKLVF

SEQ ID NO: 764274 - protein, 15 aa, Homo sapiens
  CDR3 for beta chain variable domain of TCR clone 382137 (TRBV9, TRBJ1-6)
CANSVAGTGDSPLHF

SEQ ID NO: 764275 - protein, 15 aa, Homo sapiens
  CDR3 for alpha chain variable domain of TCR clone 382138 (TRAV26-1, TRAJ44)
CIARVPFGTASKLTF

SEQ ID NO: 764276 - protein, 17 aa, Homo sapiens
  CDR3 for beta chain variable domain of TCR clone 382138 (TRBV24-1, TRBJ2-4)
CAISDAEARGVRNIQYF

SEQ ID NO: 764277 - protein, 15 aa, Homo sapiens
  CDR3 for alpha chain variable domain of TCR clone 382139 (TRAV1-2, TRAJ28)
CSVQYSGAGSYQLTF

SEQ ID NO: 764278 - protein, 13 aa, Homo sapiens
  CDR3 for beta chain variable domain of TCR clone 382139 (TRBV4-2, TRBJ1-1)
CASSQAGNTEAFF

SEQ ID NO: 764279 - protein, 13 aa, Homo sapiens
  CDR3 for alpha chain variable domain of TCR clone 382140 (TRAV8-3, TRAJ4)
WVVYSGGYNKLIL

SEQ ID NO: 764280 - protein, 16 aa, Homo sapiens
  CDR3 for beta chain variable domain of TCR clone 382140 (TRBV7-8, TRBJ2-3)
CASSTEGQRETDTQYF

SEQ ID NO: 764281 - protein, 13 aa, Homo sapiens
  CDR3 for alpha chain variable domain of TCR clone 382141 (TRAV3, TRAJ43)
CAVRARNNNDMRF

SEQ ID NO: 764282 - protein, 16 aa, Homo sapiens
  CDR3 for beta chain variable domain of TCR clone 382141 (TRBV7-9, TRBJ2-3)
CASSFSVAGGTDTQYF

SEQ ID NO: 764283 - protein, 13 aa, Homo sapiens
  CDR3 for alpha chain variable domain of TCR clone 382142 (TRAV8-3, TRAJ28)
CAVGAVGSYQLTF

SEQ ID NO: 764284 - protein, 16 aa, Homo sapiens
  CDR3 for beta chain variable domain of TCR clone 382142 (TRBV25-1, TRBJ1-1)
CASTHLGGNTEASLDK

SEQ ID NO: 764285 - protein, 10 aa, Homo sapiens
  CDR3 for alpha chain variable domain of TCR clone 382143 (TRAV12-3, TRAJ49)
CAMNDDKFYF

SEQ ID NO: 764286 - protein, 15 aa, Homo sapiens
  CDR3 for beta chain variable domain of TCR clone 382143 (TRBV6-3, TRBJ2-7)
CASSSPGTVFYEQYF

SEQ ID NO: 764287 - protein, 17 aa, Homo sapiens
  CDR3 for alpha chain variable domain of TCR clone 382144 (TRAV26-1, TRAJ58)
CIVRVGAEETSGSRLTF

SEQ ID NO: 764288 - protein, 14 aa, Homo sapiens
  CDR3 for beta chain variable domain of TCR clone 382144 (TRBV19, TRBJ2-1)
CASPTFVLSGEQFF

SEQ ID NO: 764289 - protein, 14 aa, Homo sapiens
  CDR3 for alpha chain variable domain of TCR clone 382145 (TRAV26-1, TRAJ38)
CIADNAGNNRKLIW

SEQ ID NO: 764290 - protein, 15 aa, Homo sapiens
  CDR3 for beta chain variable domain of TCR clone 382145 (TRBV7-7, TRBJ1-4)
CASSLGAGAGEKLFF

SEQ ID NO: 764291 - protein, 13 aa, Homo sapiens
  CDR3 for alpha chain variable domain of TCR clone 382146 (TRAV12-1, TRAJ38)
CVVPAGNNRKLIW

SEQ ID NO: 764292 - protein, 14 aa, Homo sapiens
  CDR3 for beta chain variable domain of TCR clone 382146 (TRBV25-1, TRBJ1-1)
CASTHLGGNTEAFF

SEQ ID NO: 764293 - protein, 11 aa, Homo sapiens
  CDR3 for alpha chain variable domain of TCR clone 382147 (TRAV3, TRAJ21)
CAVGNVNKFYF

SEQ ID NO: 764294 - protein, 14 aa, Homo sapiens
  CDR3 for beta chain variable domain of TCR clone 382147 (TRBV19, TRBJ2-1)
CASPTFVLSGEQFF

SEQ ID NO: 764295 - protein, 12 aa, Homo sapiens
  CDR3 for alpha chain variable domain of TCR clone 382148 (TRAV35, TRAJ39)
LAPNNAGNMLTF

SEQ ID NO: 764296 - protein, 14 aa, Homo sapiens
  CDR3 for beta chain variable domain of TCR clone 382148 (TRBV5-1, TRBJ1-1)
CASSLQGASTEAFF

SEQ ID NO: 764297 - protein, 14 aa, Homo sapiens
  CDR3 for alpha chain variable domain of TCR clone 382149 (TRAV17, TRAJ31)
CATVFRNNNARLMV

SEQ ID NO: 764298 - protein, 14 aa, Homo sapiens
  CDR3 for beta chain variable domain of TCR clone 382149 (TRBV12-4, TRBJ2-5)
CASSLWQKQETQYF

SEQ ID NO: 764299 - protein, 15 aa, Homo sapiens
  CDR3 for alpha chain variable domain of TCR clone 382150 (TRAV3, TRAJ13)
CAVRDRGGGYQKVTF

SEQ ID NO: 764300 - protein, 14 aa, Homo sapiens
  CDR3 for beta chain variable domain of TCR clone 382150 (TRBV4-1, TRBJ1-1)
CASSRSGQSFEAFF

SEQ ID NO: 764301 - protein, 11 aa, Homo sapiens
  CDR3 for alpha chain variable domain of TCR clone 382151 (TRAV12-1, TRAJ21)
CVVYNFNKFYF

SEQ ID NO: 764302 - protein, 14 aa, Homo sapiens
  CDR3 for beta chain variable domain of TCR clone 382151 (TRBV6-3, TRBJ2-5)
CASSYSGRLSGQYF

SEQ ID NO: 764303 - protein, 17 aa, Homo sapiens
  CDR3 for alpha chain variable domain of TCR clone 382152 (TRAV13-1, )
CAANIQNPGPAVYQLRD

SEQ ID NO: 764304 - protein, 14 aa, Homo sapiens
  CDR3 for beta chain variable domain of TCR clone 382152 (TRBV19, TRBJ2-7)
CASSIGPNSYEQYF

SEQ ID NO: 764305 - protein, 11 aa, Homo sapiens
  CDR3 for alpha chain variable domain of TCR clone 382153 (TRAV8-2, TRAJ26)
CVVTLLLGSEF

SEQ ID NO: 764306 - protein, 15 aa, Homo sapiens
  CDR3 for beta chain variable domain of TCR clone 382153 (TRBV11-2, TRBJ2-2)
CASSSYRVNAGELFF

SEQ ID NO: 764307 - protein, 14 aa, Homo sapiens
  CDR3 for alpha chain variable domain of TCR clone 382154 (TRAV2, TRAJ37)
CAVDFTSNTGKPIF

SEQ ID NO: 764308 - protein, 14 aa, Homo sapiens
  CDR3 for beta chain variable domain of TCR clone 382154 (TRBV7-2, TRBJ2-7)
CASRSQGAAYEQYF

SEQ ID NO: 764309 - protein, 22 aa, Homo sapiens
  CDR3 for alpha chain variable domain of TCR clone 382155 (TRAV21, )
CAVRQDAGSNHIQNPDPAVYQL

SEQ ID NO: 764310 - protein, 12 aa, Homo sapiens
  CDR3 for beta chain variable domain of TCR clone 382155 (TRBV2, TRBJ2-1)
CAYGPPGNEQFF

SEQ ID NO: 764311 - protein, 15 aa, Homo sapiens
  CDR3 for alpha chain variable domain of TCR clone 382156 (TRAV8-2, TRAJ28)
CVVSESGAGSYQLTF

SEQ ID NO: 764312 - protein, 11 aa, Homo sapiens
  CDR3 for beta chain variable domain of TCR clone 382156 (TRBV19, TRBJ2-5)
CASSIKETQYF

SEQ ID NO: 764313 - protein, 16 aa, Homo sapiens
  CDR3 for alpha chain variable domain of TCR clone 382157 (TRAV23/DV6, TRAJ48)
CAASGVVNFGNEELTF

SEQ ID NO: 764314 - protein, 15 aa, Homo sapiens
  CDR3 for beta chain variable domain of TCR clone 382157 (TRBV20-1, TRBJ2-5)
CSAGLAGVSQETQYF

SEQ ID NO: 764315 - protein, 13 aa, Homo sapiens
  CDR3 for alpha chain variable domain of TCR clone 382158 (TRAV20, TRAJ42)
CAVQGGSQGNLIF

SEQ ID NO: 764316 - protein, 15 aa, Homo sapiens
  CDR3 for beta chain variable domain of TCR clone 382158 (TRBV7-2, TRBJ2-1)
CASSSGLAGGNEQFF

SEQ ID NO: 764317 - protein, 15 aa, Homo sapiens
  CDR3 for alpha chain variable domain of TCR clone 382159 (TRAV3, TRAJ3)
CAVRDRDSSASKIIF

SEQ ID NO: 764318 - protein, 12 aa, Homo sapiens
  CDR3 for beta chain variable domain of TCR clone 382159 (TRBV29-1, TRBJ2-3)
CSVTGGAGTQYF

SEQ ID NO: 764319 - protein, 12 aa, Homo sapiens
  CDR3 for alpha chain variable domain of TCR clone 382160 (TRAV30, TRAJ39)
CGRGNAGNMLTF

SEQ ID NO: 764320 - protein, 15 aa, Homo sapiens
  CDR3 for beta chain variable domain of TCR clone 382160 (TRBV5-1, TRBJ1-1)
CASSWTGRGNTEALF

SEQ ID NO: 764321 - protein, 14 aa, Homo sapiens
  CDR3 for alpha chain variable domain of TCR clone 382161 (TRAV29/DV5, TRAJ20)
CAASAPIEDYKLSF

SEQ ID NO: 764322 - protein, 14 aa, Homo sapiens
  CDR3 for beta chain variable domain of TCR clone 382161 (TRBV19, TRBJ2-7)
CASTVQGRPYEQYF

SEQ ID NO: 764323 - protein, 16 aa, Homo sapiens
  CDR3 for alpha chain variable domain of TCR clone 382162 (TRAV17, TRAJ28)
CATALDSGAVIYQLTF

SEQ ID NO: 764324 - protein, 15 aa, Homo sapiens
  CDR3 for beta chain variable domain of TCR clone 382162 (TRBV12-4, TRBJ1-2)
CASSFEAGLGYGYTF

SEQ ID NO: 764325 - protein, 15 aa, Homo sapiens
  CDR3 for alpha chain variable domain of TCR clone 382163 (TRAV8-6, TRAJ11)
CAVNFMNSGYSTLPF

SEQ ID NO: 764326 - protein, 17 aa, Homo sapiens
  CDR3 for beta chain variable domain of TCR clone 382163 (TRBV3-1, TRBJ2-5)
CASSNWGGTSGQETQYF

SEQ ID NO: 764327 - protein, 12 aa, Homo sapiens
  CDR3 for alpha chain variable domain of TCR clone 382164 (TRAV13-1, TRAJ48)
CAANFGNEKLTF

SEQ ID NO: 764328 - protein, 14 aa, Homo sapiens
  CDR3 for beta chain variable domain of TCR clone 382164 (TRBV19, TRBJ2-1)
CASSRLASINEQFF

SEQ ID NO: 764329 - protein, 14 aa, Homo sapiens
  CDR3 for alpha chain variable domain of TCR clone 382165 (TRAV2, TRAJ9)
CAVEDRSGGLKTIF

SEQ ID NO: 764330 - protein, 15 aa, Homo sapiens
  CDR3 for beta chain variable domain of TCR clone 382165 (TRBV12-4, TRBJ2-5)
CASSLSGAFQETQYF

SEQ ID NO: 764331 - protein, 12 aa, Homo sapiens
  CDR3 for alpha chain variable domain of TCR clone 382166 (TRAV3, TRAJ7)
CADLLWERQTRF

SEQ ID NO: 764332 - protein, 18 aa, Homo sapiens
  CDR3 for beta chain variable domain of TCR clone 382166 (TRBV7-3, TRBJ2-5)
CASSFRGGGDPVLRARHA

SEQ ID NO: 764333 - protein, 13 aa, Homo sapiens
  CDR3 for alpha chain variable domain of TCR clone 382167 (TRAV20, TRAJ37)
CAGCSSNTGKLIF

SEQ ID NO: 764334 - protein, 21 aa, Homo sapiens
  CDR3 for beta chain variable domain of TCR clone 382167 (TRBV4-2, TRBJ2-3)
PCSQKTRPCISVPAASDTQYF

SEQ ID NO: 764335 - protein, 15 aa, Homo sapiens
  CDR3 for alpha chain variable domain of TCR clone 382168 (TRAV3, TRAJ45)
CAVRTPWGGADGLTF

SEQ ID NO: 764336 - protein, 15 aa, Homo sapiens
  CDR3 for beta chain variable domain of TCR clone 382168 (TRBV27, TRBJ2-1)
CASSNGGGSSNEQFF

SEQ ID NO: 764337 - protein, 13 aa, Homo sapiens
  CDR3 for alpha chain variable domain of TCR clone 382169 (TRAV3, TRAJ20)
CCEAFCNDYKLSF

SEQ ID NO: 764338 - protein, 16 aa, Homo sapiens
  CDR3 for beta chain variable domain of TCR clone 382169 (TRBV7-2, TRBJ2-5)
CASSPFPTGGEETQYF

SEQ ID NO: 764339 - protein, 17 aa, Homo sapiens
  CDR3 for alpha chain variable domain of TCR clone 382170 (TRAV3, TRAJ6)
CAVRDGPRAGGSSIPTF

SEQ ID NO: 764340 - protein, 20 aa, Homo sapiens
  CDR3 for beta chain variable domain of TCR clone 382170 (TRBV4-1, TRBJ2-2)
CASSQASPPGLASNTGELFF

SEQ ID NO: 764341 - protein, 14 aa, Homo sapiens
  CDR3 for alpha chain variable domain of TCR clone 382171 (TRAV9-2, TRAJ39)
CALYIYNAGNMLTF

SEQ ID NO: 764342 - protein, 14 aa, Homo sapiens
  CDR3 for beta chain variable domain of TCR clone 382171 (TRBV27, TRBJ1-2)
CASRNSRGGYGYSF

SEQ ID NO: 764343 - protein, 16 aa, Homo sapiens
  CDR3 for alpha chain variable domain of TCR clone 382172 (TRAV3, TRAJ18)
CAVRDGRGSTLGRLYF

SEQ ID NO: 764344 - protein, 15 aa, Homo sapiens
  CDR3 for beta chain variable domain of TCR clone 382172 (TRBV5-4, TRBJ2-3)
CASSLSGGRRDTQYF

SEQ ID NO: 764345 - protein, 14 aa, Homo sapiens
  CDR3 for alpha chain variable domain of TCR clone 382173 (TRAV1-1, TRAJ30)
CAVRSLNRDDRIIF

SEQ ID NO: 764346 - protein, 15 aa, Homo sapiens
  CDR3 for beta chain variable domain of TCR clone 382173 (TRBV27, TRBJ1-4)
CASSAQQDRNEKLFF

SEQ ID NO: 764347 - protein, 18 aa, Homo sapiens
  CDR3 for alpha chain variable domain of TCR clone 382174 (TRAV12-3, TRAJ52)
CAMSRNNAGGTSYGKLTF

SEQ ID NO: 764348 - protein, 17 aa, Homo sapiens
  CDR3 for beta chain variable domain of TCR clone 382174 (TRBV7-3, TRBJ2-3)
CASSLMKWMRGADTQYF

SEQ ID NO: 764349 - protein, 10 aa, Homo sapiens
  CDR3 for alpha chain variable domain of TCR clone 382175 (TRAV12-2, TRAJ20)
CAVYLYNLSF

SEQ ID NO: 764350 - protein, 16 aa, Homo sapiens
  CDR3 for beta chain variable domain of TCR clone 382175 (TRBV4-3, TRBJ1-6)
CASSAQPGGEGSPLHF

SEQ ID NO: 764351 - protein, 12 aa, Homo sapiens
  CDR3 for alpha chain variable domain of TCR clone 382176 (TRAV8-3, TRAJ26)
CAGDNYGQNFVF

SEQ ID NO: 764352 - protein, 19 aa, Homo sapiens
  CDR3 for beta chain variable domain of TCR clone 382176 (TRBV28, TRBJ2-7)
CASSYSGTSRLGWVYEQYF

SEQ ID NO: 764353 - protein, 16 aa, Homo sapiens
  CDR3 for alpha chain variable domain of TCR clone 382177 (TRAV3, TRAJ10)
CAVRDMRAGGGNKLTF

SEQ ID NO: 764354 - protein, 15 aa, Homo sapiens
  CDR3 for beta chain variable domain of TCR clone 382177 (TRBV20-1, TRBJ2-7)
CSARDRVSGMDEQYF

SEQ ID NO: 764355 - protein, 14 aa, Homo sapiens
  CDR3 for alpha chain variable domain of TCR clone 382178 (TRAV8-6, TRAJ52)
CALIGGTSYGKLTF

SEQ ID NO: 764356 - protein, 15 aa, Homo sapiens
  CDR3 for beta chain variable domain of TCR clone 382178 (TRBV11-2, TRBJ2-5)
CASSLGAGGVETQYF

SEQ ID NO: 764357 - protein, 14 aa, Homo sapiens
  CDR3 for alpha chain variable domain of TCR clone 382179 (TRAV14/DV4, TRAJ41)
CARGGRDSGYALNF

SEQ ID NO: 764358 - protein, 15 aa, Homo sapiens
  CDR3 for beta chain variable domain of TCR clone 382179 (TRBV19, TRBJ2-1)
CASSIQATSYNEQFF

SEQ ID NO: 764359 - protein, 12 aa, Homo sapiens
  CDR3 for alpha chain variable domain of TCR clone 382180 (TRAV12-2, TRAJ3)
CAVWSSASRIIF

SEQ ID NO: 764360 - protein, 12 aa, Homo sapiens
  CDR3 for beta chain variable domain of TCR clone 382180 (TRBV11-2, TRBJ2-1)
CASSPGNNEQFF

SEQ ID NO: 764361 - protein, 14 aa, Homo sapiens
  CDR3 for alpha chain variable domain of TCR clone 382181 (TRAV13-1, TRAJ9)
CAASRPSGGFKTIF

SEQ ID NO: 764362 - protein, 13 aa, Homo sapiens
  CDR3 for beta chain variable domain of TCR clone 382181 (TRBV7-9, TRBJ2-5)
CASTPVGQETQYF

SEQ ID NO: 764363 - protein, 13 aa, Homo sapiens
  CDR3 for alpha chain variable domain of TCR clone 382182 (TRAV8-3, TRAJ28)
CAVGAVGSYQLTF

SEQ ID NO: 764364 - protein, 13 aa, Homo sapiens
  CDR3 for beta chain variable domain of TCR clone 382182 (TRBV12-4, TRBJ2-1)
CASSSRAYNEQFF

SEQ ID NO: 764365 - protein, 14 aa, Homo sapiens
  CDR3 for alpha chain variable domain of TCR clone 382183 (TRAV13-2, TRAJ15)
CAENHNQAGTALIF

SEQ ID NO: 764366 - protein, 16 aa, Homo sapiens
  CDR3 for beta chain variable domain of TCR clone 382183 (TRBV12-4, TRBJ1-2)
CASSPTATGKTRGYTF

SEQ ID NO: 764367 - protein, 14 aa, Homo sapiens
  CDR3 for alpha chain variable domain of TCR clone 382184 (TRAV1-2, TRAJ16)
CAINRFSDGQKLLF

SEQ ID NO: 764368 - protein, 15 aa, Homo sapiens
  CDR3 for beta chain variable domain of TCR clone 382184 (TRBV27, TRBJ2-3)
CASSSLAGVIDTQYF

SEQ ID NO: 764369 - protein, 14 aa, Homo sapiens
  CDR3 for alpha chain variable domain of TCR clone 382185 (TRAV9-2, TRAJ39)
CVLYIYNAGNMLTF

SEQ ID NO: 764370 - protein, 15 aa, Homo sapiens
  CDR3 for beta chain variable domain of TCR clone 382185 (TRBV6-3, TRBJ2-7)
CASSSPGTVFYEQYF

SEQ ID NO: 764371 - protein, 13 aa, Homo sapiens
  CDR3 for alpha chain variable domain of TCR clone 382186 (TRAV20, TRAJ20)
CAVPALNDYKLSF

SEQ ID NO: 764372 - protein, 13 aa, Homo sapiens
  CDR3 for beta chain variable domain of TCR clone 382186 (TRBV7-9, TRBJ1-4)
CASSLPGIEKLFF

SEQ ID NO: 764373 - protein, 21 aa, Homo sapiens
  CDR3 for alpha chain variable domain of TCR clone 382187 (TRAV3, TRAJ30)
CAVRDRGDERSSLEKGHDFIF

SEQ ID NO: 764374 - protein, 16 aa, Homo sapiens
  CDR3 for beta chain variable domain of TCR clone 382187 (TRBV7-3, TRBJ2-2)
CASSLKRGTLSGELFF

SEQ ID NO: 764375 - protein, 13 aa, Homo sapiens
  CDR3 for alpha chain variable domain of TCR clone 382188 (TRAV21, TRAJ34)
CAVSEGDTDKLIF

SEQ ID NO: 764376 - protein, 17 aa, Homo sapiens
  CDR3 for beta chain variable domain of TCR clone 382188 (TRBV20-1, TRBJ1-5)
CSARAPSAQGFNQPQHF

SEQ ID NO: 764377 - protein, 10 aa, Homo sapiens
  CDR3 for alpha chain variable domain of TCR clone 382189 (TRAV12-1, TRAJ37)
ARGSTGELIF

SEQ ID NO: 764378 - protein, 15 aa, Homo sapiens
  CDR3 for beta chain variable domain of TCR clone 382189 (TRBV7-2, TRBJ2-3)
CASSLEQGGTDTQYF

SEQ ID NO: 764379 - protein, 14 aa, Homo sapiens
  CDR3 for alpha chain variable domain of TCR clone 382190 (TRAV17, TRAJ45)
CATASGGGADGLTF

SEQ ID NO: 764380 - protein, 16 aa, Homo sapiens
  CDR3 for beta chain variable domain of TCR clone 382190 (TRBV13, TRBJ2-2)
CASSPRTGEHTGELFF

SEQ ID NO: 764381 - protein, 11 aa, Homo sapiens
  CDR3 for alpha chain variable domain of TCR clone 382191 (TRAV27, TRAJ47)
CRSNQGNKLVF

SEQ ID NO: 764382 - protein, 15 aa, Homo sapiens
  CDR3 for beta chain variable domain of TCR clone 382191 (TRBV28, TRBJ2-5)
CASSPPWSYQETQYF

SEQ ID NO: 764383 - protein, 14 aa, Homo sapiens
  CDR3 for alpha chain variable domain of TCR clone 382192 (TRAV8-1, TRAJ4)
CAVKFSGGYNKLIF

SEQ ID NO: 764384 - protein, 22 aa, Homo sapiens
  CDR3 for beta chain variable domain of TCR clone 382192 (TRBV7-3, TRBJ2-5)
RASARDRVILRPRDPVLRARHA

SEQ ID NO: 764385 - protein, 16 aa, Homo sapiens
  CDR3 for alpha chain variable domain of TCR clone 382193 (TRAV30, TRAJ24)
CGTEIVDADSWGKFKF

SEQ ID NO: 764386 - protein, 19 aa, Homo sapiens
  CDR3 for beta chain variable domain of TCR clone 382193 (TRBV25-1, TRBJ2-2)
CAILVSRVDRGRKTGELFF

SEQ ID NO: 764387 - protein, 16 aa, Homo sapiens
  CDR3 for alpha chain variable domain of TCR clone 382194 (TRAV3, TRAJ32)
CAVSETYGGATNKLIF

SEQ ID NO: 764388 - protein, 12 aa, Homo sapiens
  CDR3 for beta chain variable domain of TCR clone 382194 (TRBV20-1, TRBJ1-2)
CSVTPEGYGYTF

SEQ ID NO: 764389 - protein, 14 aa, Homo sapiens
  CDR3 for alpha chain variable domain of TCR clone 382195 (TRAV13-2, TRAJ10)
CSETFTGGGNKLTF

SEQ ID NO: 764390 - protein, 16 aa, Homo sapiens
  CDR3 for beta chain variable domain of TCR clone 382195 (TRBV18, TRBJ2-7)
CASSPRSQGISYEQYF

SEQ ID NO: 764391 - protein, 13 aa, Homo sapiens
  CDR3 for alpha chain variable domain of TCR clone 382196 (TRAV2, TRAJ15)
CAVASQAGTALIF

SEQ ID NO: 764392 - protein, 15 aa, Homo sapiens
  CDR3 for beta chain variable domain of TCR clone 382196 (TRBV7-9, TRBJ1-5)
CAGSQGHQPNQPQHF

SEQ ID NO: 764393 - protein, 14 aa, Homo sapiens
  CDR3 for alpha chain variable domain of TCR clone 382197 (TRAV13-1, TRAJ9)
CAASALTVGFETIF

SEQ ID NO: 764394 - protein, 16 aa, Homo sapiens
  CDR3 for beta chain variable domain of TCR clone 382197 (TRBV7-8, TRBJ2-4)
CASSAERTLAKNIQYF

SEQ ID NO: 764395 - protein, 14 aa, Homo sapiens
  CDR3 for alpha chain variable domain of TCR clone 382198 (TRAV12-1, TRAJ17)
SVVNPKAAGNKLTF

SEQ ID NO: 764396 - protein, 16 aa, Homo sapiens
  CDR3 for beta chain variable domain of TCR clone 382198 (TRBV20-1, TRBJ2-1)
CSASASGYSSYNEQFF

SEQ ID NO: 764397 - protein, 18 aa, Homo sapiens
  CDR3 for alpha chain variable domain of TCR clone 382199 (TRAV26-2, TRAJ54)
CILRDVEVGIQGAQKLVF

SEQ ID NO: 764398 - protein, 17 aa, Homo sapiens
  CDR3 for beta chain variable domain of TCR clone 382199 (TRBV20-1, TRBJ1-5)
CSASSSPGQGGNQPQHF

SEQ ID NO: 764399 - protein, 10 aa, Homo sapiens
  CDR3 for alpha chain variable domain of TCR clone 382200 (TRAV12-1, TRAJ23)
CVVSGGKLIF

SEQ ID NO: 764400 - protein, 15 aa, Homo sapiens
  CDR3 for beta chain variable domain of TCR clone 382200 (TRBV5-1, TRBJ2-7)
CASSLNGGPAREQYF

SEQ ID NO: 764401 - protein, 15 aa, Homo sapiens
  CDR3 for alpha chain variable domain of TCR clone 382201 (TRAV17, TRAJ23)
CATDAEDKQGGKLIL

SEQ ID NO: 764402 - protein, 12 aa, Homo sapiens
  CDR3 for beta chain variable domain of TCR clone 382201 (TRBV2, TRBJ2-1)
CAKREGYNEQFF

SEQ ID NO: 764403 - protein, 17 aa, Homo sapiens
  CDR3 for alpha chain variable domain of TCR clone 382202 (TRAV20, TRAJ57)
CAVQAIVAQGVSEKLVF

SEQ ID NO: 764404 - protein, 13 aa, Homo sapiens
  CDR3 for beta chain variable domain of TCR clone 382202 (TRBV20-1, TRBJ2-5)
CSAFVGGGETQYF

SEQ ID NO: 764405 - protein, 16 aa, Homo sapiens
  CDR3 for alpha chain variable domain of TCR clone 382203 (TRAV8-6, TRAJ4)
CAVSPTFSGGYNKLLF

SEQ ID NO: 764406 - protein, 14 aa, Homo sapiens
  CDR3 for beta chain variable domain of TCR clone 382203 (TRBV29-1, TRBJ2-2)
CSVVTSGAPGELFF

SEQ ID NO: 764407 - protein, 15 aa, Homo sapiens
  CDR3 for alpha chain variable domain of TCR clone 382204 (TRAV34, TRAJ38)
CGADFTPGNNRKLIW

SEQ ID NO: 764408 - protein, 16 aa, Homo sapiens
  CDR3 for beta chain variable domain of TCR clone 382204 (TRBV13, TRBJ2-2)
CASSPRTGEHTGELFF

SEQ ID NO: 764409 - protein, 13 aa, Homo sapiens
  CDR3 for alpha chain variable domain of TCR clone 382205 (TRAV12-1, TRAJ39)
CVVNYNAGNMLTF

SEQ ID NO: 764410 - protein, 16 aa, Homo sapiens
  CDR3 for beta chain variable domain of TCR clone 382205 (TRBV7-3, TRBJ2-2)
CASSLKRGTLSGELFF

SEQ ID NO: 764411 - protein, 14 aa, Homo sapiens
  CDR3 for alpha chain variable domain of TCR clone 382206 (TRAV1-2, TRAJ8)
CAVREDTGFQKLVF

SEQ ID NO: 764412 - protein, 15 aa, Homo sapiens
  CDR3 for beta chain variable domain of TCR clone 382206 (TRBV20-1, TRBJ2-7)
CSARDRVSVMDEQYF

SEQ ID NO: 764413 - protein, 13 aa, Homo sapiens
  CDR3 for alpha chain variable domain of TCR clone 382207 (TRAV21, TRAJ53)
CAVRRGSNYKLTF

SEQ ID NO: 764414 - protein, 15 aa, Homo sapiens
  CDR3 for beta chain variable domain of TCR clone 382207 (TRBV28, TRBJ2-7)
CASSLVAGGPYEQYF

SEQ ID NO: 764415 - protein, 18 aa, Homo sapiens
  CDR3 for alpha chain variable domain of TCR clone 382208 (TRAV21, TRAJ52)
CAVRPSPAGGTSYGKLTF

SEQ ID NO: 764416 - protein, 15 aa, Homo sapiens
  CDR3 for beta chain variable domain of TCR clone 382208 (TRBV11-2, TRBJ1-3)
CAGSLDGTVGNTIYF

SEQ ID NO: 764417 - protein, 13 aa, Homo sapiens
  CDR3 for alpha chain variable domain of TCR clone 382209 (TRAV21, TRAJ27)
CAARPGNAGKSTF

SEQ ID NO: 764418 - protein, 16 aa, Homo sapiens
  CDR3 for beta chain variable domain of TCR clone 382209 (TRBV5-1, TRBJ2-1)
CASSHGLAGPQNEQFF

SEQ ID NO: 764419 - protein, 13 aa, Homo sapiens
  CDR3 for alpha chain variable domain of TCR clone 382210 (TRAV12-1, TRAJ31)
CVVNDNNNARLMF

SEQ ID NO: 764420 - protein, 16 aa, Homo sapiens
  CDR3 for beta chain variable domain of TCR clone 382210 (TRBV7-9, TRBJ1-2)
CASSLGFSSGEDGYTF

SEQ ID NO: 764421 - protein, 13 aa, Homo sapiens
  CDR3 for alpha chain variable domain of TCR clone 382211 (TRAV35, TRAJ26)
CAGRDNYGQNFVF

SEQ ID NO: 764422 - protein, 15 aa, Homo sapiens
  CDR3 for beta chain variable domain of TCR clone 382211 (TRBV6-5, TRBJ2-1)
CASSYLGRSYNEQFF

SEQ ID NO: 764423 - protein, 15 aa, Homo sapiens
  CDR3 for alpha chain variable domain of TCR clone 382212 (TRAV17, TRAJ57)
CATGSSQGGSEKLVF

SEQ ID NO: 764424 - protein, 18 aa, Homo sapiens
  CDR3 for beta chain variable domain of TCR clone 382212 (TRBV7-9, TRBJ2-7)
CASSLTTSGSRTWYEQYF

SEQ ID NO: 764425 - protein, 15 aa, Homo sapiens
  CDR3 for alpha chain variable domain of TCR clone 382213 (TRAV26-1, TRAJ22)
CIVRVSFWSCKATDL

SEQ ID NO: 764426 - protein, 16 aa, Homo sapiens
  CDR3 for beta chain variable domain of TCR clone 382213 (TRBV24-1, TRBJ2-3)
CATSDPGTGATDTQYF

SEQ ID NO: 764427 - protein, 14 aa, Homo sapiens
  CDR3 for alpha chain variable domain of TCR clone 382214 (TRAV1-2, TRAJ16)
YAVNRFSDGQKLLF

SEQ ID NO: 764428 - protein, 12 aa, Homo sapiens
  CDR3 for beta chain variable domain of TCR clone 382214 (TRBV2, TRBJ2-1)
CAYGPPGNEQFF

SEQ ID NO: 764429 - protein, 14 aa, Homo sapiens
  CDR3 for alpha chain variable domain of TCR clone 382215 (TRAV13-1, TRAJ23)
CAASRLGRGGKLIF

SEQ ID NO: 764430 - protein, 13 aa, Homo sapiens
  CDR3 for beta chain variable domain of TCR clone 382215 (TRBV20-1, TRBJ1-1)
CSAPLGGGTEAVF

SEQ ID NO: 764431 - protein, 15 aa, Homo sapiens
  CDR3 for alpha chain variable domain of TCR clone 382216 (TRAV26-1, TRAJ3)
CIVRSGYSSDSKIIF

SEQ ID NO: 764432 - protein, 14 aa, Homo sapiens
  CDR3 for beta chain variable domain of TCR clone 382216 (TRBV13, TRBJ2-5)
CASYRRLAEETQYF

SEQ ID NO: 764433 - protein, 11 aa, Homo sapiens
  CDR3 for alpha chain variable domain of TCR clone 382217 (TRAV23/DV6, TRAJ48)
CAPRWGEKLTF

SEQ ID NO: 764434 - protein, 14 aa, Homo sapiens
  CDR3 for beta chain variable domain of TCR clone 382217 (TRBV12-5, TRBJ2-5)
CASGSRTHQETQYF

SEQ ID NO: 764435 - protein, 13 aa, Homo sapiens
  CDR3 for alpha chain variable domain of TCR clone 382218 (TRAV8-2, TRAJ36)
CVLSHLPTNNLFF

SEQ ID NO: 764436 - protein, 18 aa, Homo sapiens
  CDR3 for beta chain variable domain of TCR clone 382218 (TRBV7-9, TRBJ2-6)
CASSFPGAGISGANVLTF

SEQ ID NO: 764437 - protein, 14 aa, Homo sapiens
  CDR3 for alpha chain variable domain of TCR clone 382219 (TRAV23/DV6, TRAJ12)
CAASRMDSSYKLIF

SEQ ID NO: 764438 - protein, 17 aa, Homo sapiens
  CDR3 for beta chain variable domain of TCR clone 382219 (TRBV7-8, TRBJ2-6)
CASSAGTGGAGANVLAF

SEQ ID NO: 764439 - protein, 17 aa, Homo sapiens
  CDR3 for alpha chain variable domain of TCR clone 382220 (TRAV21, TRAJ24)
CAGIRLRSTDSWGKLQC

SEQ ID NO: 764440 - protein, 15 aa, Homo sapiens
  CDR3 for beta chain variable domain of TCR clone 382220 (TRBV7-2, TRBJ2-3)
CASSPRGLSTDTQYF

SEQ ID NO: 764441 - protein, 14 aa, Homo sapiens
  CDR3 for alpha chain variable domain of TCR clone 382221 (TRAV13-2, TRAJ42)
CGEWVGGSQGNLIC

SEQ ID NO: 764442 - protein, 14 aa, Homo sapiens
  CDR3 for beta chain variable domain of TCR clone 382221 (TRBV11-2, TRBJ1-5)
CASSSRTGNQPQHF

SEQ ID NO: 764443 - protein, 10 aa, Homo sapiens
  CDR3 for alpha chain variable domain of TCR clone 382222 (TRAV12-2, TRAJ43)
CAVKVLSMRL

SEQ ID NO: 764444 - protein, 14 aa, Homo sapiens
  CDR3 for beta chain variable domain of TCR clone 382222 (TRBV11-2, TRBJ2-7)
CASSLGNSLYEQYF

SEQ ID NO: 764445 - protein, 13 aa, Homo sapiens
  CDR3 for alpha chain variable domain of TCR clone 382223 (TRAV8-2, TRAJ43)
CVVSDQGTMKCAL

SEQ ID NO: 764446 - protein, 12 aa, Homo sapiens
  CDR3 for beta chain variable domain of TCR clone 382223 (TRBV7-9, TRBJ2-7)
CASRTGFDEQYF

SEQ ID NO: 764447 - protein, 13 aa, Homo sapiens
  CDR3 for alpha chain variable domain of TCR clone 382224 (TRAV9-2, TRAJ53)
CALSGGSNYKLTF

SEQ ID NO: 764448 - protein, 17 aa, Homo sapiens
  CDR3 for beta chain variable domain of TCR clone 382224 (TRBV11-2, TRBJ2-1)
CASSLYPPGVEYNQQFF

SEQ ID NO: 764449 - protein, 14 aa, Homo sapiens
  CDR3 for alpha chain variable domain of TCR clone 382225 (TRAV8-6, TRAJ36)
CAVSEKDGANNLFF

SEQ ID NO: 764450 - protein, 13 aa, Homo sapiens
  CDR3 for beta chain variable domain of TCR clone 382225 (TRBV19, TRBJ1-2)
CASSGPGQDGYTF

SEQ ID NO: 764451 - protein, 18 aa, Homo sapiens
  CDR3 for alpha chain variable domain of TCR clone 382226 (TRAV3, TRAJ10)
CAVRDPRGLTGGGNKLTF

SEQ ID NO: 764452 - protein, 14 aa, Homo sapiens
  CDR3 for beta chain variable domain of TCR clone 382226 (TRBV2, TRBJ2-5)
CASKRDGTTETQYF

SEQ ID NO: 764453 - protein, 15 aa, Homo sapiens
  CDR3 for alpha chain variable domain of TCR clone 382227 (TRAV38-1, TRAJ37)
CAFIHGSGNTGKLIF

SEQ ID NO: 764454 - protein, 14 aa, Homo sapiens
  CDR3 for beta chain variable domain of TCR clone 382227 (TRBV7-3, TRBJ1-1)
CASSLKGGNTEAFF

SEQ ID NO: 764455 - protein, 12 aa, Homo sapiens
  CDR3 for alpha chain variable domain of TCR clone 382228 (TRAV12-3, TRAJ40)
CAMSSGTYKYIF

SEQ ID NO: 764456 - protein, 17 aa, Homo sapiens
  CDR3 for beta chain variable domain of TCR clone 382228 (TRBV7-2, TRBJ2-1)
CASSRGTSGAVGWEQFF

SEQ ID NO: 764457 - protein, 12 aa, Homo sapiens
  CDR3 for alpha chain variable domain of TCR clone 382229 (TRAV12-3, TRAJ54)
CGAYRGAQKLVF

SEQ ID NO: 764458 - protein, 15 aa, Homo sapiens
  CDR3 for beta chain variable domain of TCR clone 382229 (TRBV27, TRBJ2-1)
CASSLAGGPFNEQFF

SEQ ID NO: 764459 - protein, 15 aa, Homo sapiens
  CDR3 for alpha chain variable domain of TCR clone 382230 (TRAV8-4, TRAJ37)
CAVSTRSGNTGKLII

SEQ ID NO: 764460 - protein, 20 aa, Homo sapiens
  CDR3 for beta chain variable domain of TCR clone 382230 (TRBV7-8, TRBJ2-2)
CASSHLFPGPTIHLTGELFF

SEQ ID NO: 764461 - protein, 13 aa, Homo sapiens
  CDR3 for alpha chain variable domain of TCR clone 382231 (TRAV17, TRAJ26)
CATVDDYGQNFVF

SEQ ID NO: 764462 - protein, 14 aa, Homo sapiens
  CDR3 for beta chain variable domain of TCR clone 382231 (TRBV6-1, TRBJ1-3)
CASVQGGGGNTIYF

SEQ ID NO: 764463 - protein, 18 aa, Homo sapiens
  CDR3 for alpha chain variable domain of TCR clone 382232 (TRAV21, TRAJ52)
CAVRPSSAGGTSYGKLTF

SEQ ID NO: 764464 - protein, 16 aa, Homo sapiens
  CDR3 for beta chain variable domain of TCR clone 382232 (TRBV20-1, TRBJ1-4)
CSAPGQGLLTNEKLFF

SEQ ID NO: 764465 - protein, 13 aa, Homo sapiens
  CDR3 for alpha chain variable domain of TCR clone 382233 (TRAV21, TRAJ27)
CAARPGNAGKLTF

SEQ ID NO: 764466 - protein, 20 aa, Homo sapiens
  CDR3 for beta chain variable domain of TCR clone 382233 (TRBV4-2, TRBJ2-7)
CASSQASGGNLRAVLRAGHQ

SEQ ID NO: 764467 - protein, 15 aa, Homo sapiens
  CDR3 for alpha chain variable domain of TCR clone 382234 (TRAV2, TRAJ15)
CAVEDREQAGTALIF

SEQ ID NO: 764468 - protein, 14 aa, Homo sapiens
  CDR3 for beta chain variable domain of TCR clone 382234 (TRBV20-1, TRBJ2-1)
CSAQIGGSANEQFF

SEQ ID NO: 764469 - protein, 12 aa, Homo sapiens
  CDR3 for alpha chain variable domain of TCR clone 382235 (TRAV12-3, TRAJ17)
CAMTLTGNKLTF

SEQ ID NO: 764470 - protein, 15 aa, Homo sapiens
  CDR3 for beta chain variable domain of TCR clone 382235 (TRBV20-1, TRBJ2-7)
CSARDWVSGMDEQCF

SEQ ID NO: 764471 - protein, 13 aa, Homo sapiens
  CDR3 for alpha chain variable domain of TCR clone 382236 (TRAV26-2, TRAJ43)
CVLRAVNNNDMRF

SEQ ID NO: 764472 - protein, 11 aa, Homo sapiens
  CDR3 for beta chain variable domain of TCR clone 382236 (TRBV20-1, TRBJ2-7)
CSAQTGYEQYF

SEQ ID NO: 764473 - protein, 18 aa, Homo sapiens
  CDR3 for alpha chain variable domain of TCR clone 382237 (TRAV21, TRAJ52)
CALRPSPAGGTSYGKLTF

SEQ ID NO: 764474 - protein, 12 aa, Homo sapiens
  CDR3 for beta chain variable domain of TCR clone 382237 (TRBV11-2, TRBJ2-2)
CASSLGGGELFF

SEQ ID NO: 764475 - protein, 11 aa, Homo sapiens
  CDR3 for alpha chain variable domain of TCR clone 382238 (TRAV16, TRAJ20)
CALSEGFKAAL

SEQ ID NO: 764476 - protein, 13 aa, Homo sapiens
  CDR3 for beta chain variable domain of TCR clone 382238 (TRBV19, TRBJ1-2)
CASSVPGQDGYTF

SEQ ID NO: 764477 - protein, 14 aa, Homo sapiens
  CDR3 for alpha chain variable domain of TCR clone 382239 (TRAV13-1, TRAJ9)
CAASALTGGFKTIF

SEQ ID NO: 764478 - protein, 14 aa, Homo sapiens
  CDR3 for beta chain variable domain of TCR clone 382239 (TRBV6-3, TRBJ2-5)
CASLWAGGTETQYF

SEQ ID NO: 764479 - protein, 17 aa, Homo sapiens
  CDR3 for alpha chain variable domain of TCR clone 382240 (TRAV4, TRAJ18)
CLVGERSGGSTLGRLYF

SEQ ID NO: 764480 - protein, 15 aa, Homo sapiens
  CDR3 for beta chain variable domain of TCR clone 382240 (TRBV7-3, TRBJ2-2)
CASSETGQGTGELFF

SEQ ID NO: 764481 - protein, 10 aa, Homo sapiens
  CDR3 for alpha chain variable domain of TCR clone 382241 (TRAV5, TRAJ34)
CAEDTDKLIF

SEQ ID NO: 764482 - protein, 13 aa, Homo sapiens
  CDR3 for beta chain variable domain of TCR clone 382241 (TRBV20-1, TRBJ1-1)
CSARGGGNTEAFF

SEQ ID NO: 764483 - protein, 14 aa, Homo sapiens
  CDR3 for alpha chain variable domain of TCR clone 382242 (TRAV8-1, TRAJ5)
CAVRTDTGRRALTF

SEQ ID NO: 764484 - protein, 14 aa, Homo sapiens
  CDR3 for beta chain variable domain of TCR clone 382242 (TRBV5-5, TRBJ1-2)
CASSLDAYNYGYAF

SEQ ID NO: 764485 - protein, 14 aa, Homo sapiens
  CDR3 for alpha chain variable domain of TCR clone 382243 (TRAV30, TRAJ33)
CGTVAPRSNYQLIW

SEQ ID NO: 764486 - protein, 13 aa, Homo sapiens
  CDR3 for beta chain variable domain of TCR clone 382243 (TRBV7-6, TRBJ2-3)
CASSLRSDNTQYF

SEQ ID NO: 764487 - protein, 14 aa, Homo sapiens
  CDR3 for alpha chain variable domain of TCR clone 382244 (TRAV26-1, TRAJ16)
CIVRVPSDGQKLLF

SEQ ID NO: 764488 - protein, 17 aa, Homo sapiens
  CDR3 for beta chain variable domain of TCR clone 382244 (TRBV11-2, TRBJ2-1)
CASSLYPPGVEYNEQFF

SEQ ID NO: 764489 - protein, 10 aa, Homo sapiens
  CDR3 for alpha chain variable domain of TCR clone 382245 (TRAV8-4, TRAJ43)
GAVSADDMRF

SEQ ID NO: 764490 - protein, 13 aa, Homo sapiens
  CDR3 for beta chain variable domain of TCR clone 382245 (TRBV12-4, TRBJ2-5)
CASSPGTEETQYF

SEQ ID NO: 764491 - protein, 13 aa, Homo sapiens
  CDR3 for alpha chain variable domain of TCR clone 382246 (TRAV3, TRAJ16)
CAVRARNGQKLLF

SEQ ID NO: 764492 - protein, 15 aa, Homo sapiens
  CDR3 for beta chain variable domain of TCR clone 382246 (TRBV5-1, TRBJ2-1)
CASSPPRAPYNEQFF

SEQ ID NO: 764493 - protein, 13 aa, Homo sapiens
  CDR3 for alpha chain variable domain of TCR clone 382247 (TRAV16, TRAJ58)
CALSIPSGSRLTF

SEQ ID NO: 764494 - protein, 14 aa, Homo sapiens
  CDR3 for beta chain variable domain of TCR clone 382247 (TRBV12-4, TRBJ1-1)
CASSLGTGGTEAFF

SEQ ID NO: 764495 - protein, 14 aa, Homo sapiens
  CDR3 for alpha chain variable domain of TCR clone 382248 (TRAV12-3, TRAJ13)
CAMRNSGGYQKVTF

SEQ ID NO: 764496 - protein, 14 aa, Homo sapiens
  CDR3 for beta chain variable domain of TCR clone 382248 (TRBV4-1, TRBJ1-6)
CASSPGSDSSHHHF

SEQ ID NO: 764497 - protein, 12 aa, Homo sapiens
  CDR3 for alpha chain variable domain of TCR clone 382249 (TRAV20, TRAJ20)
CAVRFNDYKLSF

SEQ ID NO: 764498 - protein, 13 aa, Homo sapiens
  CDR3 for beta chain variable domain of TCR clone 382249 (TRBV4-2, TRBJ1-1)
CASSQAGNTEAFF

SEQ ID NO: 764499 - protein, 14 aa, Homo sapiens
  CDR3 for alpha chain variable domain of TCR clone 382250 (TRAV13-1, TRAJ44)
CAAKATGTASKLTF

SEQ ID NO: 764500 - protein, 13 aa, Homo sapiens
  CDR3 for beta chain variable domain of TCR clone 382250 (TRBV19, TRBJ2-2)
CASSGRGTGELFF

SEQ ID NO: 764501 - protein, 11 aa, Homo sapiens
  CDR3 for alpha chain variable domain of TCR clone 382251 (TRAV12-1, TRAJ21)
CVVNNFNKFYF

SEQ ID NO: 764502 - protein, 14 aa, Homo sapiens
  CDR3 for beta chain variable domain of TCR clone 382251 (TRBV15, TRBJ1-5)
CATSREQSNQPQHC

SEQ ID NO: 764503 - protein, 14 aa, Homo sapiens
  CDR3 for alpha chain variable domain of TCR clone 382252 (TRAV1-2, TRAJ8)
CAVREDTGFQKLGF

SEQ ID NO: 764504 - protein, 14 aa, Homo sapiens
  CDR3 for beta chain variable domain of TCR clone 382252 (TRBV29-1, TRBJ2-3)
CSAGAGVGADTQYF

SEQ ID NO: 764505 - protein, 15 aa, Homo sapiens
  CDR3 for alpha chain variable domain of TCR clone 382253 (TRAV8-3, TRAJ13)
CAVAPNSGGYQKVTF

SEQ ID NO: 764506 - protein, 16 aa, Homo sapiens
  CDR3 for beta chain variable domain of TCR clone 382253 (TRBV19, TRBJ2-2)
CASQSPGTGATGELFF

SEQ ID NO: 764507 - protein, 18 aa, Homo sapiens
  CDR3 for alpha chain variable domain of TCR clone 382254 (TRAV26-1, TRAJ56)
CIVRVASRVTGANSKLTL

SEQ ID NO: 764508 - protein, 15 aa, Homo sapiens
  CDR3 for beta chain variable domain of TCR clone 382254 (TRBV7-9, TRBJ2-5)
CASSDTGRGRETQYF

SEQ ID NO: 764509 - protein, 20 aa, Homo sapiens
  CDR3 for alpha chain variable domain of TCR clone 382255 (TRAV1-2, TRAJ8)
CAVREDTGFRNLYLELAPDF

SEQ ID NO: 764510 - protein, 15 aa, Homo sapiens
  CDR3 for beta chain variable domain of TCR clone 382255 (TRBV6-3, TRBJ2-7)
CASSSPGTVFYEKYF

SEQ ID NO: 764511 - protein, 13 aa, Homo sapiens
  CDR3 for alpha chain variable domain of TCR clone 382256 (TRAV27, TRAJ49)
CAQRPYTGNQFYF

SEQ ID NO: 764512 - protein, 13 aa, Homo sapiens
  CDR3 for beta chain variable domain of TCR clone 382256 (TRBV20-1, TRBJ1-1)
CSAPLGGGTEAFF

SEQ ID NO: 764513 - protein, 15 aa, Homo sapiens
  CDR3 for alpha chain variable domain of TCR clone 382257 (TRAV21, TRAJ53)
CATLNSGGSNYKLTF

SEQ ID NO: 764514 - protein, 16 aa, Homo sapiens
  CDR3 for beta chain variable domain of TCR clone 382257 (TRBV6-6, TRBJ2-4)
CASSNAGQGAKNIQYF

SEQ ID NO: 764515 - protein, 14 aa, Homo sapiens
  CDR3 for alpha chain variable domain of TCR clone 382258 (TRAV8-4, TRAJ13)
CAATLSGGYQKVTF

SEQ ID NO: 764516 - protein, 14 aa, Homo sapiens
  CDR3 for beta chain variable domain of TCR clone 382258 (TRBV7-2, TRBJ1-2)
CASSQTGSTYGYTF

SEQ ID NO: 764517 - protein, 14 aa, Homo sapiens
  CDR3 for alpha chain variable domain of TCR clone 382259 (TRAV8-1, TRAJ5)
CAGRTDTGRRALTF

SEQ ID NO: 764518 - protein, 15 aa, Homo sapiens
  CDR3 for beta chain variable domain of TCR clone 382259 (TRBV28, TRBJ1-2)
CASSLWQPTNYGYTF

SEQ ID NO: 764519 - protein, 16 aa, Homo sapiens
  CDR3 for alpha chain variable domain of TCR clone 382260 (TRAV12-2, TRAJ32)
CAVNLGQGGATNKLIF

SEQ ID NO: 764520 - protein, 12 aa, Homo sapiens
  CDR3 for beta chain variable domain of TCR clone 382260 (TRBV29-1, TRBJ2-3)
FSVTGGADTQYF

SEQ ID NO: 764521 - protein, 18 aa, Homo sapiens
  CDR3 for alpha chain variable domain of TCR clone 382261 (TRAV3, TRAJ17)
CAVRARRGGRSCSQQANF

SEQ ID NO: 764522 - protein, 14 aa, Homo sapiens
  CDR3 for beta chain variable domain of TCR clone 382261 (TRBV4-1, TRBJ2-2)
CASSQAVNTGELFF

SEQ ID NO: 764523 - protein, 12 aa, Homo sapiens
  CDR3 for alpha chain variable domain of TCR clone 382262 (TRAV12-3, TRAJ17)
FAMTLKGNKLTF

SEQ ID NO: 764524 - protein, 15 aa, Homo sapiens
  CDR3 for beta chain variable domain of TCR clone 382262 (TRBV20-1, TRBJ2-7)
CSARDRVSGMDEQYF

SEQ ID NO: 764525 - protein, 12 aa, Homo sapiens
  CDR3 for alpha chain variable domain of TCR clone 382263 (TRAV1-1, TRAJ9)
CAVDTGGFKTIF

SEQ ID NO: 764526 - protein, 12 aa, Homo sapiens
  CDR3 for beta chain variable domain of TCR clone 382263 (TRBV5-4, TRBJ2-7)
CASSLEAYEQYF

SEQ ID NO: 764527 - protein, 13 aa, Homo sapiens
  CDR3 for alpha chain variable domain of TCR clone 382264 (TRAV8-6, TRAJ49)
CAVITNTGNQFYF

SEQ ID NO: 764528 - protein, 16 aa, Homo sapiens
  CDR3 for beta chain variable domain of TCR clone 382264 (TRBV11-2, TRBJ2-3)
CASSSRTSGGAGTQYF

SEQ ID NO: 764529 - protein, 14 aa, Homo sapiens
  CDR3 for alpha chain variable domain of TCR clone 382265 (TRAV23/DV6, TRAJ27)
CAASRDTNAGKSTF

SEQ ID NO: 764530 - protein, 13 aa, Homo sapiens
  CDR3 for beta chain variable domain of TCR clone 382265 (TRBV20-1, TRBJ1-5)
CSASVRGNQPQHF

SEQ ID NO: 764531 - protein, 12 aa, Homo sapiens
  CDR3 for alpha chain variable domain of TCR clone 382266 (TRAV25, TRAJ35)
CAGIGFGNVLHC

SEQ ID NO: 764532 - protein, 17 aa, Homo sapiens
  CDR3 for beta chain variable domain of TCR clone 382266 (TRBV7-8, TRBJ2-6)
CASSAGTGGAGANVLTF

SEQ ID NO: 764533 - protein, 12 aa, Homo sapiens
  CDR3 for alpha chain variable domain of TCR clone 382267 (TRAV12-1, TRAJ23)
CVVNIPGGKLIF

SEQ ID NO: 764534 - protein, 15 aa, Homo sapiens
  CDR3 for beta chain variable domain of TCR clone 382267 (TRBV6-3, TRBJ2-7)
CASSSPGTVCYEQYF

SEQ ID NO: 764535 - protein, 15 aa, Homo sapiens
  CDR3 for alpha chain variable domain of TCR clone 382268 (TRAV26-1, TRAJ48)
CTVRVGDFGNEKLTF

SEQ ID NO: 764536 - protein, 16 aa, Homo sapiens
  CDR3 for beta chain variable domain of TCR clone 382268 (TRBV4-1, TRBJ2-3)
CASSQRAGGLTDTQYF

SEQ ID NO: 764537 - protein, 15 aa, Homo sapiens
  CDR3 for alpha chain variable domain of TCR clone 382269 (TRAV13-1, TRAJ8)
CAASIPNTGFQKLVF

SEQ ID NO: 764538 - protein, 15 aa, Homo sapiens
  CDR3 for beta chain variable domain of TCR clone 382269 (TRBV6-1, TRBJ2-6)
CASSSRPSGANVLTF

SEQ ID NO: 764539 - protein, 15 aa, Homo sapiens
  CDR3 for alpha chain variable domain of TCR clone 382270 (TRAV35, TRAJ58)
CAGRRQETSGSRLTF

SEQ ID NO: 764540 - protein, 10 aa, Homo sapiens
  CDR3 for beta chain variable domain of TCR clone 382270 (TRBV23-1, TRBJ2-7)
NDSTSYEQYF

SEQ ID NO: 764541 - protein, 22 aa, Homo sapiens
  CDR3 for alpha chain variable domain of TCR clone 382271 (TRAV27, TRAJ38)
CAARRNAGNNHIQNPDPAVYQL

SEQ ID NO: 764542 - protein, 13 aa, Homo sapiens
  CDR3 for beta chain variable domain of TCR clone 382271 (TRBV12-5, TRBJ2-3)
CARGDRQSDTQYF

SEQ ID NO: 764543 - protein, 13 aa, Homo sapiens
  CDR3 for alpha chain variable domain of TCR clone 382272 (TRAV21, TRAJ57)
CAVTQGGSEKLVL

SEQ ID NO: 764544 - protein, 16 aa, Homo sapiens
  CDR3 for beta chain variable domain of TCR clone 382272 (TRBV29-1, TRBJ2-7)
CSVEDAEDGTAYEQHF

SEQ ID NO: 764545 - protein, 12 aa, Homo sapiens
  CDR3 for alpha chain variable domain of TCR clone 382273 (TRAV12-1, TRAJ30)
CVVNPRDDKIIF

SEQ ID NO: 764546 - protein, 17 aa, Homo sapiens
  CDR3 for beta chain variable domain of TCR clone 382273 (TRBV20-1, TRBJ2-1)
CSASSSGLAGSYNEQFF

SEQ ID NO: 764547 - protein, 15 aa, Homo sapiens
  CDR3 for alpha chain variable domain of TCR clone 382274 (TRAV26-1, TRAJ29)
CIVRVTNSGNTPLAF

SEQ ID NO: 764548 - protein, 16 aa, Homo sapiens
  CDR3 for beta chain variable domain of TCR clone 382274 (TRBV12-5, TRBJ2-5)
CASGPRTSGNQETQYF

SEQ ID NO: 764549 - protein, 16 aa, Homo sapiens
  CDR3 for alpha chain variable domain of TCR clone 382275 (TRAV3, TRAJ37)
CALRGKGSGNTGKLIF

SEQ ID NO: 764550 - protein, 15 aa, Homo sapiens
  CDR3 for beta chain variable domain of TCR clone 382275 (TRBV7-3, TRBJ2-2)
CASSETGQGTGELFF

SEQ ID NO: 764551 - protein, 16 aa, Homo sapiens
  CDR3 for alpha chain variable domain of TCR clone 382276 (TRAV8-3, TRAJ42)
CAVGEGNGGSQGNLIF

SEQ ID NO: 764552 - protein, 12 aa, Homo sapiens
  CDR3 for beta chain variable domain of TCR clone 382276 (TRBV28, TRBJ2-3)
CASSLYRDTQYF

SEQ ID NO: 764553 - protein, 15 aa, Homo sapiens
  CDR3 for alpha chain variable domain of TCR clone 382277 (TRAV12-1, TRAJ44)
CVADLPTGTASKLTF

SEQ ID NO: 764554 - protein, 13 aa, Homo sapiens
  CDR3 for beta chain variable domain of TCR clone 382277 (TRBV6-5, TRBJ2-5)
CASSRQGGETQYF

SEQ ID NO: 764555 - protein, 12 aa, Homo sapiens
  CDR3 for alpha chain variable domain of TCR clone 382278 (TRAV13-2, TRAJ32)
RVYGGATNKLIF

SEQ ID NO: 764556 - protein, 16 aa, Homo sapiens
  CDR3 for beta chain variable domain of TCR clone 382278 (TRBV7-9, TRBJ1-2)
CASSISFDRGGYGYTF

SEQ ID NO: 764557 - protein, 14 aa, Homo sapiens
  CDR3 for alpha chain variable domain of TCR clone 382279 (TRAV26-1, TRAJ22)
CIVRVYGSARQLTF

SEQ ID NO: 764558 - protein, 17 aa, Homo sapiens
  CDR3 for beta chain variable domain of TCR clone 382279 (TRBV7-3, TRBJ2-3)
CASSPGGVAGFGDTQYF

SEQ ID NO: 764559 - protein, 15 aa, Homo sapiens
  CDR3 for alpha chain variable domain of TCR clone 382280 (TRAV4, TRAJ39)
CLVGPNNSAGNMLTF

SEQ ID NO: 764560 - protein, 14 aa, Homo sapiens
  CDR3 for beta chain variable domain of TCR clone 382280 (TRBV7-9, TRBJ1-2)
CASSFPLREYGYTF

SEQ ID NO: 764561 - protein, 12 aa, Homo sapiens
  CDR3 for alpha chain variable domain of TCR clone 382281 (TRAV1-1, TRAJ39)
CAVPVVGNLPTF

SEQ ID NO: 764562 - protein, 13 aa, Homo sapiens
  CDR3 for beta chain variable domain of TCR clone 382281 (TRBV4-1, TRBJ1-1)
CASSRKMNTEAFF

SEQ ID NO: 764563 - protein, 11 aa, Homo sapiens
  CDR3 for alpha chain variable domain of TCR clone 382282 (TRAV13-1, TRAJ20)
CAASNDYKLSF

SEQ ID NO: 764564 - protein, 20 aa, Homo sapiens
  CDR3 for beta chain variable domain of TCR clone 382282 (TRBV28, TRBJ2-1)
SASTNQTSMYLCARGGEQFF

SEQ ID NO: 764565 - protein, 12 aa, Homo sapiens
  CDR3 for alpha chain variable domain of TCR clone 382283 (TRAV35, TRAJ30)
CAGLKRDDKIIF

SEQ ID NO: 764566 - protein, 15 aa, Homo sapiens
  CDR3 for beta chain variable domain of TCR clone 382283 (TRBV9, TRBJ1-6)
CASSVAGTGDSPLHF

SEQ ID NO: 764567 - protein, 13 aa, Homo sapiens
  CDR3 for alpha chain variable domain of TCR clone 382284 (TRAV2, TRAJ40)
CAVVTSGTYKYIY

SEQ ID NO: 764568 - protein, 16 aa, Homo sapiens
  CDR3 for beta chain variable domain of TCR clone 382284 (TRBV19, TRBJ2-2)
CASRSPGTGATGELFF

SEQ ID NO: 764569 - protein, 17 aa, Homo sapiens
  CDR3 for alpha chain variable domain of TCR clone 382285 (TRAV3, TRAJ42)
CAVRDRDYGGRQGNLIF

SEQ ID NO: 764570 - protein, 15 aa, Homo sapiens
  CDR3 for beta chain variable domain of TCR clone 382285 (TRBV3-1, TRBJ2-1)
CASSQVVDDGEEQFF

SEQ ID NO: 764571 - protein, 10 aa, Homo sapiens
  CDR3 for alpha chain variable domain of TCR clone 382286 (TRAV5, TRAJ34)
CAEDTDKLII

SEQ ID NO: 764572 - protein, 14 aa, Homo sapiens
  CDR3 for beta chain variable domain of TCR clone 382286 (TRBV7-9, TRBJ2-1)
CASSPRDSLYEQFF

SEQ ID NO: 764573 - protein, 13 aa, Homo sapiens
  CDR3 for alpha chain variable domain of TCR clone 382287 (TRAV12-3, TRAJ31)
CAMSANNNARLMF

SEQ ID NO: 764574 - protein, 16 aa, Homo sapiens
  CDR3 for beta chain variable domain of TCR clone 382287 (TRBV5-1, TRBJ1-1)
CASSSGGNSLNTEAFF

SEQ ID NO: 764575 - protein, 12 aa, Homo sapiens
  CDR3 for alpha chain variable domain of TCR clone 382288 (TRAV17, TRAJ20)
CATDGYDYKLSF

SEQ ID NO: 764576 - protein, 16 aa, Homo sapiens
  CDR3 for beta chain variable domain of TCR clone 382288 (TRBV20-1, TRBJ1-4)
CSAPGQGLLTNEKLFF

SEQ ID NO: 764577 - protein, 14 aa, Homo sapiens
  CDR3 for alpha chain variable domain of TCR clone 382289 (TRAV12-2, TRAJ13)
CSVKKTGGYQKVTF

SEQ ID NO: 764578 - protein, 15 aa, Homo sapiens
  CDR3 for beta chain variable domain of TCR clone 382289 (TRBV20-1, TRBJ2-7)
CSARDRVSGMDEQYF

SEQ ID NO: 764579 - protein, 11 aa, Homo sapiens
  CDR3 for alpha chain variable domain of TCR clone 382290 (TRAV4, TRAJ31)
CLVGDNARLMF

SEQ ID NO: 764580 - protein, 14 aa, Homo sapiens
  CDR3 for beta chain variable domain of TCR clone 382290 (TRBV4-2, TRBJ2-1)
CASGLDRAYNEQFC

SEQ ID NO: 764581 - protein, 14 aa, Homo sapiens
  CDR3 for alpha chain variable domain of TCR clone 382291 (TRAV1-2, TRAJ16)
CAVNRFSDGQKLLF

SEQ ID NO: 764582 - protein, 13 aa, Homo sapiens
  CDR3 for beta chain variable domain of TCR clone 382291 (TRBV20-1, TRBJ1-1)
CSARLGQGTEALF

SEQ ID NO: 764583 - protein, 15 aa, Homo sapiens
  CDR3 for alpha chain variable domain of TCR clone 382292 (TRAV17, TRAJ37)
CATDHGSSNKGKQIF

SEQ ID NO: 764584 - protein, 14 aa, Homo sapiens
  CDR3 for beta chain variable domain of TCR clone 382292 (TRBV7-2, TRBJ2-3)
CASSRTSGADTQYF

SEQ ID NO: 764585 - protein, 13 aa, Homo sapiens
  CDR3 for alpha chain variable domain of TCR clone 382293 (TRAV13-1, TRAJ21)
CAASIYNFNKFYF

SEQ ID NO: 764586 - protein, 14 aa, Homo sapiens
  CDR3 for beta chain variable domain of TCR clone 382293 (TRBV20-1, TRBJ2-1)
GSALDRGTYNEQFF

SEQ ID NO: 764587 - protein, 17 aa, Homo sapiens
  CDR3 for alpha chain variable domain of TCR clone 382294 (TRAV29/DV5, TRAJ42)
CAASAGNYGGSQGNRIF

SEQ ID NO: 764588 - protein, 13 aa, Homo sapiens
  CDR3 for beta chain variable domain of TCR clone 382294 (TRBV19, TRBJ1-2)
CASSQGQVYGYTF

SEQ ID NO: 764589 - protein, 11 aa, Homo sapiens
  CDR3 for alpha chain variable domain of TCR clone 382295 (TRAV1-2, TRAJ20)
CAVANDYKLSF

SEQ ID NO: 764590 - protein, 14 aa, Homo sapiens
  CDR3 for beta chain variable domain of TCR clone 382295 (TRBV7-9, TRBJ1-1)
CASTPRQSYTEAFF

SEQ ID NO: 764591 - protein, 11 aa, Homo sapiens
  CDR3 for alpha chain variable domain of TCR clone 382296 (TRAV12-3, TRAJ27)
CATANAGKSTF

SEQ ID NO: 764592 - protein, 14 aa, Homo sapiens
  CDR3 for beta chain variable domain of TCR clone 382296 (TRBV20-1, TRBJ2-2)
CSARDRGSTGELFF

SEQ ID NO: 764593 - protein, 13 aa, Homo sapiens
  CDR3 for alpha chain variable domain of TCR clone 382297 (TRAV2, TRAJ40)
CAVVTSGTYKYIF

SEQ ID NO: 764594 - protein, 16 aa, Homo sapiens
  CDR3 for beta chain variable domain of TCR clone 382297 (TRBV4-1, TRBJ1-4)
CASSQDLRRGGEKLFF

SEQ ID NO: 764595 - protein, 12 aa, Homo sapiens
  CDR3 for alpha chain variable domain of TCR clone 382298 (TRAV12-2, TRAJ9)
CAAQTGGFKTIF

SEQ ID NO: 764596 - protein, 19 aa, Homo sapiens
  CDR3 for beta chain variable domain of TCR clone 382298 (TRBV7-3, TRBJ2-2)
CASSLRAGGSGPNTGELFF

SEQ ID NO: 764597 - protein, 12 aa, Homo sapiens
  CDR3 for alpha chain variable domain of TCR clone 382299 (TRAV26-1, TRAJ42)
CIGRGSQGNLTF

SEQ ID NO: 764598 - protein, 14 aa, Homo sapiens
  CDR3 for beta chain variable domain of TCR clone 382299 (TRBV7-2, TRBJ1-1)
CASSFLTGTTEAFF

SEQ ID NO: 764599 - protein, 17 aa, Homo sapiens
  CDR3 for alpha chain variable domain of TCR clone 382300 (TRAV26-1, TRAJ37)
CIVRVITVSSNTGKLIF

SEQ ID NO: 764600 - protein, 16 aa, Homo sapiens
  CDR3 for beta chain variable domain of TCR clone 382300 (TRBV7-2, TRBJ2-3)
CASSLAGAGSGDTQYF

SEQ ID NO: 764601 - protein, 12 aa, Homo sapiens
  CDR3 for alpha chain variable domain of TCR clone 382301 (TRAV29/DV5, TRAJ43)
CAAPYNKNDIRF

SEQ ID NO: 764602 - protein, 17 aa, Homo sapiens
  CDR3 for beta chain variable domain of TCR clone 382301 (TRBV19, TRBJ2-6)
CASSTGQVFSGANVLTF

SEQ ID NO: 764603 - protein, 14 aa, Homo sapiens
  CDR3 for alpha chain variable domain of TCR clone 382302 (TRAV3, TRAJ21)
CAVESQANFNKFYF

SEQ ID NO: 764604 - protein, 18 aa, Homo sapiens
  CDR3 for beta chain variable domain of TCR clone 382302 (TRBV7-9, TRBJ2-1)
CASSLAVSGPSGRNEQFF

SEQ ID NO: 764605 - protein, 15 aa, Homo sapiens
  CDR3 for alpha chain variable domain of TCR clone 382303 (TRAV8-3, TRAJ6)
CAVGPLGGGSYIPTF

SEQ ID NO: 764606 - protein, 14 aa, Homo sapiens
  CDR3 for beta chain variable domain of TCR clone 382303 (TRBV19, TRBJ2-2)
SASSTGQGAGELFF

SEQ ID NO: 764607 - protein, 14 aa, Homo sapiens
  CDR3 for alpha chain variable domain of TCR clone 382304 (TRAV12-2, TRAJ17)
CAVLFKAAGNKLTF

SEQ ID NO: 764608 - protein, 16 aa, Homo sapiens
  CDR3 for beta chain variable domain of TCR clone 382304 (TRBV20-1, TRBJ2-2)
QCWRIGTGWITGELFF

SEQ ID NO: 764609 - protein, 12 aa, Homo sapiens
  CDR3 for alpha chain variable domain of TCR clone 382305 (TRAV12-1, TRAJ40)
CVAYLRNLQIHL

SEQ ID NO: 764610 - protein, 16 aa, Homo sapiens
  CDR3 for beta chain variable domain of TCR clone 382305 (TRBV7-9, TRBJ1-2)
CASSLGFSSGEDGYTF

SEQ ID NO: 764611 - protein, 10 aa, Homo sapiens
  CDR3 for alpha chain variable domain of TCR clone 382306 (TRAV13-1, TRAJ30)
CAARDDKIIF

SEQ ID NO: 764612 - protein, 16 aa, Homo sapiens
  CDR3 for beta chain variable domain of TCR clone 382306 (TRBV12-5, TRBJ2-5)
CASGPRTSGNQETQYF

SEQ ID NO: 764613 - protein, 15 aa, Homo sapiens
  CDR3 for alpha chain variable domain of TCR clone 382307 (TRAV3, TRAJ40)
CAVRPQTSGTYKYIF

SEQ ID NO: 764614 - protein, 14 aa, Homo sapiens
  CDR3 for beta chain variable domain of TCR clone 382307 (TRBV7-9, TRBJ2-7)
CASSLDRPTDEQYF

SEQ ID NO: 764615 - protein, 11 aa, Homo sapiens
  CDR3 for alpha chain variable domain of TCR clone 382308 (TRAV21, TRAJ9)
RAVPGCFKTIF

SEQ ID NO: 764616 - protein, 12 aa, Homo sapiens
  CDR3 for beta chain variable domain of TCR clone 382308 (TRBV20-1, TRBJ2-3)
CSARVGTDTQYF

SEQ ID NO: 764617 - protein, 12 aa, Homo sapiens
  CDR3 for alpha chain variable domain of TCR clone 382309 (TRAV12-3, TRAJ42)
CAPGGSRGNLIF

SEQ ID NO: 764618 - protein, 13 aa, Homo sapiens
  CDR3 for beta chain variable domain of TCR clone 382309 (TRBV5-7, TRBJ2-6)
CASTSSGANVLTF

SEQ ID NO: 764619 - protein, 18 aa, Homo sapiens
  CDR3 for alpha chain variable domain of TCR clone 382310 (TRAV17, TRAJ45)
CATSLDLYSGGGADGLTF

SEQ ID NO: 764620 - protein, 16 aa, Homo sapiens
  CDR3 for beta chain variable domain of TCR clone 382310 (TRBV12-5, TRBJ2-5)
CASGPRTSGSQETQYF

SEQ ID NO: 764621 - protein, 14 aa, Homo sapiens
  CDR3 for alpha chain variable domain of TCR clone 382311 (TRAV26-1, TRAJ48)
CIVRVGFGNEKLTF

SEQ ID NO: 764622 - protein, 14 aa, Homo sapiens
  CDR3 for beta chain variable domain of TCR clone 382311 (TRBV11-2, TRBJ2-7)
CASSLGAGAYEQYF

SEQ ID NO: 764623 - protein, 12 aa, Homo sapiens
  CDR3 for alpha chain variable domain of TCR clone 382312 (TRAV8-3, TRAJ6)
CAVAGGSYIPTF

SEQ ID NO: 764624 - protein, 16 aa, Homo sapiens
  CDR3 for beta chain variable domain of TCR clone 382312 (TRBV5-5, TRBJ1-1)
CASSLGGGFLNTEAFF

SEQ ID NO: 764625 - protein, 15 aa, Homo sapiens
  CDR3 for alpha chain variable domain of TCR clone 382313 (TRAV12-2, TRAJ53)
CAVNGGGGSNYKLTF

SEQ ID NO: 764626 - protein, 18 aa, Homo sapiens
  CDR3 for beta chain variable domain of TCR clone 382313 (TRBV25-1, TRBJ1-2)
CASSGLQNGQGLIFGYTF

SEQ ID NO: 764627 - protein, 16 aa, Homo sapiens
  CDR3 for alpha chain variable domain of TCR clone 382314 (TRAV12-3, TRAJ58)
CAMTDTEETSGSRLTF

SEQ ID NO: 764628 - protein, 22 aa, Homo sapiens
  CDR3 for beta chain variable domain of TCR clone 382314 (TRBV23-1, TRBJ2-7)
GASSRRLGSGQGYVGGGYEQYF

SEQ ID NO: 764629 - protein, 13 aa, Homo sapiens
  CDR3 for alpha chain variable domain of TCR clone 382315 (TRAV2, TRAJ24)
CAVTTDSWEKLQF

SEQ ID NO: 764630 - protein, 14 aa, Homo sapiens
  CDR3 for beta chain variable domain of TCR clone 382315 (TRBV13, TRBJ2-5)
CASSLGRGQETQYF

SEQ ID NO: 764631 - protein, 15 aa, Homo sapiens
  CDR3 for alpha chain variable domain of TCR clone 382316 (TRAV1-2, TRAJ38)
CAVSEKAGNNRKLIW

SEQ ID NO: 764632 - protein, 16 aa, Homo sapiens
  CDR3 for beta chain variable domain of TCR clone 382316 (TRBV4-1, TRBJ2-7)
CASSLTAGQATYEQYF

SEQ ID NO: 764633 - protein, 14 aa, Homo sapiens
  CDR3 for alpha chain variable domain of TCR clone 382317 (TRAV21, TRAJ35)
CAVMPIGFGNVLHC

SEQ ID NO: 764634 - protein, 13 aa, Homo sapiens
  CDR3 for beta chain variable domain of TCR clone 382317 (TRBV7-2, TRBJ2-2)
CASSLAVTGELFF

SEQ ID NO: 764635 - protein, 16 aa, Homo sapiens
  CDR3 for alpha chain variable domain of TCR clone 382318 (TRAV1-2, TRAJ10)
CAVRGVLTGGGNKLTF

SEQ ID NO: 764636 - protein, 13 aa, Homo sapiens
  CDR3 for beta chain variable domain of TCR clone 382318 (TRBV16, TRBJ2-7)
CASSQSVSYEQYF

SEQ ID NO: 764637 - protein, 12 aa, Homo sapiens
  CDR3 for alpha chain variable domain of TCR clone 382319 (TRAV23/DV6, TRAJ16)
CAARGRGQKLLF

SEQ ID NO: 764638 - protein, 15 aa, Homo sapiens
  CDR3 for beta chain variable domain of TCR clone 382319 (TRBV15, TRBJ2-1)
WATSRPGQGLHEQFF

SEQ ID NO: 764639 - protein, 12 aa, Homo sapiens
  CDR3 for alpha chain variable domain of TCR clone 382320 (TRAV35, TRAJ39)
LAPNNAGNMLTL

SEQ ID NO: 764640 - protein, 16 aa, Homo sapiens
  CDR3 for beta chain variable domain of TCR clone 382320 (TRBV2, TRBJ2-3)
CASSTSVEGVTDTQYL

SEQ ID NO: 764641 - protein, 13 aa, Homo sapiens
  CDR3 for alpha chain variable domain of TCR clone 382321 (TRAV35, TRAJ33)
CAGQLYGVYPLIW

SEQ ID NO: 764642 - protein, 14 aa, Homo sapiens
  CDR3 for beta chain variable domain of TCR clone 382321 (TRBV7-2, TRBJ1-1)
CASSLGGAGTEAFF

SEQ ID NO: 764643 - protein, 14 aa, Homo sapiens
  CDR3 for alpha chain variable domain of TCR clone 382322 (TRAV27, TRAJ22)
CAGLPSGSARQLTF

SEQ ID NO: 764644 - protein, 17 aa, Homo sapiens
  CDR3 for beta chain variable domain of TCR clone 382322 (TRBV7-3, TRBJ2-5)
CASSLGSGRSGSETQYF

SEQ ID NO: 764645 - protein, 13 aa, Homo sapiens
  CDR3 for alpha chain variable domain of TCR clone 382323 (TRAV12-1, TRAJ13)
CVVTSGGYQKVTF

SEQ ID NO: 764646 - protein, 14 aa, Homo sapiens
  CDR3 for beta chain variable domain of TCR clone 382323 (TRBV27, TRBJ2-7)
CASSLAGISYEQYF

SEQ ID NO: 764647 - protein, 12 aa, Homo sapiens
  CDR3 for alpha chain variable domain of TCR clone 382324 (TRAV13-2, TRAJ48)
CRDGLGNEKLTF

SEQ ID NO: 764648 - protein, 15 aa, Homo sapiens
  CDR3 for beta chain variable domain of TCR clone 382324 (TRBV7-9, TRBJ1-6)
CARSSPGRGNSPLHF

SEQ ID NO: 764649 - protein, 14 aa, Homo sapiens
  CDR3 for alpha chain variable domain of TCR clone 382325 (TRAV35, TRAJ22)
CAGLRPGSAWQLTF

SEQ ID NO: 764650 - protein, 14 aa, Homo sapiens
  CDR3 for beta chain variable domain of TCR clone 382325 (TRBV11-3, TRBJ2-3)
CASSSGQGPDTQYF

SEQ ID NO: 764651 - protein, 13 aa, Homo sapiens
  CDR3 for alpha chain variable domain of TCR clone 382326 (TRAV21, TRAJ27)
CTARPGNAGKSTF

SEQ ID NO: 764652 - protein, 15 aa, Homo sapiens
  CDR3 for beta chain variable domain of TCR clone 382326 (TRBV20-1, TRBJ2-7)
CSARDRVSGMDEQYF

SEQ ID NO: 764653 - protein, 14 aa, Homo sapiens
  CDR3 for alpha chain variable domain of TCR clone 382327 (TRAV1-2, TRAJ8)
CAVREDTGFQKLVF

SEQ ID NO: 764654 - protein, 17 aa, Homo sapiens
  CDR3 for beta chain variable domain of TCR clone 382327 (TRBV6-5, TRBJ2-7)
CANRPSVGEVQHYEQYF

SEQ ID NO: 764655 - protein, 11 aa, Homo sapiens
  CDR3 for alpha chain variable domain of TCR clone 382328 (TRAV2, TRAJ3)
CAVRKEQCFQD

SEQ ID NO: 764656 - protein, 13 aa, Homo sapiens
  CDR3 for beta chain variable domain of TCR clone 382328 (TRBV6-1, TRBJ1-1)
CASSRQGNTEAFF

SEQ ID NO: 764657 - protein, 14 aa, Homo sapiens
  CDR3 for alpha chain variable domain of TCR clone 382329 (TRAV35, TRAJ44)
CAGRPSRTASKLTF

SEQ ID NO: 764658 - protein, 20 aa, Homo sapiens
  CDR3 for beta chain variable domain of TCR clone 382329 (TRBV11-3, TRBJ2-7)
CASSQRTSGSLRAVLRAGHQ

SEQ ID NO: 764659 - protein, 17 aa, Homo sapiens
  CDR3 for alpha chain variable domain of TCR clone 382330 (TRAV3, TRAJ6)
CAVRDGPRAGGSYIPTF

SEQ ID NO: 764660 - protein, 14 aa, Homo sapiens
  CDR3 for beta chain variable domain of TCR clone 382330 (TRBV7-9, TRBJ2-3)
CASSPSGRAGTQYF

SEQ ID NO: 764661 - protein, 13 aa, Homo sapiens
  CDR3 for alpha chain variable domain of TCR clone 382331 (TRAV3, TRAJ30)
CAARDRGDDKIIF

SEQ ID NO: 764662 - protein, 16 aa, Homo sapiens
  CDR3 for beta chain variable domain of TCR clone 382331 (TRBV7-3, TRBJ2-2)
CASSLKRGTLSGELFF

SEQ ID NO: 764663 - protein, 16 aa, Homo sapiens
  CDR3 for alpha chain variable domain of TCR clone 382332 (TRAV30, TRAJ24)
CGTEIVDADSWVKSQF

SEQ ID NO: 764664 - protein, 14 aa, Homo sapiens
  CDR3 for beta chain variable domain of TCR clone 382332 (TRBV12-5, TRBJ2-5)
CASGSRTHQETQYF

SEQ ID NO: 764665 - protein, 14 aa, Homo sapiens
  CDR3 for alpha chain variable domain of TCR clone 382333 (TRAV26-1, TRAJ39)
CIVRGSRAGNMLTF

SEQ ID NO: 764666 - protein, 14 aa, Homo sapiens
  CDR3 for beta chain variable domain of TCR clone 382333 (TRBV19, TRBJ2-1)
CASPTFVLSGEQFF

SEQ ID NO: 764667 - protein, 13 aa, Homo sapiens
  CDR3 for alpha chain variable domain of TCR clone 382334 (TRAV1-1, TRAJ13)
CAVNSGGYQEVTF

SEQ ID NO: 764668 - protein, 12 aa, Homo sapiens
  CDR3 for beta chain variable domain of TCR clone 382334 (TRBV28, TRBJ2-1)
CASSVQINEQFF

SEQ ID NO: 764669 - protein, 15 aa, Homo sapiens
  CDR3 for alpha chain variable domain of TCR clone 382335 (TRAV8-1, TRAJ6)
CAVNAGAGGSYIPTF

SEQ ID NO: 764670 - protein, 17 aa, Homo sapiens
  CDR3 for beta chain variable domain of TCR clone 382335 (TRBV4-1, TRBJ1-4)
CASSQEGPRGVEEKLFF

SEQ ID NO: 764671 - protein, 10 aa, Homo sapiens
  CDR3 for alpha chain variable domain of TCR clone 382336 (TRAV1-2, TRAJ31)
CVSEDARLMF

SEQ ID NO: 764672 - protein, 14 aa, Homo sapiens
  CDR3 for beta chain variable domain of TCR clone 382336 (TRBV19, TRBJ2-1)
CAIPTFVLSGEQFF

SEQ ID NO: 764673 - protein, 15 aa, Homo sapiens
  CDR3 for alpha chain variable domain of TCR clone 382337 (TRAV3, TRAJ5)
CAVRDLDTGRRALTF

SEQ ID NO: 764674 - protein, 15 aa, Homo sapiens
  CDR3 for beta chain variable domain of TCR clone 382337 (TRBV18, TRBJ1-1)
CASSPRQGENTEAFF

SEQ ID NO: 764675 - protein, 14 aa, Homo sapiens
  CDR3 for alpha chain variable domain of TCR clone 382338 (TRAV8-6, TRAJ17)
CAATYAAAGNKLTF

SEQ ID NO: 764676 - protein, 18 aa, Homo sapiens
  CDR3 for beta chain variable domain of TCR clone 382338 (TRBV7-8, TRBJ2-7)
CASSHATPGRLRAYEQYF

SEQ ID NO: 764677 - protein, 16 aa, Homo sapiens
  CDR3 for alpha chain variable domain of TCR clone 382339 (TRAV3, TRAJ21)
CAVSDIERGNFNKFYF

SEQ ID NO: 764678 - protein, 20 aa, Homo sapiens
  CDR3 for beta chain variable domain of TCR clone 382339 (TRBV4-1, TRBJ2-2)
CASSQASPPGLASNTGELFF

SEQ ID NO: 764679 - protein, 11 aa, Homo sapiens
  CDR3 for alpha chain variable domain of TCR clone 382340 (TRAV27, TRAJ45)
CAGAKEGVLTD

SEQ ID NO: 764680 - protein, 17 aa, Homo sapiens
  CDR3 for beta chain variable domain of TCR clone 382340 (TRBV11-2, TRBJ2-1)
CASSLYPPGVEYNEQFF

SEQ ID NO: 764681 - protein, 23 aa, Homo sapiens
  CDR3 for alpha chain variable domain of TCR clone 382341 (TRAV26-1, TRAJ38)
CIADNAGNNHIQNPDPAVYQLRD

SEQ ID NO: 764682 - protein, 13 aa, Homo sapiens
  CDR3 for beta chain variable domain of TCR clone 382341 (TRBV7-9, TRBJ2-3)
CASSPGSTDTQYF

SEQ ID NO: 764683 - protein, 14 aa, Homo sapiens
  CDR3 for alpha chain variable domain of TCR clone 382342 (TRAV12-2, TRAJ24)
CAVTPADTWGKLQF

SEQ ID NO: 764684 - protein, 13 aa, Homo sapiens
  CDR3 for beta chain variable domain of TCR clone 382342 (TRBV6-4, TRBJ1-5)
CASSADLNQPQHF

SEQ ID NO: 764685 - protein, 11 aa, Homo sapiens
  CDR3 for alpha chain variable domain of TCR clone 382343 (TRAV21, TRAJ31)
CAVRNNARLMF

SEQ ID NO: 764686 - protein, 15 aa, Homo sapiens
  CDR3 for beta chain variable domain of TCR clone 382343 (TRBV20-1, TRBJ2-7)
CSARDWVSGMDEQYF

SEQ ID NO: 764687 - protein, 16 aa, Homo sapiens
  CDR3 for alpha chain variable domain of TCR clone 382344 (TRAV39, TRAJ32)
CAVDMEYGGATKKLIF

SEQ ID NO: 764688 - protein, 14 aa, Homo sapiens
  CDR3 for beta chain variable domain of TCR clone 382344 (TRBV9, TRBJ2-4)
CASSPSGTSGFQYF

SEQ ID NO: 764689 - protein, 15 aa, Homo sapiens
  CDR3 for alpha chain variable domain of TCR clone 382345 (TRAV21, TRAJ53)
GATLNSGGSNYKLTF

SEQ ID NO: 764690 - protein, 15 aa, Homo sapiens
  CDR3 for beta chain variable domain of TCR clone 382345 (TRBV20-1, TRBJ2-7)
CSARDRVSGMDEQYF

SEQ ID NO: 764691 - protein, 13 aa, Homo sapiens
  CDR3 for alpha chain variable domain of TCR clone 382346 (TRAV38-1, TRAJ42)
CARWGGSRGSLIF

SEQ ID NO: 764692 - protein, 17 aa, Homo sapiens
  CDR3 for beta chain variable domain of TCR clone 382346 (TRBV20-1, TRBJ2-1)
CSARDPLAGVWDNEQFF

SEQ ID NO: 764693 - protein, 14 aa, Homo sapiens
  CDR3 for alpha chain variable domain of TCR clone 382347 (TRAV8-4, TRAJ53)
CCEWSGGSNYKLTF

SEQ ID NO: 764694 - protein, 13 aa, Homo sapiens
  CDR3 for beta chain variable domain of TCR clone 382347 (TRBV7-2, TRBJ2-7)
CASSSPSGSEQYF

SEQ ID NO: 764695 - protein, 17 aa, Homo sapiens
  CDR3 for alpha chain variable domain of TCR clone 382348 (TRAV4, TRAJ18)
CLVGERSVGSTLGRLYF

SEQ ID NO: 764696 - protein, 15 aa, Homo sapiens
  CDR3 for beta chain variable domain of TCR clone 382348 (TRBV5-1, TRBJ2-3)
CASSVTSGSTDTQYF

SEQ ID NO: 764697 - protein, 13 aa, Homo sapiens
  CDR3 for alpha chain variable domain of TCR clone 382349 (TRAV17, TRAJ9)
CATFLTGGFKTIF

SEQ ID NO: 764698 - protein, 16 aa, Homo sapiens
  CDR3 for beta chain variable domain of TCR clone 382349 (TRBV5-7, TRBJ1-4)
CASSPSGGLKTKKLFF

SEQ ID NO: 764699 - protein, 18 aa, Homo sapiens
  CDR3 for alpha chain variable domain of TCR clone 382350 (TRAV21, TRAJ52)
CAVRPSPAGGTSYGELTF

SEQ ID NO: 764700 - protein, 17 aa, Homo sapiens
  CDR3 for beta chain variable domain of TCR clone 382350 (TRBV13, TRBJ2-3)
CASSLSRVAGGRNKQYF

SEQ ID NO: 764701 - protein, 14 aa, Homo sapiens
  CDR3 for alpha chain variable domain of TCR clone 382351 (TRAV25, TRAJ9)
CAGPGNTGGFKTIF

SEQ ID NO: 764702 - protein, 12 aa, Homo sapiens
  CDR3 for beta chain variable domain of TCR clone 382351 (TRBV11-2, TRBJ2-1)
CASSPGNNEQFF

SEQ ID NO: 764703 - protein, 16 aa, Homo sapiens
  CDR3 for alpha chain variable domain of TCR clone 382352 (TRAV23/DV6, TRAJ9)
CAASIGGNTGGFKTIF

SEQ ID NO: 764704 - protein, 12 aa, Homo sapiens
  CDR3 for beta chain variable domain of TCR clone 382352 (TRBV19, TRBJ2-1)
CASSMQDTEQFF

SEQ ID NO: 764705 - protein, 14 aa, Homo sapiens
  CDR3 for alpha chain variable domain of TCR clone 382353 (TRAV17, TRAJ35)
CATDRPGFGNVLHC

SEQ ID NO: 764706 - protein, 18 aa, Homo sapiens
  CDR3 for beta chain variable domain of TCR clone 382353 (TRBV7-2, TRBJ2-3)
CASSLETSRGRKADTQYF

SEQ ID NO: 764707 - protein, 14 aa, Homo sapiens
  CDR3 for alpha chain variable domain of TCR clone 382354 (TRAV38-1, TRAJ45)
CASHSGGGADGLTF

SEQ ID NO: 764708 - protein, 17 aa, Homo sapiens
  CDR3 for beta chain variable domain of TCR clone 382354 (TRBV13, TRBJ2-3)
CASSLSRVAGGRNTQYF

SEQ ID NO: 764709 - protein, 14 aa, Homo sapiens
  CDR3 for alpha chain variable domain of TCR clone 382355 (TRAV12-2, TRAJ6)
CAVVASGGSYIPTF

SEQ ID NO: 764710 - protein, 14 aa, Homo sapiens
  CDR3 for beta chain variable domain of TCR clone 382355 (TRBV7-2, TRBJ2-7)
CASSPKTSFYEQYF

SEQ ID NO: 764711 - protein, 15 aa, Homo sapiens
  CDR3 for alpha chain variable domain of TCR clone 382356 (TRAV17, TRAJ4)
CATGTYSGGYNKLIF

SEQ ID NO: 764712 - protein, 13 aa, Homo sapiens
  CDR3 for beta chain variable domain of TCR clone 382356 (TRBV6-6, TRBJ2-7)
CASSPTHLAEQYF

SEQ ID NO: 764713 - protein, 14 aa, Homo sapiens
  CDR3 for alpha chain variable domain of TCR clone 382357 (TRAV12-2, TRAJ40)
CAVKIPSVTHKYIF

SEQ ID NO: 764714 - protein, 17 aa, Homo sapiens
  CDR3 for beta chain variable domain of TCR clone 382357 (TRBV13, TRBJ2-3)
CASSLSRVAGGRNTQYF

SEQ ID NO: 764715 - protein, 16 aa, Homo sapiens
  CDR3 for alpha chain variable domain of TCR clone 382358 (TRAV13-1, TRAJ40)
CAASIATTSGTYKYIF

SEQ ID NO: 764716 - protein, 14 aa, Homo sapiens
  CDR3 for beta chain variable domain of TCR clone 382358 (TRBV28, TRBJ2-1)
CASSLNGRNNEQFF

SEQ ID NO: 764717 - protein, 12 aa, Homo sapiens
  CDR3 for alpha chain variable domain of TCR clone 382359 (TRAV21, TRAJ33)
CAKMDSNYQLIW

SEQ ID NO: 764718 - protein, 15 aa, Homo sapiens
  CDR3 for beta chain variable domain of TCR clone 382359 (TRBV2, TRBJ1-5)
CASSFGQGGVQPQHF

SEQ ID NO: 764719 - protein, 15 aa, Homo sapiens
  CDR3 for alpha chain variable domain of TCR clone 382360 (TRAV23/DV6, TRAJ12)
CAAIDLGAMDSSYKL

SEQ ID NO: 764720 - protein, 14 aa, Homo sapiens
  CDR3 for beta chain variable domain of TCR clone 382360 (TRBV20-1, TRBJ2-1)
CSARRGGYYNEQFF

SEQ ID NO: 764721 - protein, 14 aa, Homo sapiens
  CDR3 for alpha chain variable domain of TCR clone 382361 (TRAV1-2, TRAJ8)
CAVREDTGFQKLVF

SEQ ID NO: 764722 - protein, 16 aa, Homo sapiens
  CDR3 for beta chain variable domain of TCR clone 382361 (TRBV20-1, TRBJ2-2)
CSARAGLAGVTGELFF

SEQ ID NO: 764723 - protein, 13 aa, Homo sapiens
  CDR3 for alpha chain variable domain of TCR clone 382362 (TRAV1-1, TRAJ15)
CAVVDQAGTALIF

SEQ ID NO: 764724 - protein, 14 aa, Homo sapiens
  CDR3 for beta chain variable domain of TCR clone 382362 (TRBV5-4, TRBJ1-6)
CASSLWSDNSPLHF

SEQ ID NO: 764725 - protein, 13 aa, Homo sapiens
  CDR3 for alpha chain variable domain of TCR clone 382363 (TRAV20, TRAJ48)
CAVQGVGNEKLTF

SEQ ID NO: 764726 - protein, 14 aa, Homo sapiens
  CDR3 for beta chain variable domain of TCR clone 382363 (TRBV27, TRBJ2-7)
RASSFRDGPYEQYF

SEQ ID NO: 764727 - protein, 16 aa, Homo sapiens
  CDR3 for alpha chain variable domain of TCR clone 382364 (TRAV8-4, TRAJ5)
CAVSPFTDTGRRALTF

SEQ ID NO: 764728 - protein, 14 aa, Homo sapiens
  CDR3 for beta chain variable domain of TCR clone 382364 (TRBV19, TRBJ1-6)
CASSTDEWNSPLHF

SEQ ID NO: 764729 - protein, 14 aa, Homo sapiens
  CDR3 for alpha chain variable domain of TCR clone 382365 (TRAV3, TRAJ33)
CAVRDMDSNYQLIG

SEQ ID NO: 764730 - protein, 19 aa, Homo sapiens
  CDR3 for beta chain variable domain of TCR clone 382365 (TRBV7-3, TRBJ1-2)
CASSFPQGNDGELWLHLRF

SEQ ID NO: 764731 - protein, 14 aa, Homo sapiens
  CDR3 for alpha chain variable domain of TCR clone 382366 (TRAV12-2, TRAJ13)
CAVKKTGGYQQVTF

SEQ ID NO: 764732 - protein, 11 aa, Homo sapiens
  CDR3 for beta chain variable domain of TCR clone 382366 (TRBV29-1, TRBJ2-5)
CSEDRTGTQYF

SEQ ID NO: 764733 - protein, 11 aa, Homo sapiens
  CDR3 for alpha chain variable domain of TCR clone 382367 (TRAV8-6, TRAJ13)
CALGIYEKVTF

SEQ ID NO: 764734 - protein, 14 aa, Homo sapiens
  CDR3 for beta chain variable domain of TCR clone 382367 (TRBV6-1, TRBJ1-3)
CASVQGGGGNTIYF

SEQ ID NO: 764735 - protein, 17 aa, Homo sapiens
  CDR3 for alpha chain variable domain of TCR clone 382368 (TRAV1-2, TRAJ27)
CAVRDKTGNTNAGKSTL

SEQ ID NO: 764736 - protein, 14 aa, Homo sapiens
  CDR3 for beta chain variable domain of TCR clone 382368 (TRBV6-1, TRBJ1-3)
CASVQGGGGNTIYF

SEQ ID NO: 764737 - protein, 14 aa, Homo sapiens
  CDR3 for alpha chain variable domain of TCR clone 382369 (TRAV2, TRAJ37)
CAVDFTSNTGKLIF

SEQ ID NO: 764738 - protein, 14 aa, Homo sapiens
  CDR3 for beta chain variable domain of TCR clone 382369 (TRBV12-4, TRBJ1-2)
CASSFVGTAYGYTF

SEQ ID NO: 764739 - protein, 13 aa, Homo sapiens
  CDR3 for alpha chain variable domain of TCR clone 382370 (TRAV12-2, TRAJ13)
CREEDWGYQKVTF

SEQ ID NO: 764740 - protein, 15 aa, Homo sapiens
  CDR3 for beta chain variable domain of TCR clone 382370 (TRBV27, TRBJ2-1)
CASSNGGGPSNEQFF

SEQ ID NO: 764741 - protein, 12 aa, Homo sapiens
  CDR3 for alpha chain variable domain of TCR clone 382371 (TRAV1-2, TRAJ17)
CAVRAAGNKLTF

SEQ ID NO: 764742 - protein, 15 aa, Homo sapiens
  CDR3 for beta chain variable domain of TCR clone 382371 (TRBV20-1, TRBJ1-1)
CSASRGVTGNTEAFF

SEQ ID NO: 764743 - protein, 15 aa, Homo sapiens
  CDR3 for alpha chain variable domain of TCR clone 382372 (TRAV19, TRAJ9)
CALSEGSTGGFKTIF

SEQ ID NO: 764744 - protein, 16 aa, Homo sapiens
  CDR3 for beta chain variable domain of TCR clone 382372 (TRBV4-3, TRBJ2-7)
CASSPRTSGRSYEQYF

SEQ ID NO: 764745 - protein, 15 aa, Homo sapiens
  CDR3 for alpha chain variable domain of TCR clone 382373 (TRAV16, TRAJ16)
CSKWPRHRDGQKLLF

SEQ ID NO: 764746 - protein, 14 aa, Homo sapiens
  CDR3 for beta chain variable domain of TCR clone 382373 (TRBV7-9, TRBJ2-4)
CASTTGGAKNIQYF

SEQ ID NO: 764747 - protein, 14 aa, Homo sapiens
  CDR3 for alpha chain variable domain of TCR clone 382374 (TRAV26-1, TRAJ38)
CIADNAGNNPKLIW

SEQ ID NO: 764748 - protein, 11 aa, Homo sapiens
  CDR3 for beta chain variable domain of TCR clone 382374 (TRBV29-1, TRBJ2-5)
CSEDRTGTQYF

SEQ ID NO: 764749 - protein, 11 aa, Homo sapiens
  CDR3 for alpha chain variable domain of TCR clone 382375 (TRAV12-1, TRAJ43)
CVEYDDNDMRF

SEQ ID NO: 764750 - protein, 17 aa, Homo sapiens
  CDR3 for beta chain variable domain of TCR clone 382375 (TRBV20-1, TRBJ2-1)
CSARDPLAGVWGNEQFF

SEQ ID NO: 764751 - protein, 14 aa, Homo sapiens
  CDR3 for alpha chain variable domain of TCR clone 382376 (TRAV9-2, TRAJ39)
CALYIYNAGNMLTF

SEQ ID NO: 764752 - protein, 14 aa, Homo sapiens
  CDR3 for beta chain variable domain of TCR clone 382376 (TRBV11-2, TRBJ2-1)
CASSPSRQGGGQFF

SEQ ID NO: 764753 - protein, 11 aa, Homo sapiens
  CDR3 for alpha chain variable domain of TCR clone 382377 (TRAV3, TRAJ21)
CAVGNFNKFYF

SEQ ID NO: 764754 - protein, 16 aa, Homo sapiens
  CDR3 for beta chain variable domain of TCR clone 382377 (TRBV19, TRBJ2-1)
CASSKAGPSAYNEQFS

SEQ ID NO: 764755 - protein, 14 aa, Homo sapiens
  CDR3 for alpha chain variable domain of TCR clone 382378 (TRAV12-3, TRAJ12)
CAMSEVDSSYKLIF

SEQ ID NO: 764756 - protein, 13 aa, Homo sapiens
  CDR3 for beta chain variable domain of TCR clone 382378 (TRBV19, TRBJ2-2)
CASSPLGIGELFF

SEQ ID NO: 764757 - protein, 14 aa, Homo sapiens
  CDR3 for alpha chain variable domain of TCR clone 382379 (TRAV20, TRAJ29)
CAVQAWVVNTPLVF

SEQ ID NO: 764758 - protein, 15 aa, Homo sapiens
  CDR3 for beta chain variable domain of TCR clone 382379 (TRBV29-1, TRBJ2-7)
CSVEFFDRGSYEQYF

SEQ ID NO: 764759 - protein, 17 aa, Homo sapiens
  CDR3 for alpha chain variable domain of TCR clone 382380 (TRAV3, TRAJ42)
CAVRDRDYGGSQGNLIF

SEQ ID NO: 764760 - protein, 15 aa, Homo sapiens
  CDR3 for beta chain variable domain of TCR clone 382380 (TRBV6-6, TRBJ2-7)
CASSYSYGGSFEQYF

SEQ ID NO: 764761 - protein, 16 aa, Homo sapiens
  CDR3 for alpha chain variable domain of TCR clone 382381 (TRAV1-1, TRAJ29)
CAVRSTRNSGNTPLVF

SEQ ID NO: 764762 - protein, 16 aa, Homo sapiens
  CDR3 for beta chain variable domain of TCR clone 382381 (TRBV2, TRBJ2-1)
CASSVGGSLSYNEQFF

SEQ ID NO: 764763 - protein, 14 aa, Homo sapiens
  CDR3 for alpha chain variable domain of TCR clone 382382 (TRAV12-2, TRAJ40)
CAVKIPSGTYKYIF

SEQ ID NO: 764764 - protein, 14 aa, Homo sapiens
  CDR3 for beta chain variable domain of TCR clone 382382 (TRBV20-1, TRBJ1-1)
CSAQTRIGGPEAVF

SEQ ID NO: 764765 - protein, 17 aa, Homo sapiens
  CDR3 for alpha chain variable domain of TCR clone 382383 (TRAV21, TRAJ52)
CAVGVNAGGTSYGKLKF

SEQ ID NO: 764766 - protein, 13 aa, Homo sapiens
  CDR3 for beta chain variable domain of TCR clone 382383 (TRBV5-1, TRBJ1-2)
CASSFQGNYGYTF

SEQ ID NO: 764767 - protein, 13 aa, Homo sapiens
  CDR3 for alpha chain variable domain of TCR clone 382384 (TRAV3, TRAJ41)
FAGSSNSGYALNF

SEQ ID NO: 764768 - protein, 13 aa, Homo sapiens
  CDR3 for beta chain variable domain of TCR clone 382384 (TRBV20-1, TRBJ2-2)
CSALSGGAGELFF

SEQ ID NO: 764769 - protein, 15 aa, Homo sapiens
  CDR3 for alpha chain variable domain of TCR clone 382385 (TRAV17, TRAJ10)
CATVLLTGGGNKLTF

SEQ ID NO: 764770 - protein, 14 aa, Homo sapiens
  CDR3 for beta chain variable domain of TCR clone 382385 (TRBV7-9, TRBJ2-4)
CASSLAMGGNIQYF

SEQ ID NO: 764771 - protein, 12 aa, Homo sapiens
  CDR3 for alpha chain variable domain of TCR clone 382386 (TRAV12-3, TRAJ42)
CASGGSQGNLIF

SEQ ID NO: 764772 - protein, 13 aa, Homo sapiens
  CDR3 for beta chain variable domain of TCR clone 382386 (TRBV5-7, TRBJ2-6)
CASTSSGANVLTF

SEQ ID NO: 764773 - protein, 15 aa, Homo sapiens
  CDR3 for alpha chain variable domain of TCR clone 382387 (TRAV3, TRAJ9)
CTVRDSNTGGFKTIF

SEQ ID NO: 764774 - protein, 16 aa, Homo sapiens
  CDR3 for beta chain variable domain of TCR clone 382387 (TRBV15, TRBJ2-5)
CATSPTTGQGMETQYF

SEQ ID NO: 764775 - protein, 16 aa, Homo sapiens
  CDR3 for alpha chain variable domain of TCR clone 382388 (TRAV12-2, TRAJ32)
CAVNMNYGGATNKLIF

SEQ ID NO: 764776 - protein, 16 aa, Homo sapiens
  CDR3 for beta chain variable domain of TCR clone 382388 (TRBV7-8, TRBJ2-3)
WASSTEGQRETDTQYF

SEQ ID NO: 764777 - protein, 15 aa, Homo sapiens
  CDR3 for alpha chain variable domain of TCR clone 382389 (TRAV21, TRAJ53)
CATLNSGGSNYKLTF

SEQ ID NO: 764778 - protein, 15 aa, Homo sapiens
  CDR3 for beta chain variable domain of TCR clone 382389 (TRBV7-6, TRBJ1-5)
CASSQSSGINQLQHF

SEQ ID NO: 764779 - protein, 11 aa, Homo sapiens
  CDR3 for alpha chain variable domain of TCR clone 382390 (TRAV13-1, TRAJ49)
CACVGGNQFYF

SEQ ID NO: 764780 - protein, 16 aa, Homo sapiens
  CDR3 for beta chain variable domain of TCR clone 382390 (TRBV11-2, TRBJ2-2)
CASGLRTGNVIGELFF

SEQ ID NO: 764781 - protein, 16 aa, Homo sapiens
  CDR3 for alpha chain variable domain of TCR clone 382391 (TRAV14/DV4, TRAJ20)
CAMREGRSRDDYKLSF

SEQ ID NO: 764782 - protein, 16 aa, Homo sapiens
  CDR3 for beta chain variable domain of TCR clone 382391 (TRBV2, TRBJ2-5)
CASSARGLGGRETQYF

SEQ ID NO: 764783 - protein, 19 aa, Homo sapiens
  CDR3 for alpha chain variable domain of TCR clone 382392 (TRAV26-1, TRAJ22)
CCVLLHRWVFSGSARQLTF

SEQ ID NO: 764784 - protein, 12 aa, Homo sapiens
  CDR3 for beta chain variable domain of TCR clone 382392 (TRBV27, TRBJ2-2)
CASKLFTGELFF

SEQ ID NO: 764785 - protein, 17 aa, Homo sapiens
  CDR3 for alpha chain variable domain of TCR clone 382393 (TRAV12-3, TRAJ6)
CAMIARGGAGGSYIPTF

SEQ ID NO: 764786 - protein, 12 aa, Homo sapiens
  CDR3 for beta chain variable domain of TCR clone 382393 (TRBV12-4, TRBJ2-3)
CASSTLPDTQYF

SEQ ID NO: 764787 - protein, 15 aa, Homo sapiens
  CDR3 for alpha chain variable domain of TCR clone 382394 (TRAV8-3, TRAJ37)
CAVGAGASNTGKLIF

SEQ ID NO: 764788 - protein, 15 aa, Homo sapiens
  CDR3 for beta chain variable domain of TCR clone 382394 (TRBV5-4, TRBJ2-3)
CASSLAGRVTDTQYF

SEQ ID NO: 764789 - protein, 14 aa, Homo sapiens
  CDR3 for alpha chain variable domain of TCR clone 382395 (TRAV1-2, TRAJ8)
RAVREDTGFQKLVF

SEQ ID NO: 764790 - protein, 13 aa, Homo sapiens
  CDR3 for beta chain variable domain of TCR clone 382395 (TRBV10-3, TRBJ1-2)
CAISERDSYGYTF

SEQ ID NO: 764791 - protein, 13 aa, Homo sapiens
  CDR3 for alpha chain variable domain of TCR clone 382396 (TRAV1-2, TRAJ20)
CAVRDGNDYKLSF

SEQ ID NO: 764792 - protein, 16 aa, Homo sapiens
  CDR3 for beta chain variable domain of TCR clone 382396 (TRBV28, TRBJ2-6)
CASSNRRGSGANDLTF

SEQ ID NO: 764793 - protein, 17 aa, Homo sapiens
  CDR3 for alpha chain variable domain of TCR clone 382397 (TRAV3, TRAJ6)
CAVRDGPRAGGSYIPTF

SEQ ID NO: 764794 - protein, 15 aa, Homo sapiens
  CDR3 for beta chain variable domain of TCR clone 382397 (TRBV5-1, TRBJ1-2)
CASSLGTGENYGYTF

SEQ ID NO: 764795 - protein, 12 aa, Homo sapiens
  CDR3 for alpha chain variable domain of TCR clone 382398 (TRAV8-3, TRAJ20)
CAVDFNDYKLSF

SEQ ID NO: 764796 - protein, 17 aa, Homo sapiens
  CDR3 for beta chain variable domain of TCR clone 382398 (TRBV7-8, TRBJ2-6)
CASSSGTGGAGANVLTF

SEQ ID NO: 764797 - protein, 12 aa, Homo sapiens
  CDR3 for alpha chain variable domain of TCR clone 382399 (TRAV4, TRAJ6)
CLAPGGSYIPTF

SEQ ID NO: 764798 - protein, 17 aa, Homo sapiens
  CDR3 for beta chain variable domain of TCR clone 382399 (TRBV20-1, TRBJ2-2)
CSASGSGQGGLTGELFC

SEQ ID NO: 764799 - protein, 12 aa, Homo sapiens
  CDR3 for alpha chain variable domain of TCR clone 382400 (TRAV29/DV5, TRAJ49)
CAATDTGNQFYF

SEQ ID NO: 764800 - protein, 18 aa, Homo sapiens
  CDR3 for beta chain variable domain of TCR clone 382400 (TRBV25-1, TRBJ2-2)
CHPSLPGGQGAQTGELFF

SEQ ID NO: 764801 - protein, 15 aa, Homo sapiens
  CDR3 for alpha chain variable domain of TCR clone 382401 (TRAV21, TRAJ24)
CAARSSTDSWGKLQF

SEQ ID NO: 764802 - protein, 13 aa, Homo sapiens
  CDR3 for beta chain variable domain of TCR clone 382401 (TRBV6-6, TRBJ2-7)
CASSPKHLDEQYF

SEQ ID NO: 764803 - protein, 13 aa, Homo sapiens
  CDR3 for alpha chain variable domain of TCR clone 382402 (TRAV29/DV5, TRAJ31)
CSASRNNNARLMF

SEQ ID NO: 764804 - protein, 15 aa, Homo sapiens
  CDR3 for beta chain variable domain of TCR clone 382402 (TRBV2, TRBJ2-1)
CASSELAGSYNEQFF

SEQ ID NO: 764805 - protein, 13 aa, Homo sapiens
  CDR3 for alpha chain variable domain of TCR clone 382403 (TRAV20, TRAJ21)
CAVEGYNFKKFYF

SEQ ID NO: 764806 - protein, 14 aa, Homo sapiens
  CDR3 for beta chain variable domain of TCR clone 382403 (TRBV3-1, TRBJ2-5)
CASSQGPDQETQYF

SEQ ID NO: 764807 - protein, 15 aa, Homo sapiens
  CDR3 for alpha chain variable domain of TCR clone 382404 (TRAV1-2, TRAJ38)
CAVRENAGNNRKLIW

SEQ ID NO: 764808 - protein, 13 aa, Homo sapiens
  CDR3 for beta chain variable domain of TCR clone 382404 (TRBV27, TRBJ1-2)
CASSPSHRGRDTF

SEQ ID NO: 764809 - protein, 14 aa, Homo sapiens
  CDR3 for alpha chain variable domain of TCR clone 382405 (TRAV26-1, TRAJ49)
CIVRLTNTGNPFYF

SEQ ID NO: 764810 - protein, 13 aa, Homo sapiens
  CDR3 for beta chain variable domain of TCR clone 382405 (TRBV4-1, TRBJ2-7)
CASSQGQAYEQYF

SEQ ID NO: 764811 - protein, 11 aa, Homo sapiens
  CDR3 for alpha chain variable domain of TCR clone 382406 (TRAV21, TRAJ49)
CAVSFGNQVYF

SEQ ID NO: 764812 - protein, 15 aa, Homo sapiens
  CDR3 for beta chain variable domain of TCR clone 382406 (TRBV10-3, TRBJ2-1)
CATNGGPGQGDEQFF

SEQ ID NO: 764813 - protein, 17 aa, Homo sapiens
  CDR3 for alpha chain variable domain of TCR clone 382407 (TRAV3, TRAJ6)
CAVRDGPRAGGSYIPTF

SEQ ID NO: 764814 - protein, 13 aa, Homo sapiens
  CDR3 for beta chain variable domain of TCR clone 382407 (TRBV13, TRBJ2-1)
CASILGGRGEQFF

SEQ ID NO: 764815 - protein, 11 aa, Homo sapiens
  CDR3 for alpha chain variable domain of TCR clone 382408 (TRAV23/DV6, TRAJ58)
CAARLLRGETS

SEQ ID NO: 764816 - protein, 15 aa, Homo sapiens
  CDR3 for beta chain variable domain of TCR clone 382408 (TRBV9, TRBJ1-6)
GASSVAGTGDSPLHF

SEQ ID NO: 764817 - protein, 18 aa, Homo sapiens
  CDR3 for alpha chain variable domain of TCR clone 382409 (TRAV21, TRAJ52)
CAVRPSPAGGTSYGKLTF

SEQ ID NO: 764818 - protein, 13 aa, Homo sapiens
  CDR3 for beta chain variable domain of TCR clone 382409 (TRBV2, TRBJ1-5)
CATAGPGNQPHHF

SEQ ID NO: 764819 - protein, 14 aa, Homo sapiens
  CDR3 for alpha chain variable domain of TCR clone 382410 (TRAV23/DV6, TRAJ17)
CAARGRAAGNKLSF

SEQ ID NO: 764820 - protein, 13 aa, Homo sapiens
  CDR3 for beta chain variable domain of TCR clone 382410 (TRBV7-6, TRBJ1-2)
CASSLVADYGYTF

SEQ ID NO: 764821 - protein, 16 aa, Homo sapiens
  CDR3 for alpha chain variable domain of TCR clone 382411 (TRAV26-1, TRAJ52)
CIVRVSGGTSYGKLPF

SEQ ID NO: 764822 - protein, 16 aa, Homo sapiens
  CDR3 for beta chain variable domain of TCR clone 382411 (TRBV3-1, TRBJ2-3)
CASSQRAGDPTDTQYF

SEQ ID NO: 764823 - protein, 13 aa, Homo sapiens
  CDR3 for alpha chain variable domain of TCR clone 382412 (TRAV17, TRAJ22)
CVHHSGSARQLTF

SEQ ID NO: 764824 - protein, 14 aa, Homo sapiens
  CDR3 for beta chain variable domain of TCR clone 382412 (TRBV16, TRBJ1-1)
CASSQAGPNTEAFF

SEQ ID NO: 764825 - protein, 18 aa, Homo sapiens
  CDR3 for alpha chain variable domain of TCR clone 382413 (TRAV26-1, TRAJ56)
CIVRVASRVTGANRKLTF

SEQ ID NO: 764826 - protein, 15 aa, Homo sapiens
  CDR3 for beta chain variable domain of TCR clone 382413 (TRBV7-9, TRBJ2-5)
CASSDTGRGRETQYF

SEQ ID NO: 764827 - protein, 15 aa, Homo sapiens
  CDR3 for alpha chain variable domain of TCR clone 382414 (TRAV12-1, TRAJ8)
CVVNVENTGFRKLVF

SEQ ID NO: 764828 - protein, 14 aa, Homo sapiens
  CDR3 for beta chain variable domain of TCR clone 382414 (TRBV19, TRBJ1-5)
CASGTEVYNQPQHF

SEQ ID NO: 764829 - protein, 16 aa, Homo sapiens
  CDR3 for alpha chain variable domain of TCR clone 382415 (TRAV30, TRAJ24)
CGTEIVDADSWGKFQF

SEQ ID NO: 764830 - protein, 14 aa, Homo sapiens
  CDR3 for beta chain variable domain of TCR clone 382415 (TRBV5-5, TRBJ1-2)
CASSLDPYIYGYTF

SEQ ID NO: 764831 - protein, 13 aa, Homo sapiens
  CDR3 for alpha chain variable domain of TCR clone 382416 (TRAV1-2, TRAJ11)
CAVRSSGYSTLTF

SEQ ID NO: 764832 - protein, 15 aa, Homo sapiens
  CDR3 for beta chain variable domain of TCR clone 382416 (TRBV20-1, TRBJ2-7)
CSARDRVSGMDEQYF

SEQ ID NO: 764833 - protein, 14 aa, Homo sapiens
  CDR3 for alpha chain variable domain of TCR clone 382417 (TRAV17, TRAJ16)
CATADFSDGQKVLF

SEQ ID NO: 764834 - protein, 15 aa, Homo sapiens
  CDR3 for beta chain variable domain of TCR clone 382417 (TRBV18, TRBJ2-1)
CASSPPSASYNEQFF

SEQ ID NO: 764835 - protein, 13 aa, Homo sapiens
  CDR3 for alpha chain variable domain of TCR clone 382418 (TRAV13-2, TRAJ13)
CAERPGGYQKVTF

SEQ ID NO: 764836 - protein, 15 aa, Homo sapiens
  CDR3 for beta chain variable domain of TCR clone 382418 (TRBV11-3, TRBJ2-7)
CASSPGPASSYVQYF

SEQ ID NO: 764837 - protein, 10 aa, Homo sapiens
  CDR3 for alpha chain variable domain of TCR clone 382419 (TRAV23/DV6, TRAJ57)
CAASSTLSQD

SEQ ID NO: 764838 - protein, 14 aa, Homo sapiens
  CDR3 for beta chain variable domain of TCR clone 382419 (TRBV20-1, TRBJ2-7)
CSAKRGRSSYEQYF

SEQ ID NO: 764839 - protein, 13 aa, Homo sapiens
  CDR3 for alpha chain variable domain of TCR clone 382420 (TRAV8-3, TRAJ48)
CAVVPFGNEKLTF

SEQ ID NO: 764840 - protein, 15 aa, Homo sapiens
  CDR3 for beta chain variable domain of TCR clone 382420 (TRBV11-2, TRBJ2-1)
CASSSPSTRYNESSS

SEQ ID NO: 764841 - protein, 15 aa, Homo sapiens
  CDR3 for alpha chain variable domain of TCR clone 382421 (TRAV21, TRAJ45)
CAVSYSGGGADGLTF

SEQ ID NO: 764842 - protein, 13 aa, Homo sapiens
  CDR3 for beta chain variable domain of TCR clone 382421 (TRBV11-2, TRBJ2-1)
CASSLGLAGGRFF

SEQ ID NO: 764843 - protein, 14 aa, Homo sapiens
  CDR3 for alpha chain variable domain of TCR clone 382422 (TRAV1-2, TRAJ16)
CAVNRFSDGQKLLF

SEQ ID NO: 764844 - protein, 13 aa, Homo sapiens
  CDR3 for beta chain variable domain of TCR clone 382422 (TRBV7-3, TRBJ1-1)
CASSKDWGAEAFF

SEQ ID NO: 764845 - protein, 12 aa, Homo sapiens
  CDR3 for alpha chain variable domain of TCR clone 382423 (TRAV4, TRAJ26)
CLVGDFGQNFVF

SEQ ID NO: 764846 - protein, 16 aa, Homo sapiens
  CDR3 for beta chain variable domain of TCR clone 382423 (TRBV7-2, TRBJ1-2)
CASSSNQGRRGHGYTF

SEQ ID NO: 764847 - protein, 12 aa, Homo sapiens
  CDR3 for alpha chain variable domain of TCR clone 382424 (TRAV12-3, TRAJ33)
CAMSVNSNYQLI

SEQ ID NO: 764848 - protein, 11 aa, Homo sapiens
  CDR3 for beta chain variable domain of TCR clone 382424 (TRBV7-3, TRBJ2-5)
CASSLSETQYF

SEQ ID NO: 764849 - protein, 12 aa, Homo sapiens
  CDR3 for alpha chain variable domain of TCR clone 382425 (TRAV13-1, TRAJ53)
CAEGGSNYKLTF

SEQ ID NO: 764850 - protein, 14 aa, Homo sapiens
  CDR3 for beta chain variable domain of TCR clone 382425 (TRBV7-2, TRBJ2-7)
CASSPKTSFYEQYF

SEQ ID NO: 764851 - protein, 15 aa, Homo sapiens
  CDR3 for alpha chain variable domain of TCR clone 382426 (TRAV16, TRAJ52)
CALNAGGTSYGKLTF

SEQ ID NO: 764852 - protein, 15 aa, Homo sapiens
  CDR3 for beta chain variable domain of TCR clone 382426 (TRBV6-3, TRBJ2-7)
CASSSPGTVFYEQYF

SEQ ID NO: 764853 - protein, 14 aa, Homo sapiens
  CDR3 for alpha chain variable domain of TCR clone 382427 (TRAV29/DV5, TRAJ20)
CAATIRSNDYKLSF

SEQ ID NO: 764854 - protein, 12 aa, Homo sapiens
  CDR3 for beta chain variable domain of TCR clone 382427 (TRBV24-1, TRBJ1-1)
CATLYPDTEAFF

SEQ ID NO: 764855 - protein, 13 aa, Homo sapiens
  CDR3 for alpha chain variable domain of TCR clone 382428 (TRAV27, TRAJ29)
CAGAHSGNTPLVF

SEQ ID NO: 764856 - protein, 14 aa, Homo sapiens
  CDR3 for beta chain variable domain of TCR clone 382428 (TRBV15, TRBJ1-4)
CHSRDMGSYEKLFF

SEQ ID NO: 764857 - protein, 17 aa, Homo sapiens
  CDR3 for alpha chain variable domain of TCR clone 382429 (TRAV38-2/DV8, TRAJ48)
CAYRSVFRGLGNEKLTF

SEQ ID NO: 764858 - protein, 16 aa, Homo sapiens
  CDR3 for beta chain variable domain of TCR clone 382429 (TRBV20-1, TRBJ1-4)
CSAPGQGLLTNEKLFF

SEQ ID NO: 764859 - protein, 13 aa, Homo sapiens
  CDR3 for alpha chain variable domain of TCR clone 382430 (TRAV30, TRAJ34)
CGTVGYNTDKLIF

SEQ ID NO: 764860 - protein, 16 aa, Homo sapiens
  CDR3 for beta chain variable domain of TCR clone 382430 (TRBV7-9, TRBJ1-2)
CAGSLGFSSGEDGYTF

SEQ ID NO: 764861 - protein, 18 aa, Homo sapiens
  CDR3 for alpha chain variable domain of TCR clone 382431 (TRAV12-1, TRAJ52)
CVVNLINAGGTSYGKLTF

SEQ ID NO: 764862 - protein, 16 aa, Homo sapiens
  CDR3 for beta chain variable domain of TCR clone 382431 (TRBV7-6, TRBJ2-7)
CASSGGTGALSYEQYF

SEQ ID NO: 764863 - protein, 14 aa, Homo sapiens
  CDR3 for alpha chain variable domain of TCR clone 382432 (TRAV13-1, TRAJ35)
CAASKGGFGNVMHW

SEQ ID NO: 764864 - protein, 13 aa, Homo sapiens
  CDR3 for beta chain variable domain of TCR clone 382432 (TRBV7-3, TRBJ1-1)
CASSQDWGAEAFF

SEQ ID NO: 764865 - protein, 14 aa, Homo sapiens
  CDR3 for alpha chain variable domain of TCR clone 382433 (TRAV36/DV7, TRAJ35)
CAGMPIGFGNVLHC

SEQ ID NO: 764866 - protein, 13 aa, Homo sapiens
  CDR3 for beta chain variable domain of TCR clone 382433 (TRBV24-1, TRBJ2-2)
CATSDWSTGELFF

SEQ ID NO: 764867 - protein, 16 aa, Homo sapiens
  CDR3 for alpha chain variable domain of TCR clone 382434 (TRAV19, TRAJ42)
CALSVNYVGSQGNLIF

SEQ ID NO: 764868 - protein, 13 aa, Homo sapiens
  CDR3 for beta chain variable domain of TCR clone 382434 (TRBV7-3, TRBJ2-1)
CASSPVAYNEQFF

SEQ ID NO: 764869 - protein, 14 aa, Homo sapiens
  CDR3 for alpha chain variable domain of TCR clone 382435 (TRAV1-2, TRAJ16)
CAVTRFSDGQKLLF

SEQ ID NO: 764870 - protein, 12 aa, Homo sapiens
  CDR3 for beta chain variable domain of TCR clone 382435 (TRBV24-1, TRBJ1-1)
CATLYPDTEAFF

SEQ ID NO: 764871 - protein, 14 aa, Homo sapiens
  CDR3 for alpha chain variable domain of TCR clone 382436 (TRAV20, TRAJ22)
CAVALGGSARQLTF

SEQ ID NO: 764872 - protein, 15 aa, Homo sapiens
  CDR3 for beta chain variable domain of TCR clone 382436 (TRBV15, TRBJ1-4)
FATSRDMGSYEKLFF

SEQ ID NO: 764873 - protein, 14 aa, Homo sapiens
  CDR3 for alpha chain variable domain of TCR clone 382437 (TRAV38-1, TRAJ40)
CALRPTSGTYKYIF

SEQ ID NO: 764874 - protein, 18 aa, Homo sapiens
  CDR3 for beta chain variable domain of TCR clone 382437 (TRBV5-1, TRBJ2-7)
CASSLGPLGTTSSYEQYF

SEQ ID NO: 764875 - protein, 13 aa, Homo sapiens
  CDR3 for alpha chain variable domain of TCR clone 382438 (TRAV12-1, TRAJ44)
CVVNAGTASKLTF

SEQ ID NO: 764876 - protein, 16 aa, Homo sapiens
  CDR3 for beta chain variable domain of TCR clone 382438 (TRBV6-1, TRBJ2-5)
CASSETLDRGAETQYF

SEQ ID NO: 764877 - protein, 12 aa, Homo sapiens
  CDR3 for alpha chain variable domain of TCR clone 382439 (TRAV12-3, TRAJ17)
RAMTLTGNKLTF

SEQ ID NO: 764878 - protein, 14 aa, Homo sapiens
  CDR3 for beta chain variable domain of TCR clone 382439 (TRBV9, TRBJ2-1)
SASSVVAAYNEQFF

SEQ ID NO: 764879 - protein, 14 aa, Homo sapiens
  CDR3 for alpha chain variable domain of TCR clone 382440 (TRAV1-2, TRAJ16)
CAVNRFSDGQKLLF

SEQ ID NO: 764880 - protein, 15 aa, Homo sapiens
  CDR3 for beta chain variable domain of TCR clone 382440 (TRBV27, TRBJ2-7)
CASSLFGTGLDEQYF

SEQ ID NO: 764881 - protein, 14 aa, Homo sapiens
  CDR3 for alpha chain variable domain of TCR clone 382441 (TRAV17, TRAJ57)
CATDPQGGSEKLVF

SEQ ID NO: 764882 - protein, 12 aa, Homo sapiens
  CDR3 for beta chain variable domain of TCR clone 382441 (TRBV18, TRBJ2-7)
CASSLDSYEQYF

SEQ ID NO: 764883 - protein, 14 aa, Homo sapiens
  CDR3 for alpha chain variable domain of TCR clone 382442 (TRAV17, TRAJ15)
CATTTNQAGTALIF

SEQ ID NO: 764884 - protein, 16 aa, Homo sapiens
  CDR3 for beta chain variable domain of TCR clone 382442 (TRBV4-1, TRBJ2-7)
CASSRGDILNSYERYF

SEQ ID NO: 764885 - protein, 15 aa, Homo sapiens
  CDR3 for alpha chain variable domain of TCR clone 382443 (TRAV17, TRAJ57)
CGTGPSKGGSEKLVF

SEQ ID NO: 764886 - protein, 16 aa, Homo sapiens
  CDR3 for beta chain variable domain of TCR clone 382443 (TRBV12-4, TRBJ1-5)
CASSRPVGGSNQPQHF

SEQ ID NO: 764887 - protein, 13 aa, Homo sapiens
  CDR3 for alpha chain variable domain of TCR clone 382444 (TRAV17, TRAJ9)
CATDYTGGFKTIF

SEQ ID NO: 764888 - protein, 16 aa, Homo sapiens
  CDR3 for beta chain variable domain of TCR clone 382444 (TRBV28, TRBJ1-1)
CASSLSGTGWNTEAFF

SEQ ID NO: 764889 - protein, 11 aa, Homo sapiens
  CDR3 for alpha chain variable domain of TCR clone 382445 (TRAV12-1, TRAJ15)
CVVNAGTVLIF

SEQ ID NO: 764890 - protein, 16 aa, Homo sapiens
  CDR3 for beta chain variable domain of TCR clone 382445 (TRBV28, TRBJ2-1)
CASSSRVRDSYNEQFF

SEQ ID NO: 764891 - protein, 13 aa, Homo sapiens
  CDR3 for alpha chain variable domain of TCR clone 382446 (TRAV12-3, TRAJ7)
CAMSASGNNRLAL

SEQ ID NO: 764892 - protein, 14 aa, Homo sapiens
  CDR3 for beta chain variable domain of TCR clone 382446 (TRBV13, TRBJ2-5)
CASSLGPRGENQYF

SEQ ID NO: 764893 - protein, 14 aa, Homo sapiens
  CDR3 for alpha chain variable domain of TCR clone 382447 (TRAV4, TRAJ22)
CLAHLSGSARQLTF

SEQ ID NO: 764894 - protein, 12 aa, Homo sapiens
  CDR3 for beta chain variable domain of TCR clone 382447 (TRBV7-9, TRBJ2-7)
CASSIKREEQYF

SEQ ID NO: 764895 - protein, 17 aa, Homo sapiens
  CDR3 for alpha chain variable domain of TCR clone 382448 (TRAV3, TRAJ6)
CAVRDGPRAGGSYIPTF

SEQ ID NO: 764896 - protein, 15 aa, Homo sapiens
  CDR3 for beta chain variable domain of TCR clone 382448 (TRBV7-8, TRBJ1-5)
CASSLAGQPNQPQHF

SEQ ID NO: 764897 - protein, 12 aa, Homo sapiens
  CDR3 for alpha chain variable domain of TCR clone 382449 (TRAV3, TRAJ43)
CAVRDPNNDMRF

SEQ ID NO: 764898 - protein, 13 aa, Homo sapiens
  CDR3 for beta chain variable domain of TCR clone 382449 (TRBV4-1, TRBJ2-2)
CASSQENTGELFF

SEQ ID NO: 764899 - protein, 13 aa, Homo sapiens
  CDR3 for alpha chain variable domain of TCR clone 382450 (TRAV17, TRAJ40)
RAGALGGTYKYSF

SEQ ID NO: 764900 - protein, 16 aa, Homo sapiens
  CDR3 for beta chain variable domain of TCR clone 382450 (TRBV7-2, TRBJ1-4)
CASSLAPGRRDEKLFF

SEQ ID NO: 764901 - protein, 14 aa, Homo sapiens
  CDR3 for alpha chain variable domain of TCR clone 382451 (TRAV12-1, TRAJ17)
CVLNYKAAGNKPTF

SEQ ID NO: 764902 - protein, 17 aa, Homo sapiens
  CDR3 for beta chain variable domain of TCR clone 382451 (TRBV20-1, TRBJ2-1)
CSASSSGLAGSYNEQFF

SEQ ID NO: 764903 - protein, 16 aa, Homo sapiens
  CDR3 for alpha chain variable domain of TCR clone 382452 (TRAV8-4, TRAJ9)
CAVTFNTGGFKNYLCS

SEQ ID NO: 764904 - protein, 15 aa, Homo sapiens
  CDR3 for beta chain variable domain of TCR clone 382452 (TRBV7-9, TRBJ2-2)
CASSPETGAGGELFF

SEQ ID NO: 764905 - protein, 14 aa, Homo sapiens
  CDR3 for alpha chain variable domain of TCR clone 382453 (TRAV35, TRAJ13)
CAGSPSGGYQKVTF

SEQ ID NO: 764906 - protein, 17 aa, Homo sapiens
  CDR3 for beta chain variable domain of TCR clone 382453 (TRBV7-6, TRBJ2-5)
CASSAGLADPWGETQYF

SEQ ID NO: 764907 - protein, 18 aa, Homo sapiens
  CDR3 for alpha chain variable domain of TCR clone 382454 (TRAV13-1, TRAJ52)
CAAKNPNAGGTSYRKLTF

SEQ ID NO: 764908 - protein, 14 aa, Homo sapiens
  CDR3 for beta chain variable domain of TCR clone 382454 (TRBV7-3, TRBJ2-1)
RASSLAGGTNEQFF

SEQ ID NO: 764909 - protein, 14 aa, Homo sapiens
  CDR3 for alpha chain variable domain of TCR clone 382455 (TRAV12-1, TRAJ17)
CVVNYKAAGNKLTF

SEQ ID NO: 764910 - protein, 17 aa, Homo sapiens
  CDR3 for beta chain variable domain of TCR clone 382455 (TRBV20-1, TRBJ2-1)
GSASSSGLAGSYNEQFF

SEQ ID NO: 764911 - protein, 12 aa, Homo sapiens
  CDR3 for alpha chain variable domain of TCR clone 382456 (TRAV2, TRAJ31)
CAVEDNNARHLF

SEQ ID NO: 764912 - protein, 12 aa, Homo sapiens
  CDR3 for beta chain variable domain of TCR clone 382456 (TRBV28, TRBJ2-3)
CASSLYRDTQYF

SEQ ID NO: 764913 - protein, 12 aa, Homo sapiens
  CDR3 for alpha chain variable domain of TCR clone 382457 (TRAV30, TRAJ43)
CGTGERGNDMRF

SEQ ID NO: 764914 - protein, 13 aa, Homo sapiens
  CDR3 for beta chain variable domain of TCR clone 382457 (TRBV12-4, TRBJ1-2)
CASSSGSKDGYTF

SEQ ID NO: 764915 - protein, 13 aa, Homo sapiens
  CDR3 for alpha chain variable domain of TCR clone 382458 (TRAV21, TRAJ45)
CAVMGGGADGLTF

SEQ ID NO: 764916 - protein, 13 aa, Homo sapiens
  CDR3 for beta chain variable domain of TCR clone 382458 (TRBV19, TRBJ1-3)
CASRLSLGNTIYF

SEQ ID NO: 764917 - protein, 13 aa, Homo sapiens
  CDR3 for alpha chain variable domain of TCR clone 382459 (TRAV2, TRAJ40)
CVVVTSGTYKYIF

SEQ ID NO: 764918 - protein, 15 aa, Homo sapiens
  CDR3 for beta chain variable domain of TCR clone 382459 (TRBV4-1, TRBJ1-4)
CASSDTGGTNEKLFF

SEQ ID NO: 764919 - protein, 17 aa, Homo sapiens
  CDR3 for alpha chain variable domain of TCR clone 382460 (TRAV13-1, TRAJ28)
CAASPPYSGAGSYQLTF

SEQ ID NO: 764920 - protein, 15 aa, Homo sapiens
  CDR3 for beta chain variable domain of TCR clone 382460 (TRBV13, TRBJ1-5)
CASSRTGRGHQPQHF

SEQ ID NO: 764921 - protein, 12 aa, Homo sapiens
  CDR3 for alpha chain variable domain of TCR clone 382461 (TRAV36/DV7, TRAJ26)
CAADNYGQIFVF

SEQ ID NO: 764922 - protein, 13 aa, Homo sapiens
  CDR3 for beta chain variable domain of TCR clone 382461 (TRBV12-5, TRBJ2-3)
CASGDRQSDTQYF

SEQ ID NO: 764923 - protein, 13 aa, Homo sapiens
  CDR3 for alpha chain variable domain of TCR clone 382462 (TRAV8-6, TRAJ49)
CAVITNTGNQFYF

SEQ ID NO: 764924 - protein, 11 aa, Homo sapiens
  CDR3 for beta chain variable domain of TCR clone 382462 (TRBV12-4, TRBJ2-3)
CASAATDTQYF

SEQ ID NO: 764925 - protein, 17 aa, Homo sapiens
  CDR3 for alpha chain variable domain of TCR clone 382463 (TRAV21, TRAJ18)
CAVRHQGRGSTLGRLYF

SEQ ID NO: 764926 - protein, 12 aa, Homo sapiens
  CDR3 for beta chain variable domain of TCR clone 382463 (TRBV29-1, TRBJ2-3)
CSVTGGADTQYF

SEQ ID NO: 764927 - protein, 14 aa, Homo sapiens
  CDR3 for alpha chain variable domain of TCR clone 382464 (TRAV12-2, TRAJ13)
CAVKNTLGYQKVTF

SEQ ID NO: 764928 - protein, 15 aa, Homo sapiens
  CDR3 for beta chain variable domain of TCR clone 382464 (TRBV27, TRBJ2-1)
CASSNGGGSSNEQFF

SEQ ID NO: 764929 - protein, 16 aa, Homo sapiens
  CDR3 for alpha chain variable domain of TCR clone 382465 (TRAV30, TRAJ24)
CGTEIVDADSWGKFKF

SEQ ID NO: 764930 - protein, 14 aa, Homo sapiens
  CDR3 for beta chain variable domain of TCR clone 382465 (TRBV12-5, TRBJ2-5)
CASGSRTHQETPDF

SEQ ID NO: 764931 - protein, 15 aa, Homo sapiens
  CDR3 for alpha chain variable domain of TCR clone 382466 (TRAV17, TRAJ13)
CATDAGSGGYQKVTF

SEQ ID NO: 764932 - protein, 17 aa, Homo sapiens
  CDR3 for beta chain variable domain of TCR clone 382466 (TRBV11-2, TRBJ2-1)
CASSLYPPGVEYNEQFV

SEQ ID NO: 764933 - protein, 14 aa, Homo sapiens
  CDR3 for alpha chain variable domain of TCR clone 382467 (TRAV13-1, TRAJ35)
CAASKGGFGNVLNC

SEQ ID NO: 764934 - protein, 13 aa, Homo sapiens
  CDR3 for beta chain variable domain of TCR clone 382467 (TRBV7-3, TRBJ1-1)
CASSQDWGAEAFV

SEQ ID NO: 764935 - protein, 14 aa, Homo sapiens
  CDR3 for alpha chain variable domain of TCR clone 382468 (TRAV2, TRAJ37)
CAVEDQGNTGKLIF

SEQ ID NO: 764936 - protein, 14 aa, Homo sapiens
  CDR3 for beta chain variable domain of TCR clone 382468 (TRBV18, TRBJ2-1)
CTSSPQGRFNEQFF

SEQ ID NO: 764937 - protein, 13 aa, Homo sapiens
  CDR3 for alpha chain variable domain of TCR clone 382469 (TRAV14/DV4, TRAJ20)
RAMRESNDYKPSF

SEQ ID NO: 764938 - protein, 15 aa, Homo sapiens
  CDR3 for beta chain variable domain of TCR clone 382469 (TRBV7-9, TRBJ1-1)
CASSRPGTANTEAFF

SEQ ID NO: 764939 - protein, 14 aa, Homo sapiens
  CDR3 for alpha chain variable domain of TCR clone 382470 (TRAV35, TRAJ44)
CAGRPSRTASKLTF

SEQ ID NO: 764940 - protein, 11 aa, Homo sapiens
  CDR3 for beta chain variable domain of TCR clone 382470 (TRBV7-2, TRBJ2-3)
CASSYTDTQYF

SEQ ID NO: 764941 - protein, 13 aa, Homo sapiens
  CDR3 for alpha chain variable domain of TCR clone 382471 (TRAV2, TRAJ40)
CAVVTSGTYKYIS

SEQ ID NO: 764942 - protein, 16 aa, Homo sapiens
  CDR3 for beta chain variable domain of TCR clone 382471 (TRBV19, TRBJ2-1)
CASSKAGPSSYNEQFF

SEQ ID NO: 764943 - protein, 10 aa, Homo sapiens
  CDR3 for alpha chain variable domain of TCR clone 382472 (TRAV30, TRAJ48)
CGIGSEKLTF

SEQ ID NO: 764944 - protein, 14 aa, Homo sapiens
  CDR3 for beta chain variable domain of TCR clone 382472 (TRBV7-6, TRBJ2-3)
CASSLGTVTDTQYF

SEQ ID NO: 764945 - protein, 17 aa, Homo sapiens
  CDR3 for alpha chain variable domain of TCR clone 382473 (TRAV3, TRAJ6)
CAVRDGPRAGGSYIPTF

SEQ ID NO: 764946 - protein, 15 aa, Homo sapiens
  CDR3 for beta chain variable domain of TCR clone 382473 (TRBV19, TRBJ2-1)
CASSIQATSYNEQFF

SEQ ID NO: 764947 - protein, 16 aa, Homo sapiens
  CDR3 for alpha chain variable domain of TCR clone 382474 (TRAV1-2, TRAJ10)
CAVRGVLTGGGNKLTF

SEQ ID NO: 764948 - protein, 13 aa, Homo sapiens
  CDR3 for beta chain variable domain of TCR clone 382474 (TRBV12-4, TRBJ1-1)
CASSPGTGCEAFF

SEQ ID NO: 764949 - protein, 11 aa, Homo sapiens
  CDR3 for alpha chain variable domain of TCR clone 382475 (TRAV26-1, TRAJ27)
CIDPNAGKSTF

SEQ ID NO: 764950 - protein, 18 aa, Homo sapiens
  CDR3 for beta chain variable domain of TCR clone 382475 (TRBV7-9, TRBJ2-6)
CASSLPGAGISGANVLTF

SEQ ID NO: 764951 - protein, 11 aa, Homo sapiens
  CDR3 for alpha chain variable domain of TCR clone 382476 (TRAV13-1, TRAJ44)
KGDGTASKLTF

SEQ ID NO: 764952 - protein, 15 aa, Homo sapiens
  CDR3 for beta chain variable domain of TCR clone 382476 (TRBV4-3, TRBJ1-1)
CASSQELGRGTEAFF

SEQ ID NO: 764953 - protein, 11 aa, Homo sapiens
  CDR3 for alpha chain variable domain of TCR clone 382477 (TRAV1-2, TRAJ40)
CAVPGTYKYIF

SEQ ID NO: 764954 - protein, 16 aa, Homo sapiens
  CDR3 for beta chain variable domain of TCR clone 382477 (TRBV29-1, TRBJ2-7)
YSVEVVGTSGSYEQYF

SEQ ID NO: 764955 - protein, 13 aa, Homo sapiens
  CDR3 for alpha chain variable domain of TCR clone 382478 (TRAV8-3, TRAJ6)
FAVGSGGSYIPTF

SEQ ID NO: 764956 - protein, 14 aa, Homo sapiens
  CDR3 for beta chain variable domain of TCR clone 382478 (TRBV11-2, TRBJ1-1)
CASSTQRGRTEAFF

SEQ ID NO: 764957 - protein, 13 aa, Homo sapiens
  CDR3 for alpha chain variable domain of TCR clone 382479 (TRAV12-2, TRAJ52)
CAVVGTSYGKLTF

SEQ ID NO: 764958 - protein, 14 aa, Homo sapiens
  CDR3 for beta chain variable domain of TCR clone 382479 (TRBV19, TRBJ2-1)
CASPTFVLSGEQFF

SEQ ID NO: 764959 - protein, 15 aa, Homo sapiens
  CDR3 for alpha chain variable domain of TCR clone 382480 (TRAV4, TRAJ8)
CLVGEQHTGFQQLGF

SEQ ID NO: 764960 - protein, 15 aa, Homo sapiens
  CDR3 for beta chain variable domain of TCR clone 382480 (TRBV7-9, TRBJ2-5)
CASSNRDYLQETQYF

SEQ ID NO: 764961 - protein, 19 aa, Homo sapiens
  CDR3 for alpha chain variable domain of TCR clone 382481 (TRAV1-2, TRAJ26)
CLLPLCCERPDNYGQNFVF

SEQ ID NO: 764962 - protein, 14 aa, Homo sapiens
  CDR3 for beta chain variable domain of TCR clone 382481 (TRBV7-8, TRBJ2-3)
CASSLEAGTDTQYF

SEQ ID NO: 764963 - protein, 15 aa, Homo sapiens
  CDR3 for alpha chain variable domain of TCR clone 382482 (TRAV13-1, TRAJ32)
CAASIHGGATNKLIF

SEQ ID NO: 764964 - protein, 12 aa, Homo sapiens
  CDR3 for beta chain variable domain of TCR clone 382482 (TRBV7-6, TRBJ2-3)
CASSTGTDTQYF

SEQ ID NO: 764965 - protein, 12 aa, Homo sapiens
  CDR3 for alpha chain variable domain of TCR clone 382483 (TRAV12-3, TRAJ17)
CAMTLTGNKLNF

SEQ ID NO: 764966 - protein, 15 aa, Homo sapiens
  CDR3 for beta chain variable domain of TCR clone 382483 (TRBV20-1, TRBJ2-7)
CSVRDRVSGMDEQYF

SEQ ID NO: 764967 - protein, 10 aa, Homo sapiens
  CDR3 for alpha chain variable domain of TCR clone 382484 (TRAV23/DV6, TRAJ57)
CAASYTLSQG

SEQ ID NO: 764968 - protein, 14 aa, Homo sapiens
  CDR3 for beta chain variable domain of TCR clone 382484 (TRBV7-8, TRBJ2-5)
CASSATGGQETQYF

SEQ ID NO: 764969 - protein, 15 aa, Homo sapiens
  CDR3 for alpha chain variable domain of TCR clone 382485 (TRAV20, TRAJ43)
CAVQAGESSNKDKRF

SEQ ID NO: 764970 - protein, 14 aa, Homo sapiens
  CDR3 for beta chain variable domain of TCR clone 382485 (TRBV27, TRBJ2-1)
CASRHLGGGKEQFF

SEQ ID NO: 764971 - protein, 17 aa, Homo sapiens
  CDR3 for alpha chain variable domain of TCR clone 382486 (TRAV3, TRAJ28)
CAVREAYSGAGGYQLTF

SEQ ID NO: 764972 - protein, 18 aa, Homo sapiens
  CDR3 for beta chain variable domain of TCR clone 382486 (TRBV27, TRBJ2-1)
CASGSRAVGVGSKNEQFF

SEQ ID NO: 764973 - protein, 14 aa, Homo sapiens
  CDR3 for alpha chain variable domain of TCR clone 382487 (TRAV13-1, TRAJ15)
CAASTKQAGTALIF

SEQ ID NO: 764974 - protein, 11 aa, Homo sapiens
  CDR3 for beta chain variable domain of TCR clone 382487 (TRBV7-2, TRBJ2-1)
CASSLRDNEFF

SEQ ID NO: 764975 - protein, 17 aa, Homo sapiens
  CDR3 for alpha chain variable domain of TCR clone 382488 (TRAV3, TRAJ6)
CAVRDGPSAGGSYIPTL

SEQ ID NO: 764976 - protein, 20 aa, Homo sapiens
  CDR3 for beta chain variable domain of TCR clone 382488 (TRBV28, TRBJ2-1)
CASTPIGRSPGLAGGNEQFF

SEQ ID NO: 764977 - protein, 14 aa, Homo sapiens
  CDR3 for alpha chain variable domain of TCR clone 382489 (TRAV2, TRAJ9)
CAVEDRSGGFKTIF

SEQ ID NO: 764978 - protein, 12 aa, Homo sapiens
  CDR3 for beta chain variable domain of TCR clone 382489 (TRBV27, TRBJ2-2)
CASKLFTGELFF

SEQ ID NO: 764979 - protein, 14 aa, Homo sapiens
  CDR3 for alpha chain variable domain of TCR clone 382490 (TRAV1-2, TRAJ8)
CAVREDTGFQKLVF

SEQ ID NO: 764980 - protein, 13 aa, Homo sapiens
  CDR3 for beta chain variable domain of TCR clone 382490 (TRBV7-9, TRBJ2-3)
CTSSPGSTDTQYF

SEQ ID NO: 764981 - protein, 23 aa, Homo sapiens
  CDR3 for alpha chain variable domain of TCR clone 382491 (TRAV26-1, TRAJ38)
CIADNAGNNHIQNPDPAVYQLRD

SEQ ID NO: 764982 - protein, 12 aa, Homo sapiens
  CDR3 for beta chain variable domain of TCR clone 382491 (TRBV2, TRBJ2-1)
CASSATWNEQFF

SEQ ID NO: 764983 - protein, 14 aa, Homo sapiens
  CDR3 for alpha chain variable domain of TCR clone 382492 (TRAV17, TRAJ22)
CATDAIGSARQLTF

SEQ ID NO: 764984 - protein, 15 aa, Homo sapiens
  CDR3 for beta chain variable domain of TCR clone 382492 (TRBV4-1, TRBJ1-4)
CASSDTGGTNEKLFF

SEQ ID NO: 764985 - protein, 12 aa, Homo sapiens
  CDR3 for alpha chain variable domain of TCR clone 382493 (TRAV12-3, TRAJ40)
CAMSSGTYKYIF

SEQ ID NO: 764986 - protein, 20 aa, Homo sapiens
  CDR3 for beta chain variable domain of TCR clone 382493 (TRBV7-8, TRBJ2-2)
CASSHLFPGPTIHITWELFF

SEQ ID NO: 764987 - protein, 15 aa, Homo sapiens
  CDR3 for alpha chain variable domain of TCR clone 382494 (TRAV26-1, TRAJ29)
CIVRVEGSGNTPLVF

SEQ ID NO: 764988 - protein, 14 aa, Homo sapiens
  CDR3 for beta chain variable domain of TCR clone 382494 (TRBV18, TRBJ2-5)
CASSPGVSQEDQYF

SEQ ID NO: 764989 - protein, 17 aa, Homo sapiens
  CDR3 for alpha chain variable domain of TCR clone 382495 (TRAV3, TRAJ6)
CAVRDGPRAGGSYIPTF

SEQ ID NO: 764990 - protein, 16 aa, Homo sapiens
  CDR3 for beta chain variable domain of TCR clone 382495 (TRBV2, TRBJ2-1)
CASRSPAGGKYNEQFF

SEQ ID NO: 764991 - protein, 12 aa, Homo sapiens
  CDR3 for alpha chain variable domain of TCR clone 382496 (TRAV12-2, TRAJ8)
CAVNTGFQKLVF

SEQ ID NO: 764992 - protein, 15 aa, Homo sapiens
  CDR3 for beta chain variable domain of TCR clone 382496 (TRBV6-1, TRBJ2-1)
CASSEAAYSYNEQFF

SEQ ID NO: 764993 - protein, 14 aa, Homo sapiens
  CDR3 for alpha chain variable domain of TCR clone 382497 (TRAV12-2, TRAJ17)
CAVLFKAAGNKLTF

SEQ ID NO: 764994 - protein, 15 aa, Homo sapiens
  CDR3 for beta chain variable domain of TCR clone 382497 (TRBV19, TRBJ2-1)
CASNAQGLAGREQFF

SEQ ID NO: 764995 - protein, 11 aa, Homo sapiens
  CDR3 for alpha chain variable domain of TCR clone 382498 (TRAV22, TRAJ49)
CAVLTGNQFYL

SEQ ID NO: 764996 - protein, 11 aa, Homo sapiens
  CDR3 for beta chain variable domain of TCR clone 382498 (TRBV5-6, TRBJ2-1)
CASSLGGEQFF

SEQ ID NO: 764997 - protein, 14 aa, Homo sapiens
  CDR3 for alpha chain variable domain of TCR clone 382499 (TRAV1-2, TRAJ16)
CAVNRFSDGQKLLF

SEQ ID NO: 764998 - protein, 15 aa, Homo sapiens
  CDR3 for beta chain variable domain of TCR clone 382499 (TRBV20-1, TRBJ2-5)
CSATRTSGSLETQYF

SEQ ID NO: 764999 - protein, 11 aa, Homo sapiens
  CDR3 for alpha chain variable domain of TCR clone 382500 (TRAV1-1, TRAJ23)
CAVRQGGKFIF

SEQ ID NO: 765000 - protein, 20 aa, Homo sapiens
  CDR3 for beta chain variable domain of TCR clone 382500 (TRBV7-8, TRBJ2-2)
CASSHLFPGPTVHITGELFF

SEQ ID NO: 765001 - protein, 16 aa, Homo sapiens
  CDR3 for alpha chain variable domain of TCR clone 382501 (TRAV12-2, TRAJ40)
CAVIRGGTSGTYKYIF

SEQ ID NO: 765002 - protein, 15 aa, Homo sapiens
  CDR3 for beta chain variable domain of TCR clone 382501 (TRBV7-2, TRBJ2-1)
CASSSGLAGGNEQFF

SEQ ID NO: 765003 - protein, 13 aa, Homo sapiens
  CDR3 for alpha chain variable domain of TCR clone 382502 (TRAV29/DV5, TRAJ31)
CAASRNNNARLMF

SEQ ID NO: 765004 - protein, 12 aa, Homo sapiens
  CDR3 for beta chain variable domain of TCR clone 382502 (TRBV11-2, TRBJ2-1)
CASSPGNNEQFS

SEQ ID NO: 765005 - protein, 14 aa, Homo sapiens
  CDR3 for alpha chain variable domain of TCR clone 382503 (TRAV12-1, TRAJ17)
CVVNYKAAGNKITF

SEQ ID NO: 765006 - protein, 17 aa, Homo sapiens
  CDR3 for beta chain variable domain of TCR clone 382503 (TRBV11-2, TRBJ2-1)
CASSLYPPGVEYNEQFF

SEQ ID NO: 765007 - protein, 14 aa, Homo sapiens
  CDR3 for alpha chain variable domain of TCR clone 382504 (TRAV17, TRAJ31)
CDTVLRNNDARLMF

SEQ ID NO: 765008 - protein, 14 aa, Homo sapiens
  CDR3 for beta chain variable domain of TCR clone 382504 (TRBV12-4, TRBJ2-5)
CASSLWQKQETQYF

SEQ ID NO: 765009 - protein, 11 aa, Homo sapiens
  CDR3 for alpha chain variable domain of TCR clone 382505 (TRAV12-1, TRAJ26)
CVVAYGQNFVF

SEQ ID NO: 765010 - protein, 15 aa, Homo sapiens
  CDR3 for beta chain variable domain of TCR clone 382505 (TRBV12-4, TRBJ2-5)
CASSGTGQAPETQYF

SEQ ID NO: 765011 - protein, 16 aa, Homo sapiens
  CDR3 for alpha chain variable domain of TCR clone 382506 (TRAV23/DV6, TRAJ34)
CAARGALSYNTDKLIF

SEQ ID NO: 765012 - protein, 17 aa, Homo sapiens
  CDR3 for beta chain variable domain of TCR clone 382506 (TRBV7-3, TRBJ2-3)
CASSLMKRMRGADTQYF

SEQ ID NO: 765013 - protein, 12 aa, Homo sapiens
  CDR3 for alpha chain variable domain of TCR clone 382507 (TRAV16, TRAJ26)
CASEDGGQNFVF

SEQ ID NO: 765014 - protein, 13 aa, Homo sapiens
  CDR3 for beta chain variable domain of TCR clone 382507 (TRBV25-1, TRBJ1-1)
CASSDRGRAEAFF

SEQ ID NO: 765015 - protein, 13 aa, Homo sapiens
  CDR3 for alpha chain variable domain of TCR clone 382508 (TRAV8-4, TRAJ36)
CAVSVAGANNHFF

SEQ ID NO: 765016 - protein, 15 aa, Homo sapiens
  CDR3 for beta chain variable domain of TCR clone 382508 (TRBV7-2, TRBJ2-5)
CASSLEGRGVETQYF

SEQ ID NO: 765017 - protein, 15 aa, Homo sapiens
  CDR3 for alpha chain variable domain of TCR clone 382509 (TRAV17, TRAJ57)
CATGRSQGGSEKLVF

SEQ ID NO: 765018 - protein, 13 aa, Homo sapiens
  CDR3 for beta chain variable domain of TCR clone 382509 (TRBV27, TRBJ2-1)
CASRTLGVGEQFF

SEQ ID NO: 765019 - protein, 14 aa, Homo sapiens
  CDR3 for alpha chain variable domain of TCR clone 382510 (TRAV9-2, TRAJ39)
CALYIYNAGNMLTF

SEQ ID NO: 765020 - protein, 15 aa, Homo sapiens
  CDR3 for beta chain variable domain of TCR clone 382510 (TRBV5-1, TRBJ2-7)
CASSLGDFTTYEQYF

SEQ ID NO: 765021 - protein, 14 aa, Homo sapiens
  CDR3 for alpha chain variable domain of TCR clone 382511 (TRAV9-2, TRAJ39)
CALYIYNAGNMLTF

SEQ ID NO: 765022 - protein, 14 aa, Homo sapiens
  CDR3 for beta chain variable domain of TCR clone 382511 (TRBV12-5, TRBJ2-5)
CASGSRTHQETRYF

SEQ ID NO: 765023 - protein, 14 aa, Homo sapiens
  CDR3 for alpha chain variable domain of TCR clone 382512 (TRAV26-1, TRAJ48)
CIVRVPFGNERLTF

SEQ ID NO: 765024 - protein, 16 aa, Homo sapiens
  CDR3 for beta chain variable domain of TCR clone 382512 (TRBV18, TRBJ2-1)
CASSPYLSIRGDEQFF

SEQ ID NO: 765025 - protein, 17 aa, Homo sapiens
  CDR3 for alpha chain variable domain of TCR clone 382513 (TRAV17, TRAJ28)
CATAAVYSGAGSYQLTF

SEQ ID NO: 765026 - protein, 16 aa, Homo sapiens
  CDR3 for beta chain variable domain of TCR clone 382513 (TRBV6-1, TRBJ2-5)
CASSETLDRGAETQYF

SEQ ID NO: 765027 - protein, 15 aa, Homo sapiens
  CDR3 for alpha chain variable domain of TCR clone 382514 (TRAV21, TRAJ53)
CATLNSGGSNYKLTF

SEQ ID NO: 765028 - protein, 15 aa, Homo sapiens
  CDR3 for beta chain variable domain of TCR clone 382514 (TRBV7-6, TRBJ1-5)
CASSKSSGINQPQHF

SEQ ID NO: 765029 - protein, 19 aa, Homo sapiens
  CDR3 for alpha chain variable domain of TCR clone 382515 (TRAV1-2, TRAJ26)
CLLPLCCERPDNYGQNFVF

SEQ ID NO: 765030 - protein, 13 aa, Homo sapiens
  CDR3 for beta chain variable domain of TCR clone 382515 (TRBV29-1, TRBJ1-1)
CSVGDSRNTEAFF

SEQ ID NO: 765031 - protein, 18 aa, Homo sapiens
  CDR3 for alpha chain variable domain of TCR clone 382516 (TRAV21, TRAJ52)
CAVRPSPAGGTSYGKMTF

SEQ ID NO: 765032 - protein, 13 aa, Homo sapiens
  CDR3 for beta chain variable domain of TCR clone 382516 (TRBV10-3, TRBJ2-7)
CASKLAVNYEQYF

SEQ ID NO: 765033 - protein, 12 aa, Homo sapiens
  CDR3 for alpha chain variable domain of TCR clone 382517 (TRAV13-2, TRAJ39)
CAENSERNLLTF

SEQ ID NO: 765034 - protein, 13 aa, Homo sapiens
  CDR3 for beta chain variable domain of TCR clone 382517 (TRBV6-1, TRBJ1-2)
CASSGGISFGYTF

SEQ ID NO: 765035 - protein, 14 aa, Homo sapiens
  CDR3 for alpha chain variable domain of TCR clone 382518 (TRAV21, TRAJ57)
CAVSRGGGSEKLVF

SEQ ID NO: 765036 - protein, 16 aa, Homo sapiens
  CDR3 for beta chain variable domain of TCR clone 382518 (TRBV7-3, TRBJ2-1)
CASSLVSGSSNNEQFF

SEQ ID NO: 765037 - protein, 14 aa, Homo sapiens
  CDR3 for alpha chain variable domain of TCR clone 382519 (TRAV1-2, TRAJ16)
CVVNRFSDGQKLLF

SEQ ID NO: 765038 - protein, 13 aa, Homo sapiens
  CDR3 for beta chain variable domain of TCR clone 382519 (TRBV7-3, TRBJ1-1)
CASSQDWGAEAFF

SEQ ID NO: 765039 - protein, 12 aa, Homo sapiens
  CDR3 for alpha chain variable domain of TCR clone 382520 (TRAV12-3, TRAJ17)
CAMTLTGNKLTF

SEQ ID NO: 765040 - protein, 14 aa, Homo sapiens
  CDR3 for beta chain variable domain of TCR clone 382520 (TRBV7-3, TRBJ1-1)
CASSLKGGDTEAFF

SEQ ID NO: 765041 - protein, 14 aa, Homo sapiens
  CDR3 for alpha chain variable domain of TCR clone 382521 (TRAV17, TRAJ32)
CATDPGGATNKLIF

SEQ ID NO: 765042 - protein, 14 aa, Homo sapiens
  CDR3 for beta chain variable domain of TCR clone 382521 (TRBV2, TRBJ1-5)
RASSENRGGQPQHF

SEQ ID NO: 765043 - protein, 13 aa, Homo sapiens
  CDR3 for alpha chain variable domain of TCR clone 382522 (TRAV12-3, TRAJ33)
CAMSVNSNYQLIW

SEQ ID NO: 765044 - protein, 16 aa, Homo sapiens
  CDR3 for beta chain variable domain of TCR clone 382522 (TRBV2, TRBJ2-3)
CASSTSVEGVTDTQYF

SEQ ID NO: 765045 - protein, 12 aa, Homo sapiens
  CDR3 for alpha chain variable domain of TCR clone 382523 (TRAV8-2, TRAJ45)
CVQGGGADGLTF

SEQ ID NO: 765046 - protein, 14 aa, Homo sapiens
  CDR3 for beta chain variable domain of TCR clone 382523 (TRBV4-3, TRBJ1-1)
CASGQGWTPARAFF

SEQ ID NO: 765047 - protein, 12 aa, Homo sapiens
  CDR3 for alpha chain variable domain of TCR clone 382524 (TRAV3, TRAJ20)
CALRDHDYKLSV

SEQ ID NO: 765048 - protein, 15 aa, Homo sapiens
  CDR3 for beta chain variable domain of TCR clone 382524 (TRBV9, TRBJ1-6)
CASSVAGTGDSPLHF

SEQ ID NO: 765049 - protein, 13 aa, Homo sapiens
  CDR3 for alpha chain variable domain of TCR clone 382525 (TRAV8-3, TRAJ36)
CAVGATGANNLFF

SEQ ID NO: 765050 - protein, 16 aa, Homo sapiens
  CDR3 for beta chain variable domain of TCR clone 382525 (TRBV11-1, TRBJ1-1)
CATNPRDRAFNTEAFF

SEQ ID NO: 765051 - protein, 12 aa, Homo sapiens
  CDR3 for alpha chain variable domain of TCR clone 382526 (TRAV2, TRAJ31)
CAVEDNNARLMF

SEQ ID NO: 765052 - protein, 14 aa, Homo sapiens
  CDR3 for beta chain variable domain of TCR clone 382526 (TRBV11-2, TRBJ2-5)
CASRPLAGRETQYF

SEQ ID NO: 765053 - protein, 13 aa, Homo sapiens
  CDR3 for alpha chain variable domain of TCR clone 382527 (TRAV3, TRAJ27)
CSVRPLGAGKSTF

SEQ ID NO: 765054 - protein, 13 aa, Homo sapiens
  CDR3 for beta chain variable domain of TCR clone 382527 (TRBV7-9, TRBJ1-2)
CASSLKQNYGYTF

SEQ ID NO: 765055 - protein, 12 aa, Homo sapiens
  CDR3 for alpha chain variable domain of TCR clone 382528 (TRAV30, TRAJ39)
CGRGNAGNMLNF

SEQ ID NO: 765056 - protein, 12 aa, Homo sapiens
  CDR3 for beta chain variable domain of TCR clone 382528 (TRBV10-3, TRBJ1-1)
CATMDRPPEAFF

SEQ ID NO: 765057 - protein, 15 aa, Homo sapiens
  CDR3 for alpha chain variable domain of TCR clone 382529 (TRAV13-2, TRAJ29)
CAETPRNSGNTPLVF

SEQ ID NO: 765058 - protein, 15 aa, Homo sapiens
  CDR3 for beta chain variable domain of TCR clone 382529 (TRBV20-1, TRBJ2-7)
CSARDRVSGMDEQYF

SEQ ID NO: 765059 - protein, 17 aa, Homo sapiens
  CDR3 for alpha chain variable domain of TCR clone 382530 (TRAV3, TRAJ42)
CAVRDMDYGGSQGNLIF

SEQ ID NO: 765060 - protein, 14 aa, Homo sapiens
  CDR3 for beta chain variable domain of TCR clone 382530 (TRBV7-2, TRBJ2-5)
CASSPRGSSETQYV

SEQ ID NO: 765061 - protein, 14 aa, Homo sapiens
  CDR3 for alpha chain variable domain of TCR clone 382531 (TRAV1-2, TRAJ16)
CAVNRFSDGQKLLF

SEQ ID NO: 765062 - protein, 15 aa, Homo sapiens
  CDR3 for beta chain variable domain of TCR clone 382531 (TRBV29-1, TRBJ2-7)
CSVQFFDRGSYEQYF

SEQ ID NO: 765063 - protein, 14 aa, Homo sapiens
  CDR3 for alpha chain variable domain of TCR clone 382532 (TRAV13-1, TRAJ44)
CAAKATGTASKLAF

SEQ ID NO: 765064 - protein, 17 aa, Homo sapiens
  CDR3 for beta chain variable domain of TCR clone 382532 (TRBV7-3, TRBJ2-3)
RASSLRKRMRGADTQYF

SEQ ID NO: 765065 - protein, 18 aa, Homo sapiens
  CDR3 for alpha chain variable domain of TCR clone 382533 (TRAV26-1, TRAJ23)
CIVRVGLEVWNQGGKLIF

SEQ ID NO: 765066 - protein, 13 aa, Homo sapiens
  CDR3 for beta chain variable domain of TCR clone 382533 (TRBV6-6, TRBJ2-7)
CASSSSGSYEQYF

SEQ ID NO: 765067 - protein, 15 aa, Homo sapiens
  CDR3 for alpha chain variable domain of TCR clone 382534 (TRAV17, TRAJ23)
CATDAEDNQGGKLIF
